(19) United States
(12) Patent Application Publication
(10) Pub. No.: US 2021/0139889 A1
(43) Pub. Date: May 13, 2021

(54) Compositions and Methods for Multiplexed Genome Editing and Screening

(71) Applicant: YALE UNIVERSITY, New Haven, CT (US)

(72) Inventors: Sidi Chen, Milford, CT (US); Ryan Chow, San Jose, CA (US)

(21) Appl. No.: 16/624,775

(22) PCT Filed: Jun. 19, 2018
(86) PCT No.: PCT/US18/38242

§ 371 Date: Dec. 19, 2019

Related U.S. Application Data
(60) Provisional application No. 62/521,600, filed on Jun. 19, 2017.
(60) Provisional application No. 62/660,467, filed on Apr. 20, 2018.

(51) Int. Cl. C12N 15/10; C12N 15/85; C12N 9/22

(52) U.S. Cl. CPC C12N 15/1082; C12N 15/1024; C12N 15/85; C12N 2310/20; C12N 2800/80; C12N 2830/00; C12N 9/22

(57) ABSTRACT

The present invention includes compositions and methods for multiplexed genome editing and screening in vivo. In certain aspects, the invention includes an CCAS library for multiplexed genome-scale mutagenesis.

### CROSS-REFERENCE TO RELATED APPLICATION

[0001] The present application is entitled to priority under 35 U.S.C. § 119(e) to U.S. Provisional Patent Application No. 62/521,600, filed Jun. 19, 2017, and U.S. Provisional Patent Application No. 62/660,467, filed Apr. 20, 2018, which are both incorporated by reference in their entireties herein.

### STATEMENT REGARDING FEDERALLY SPONSORED RESEARCH OR DEVELOPMENT

[0002] This invention was made with government support under CA21974, CA209992, CA196530, and GM007205 awarded by National Institutes of Health. The government has certain rights in the invention.

### BACKGROUND OF THE INVENTION

[0003] Genetic interactions lay the foundation of virtually all biological systems. With rare exceptions, every gene interacts with one or more other genes, forming highly complex and dynamic networks. The nature of genetic interactions includes physical interactions, functional redundancy, enhancer, suppressor, and/or synthetic lethality. Such interactions are the cornerstones of biological processes such as embryonic development, homeostatic regulation, immune responses, nervous system function and behavior, and evolution. Perturbation or misregulation of genetic interactions in the germ line can lead to failures in development, physiological malfunction, autoimmunity, neurological disorders, and/or many forms of genetic diseases. Disruption of the genetic networks in somatic cells can lead to malignant cellular behaviors such as uncontrolled growth, driving the development of cancer.

[0004] The study of genetic interactions evolved over a century, originating in the era of classical genetics. In essence, how two genes interact can be studied by examining the phenotypes of double mutants as compared to single mutants. This concept of epistasis has guided the conceptualization and subsequent discovery of countless important pathways, and has become the gold standard for determining downstream and upstream regulation in genetic analysis. For instance, synthetic lethality has been investigated in animal development and cancer therapeutics. Classical approaches such as genome-wide association studies (GWAS) and quantitative trait loci (QTL) mapping have been extensively employed to study complex phenotypes that involve multiple genes. While high-throughput genetic perturbation approaches have been developed to map out the landscape of genetic interactions in yeast and in worms, large-scale double knockout studies in mammalian species are scarce, due to the exponentially scaling number of possible gene combinations and the technological challenges of generating and screening double knockouts.

[0005] There is thus a need in the art for compositions and methods for high-throughput multi-dimensional knockout screening. Such compositions and methods should be useful for multiplexed genome editing and screening. The present invention satisfies this need.

### SUMMARY OF THE INVENTION

[0006] As described herein, the present invention relates to compositions and methods for simultaneously or sequentially mutagenizing multiple target sequences in a cell.

[0007] One aspect of the invention includes a vector comprising a first long terminal repeat (LTR) sequence, an Embryonal Fyn-Associated Substrate (EFS) sequence, a Cpf1 sequence, a Nuclear Localization Signal (NLS) sequence, an antibiotic resistance sequence, and a second LTR sequence.

[0008] Another aspect of the invention includes a vector comprising a first LTR sequence, a promoter sequence, a direct repeat sequence of Cpf1, a first restriction site, a second restriction site, an EFS sequence, an antibiotic resistance sequence, a posttranscriptional regulatory element sequence, and a second LTR sequence.

[0009] Yet another aspect of the invention includes a crRNA array comprising a 5′ nucleotide sequence that is homologous to a first nucleotide sequence on a vector, a first crRNA sequence, a direct repeat sequence of Cpf1, a second crRNA sequence, a terminator sequence, and a 3′ sequence that is homologous to a second sequence on the vector.

[0010] In another aspect, the invention includes a vector comprising a first LTR sequence, a promoter sequence, a first direct repeat sequence of Cpf1, a first crRNA sequence, a second direct repeat sequence of Cpf1, a second crRNA sequence, a terminator sequence, an EFS sequence, a posttranscriptional regulatory sequence, and a second LTR sequence.

[0011] In yet another aspect, the invention includes a crRNA library comprising a plurality of crRNA arrays cloned into a plurality of vectors, wherein the crRNA arrays individually comprise a 5′ nucleotide sequence that is homologous to a first nucleotide sequence on a vector, a first crRNA sequence, a direct repeat sequence of Cpf1, a second crRNA sequence, a terminator sequence, and a 3′ sequence that is homologous to a second sequence on the vector.

[0012] In still another aspect, the invention includes a method for simultaneously mutagenizing multiple target sequences in a cell. The method comprises administering to the cell a crRNA library comprising a plurality of vectors comprising a plurality of crRNA arrays. Each crRNA array independently comprises a 5′ nucleotide sequence that is homologous to a first nucleotide sequence on the vector, a first crRNA sequence, a direct repeat sequence of Cpf1, a second crRNA sequence, a terminator sequence, and a 3′ sequence that is homologous to a second sequence on the vector. The first crRNA is complementary to a first target sequence and the second crRNA is complementary to a second target sequence.

[0013] Another aspect of the invention includes a method of identifying synergistic drivers of transformation and/or tumorigenesis in vivo. The method comprises administering a cell mutagenized by a crRNA library to an animal. The crRNA library comprises a plurality of vectors comprising a plurality of crRNA arrays. Each crRNA array independently comprises a 5′ nucleotide sequence that is homologous to a first nucleotide sequence on the vector, a first crRNA sequence, a direct repeat sequence of Cpf1, a second crRNA sequence, a terminator sequence and a 3′ sequence that is homologous to a second sequence on the vector. The first crRNA is complementary to a first target sequence and the second crRNA is complementary to a second target sequence. A nucleotide from a tumor from the animal is sequenced. The data from the sequencing are analyzed to identify the synergistic drivers of transformation and/or tumorigenesis.

[0014] Yet another aspect of the invention includes an in vivo method for identifying and mapping genetic interactions between a plurality of genes. The method comprises administering a cell mutagenized by a crRNA library to an animal. The crRNA library comprises a plurality of vectors comprising a plurality of crRNA arrays. The crRNA array comprises a 5′ nucleotide sequence that is homologous to a first nucleotide sequence on the vector, a first crRNA sequence, a direct repeat sequence of Cpf1, a second crRNA sequence, a terminator sequence, and a 3′ sequence that is homologous to a second sequence on the vector. The first crRNA is complementary to a first target sequence and the second crRNA is complementary to a second target sequence. A nucleotide from a tissue from the animal is sequence. The data from the sequencing are analyzed to identify and map the genetic interactions.

[0015] Another aspect of the invention includes a kit comprising a CCAS library comprising a plurality of vectors comprising a plurality of crRNA arrays, wherein the crRNA arrays comprise a nucleotide sequence selected from the group consisting of SEQ ID NOs: 4-9,708, and instructional material for use thereof.

[0016] Still another aspect of the invention includes a kit comprising a MCAP library comprising a plurality of vectors comprising a plurality of crRNA arrays, wherein the crRNA arrays comprise a nucleotide sequence selected from the group consisting of SEQ ID NOs: 9,762-21,695, and instructional material for use thereof.

[0017] In another aspect, the invention includes a vector comprising a first promoter, a Cpf1 sequence, a second promoter, a first Cpf1 direct repeat sequence, a lox66 sequence, a second Cpf1 direct repeat sequence, two inverted restriction sites, an inverted lox71 sequence, and a crRNA FlipArray. The crRNA FlipArray comprises a first crRNA sequence, 4-10 consecutive thymidines, a second inverted crRNA sequence, 4-10 consecutive adenines, and a third inverted direct repeat sequence.

[0018] In yet another aspect, the invention includes a gene editing system capable of inducible, sequential mutagenesis in a cell. The system comprises a vector and a Cre recombinase. The vector comprises a first promoter, a Cpf1 sequence, a second promoter, a first Cpf1 direct repeat sequence, a lox66 sequence, a second Cpf1 direct repeat sequence, two inverted restriction sites, an inverted lox71 sequence, and a crRNA FlipArray. The crRNA FlipArray comprises a first crRNA sequence, 4-10 consecutive thymidines, a second inverted crRNA sequence, 4-10 consecutive adenines, and a third inverted direct repeat sequence.

[0019] Another aspect of the invention includes a gene editing system capable of inducible, sequential mutagenesis in a cell. The system comprises a plurality of vectors and a Cre recombinase. The the vectors comprise a first promoter, a Cpf1 sequence, a second promoter, a first Cpf1 direct repeat sequence, a lox66 sequence, a second Cpf1 direct repeat sequence, two inverted restriction sites, an inverted lox71 sequence, and a crRNA FlipArray. The crRNA FlipArray comprises a first crRNA sequence, 4-10 consecutive thymidines, a second inverted crRNA sequence, 4-10 consecutive adenines, and a third inverted direct repeat sequence.

[0020] Yet another aspect of the invention includes a method of inducible, sequential mutagenesis in a cell. The method comprises administering to the cell a vector comprising a first promoter, a Cpf1 sequence, a second promoter, a first Cpf1 direct repeat sequence, a lox66 sequence, a second Cpf1 direct repeat sequence, two inverted restriction sites, an inverted lox71 sequence, and a crRNA FlipArray. The crRNA FlipArray comprises a first crRNA sequence, 4-10 consecutive thymidines, a second inverted crRNA sequence, 4-10 consecutive adenines, and a third inverted direct repeat sequence. The first crRNA is expressed. A Cre recombinase is administered to the cell. When the Cre recombinase is administered, the second crRNA is expressed, thus sequentially mutagenizing the cell.

[0021] Still another aspect of the invention includes a method of inducible, sequential mutagenesis in a cell. The method comprises administering to the cell a plurality of vectors. The plurality of vectors individually comprise a first promoter, a Cpf1 sequence, a second promoter, a first Cpf1 direct repeat sequence, a lox66 sequence, a second Cpf1 direct repeat sequence, two inverted restriction sites, an inverted lox71 sequence, and a crRNA FlipArray. The crRNA FlipArray comprises a first crRNA sequence, 4-10 consecutive thymidines, a second inverted crRNA sequence, 4-10 consecutive adenines, and a third inverted direct repeat sequence. The first crRNA is expressed. A Cre recombinase is administered to the cell. When the Cre recombinase is administered, the second crRNA is expressed, thus sequentially mutagenizing the cell.

[0022] Another aspect of the invention includes a method of inducible, sequential mutagenesis in a cell in an animal. The method comprises administering to the animal a plurality of vectors. The plurality of vectors individually comprise a first promoter, a Cpf1 sequence, a second promoter, a first Cpf1 direct repeat sequence, a lox66 sequence, a second Cpf1 direct repeat sequence, two inverted restriction sites, an inverted lox71 sequence, and a crRNA FlipArray. The crRNA FlipArray comprises a first crRNA sequence, 4-10 consecutive thymidines, a second inverted crRNA sequence, 4-10 consecutive adenines, and a third inverted direct repeat sequence. The first crRNA is expressed. The animal is administered a Cre recombinase. When the Cre recombinase is administered, the second crRNA is expressed thus sequentially mutagenizing the cell in the animal.

[0023] In various embodiments of the above aspects or any other aspect of the invention delineated herein, the vector further comprises a tag sequence. In one embodiment, the tag sequence is a a Flag2A sequence. In one embodiment, the first and/or second restriction site is a BsmBI restriction site. In one embodiment, the posttranscriptional regulatory element sequence comprises a Woodchuck Hepatitis Virus (WHP) Posttranscriptional Regulatory Element (WPRE) sequence. In one embodiment, the promoter sequence comprises a U6 promoter sequence. In one embodiment, the terminator sequence comprises a U6 terminator sequence.

[0024] In one embodiment, the first promoter is an EFS promoter. In one embodiment, the EFS promoter drives expression of Cpf1. In one embodiment, the second promoter is a U6 promoter. In one embodiment, the U6 promoter drives expression of the crRNA FlipArray. In one embodiment, the first promoter and the second promoter are in opposite orientations. In one embodiment, the vector further comprises an antibiotic resistance marker. In one embodiment, In one embodiment, the antibiotic resistance marker is a puromycin resistance sequence. In one embodiment, the restriction sites are BsmbI restriction sites. In one embodiment, the Cpf1 sequence is a Lachnospiraceae bacterium Cpf1 (LbCpf1) sequence. In one embodiment, any one of the first, second, or third, direct repeat sequences is from LbCpf1. In one embodiment, the first crRNA sequence comprises six consecutive thymidines. In one embodiment, the second inverted crRNA sequence comprises six consecutive adenines. In one embodiment, the first crRNA and/or the second crRNA target more than one sequence.

[0025] In one embodiment, the vector comprises the nucleic acid sequence of SEQ ID NO: 1. In one embodiment, the vector comprises the nucleic acid sequence of SEQ ID NO: 2. In one embodiment, the vector comprises SEQ ID NO: 21,697.

[0026] In one embodiment, the crRNA array comprises any one of the vectors of the present invention. In one embodiment, the crRNA library comprises any one of the vectors of the present invention.

[0027] In one embodiment, the first crRNA sequence is complementary to a gene selected from the group consisting of Pten and Nf1, and the second crRNA sequence is complementary to a gene selected from the group consisting of Pten and Nf1. In one embodiment, the first crRNA targets Nf1 and the second crRNA targets Pten. In one embodiment, the first crRNA and/or the second crRNA targets a panel of immunomodulatory factors comprising Cd274, Ido1, B2m, Fas1, Jak2, and Lgals9.

[0028] In one embodiment, the crRNA arrays comprise a nucleotide sequence selected from the group consisting of SEQ ID NOs: 4-9,708. In one embodiment, the crRNA arrays comprise a nucleotide sequence selected from the group consisting of SEQ ID NOs: 9,762-21,695. In one embodiment, the plurality of crRNA arrays comprise a nucleotide sequence selected from the group consisting of SEQ ID NOs. 4-9,708. In one embodiment, the plurality of crRNA arrays comprise a nucleotide sequence selected from the group consisting of SEQ ID NOs. 9,762-21,695. In one embodiment, the crRNA comprises at least one additional crRNA sequence that is complementary to at least one additional target sequence. In one embodiment, the first crRNA and/or the second crRNA targets more than one sequence.

[0029] In one embodiment, the crRNA library comprises a Cpf1 crRNA array screening (CCAS) library, wherein the crRNA arrays consist of SEQ ID NOs: 4-9,708. In one embodiment, the crRNA library comprises a Massively-Parallel crRNA Array Profiling (MCAP) library comprising a plurality of crRNA arrays targeting pairwise combinations of genes significantly mutated in human metastases. In one embodiment, the MCAP library comprises crRNA arrays consisting of SEQ ID NOs: 9,762-21,695.

[0030] In one embodiment, the cell is selected from the group consisting of a T cell, a CD8+ cell, a CD4+ cell, a dendritic cell, an endothelial cell, and a stem cell. In one embodiment, the cell is a human cell. In one embodiment, the animal is a mouse. In one embodiment, the animal is a human.

[0031] In one embodiment, the mutagenesis is selected from the group consisting of nucleotide insertion, nucleotide deletion, frameshift mutation, gene activation, gene repression, and epigenetic modification.

### BRIEF DESCRIPTION OF THE DRAWINGS

[0032] The following detailed description of specific embodiments of the invention will be better understood when read in conjunction with the appended drawings. For the purpose of illustrating the invention, there are shown in the drawings exemplary embodiments. It should be understood, however, that the invention is not limited to the precise arrangements and instrumentalities of the embodiments shown in the drawings.

[0033] FIGS. 1A-1D are a series of plots and images illustrating enabling one-step double knockout screening with a Cpf1 crRNA array library. FIG. 1A shows schematic maps of the constructs for one-step double knockout screens by CRISPR-Cpf1. A pLenti-EFS-Cpf1-blast vector, which constitutively expresses a humanized form of Lachnospiraceae bacterium Cpf1 (LbCpf1) was generated; transduced cells can be selected by blasticidin. A pLenti-U6-DR-crRNA-puro vector, which contains the direct repeat (DR) sequence of Cpf1 and two BsmBI restriction sites for one-step cloning of crRNA arrays, was also generated; puromycin treatment enables the selection of cells that have been transduced. The structure of the crRNA array library for cloning into the base vector is also shown. Each crRNA array is comprised of a 5′ homology arm to the base vector, followed by the first crRNA, the direct repeat (DR) sequence for Cpf1, the second crRNA, a U6 terminator sequence, and a 3′ homology arm. FIG. 1B is a schematic of the cloning strategy for double knockout screens by CRISPR-Cpf1. Incorporating a crRNA array library into the base vector simply requires BsmBI linearization followed by Gibson assembly, thereby producing a lentiviral version of the library (pLenti-U6-DR-cr1(N20)-DR-cr2(N20)-puro). This one-step cloning procedure greatly simplifies library construction for high-dimension genetic screens. FIG. 1C is a schematic describing the design and synthesis of the Cpf1 double knockout (CCAS) library for identifying synergistic drivers of tumorigenesis. The top 50 tumor suppressors (TSGs) were first identified based on an unbiased pan-cancer analysis of 17 cancer types from the TCGA (PANCAN17-TSG50). 49 of these 50 TSGs had corresponding mouse orthologs (PANCAN17-mTSG). All possible Cpf1 spacer sequences within these genes were identified, and 2 were chosen for each gene. The selection of crRNAs was based on two scoring criteria: 1) high genome-wide mapping specificity and 2) a low number of consecutive thymidines, since long stretches of thymidines will terminate U6 transcription. With these 98 crRNAs and 3 additional non-targeting control (NTC) crRNAs, a library was designed containing 9,705 permutations of two crRNAs each (CCAS library). After pooled oligo synthesis, the PANCAN17-mTSG CCAS library was cloned into the base vector, and the plasmid crRNA array representation was subsequently read out by deep-sequencing the crRNA expression cassette. FIG. 1D is a density plot showing the distribution of CCAS crRNA array abundance in terms of log₂ reads per million (rpm). Of the 9,705 total crRNA arrays in the library, 9,408 were comprised of two gene-targeting crRNAs (double knockout, or DKO), while 294 contained one gene-targeting crRNA and one NTC crRNA (single knockout, or SKO). The remaining 3 crRNA arrays were controls, with two NTC crRNAs in the crRNA array (NTC-NTC, not shown). The library-wide abundance of both DKO and SKO crRNA arrays followed a log-normal distribution, demonstrating relatively even coverage of the CCAS plasmid library.

[0034] FIGS. 2A-2E are a series of plots and images illustrating a library-scale Cpf1 crRNA array screen in a mouse model of early tumorigenesis. FIG. 2A is a schematic of the experimental approach for Cpf1-mediated double knockout screens to identify synergistic drivers of tumorigenesis in a transplant model. Lentiviral pools were generated from the CCAS plasmid library, and subsequently infected Cpf1+IM cells to perform massively parallel gene-pair level mutagenesis. The mixed double mutant cell population (CCAS-treated cells), or vector-treated control cells were then injected subcutaneously into nude mice (n=10 and n=4, respectively). After 6.5 weeks, genomic DNA was extracted from the injection site and subjected to crRNA array sequencing. FIG. 2B shows tumor growth curves of CCAS-treated (red, n=10) and vector-treated cells (black, n=4) in vivo. As expected, vector treated cells were lowly tumorigenic, and the population of mixed double mutants (CCAS-treated cells) were highly tumorigenic. By 45 days post injection (dpi), tumors derived from CCAS-treated cells were significantly larger than those by vector-treated cells (* p<0.05, ** p<0.01, two-sided t-test). FIG. 2C shows histological sections of tumors derived from vector-treated and CCAS-treated cells, stained by hematoxylin and eosin. Two representative tumors are shown from each group. Images in each row were taken at the same magnification (top row, scale bar=500 μm; bottom row, scale bar=200 μm). CCAS-treated cells gave rise to much larger tumors than vector-treated cells. FIG. 2D is a dot-boxplot depicting the overall representation of the CCAS library, in terms of log₂ rpm abundance. The plasmid library, 4 pre-injection cell pools, and 10 tumor samples were sequenced. NTC-NTC controls, SKO crRNA arrays, and DKO crRNA arrays are shown. Whereas plasmid and cell samples exhibited lognormal representation of the CCAS library, tumor samples showed strong enrichment of specific SKO and DKO crRNA arrays. Notably, NTC-NTC crRNA arrays were consistently found at low abundance in all tumor samples. FIG. 2E is a scatterplot comparing average log 2 rpm abundance of all CCAS crRNA arrays in cells and in tumors. The linear regression line is shown, demonstrating the log-linear relationship of most crRNA arrays between tumors and cells (r²=0.166, coefficient=0.569, p<2.2 e-16 by F-test). There were numerous outliers (Bonferroni adjusted p<0.05), indicating that specific crRNA arrays had undergone positive selection in vivo. See FIGS. 10A-10B for the individual tumor comparisons, with outliers labeled.

[0035] FIGS. 3A-3E are a series of plots and images illustrating enrichment analysis of single knockout and double knockout crRNA arrays. FIG. 3A shows ranked crRNA array abundance plots of four representative tumor samples. In each tumor, there was a distinct set of DKO crRNA arrays that showed clear enrichment above the rest of the library, including the corresponding SKO crRNA arrays for each DKO pair. In Tumor 1, crCasp8.crApc was by far the most abundant crRNA array, dwarfing all other crRNA arrays including the corresponding SKO crRNA arrays crApc.NTC and crCasp8.NTC. Tumor 3 was dominated by crSetd2.crAcvr2a and crRnf43.crAtrx, Tumor 5 by crCic.crZc3h13 and crCbwd1.crNsd1, and Tumor 6 by crAtm.crRunx1 and crKmt2d.crH2-Q2. In all of these cases, the corresponding SKO crRNA arrays were far less abundant compared to the DKO crRNA arrays. FIG. 3B shows a volcano plot of DKO and SKO crRNA arrays compared to NTC-NTC controls. Log 2 fold change is calculated using average log 2 rpm abundance across all tumor samples, after averaging the 3 NTC-NTC controls to get one NTC-NTC score per sample. 655 crRNA arrays were found to be significantly enriched compared to NTC-NTC controls (Benjamini Hochberg-adjusted p<0.05). Of these, 620 were DKO crRNA arrays and 354 were SKO crRNA arrays. In total, the 655 enriched crRNA arrays corresponded to 498 gene combinations. A Venn diagram is also shown, detailing the number of genes involved in significant DKO and/or SKO crRNA arrays. All 49 genes in the PANCAN17-mTSG CCAS library were represented within at least one significant DKO crRNA array, while 24 genes were found to be significant as part of a SKO crRNA array. FIG. 3C is a bar plot of the top 10 genes ranked by the number of significant crRNA arrays associated with each gene. DKO crRNA array counts are shown in light grey, and SKO crRNA arrays in dark grey. Rnf43 and Kmt2c were the two most influential genes, associated with 58 and 51 independent crRNA arrays. FIG. 3D is a bar plot showing the number of significant DKO crRNA arrays associated with each gene pair in the CCAS library. 113 gene pairs were represented by at least 2 independent DKO crRNA arrays. Of note, the interaction of Atrx+Setd2 was supported by 5 independent crRNA arrays, while Atrx+Kmt2c, Arid1a+Map3k1, Kdm5c+Kmt2c, and Arid1a+Rnf43 were substantiated by 4 crRNA arrays. FIG. 3E is a violin plot showing the distribution of permutation correlations between crX.crY and crY.crX for the 4,704 DKO crRNA array combinations in the CCAS library (9,408 unique crRNA array permutations). In total, 80.1% (3,767/4,704) of all crRNA array combinations were significantly correlated when comparing the two permutations associated with each combination (Benjamini-Hochberg adjusted p<0.05, by t-distribution).

[0036] FIGS. 4A-4E are a series of plots and images illustrating high-throughput identification of synergistic gene pairs as co-drivers of transformation and tumorigenesis. FIG. 4A is a schematic describing the methodology for calculating a synergy coefficient (SynCo) for each DKO crRNA array in individual tumor samples. DKOₓ score is the log₂ rpm abundance of the DKO crRNA array (i.e., crX.crY) after subtracting average NTC-NTC abundance. SKOₓ and SKO_{y} scores are defined as the average log₂ rpm abundance of each SKO crRNA array (3 SKO crRNA arrays associated with each individual crRNA), after subtracting average NTC-NTC abundance. SynCo=DKO_{xy}−SKOₓ−SKO_{y}. By this definition, a SynCo score>>0 would indicate that a given DKO crRNA array is synergistic, as the DKO score would thus be greater than the sum of the individual SKO scores. FIG. 4B is a volcano plot of average SynCo across all tumor samples and associated −log₁₀ Benjamini-Hochberg adjusted p-value (two-sided one sample t-test, Ho: mean SynCo=0) for each DKO crRNA array in the library. Each point is scaled by size, in reference to the % of tumor samples with a SynCo≥7 for a particular crRNA array, and also color-coded according to the average log₂ rpm abundance across all tumor samples. To the right is a zoomed-in view of the top synergistic DKO crRNA arrays. Among the strongest driver pairs were crSetd2.crAcvr2a, crCbwd1.crNsd1, crRnf43.crAtrx, and crPten.crRasa1. FIG. 4C is a bar plot showing the number of significantly synergistic dual-crRNAs associated with each gene pair in the CCAS library (Benjamini-Hochberg adjusted p<0.05). 24 synergistic pairs were corroborated by multiple dual-crRNAs, including Brca1+Cbwd1 and Kdm6a+Trp53. FIG. 4D shows gene-level synergistic driver network based on the CCAS screen, focusing here on H2-Q2 and all first-degree connections between genes associated with H2-Q2. The complete network is shown in FIG. 12. Each node represents one gene, and each edge indicates a significant synergistic interaction (Benjamini-Hochberg adjusted p<0.05). Edge widths are scaled by SynCo score. H2-Q2 was significantly synergistic with a total of 19 other genes by this analysis, and its strongest synergistic partner was found to be Kmt2d (SynCo=8.877). FIG. 4E is a bubble chart depicting co-mutation analysis of synergistic drivers across 21 human cancer types. For each of the top 50 significant driver pairs identified through CCAS SynCo analysis, bubble dots indicate whether these gene pairs were significantly co-mutated in human cancers (where mutations are defined as nonsynonymous mutations or deep deletions). The color of each point corresponds to the average SynCo score (from mice), while the size of each point is scaled to the −log₁₀ p-value of co-mutation in each human cancer (hypergeometric test). Of all synergistic interactions identified by SynCo analysis, 132 gene combinations were significantly co-mutated in at least one cancer type (Benjamini-Hochberg adjusted p<0.05), with 46 pairs significantly co-mutated in two or more cancer types, indicating that the synergistic driver pairs identified through the mouse CCAS screen recapitulate genomic features of human cancers.

[0037] FIGS. 5A-5C are a series of plots and images illustrating a Cpf1 crRNA array library screen in a mouse model of metastasis. FIG. 5A is a schematic of the experimental approach for Cpf1 crRNA array library screen in a mouse model of metastasis to identify co-drivers of metastatic process in vivo. Lentiviral pools were generated from the CCAS plasmid library, and Cpf1⁺ KPD LCC cells subsequently infected to perform massively parallel gene-pair level mutagenesis. The mixed double mutant cell populations (CCAS-treated cells, 4×10⁶ cells per mouse, ˜400× coverage) were then injected subcutaneously into Nu/Nu mice (n=7) and Rag1−/− mice (n=4). After 8 weeks, genomic DNA was extracted from the primary tumors, four lung lobes, and other stereoscope-visible metastases, and then subjected to crRNA array sequencing. FIG. 5B is a dot-boxplot depicting the overall representation of the CCAS library across all metastasis screen samples, in terms of log₂ rpm abundance. The 3 pre-injection cell pools, as well as primary tumors and metastases from all 11 mice were sequenced. NTC-NTC controls, SKO crRNA arrays, and DKO crRNA arrays are shown. Whereas cell samples exhibited lognormal representation of the CCAS library, both primary tumors and metastases showed strong enrichment of specific SKO and DKO crRNA arrays. Notably, NTC-NTC crRNA arrays were consistently found at low abundance in all primary tumors and metastases samples. FIG. 5C shows intra-mouse Pearson correlation heatmaps of samples, showing high degree of similarity between primary tumors and metastases from the same host.

[0038] FIGS. 6A-6D are a series of plots and images illustrating enrichment analysis of crRNA arrays identified metastasis drivers and co-drivers. FIG. 6A is a violin plot showing the distribution of permutation correlations between crX.crY and crY.crX for the 4,704 DKO crRNA array combinations in the CCAS library (9,408 unique crRNA array permutations). 97.4% all crRNA array combinations were significantly correlated when comparing the two permutations associated with each combination (Benjamini-Hochberg adjusted p<0.05, by t-distribution). FIG. 6B is a volcano plot of DKO and SKO crRNA arrays compared to NTC-NTC controls in the metastasis screen. Log₂ fold change is calculated using average log₂ rpm abundance across all in vivo samples, after averaging the 3 NTC-NTC controls to get one NTC-NTC score per sample. 2933 crRNA arrays were found to be significantly enriched compared to NTC-NTC controls (Benjamini Hochberg-adjusted p<0.05), targeting 1006 gene pairs. Of these, 2813 were DKO crRNA arrays and 120 were SKO crRNA arrays. All 49 genes in the PANCAN17-mTSG CCAS library were represented within at least one significant DKO crRNA array. FIG. 6C is a bar plot of the top 15 genes ranked by the number of significant crRNA arrays associated with each gene. Arid1a, Cdh1, Kdm5c and Rb1 were the top genes associated with ≥200 independent crRNA arrays. FIG. 6D is a bar plot showing the number of significant DKO crRNA arrays associated with each gene pair in the CCAS library. Most gene pairs were represented by at least 2 independent DKO crRNA arrays. Of note, 8 gene pairs were represented by all eight crRNA arrays.

[0039] FIGS. 7A-7D are a series of plots and images illustrating modes and patterns of metastatic spread with co-drivers. Comparison of the crRNA array representations between metastases to primary tumors revealed modes of monoclonal spread (FIG. 7A) where dominant metastases in all lobes were derived from identical crRNA arrays, and polyclonal spread (FIG. 7B) where dominant metastases in all lobes were derived from several different crRNAs. FIG. 7A is an example of a monoclonal spread where all 4 lobes were dominated by a clone crNf2.crRnf43, that was also found at the primary tumor as a major clone (≥2% frequency). FIG. 7B is an example of a polyclonal spread where all 4 lobes were derived from multiple varying crRNAs. Lobe 1 was dominated by crNsd1.crNTC, which was one of major clones in the corresponding primary tumor; Lobe 2 was dominated by crH2-Q2.crCdh1, crNsd1.crAtm and crCasp8.crArid1a, which were also major clones in primary tumor. However, lobe 3 was dominated by crElf3.crFbxw7 and crRb1.crCasp8, which were not found as major clones in primary tumor; the case of lobe 4 echoes that of lobe 3 with a more complex metastatic clonal mixture, as most of its dominant clones (crBcor.crKdm5c, crAcvr2a.crNTC, crRb1.crCasp8, crCdkn2a.crApc, crApc.crKmt2b, crRasa1.crNf2, crElf3.crFbxw7 and crPten.crKdm5c) were not found as major clones in the primary tumor. FIG. 7C is a waterfall plot of enriched crRNA arrays in a metastases vs primary tumor analysis, identifying crRNA arrays that were dominant clones in metastases but not in the corresponding primary tumor. Top ranked metastasis-specific dominant crRNA arrays were found to be crCic.crKmt2b, crCdkn2a.crApc, crRasa1.crNf2, crApc.crKmt2b, crNf2.crPik3r1, crNf2.crRnf43, among 23 enriched crRNA arrays. FIG. 7D is a schematic describing several extended applications of multiplexed Cpf1 screens. The relative ease of library construction and subsequent readout with the approach described herein empowers the study of previously intractable biological problems, including combinatorial genome-wide knockout studies of synthetic lethality, as well as the discovery and characterization of epistatic networks in embryonic development and stem cell differentiation. Notably, this approach is rapidly scalable to triple knockout or higher-dimensional screens.

[0040] FIGS. 8A-8B are a series of images illustrating double knockout of Nf1 and Pten by a single crRNA array. FIG. 8A is a schematic depicting the experimental approach for testing the ability of a single crRNA array to induce mutagenesis at both Nf1 and Pten. Plasmids were designed containing a U6 promoter driving the expression of either a Pten crRNA (crPten) followed by an Nf1 crRNA (crNf1), or vice versa. Lentiviruses were subsequently generated and used to infect a tumor cell line that had been transduced with a Cpf1 expression vector (KPD.LbCpf1+). FIG. 8B shows 7 days after lentiviral infection, genomic DNA was harvested from puromycin-resistant cells for mutation analysis. Nextera library preparation and deep sequencing enabled quantitative high-resolution analysis of the mutations induced by Cpf1 activity. For each treatment condition, mutations were identified at the genomic loci targeted by crPten (left column) and by crNf1 (right column). Variant frequencies associated with each mutation are shown in the boxes to the right; for each condition, the top 5 most frequent variants are shown. The location of the protospacer adjacent motif and the crRNA are indicated at the top. Regardless of individual crRNA position within the crRNA array (top row, crPten-crNf1; bottom row, crNf1-crPten), indels were found at both Pten and Nf1 loci in KPD.LbCpf1+ cells treated with crPten-crNf1 or crNf1-crPten crRNA arrays.

[0041] FIGS. 9A-9E are a series of plots and images illustrating representation of CCAS crRNA array library in plasmid, cells, and tumors. FIG. 9A is a heatmap of pairwise Pearson correlation coefficients of crRNA array log₂ rpm abundance from CCAS plasmid library, CCAS transduced cells before transplantation (day 7 post infection), and late stage subcutaneous tumors (6.5 weeks post transplantation). Plasmid and cell samples were highly correlated with one another, while tumor samples were most correlated with other tumors. FIG. 9B is a bar plot depicting the percentage of all crRNA arrays in the CCAS library that were detected in each sample. All plasmid and cell samples contained 100% of CCAS crRNA arrays, while tumor samples exhibited significantly lower crRNA array library diversity (mean SEM=37.0% 10.5%; p=2.02 e-4 compared to plasmid and cells, t-test). FIG. 9C is a series of Q-Q plots comparing theoretical and sample quantiles of log₂ rpm crRNA array abundance in plasmid, cell, and tumor samples (cells and tumor samples averaged by group). In contrast with plasmid and cell samples, tumor samples did not appear linear on the Q-Q plot, indicating that the distribution of crRNA array abundance in plasmid and cell samples (but not tumor samples) approximated a normal distribution. FIGS. 9D-9E are a series of pie charts showing highly enriched crRNA arrays (>2% reads) across all 10 tumors; the area for each crRNA array corresponds to the percentage of reads within the tumor.

[0042] FIGS. 10A-10B are a series of plots and images illustrating outlier analysis of individual tumors compared to cells. FIG. 10A is a series of scatterplots comparing log₂ rpm abundance of crRNA arrays in individual tumors compared to cell samples (cell samples were averaged). In all tumors, crRNA arrays largely approximated a log-linear distribution, as indicated by the linear regression lines. However, there were numerous clear outliers (Bonferroni adjusted p<0.05), indicating that specific crRNA arrays had undergone positive selection in vivo. The associated regression r², coefficient, and p-value (by F-test) are noted on each plot. FIG. 10B is a barplot depicting the number of DKO and SKO outlier crRNA arrays identified within each individual tumor, as defined in FIG. 10A.

[0043] FIGS. 11A-11E are a series of plots and images illustrating crRNA array permutation has a minimal effect on enrichment. FIG. 11A is a schematic illustrating two permutations of the same crRNA array combination (crX-crY and crY-crX). To estimate possible position effects on the efficiency of Cpf1 mutagenesis, the Pearson correlation was calculated between each permutation pair in terms of log₂ rpm abundance. This value was defined as the permutation correlation. FIG. 11B is an empirical cumulative density plot of all permutation correlations across the 4,704 crRNA array combinations in the CCAS library. Greater than half of all crRNA array combinations had a correlation coefficient R≥0.97, indicating that the majority of crRNA array permutations were strongly correlated. FIG. 11C is a scatterplot comparing log₂ rpm abundance of crH2-Q2.1_crPten.240 and its permutation crPten.240_crH2-Q2.1 across all 10 tumor samples. The correlation coefficient and associated p-value of the correlation are noted in the top left (R=0.999, p=2.28 e-19). FIG. 11D is a scatterplot comparing log₂ rpm abundance of crCbwd1.84_crEpha2.5 and its permutation crEpha2.5_crCbwd.84 across all 10 tumor samples. The correlation coefficient and associated p-value of the correlation are noted in the top left (R=0.999, p=7.09 e-19). FIG. 11E shows marginal distribution meta-analysis of all 98 constituent single crRNAs in the CCAS library showing the average log₂ rpm abundance of all DKO crRNA arrays associated with each individual crRNA when present in position 1 or in position 2 of the crRNA array. The scatterplot shows the average log₂ rpm abundance for each single crRNA when in position 1 (x-axis) or position 2 (y-axis). Across all 98 single crRNAs, the average abundance for each single crRNA when in position 1 was significantly correlated with the average abundance when in position 2 (Pearson correlation coefficient (R)=0.397, p=5.25 e-5 by t-distribution), showing that individual crRNAs confer a similar selective advantage regardless of position in the crRNA array.

[0044] FIG. 12 is an image illustrating network analysis of synergistic driver pairs. The complete map of the gene-level synergistic driver network among all 49 genes in the CCAS library is shown. Each node represents one gene, and each edge indicates a statistically significant synergistic interaction between a given gene pair (Benjamini-Hochberg adjusted p-value<0.05, as in FIG. 4B). The strength of each synergistic interaction (SynCo score) is represented by edge width. Nodes are color-coded based on the degree of connectivity within the network.

[0045] FIG. 13 is a heatmap of pairwise Pearson correlation coefficients of crRNA arrays in the CCAS metastasis screen. Heatmap of pairwise Pearson correlation coefficients in log₂ rpm abundance from all 50 samples, including CCAS transduced cells before transplantation (day 7 post infection, n=3 biological replicates), primary tumors (n=11 tumors from 11 mice, 7 were Nu/Nu and 4 were Rag1−/−), and metastases (n=36 samples from 11 mice).

[0046] FIG. 14 is a heatmap illustrating the overall library representation landscape of all crRNA array abundance in the CCAS metastasis screen. Heatmap of all crRNA array abundance in log₂ rpm abundance from all 50 samples, including CCAS transduced cells before transplantation (day 7 post infection, n=3 biological replicates), primary tumors (n=11 tumors from 11 mice, 7 were Nu/Nu and 4 were Rag1−/−), and metastases (n=36 samples from 11 mice).

[0047] FIGS. 15A-15G are a series of pie charts of dominant clones in all primary tumor and metastases in the CCAS metastasis screen. Pie charts showing dominant crRNA arrays (>2% reads) in each sample, across all 11 primary tumors and 36 metastasis samples. The area for each crRNA array corresponds to the percentage of reads within the tumor.

[0048] FIG. 16 is an image illustrating a CCAS system for multiplexed genome editing in immune cells and brain endothelial cells. Arrows point to successful detection of genome editing products.

[0049] FIGS. 17A-17C illustrate the features of the pLenti-EFS-Cpf1-blast vector (SEQ ID NO: 1).

[0050] FIGS. 18A-18B illustrate the features of the pLenti-U6-DR-crRNA-puro vector (SEQ ID NO: 2).

[0051] FIGS. 19A-19B illustrate the features of the vector pSC020_pLKO_U6-Cpf1crRNA-EFS-Thy11CO-sPA (SEQ ID NO: 3).

[0052] FIGS. 20A-20F are a series of tables displaying a ranked list of putative TSGs from analysis of 17 cancer types from TCGA (PANCAN17-TSG50).

[0053] FIGS. 21A-21C illustrate Cpf1-Flip—Cre-inducible sequential mutagenesis by a single crRNA FlipArray. FIG. 21A shows schematics of vectors used in the study. The Cpf1-Flip construct contains an EFS promoter driving expression of Cpf1 and puromycin resistance, and a U6 expression cassette containing two inverted BsmbI restriction sites, flanked by a lox66 sequence and an inverted lox71 sequence. After BsmbI digestion, a crRNA FlipArray is cloned in. The FlipArray inverts upon Cre recombination, thereby switching the crRNA that is expressed. FIG. 21B is a schematic of an experimental design. Cells were first infected with lentivirus containing EFS-Cpf1-puro; U6-FlipArray. After 7 days, cells were then infected with lentivirus containing EFS-Cre to induce inversion of the FlipArray. Prior to Cre recombination, only crNf1 is expressed; following Cre recombination, crPten becomes expressed. FIG. 21C shows sequences of the FlipArray construct before and after Cre recombination. Boxes denote mutants from wildtype loxP. Prior to Cre, single mutant lox66 and lox71 sites are present. After Cre recombination, a wildtype loxP site and a double mutant lox72 site are generated.

[0054] FIGS. 22A-22K illustrate inducible sequential mutagenesis in murine cells through Cpf1-Flip. FIG. 22A is a schematic for PCR-based detection of Cre-mediated inversion of the crRNA FlipArray (Nf1 and Pten). FIG. 22B shows results from PCR-based detection of non-inverted and inverted FlipArrays at DO (n=3) and D10 (n=3) following Cre, along with input control. FIG. 22C shows quantification of gel intensities in FIG. 22B, normalized to input and expressed as a percentage of total FlipArray abundance. FIG. 22D shows detection and quantification of Cre-mediated inversion of the crRNA FlipArray at the RNA transcript level using RT-PCR (n=2 infection replicates). The expression of the inverted FlipArray was assessed at multiple timepoints following EFS-Cre infection using sequence-specific primers for the inverted FlipArray transcript as normalized to the Cpf1 mRNA level. The induction of inverted crRNA expression steadily increased through 5d after Cre. FIG. 22E shows representative Illumina targeted amplicon sequencing of the crNf1 target site in uninfected controls. No significant variants were detected. FIG. 22F shows representative Illumina targeted amplicon sequencing of the crPten target site in uninfected controls. No significant variants were detected. FIG. 22G shows representative Illumina targeted amplicon sequencing of the crNf1 target site 7 days after infection with lentivirus containing EFS-Cpf1-puro; U6-NPF-FlipArray. The top 5 most frequent variants are shown, with the associated variant frequencies in the box to the right. FIG. 22H shows representative Illumina targeted amplicon sequencing of the crPten target site 7 days after infection with lentivirus containing EFS-Cpf1-puro; U6-NPF-FlipArray. No significant variants were detected. FIG. 22I shows representative Illuminatargeted amplicon sequencing of the crNf1 target site 17 days after infection with lentivirus containing EFS-Cpf1-puro; U6-NPF-FlipArray and 10 days following EFS-Cre infection. The top 5 most frequent variants are shown, with the associated variant frequencies in the box to the right. FIG. 22J shows representative Illumina targeted amplicon sequencing of the crPten target site 17 days after infection with lentivirus containing EFS-Cpf1-puro; U6-NPF-FlipArray and 10 days following EFS-Cre infection. The top 5 most frequent variants are shown, with the associated variant frequencies in the box to the right. FIG. 22K is a dot plot detailing the total variant frequenciesat the crNf1 and crPten target sites in uninfected cells, 7 days after FlipArray transduction (−Cre), and 17 days after FlipArray transduction (+Cre). Error bars are mean s.e.m (n=2 cell replicates for uninfected group, n=3 for other conditions).

[0055] FIGS. 23A-23K illustrate inducible sequential mutagenesis in human cells through Cpf1-Flip. FIG. 23A is a schematic of a FlipArray targeting human DNMT1 and VEGFA. In the absence of Cre, crDNMT1 is expressed. Cre administration leads to the inversion of the FlipArray, leading to the expression of crVEGFA. FIG. 23B shows results from PCR-based detection of non-inverted and inverted FlipArrays at DO (n=2) and D14 (n=3) following Cre, along with the input control. FIG. 23C shows quantification of gel intensities in FIG. 23B, normalized to input and expressed as a percentage of total FlipArray abundance. FIG. 23D shows representative Illumina targeted amplicon sequencing of the crDNMT1 target site in uninfected controls. No significant variants were detected. FIG. 23E shows representative Illumina targeted amplicon sequencing of the crVEGFA target site in uninfected controls. No significant variants were detected. FIG. 23F shows representative Illumina targeted amplicon sequencing of the crDNMT1 target site 7 days after infection with lentivirus containing EFS-Cpf1-puro; U6-DVF-FlipArray. The top 5 most frequent variants are shown, with the associated variant frequencies in the box to the right. FIG. 23G shows representative Illumina targeted amplicon sequencing of the crVEGFA target site 7 days after infection with lentivirus containing EFS-Cpf1-puro; U6-DVF-FlipArray. No significant variants were detected. FIG. 23H shows representative Illumina targeted amplicon sequencing of the crDNMT1 target site 21 days after infection with lentivirus containing EFS-Cpf1-puro; U6-DVF-FlipArray and 14 days following EFS-Cre infection. The top 5 most frequent variants are shown, with the associated variant frequencies in the box to the right. FIG. 23I shows representative Illumina targeted amplicon sequencing of the crVEGFA target site 21 days after infection with lentivirus containing EFS-Cpf1-puro; U6-DVF-FlipArray and 14 days following EFS-Cre infection. The associated variant frequencies are shown in the box to the right. FIGS. 23J-23K are dot plots detailing the total variant frequencies at the crDNMT1 and crVEGFA target sites in uninfected cells, 7 days after FlipArray transduction (−Cre), and 21 days after FlipArray transduction (+Cre). Error bars are mean s.e.m (n=2 cell replicates for uninfected and D7 conditions, n=6 for D21 timepoint).

[0056] FIGS. 24A-24C illustrate pooled sequential mutagenesis to model acquired resistance to immunotherapy. FIG. 24A is a schematic of the experimental approach for pooled sequential mutagenesis using Cpf1-Flip. Following restriction digest, a library of FlipArrays is cloned into the base vector. In each FlipArray, the first crRNA targets a tumor suppressor (Nf1), while the second crRNA targets a panel of putative immunomodulatory factors. Cre-mediated inversion induces expression of the second crRNA. FIG. 24B is a dot plot detailing the total variant frequencies at the crNf1 target site in uninfected cells, 14 days after FlipArray transduction (−Cre), and 28 days after FlipArray transduction (+Cre). Error bars are mean s.e.m (n=3 cell replicates for all conditions). FIG. 24C is a dot plot detailing the total variant frequencies at the second crRNA target sites (Fas1, Ido1, Jak2, Lgals9, B2m, and Cd274) in uninfected cells, 14 days after FlipArray transduction (−Cre), and 28 days after FlipArray transduction (+Cre). Error bars are mean s.e.m (n=3 cell replicates for all conditions).

[0057] FIGS. 25A-25B illustrate applications and variations of Cpf1-Flip. FIG. 25A is a schematic of several variations of Cpf1-Flip, using modified Cpf1 effector proteins. Sequential gene activation, gene repression, and epigenetic modification can all be readily performed using Cpf1-Flip. FIG. 25B illustrates Cpf1-Flip applied to model the evolution of cancer in a direct in vivo system. Since Cpf1-Flip operates in a stepwise manner, it is possible to temporally separate the initial mutagenesis event (in this case targeting a tumor suppressor gene, or TSG). After tumorigenesis, induction of FlipArray inversion activates the second set of crRNAs, allowing for parallel interrogation of clonal dynamics in vivo.

[0058] FIGS. 26A-26C illustrate evaluation of in vivo library diversity in the absence of mutagenesis. FIG. 26A shows the experimental design used to evaluate the suitability of the in vivo transplant model for high-throughput genetic interrogation. To model neutral selection in the absence of mutagenesis, a lentiviral library containing random 8 mer barcodes was introduced into KPD cells, for a theoretical total of 48=65,536 unique barcodes. 4×10⁶ cells were then injected into mice to mimic normal experimental conditions. After 12 days, genomic DNA was extracted from the nodules for barcode sequencing and assessment of library diversity. FIG. 26B is a bar plot detailing the percentage of all possible 8 mers that were recovered in each sample (cell pool, n=1; nu/nu mice, n=2; Rag^{-/-} mice, n=4). FIG. 26C is a scatter-box plot of the abundances of all possible 8 mers in cell pools, nu/nu mice, and Rag^{-/-} mice.

[0059] FIGS. 27A-27E illustrate interrogation of metastasis driver combinations by massively-parallel Cpf1-crRNA array profiling (MCAP). FIG. 27 is a schematic describing the design and synthesis of a library for massively-parallel Cpf1-crRNA array profiling (MCAP) of metastasis driver combinations. The top 23 tumor suppressors (TSGs) were identified from a human metastasis genomics cohort (MET-500), as well as the top 3 hits from a prior single-gene mouse metastasis screen (total n=26 genes). 4 crRNAs were chosen for each gene. Along with 52 NTC-NTC control crRNA arrays, a library was designed containing 1,326 NTC-NTC arrays, 5,408 single knockout (SKO) arrays targeting 26 single genes, and 5200 double knockout (DKO) arrays targeting 325 gene pairs for a total of 11,934 crRNA arrays (MCAP-MET library). FIG. 27B shows an experimental design for combinatorial interrogation of metastasis drivers in vivo. After generation of the MCAP-MET library, 4×10⁶ Cpf1+ KPD cells were transduced and then injected into nu/nu mice. 6 weeks after injection, primary tumors and lung lobes were harvested for genomic DNA extraction and crRNA array sequencing. FIG. 27C is a density plot showing the distribution of MCAP-MET library abundance in terms of log₂ reads per million (rpm). All crRNA arrays were detected in the plasmid library, following a log-normal distribution of abundances. FIG. 27D is a density plot of the number of unique barcodes associated with each crRNA array. A total of 774,296 unique barcoded-crRNA arrays (BC-arrays) were detected in the MCAP-MET plasmid library. FIG. 27E is a scatter plot of the normalized MCAP-MET library abundance in plasmid and averaged cell pools. Data are shown in terms of log₂ reads per million (rpm). The linear regression line for the entire MCAP-MET library is overlaid, demonstrating high concordance between plasmid library and cell pools. Shading on the regression line denotes the 95% confidence interval (CI).

[0060] FIG. 28 illustrates barcode-level analysis of the MCAP-MET library. Empirical CDF of the abundance of all detected barcoded-crRNA arrays in the MCAP-MET library (left), and a violin plot of the abundances (right).

[0061] FIGS. 29A-29B illustrate representation of MCAP-MET crRNA array library in plasmid, cells, primary tumors, and lung metastases. FIG. 29A is a heat map of pairwise Spearman correlation coefficients of crRNA array log₂ rpm abundance from MCAP-MET plasmid library, MCAP transduced cells before transplantation (day 7 or day 14 post infection), primary tumors, and lung metastases. Plasmid and cell samples were highly correlated with one another. FIG. 29B is a box-dot plot of crRNA array log₂ rpm abundance from MCAP-MET profiling experiment of all samples, including plasmid library, MCAP transduced cells before transplantation (day 7 or day 14 post infection), primary tumors, and lung metastases.

[0062] FIGS. 30A-30L illustrate clonal compositions and crRNA array enrichment analysis. FIG. 30A is a bar plot of the number of clones present at ≥0.001% frequency (1 in 10,000) in cell pools (light gray), primary tumors (*) and lung metastases. Sample annotations are noted below. FIG. 30B is a Violin plot of the number of clones present at ≥0.001% frequency in cell pools, primary tumors, and lung metastases. Cells vs. primary tumors (Wilcoxon rank sum test, p=0.0002), cells vs. lung metastases (p=0.0001), and primary tumors vs. lung metastases (p=0.0162). FIG. 30C is a dot plot of the relative frequencies of clones at ≥0.001% frequency across cell pools, primary tumors, and lung metastases. Relative frequencies are expressed as percentages of total reads in each sample. Points are colored by cell sample/mouse ID. FIG. 30D shows empirical CDF of all clones at ≥0.001% frequency in cell pools, primary tumors (*) and lung metastases (**), expressed as percentages of total reads in each sample. The clone size distributions in primary tumors and lung metastases were significantly different (Kolmogorov-Smirnov test, p<2.2*10⁻¹⁶). FIG. 30E is a Venn diagram of gene pairs that were enriched in ≥50% of primary tumors or lung metastases. FIG. 30F is a histogram detailing the percentage of independent crRNA arrays that were enriched in primary tumors for each single gene (left) or gene pair (right). FIG. 30G is a table of the top genes/gene pairs in terms of the percentage of independent crRNA arrays that were enriched in primary tumors. Colors correspond to the histograms in FIG. 30F. FIG. 30H is a histogram detailing the percentage of independent crRNA arrays that were enriched in lung metastases for each single gene (left) or gene pair (right). FIG. 30I is a Table of the top genes/gene pairs in terms of the percentage of independent crRNA arrays that were enriched in lung metastases. Colors correspond to the histograms in FIG. 30H. FIGS. 30J-30L are enrichment bar plots of multiple independent crRNA arrays targeting Nf2_Rb1 (FIG. 30J), Nf2_Pten (FIG. 30K), and Nf2_Trim72 (FIG. 30L) in lung metastases.

[0063] FIGS. 31A-31F illustrate analysis of large clones in primary tumors and lung metastases. FIG. 31A is a bar plot of the number of clones present at ≥0.01% frequency in primary tumors (*) and lung metastases. Mouse IDs are annotated below. Noted that cell samples do not have clones passing this frequency cutoff due to the high diversity in the population. FIG. 31B is a Violin plot of the number of clones present at ≥0.01% frequency in primary tumors and lung metastases. Collectively, primary tumors had significantly more clones at ≥0.01% frequency than lung metastases (Wilcoxon rank sum test, p<0.0023). FIG. 31C is a dot plot of the relative frequencies of clones at ≥0.01% frequency across primary tumors and lung metastases. Relative frequencies are expressed as percentages of total reads in each sample. FIG. 31D shows empirical CDF of all clones at ≥0.01% frequency in primary tumors (*) and lung metastases, expressed as percentages of total reads in each sample. The clone size distributions in primary tumors and lung metastases were significantly different (Kolmogorov-Smirnov test, p=0.0412).

[0064] FIG. 31E is a Violin plot of Shannon diversity indices in primary tumors and lung metastases for clones at ≥0.01% frequency. Primary tumors were significantly more diverse with regard to clone frequency distribution (Wilcoxon rank sum test, p=0.0183). FIG. 31F is a Violin plot of Shannon diversity indices in cell pools, primary tumors, and lung metastases for clones at ≥0.001% frequency. Cells vs. primary tumors (Wilcoxon rank sum test, p=0.0002), cells vs. lung metastases (p=3.28*10-), and primary tumors vs. lung metastases (p=0.0212).

[0065] FIGS. 32A-32F illustrate identification of mutation combinations with enhanced metastatic potential. FIGS. 32A, 32C, 32E are scatter plots of MCAP-MET crRNA array abundance in cell pools vs. primary tumors (FIG. 32A), cell pools vs. lung metastases (FIG. 32C), and primary tumors vs. lung metastases (FIG. 32E). Data are shown in terms of average log₂ reads per million (rpm) across the indicated sample type. To illustrate the null distribution, the linear regression line of NTC-NTC control arrays is overlain. Shading on the regression line denotes the 95% CI. FIGS. 32B, 32D, 32F are scatter plots of MCAP-MET single gene and gene pair abundance in cell pools vs. primary tumors (FIG. 32B), cell pools vs. lung metastases (FIG. 32D), and primary tumors vs. lung metastases (FIG. 32F). Data are shown in terms of average log₂ rpm across the indicated sample type, after first averaging the constituent crRNA arrays for each gene/gene pair. The linear regression was calculated over the entire library, with the 95% CI shaded in. Single genes and gene pairs that were found to be significant outliers are outlined and enlarged, with s.e.m. error bars.

[0066] FIGS. 33A-33I illustrate identification of synergistic mutation combinations. FIG. 33A is a schematic of the analytical workflow to identify synergistic mutation combinations. crRNA array abundances were averaged to the corresponding gene/gene pair, then compared across samples. To identify synergistic gene pairs, a synergy coefficient score (SynCo) was also calculated. For a given gene pair NM, the SynCo is defined as DKO_{NM}−SKO_{N}−SKO_{M} using median values across the sample cohort. A positive SynCo value indicates the selective advantage of the gene pair is greater than that of the two individual genes combined. FIG. 33B is a scatter plot of the −log₁₀ p-values for each gene pair (Wilcox rank sum test), compared to the constituent single genes. Synergistic gene pairs are labeled. FIG. 33C is a scatter plot of the median differential abundance for each gene pair compared to the constituent single genes. Synergistic gene pairs are labeled with the. FIGS. 33D-33I are boxplots detailing the log₂ rpm abundances of the indicated genotypes, with associated Wilcoxon rank sum p-values and SynCo scores noted. Statistics are in reference to the DKO genotype. Nf2/Trim72 (FIG. 33D), Chd1/Nf2 (FIG. 33E), Chd1/Kmt2d (FIG. 33F), Jak1/Kmt2c (FIG. 33G), Kmt2d/Pten (FIG. 33H), and Nf1Pten (FIG. 33I).

[0067] FIG. 34 illustrates relative selective advantages of gene pair vs. single gene knockouts. Heat map of the change in log₂ rpm abundance in lung metastases for each single gene knockout, relative to the indicated second knockout. A positive value means that the second knockout (rows) granted a relative selective advantage to the reference knockout (columns), while a negative value means the second knockout was relatively disadvantageous compared to the single knockout.

### DETAILED DESCRIPTION

### Definitions

[0068] Unless defined otherwise, all technical and scientific terms used herein have the same meaning as commonly understood by one of ordinary skill in the art to which the invention pertains. Although any methods and materials similar or equivalent to those described herein can be used in the practice for testing of the present invention, specific materials and methods are described herein. In describing and claiming the present invention, the following terminology will be used.

[0069] It is also to be understood that the terminology used herein is for the purpose of describing particular embodiments only, and is not intended to be limiting.

[0070] The articles “a” and “an” are used herein to refer to one or to more than one (i.e., to at least one) of the grammatical object of the article. By way of example, “an element” means one element or more than one element.

[0071] “About” as used herein when referring to a measurable value such as an amount, a temporal duration, and the like, is meant to encompass variations of 20% or 10%, more preferably 5%, even more preferably 1%, and still more preferably 0.1% from the specified value, as such variations are appropriate to perform the disclosed methods.

[0072] As used herein the term “amount” refers to the abundance or quantity of a constituent in a mixture.

[0073] As used herein, the term “bp” refers to base pair.

[0074] The term “complementary” refers to the degree of anti-parallel alignment between two nucleic acid strands. Complete complementarity requires that each nucleotide be across from its opposite. No complementarity requires that each nucleotide is not across from its opposite. The degree of complementarity determines the stability of the sequences to be together or anneal/hybridize. Furthermore various DNA repair functions as well as regulatory functions are based on base pair complementarity.

[0075] The term “CRISPR/Cas” or “clustered regularly interspaced short palindromic repeats” or “CRISPR” refers to DNA loci containing short repetitions of base sequences followed by short segments of spacer DNA from previous exposures to a virus or plasmid. Bacteria and archaea have evolved adaptive immune defenses termed CRISPR/CRISPR-associated (Cas) systems that use short RNA to direct degradation of foreign nucleic acids. In bacteria, the CRISPR system provides acquired immunity against invading foreign DNA via RNA-guided DNA cleavage. “crRNA” or “CRISPR targeting RNA” is the transcribed region of the unique “spacer” sequences found in CRISPRs. The cRNAs confer target specificity to the endonuclease, e.g. Cpf1.

[0076] The term “cleavage” refers to the breakage of covalent bonds, such as in the backbone of a nucleic acid molecule or the hydrolysis of peptide bonds. Cleavage can be initiated by a variety of methods, including, but not limited to, enzymatic or chemical hydrolysis of a phosphodiester bond. Both single-stranded cleavage and double-stranded cleavage are possible. Double-stranded cleavage can occur as a result of two distinct single-stranded cleavage events. DNA cleavage can result in the production of either blunt ends or staggered ends. In certain embodiments, fusion polypeptides can be used for targeting cleaved double-stranded DNA.

[0077] A “disease” is a state of health of an animal wherein the animal cannot maintain homeostasis, and wherein if the disease is not ameliorated then the animal's health continues to deteriorate. In contrast, a “disorder” in an animal is a state of health in which the animal is able to maintain homeostasis, but in which the animal's state of health is less favorable than it would be in the absence of the disorder. Left untreated, a disorder does not necessarily cause a further decrease in the animal's state of health.

[0078] “Effective amount” or “therapeutically effective amount” are used interchangeably herein, and refer to an amount of a compound, formulation, material, or composition, as described herein effective to achieve a particular biological result or provides a therapeutic or prophylactic benefit. Such results may include, but are not limited to, anti-tumor activity as determined by any means suitable in the art.

[0079] “Encoding” refers to the inherent property of specific sequences of nucleotides in a polynucleotide, such as a gene, a cDNA, or an mRNA, to serve as templates for synthesis of other polymers and macromolecules in biological processes having either a defined sequence of nucleotides (i.e., rRNA, tRNA and mRNA) or a defined sequence of amino acids and the biological properties resulting therefrom. Thus, a gene encodes a protein if transcription and translation of mRNA corresponding to that gene produces the protein in a cell or other biological system. Both the coding strand, the nucleotide sequence of which is identical to the mRNA sequence and is usually provided in sequence listings, and the non-coding strand, used as the template for transcription of a gene or cDNA, can be referred to as encoding the protein or other product of that gene or cDNA.

[0080] As used herein “endogenous” refers to any material from or produced inside an organism, cell, tissue or system.

[0081] The term “expression” as used herein is defined as the transcription and/or translation of a particular nucleotide sequence driven by its promoter.

[0082] “Expression vector” refers to a vector comprising a recombinant polynucleotide comprising expression control sequences operatively linked to a nucleotide sequence to be expressed. An expression vector comprises sufficient cis-acting elements for expression; other elements for expression can be supplied by the host cell or in an in vitro expression system. Expression vectors include all those known in the art, such as cosmids, plasmids (e.g., naked or contained in liposomes) and viruses (e.g., Sendai viruses, lentiviruses, retroviruses, adenoviruses, and adeno-associated viruses) that incorporate the recombinant polynucleotide.

[0083] “Homologous” as used herein, refers to the subunit sequence identity between two polymeric molecules, e.g., between two nucleic acid molecules, such as, two DNA molecules or two RNA molecules, or between two polypeptide molecules. When a subunit position in both of the two molecules is occupied by the same monomeric subunit; e.g., if a position in each of two DNA molecules is occupied by adenine, then they are homologous at that position. The homology between two sequences is a direct function of the number of matching or homologous positions; e.g., if half (e.g., five positions in a polymer ten subunits in length) of the positions in two sequences are homologous, the two sequences are 50% homologous; if 90% of the positions (e.g., 9 of 10), are matched or homologous, the two sequences are 90% homologous.

[0084] “Identity” as used herein refers to the subunit sequence identity between two polymeric molecules particularly between two amino acid molecules, such as, between two polypeptide molecules. When two amino acid sequences have the same residues at the same positions; e.g., if a position in each of two polypeptide molecules is occupied by an arginine, then they are identical at that position. The identity or extent to which two amino acid sequences have the same residues at the same positions in an alignment is often expressed as a percentage. The identity between two amino acid sequences is a direct function of the number of matching or identical positions; e.g., if half (e.g., five positions in a polymer ten amino acids in length) of the positions in two sequences are identical, the two sequences are 50% identical; if 90% of the positions (e.g., 9 of 10), are matched or identical, the two amino acids sequences are 90% identical.

[0085] As used herein, an “instructional material” includes a publication, a recording, a diagram, or any other medium of expression which can be used to communicate the usefulness of the compositions and methods of the invention. The instructional material of the kit of the invention may, for example, be affixed to a container which contains the nucleic acid, peptide, and/or composition of the invention or be shipped together with a container which contains the nucleic acid, peptide, and/or composition. Alternatively, the instructional material may be shipped separately from the container with the intention that the instructional material and the compound be used cooperatively by the recipient.

[0086] “Isolated” means altered or removed from the natural state. For example, a nucleic acid or a peptide naturally present in a living animal is not “isolated,” but the same nucleic acid or peptide partially or completely separated from the coexisting materials of its natural state is “isolated.” An isolated nucleic acid or protein can exist in substantially purified form, or can exist in a non-native environment such as, for example, a host cell.

[0087] The term “knockdown” as used herein refers to a decrease in gene expression of one or more genes. The term “knockout” as used herein refers to the ablation of gene expression of one or more genes.

[0088] A “lentivirus” as used herein refers to a genus of the Retroviridae family. Lentiviruses are unique among the retroviruses in being able to infect non-dividing cells; they can deliver a significant amount of genetic information into the DNA of the host cell, so they are one of the most efficient methods of a gene delivery vector. HIV, SIV, and FIV are all examples of lentiviruses. Vectors derived from lentiviruses offer the means to achieve significant levels of gene transfer in vivo.

[0089] By the term “modified” as used herein, is meant a changed state or structure of a molecule or cell of the invention. Molecules may be modified in many ways, including chemically, structurally, and functionally. Cells may be modified through the introduction of nucleic acids.

[0090] By the term “modulating,” as used herein, is meant mediating a detectable increase or decrease in the level of a response in a subject compared with the level of a response in the subject in the absence of a treatment or compound, and/or compared with the level of a response in an otherwise identical but untreated subject. The term encompasses perturbing and/or affecting a native signal or response thereby mediating a beneficial therapeutic response in a subject, preferably, a human.

[0091] A “mutation” as used herein is a change in a DNA sequence resulting in an alteration from a given reference sequence (which may be, for example, an earlier collected DNA sample from the same subject). The mutation can comprise deletion and/or insertion and/or duplication and/or substitution of at least one deoxyribonucleic acid base such as a purine (adenine and/or thymine) and/or a pyrimidine (guanine and/or cytosine). Mutations may or may not produce discernible changes in the observable characteristics (phenotype) of an organism (subject).

[0092] By “nucleic acid” is meant any nucleic acid, whether composed of deoxyribonucleosides or ribonucleosides, and whether composed of phosphodiester linkages or modified linkages such as phosphotriester, phosphoramidate, siloxane, carbonate, carboxymethylester, acetamidate, carbamate, thioether, bridged phosphoramidate, bridged methylene phosphonate, phosphorothioate, methylphosphonate, phosphorodithioate, bridged phosphorothioate or sulfone linkages, and combinations of such linkages. The term nucleic acid also specifically includes nucleic acids composed of bases other than the five biologically occurring bases (adenine, guanine, thymine, cytosine and uracil).

[0093] In the context of the present invention, the following abbreviations for the commonly occurring nucleic acid bases are used. “A” refers to adenosine, “C” refers to cytosine, “G” refers to guanosine, “T” refers to thymidine, and “U” refers to uridine.

[0094] Unless otherwise specified, a “nucleotide sequence encoding an amino acid sequence” includes all nucleotide sequences that are degenerate versions of each other and that encode the same amino acid sequence. The phrase nucleotide sequence that encodes a protein or an RNA may also include introns to the extent that the nucleotide sequence encoding the protein may in some version contain an intron(s).

[0095] The term “oligonucleotide” typically refers to short polynucleotides, generally no greater than about 60 nucleotides. It will be understood that when a nucleotide sequence is represented by a DNA sequence (i.e., A, T, G, C), this also includes an RNA sequence (i.e., A, U, G, C) in which “U” replaces “T”.

[0096] “Parenteral” administration of an immunogenic composition includes, e.g., subcutaneous (s.c.), intravenous (i.v.), intramuscular (i.m.), or intrasternal injection, or infusion techniques.

[0097] The term “polynucleotide” as used herein is defined as a chain of nucleotides.

[0098] Furthermore, nucleic acids are polymers of nucleotides. Thus, nucleic acids and polynucleotides as used herein are interchangeable. One skilled in the art has the general knowledge that nucleic acids are polynucleotides, which can be hydrolyzed into the monomeric “nucleotides.” The monomeric nucleotides can be hydrolyzed into nucleosides. As used herein polynucleotides include, but are not limited to, all nucleic acid sequences which are obtained by any means available in the art, including, without limitation, recombinant means, i.e., the cloning of nucleic acid sequences from a recombinant library or a cell genome, using ordinary cloning technology and PCR™, and the like, and by synthetic means. Conventional notation is used herein to describe polynucleotide sequences: the left-hand end of a single-stranded polynucleotide sequence is the 5′-end; the left-hand direction of a double-stranded polynucleotide sequence is referred to as the 5′-direction.

[0099] As used herein, the terms “peptide,” “polypeptide,” and “protein” are used interchangeably, and refer to a compound comprised of amino acid residues covalently linked by peptide bonds. A protein or peptide must contain at least two amino acids, and no limitation is placed on the maximum number of amino acids that can comprise a protein's or peptide's sequence. Polypeptides include any peptide or protein comprising two or more amino acids joined to each other by peptide bonds. As used herein, the term refers to both short chains, which also commonly are referred to in the art as peptides, oligopeptides and oligomers, for example, and to longer chains, which generally are referred to in the art as proteins, of which there are many types. “Polypeptides” include, for example, biologically active fragments, substantially homologous polypeptides, oligopeptides, homodimers, heterodimers, variants of polypeptides, modified polypeptides, derivatives, analogs, fusion proteins, among others. The polypeptides include natural peptides, recombinant peptides, synthetic peptides, or a combination thereof.

[0100] The term “promoter” as used herein is defined as a DNA sequence recognized by the synthetic machinery of the cell, or introduced synthetic machinery, required to initiate the specific transcription of a polynucleotide sequence.

[0101] A “sample” or “biological sample” as used herein means a biological material from a subject, including but is not limited to organ, tissue, exosome, blood, plasma, saliva, urine and other body fluid. A sample can be any source of material obtained from a subject.

[0102] As used herein, the terms “sequencing” or “nucleotide sequencing” refer to determining the order of nucleotides (base sequences) in a nucleic acid sample, e.g. DNA or RNA. Many techniques are available such as Sanger sequencing and high-throughput sequencing technologies (also known as next-generation sequencing technologies) such as Illumina's HiSeq and MiSeq platforms or the GS FLX platform offered by Roche Applied Science.

[0103] The term “subject” is intended to include living organisms in which an immune response can be elicited (e.g., mammals). A “subject” or “patient,” as used therein, may be a human or non-human mammal. Non-human mammals include, for example, livestock and pets, such as ovine, bovine, porcine, canine, feline and murine mammals. Preferably, the subject is human.

[0104] A “target site” or “target sequence” refers to a genomic nucleic acid sequence that defines a portion of a nucleic acid to which a binding molecule may specifically bind under conditions sufficient for binding to occur.

[0105] The term “therapeutic” as used herein means a treatment and/or prophylaxis. A therapeutic effect is obtained by suppression, remission, or eradication of a disease state.

[0106] The term “transfected” or “transformed” or “transduced” as used herein refers to a process by which exogenous nucleic acid is transferred or introduced into the host cell. A “transfected” or “transformed” or “transduced” cell is one that has been transfected, transformed or transduced with exogenous nucleic acid. The cell includes the primary subject cell and its progeny.

[0107] To “treat” a disease as the term is used herein, means to reduce the frequency or severity of at least one sign or symptom of a disease or disorder experienced by a subject.

[0108] A “vector” is a composition of matter which comprises an isolated nucleic acid and which can be used to deliver the isolated nucleic acid to the interior of a cell. Numerous vectors are known in the art including, but not limited to, linear polynucleotides, polynucleotides associated with ionic or amphiphilic compounds, plasmids, and viruses. Thus, the term “vector” includes an autonomously replicating plasmid or a virus. The term should also be construed to include non-plasmid and non-viral compounds which facilitate transfer of nucleic acid into cells, such as, for example, polylysine compounds, liposomes, and the like. Examples of viral vectors include, but are not limited to, Sendai viral vectors, adenoviral vectors, adeno-associated virus vectors, retroviral vectors, lentiviral vectors, and the like.

[0109] Ranges: throughout this disclosure, various aspects of the invention can be presented in a range format. It should be understood that the description in range format is merely for convenience and brevity and should not be construed as an inflexible limitation on the scope of the invention. Accordingly, the description of a range should be considered to have specifically disclosed all the possible subranges as well as individual numerical values within that range. For example, description of a range such as from 1 to 6 should be considered to have specifically disclosed subranges such as from 1 to 3, from 1 to 4, from 1 to 5, from 2 to 4, from 2 to 6, from 3 to 6 etc., as well as individual numbers within that range, for example, 1, 2, 2.7, 3, 4, 5, 5.3, and 6. This applies regardless of the breadth of the range.

### Description

[0110] The present invention provides, in one aspect, compositions and methods for simultaneously mutagenizing multiple target sequences in a cell. In certain aspects, the invention provides compositions and methods for sequentially mutagenizing multiple target sequences in a cell. In other aspects, the invention provides methods for identifying synergistic drivers of transformation and/or tumorigenesis and/or metastasis. In other aspects, the invention provides in vivo methods for identifying and mapping genetic interactions.

### Compositions

[0111] Certain aspects of the invention include lentiviral vectors for use in genome editing. In one aspect, the invention includes a vector comprising a first long terminal repeat (LTR) sequence, an Embryonal Fyn-Associated Substrate (EFS) sequence, a Cpf1 sequence, a Nuclear Localization Signal (NLS) sequence, a Flag2A sequence, an antibiotic resistance sequence, and a second LTR sequence (pLenti-EFS-Cpf1-blast vector, LentiCpf1 for short). The Cpf1 enzyme can be derived from any genera of microbes including but not limited to Parcubacteria, Lachnospiraceae, Butyrivibrio, Peregrinibacteria, Acidaminococcus, Porphyromonas, Lachnospiraceae, Porphromonas, Prevotella, Moraxela, Smithella, Leptospira, Lachnospiraceae, Francisella, Candidatus, and Eubacterium. In certain embodiments, Cpf1 is derived from a species from the Lachnospiraceae genus (LbCpf1). In some embodiments, the Cpf1 sequence comprises a humanized form of a Lachnospiraceae bacterium Cpf1 (LbCpf1). In one embodiment, the antibiotic resistance sequence is a blasticidin resistance sequence. In one embodiment, the vector comprises SEQ ID NO: 1 (FIGS. 17A-17C).

```
pLenti-EFS-Cpf1-blast vector (SEQ ID NO: 1):
        1 gtcgacggat cgggagatct cccgatcccc tatggtgcac tctcagtaca atctgctctg
      61 atgccgcata gttaagccag tatctgctcc ctgcttgtgt gttggaggtc gctgagtagt
    121 gcgcgagcaa aatttaagct acaacaaggc aaggcttgac cgacaattgc atgaagaatc
    181 tgcttagggt taggcgtttt gcgctgcttc gcgatgtacg ggccagatat acgcgttgac
    241 attgattatt gactagttat taatagtaat caattacggg gtcattagtt catagcccat
    301 atatggagtt ccgcgttaca taacttacgg taaatggccc gcctggctga ccgcccaacg
    361 acccccgccc attgacgtca ataatgacgt atgttcccat agtaacgcca atagggactt
    421 tccattgacg tcaatgggtg gagtatttac ggtaaactgc ccacttggca gtacatcaag
    481 tgtatcatat gccaagtacg ccccctattg acgtcaatga cggtaaatgg cccgcctggc
    541 attatgccca gtacatgacc ttatgggact ttcctacttg gcagtacatc tacgtattag
    601 tcatcgctat taccatggtg atgcggtttt ggcagtacat caatgggcgt ggatagcggt
    661 ttgactcacg gggatttcca agtctccacc ccattgacgt caatgggagt ttgttttggc
    721 accaaaatca acgggacttt ccaaaatgtc gtaacaactc cgccccattg acgcaaatgg
    781 gcggtaggcg tgtacggtgg gaggtctata taagcagcgc gttttgcctg tactgggtct
    841 ctctggttag accagatctg agcctgggag ctctctggct aactagggaa cccactgctt
    901 aagcctcaat aaagcttgcc ttgagtgctt caagtagtgt gtgcccgtct gttgtgtgac
    961 tctggtaact agagatccct cagacccttt tagtcagtgt ggaaaatctc tagcagtggc
  1021 gcccgaacag ggacttgaaa gcgaaaggga aaccagagga gctctctcga cgcaggactc
  1081 ggcttgctga agcgcgcacg gcaagaggcg aggggcggcg actggtgagt acgccaaaaa
  1141 ttttgactag cggaggctag aaggagagag atgggtgcga gagcgtcagt attaagcggg
  1201 ggagaattag atcgcgatgg gaaaaaattc ggttaaggcc agggggaaag aaaaaatata
  1261 aattaaaaca tatagtatgg gcaagcaggg agctagaacg attcgcagtt aatcctggcc
  1321 tgttagaaac atcagaaggc tgtagacaaa tactgggaca gctacaacca tcccttcaga
  1381 caggatcaga agaacttaga tcattatata atacagtagc aaccctctat tgtgtgcatc
  1441 aaaggataga gataaaagac accaaggaag ctttagacaa gatagaggaa gagcaaaaca
  1501 aaagtaagac caccgcacag caagcggccg ctgatcttca gacctggagg aggagatatg
  1561 agggacaatt ggagaagtga attatataaa tataaagtag taaaaattga accattagga
  1621 gtagcaccca ccaaggcaaa gagaagagtg gtgcagagag aaaaaagagc agtgggaata
  1681 ggagctttgt tccttgggtt cttgggagca gcaggaagca ctatgggcgc agcgtcaatg
  1741 acgctgacgg tacaggccag acaattattg tctggtatag tgcagcagca gaacaatttg
  1801 ctgagggcta ttgaggcgca acagcatctg ttgcaactca cagtctgggg catcaagcag
  1861 ctccaggcaa gaatcctggc tgtggaaaga tacctaaagg atcaacagct cctggggatt
  1921 tggggttgct ctggaaaact catttgcacc actgctgtgc cttggaatgc tagttggagt
  1981 aataaatctc tggaacagat ttggaatcac acgacctgga tggagtggga cagagaaatt
  2041 aacaattaca caagcttaat acactcctta attgaagaat cgcaaaacca gcaagaaaag
  2101 aatgaacaag aattattgga attagataaa tgggcaagtt tgtggaattg gtttaacata
  2161 acaaattggc tgtggtatat aaaattattc ataatgatag taggaggctt ggtaggttta
  2221 agaatagttt ttgctgtact ttctatagtg aatagagtta ggcagggata ttcaccatta
  2281 tcgtttcaga cccacctccc aaccccgagg ggacccgaca ggcccgaagg aatagaagaa
  2341 gaaggtggag agagagacag agacagatcc attcgattag tgaacggatc ggcactgcgt
  2401 gcgccaattc tgcagacaaa tggcagtatt catccacaat tttaaaagaa aaggggggat
  2461 tggggggtac agtgcagggg aaagaatagt agacataata gcaacagaca tacaaactaa
  2521 agaattacaa aaacaaatta caaaaattca aaattttcgg gtttattaca gggacagcag
  2581 agatccagtt tggttaatta aTCGAGTGGC TCCGGTGCCC GTCAGTGGGC AGAGCGCACA
  2641 TCGCCCACAG TCCCCGAGAA GTTGGGGGGA GGGGTCGGCA ATTGAACCGG TGCCTAGAGA
  2701 AGGTGGCGCG GGGTAAACTG GGAAAGTGAT GTCGTGTACT GGCTCCGCCT TTTTCCCGAG
  2761 GGTGGGGGAG AACCGTATAT AAGTGCAGTA GTCGCCGTGA ACGTTCTTTT TCGCAACGGG
  2821 TTTGCCGCCA GAACACAGGT GTCGTGACGC GGGATCCATG AGCAAGCTGG AGAAGTTTAC
  2881 AAACTGCTAC TCCCTGTCTA AGACCCTGAG GTTCAAGGCC ATCCCTGTGG GCAAGACCCA
  2941 GGAGAACATC GACAATAAGC GGCTGCTGGT GGAGGACGAG AAGAGAGCCG AGGATTATAA
  3001 GGGCGTGAAG AAGCTGCTGG ATCGCTACTA TCTGTCTTTT ATCAACGACG TGCTGCACAG
  3061 CATCAAGCTG AAGAATCTGA ACAATTACAT CAGCCTGTTC CGGAAGAAAA CCAGAACCGA
  3121 GAAGGAGAAT AAGGAGCTGG AGAACCTGGA GATCAATCTG CGGAAGGAGA TCGCCAAGGC
  3181 CTTCAAGGGC AACGAGGGCT ACAAGTCCCT GTTTAAGAAG GATATCATCG AGACAATCCT
  3241 GCCAGAGTTC CTGGACGATA AGGACGAGAT CGCCCTGGTG AACAGCTTCA ATGGCTTTAC
  3301 CACAGCCTTC ACCGGCTTCT TTGATAACAG AGAGAATATG TTTTCCGAGG AGGCCAAGAG
  3361 CACATCCATC GCCTTCAGGT GTATCAACGA GAATCTGACC CGCTACATCT CTAATATGGA
  3421 CATCTTCGAG AAGGTGGACG CCATCTTTGA TAAGCACGAG GTGCAGGAGA TCAAGGAGAA
  3481 GATCCTGAAC AGCGACTATG ATGTGGAGGA TTTCTTTGAG GGCGAGTTCT TTAACTTTGT
  3541 GCTGACACAG GAGGGCATCG ACGTGTATAA CGCCATCATC GGCGGCTTCG TGACCGAGAG
  3601 CGGCGAGAAG ATCAAGGGCC TGAACGAGTA CATCAACCTG TATAATCAGA AAACCAAGCA
  3661 GAAGCTGCCT AAGTTTAAGC CACTGTATAA GCAGGTGCTG AGCGATCGGG AGTCTCTGAG
  3721 CTTCTACGGC GAGGGCTATA CATCCGATGA GGAGGTGCTG GAGGTGTTTA GAAACACCCT
  3781 GAACAAGAAC AGCGAGATCT TCAGCTCCAT CAAGAAGCTG GAGAAGCTGT TCAAGAATTT
  3841 TGACGAGTAC TCTAGCGCCG GCATCTTTGT GAAGAACGGC CCCGCCATCA GCACAATCTC
  3901 CAAGGATATC TTCGGCGAGT GGAACGTGAT CCGGGACAAG TGGAATGCCG AGTATGACGA
  3961 TATCCACCTG AAGAAGAAGG CCGTGGTGAC CGAGAAGTAC GAGGACGATC GGAGAAAGTC
  4021 CTTCAAGAAG ATCGGCTCCT TTTCTCTGGA GCAGCTGCAG GAGTACGCCG ACGCCGATCT
  4081 GTCTGTGGTG GAGAAGCTGA AGGAGATCAT CATCCAGAAG GTGGATGAGA TCTACAAGGT
  4141 GTATGGCTCC TCTGAGAAGC TGTTCGACGC CGATTTTGTG CTGGAGAAGA GCCTGAAGAA
  4201 GAACGACGCC GTGGTGGCCA TCATGAAGGA CCTGCTGGAT TCTGTGAAGA GCTTCGAGAA
  4261 TTACATCAAG GCCTTCTTTG GCGAGGGCAA GGAGACAAAC AGGGACGAGT CCTTCTATGG
  4321 CGATTTTGTG CTGGCCTACG ACATCCTGCT GAAGGTGGAC CACATCTACG ATGCCATCCG
  4381 CAATTATGTG ACCCAGAAGC CCTACTCTAA GGATAAGTTC AAGCTGTATT TTCAGAACCC
  4441 TCAGTTCATG GGCGGCTGGG ACAAGGATAA GGAGACAGAC TATCGGGCCA CCATCCTGAG
  4501 ATACGGCTCC AAGTACTATC TGGCCATCAT GGATAAGAAG TACGCCAAGT GCCTGCAGAA
  4561 GATCGACAAG GACGATGTGA ACGGCAATTA CGAGAAGATC AACTATAAGC TGCTGCCCGG
  4621 CCCTAATAAG ATGCTGCCAA AGGTGTTCTT TTCTAAGAAG TGGATGGCCT ACTATAACCC
  4681 CAGCGAGGAC ATCCAGAAGA TCTACAAGAA TGGCACATTC AAGAAGGGCG ATATGTTTAA
  4741 CCTGAATGAC TGTCACAAGC TGATCGACTT CTTTAAGGAT AGCATCTCCC GGTATCCAAA
  4801 GTGGTCCAAT GCCTACGATT TCAACTTTTC TGAGACAGAG AAGTATAAGG ACATCGCCGG
  4861 CTTTTACAGA GAGGTGGAGG AGCAGGGCTA TAAGGTGAGC TTCGAGTCTG CCAGCAAGAA
  4921 GGAGGTGGAT AAGCTGGTGG AGGAGGGCAA GCTGTATATG TTCCAGATCT ATAACAAGGA
  4981 CTTTTCCGAT AAGTCTCACG GCACACCCAA TCTGCACACC ATGTACTTCA AGCTGCTGTT
  5041 TGACGAGAAC AATCACGGAC AGATCAGGCT GAGCGGAGGA GCAGAGCTGT TCATGAGGCG
  5101 CGCCTCCCTG AAGAAGGAGG AGCTGGTGGT GCACCCAGCC AACTCCCCTA TCGCCAACAA
  5161 GAATCCAGAT AATCCCAAGA AAACCACAAC CCTGTCCTAC GACGTGTATA AGGATAAGAG
  5221 GTTTTCTGAG GACCAGTACG AGCTGCACAT CCCAATCGCC ATCAATAAGT GCCCCAAGAA
  5281 CATCTTCAAG ATCAATACAG AGGTGCGCGT GCTGCTGAAG CACGACGATA ACCCCTATGT
  5341 GATCGGCATC GATAGGGGCG AGCGCAATCT GCTGTATATC GTGGTGGTGG ACGGCAAGGG
  5401 CAACATCGTG GAGCAGTATT CCCTGAACGA GATCATCAAC AACTTCAACG GCATCAGGAT
  5461 CAAGACAGAT TACCACTCTC TGCTGGACAA GAAGGAGAAG GAGAGGTTCG AGGCCCGCCA
  5521 GAACTGGACC TCCATCGAGA ATATCAAGGA GCTGAAGGCC GGCTATATCT CTCAGGTGGT
  5581 GCACAAGATC TGCGAGCTGG TGGAGAAGTA CGATGCCGTG ATCGCCCTGG AGGACCTGAA
  5641 CTCTGGCTTT AAGAATAGCC GCGTGAAGGT GGAGAAGCAG GTGTATCAGA AGTTCGAGAA
  5701 GATGCTGATC GATAAGCTGA ACTACATGGT GGACAAGAAG TCTAATCCTT GTGCAACAGG
  5761 CGGCGCCCTG AAGGGCTATC AGATCACCAA TAAGTTCGAG AGCTTTAAGT CCATGTCTAC
  5821 CCAGAACGGC TTCATCTTTT ACATCCCTGC CTGGCTGACA TCCAAGATCG ATCCATCTAC
  5881 CGGCTTTGTG AACCTGCTGA AAACCAAGTA TACCAGCATC GCCGATTCCA AGAAGTTCAT
  5941 CAGCTCCTTT GACAGGATCA TGTACGTGCC CGAGGAGGAT CTGTTCGAGT TTGCCCTGGA
  6001 CTATAAGAAC TTCTCTCGCA CAGACGCCGA TTACATCAAG AAGTGGAAGC TGTACTCCTA
  6061 CGGCAACCGG ATCAGAATCT TCCGGAATCC TAAGAAGAAC AACGTGTTCG ACTGGGAGGA
  6121 GGTGTGCCTG ACCAGCGCCT ATAAGGAGCT GTTCAACAAG TACGGCATCA ATTATCAGCA
  6181 GGGCGATATC AGAGCCCTGC TGTGCGAGCA GTCCGACAAG GCCTTCTACT CTAGCTTTAT
  6241 GGCCCTGATG AGCCTGATGC TGCAGATGCG GAACAGCATC ACAGGCCGCA CCGACGTGGA
  6301 TTTTCTGATC AGCCCTGTGA AGAACTCCGA CGGCATCTTC TACGATAGCC GGAACTATGA
  6361 GGCCCAGGAG AATGCCATCC TGCCAAAGAA CGCCGACGCC AATGGCGCCT ATAACATCGC
  6421 CAGAAAGGTG CTGTGGGCCA TCGGCCAGTT CAAGAAGGCC GAGGACGAGA AGCTGGATAA
  6481 GGTGAAGATC GCCATCTCTA ACAAGGAGTG GCTGGAGTAC GCCCAGACCA GCGTGAAGCA
  6541 CAAAAGGCCG GCGGCCACGA AAAAGGCCGG CCAGGCAAAA AAGAAAAAGG ATTACAAAGA
  6601 CGATGACGAT AAGGGCAGCG GCGCCACCAA CTTCAGCCTG CTGAAGCAGG CCGGCGACGT
  6661 GGAGGAGAAC CCCGGCCCCa tggccaagcc tttgtctcaa gaagaatcca ccctcattga
  6721 aagagcaacg gctacaatca acagcatccc catctctgaa gactacagcg tcgccagcgc
  6781 agctctctct agcgacggcc gcatcttcac tggtgtcaat gtatatcatt ttactggggg
  6841 accttgtgca gaactcgtgg tgctgggcac tgctgctgct gcggcagctg gcaacctgac
  6901 ttgtatcgtc gcgatcggaa atgagaacag gggcatcttg agcccctgcg gacggtgccg
  6961 acaggtgctt ctcgatctgc atcctgggat caaagccata gtgaaggaca gtgatggaca
  7021 gccgacggca gttgggattc gtgaattgct gccctctggt tatgtgtggg agggctaaga
  7081 attcgatatc aagcttatcg ataatcaacc tctggattac aaaatttgtg aaagattgac
  7141 tggtattctt aactatgttg ctccttttac gctatgtgga tacgctgctt taatgccttt
  7201 gtatcatgct attgcttccc gtatggcttt cattttctcc tccttgtata aatcctggtt
  7261 gctgtctctt tatgaggagt tgtggcccgt tgtcaggcaa cgtggcgtgg tgtgcactgt
  7321 gtttgctgac gcaaccccca ctggttgggg cattgccacc acctgtcagc tcctttccgg
  7381 gactttcgct ttccccctcc ctattgccac ggcggaactc atcgccgcct gccttgcccg
  7441 ctgctggaca ggggctcggc tgttgggcac tgacaattcc gtggtgttgt cggggaaatc
  7501 atcgtccttt ccttggctgc tcgcctgtgt tgccacctgg attctgcgcg ggacgtcctt
  7561 ctgctacgtc ccttcggccc tcaatccagc ggaccttcct tcccgcggcc tgctgccggc
  7621 tctgcggcct cttccgcgtc ttcgccttcg ccctcagacg agtcggatct ccctttgggc
  7681 cgcctccccg catcgatacc gtcgacctcg agacctagaa aaacatggag caatcacaag
  7741 tagcaataca gcagctacca atgctgattg tgcctggcta gaagcacaag aggaggagga
  7801 ggtgggtttt ccagtcacac ctcaggtacc tttaagacca atgacttaca aggcagctgt
  7861 agatcttagc cactttttaa aagaaaaggg gggactggaa gggctaattc actcccaacg
  7921 aagacaagat atccttgatc tgtggatcta ccacacacaa ggctacttcc ctgattggca
  7981 gaactacaca ccagggccag ggatcagata tccactgacc tttggatggt gctacaagct
  8041 agtaccagtt gagcaagaga aggtagaaga agccaatgaa ggagagaaca cccgcttgtt
  8101 acaccctgtg agcctgcatg ggatggatga cccggagaga gaagtattag agtggaggtt
  8161 tgacagccgc ctagcatttc atcacatggc ccgagagctg catccggact gtactgggtc
  8221 tctctggtta gaccagatct gagcctggga gctctctggc taactaggga acccactgct
  8281 taagcctcaa taaagcttgc cttgagtgct tcaagtagtg tgtgcccgtc tgttgtgtga
  8341 ctctggtaac tagagatccc tcagaccctt ttagtcagtg tggaaaatct ctagcagggc
  8401 ccgtttaaac ccgctgatca gcctcgactg tgccttctag ttgccagcca tctgttgttt
  8461 gcccctcccc cgtgccttcc ttgaccctgg aaggtgccac tcccactgtc ctttcctaat
  8521 aaaatgagga aattgcatcg cattgtctga gtaggtgtca ttctattctg gggggtgggg
  8581 tggggcagga cagcaagggg gaggattggg aagacaatag caggcatgct ggggatgcgg
  8641 tgggctctat ggcttctgag gcggaaagaa ccagctgggg ctctaggggg tatccccacg
  8701 cgccctgtag cggcgcatta agcgcggcgg gtgtggtggt tacgcgcagc gtgaccgcta
  8761 cacttgccag cgccctagcg cccgctcctt tcgctttctt cccttccttt ctcgccacgt
  8821 tcgccggctt tccccgtcaa gctctaaatc gggggctccc tttagggttc cgatttagtg
  8881 ctttacggca cctcgacccc aaaaaacttg attagggtga tggttcacgt agtgggccat
  8941 cgccctgata gacggttttt cgccctttga cgttggagtc cacgttcttt aatagtggac
  9001 tcttgttcca aactggaaca acactcaacc ctatctcggt ctattctttt gatttataag
  9061 ggattttgcc gatttcggcc tattggttaa aaaatgagct gatttaacaa aaatttaacg
  9121 cgaattaatt ctgtggaatg tgtgtcagtt agggtgtgga aagtccccag gctccccagc
  9181 aggcagaagt atgcaaagca tgcatctcaa ttagtcagca accaggtgtg gaaagtcccc
  9241 aggctcccca gcaggcagaa gtatgcaaag catgcatctc aattagtcag caaccatagt
  9301 cccgccccta actccgccca tcccgcccct aactccgccc agttccgccc attctccgcc
  9361 ccatggctga ctaatttttt ttatttatgc agaggccgag gccgcctctg cctctgagct
  9421 attccagaag tagtgaggag gcttttttgg aggcctaggc ttttgcaaaa agctcccggg
  9481 agcttgtata tccattttcg gatctgatca gcacgtgttg acaattaatc atcggcatag
  9541 tatatcggca tagtataata cgacaaggtg aggaactaaa ccatggccaa gttgaccagt
  9601 gccgttccgg tgctcaccgc gcgcgacgtc gccggagcgg tcgagttctg gaccgaccgg
  9661 ctcgggttct cccgggactt cgtggaggac gacttcgccg gtgtggtccg ggacgacgtg
  9721 accctgttca tcagcgcggt ccaggaccag gtggtgccgg acaacaccct ggcctgggtg
  9781 tgggtgcgcg gcctggacga gctgtacgcc gagtggtcgg aggtcgtgtc cacgaacttc
  9841 cgggacgcct ccgggccggc catgaccgag atcggcgagc agccgtgggg gcgggagttc
  9901 gccctgcgcg acccggccgg caactgcgtg cacttcgtgg ccgaggagca ggactgacac
  9961 gtgctacgag atttcgattc caccgccgcc ttctatgaaa ggttgggctt cggaatcgtt
10021 ttccgggacg ccggctggat gatcctccag cgcggggatc tcatgctgga gttcttcgcc
10081 caccccaact tgtttattgc agcttataat ggttacaaat aaagcaatag catcacaaat
10141 ttcacaaata aagcattttt ttcactgcat tctagttgtg gtttgtccaa actcatcaat
10201 gtatcttatc atgtctgtat accgtcgacc tctagctaga gcttggcgta atcatggtca
10261 tagctgtttc ctgtgtgaaa ttgttatccg ctcacaattc cacacaacat acgagccgga
10321 agcataaagt gtaaagcctg gggtgcctaa tgagtgagct aactcacatt aattgcgttg
10381 cgctcactgc ccgctttcca gtcgggaaac ctgtcgtgcc agctgcatta atgaatcggc
10441 caacgcgcgg ggagaggcgg tttgcgtatt gggcgctctt ccgcttcctc gctcactgac
10501 tcgctgcgct cggtcgttcg gctgcggcga gcggtatcag ctcactcaaa ggcggtaata
10561 cggttatcca cagaatcagg ggataacgca ggaaagaaca tgtgagcaaa aggccagcaa
10621 aaggccagga accgtaaaaa ggccgcgttg ctggcgtttt tccataggct ccgcccccct
10681 gacgagcatc acaaaaatcg acgctcaagt cagaggtggc gaaacccgac aggactataa
10741 agataccagg cgtttccccc tggaagctcc ctcgtgcgct ctcctgttcc gaccctgccg
10801 cttaccggat acctgtccgc ctttctccct tcgggaagcg tggcgctttc tcatagctca
10861 cgctgtaggt atctcagttc ggtgtaggtc gttcgctcca agctgggctg tgtgcacgaa
10921 ccccccgttc agcccgaccg ctgcgcctta tccggtaact atcgtcttga gtccaacccg
10981 gtaagacacg acttatcgcc actggcagca gccactggta acaggattag cagagcgagg
11041 tatgtaggcg gtgctacaga gttcttgaag tggtggccta actacggcta cactagaaga
11101 acagtatttg gtatctgcgc tctgctgaag ccagttacct tcggaaaaag agttggtagc
11161 tcttgatccg gcaaacaaac caccgctggt agcggtggtt tttttgtttg caagcagcag
11221 attacgcgca gaaaaaaagg atctcaagaa gatcctttga tcttttctac ggggtctgac
11281 gctcagtgga acgaaaactc acgttaaggg attttggtca tgagattatc aaaaaggatc
11341 ttcacctaga tccttttaaa ttaaaaatga agttttaaat caatctaaag tatatatgag
11401 taaacttggt ctgacagtta ccaatgctta atcagtgagg cacctatctc agcgatctgt
11461 ctatttcgtt catccatagt tgcctgactc cccgtcgtgt agataactac gatacgggag
11521 ggcttaccat ctggccccag tgctgcaatg ataccgcgag acccacgctc accggctcca
11581 gatttatcag caataaacca gccagccgga agggccgagc gcagaagtgg tcctgcaact
11641 ttatccgcct ccatccagtc tattaattgt tgccgggaag ctagagtaag tagttcgcca
11701 gttaatagtt tgcgcaacgt tgttgccatt gctacaggca tcgtggtgtc acgctcgtcg
11761 tttggtatgg cttcattcag ctccggttcc caacgatcaa ggcgagttac atgatccccc
11821 atgttgtgca aaaaagcggt tagctccttc ggtcctccga tcgttgtcag aagtaagttg
11881 gccgcagtgt tatcactcat ggttatggca gcactgcata attctcttac tgtcatgcca
11941 tccgtaagat gcttttctgt gactggtgag tactcaacca agtcattctg agaatagtgt
12001 atgcggcgac cgagttgctc ttgcccggcg tcaatacggg ataataccgc gccacatagc
12061 agaactttaa aagtgctcat cattggaaaa cgttcttcgg ggcgaaaact ctcaaggatc
12121 ttaccgctgt tgagatccag ttcgatgtaa cccactcgtg cacccaactg atcttcagca
12181 tcttttactt tcaccagcgt ttctgggtga gcaaaaacag gaaggcaaaa tgccgcaaaa
12241 aagggaataa gggcgacacg gaaatgttga atactcatac tcttcctttt tcaatattat
12301 tgaagcattt atcagggtta ttgtctcatg agcggataca tatttgaatg tatttagaaa
12361 aataaacaaa taggggttcc gcgcacattt ccccgaaaag tgccacctga c
```

[0112] In another aspect, the invention includes a vector comprising a first long terminal repeat (LTR) sequence, a U6 sequence, a direct repeat sequence of Cpf1, a first restriction site, a second restriction site, an EFS sequence, an antibiotic resistance sequence, a Woodchuck Hepatitis Virus 50 (WHP) Posttranscriptional Regulatory Element (WPRE) sequence, and a second LTR sequence (pLenti-U6-DR-crRNA-puro vector, Lenti-U6-crRNA for short). In certain embodiments, the first and/or second restriction site is a BsmBI restriction site. In one embodiment, the antibiotic resistance sequence is a puromycin resistance sequence. In one aspect, the vector comprises SEQ ID NO: 2 (FIGS. 18A-18B). In another aspect, the invention includes a vector optimized for primary cells (pSCO20_pLKO_U6-Cpf1crRNA-EFS-Thy11CO-sPA) (SEQ ID NO: 3) (FIGS. 19A-19EB).

```
pLenti-U6-DR-crRNA-puro vector (SEQ ID NO: 2):
      1 ttaatgtagt cttatgcaat actcttgtag tcttgcaaca tggtaacgat gagttagcaa
    61 catgccttac aaggagagaa aaagcaccgt gcatgccgat tggtggaagt aaggtggtac
  121 gatcgtgcct tattaggaag gcaacagacg ggtctgacat ggattggacg aaccactgaa
  181 ttgccgcatt gcagagatat tgtatttaag tgcctagctc gatacataaa cgggtctctc
  241 tggttagacc agatctgagc ctgggagctc tctggctaac tagggaaccc actgcttaag
  301 cctcaataaa gcttgccttg agtgcttcaa gtagtgtgtg cccgtctgtt gtgtgactct
  361 ggtaactaga gatccctcag acccttttag tcagtgtgga aaatctctag cagtggcgcc
  421 cgaacaggga cttgaaagcg aaagggaaac cagaggagct ctctcgacgc aggactcggc
  481 ttgctgaagc gcgcacggca agaggcgagg ggcggcgact ggtgagtacg ccaaaaattt
  541 tgactagcgg aggctagaag gagagagatg ggtgcgagag cgtcagtatt aagcggggga
  601 gaattagatc gcgatgggaa aaaattcggt taaggccagg gggaaagaaa aaatataaat
  661 taaaacatat agtatgggca agcagggagc tagaacgatt cgcagttaat cctggcctgt
  721 tagaaacatc agaaggctgt agacaaatac tgggacagct acaaccatcc cttcagacag
  781 gatcagaaga acttagatca ttatataata cagtagcaac cctctattgt gtgcatcaaa
  841 ggatagagat aaaagacacc aaggaagctt tagacaagat agaggaagag caaaacaaaa
  901 gtaagaccac cgcacagcaa gcggccgctg atcttcagac ctggaggagg agatatgagg
  961 gacaattgga gaagtgaatt atataaatat aaagtagtaa aaattgaacc attaggagta
1021 gcacccacca aggcaaagag aagagtggtg cagagagaaa aaagagcagt gggaatagga
1081 gctttgttcc ttgggttctt gggagcagca ggaagcacta tgggcgcagc gtcaatgacg
1141 ctgacggtac aggccagaca attattgtct ggtatagtgc agcagcagaa caatttgctg
1201 agggctattg aggcgcaaca gcatctgttg caactcacag tctggggcat caagcagctc
1261 caggcaagaa tcctggctgt ggaaagatac ctaaaggatc aacagctcct ggggatttgg
1321 ggttgctctg gaaaactcat ttgcaccact gctgtgcctt ggaatgctag ttggagtaat
1381 aaatctctgg aacagatttg gaatcacacg acctggatgg agtgggacag agaaattaac
1441 aattacacaa gcttaataca ctccttaatt gaagaatcgc aaaaccagca agaaaagaat
1501 gaacaagaat tattggaatt agataaatgg gcaagtttgt ggaattggtt taacataaca
1561 aattggctgt ggtatataaa attattcata atgatagtag gaggcttggt aggtttaaga
1621 atagtttttg ctgtactttc tatagtgaat agagttaggc agggatattc accattatcg
1681 tttcagaccc acctcccaac cccgagggga cccagagagg gcctatttcc catgattcct
1741 tcatatttgc atatacgata caaggctgtt agagagataa ttagaattaa tttgactgta
1801 aacacaaaga tattagtaca aaatacgtga cgtagaaagt aataatttct tgggtagttt
1861 gcagttttaa aattatgttt taaaatggac tatcatatgc ttaccgtaac ttgaaagtat
1921 ttcgatttct tggctttata tatcttGTGG AAAGGACGAA ACACCgTAAT TTCTACTAAG
1981 TGTAGATGAG ACGgaCGTCT Caagcttggc gtGGATCCGA TATCaactag atcttgagac
2041 aaatggcagt attcatccac aattttaaaa gaaaaggggg gattgggggg tacagtgcag
2101 gggaaagaat agtagacata atagcaacag acatacaaac taaagaatta caaaaacaaa
2161 ttacaaaaat tcaaaatttt cgggtttatt acagggacag cagagatcca ctttggcgcc
2221 ggctcgaggg ggcccgggga attcgctagc taggtcttga aaggagtggg aattggctcc
2281 ggtgcccgtc agtgggcaga gcgcacatcg cccacagtcc ccgagaagtt ggggggaggg
2341 gtcggcaatt gatccggtgc ctagagaagg tggcgcgggg taaactggga aagtgatgtc
2401 gtgtactggc tccgcctttt tcccgagggt gggggagaac cgtatataag tgcagtagtc
2461 gccgtgaacg ttctttttcg caacgggttt gccgccagaa cacaggaccg gttctagacg
2521 tacggccacc atgaccgagt acaagcccac ggtgcgcctc gccacccgcg acgacgtccc
2581 cagggccgta cgcaccctcg ccgccgcgtt cgccgactac cccgccacgc gccacaccgt
2641 cgatccggac cgccacatcg agcgggtcac cgagctgcaa gaactcttcc tcacgcgcgt
2701 cgggctcgac atcggcaagg tgtgggtcgc ggacgacggc gccgccgtgg cggtctggac
2761 cacgccggag agcgtcgaag cgggggcggt gttcgccgag atcggcccgc gcatggccga
2821 gttgagcggt tcccggctgg ccgcgcagca acagatggaa ggcctcctgg cgccgcaccg
2881 gcccaaggag cccgcgtggt tcctggccac cgtcggagtc tcgcccgacc accagggcaa
2941 gggtctgggc agcgccgtcg tgctccccgg agtggaggcg gccgagcgcg ccggggtgcc
3001 cgccttcctg gagacctccg cgccccgcaa cctccccttc tacgagcggc tcggcttcac
3061 cgtcaccgcc gacgtcgagg tgcccgaagg accgcgcacc tggtgcatga cccgcaagcc
3121 cggtgcctga acgcgttaag tcgacaatca acctctggat tacaaaattt gtgaaagatt
3181 gactggtatt cttaactatg ttgctccttt tacgctatgt ggatacgctg ctttaatgcc
3241 tttgtatcat gctattgctt cccgtatggc tttcattttc tcctccttgt ataaatcctg
3301 gttgctgtct ctttatgagg agttgtggcc cgttgtcagg caacgtggcg tggtgtgcac
3361 tgtgtttgct gacgcaaccc ccactggttg gggcattgcc accacctgtc agctcctttc
3421 cgggactttc gctttccccc tccctattgc cacggcggaa ctcatcgccg cctgccttgc
3481 ccgctgctgg acaggggctc ggctgttggg cactgacaat tccgtggtgt tgtcggggaa
3541 atcatcgtcc tttccttggc tgctcgcctg tgttgccacc tggattctgc gcgggacgtc
3601 cttctgctac gtcccttcgg ccctcaatcc agcggacctt ccttcccgcg gcctgctgcc
3661 ggctctgcgg cctcttccgc gtcttcgcct tcgccctcag acgagtcgga tctccctttg
3721 ggccgcctcc ccgcgtcgac tttaagacca atgacttaca aggcagctgt agatcttagc
3781 cactttttaa aagaaaaggg gggactggaa gggctaattc actcccaacg aagacaagat
3841 ctgctttttg cttgtactgg gtctctctgg ttagaccaga tctgagcctg ggagctctct
3901 ggctaactag ggaacccact gcttaagcct caataaagct tgccttgagt gcttcaagta
3961 gtgtgtgccc gtctgttgtg tgactctggt aactagagat ccctcagacc cttttagtca
4021 gtgtggaaaa tctctagcag tacgtatagt agttcatgtc atcttattat tcagtattta
4081 taacttgcaa agaaatgaat atcagagagt gagaggaact tgtttattgc agcttataat
4141 ggttacaaat aaagcaatag catcacaaat ttcacaaata aagcattttt ttcactgcat
4201 tctagttgtg gtttgtccaa actcatcaat gtatcttatc atgtctggct ctagctatcc
4261 cgcccctaac tccgcccatc ccgcccctaa ctccgcccag ttccgcccat tctccgcccc
4321 atggctgact aatttttttt atttatgcag aggccgaggc cgcctcggcc tctgagctat
4381 tccagaagta gtgaggaggc ttttttggag gcctagggac gtacccaatt cgccctatag
4441 tgagtcgtat tacgcgcgct cactggccgt cgttttacaa cgtcgtgact gggaaaaccc
4501 tggcgttacc caacttaatc gccttgcagc acatccccct ttcgccagct ggcgtaatag
4561 cgaagaggcc cgcaccgatc gcccttccca acagttgcgc agcctgaatg gcgaatggga
4621 cgcgccctgt agcggcgcat taagcgcggc gggtgtggtg gttacgcgca gcgtgaccgc
4681 tacacttgcc agcgccctag cgcccgctcc tttcgctttc ttcccttcct ttctcgccac
4741 gttcgccggc tttccccgtc aagctctaaa tcgggggctc cctttagggt tccgatttag
4801 tgctttacgg cacctcgacc ccaaaaaact tgattagggt gatggttcac gtagtgggcc
4861 atcgccctga tagacggttt ttcgcccttt gacgttggag tccacgttct ttaatagtgg
4921 actcttgttc caaactggaa caacactcaa ccctatctcg gtctattctt ttgatttata
4981 agggattttg ccgatttcgg cctattggtt aaaaaatgag ctgatttaac aaaaatttaa
5041 cgcgaatttt aacaaaatat taacgcttac aatttaggtg gcacttttcg gggaaatgtg
5101 cgcggaaccc ctatttgttt atttttctaa atacattcaa atatgtatcc gctcatgaga
5161 caataaccct gataaatgct tcaataatat tgaaaaagga agagtatgag tattcaacat
5221 ttccgtgtcg cccttattcc cttttttgcg gcattttgcc ttcctgtttt tgctcaccca
5281 gaaacgctgg tgaaagtaaa agatgctgaa gatcagttgg gtgcacgagt gggttacatc
5341 gaactggatc tcaacagcgg taagatcctt gagagttttc gccccgaaga acgttttcca
5401 atgatgagca cttttaaagt tctgctatgt ggcgcggtat tatcccgtat tgacgccggg
5461 caagagcaac tcggtcgccg catacactat tctcagaatg acttggttga gtactcacca
5521 gtcacagaaa agcatcttac ggatggcatg acagtaagag aattatgcag tgctgccata
5581 accatgagtg ataacactgc ggccaactta cttctgacaa cgatcggagg accgaaggag
5641 ctaaccgctt ttttgcacaa catgggggat catgtaactc gccttgatcg ttgggaaccg
5701 gagctgaatg aagccatacc aaacgacgag cgtgacacca cgatgcctgt agcaatggca
5761 acaacgttgc gcaaactatt aactggcgaa ctacttactc tagcttcccg gcaacaatta
5821 atagactgga tggaggcgga taaagttgca ggaccacttc tgcgctcggc ccttccggct
5881 ggctggttta ttgctgataa atctggagcc ggtgagcgtg ggtctcgcgg tatcattgca
5941 gcactggggc cagatggtaa gccctcccgt atcgtagtta tctacacgac ggggagtcag
6001 gcaactatgg atgaacgaaa tagacagatc gctgagatag gtgcctcact gattaagcat
6061 tggtaactgt cagaccaagt ttactcatat atactttaga ttgatttaaa acttcatttt
6121 taatttaaaa ggatctaggt gaagatcctt tttgataatc tcatgaccaa aatcccttaa
6181 cgtgagtttt cgttccactg agcgtcagac cccgtagaaa agatcaaagg atcttcttga
6241 gatccttttt ttctgcgcgt aatctgctgc ttgcaaacaa aaaaaccacc gctaccagcg
6301 gtggtttgtt tgccggatca agagctacca actctttttc cgaaggtaac tggcttcagc
6361 agagcgcaga taccaaatac tgttcttcta gtgtagccgt agttaggcca ccacttcaag
6421 aactctgtag caccgcctac atacctcgct ctgctaatcc tgttaccagt ggctgctgcc
6481 agtggcgata agtcgtgtct taccgggttg gactcaagac gatagttacc ggataaggcg
6541 cagcggtcgg gctgaacggg gggttcgtgc acacagccca gcttggagcg aacgacctac
6601 accgaactga gatacctaca gcgtgagcta tgagaaagcg ccacgcttcc cgaagggaga
6661 aaggcggaca ggtatccggt aagcggcagg gtcggaacag gagagcgcac gagggagctt
6721 ccagggggaa acgcctggta tctttatagt cctgtcgggt ttcgccacct ctgacttgag
6781 cgtcgatttt tgtgatgctc gtcagggggg cggagcctat ggaaaaacgc cagcaacgcg
6841 gcctttttac ggttcctggc cttttgctgg ccttttgctc acatgttctt tcctgcgtta
6901 tcccctgatt ctgtggataa ccgtattacc gcctttgagt gagctgatac cgctcgccgc
6961 agccgaacga ccgagcgcag cgagtcagtg agcgaggaag cggaagagcg cccaatacgc
7021 aaaccgcctc tccccgcgcg ttggccgatt cattaatgca gctggcacga caggtttccc
7081 gactggaaag cgggcagtga gcgcaacgca attaatgtga gttagctcac tcattaggca
7141 ccccaggctt tacactttat gcttccggct cgtatgttgt gtggaattgt gagcggataa
7201 caatttcaca caggaaacag ctatgaccat gattacgcca agcgcgcaat taaccctcac
7261 taaagggaac aaaagctgga gctgcaagc
pSC020_pLKO_U6-Cpf1crRNA-EFS-Thy11CO-sPA vector (SEQ ID NO: 3)
      1 ttaatgtagt cttatgcaat actcttgtag tcttgcaaca tggtaacgat gagttagcaa
    61 catgccttac aaggagagaa aaagcaccgt gcatgccgat tggtggaagt aaggtggtac
  121 gatcgtgcct tattaggaag gcaacagacg ggtctgacat ggattggacg aaccactgaa
  181 ttgccgcatt gcagagatat tgtatttaag tgcctagctc gatacataaa cgggtctctc
  241 tggttagacc agatctgagc ctgggagctc tctggctaac tagggaaccc actgcttaag
  301 cctcaataaa gcttgccttg agtgcttcaa gtagtgtgtg cccgtctgtt gtgtgactct
  361 ggtaactaga gatccctcag acccttttag tcagtgtgga aaatctctag cagtggcgcc
  421 cgaacaggga cttgaaagcg aaagggaaac cagaggagct ctctcgacgc aggactcggc
  481 ttgctgaagc gcgcacggca agaggcgagg ggcggcgact ggtgagtacg ccaaaaattt
  541 tgactagcgg aggctagaag gagagagatg ggtgcgagag cgtcagtatt aagcggggga
  601 gaattagatc gcgatgggaa aaaattcggt taaggccagg gggaaagaaa aaatataaat
  661 taaaacatat agtatgggca agcagggagc tagaacgatt cgcagttaat cctggcctgt
  721 tagaaacatc agaaggctgt agacaaatac tgggacagct acaaccatcc cttcagacag
  781 gatcagaaga acttagatca ttatataata cagtagcaac cctctattgt gtgcatcaaa
  841 ggatagagat aaaagacacc aaggaagctt tagacaagat agaggaagag caaaacaaaa
  901 gtaagaccac cgcacagcaa gcggccgctg atcttcagac ctggaggagg agatatgagg
  961 gacaattgga gaagtgaatt atataaatat aaagtagtaa aaattgaacc attaggagta
1021 gcacccacca aggcaaagag aagagtggtg cagagagaaa aaagagcagt gggaatagga
1081 gctttgttcc ttgggttctt gggagcagca ggaagcacta tgggcgcagc gtcaatgacg
1141 ctgacggtac aggccagaca attattgtct ggtatagtgc agcagcagaa caatttgctg
1201 agggctattg aggcgcaaca gcatctgttg caactcacag tctggggcat caagcagctc
1261 caggcaagaa tcctggctgt ggaaagatac ctaaaggatc aacagctcct ggggatttgg
1321 ggttgctctg gaaaactcat ttgcaccact gctgtgcctt ggaatgctag ttggagtaat
1381 aaatctctgg aacagatttg gaatcacacg acctggatgg agtgggacag agaaattaac
1441 aattacacaa gcttaataca ctccttaatt gaagaatcgc aaaaccagca agaaaagaat
1501 gaacaagaat tattggaatt agataaatgg gcaagtttgt ggaattggtt taacataaca
1561 aattggctgt ggtatataaa attattcata atgatagtag gaggcttggt aggtttaaga
1621 atagtttttg ctgtactttc tatagtgaat agagttaggc agggatattc accattatcg
1681 tttcagaccc acctcccaac cccgagggga cccagagagg gcctatttcc catgattcct
1741 tcatatttgc atatacgata caaggctgtt agagagataa ttagaattaa tttgactgta
1801 aacacaaaga tattagtaca aaatacgtga cgtagaaagt aataatttct tgggtagttt
1861 gcagttttaa aattatgttt taaaatggac tatcatatgc ttaccgtaac ttgaaagtat
1921 ttcgatttct tggctttata tatcttGTGG AAAGGACGAA ACACCgTAAT TTCTACTAAG
1981 TGTAGATGAG ACGgaCGTCT Caagcttggc gtGGATCCGA TATCaactag atcttgagac
2041 aaatggcagt attcatccac aattttaaaa gaaaaggggg gattgggggg tacagtgcag
2101 gggaaagaat agtagacata atagcaacag acatacaaac taaagaatta caaaaacaaa
2161 ttacaaaaat tcaaaatttt cgggtttatt acagggacag cagagatcca ctttggcgcc
2221 ggctcgaggg ggcccgggga attcgctagc taggtcttga aaggagtggg aattggctcc
2281 ggtgcccgtc agtgggcaga gcgcacatcg cccacagtcc ccgagaagtt ggggggaggg
2341 gtcggcaatt gatccggtgc ctagagaagg tggcgcgggg taaactggga aagtgatgtc
2401 gtgtactggc tccgcctttt tcccgagggt gggggagaac cgtatataag tgcagtagtc
2461 gccgtgaacg ttctttttcg caacgggttt gccgccagaa cacaggaccg gttctagacg
2521 tacggccacc ATGAACCCAG CCATCAGCGT CGCTCTCCTG CTCTCAGTCT TGCAGGTGTC
2581 CCGAGGGCAG AAGGTGACCA GCCTGACAGC CTGCCTGGTG AACCAAAACC TTCGCCTGGA
2641 CTGCCGCCAT GAGAATAACA CCAAGGATAA CTCCATCCAG CATGAGTTCA GCCTGACCCG
2701 AGAGAAGAGG AAGCACGTGC TCTCAGGCAC CCTTGGGATA CCCGAGCACA CGTACCGCTC
2761 CCGCGTCACC CTCTCCAACC AGCCCTATAT CAAGGTCCTT ACCCTAGCCA ACTTCACCAC
2821 CAAGGATGAG GGCGACTACT TTTGTGAGCT TCGCGTAAGT GGCGCGAATC CCATGAGCTC
2881 CAATAAAAGT ATCAGTGTGT ATAGAGACAA GCTGGTCAAG TGTGGCGGCA TAAGCCTGCT
2941 GGTTCAGAAC ACATCCTGGA TGCTGCTGCT GCTGCTTTCC CTCTCCCTCC TCCAAGCCCT
3001 GGACTTCATT TCTCTGTGAa gcgctAATAA AAGATCTTTA TTTTCATTAG ATCTGTGTGT
3061 TGGTTTTTTG TGTGacgtgc ggtcgacttt aagaccaatg acttacaagg cagctgtaga
3121 tcttagccac tttttaaaag aaaagggggg actggaaggg ctaattcact cccaacgaag
3181 acaagatctg ctttttgctt gtactgggtc tctctggtta gaccagatct gagcctggga
3241 gctctctggc taactaggga acccactgct taagcctcaa taaagcttgc cttgagtgct
3301 tcaagtagtg tgtgcccgtc tgttgtgtga ctctggtaac tagagatccc tcagaccctt
3361 ttagtcagtg tggaaaatct ctagcagtac gtatagtagt tcatgtcatc ttattattca
3421 gtatttataa cttgcaaaga aatgaatatc agagagtgag aggaacttgt ttattgcagc
3481 ttataatggt tacaaataaa gcaatagcat cacaaatttc acaaataaag catttttttc
3541 actgcattct agttgtggtt tgtccaaact catcaatgta tcttatcatg tctggctcta
3601 gctatcccgc ccctaactcc gcccatcccg cccctaactc cgcccagttc cgcccattct
3661 ccgccccatg gctgactaat tttttttatt tatgcagagg ccgaggccgc ctcggcctct
3721 gagctattcc agaagtagtg aggaggcttt tttggaggcc tagggacgta cccaattcgc
3781 cctatagtga gtcgtattac gcgcgctcac tggccgtcgt tttacaacgt cgtgactggg
3841 aaaaccctgg cgttacccaa cttaatcgcc ttgcagcaca tccccctttc gccagctggc
3901 gtaatagcga agaggcccgc accgatcgcc cttcccaaca gttgcgcagc ctgaatggcg
3961 aatgggacgc gccctgtagc ggcgcattaa gcgcggcggg tgtggtggtt acgcgcagcg
4021 tgaccgctac acttgccagc gccctagcgc ccgctccttt cgctttcttc ccttcctttc
4081 tcgccacgtt cgccggcttt ccccgtcaag ctctaaatcg ggggctccct ttagggttcc
4141 gatttagtgc tttacggcac ctcgacccca aaaaacttga ttagggtgat ggttcacgta
4201 gtgggccatc gccctgatag acggtttttc gccctttgac gttggagtcc acgttcttta
4261 atagtggact cttgttccaa actggaacaa cactcaaccc tatctcggtc tattcttttg
4321 atttataagg gattttgccg atttcggcct attggttaaa aaatgagctg atttaacaaa
4381 aatttaacgc gaattttaac aaaatattaa cgcttacaat ttaggtggca cttttcgggg
4441 aaatgtgcgc ggaaccccta tttgtttatt tttctaaata cattcaaata tgtatccgct
4501 catgagacaa taaccctgat aaatgcttca ataatattga aaaaggaaga gtatgagtat
4561 tcaacatttc cgtgtcgccc ttattccctt ttttgcggca ttttgccttc ctgtttttgc
4621 tcacccagaa acgctggtga aagtaaaaga tgctgaagat cagttgggtg cacgagtggg
4681 ttacatcgaa ctggatctca acagcggtaa gatccttgag agttttcgcc ccgaagaacg
4741 ttttccaatg atgagcactt ttaaagttct gctatgtggc gcggtattat cccgtattga
4801 cgccgggcaa gagcaactcg gtcgccgcat acactattct cagaatgact tggttgagta
4861 ctcaccagtc acagaaaagc atcttacgga tggcatgaca gtaagagaat tatgcagtgc
4921 tgccataacc atgagtgata acactgcggc caacttactt ctgacaacga tcggaggacc
4981 gaaggagcta accgcttttt tgcacaacat gggggatcat gtaactcgcc ttgatcgttg
5041 ggaaccggag ctgaatgaag ccataccaaa cgacgagcgt gacaccacga tgcctgtagc
5101 aatggcaaca acgttgcgca aactattaac tggcgaacta cttactctag cttcccggca
5161 acaattaata gactggatgg aggcggataa agttgcagga ccacttctgc gctcggccct
5221 tccggctggc tggtttattg ctgataaatc tggagccggt gagcgtgggt ctcgcggtat
5281 cattgcagca ctggggccag atggtaagcc ctcccgtatc gtagttatct acacgacggg
5341 gagtcaggca actatggatg aacgaaatag acagatcgct gagataggtg cctcactgat
5401 taagcattgg taactgtcag accaagttta ctcatatata ctttagattg atttaaaact
5461 tcatttttaa tttaaaagga tctaggtgaa gatccttttt gataatctca tgaccaaaat
5521 cccttaacgt gagttttcgt tccactgagc gtcagacccc gtagaaaaga tcaaaggatc
5581 ttcttgagat cctttttttc tgcgcgtaat ctgctgcttg caaacaaaaa aaccaccgct
5641 accagcggtg gtttgtttgc cggatcaaga gctaccaact ctttttccga aggtaactgg
5701 cttcagcaga gcgcagatac caaatactgt tcttctagtg tagccgtagt taggccacca
5761 cttcaagaac tctgtagcac cgcctacata cctcgctctg ctaatcctgt taccagtggc
5821 tgctgccagt ggcgataagt cgtgtcttac cgggttggac tcaagacgat agttaccgga
5881 taaggcgcag cggtcgggct gaacgggggg ttcgtgcaca cagcccagct tggagcgaac
5941 gacctacacc gaactgagat acctacagcg tgagctatga gaaagcgcca cgcttcccga
6001 agggagaaag gcggacaggt atccggtaag cggcagggtc ggaacaggag agcgcacgag
6061 ggagcttcca gggggaaacg cctggtatct ttatagtcct gtcgggtttc gccacctctg
6121 acttgagcgt cgatttttgt gatgctcgtc aggggggcgg agcctatgga aaaacgccag
6181 caacgcggcc tttttacggt tcctggcctt ttgctggcct tttgctcaca tgttctttcc
6241 tgcgttatcc cctgattctg tggataaccg tattaccgcc tttgagtgag ctgataccgc
6301 tcgccgcagc cgaacgaccg agcgcagcga gtcagtgagc gaggaagcgg aagagcgccc
6361 aatacgcaaa ccgcctctcc ccgcgcgttg gccgattcat taatgcagct ggcacgacag
6421 gtttcccgac tggaaagcgg gcagtgagcg caacgcaatt aatgtgagtt agctcactca
6481 ttaggcaccc caggctttac actttatgct tccggctcgt atgttgtgtg gaattgtgag
6541 cggataacaa tttcacacag gaaacagcta tgaccatgat tacgccaagc gcgcaattaa
6601 ccctcactaa agggaacaaa agctggagct gcaagc
```

[0113] In another aspect, the invention includes a crRNA array comprising a 5′ nucleotide sequence that is homologous to a first nucleotide sequence on a vector, a first crRNA sequence, a direct repeat sequence of Cpf1, a second crRNA sequence, a terminator sequence, and a 3′ sequence that is homologous to a second sequence on the vector. In one embodiment, the terminator sequence is a U6 terminator sequence. The vector can include any vector known in the art or described herein. In certain embodiments the vector comprises the pLenti-U6-DR-crRNA-puro vector. The crRNA sequences can be designed to target any gene of interest or nucleotide sequence of interest.

[0114] In yet another aspect, the invention includes a double knockout crRNA expression vector (pLenti-U6-DR-cr1-DR-cr2-puro). The vector comprises a first LTR sequence, a promoter sequence, a first direct repeat sequence of Cpf1, a first crRNA sequence, a second direct repeat sequence of Cpf1, a second crRNA sequence, a terminator sequence, an EFS sequence, a WPRE sequence, and a second LTR sequence. In one embodiment, the promoter sequence is a U6 promoter sequence. In one embodiment, the terminator sequence is a U6 terminator sequence.

[0115] The crRNA sequences can target any gene or nucleotide sequence of interest. In certain embodiments, the first crRNA sequence is complementary to a gene selected from the group consisting of Pten and Nf1, and the second crRNA sequence is complementary to a gene selected from the group consisting of Pten and Nf1. The first and second crRNAs can target the same gene/sequence or different genes/sequences. The vector can further comprise additional crRNA sequences totaling up to 3, 4, 5, 6, 7, 8, 9, 10, 11, 12, 13, 14, 15, 16, 17, 18, 19 or 20 crRNAs in one vector.

[0116] In one aspect, the invention includes a Cpf1 crRNA array screening (CCAS) library. In another aspect, the invention includes a Massively-Parallel crRNA Array Profiling (MCAP) library. In certain embodiments, the library comprises a plurality of the crRNA arrays of the invention cloned into a plurality of the vectors of the invention. In certain embodiments, the MCAP library comprises a plurality of crRNA arrays targeting pairwise combinations of genes significantly mutated in human metastases. In certain embodiments, the crRNA arrays in the library comprise at least one nucleotide sequence selected from the group consisting of SEQ ID NOs. 4-9,708. In certain embodiments, the crRNA arrays in the library consist of the nucleotide sequences of SEQ ID NOs. 4-9,708. In certain embodiments, the crRNA arrays in the library comprise at least one nucleotide sequence selected from the group consisting of SEQ ID NOs. 9,762-21,695. In certain embodiments, the crRNA arrays in the library consist of the nucleotide sequences of SEQ ID NOs. 9,762-21,695.

[0117] The invention also provides, in one aspect, a kit comprising a CCAS library comprising a plurality of vectors comprising a plurality of crRNA arrays, wherein the crRNA arrays comprise a nucleotide sequence selected from the group consisting of SEQ ID NOs. 4-9,708. In another aspect, the invention includes a kit comprising a MCAP library comprising a plurality of vectors comprising a plurality of crRNA arrays, wherein the crRNA arrays comprise a nucleotide sequence selected from the group consisting of SEQ ID NOs. 9,762-21,695. Also included in the kits are instructional materials for use thereof. Instructional material can include directions for using the components of the kit as well as instructions and guidance for interpreting the results. In one aspect, the kit comprises at least one additional crRNA sequence that is complementary to at least one additional target sequence. For example, the kit is capable of multiplexing 3 or more crRNAs in each array in order to study triple knockouts and even higher-dimension (i.e., quadruple or higher) genetic interactions.

[0118] Methods Described herein are multiplexed Cpf1 screens that provide a powerful tool for studying genetic interactions with unparalleled simplicity and specificity. The Cpf1 crRNA array screening (CCAS) and MCAP (Massively-parallel crRNA array profiling) technologies enable rapid identification of all combinations of double inhibition of two targets simultaneously. The methods described herein can be broadly applied to many cell types of interest, including but not limited to cancer cells. As shown in the present study (FIGS. 1A-20F and 26A-34), CCAS and MCAP can be used in mammalian cells for high-throughput, high-dimensional screening. A set of highly quantitative algorithms was developed, and this was used to generate unbiased profiles of genetic interactions in tumor suppression and metastasis, which were dismantled upon Cpf1-mediated double-mutagenesis. Particularly, in a more complex biological process such as the multi-step metastatic process, the screen was capable of detecting robust signatures of selection and revealing modes and patterns of clonal expansion of complex pools of double mutants in vivo. Technology-wise, establishment of Cpf1 crRNA array libraries, readout and mapping platform, as well as customized computational pipelines, enables more comprehensive combinatorial screens through a single crRNA array. This technology is readily extendable to multiplexing 3 or more crRNAs in each array in order to study triple knockouts and even higher-dimension genetic interactions. Triple-, quadruple- or higher dimensional screens are easily feasible with Cpf1 crRNA array screening system, which were exponentially challenging for methods depending on Cas9. The extremely simplified library construction enables direct double knockout at greatly reduced cost and effort. Particularly in an in vivo setting, simplicity directly empowers feasibility.

[0119] The methods can also encompass additional applications in immune cells for immunotherapy screening and enhancement. Editing of primary immune cells (such as Dendritic cells (DCs)) was demonstrated herein (FIG. 16). This allows direct application of CCAS technology to screen for combinatorial factors that modulate immunotherapy and engineering immune cells with desired or improved functions.

[0120] Applications in primary cells for improving regenerative medicine are also encompassed by this approach. Editing of freshly isolated primary cells (such as Endothelial cells (ECs)) was demonstrated herein (FIG. 16). This allows direct application of the CCAS technology to screen for combinatorial factors that modulate regenerative medicine.

[0121] In one aspect, the invention includes a method for simultaneously mutagenizing multiple target sequences in a cell. The method comprises administering to the cell a CCAS library. The CCAS library comprises a plurality of vectors comprising a plurality of crRNA arrays. The crRNA arrays comprise a 5′ nucleotide sequence that is homologous to a first nucleotide sequence on the vector, a first crRNA sequence, a direct repeat sequence of Cpf1, a second crRNA sequence, a terminator sequence, and a 3′ sequence that is homologous to a second sequence on the vector, and wherein the first crRNA is complementary to a first target sequence and the second crRNA is complementary to a second target sequence. In certain embodiments, the plurality of crRNA arrays in the CCAS library comprises a nucleotide sequence selected from the group consisting of SEQ ID NOs. 4-9,708. The method can also include additional crRNA sequences complementary to additional target sequences. For example, additional crRNA sequences totaling up to 3, 4, 5, 6, 7, 8, 9, 10, 11, 12, 13, 14, 15, 16, 17, 18, 19 or 20 crRNAs can be included in the methods as described herein.

[0122] In another aspect, the invention includes a method for simultaneously mutagenizing multiple target sequences in a cell comprising administering to the cell a MCAP library. The MCAP library comprises a plurality of vectors comprising a plurality of crRNA arrays. The crRNA arrays comprise a 5′ nucleotide sequence that is homologous to a first nucleotide sequence on the vector, a first crRNA sequence, a direct repeat sequence of Cpf1, a second crRNA sequence, a terminator sequence, and a 3′ sequence that is homologous to a second sequence on the vector, and wherein the first crRNA is complementary to a first target sequence and the second crRNA is complementary to a second target sequence. In certain embodiments, the plurality of crRNA arrays in the MCAP library comprises a nucleotide sequence selected from the group consisting of SEQ ID NOs. 9,762-21,695.

[0123] By ‘target sequence’ is meant any nucleic acid sequence or gene of interest targeted to be mutated by the methods described herein.

[0124] Any type of cell can be mutagenized by the methods described herein, including but not limited to cancer cells, immune cells, cell lines, hybridomas, primary cells, T cells, dendritic cells (DCs), endothelial cells, brain endothelial cells, macrophages, monocytes, CD8+ cells, CD4+ cells, T regulatory (Treg) cells, B cells, Natural Killer cells (NKs), and stem cells.

[0125] Another aspect of the invention includes a method of identifying synergistic drivers of transformation and/or tumorigenesis and/or metastasis in vivo. The method comprises administering to an animal cells mutagenized by a CCAS library. The CCAS library comprises a plurality of vectors comprising a plurality of crRNA arrays. Each crRNA array comprises a 5′ nucleotide sequence that is homologous to a first nucleotide sequence on the vector, a first crRNA sequence, a direct repeat sequence of Cpf1, a second crRNA sequence, a terminator sequence, and a 3′ sequence that is homologous to a second sequence on the vector. The first crRNA is complementary to a first target sequence and the second crRNA is complementary to a second target sequence. A nucleotide from a tumor from the animal are sequenced, and the data are analyzed to identify the synergistic drivers of transformation and/or tumorigenesis.

[0126] Still another aspect of the invention includes a method of identifying synergistic drivers of transformation and/or tumorigenesis and/or metastasis in vivo comprising administering cells mutagenized by a MCAP library to an animal. The MCAP library comprises a plurality of vectors comprising a plurality of crRNA arrays. Each crRNA array comprises a 5′ nucleotide sequence that is homologous to a first nucleotide sequence on the vector, a first crRNA sequence, a direct repeat sequence of Cpf1, a second crRNA sequence, a terminator sequence, and a 3′ sequence that is homologous to a second sequence on the vector. In certain embodiments, the MCAP library comprises a plurality of crRNA arrays targeting pairwise combinations of genes significantly mutated in human metastases. The first crRNA is complementary to a first target sequence and the second crRNA is complementary to a second target sequence. A nucleotide from a tumor from the animal are sequenced, and the data are analyzed to identify the synergistic drivers of transformation and/or tumorigenesis.

[0127] Yet another aspect of the invention includes an in vivo method for identifying and mapping genetic interactions. The method comprises administering cells mutagenized by a CCAS library to an animal. The CCAS library comprises a plurality of vectors comprising a plurality of crRNA arrays. Each crRNA array comprises a 5′ nucleotide sequence that is homologous to a first nucleotide sequence on the vector, a first crRNA sequence, a direct repeat sequence of Cpf1, a second crRNA sequence, a U6 terminator sequence, and a 3′ sequence that is homologous to a second sequence on the vector. The first crRNA is complementary to a first target sequence, and the second crRNA is complementary to a second target sequence. A nucleotide from a tumor and/or tissue and/or cell of the animal are sequenced, and the data are analyzed to identify and map the genetic interactions.

[0128] Another aspect of the invention includes an in vivo method for identifying and mapping genetic interactions. The method comprises administering to an animal cells mutagenized by a MCAP library. The MCAP library comprises a plurality of vectors comprising a plurality of crRNA arrays. Each crRNA array comprises a 5′ nucleotide sequence that is homologous to a first nucleotide sequence on the vector, a first crRNA sequence, a direct repeat sequence of Cpf1, a second crRNA sequence, a terminator sequence, and a 3′ sequence that is homologous to a second sequence on the vector. The first crRNA is complementary to a first target sequence, and the second crRNA is complementary to a second target sequence. A nucleotide (DNA or RNA) from a tumor and/or tissue and/or cell of the animal are sequenced, and the data are analyzed to identify and map the genetic interactions.

[0129] In certain embodiments of the methods, the plurality of crRNA arrays comprises SEQ ID NOs. 4-9,708. In certain embodiments of the methods, the plurality of crRNA arrays comprises SEQ ID NOs. 9,762-21,695. In certain embodiments, the methods further comprise wherein the crRNA comprises additional crRNA sequences that are complementary to additional target sequences. The methods of the invention are capable of multiplexing 3 or more crRNAs in each array in order to study triple knockouts and even higher-dimension genetic interactions.

[0130] Nucleotide sequencing or “sequencing”, as it is commonly known in the art, can be performed by standard methods commonly known to one of ordinary skill in the art. In certain embodiments of the invention, sequencing is performed by targeted capture sequencing.

[0131] Targeted captured sequencing can be performed as described herein, or by methods commonly performed by one of ordinary skill in the art. In certain embodiments of the invention, sequencing is performed via next-generation sequencing. Next-generation sequencing (NGS), also known as high-throughput sequencing, is used herein to describe a number of different modern sequencing technologies that allow to sequence DNA and RNA much more quickly and cheaply than the previously used Sanger sequencing (Metzker, 2010, Nature Reviews Genetics 11.1: 31-46). It is based on micro- and nanotechnologies to reduce the size of sample, the reagent costs, and to enable massively parallel sequencing reactions. It can be highly multiplexed, which allows simultaneous sequencing and analysis of millions of samples. NGS includes first, second, third as well as subsequent Next Generations Sequencing technologies. Data generated from NGS can be analyzed via a broad range of computational tools and statistical methods including but not limited to those described herein. Sequencing can also be performed at the single cell level, e.g. single cell sequencing. Sequencing can be performed on DNA as well as RNA (e.g. RNASeq). The wide variety of analysis can be appreciated and performed by those skilled in the art.

[0132] Mutagenizing a cell can include introducing mutations throughout the genome of the cell. The mutations introduced can be any combination of insertions or deletions, including but not limited to a single base insertion, a single base deletion, a frameshift, a rearrangement, and an insertion or deletion of 2, 3, 4, 5, 6, 7, 8, 9, 10, 15, 20, 25, 30, 40, 50, 60, 70, 80, 90, 100, 150, 200, 250, 300, any and all numbers in between, bases. The mutation can occur in a gene or in a non-coding region.

[0133] In certain embodiments of the invention, the animal is a mouse. Other animals that can be used include but are not limited to rats, rabbits, dogs, cats, horses, pigs, cows and birds. In certain embodiments, the animal is a human. The sgRNA library can be administered to an animal by any means standard in the art. For example the vectors can be injected into the animal. The injections can be intravenous, subcutaneous, intraperitoneal, or directly into a tissue or organ. In certain embodiments, the sgRNA library is adoptively transferred to the animal.

[0134] Cpf1-Flip In certain aspects, the invention includes compositions and methods for sequential mutagnesis in a cell using the Cpf1-Flip system.

[0135] In a large variety of biological and pathological processes, genetic mutations or alterations are often acquired in a sequential manner. In evolution and speciation, the genomes of organisms acquire mutations constantly and are subjected to natural selection. In genetically complex disorders such as cancer, multi-step mutagenesis is often a major obstacle for effective treatments. Cancers evolve through an ongoing process of mutation-selection balance, where initial mutations are selected for, or against, in vivo, followed by subsequent acquisition of additional mutations as the tumor grows. Since the initial set of oncogenic “driver” mutations is generally what starts and sustains tumor growth, targeted molecular therapies are often chosen to specifically attack such oncogenic dependencies. However, the selection pressures of treatment favor secondary mutations that confer drug resistance, leading to relapse. Thus, the process of cancer evolution by sequential mutagenesis stymies these therapies via continuous diversification and adaptation to the tumor microenvironment, eventually exhausting available treatment options. Even with the advent of cancer immunotherapy, where checkpoint blockade is increasingly being utilized in the clinic, the acquisition of secondary mutations that abolish T cell receptor (TCR)—antigen—major histocompatibility complex (MHC) recognition can still lead to immune escape and ultimately negate the effect of immunotherapy. Thus, the ability to perform sequential and precise mutagenesis is critical for studying biological processes with multi-stage genetic events such as development and evolution, as well as the pathogenesis of complex diseases such as cancer.

[0136] From a genetic engineering perspective, stepwise mutagenesis or perturbation is a powerful technique for precise genetic manipulation of cells and live organisms. Multiple methods have been employed to achieve this end. In the pre-recombinant DNA era, stepwise perturbation was often done by multiple rounds of random mutagenesis using chemical or physical carcinogens followed by artificial selection. The subsequent discovery and application of recombinase systems such as Cre-loxP, Flp-FRT and cpC31-att enabled inducible genetic events. In these systems, the DNA recombinase (i.e. Cre) specifically recognizes its target DNA sequence motif (i.e. loxP) and catalyzes recombination between two such target sites. Depending on the configuration of the target sites, targeted recombinases can be utilized for DNA excision, translocation, and/or inversion. However, the floxed genomic loci underlying Cre-based systems must be pre-engineered on a gene-by-gene basis. This process of generating new floxed alleles for each unique application is time and labor intensive, further limiting the feasibility of multiplexed Cre recombination.

[0137] More recently, precisely targeted and customizable mutagenesis was simplified by the discovery of RNA-guided endonucleases (RGNs) Cas9 and Cpf1. RGNs can induce double strand DNA breaks, subsequently generating insertions and deletions at the target site. This process is precisely targeted based on the sequences of CRISPR RNAs (crRNAs), which complex with RGNs to enable and guide their nuclease functions. Unlike with Cre recombination, CRISPR crRNAs can be easily transferred to target cells through transfection or viral vectors, thus obviating the need to pre-engineer the host genome for each target gene. In contrast to Cas9, the most widely utilized RGN to date, Cpf1 is a single component RGN that does not depend on trans-activating RNA and can autonomously process CRISPR-RNA (crRNA) arrays. These features have made Cpf1 particularly attractive for multiplexed mutagenesis. In addition to several studies in mammalian systems, Cpf1-mediated mutagenesis and transcriptional repression have now been successfully applied in plants. Furthermore, chemical modifications on Cpf1 mRNA and crRNAs have been identified that can improve cutting efficiency. Cpf1 can also process crRNAs from mRNAs expressed by a Pol II promoter, further enabling flexible transcriptional control.

[0138] Sequential mutagenesis using Cas9 has been demonstrated in ex vivo organoid cultures. However, this approach required sequentially introducing each sgRNA in culture, one at a time, limiting its broader applicability. In particular, the sequential introduction of different sgRNAs would be impractical for library-scale screening or any in vivo experimental designs. Prior to this disclosure, conditional sequential mutagenesis using RGNs has not yet been demonstrated.

[0139] Herein, a flexible sequential mutagenesis system was created through inducible inversion of a single crRNA array (Cpf1-Flip) and its simplicity demonstrated in stepwise multiplexed gene editing in mammalian cells for modeling sequential genetic events, such as in cancer. Cpf1-Flip was further applied to model the acquisition of resistance mutations to immunotherapy in a pooled mutagenesis setting, demonstrating the feasibility of Cpf1-Flip for conducting sequential genetic studies. This system can be utilized for multi-step mutagenesis of any genes in the genome for interrogating complex genetic events with temporal control.

[0140] In certain aspects, the invention includes a crRNA Flip Array. In one embodiment, the crRNA FlipArray comprises a first crRNA sequence, 4-10 consecutive thymidines, a second inverted crRNA sequence, 4-10 consecutive adenines, and a third inverted direct repeat sequence. In one embodiment, the first crRNA sequence comprises six consecutive thymidines. In one embodiment, the second inverted crRNA sequence comprises six consecutive adenines. The crRNA Flip Array can be included in any vector known to one of ordinary skill in the art.

[0141] In one embodiment, the invention includes a vector comprising a first promoter, a Cpf1 sequence, a second promoter, a first Cpf1 direct repeat sequence, a lox66 sequence, a second Cpf1 direct repeat sequence, two inverted restriction sites, an inverted lox71 sequence, and a crRNA FlipArray, wherein the crRNA FlipArray comprises a first crRNA sequence, 4-10 consecutive thymidines, a second inverted crRNA sequence, 4-10 consecutive adenines, and a third inverted direct repeat sequence.

[0142] In certain embodiments, the vector comprises SEQ ID NO: 21,697. In one embodiment, the first promoter is an EFS promoter. In one embodiment, the EFS promoter drives expression of Cpf1. In one embodiment, the second promoter is a U6 promoter. In one embodiment, the U6 promoter drives expression of the crRNA FlipArray. In one embodiment, the first promoter and the second promoter are in opposite orientations. In one embodiment, the vector further comprises an antibiotic resistance marker. In one embodiment, the antibiotic resistance marker is a puromycin resistance sequence. In one embodiment, the restriction sites are BsmbI restriction sites. In one embodiment, the Cpf1 sequence is a Lachnospiraceae bacterium Cpf1 (LbCpf1) sequence. In one embodiment, any one of the first, second, or third, direct repeat sequences is from LbCpf1.

[0143] In one aspect, the invention includes a gene editing system capable of inducible, sequential mutagenesis in a cell. The system comprising a vector and a Cre recombinase, wherein the vector comprising a first promoter, a Cpf1 sequence, a second promoter, a first Cpf1 direct repeat sequence, a lox66 sequence, a second Cpf1 direct repeat sequence, two inverted restriction sites, an inverted lox71 sequence, and a crRNA FlipArray, wherein the crRNA FlipArray comprises a first crRNA sequence, 4-10 consecutive thymidines, a second inverted crRNA sequence, 4-10 consecutive adenines, and a third inverted direct repeat sequence.

[0144] Another aspect of the invention includes a gene editing system capable of inducible, sequential mutagenesis in a cell comprising a plurality of vectors and a Cre recombinase. The vectors comprising a first promoter, a Cpf1 sequence, a second promoter, a first Cpf1 direct repeat sequence, a lox66 sequence, a second Cpf1 direct repeat sequence, two inverted restriction sites, an inverted lox71 sequence, and a crRNA FlipArray, wherein the crRNA FlipArray comprises a first crRNA sequence, 4-10 consecutive thymidines, a second inverted crRNA sequence, 4-10 consecutive adenines, and a third inverted direct repeat sequence.

[0145] In any of the gene editing systems of the present invention, the first crRNA and/or the second crRNA can target more than one sequence.

[0146] In another aspect, the invention includes a method of inducible, sequential mutagenesis in a cell. The method comprises administering to the cell a vector comprising a first promoter, a Cpf1 sequence, a second promoter, a first Cpf1 direct repeat sequence, a lox66 sequence, a second Cpf1 direct repeat sequence, two inverted restriction sites, an inverted lox71 sequence, and a crRNA FlipArray, wherein the crRNA FlipArray comprises a first crRNA sequence, 4-10 consecutive thymidines, a second inverted crRNA sequence, 4-10 consecutive adenines, and a third inverted direct repeat sequence. The first crRNA is expressed, then a Cre recombinase is administered to the cell. When the Cre recombinase is administered, the second crRNA is expressed, thus sequentially mutagenizing the cell.

[0147] Another aspect of the invention includes a method of inducible, sequential mutagenesis in a cell comprising administering to the cell a plurality of vectors. The vectors individually comprise a first promoter, a Cpf1 sequence, a second promoter, a first Cpf1 direct repeat sequence, a lox66 sequence, a second Cpf1 direct repeat sequence, two inverted restriction sites, an inverted lox71 sequence, and a crRNA FlipArray, wherein the crRNA FlipArray comprises a first crRNA sequence, 4-10 consecutive thymidines, a second inverted crRNA sequence, 4-10 consecutive adenines, and a third inverted direct repeat sequence. The first crRNA is expressed and a Cre recombinase is administered to the cell. When the Cre recombinase is administered, the second crRNA is expressed, thus sequentially mutagenizing the cell.

[0148] Yet another aspect of the invention includes a method of inducible, sequential mutagenesis in a cell in an animal. The method comprises administering to the animal a plurality of vectors. The vectors individually comprise a first promoter, a Cpf1 sequence, a second promoter, a first Cpf1 direct repeat sequence, a lox66 sequence, a second Cpf1 direct repeat sequence, two inverted restriction sites, an inverted lox71 sequence, and a crRNA FlipArray, wherein the crRNA FlipArray comprises a first crRNA sequence, 4-10 consecutive thymidines, a second inverted crRNA sequence, 4-10 consecutive adenines, and a third inverted direct repeat sequence. The first crRNA is expressed and a Cre recombinase is administered to the animal.

[0149] When the Cre recombinase is administered, the second crRNA is expressed, thus sequentially mutagenizing the cell in the animal.

[0150] In one embodiment of the method, the cell is a human cell. In one embodiment, the animal is a mouse. In one embodiment, the animal is a human. In one embodiment, mutagenesis is selected from the group consisting of nucleotide insertion, nucleotide deletion, frameshift mutation, gene activation, gene repression, and epigenetic modification. In one embodiment, the first crRNA and/or the second crRNA target more than one sequence. In one embodiment, the first crRNA targets Nf1 and the second crRNA targets Pten. In one embodiment, the first crRNA targets Pten and the second crRNA targets Nf1. In one embodiment, the first crRNA and/or the second crRNA targets a panel of immunomodulatory factors comprising Cd274, Ido1, B2m, Fas1, Jak2, and Lgals9

### CRISPR/Cpf1

[0151] As described herein, the discovery and characterization of the type V CRISPR system, Cpf1 (CRISPR from Prevotella and Francisella) has enabled rapid genome editing of multiple loci in the same cell. Cpf1 is a single component RNA-guided nuclease that can mediate target cleavage with a single crRNA. Compared to Cas9, Cpf1 does not require a tracrRNA, which greatly simplifies multiplexed genome editing of two or more loci simultaneously by using a string of crRNAs targeting different genes, as described herein. Thus, Cpf1 is an ideal system for high-throughput higher dimensional screens in mammalian species, with substantial advantages in library design and readout when compared to Cas9-based approaches. Herein, a Cpf1 crRNA array library that targets a set of the most significantly mutated cancer genes was designed. An unbiased screen was performed on two different mouse models, one studying early-stage tumorigenesis and the second studying cancer metastasis, identifying many unpredicted gene pairs. Thus, Cpf1 screening is a powerful approach to systematically quantify genetic interactions and identify new synergistic combinations. Unlike with Cas9-based strategies, due to the simple expansion of crRNA arrays, this approach can be readily extended to perform triple-, quadruple- or higher dimensional screens in vivo.

[0152] The Cpf1 enzyme can be derived from any genera of microbes, including but not limited to, Parcubacteria, Lachnospiraceae, Butyrivibrio, Peregrinibacteria, Acidaminococcus, Porphyromonas, Lachnospiraceae, Porphromonas, Prevotella, Moraxela, Smithella, Leptospira, Lachnospiraceae, Francisella, Candidatus, and Eubacterium. In certain embodiments, Cpf1 is derived from a species from the Acidaminococcus genus (AsCpf1). In other embodiments, Cpf1 is derived from a species from the Lachnospiraceae genus (LbCpf1). In yet other embodiments, the Cpf1 is a humanized form of LbCpf1.

[0153] In the context of formation of a CRISPR complex, “target sequence” refers to a sequence to which a crRNA sequence is designed to have some complementarity, where hybridization between a target sequence and a crRNA sequence promotes the formation of a CRISPR complex.

[0154] Full complementarity is not necessarily required, provided there is sufficient complementarity to cause hybridization and promote formation of a CRISPR complex. A target sequence may comprise any polynucleotide, such as DNA or RNA polynucleotides.

[0155] In certain embodiments, one or more vectors driving expression of one or more elements of a CRISPR system are introduced into a cell, such that expression of the elements of the CRISPR system direct formation of a CRISPR complex at one or more target sites. For example, a Cpf1 enzyme, and a crRNA could each be operably linked to separate regulatory elements on separate vectors. Alternatively, two or more of the elements expressed from the same or different regulatory elements may be combined in a single vector, with one or more additional vectors providing any components of the CRISPR system not included in the first vector. CRISPR system elements that are combined in a single vector may be arranged in any suitable orientation, such as one element located 5′ with respect to (“upstream” of) or 3′ with respect to (“downstream” of) a second element. The coding sequence of one element may be located on the same or opposite strand of the coding sequence of a second element, and oriented in the same or opposite direction.

[0156] In certain embodiments, the CRISPR enzyme is part of a fusion protein comprising one or more heterologous protein domains (e.g. about or more than about 1, 2, 3, 4, 5, 6, 7, 8, 9, 10, or more domains in addition to the CRISPR enzyme). A CRISPR enzyme fusion protein may comprise any additional protein sequence, and optionally a linker sequence between any two domains. Examples of protein domains that may be fused to a CRISPR enzyme include, without limitation, epitope tags, reporter gene sequences, and protein domains having one or more of the following activities: methylase activity, demethylase activity, transcription activation activity, transcription repression activity, transcription release factor activity, histone modification activity, RNA cleavage activity, and nucleic acid binding activity. Additional domains that can form part of a fusion protein comprising a CRISPR enzyme are described in U.S. Patent Appl. Publ. No. US20110059502, which is incorporated herein by reference. In certain embodiments, a tagged CRISPR enzyme is used to identify the location of a target sequence.

[0157] Conventional viral and non-viral based gene transfer methods can be used to introduce nucleic acids in mammalian and non-mammalian cells or target tissues. Such methods can be used to administer nucleic acids encoding components of a CRISPR system to cells in culture, or in a host organism. Non-viral vector delivery systems include DNA plasmids, RNA (e.g., a transcript of a vector described herein), naked nucleic acid, and nucleic acid complexed with a delivery vehicle, such as a liposome. Viral vector delivery systems include DNA and RNA viruses, which have either episomal or integrated genomes after delivery to the cell (Anderson, 1992, Science 256:808-813; and Yu, et al., 1994, Gene Therapy 1:13-26).

[0158] In one non-limiting embodiment, a vector drives the expression of the CRISPR system. The art is replete with suitable vectors that are useful in the present invention. The vectors to be used are suitable for replication and, optionally, integration in eukaryotic cells. Typical vectors contain transcription and translation terminators, initiation sequences, and promoters useful for regulation of the expression of the desired nucleic acid sequence. The vectors of the present invention may also be used for nucleic acid standard gene delivery protocols. Methods for gene delivery are known in the art (U.S. Pat. Nos. 5,399,346, 5,580,859 & 5,589,466, incorporated by reference herein in their entireties).

[0159] Further, the vector can be provided to a cell in the form of a viral vector. Viral vector technology is well known in the art and is described, for example, in Sambrook et al. (4^{th} Edition, Molecular Cloning: A Laboratory Manual, Cold Spring Harbor Laboratory, New York, 2012), and in other virology and molecular biology manuals. Viruses, which are useful as vectors include, but are not limited to, retroviruses, adenoviruses, adeno-associated viruses, herpes viruses, Sindbis virus, gammaretrovirus, and lentiviruses. In general, a suitable vector contains an origin of replication functional in at least one organism, a promoter sequence, convenient restriction endonuclease sites, and one or more selectable markers (e.g., WO 01/96584; WO 01/29058; and U.S. Pat. No. 6,326,193).

[0160] Introduction of Nucleic Acids Methods of introducing nucleic acids into a cell include physical, biological and chemical methods. Physical methods for introducing a polynucleotide, such as RNA, into a host cell include calcium phosphate precipitation, lipofection, particle bombardment, microinjection, electroporation, and the like. RNA can be introduced into target cells using commercially available methods including electroporation (Amaxa Nucleofector-II (Amaxa Biosystems, Cologne, Germany)), (ECM 830 (BTX) (Harvard Instruments, Boston, Mass.) or the Gene Pulser II (BioRad, Denver, Colo.), Multiporator (Eppendort, Hamburg Germany). RNA can also be introduced into cells using cationic liposome mediated transfection using lipofection, using polymer encapsulation, using peptide mediated transfection, or using biolistic particle delivery systems such as “gene guns” (see, for example, Nishikawa, et al., Hum Gene Ther., 12(8):861-70 (2001).

[0161] Biological methods for introducing a polynucleotide of interest into a host cell include use of DNA and RNA vectors. Viral vectors, and especially retroviral vectors, have become the most widely used method for inserting genes into mammalian, e.g., human cells. Other viral vectors can be derived from lentivirus, poxviruses, herpes simplex virus I, adenoviruses and adeno-associated viruses, and the like. See, for example, U.S. Pat. Nos. 5,350,674 and 5,585,362.

[0162] Chemical means for introducing a polynucleotide into a host cell include colloidal dispersion systems, such as macromolecule complexes, nanocapsules, microspheres, beads, and lipid-based systems including oil-in-water emulsions, micelles, mixed micelles, and liposomes. An exemplary colloidal system for use as a delivery vehicle in vitro and in vivo is a liposome (e.g., an artificial membrane vesicle).

[0163] Regardless of the method used to introduce exogenous nucleic acids into a host cell or otherwise expose a cell to the inhibitor of the present invention, in order to confirm the presence of the nucleic acids in the host cell, a variety of assays may be performed. Such assays include, for example, “molecular biological” assays well known to those of skill in the art, such as Southern and Northern blotting, RT-PCR and PCR; “biochemical” assays, such as detecting the presence or absence of a particular peptide, e.g., by immunological means (ELISAs and Western blots) or by assays described herein to identify agents falling within the scope of the invention.

[0164] It should be understood that the methods and compositions that would be useful in the present invention are not limited to the particular formulations set forth in the examples. The following examples are put forth so as to provide those of ordinary skill in the art with a complete disclosure and description, and are not intended to limit the scope of what the inventors regard as their invention.

[0165] The practice of the present invention employs, unless otherwise indicated, conventional techniques of molecular biology (including recombinant techniques), microbiology, cell biology, biochemistry and immunology, which are well within the purview of the skilled artisan. Such techniques are explained fully in the literature, such as, Molecular Cloning: A Laboratory Manual”, fourth edition (Sambrook et al. (2012) Molecular Cloning, Cold Spring Harbor Laboratory); “Oligonucleotide Synthesis” (Gait, M. J. (1984). Oligonucleotide synthesis. IRL press); “Culture of Animal Cells” (Freshney, R. (2010). Culture of animal cells. Cell Proliferation, 15(2.3), 1); “Methods in Enzymology” “Weir's Handbook of Experimental Immunology” (Wiley-Blackwell; 5 edition (Jan. 15, 1996); “Gene Transfer Vectors for Mammalian Cells” (Miller and Carlos, (1987) Cold Spring Harbor Laboratory, New York); “Short Protocols in Molecular Biology” (Ausubel et al., Current Protocols; 5 edition (Nov. 5, 2002)); “Polymerase Chain Reaction: Principles, Applications and Troubleshooting”, (Babar, M., VDM Verlag Dr. Müller (Aug. 17, 2011)); “Current Protocols in Immunology” (Coligan, John Wiley & Sons, Inc. Nov. 1, 2002).

[0166] Those skilled in the art will recognize, or be able to ascertain using no more than routine experimentation, numerous equivalents to the specific procedures, embodiments, claims, and examples described herein. Such equivalents were considered to be within the scope of this invention and covered by the claims appended hereto. For example, it should be understood, that modifications in reaction conditions, including but not limited to reaction times, reaction size/volume, and experimental reagents, such as solvents, catalysts, pressures, atmospheric conditions, e.g., nitrogen atmosphere, and reducing/oxidizing agents, with art-recognized alternatives and using no more than routine experimentation, are within the scope of the present application.

[0167] It is to be understood that wherever values and ranges are provided herein, all values and ranges encompassed by these values and ranges, are meant to be encompassed within the scope of the present invention. Moreover, all values that fall within these ranges, as well as the upper or lower limits of a range of values, are also contemplated by the present application.

[0168] The following examples further illustrate aspects of the present invention. However, they are in no way a limitation of the teachings or disclosure of the present invention as set forth herein.

### EXPERIMENTAL EXAMPLES

[0169] The invention is now described with reference to the following Examples. These Examples are provided for the purpose of illustration only, and the invention is not limited to these Examples, but rather encompasses all variations that are evident as a result of the teachings provided herein.

[0170] The materials and methods employed in Experimental Examples 1-7 are now described.

[0171] Design, synthesis and cloning of the CCAS library: Significantly mutated genes (SMGs) were identified by analysis of pan-cancer mutation data of 17 cancer types from The Cancer Genome Atlas downloaded via Synapse (www dot synapse.org/#!Synapse:syni729383) and from the Broad Institute GDAC (gdac dot broadinstitute dot org/). The top 50 putative tumor suppressors (TSGs) were chosen in an unbiased manner using a multistep approach that prioritizes genes, which are significantly mutated in multiple cancer types and possess mutational signatures consistent with non-oncogenes. (1) A list of all significantly mutated genes in each of the 17 cancer types were first compiled by collecting all MutSig2CV results from GDAC and using a cutoff of q<0.1. (2) To remove putative oncogenes from the significantly mutated gene sets in each cancer type, the ratio of null to silent mutations for each SMG in that cancer was calculated, and this ratio was multiplied by the square root of the number of null mutations. (3) Ratio scores for each gene were then summed across cancer types. (4) Finally, to heavily weight genes that are SMGs in multiple cancer types, the summed ratio scores were multiplied by the number of unique cancer types in which a gene was considered an SMG. The resulting gene set was defined as PANCAN17-TSG50.

[0172] Of the top 50 putative TSGs identified by this approach, 49 were found to have clear mouse orthologs (defined as PANCAN17-mTSG). The complete exon sequences of these 49 genes were then analyzed to extract all possible Cpf1 spacers (i.e., all 20 mers beginning with the Cpf1 PAM, 5′-TTTN-3′). Each of these 20 mers was then reverse complemented and mapped to the entire mm10 reference genome by Bowtie 1.1.2, with settings bowtie -n 2-l 18 -p 8 -a -y --best -e 90. After filtering out all alignments that contained mismatches in the final 3 basepairs (corresponding to the Cpf1 PAM) and disregarding any mismatches in the fourth to last basepair, the number of genome-wide alignments for each crRNA were quantified using all 0, 1, and 2 mismatch (mm) alignments. A total mismatch score (MM score) was calculated for each crRNA using the following ad hoc formula: MM score=0 mm*1000+1 mm*50+2 mm*1. An “on-target” (OT) score was also approximated by counting the number of consecutive thymidines in each crRNA, and then using the formula: OT score=100/(max_consecutive_Thymidines)². All the crRNAs corresponding to each target gene were sorted by low MM score and high OT score. Finally, the top 2 crRNAs for each gene were chosen. In the event of ties, crRNAs targeting constitutive exons and/or the first exon were prioritized. 3 NTC crRNAs were randomly generated.

[0173] To generate the 9,408 DKO crRNA arrays in the library, all possible permutations of the 98 gene-targeting crRNAs were computed, with the stipulation that crRNAs targeting the same gene would not be included in the same crRNA array. For SKO crRNA arrays, each gene-targeting crRNA was placed in the first position of the crRNA array and the 3 NTCs were toggled through the second position (98*3=294 crRNA arrays). Finally, 3 NTC-NTC crRNA arrays were generated from various combinations of the 3 NTC single crRNAs.

[0174] Cell lines: A non-small cell lung cancer (NSCLC) cell line (KPD cell line) was used for initial testing of crRNA array constructs. An immortalized, but non-transformed hepatocyte cell line (clone IM) was transduced with LentiCpf1 to generate Cpf1-positive cells (IM.C9-Cpf1). All cell lines were grown under standard conditions using DMEM containing 10% FBS, 1% Pen/strep in a 5% CO₂ incubator.

[0175] Nextera analysis of indels generated by Cpf1: CrRNA arrays (crPten.crNf1 and crNf1.crPten) were cloned into Lenti-U6-crRNA vector, and virus was generated for transduction of KPD cell line.

(SEQ ID NO: 9,709)
crPten = TGCATACGCTATAGCTGCTT
(SEQ ID NO: 9,710)
crNfl = TAAGCATAATGATGATGCCA

[0176] Seven days after transduction and puromycin selection, genomic DNA was harvested from the cells in culture. The surrounding genomic regions flanking the target sites of crPten and crNf1 were first amplified by PCR using the following primers (5′-3′): Pten_fwd=ACTCACCAGTGTTTAACATGCAGGC (SEQ ID NO: 9,711), Pten_rev=GGCAAGGTAGGTACGCATTTGCT (SEQ ID NO: 9,712); Nf1_fwd=AGCAGCTGTCCTGGCTGTTC (SEQ ID NO: 9,713), Nf1_rev=CGTGCACCTCCCTTGTCAGG (SEQ ID NO: 9,714). Nextera XT library preparation was then performed according to manufacturer protocol. Reads were mapped to the mm10 mouse genome using BWA (Li and Durbin. Bioinforma. Oxf Engl. 25, 1754-1760 (2009)), with the settings bwa mem -t 8 -w 200. Indel variants were first processed with Samtools (Li, H. et al. Bioinformatics 25, 2078-2079 (2009)) with the settings samtools mpileup -B -q 10 -d 10000000000000, then piped into VarScan v2.3.9 (Koboldt, et al. Genome Res. 22, 568-576 (2012)) with the settings pileup2indel --min-coverage 1 --min-reads2 1 --min-var-freq 0.00001.

[0177] Lentiviral library production: The LentiCpf1, Lenti-U6-crRNA vector and Lenti-CCAS library plasmids were used to make vector or library-containing lentiviruses. Briefly, envelope plasmid pMD2.G, packaging plasmid psPAX2, and LentiCpf1, Lenti-U6-crRNA or Lenti-CCAS-library plasmid were added at ratios of 1:1:2.5, and then polyethyleneimine (PEI) was added and mixed well by vortexing. The solution was standing at room temperature for 10-20 min, and then the mixture was dropwisely added into 80-90% confluent HEK293FT cells and mixed well by gently agitating the plates. Six hours post-transfection, fresh DMEM supplemented with 10% FBS and 1% Pen/Strep was added to replace the transfection media. Virus-containing supernatant was collected at 48 h and 72 h post-transfection, and was centrifuged at 1500 g for 10 min to remove the cell debris; aliquoted and stored at −80° C. Virus was titrated by infecting IM-Cpf1 cells at a number of different concentrations, followed by the addition of 2 μg/mL puromycin at 24 h post-infection to select the transduced cells. The virus titers were determined by calculating the ratios of surviving cells 48 or 72 h post infection and the cell count at infection.

[0178] CCAS in a mouse model of transformation and early tumorigenesis: Cells were transduced and library transduction was performed with four infection replicates at high coverage and low MOI. Briefly, according to the viral titers, CCAS library lentiviruses were added into a total of >1×10⁸ IM.C9-Cpf1 cells at calculated MOI of <=0.2 and incubated 24 h before replacing the viruses-containing media with 3 g/mL puromycin containing fresh media to select the virus-transduced cells. Approximately 2×10⁷ cells confer a -2,000× library coverage. Vector and CCAS library-transduced cells were culture under the pressure of 3 μg/mL puromycin for 7 days before injection or cryopreservation.

[0179] Vector and CCAS library-transduced IM.C9-Cpf1 cells were injected subcutaneously into the right and left flanks of Nu/Nu mice at 4×10⁶ cells per flank (˜400× coverage per transplant). Tumors were measured every week by caliper and their sizes were estimated as spheres. Statistical significance was assessed by paired t-test.

[0180] Mouse tumor dissection and histology: Mice were sacrificed by carbon dioxide asphyxiation followed by cervical dislocation. Tumors and other organs were manually dissected, and then fixed in 10% formalin for 24-96 hours, and transferred into 70% Ethanol for long-term storage. The tissues were embedded in paraffin, sectioned at 5 μm and stained with hematoxylin and eosin (H&E) for pathological analysis. For tumor size quantification, H&E slides were scanned using an Aperio digital slidescanner (Leica). For molecular biological analysis, tissues were flash frozen with liquid nitrogen, and ground in 5 mL Frosted polyethylene vial set (2240-PEF) in a 2010 GenoGrinder machine (SPEXSamplePrep). Homogenized tissues were used for DNA/RNA/protein extractions.

[0181] CCAS in a mouse model of metastasis: For Cpf1 crRNA array library screen in a mouse model of metastasis, lentiviral pools were generated from the CCAS plasmid library, and transduced ≥1×10⁸ Cpf1+ KPD cells with three independent infection replicates at calculated MOI of ≤0.2 and incubated 24 h before replacing the viruses-containing media with 3 g/mL puromycin containing fresh media to select the virus-transduced cells. Approximately 2×10⁷ cells confer a 2,000× library coverage. CCAS library-transduced cells were culture under the pressure of 3 μg/mL puromycin for 7 days before injection or cryopreservation.

[0182] CCAS-treated cells were then injected at 4×10⁶ cells per mouse (˜400× coverage) subcutaneously into Nu/Nu mice (n=7) and Rag1−/− mice (n=4). Metastases were allowed to form in vivo for 8 weeks after injection. Primary tumors, four lung lobes, and other stereoscope-visible metastases, were then dissected and then subjected to genomic DNA extraction and crRNA array sequencing.

[0183] Genomic DNA extraction: 200-800 mg of frozen ground tissue were re-suspended in 6 mL of NK Lysis Buffer (50 mM Tris, 50 mM EDTA, 1% SDS, pH 8.0) supplemented with 30 μL of 20 mg/mL Proteinase K (Qiagen) in 15 mL conical tubes, and incubated at 55° C. bath for 2 h up to overnight. After all the tissues have been lysed, 30 μL of 10 mg/mL RNAse A (Qiagen) was added, mixed well and incubated at 37° C. for 30 min. Samples were chilled on ice and then 2 mL of pre-chilled 7.5 M ammonium acetate (Sigma) was added to precipitate proteins. The samples were inverted and vortexed for 15-30 s and then centrifuged at ≥4,000 g for 10 min. The supernatant was carefully decanted into a new 15 mL conical tube, followed by the addition of 6 mL 100% isopropanol (at a ratio of 0.7), inverted 30-50 times and centrifuged at ≥4,000 g for 10 minutes. Genomic DNA should be visible as a small white pellet. After discarding the supernatant, 6 mL of freshly prepared 70% ethanol was added, mixed well, and then centrifuged at ≥4,000 g for 10 min. The supernatant was discarded by pouring; and remaining residues was removed using a pipette. After air-drying for 10-30 min, DNA was re-suspended by adding 200-500 μL of Nuclease-Free H₂O. The genomic DNA concentration was measured using a Nanodrop (Thermo Scientific), and normalized to 1000 ng/L for the following readout PCR.

[0184] Cpf1 CrRNA array library readout: The crRNA array library readout was performed using a 2-step PCR approach. Briefly, in the 1st round PCR, enough genomic DNA was used as template to guarantee coverage of the library abundance and representation. For example, assuming 6.6 pg of gDNA per cell, 20-48 μg of gDNA (≥75×) was used per sample. For the 1st PCR, the sgRNA-included region was amplified using primers specific to the double-knockout CCAS vector using Phusion Flash High Fidelity Master Mix (ThermoFisher) with thermocycling parameters: 98° C. for 1 min, 15 cycles of (98° C. for is, 60° C. for 5 s, 72° C. for 15s), and 72° C. for 1 min. Fwd: AATGGACTATCATATGCTTACCGTAACTTGAAAGTATTTCG (SEQ ID NO: 9,715); Rev: CTTTAGTTTGTATGTCTGTTGCTATTATGTCTACTATTCTTTCCC (SEQ ID NO: 9,716)

[0185] In the 2nd PCR, 1st round PCR products for each biological repeats were pooled, then 1-2 μL well-mixed 1st PCR products were used as the template for amplification using sample-tracking barcode primers with thermocycling conditions as 98° C. for 1 min, 15 cycles of (98° C. for is, 60° C. for 5 s, 72° C. for 15s), and 72° C. for 1 min. The 2^{nd} PCR products were quantified in 2% E-gel EX (Life Technologies) using E-Gel® Low Range Quantitative DNA Ladder (ThermoFisher), then the same amount of each barcoded samples were combined. The pooled PCR products were purified using QIAquick PCR Purification Kit and further QIAquick Gel Extraction Kit from 2% E-gel EX. The purified pooled library was quantified in a gel-based method. Diluted libraries with 5-20% PhiX were sequenced with Hiseq 2500 or HiSeq 4000 systems (Illumina) with 150 bp paired-end read length.

[0186] Cpf1 double knockout Illumina data pre-processing: Raw single-end fastq read files were filtered and demultiplexed using Cutadapt (Martin, EMBnet.journal 17, 10-12 (2011)). To remove extra sequences downstream (i.e. 3′ end) of the dual-RNA spacer sequences, including the U6 terminator, the following settings were used: cutadapt --discard-untrimmed -e 0.1 -a TTTTTTAAGCTTGGCGTGGATCCGATATCA (SEQ ID NO: 9,717). As the forward PCR primers used to readout crRNA array representation were designed to have a variety of barcodes to facilitate multiplexed sequencing, these filtered reads were then demultiplexed with the following settings: cutadapt -g file:fbc.fasta --no-trim, where fbc.fasta contained the 12 possible barcode sequences within the forward primers. Finally, to remove extraneous sequences upstream (i.e. 5′ end) of the crRNA array spacers, including the first DR, the following settings were used: cutadapt --discard-untrimmed -e 0.1 -g AAAGGACGAAACACCgTAATTTCT ACTAAGTGTAGAT (SEQ ID NO: 9,718). Through this procedure, the raw fastq read files were pared down to the sequences of the first crRNA, the second DR, and finally the second crRNA (cr1-DR-cr2). The filtered fastq reads were then mapped to the CCAS reference index.

[0187] To do so, a bowtie index of the CCAS library was first generated using the bowtie-build command in Bowtie 1.1.2 (Langmead, et al. (2009), Genome Biol. 10, R25). Using these bowtie indexes, the filtered fastq read files were mapped using the following settings: bowtie -v 2 -k 1 -m 1 --best. These settings ensured only single-match reads would be retained for downstream analysis.

[0188] Analysis of CCAS library representation: Using the resultant mapping output, the number of reads that had mapped to each crRNA array within the library were quantitated. The number of reads in each sample were normalized by converting raw crRNA array counts to reads per million (rpm). The rpm values were then subject to log₂ transformation for certain analyses. To generate correlation heatmaps, the NMF R package was used. To generate sgRNA representation barplots, a detection threshold of log₂ rpm≥1 was set, and the number of unique crRNA arrays present in each sample was counted.

[0189] Analysis of enriched DKO and SKO crRNA arrays: To directly compare the abundance in tumor samples vs. cells, linear regression was performed and significant outliers identified using the outlierTest function from the car R package. Significant outlier crRNA arrays in individual tumors vs. cells were defined as having a Bonferroni adjusted p<0.05, based on analysis of the studentized regression residuals.

[0190] To identify crRNA arrays significantly enriched above NTC-NTC controls, two-sided t-tests were similarly performed on the log₂ rpm abundance of each crRNA array compared to the average of all NTC-NTC crRNA arrays. Significantly enriched crRNA arrays were defined as having a Benjamini-Hochberg adjusted p<0.05. Each significantly enriched crRNA array was then deconstructed into its two constituent crRNAs, and finally down to the two target genes. This 3-tiered dataset was used to determine how many genes were involved in an enriched crRNA array (either SKO or DKO). Finally, all of the significant crRNA arrays associated with each gene were compiled, and the number of DKO or SKO crRNA arrays counted.

[0191] Position effect analysis of crRNA permutations: Marginal distribution analysis was performed by considering each of the 98 single crRNAs when found in position 1 or position 2 of the crRNA array. Specifically, the average log₂ rpm abundance was calculated for each single crRNA, and these average scores were compared between position 1 and position 2. For direct permutation correlation analysis, the 9,408 DKO crRNA arrays were condensed down into 4,704 crRNA array combinations (i.e., crX.crY and crY.crX are two permutations of the same combination). The correlation between the two corresponding permutations was then calculated the across all 10 tumor samples (defined as permutation correlation), and the statistical significance assessed by t-distribution. Violin plots, empirical density plots, and scatterplots were generated using these permutation correlation coefficients.

[0192] Synergy analysis of gene pairs: The synergy coefficient (SynCo) for each DKO crRNA array was defined with the following formula:

SynCo=DKO_{xy}−SKOₓ−SKO_{y}

[0193] The DKOₓy score is the log₂ rpm abundance of the DKO crRNA array (i.e., crX.crY) after subtracting average NTC-NTC abundance, while SKOₓ and SKO_{y} scores are defined as the average log₂ rpm abundance of each SKO crRNA array (3 SKO crRNA arrays associated with each individual crRNA), each after subtracting average NTC-NTC abundance. By this definition, a SynCo score>>0 would indicate that a given DKO crRNA array is synergistic, as the DKO score would thus be greater than the sum of the individual SKO scores. The SynCo of each DKO crRNA array was calculated within each tumor sample and it was assessed whether the SynCo score of a given crRNA array across all 10 tumors was statistically significantly different from 0 by a two-sided one-sample t-test. A significance threshold of Benjamini-Hochberg adjusted p<0.05 was set, and all significant DKO crRNA arrays with an average SynCo>0 were considered to be synergistic.

[0194] Network analysis: Using the synergistic crRNA arrays identified through SynCo analysis, library-wide networks were constructed using individual genes as nodes and SynCo scores as edge weights. The pairwise connections were visualized through Cytoscape 3.4.0 (Shannon et al., Genome Res. 13, 2498-2504 (2003)). Edge width was scaled according to SynCo score. For the global network, node color was additionally scaled according to the degree of network connectivity.

[0195] Analysis of co-mutation patterns in human pan-cancer datasets: For the synergistic driver pairs identified by the CCAS screen, co-mutation analyses were performed on 21 different solid tumor types, all of which were from TCGA except for small cell lung cancer. The somatic mutation and copy number status of each cohort were obtained from cBioPortal (Cerami et al., Cancer Discov. 2, 401-404 (2012) (only somatic mutations were available for lung small cell cancer) and classified all tumors as a mutant or non-mutant for the genes represented in the CCAS library. “Mutant” was defined as the presence of nonsynonymous mutations and/or deep deletions in a given gene. After classifying every patient in terms of mutant status, co-mutation (co-occurrence) analysis was performed by calculating the co-occurrence rate for each gene pair. The co-occurrence rate was defined as the intersection (the number of double mutant samples) divided by the union (the number of all single and double mutant samples). Statistical significance was tested by a hypergeometric test, with a significance threshold of Benjamini-Hochberg adjusted p<0.05.

[0196] Analysis of metastasis enrichment over primary tumor and metastatic clonal spread: Comparison of the crRNA array representations was made between metastases to primary tumors. A crRNA array was called metastasis-enriched if it was a dominant clone in a lung lobe or extra-pulmonary metastasis (≥2% total reads) but not a dominant clone in the corresponding primary tumor of the same mouse. Waterfall plot was made for all crRNA arrays enriched in a metastases vs primary tumor, ranked by numbers of mice where an crRNA was called enriched.

[0197] Monoclonal spread was defined where dominant metastases in all lobes were derived from identical crRNA arrays, and polyclonal spread was defined where dominant metastases in all lobes were derived from multiple varying crRNAs.

[0198] Blinding statement: Investigators were blinded for sequencing data analysis, but not blinded for tumor engraftment, organ dissection and histology analysis.

[0199] The results of the experiments from Examples 1-7 are now described.

### Example 1: Enabling One-Step Double Knockout Screening with a Cpf1 crRNA Array Library

[0200] To establish a lentiviral system for CRISPR/Cpf1-mediated genetic screening, a human-codon-optimized LbCpf1 expression vector (pLenti-EFS-Cpf1-blast, LentiCpf1 for short) and a crRNA expression vector (pLenti-U6-DR-crRNA-puro, Lenti-U6-crRNA for short) were generated (FIG. 1A). In order to facilitate direct and targeted double knockout studies using a single crRNA array, oligos were designed with a 5′ homology arm to the base vector, followed by a crRNA, the direct repeat (DR) sequence for Cpf1, a second crRNA, a U6 terminator, and finally a 3′ homology arm (cr1-DR-cr2). As the oligos each contained two crRNAs, these constructs were termed crRNA arrays. Linearization of the Lenti-U6-crRNA vector enabled one-step cloning of the crRNA array into the vector by Gibson assembly, producing the double knockout crRNA array expression vector (pLenti-U6-DR-cr1-DR-cr2-puro) (FIG. 1B). The constructs were tested for their ability to induce double knockouts in a murine cancer cell line (KPD) in vitro. After infection with LentiCpf1, the cells were transduced with lentiviruses carrying a crRNA array targeting Pten and Nf1 (FIG. 8A). To confirm whether Cpf1 can mediate mutagenesis regardless of the position of each crRNA within the array, two permutations of the Pten and Nf1 crRNA array were generated (crPten.crNf1 and crNf1.crPten, all with 20 nt spacers) (FIG. 8A). Both crPten.crNf1 and crNf1.crPten crRNA arrays generated indels at both loci in Cpf1+ KPD cells (FIG. 8B). These data confirmed that a single crRNA array can be used in conjunction with CRISPR-Cpf1 to mediate simultaneous knockout of two genes in mammalian cells.

[0201] To investigate whether Cpf1 multiplex gene targeting could be utilized for multidimensional genetic interaction screens, a library for Cpf1 crRNA array screening was developed (CCAS library). Considering the resolution of library complexity under in vivo cellular dynamics, a focused CCAS library was designed of the top 50 significantly mutated genes (SMGs) that are not oncogenes, with the vast majority being established or putative tumor suppressor genes (TSGs) identified through analysis of 17 different cancer types from The Cancer Genome Atlas (TCGA). The resultant gene set was termed PANCAN7-TSG50. (FIG. 1C). 49 of the PANCAN17-TSG50 genes had corresponding mouse orthologs (PANCAN17-mTSG), and were thus included in the CCAS library. All possible Cpf1 spacer sequences were identified within PANCAN17-mTSG and subsequently 2 crRNAs were chosen for each gene. The selection of crRNAs was based on two scoring criteria: (1) high genome-wide mapping specificity and (2) a low number of consecutive thymidines, since long stretches of thymidines will terminate U6 transcription.

[0202] Compiling these 98 gene-targeting crRNAs and 3 additional non-targeting control (NTC) crRNAs, crRNA array library was designed containing 9,705 permutations of two crRNAs each (FIGS. 20A-20F). Of the 9,705 total crRNA arrays in the library (SEQ ID NOs: 4-9,708), 9,408 were comprised of two gene-targeting crRNAs (double knockout, or DKO), while 294 contained one gene-targeting crRNA and one NTC crRNA (single knockout, or SKO). The remaining 3 crRNA arrays were dedicated controls, with two different NTC crRNAs in the crRNA array (NTC-NTC). After pooled oligo synthesis, the PANCAN17-mTSG CCAS library was cloned into the base vector, and the plasmid crRNA array representation subsequently readout by deep-sequencing the crRNA expression cassette. All 9,705/9,705 (100%) of the designed crRNA arrays were successfully cloned (FIG. 1D, FIG. 9B). Analysis of each crRNA array within the CCAS library revealed that the relative abundances of both DKO and SKO crRNA arrays approximated a log-normal distribution, demonstrating even coverage of the CCAS library (FIG. 1D). Lentiviral pools from the CCAS plasmid library were generated for subsequent high-throughput double-mutagenesis and genetic interaction screens.

### Example 2: Library-Scale Cpf1 crRNA Array Screen in a Mouse Model of Early Tumorigenesis

[0203] To perform an in vivo Cpf1 screen, a mouse model of malignant transformation and early stage tumorigenesis was utilized. An immortalized murine cell line was transduced with low tumorigenicity (clone IM) with LentiCpf1 and then with the CCAS lentiviral pool. The library transduction was performed with four infection replicates at high coverage (˜2,000× coverage for each replicate) and low multiplicity of infection (MOI, ≤0.2) to ensure the vast majority of cells would only carry one provirus integrant (FIG. 2A). After 7 days of puromycin selection, only CCAS-virus infected cells survived, comprising a mixture of various double mutants (termed CCAS-treated cells hereafter). In parallel, another group of Cpf1+ cells were infected with lentiviruses carrying the empty vector. The virus-treated cell populations were then subcutaneously injected into nude mice (CCAS, n=10 mice; vector, n=4 mice). By 45 days post-injection (dpi), CCAS-treated cells had given rise to significantly larger tumors than vector-treated cells (p=0.0223, by two-sided t-test) (FIG. 2B). This trend continued through the duration of the experiment (46.5 dpi, p=0.0017). A select fraction of tumors derived from CCAS-treated cells were harvested and sectioned for histological analysis, together with the small nodules derived from vector-treated cells (FIG. 2C).

[0204] To unveil the genetic interactions that had driven rapid tumor growth upon Cpf1-mediated mutagenesis, crRNA array sequencing was performed on genomic DNA from CCAS tumors (n=10) and pre-injection cell pools (n=4). Whereas plasmid and cell samples were highly correlated with one another, tumor samples were more correlated with other tumors (FIG. 9A). All plasmid and cell samples contained 100% of CCAS crRNA arrays, while tumor samples exhibited significantly lower crRNA array library diversity (mean SEM=37.0% 10.5%; p 2.02 e-4 compared to plasmid and cells, t-test) (FIG. 9B). Furthermore, while plasmid and cell samples exhibited robust lognormal representation of the CCAS library (FIG. 9C), tumor samples showed strong enrichment of specific SKO and DKO crRNA arrays (FIG. 9C, FIG. 2D). Of note, the 3 NTC-NTC controls in the CCAS library were consistently found at abundances similar to one another within each of the plasmid and cell samples. All NTC-NTCs were found at low abundance across all tumor samples (average log₂ rpm abundance=0.224±0.108), suggesting non-mutagenized cells do not have a selective advantage in tumorigenesis and that additional genetic perturbation is needed to drive rapid tumor growth in vivo. As a global comparison of all crRNA arrays, while the mean abundance in tumor samples correlated with the mean abundance in cell samples in a log-linear manner (regression r²=0.166, coefficient=0.569, p<2.2 e-16 by F-test), a population of crRNA arrays were outliers (Outlier test, Bonferroni adjusted p<0.05), indicating that specific crRNA arrays had undergone positive selection in vivo (FIG. 2E). This trend was consistent across the individual tumors (p<2.2 e-16 by F-test for all individual tumors, average number of outliers compared to cells=102.1±3.671 crRNA arrays) (FIGS. 10A-10B). Taken together, these data suggest that a subgroup of crRNA arrays was enriched in tumors, indicating that a select number of mutant clones had significantly expanded in vivo.

### Example 3: Enrichment Analysis of Single Knockout and Double Knockout crRNA Arrays

[0205] To further investigate the specific genetic interactions that had driven early stage tumorigenesis in CCAS-treated cells, the distribution of raw crRNA array abundance within each sample was examined. Within each tumor, specific crRNA arrays were observed that were heavily enriched by several orders of magnitude, suggesting that these mutant clones had undergone potent positive selection (FIG. 3A, FIG. 9D). For example, in Tumor 1, crCasp8.crApc was by far the most abundant crRNA array, dwarfing all other crRNA arrays including the corresponding SKO crRNA arrays crApc.NTC and crCasp8.NTC (FIG. 3A).

[0206] Interestingly, this finding that several DKO crRNA arrays were more heavily enriched than their SKO counterparts was corroborated across tumors. For instance, Tumor 3 was dominated by crSetd2.crAcvr2a and crRnf43.crAtrx, Tumor 5 by crCic.crZc3h13 and crCbwd1.crNsd1, and Tumor 6 by crAtm.crRunx1 and crKmt2d.crH2-Q2 (FIG. 3A, FIG. 9D). In all of these cases, the corresponding SKO crRNA arrays were far less abundant compared to the DKO crRNA arrays.

[0207] Taken together, these data point to the dominance of a handful of individual clones within each tumor sample, and further suggest that certain double-mutant clones had out-competed the corresponding single-mutant clones.

[0208] In order to uncover the genetic interactions underlying the positive selection in vivo, the next set of experiments set out to quantitatively identify all significantly enriched crRNA arrays across all 10 tumors. The abundance of each DKO and SKO crRNA array was compared to the average of all NTC-NTC crRNA arrays. 655 crRNA arrays targeting 498 gene combinations were found to be significantly enriched compared to NTC-NTC controls (Benjamini-Hochberg adjusted p<0.05) (FIG. 3B). Of these, 620 were DKO crRNA arrays and 35 were SKO crRNA arrays. The 655 significantly enriched crRNA arrays were decomposed to their constituent single crRNAs, and the target genes associated with each single crRNA were identified. All 49 genes in the PANCAN17-mTSG CCAS library were represented within at least one significant DKO crRNA array, and 24 genes were additionally found to be significant as part of a SKO crRNA array (FIG. 3B). To identify the genes most frequently targeted among the set of 655 significant crRNA arrays, the number of significant crRNA arrays associated with each gene were counted. Rnf43 and Kmt2c were the two genes with the largest number of significant crRNA arrays (FIG. 3C). Interestingly, of the top 10 genes in this analysis, 6 are epigenetic modifiers (Kmt2c, Atrx, Kdm5c, Setd2, Kdm6a, and Arid1a), revealing the direct phenotypic consequence of their loss-of-function in tumor suppressor gene networks.

[0209] Specific genetic interactions that comprise this network were then investigated. The number of significant DKO crRNA arrays associated with each gene pair were quantified (FIG. 3D). 113 gene pairs were represented by at least 2 independent DKO crRNA arrays. Strikingly, the interaction of Atrx+Setd2 was supported by 5 independent crRNA arrays, while Atrx+Kmt2c, Arid1a+Map3k1, Kdm5c+Kmt2c, and Arid1a+Rnf43 were substantiated by 4 crRNA arrays. In aggregate, these analyses generated an unbiased profile of genetic interactions in tumor suppression dismantled upon Cpf1-mediated double-mutagenesis.

[0210] To investigate possible positional effects for each individual crRNA in the CCAS library, the two permutations of each crRNA array combination were directly compared (FIG. 11A). For each of the 4,704 DKO crRNA array combinations (condensed from 9,408 DKO crRNA array permutations), the Pearson correlation of crRNA array abundance was calculated (i.e. comparing crX.crY to crY.crX) across all tumor samples (subsequently referred to as permutation correlation). Examining the distribution of permutation correlations, a strong skew towards high correlation coefficients was observed (median permutation correlation >0.97) (FIG. 3E), indicating that for most crRNA array combinations, the positioning of constituent single crRNAs did not affect in vivo abundance of the crRNA array (FIG. 11B). In total, 80.1% (3,767/4,704) of all crRNA array combinations were significantly correlated when comparing the 2 permutations associated with each combination (Benjamini-Hochberg adjusted p<0.05, by t-distribution). The two most significantly correlated crRNA array combinations were between the single crRNAs crH2-Q2.1 and crPten.240, and between crCbwd1.84 and crEpha2.5. CrH2-Q2.1_crPten.240 was strongly correlated with the abundance of crPten.240_crH2-Q2.1 across all 10 tumors (R=0.999, p=2.28 e-19), and a similar trend was observed between crCbwd1.84_crEpha2.5 and crEpha2.5_crCbwd1.84 (R=0.999, p=7.09 e-19) (FIGS. 11C-11D).

[0211] To quantitate the gross contributions of individual crRNAs to tumorigenesis, marginal distribution meta-analysis of all 98 constituent single crRNAs in the CCAS library was performed (FIG. 11E). As the CCAS library was designed with crRNA array orientation as a consideration (FIG. 1C), the average log₂ rpm abundance of all DKO crRNA arrays associated with each single crRNA when present in position 1 or in position 2 of the crRNA array was calculated. Across all 98 single crRNAs, the average abundance for each single crRNA when in position 1 was significantly correlated with its average abundance when in position 2 (Pearson correlation coefficient (R)=0.397, p=5.25 e-5 by t-distribution). This finding suggests that a crRNA confers a similar selective advantage regardless of position in the crRNA array considering all other crRNAs it is paired with.

### Example 4: High-Throughput Identification of Synergistic Drivers of Transformation and Tumorigenesis

[0212] To quantitatively investigate the genetic interactions in this model, a metric of synergy for DKO crRNA arrays was developed. Since the relative abundance of a crRNA array is effectively an estimate of its relative selective advantage in vivo, the synergy coefficient (SynCo) for each DKO crRNA array was defined as DKO_{y}−SKOₓ−SKO_{y}. The DKOₓ score is the log₂ rpm abundance of the DKO crRNA array (i.e., crX.crY) after subtracting average NTC-NTC abundance; SKOₓ and SKO_{y} scores are defined as the average log₂ rpm abundance of each SKO crRNA array (3 SKO crRNA arrays associated with each individual crRNA), each after subtracting average NTC-NTC abundance (FIG. 4A). By this definition, a SynCo score>>0 would indicate that a given DKO crRNA array is synergistic, as the DKO score would thus be greater than the sum of the individual SKO scores on a log-linear scale.

[0213] The SynCo of each DKO crRNA array within each tumor sample was calculated, and it was assessed whether the SynCo score of a given crRNA array across all 10 tumors was statistically significantly different from 0 by a two-sided one-sample t-test. Out of 9,408 DKO crRNA arrays, 294 were significantly synergistic (Benjamini-Hochberg adjusted p<0.05, average Synco>0), representing 270 gene combinations. To obtain a comprehensive picture of the synergistic driver pairs, the average SynCo of each DKO crRNA array was plotted against its associated p-value, while additionally color-coding each point by average abundance and scaling the size of each point by the percentage of tumors that had a high SynCo score (SynCo>7) for that crRNA array (FIG. 4B). Among the top synergistic driver pairs in this analysis were crSetd2.crAcvr2a and crCbwd1.crNsd1. Setd2 encodes a histone methyltransferase that has been implicated in a number of cancer types, while Acvr2a is a receptor serine-threonine kinase that plays a critical role in Tgf-P signaling and is frequently mutated in microsatellite-unstable colon cancers. Nsd1 encodes a lysine histone methyltransferase that has been linked to Sotos syndrome, a genetic disorder of cerebral gigantism, and has been implicated in various cancers. In contrast, Cbwd1 encodes an evolutionarily conserved protein whose biological function is unknown; on the basis of its amino acid sequence, Cbwd1 has been predicted to contain a cobalamin synthase W domain, but its function has never been characterized in a mammalian species. Interestingly, many of the high-score SynCo-significant gene pairs have not been functionally characterized in literature.

[0214] To pinpoint the most robust genetic interactions from SynCo analysis, the number of synergistic dual-crRNAs associated with each gene pair was quantified. Of the 268 significant gene pairs, 24 were represented by at least 2 synergistic dual-crRNAs (FIG. 4C). Considering that many gene pairs might have additive effects, the SynCo score is a stringent metric of genetic interaction; thus the finding that several gene pairs were further supported by multiple synergistic dual-crRNAs provides further evidence for the genetic interactions between these genes.

[0215] Two hundred and seventy significant pairwise genetic interactions in early tumorigenesis were identified, many of which corresponded to genomic features of human tumors. Next, each of these gene pairs was placed within the larger network of tumor suppression. A network of all synergistic driver interactions captured by CCAS screening was constructed, where each node represented a gene and each edge represented a significant synergistic interaction (FIG. 12). In this network, the color of each gene was scaled by its degree of connectivity, while edge widths were scaled to the SynCo score associated with that interaction. Surprisingly, H2-Q2, a gene encoding a major histocompatibility complex (MHC) component, the murine homolog of human HLA-A MHC class I A, was found to have the greatest network connectivity, with 19 different interacting partners (FIG. 4D). Of note, H2-Q2 shared its strongest interaction with Kmt2d (SynCo=8.877), pointing to a genetic interaction between an epigenetic modifier and an immune regulator in tumorigenesis. Many of these synergistic pairs were significantly co-mutated in one or more cancer types (top 50 SynCo interactions shown in FIG. 4E), suggesting relevance of these genomic features in human cancers.

### Example 5: Cpf1 crRNA Array Library Screen in a Mouse Model of Metastasis

[0216] Cpf1 crRNA array library screening was performed in a mouse model of metastasis to identify co-drivers of the metastatic process in vivo. Lentiviral pools were generated from the CCAS plasmid library, and Cpf1+ KPD cells were subsequently infected to perform massively parallel gene-pair level mutagenesis. The mixed double mutant cell populations (CCAS-treated cells, 4×10⁶ cells per mouse, ˜400× coverage) were then injected subcutaneously into Nu/Nu mice (n=7) and Rag1−/− mice (n=4). After 8 weeks, the primary tumors, four lung lobes, and other stereoscope-visible metastases (two large extra-pulmonary metastases were found) were collected and subjected to crRNA array sequencing (FIG. 5A). The 3 pre-injection cell pools, as well as primary tumors and metastases from all 11 mice were sequenced. As seen in the overall representation of the CCAS library across all metastasis screen samples (FIG. 5B, FIG. 14), cell samples exhibited lognormal representation of the CCAS library, whereas both primary tumors and metastases showed strong enrichment of specific SKO and DKO crRNA arrays. NTC-NTC crRNA arrays were consistently found at low abundance in all primary tumors and metastases samples, indicating strong selection and clonal expansion during the metastasis process. Notably, the crRNA library representation of metastases in all the collected lobes showed high degree of similarity to primary tumors (FIG. 5C), consistent with a common clonal origin from the same primary tumors within each individual mouse.

### Example 6: Enrichment Analysis of crRNA Arrays Identified Metastasis Drivers and Co-Drivers

[0217] In the CCAS metastasis screen dataset, strong overall permutation correlation was observed, where 97.4% of all crRNA array combinations were significantly correlated when comparing the two permutations associated with each combination (Benjamini-Hochberg adjusted p<0.05, by t-distribution) (median permutation correlation >0.85) (FIG. 6A), indicating that for most crRNA array combinations, the positioning of constituent single crRNAs did not affect in vivo abundance of the crRNA array. DKO and SKO crRNA arrays were then compared to NTC-NTC controls in the metastasis screen. Across all in vivo samples, 2933 crRNA arrays were found to be significantly enriched compared to NTC-NTC controls (Benjamini Hochberg-adjusted p<0.05), targeting 1006 combinations. Of these, 2813 were DKO crRNA arrays and 121 were SKO crRNA arrays (FIG. 6B). All 49 genes in the PANCAN17-mTSG CCAS library were represented within at least one significant DKO crRNA array. The top 15 genes associated with these 2933 crRNA arrays ranked by the number of significant crRNA arrays associated with each gene were found to be Arid1a, Cdh1, Kdm5c, Rb1, Epha2, Kmt2b, Cic, Kmt2c, Kdm6a, Atra, Nf2, Elf3, Apc, Rnf43 and Ctcf (FIG. 6C).

[0218] Independent evidence for selection of metastasis co-drivers was sought via investigation of independent crRNA arrays targeting the same gene pair. By calculating the number of significant DKO crRNA arrays associated with each gene pair in the CCAS library, it was discovered that the majority (729/1176=61.99%) of gene pairs were represented by at least 2 independent DKO crRNA arrays. Of note, 30 gene pairs were represented by seven independent crRNA arrays, among them including Apc+Cdh1, Cdh1+H2-Q2, Epha2+Kmt2b; and 8 gene pairs were represented by all eight designed crRNA arrays, including Arid1a+Pten, Cdh+Nf1, Cdh1+Kdm5c, Arid1a+Rasa1, Arid1a+Cdh1 Cdh7+Kmt2b, Arid1a+Kmt2b, and Arid1a+Epha2, suggesting these are the strong co-drivers of metastasis (FIG. 6D).

### Example 7: Modes and Patterns of Metastatic Spread with Co-Drivers

[0219] The in vivo patterns of metastatic evolution of these double mutants were investigated. Examination of the clonal architecture of the crRNA arrays in the metastases samples revealed a highly heterogenous pattern of clonal dominance (FIGS. 15A-15G). Comparison of the crRNA array representations between metastases to primary tumors revealed modes of monoclonal spread (FIG. 7A, FIGS. 15A-15G) where dominant metastases in multiple lobes were derived from identical crRNA arrays, as well as polyclonal spread (FIG. 7B) and where dominant metastases in all lobes were derived from multiple varying crRNAs. For example, mouse 1 represents a case of monoclonal spread where all 4 lobes were dominated by a clone, crNf2.crRnf43, which was also found at the primary tumor as a major clone (>=2% frequency). In contrast, mouse 10 represents a case of polyclonal spread where each lung lobe was comprised of a myriad of crRNA arrays. Namely, lobes 1 and 2 were dominated by crNsd1.crNTC, and crH2-Q2.crCdh1+crNsd1.crAtm+crCasp8.crArid1a, respectively, which were also major clones in primary tumor (FIG. 7B). However, lobe 3 was dominated by crElf3.crFbxw7+crRb1.crCasp8, which were not found as major clones in primary tumor; the case of lobe 4 echoes that of lobe 3 with a more complex metastatic clonal mixture, in which most of the dominant clones (crBcor.crKdm5c, crAcvr2a.crNTC, crRb1.crCasp8, crCdkn2a.crApc, crApc.crKmt2b, crRasa1.crNf2, crElf3.crFbxw7 and crPten.crKdm5c) were not found as major clones in the primary tumor (FIG. 7B).

[0220] To quantify the metastasis-specific signature of double mutants, the number of times a crRNA array was considered as metastasis-enriched (i.e. a dominant clone in a lung lobe or extra-pulmonary metastasis (>=2% total reads) but not a dominant clone in the corresponding primary tumor of the same mouse) was calculated. Top ranked metastasis-specific dominant crRNA arrays were found to be crCic.crKmt2b, crCdkn2a.crApc, crRasa1.crNf2, crApc.crKmt2b, crNf2.crPik3r1, crNf2.crRnf43, among 23 enriched crRNA arrays, with crCic.crKmt2b being metastasis-enriched 55% (6/11 mice) of the time. These data suggest strong genetic signatures of metastasis-specific co-drivers, which have notably been difficult to parse from single-gene studies. Collectively, the results presented herein demonstrate the power of in vivo Cpf1 crRNA array screens for mapping and identification of genetic interactions in an unbiased manner.

[0221] Due to the complex nature of biological systems, a single gene is often far from sufficient to explain the biological or pathological variation observed in health and disease. Genetic interactions are the building blocks of highly connected biological networks, and their modular nature enables biological pathways to take on a variety of forms—linear, branching divergent, convergent, feed-forward, feedback, or any combination of the above. In systems biology, numerous theories and algorithms have been developed to understand such complex networks and to predict genetic interactions. However, predictions have often been surprised by unexpected experimental findings, urging for experimental testing of combinatorial perturbations in a systems manner.

[0222] High-throughput genetic screens are a powerful approach for mapping genes to their associated phenotypes. Unbiased and quantitative analysis of double knockouts enables phenotypic assessment of all possible combinations of any given gene pairs. Advances in high-throughput technologies utilizing RNA-interference-based gene knockdown or CRISPR/Cas9-based gene knockout, activation and repression, have enabled genome-scale screening in multiple species across various biological applications. While high-throughput genetic perturbation approaches have been developed to map out the landscape of genetic interactions in yeast and in worms, large-scale double knockout studies in mammalian species are scarce, due to the exponentially scaling number of possible gene combinations and the technological challenges of generating and screening double knockouts. Recently, several high-throughput double perturbations have been performed in mammalian cells using RNA interference (RNAi) or clustered regularly interspaced short palindromic repeats (CRISPR)/Cas9 technologies.

[0223] However, RNAi-based methods act on the level of mRNA silencing. Though CRISPR/Cas9-based methods can induce complete knockouts, the dependence of Cas9 on a trans-activating crRNA (tracrRNA) requires multiple sgRNA cassettes, hindering the scalability of Cas9-mediated high-dimensional screens, and making in vivo genetics more difficult.

[0224] Cpf1 was recently identified and characterized as a single-effector RNA-guided endonuclease with two orthologs from Acidaminococcus (AsCpf1) and Lachnospiraceae (LbCpf1) capable of efficient genome-editing activity in human cells. Unlike Cas9, Cpf1 requires only a single 39-42-nt crRNA without the need of an additional trans-activating crRNA, enabling one RNA polymerase III promoter to drive an array of several crRNAs targeting multiple loci simultaneously. This unique feature of the Cpf1 nuclease greatly simplifies the design, synthesis and readout of multiplexed CRISPR screens, making it a suitable system to carry out combinatorial screens.

[0225] Considering that cancer is a polygenic disease of malignant somatic cells, a Cpf1 double knockout screen was designed herein and performed in a mouse model of malignant transformation and early tumorigenesis. In this setting, successful mapping of all permutations of crRNA arrays targeting combinations of two putative non-oncogenes was demonstrated, revealing a wide array of unexpected synergistic gene pairs. The most highly connected ‘hub’ genes were epigenetic factors such as Kmt2c, Atrx, Kdm5c, Setd2, Kdm6a, and Arid1a, suggesting that the multifarious interactions of these factors, whether direct or indirect, lead to drastically accelerated tumorigenesis upon loss-of-function. Without wishing to be limited by any theory, this finding might explain why, despite being frequently mutated in human cancers, single knockouts of such factors rarely lead to tumorigenesis in vivo (though only a limited number of these genes have thus far been studied in animal models). In that sense, epigenetic modifiers might function as genetic buffers, redundant backup pathways, modifiers or amplifiers of multiple other apparently unrelated pathways. Many of the synergistic interactions identified through the screen were subsequently found to be significantly co-mutated across multiple cancer types. In a more complex biological process such as metastasis, which includes a cascade of primary tumor growth, inducing angiogenesis and lyphangiogenesis, extravasation, circulation, extravasation, colonization and immunological interactions, the screen is capable of detecting robust signatures of selection and revealing modes and patterns of clonal expansion of complex pools of double mutants in vivo. Multiplexed Cpf1 screens thus represent a powerful tool for studying genetic interactions with unparalleled simplicity and specificity.

[0226] As shown herein, multiplexed Cpf1 screens can enable the high-throughput discovery of synergistic interactions by examining patterns of crRNA array enrichment. On the flip side, crRNA array depletion screens would enable the identification of synthetically lethal gene mutations in cancer, potentially opening new avenues for therapeutic discovery (FIG. 7D). While the focus was on TSGs in the present study, CCAS screens can be easily tailored for any particular gene set in any biological context. The present study serves as a proof-of-principle with an unbiased, medium size library targeting all pairwise combinations of a selected set of genes. More comprehensive combinatorial screens are feasible through this approach simply by increasing the number and complexity of crRNA arrays in the library, as well as expanding the target cell pool and/or number of experimental animals accordingly. Considering that Cpf1 can easily target more than two loci with a single crRNA array, multiplexing 3 or more crRNAs in each array enables direct screens of triple knockouts and even higher-dimension genetic interactions in vivo.

### Example 8: High-Density In Vivo Profiling of Metastatic Double Knockouts Using Cpf1

[0227] The materials and methods employed in Experimental Example 8 are now described.

[0228] Design of the MCAP-MET library: The top 23 ranked “tumor suppressors” from the human MET500 cohort (Robinson, D. R. et al. (2017) Nature 548, 297-303) were collected, and combined with 3 top hits from a previous mouse metastasis screen (Nf2, Trim72, and Ube2g2) (Chen, S. et al. (2015) Cell 160, 1246-1260) for a final set of 26 genes. The complete exon sequences of these 26 genes were analyzed to extract all possible Cpf1 spacers (i.e., all 20 mers beginning with the Cpf1 PAM, 5′-TTTV). Each of these 20 mers was then reverse complemented and mapped to the entire mm10 reference genome by Bowtie 1.1.2, with settings -n 2 -l 18 -p 8 -a -y --best -e 90 (Langmead, et al. (2009), Genome Biol. 10, R25). After filtering out all alignments that contained mismatches in the final 3 basepairs (corresponding to the Cpf1 PAM) and disregarding any mismatches in the fourth to last basepair, the number of genome-wide alignments were quantified for each crRNA using all 0, 1, and 2 mismatch (mm) alignments. A total mismatch score (MM score) was calculated for each crRNA using the following formula: MM score=0 mm*1000+1 mm*50+2 mm*1. The number of consecutive thymidines was counted in each crRNA, using the following formulas: T score=100/(max_consecutive_Thymidines). The crRNAs were sorted corresponding to each target gene by low MM score and high T score. Finally, the top 4 crRNAs for each gene were chosen. In the event of ties, crRNAs targeting constitutive exons and/or the first exon were prioritized. 52 NTC crRNAs were randomly generated. In combination with the 104 crRNAs targeting 26 genes, a total of 5,200 DKO, 5,408 SKO, and 1,326 NTC-NTC arrays were designed for a total of 11,934 arrays (MCAP-MET library). Each gene pair is represented by 16 DKO arrays, while each single gene condition is represented by 208 SKO arrays. For SKO crRNA arrays, each gene-targeting crRNA was placed in the first position of the crRNA array and the NTC crRNAs were toggled through the second position. For each oligo, a degenerate 10 mer was appended following the U6 termination sequence to serve as a barcode for downstream clonality analysis. After pooled oligo synthesis (CustomArray), Gibson cloning was used to insert the MCAP-MET library into the BsmbI-linearized crRNA expression vector.

[0229] Cell lines: A non-small cell lung cancer (NSCLC) cell line (KPD cell line) was transduced with LentiCpf1 to generate Cpf1-positive cells (LCC-Cpf1). All cell lines were grown under standard conditions using DMEM containing 10% FBS, 1% Pen/strep in a 5% CO₂ incubator.

[0230] Lentiviral library production: The LentiCpf1 and Lenti-MCAP-MET library plasmids were used for lentiviral production. Briefly, envelope plasmid pMD2.G, packaging plasmid psPAX2, and LentiCpf1 or Lenti-MCAP-library plasmid were added at ratios of 1:1:2.5, and then polyethyleneimine (PEI) was added and mixed well by vortexing. The solution was left at room temperature for 10-20 min, and then the mixture was added dropwise into 80-90% confluent HEK293FT cells and mixed well by gently agitating the plates. Six hours post-transfection, fresh DMEM supplemented with 10% FBS and 1% Pen/Strep was added to replace the transfection media. Virus-containing supernatant was collected at 48 h and 72 h post-transfection, and was centrifuged at 1500 g for 10 min to remove the cell debris; aliquoted and stored at −80° C. Virus was titrated by infecting LCC cells at a number of different concentrations, followed by the addition of 3 μg/mL puromycin at 24 h post-infection to select the transduced cells. The virus titers were determined by calculating the ratios of surviving cells 48 or 72 h post infection and the cell count at infection.

[0231] Nextera analysis of indels generated by Cpf1: CrRNA arrays (crPten.crNf1 and crNf1.crPten) were cloned into Lenti-U6-crRNA vector, and virus was generated for transduction of KPD cell line. Pten spacer=TGCATACGCTATAGCTGCTT (SEQ ID NO: 9,709); Nf1 spacer=TAAGCATAATGATGATGCCA (SEQ ID NO: 9,710). Seven days after transduction and puromycin selection, genomic DNA was harvested from the cells in culture. The surrounding genomic regions flanking the target sites of crPten and crNf1 were first amplified by PCR using the following primers (5′-3′): Pten_fwd=ACTCACCAGTGTTTAA CATGCAGGC (SEQ ID NO: 9,711), Pten_rev=GGCAAGGTAGGTACGCATTTGCT (SEQ ID NO: 9,712); Nf1_fwd=AGCAGCTGTCCTGGCTGTTC (SEQ ID NO: 9,713), Nf1_rev=CGTGCACCTCCCTTGTCAGG (SEQ ID NO: 9,714). Nextera XT library preparation was then performed according to manufacturer protocol. Reads were mapped to the mm10 mouse genome using BWA (Li, H. & Durbin, R. (2009) Bioinforma. Oxf Engl. 25, 1754-1760), with the settings bwa mem -t 8 -w 200. Indel variants were first processed with Samtools (Li, H. et al. (2009) Bioinformatics 25, 2078-2079). with the settings samtools mpileup -B -q 10 -d 10000000000000, then piped into VarScan v2.3.9 (Koboldt, D. C. et al. (2012) Genome Res. 22, 568-576) with the settings pileup2indel --min-coverage 1 --min-reads2 1 --min-var-freq 0.00001.

[0232] Evaluation of in vivo library diversity in the absence of mutagenesis: A library of degenerate 8 mers was synthesized and cloned into the crRNA expression vector. After lentiviral production, LCC cells were transduced with the 8 mer lentiviral library and selected by puromycin. 4×10⁶ LCC-8 mer cells were subcutaneously injected both in Rag1^{-/-} and nu/nu mice. Twelve days post-transplantation, mice were sacrificed and tumors were isolated for genomic preparation and readout.

[0233] MCAP in a mouse model of metastasis: Library transduction was performed with three infection replicates at high coverage and low MOI. Briefly, according to the viral titers, MCAP-MET lentiviruses were added to a total of 1×10⁸ LCCCpf1 cells at calculated MOI of ≤0.2 and incubated 24 h before replacing the virus-containing media with 3 g/mL puromycin containing fresh media to select the virus-transduced cells. Approximately 2.5×10⁷ cells confer a -2,000× library coverage. MCAP-MET library-transduced cells were cultured under the pressure of 3 μg/mL puromycin for 7 days before injection or cryopreservation. MCAP library-transduced LCC-Cpf1 cells were injected subcutaneously into the right and left flanks of nu/nu mice at 4×10⁶ cells per flank (˜350× coverage per transplant).

[0234] Mouse tumor dissection: Mice were sacrificed by carbon dioxide asphyxiation followed by cervical dislocation. Tumors and lungs were manually dissected, then fixed in 10% formalin for 24-96 hours, and transferred into 70% Ethanol. Tissues were flash frozen with liquid nitrogen, and ground in 5 mL Frosted polyethylene vial set (2240-PEF) in a 2010 GenoGrinder machine (SPEXSamplePrep). Homogenized tissues were then used for DNA extraction.

[0235] Genomic DNA extraction: 200-800 mg of frozen ground tissue were re-suspended in 6 mL of NK Lysis Buffer (50 mM Tris, 50 mM EDTA, 1% SDS, pH 8.0) supplemented with 30 μL of 20 mg/mL Proteinase K (Qiagen) in 15 mL conical tubes, and incubated at 55° C. bath overnight. After all the tissues were lysed, 30 μL of 10 mg/mL RNAse A (Qiagen) was added, mixed well and incubated at 37° C. for 30 min. Samples were chilled on ice and then 2 mL of pre-chilled 7.5 M ammonium acetate (Sigma) was added to precipitate proteins. The samples were inverted and vortexed for 15-30s and then centrifuged at ≥4,000 g for 10 min. The supernatant was carefully decanted into a new 15 mL conical tube, followed by the addition of 6 mL 100% isopropanol (at a ratio of 0.7), inverted 30-50 times and centrifuged at ≥4,000 g for 10 minutes. At this time, genomic DNA became visible as a small white pellet. After discarding the supernatant, 6 mL of freshly prepared 70% ethanol was added, mixed well, and then centrifuged at ≥4,000 g for 10 min. The supernatant was discarded by pouring; and remaining residues was removed using a pipette. After air-drying for 10-30 min, DNA was re-suspended by adding 200-500 μL of Nuclease-Free H₂O. The genomic DNA concentration was measured using a Nanodrop (Thermo Scientific), and normalized to 1000 ng/L for the following readout PCR.

[0236] MCAP library readout: MCAP library readout was performed using a 2-step PCR approach. Briefly, in the 1st round PCR, enough genomic DNA was used as template to guarantee coverage of the library abundance and representation. For example, assuming 6.6 pg of gDNA per cell, 20-48 μg of gDNA (≥75×) was used per sample. For the 1st PCR, the sgRNA-included region was amplified using primers specific to the MCAP vector using Phusion Flash High Fidelity Master Mix (ThermoFisher) with thermocycling parameters: 98° C. for 1 min, 15 cycles of (98° C. for is, 60° C. for 5 s, 72° C. for 15s), and 72° C. for 1 min. Fwd: AATGGACTA TCATATGCTTACCGTAACTTGAAAGTATTTCG (SEQ ID NO: 9,715); Rev: CTTTAGTTT GTATGTCTGTTGCTATTATGTCTACTATTCTTTCCC (SEQ ID NO: 9,716) In the 2nd PCR, 1st round PCR products for each biological repeats were pooled, then 1-2 μL well-mixed 1st PCR products were used as the template for amplification using sample-tracking barcode primers with thermocycling conditions as 98° C. for 1 min, 15 cycles of (98° C. for is, 60° C. for 5 s, 72° C. for 15s), and 72° C. for 1 min. The 2^{nd} PCR products were quantified in 2% E-gel EX (Life Technologies) using E-Gel® Low Range Quantitative DNA Ladder (ThermoFisher), then the same amount of each barcoded samples were combined. The pooled PCR products were purified using QIAquick PCR Purification Kit and further QIAquick Gel Extraction Kit from 2% E-gel EX. The purified pooled library was quantified in a gel-based method. Diluted libraries with 5-20% PhiX were sequenced with HiSeq 4000 systems (Illumina) with 150 bp paired-end read length.

[0237] MCAP-MET plasmid library readout and analysis: Raw paired-end fastq read files were first merged to single fastq files by PEAR (Zhang, J. et al. (2014). Bioinformatics 30, 614-620). with the settings -y 8G -j 8 -v 3. The merged fastq files were then filtered and demultiplexed using Cutadapt (Martin, M. (2011) EMBnet.journal 17, 10-12), using two different sets of adapters for extraction of crRNA array sequences or the 10 mer barcode. For the crRNA array, the following settings were used: cutadapt --discard-untrimmed -g tcttGTGGAAAGGACGAAACACCg (SEQ ID NO: 9,731), followed by cutadapt --discard-untrimmed -a TGTAGATTTTTTT (SEQ ID NO: 9,758). The trimmed sequences were then mapped to the MCAP-MET library using Bowtie (Langmead, et al. (2009), Genome Biol. 10, R25): bowtie -v 3 -k 1 -m 1. For the Omer barcodes, we used the following Cutadapt settings: cutadapt --discard-untrimmed -a aagcttggcgtGGATC (SEQ ID NO: 9,759), followed by cutadapt --discard-untrimmed -g TACTAAGTGTAGATTTTTTT (SEQ ID NO: 9,760). The resultant sequences were quantified to a reference of all possible 10 mer sequences. Reads that successfully mapped to both the MCAP-MET library and contained a valid barcode were tabulated.

[0238] Processing of MCAP-MET crRNA array abundance in cells and tumors: PEAR-merged fastq files were filtered and demultiplexed using Cutadapt. To remove extra sequences downstream (i.e. 3′ end) of the crRNA array sequences, including the DR and U6 terminator, the following settings were used: cutadapt --discard-untrimmed -e 0.1 -a aagcttggcgtGGATCCGATATCa (SEQ ID NO: 9,761) -m 80. As the forward PCR primers used to readout crRNA array representation were designed to have a variety of barcodes to facilitate multiplexed sequencing, these filtered reads were then demultiplexed with the following settings: cutadapt -g file:fbc.fasta --no-trim, where fbc.fasta contained the 12 possible barcode sequences within the forward primers. Finally, to remove extraneous sequences upstream (i.e. 5′ end) of the crRNA array spacers, the following settings were used: cutadapt --discard-untrimmed -e 0.1 -g tcttGTGGAAAGGACGAAACACCg (SEQ ID NO: 9,731) -m 80. The 5′ DR were removed as follows: cutadapt --discard-untrimmed -e 0.1 -g TAATTTCTACTAAGTGTAGAT (SEQ ID NO: 21,696) -m 80. The filtered fastq reads were then mapped to the MCAP-MET reference index. To do so, a Bowtie index of the MCAP-MET library was generated using the bowtie-build command in Bowtie 1.1.2 (Langmead, et al. (2009), Genome Biol. 10, R25). Using these bowtie indexes, the filtered fastq read files were mapped using the following settings: bowtie -n 2 -k 1 -m 1 --best. These settings ensured only single-match reads would be retained for downstream analysis. For data processing on the level of barcoded-crRNAs, the same trimmed fastq files as above were utilized, but instead the barcoded-crRNA plasmid library was used as the reference index.

[0239] Analysis of MCAP crRNA array library representation: Using the resultant mapping output, the number of reads that had mapped to each crRNA array within the library were quantified. The number of reads in each sample was normalized by converting raw crRNA array counts to reads per million (rpm). The rpm values were then subject to log₂ transformation for certain analyses. To generate Spearman correlation heat maps, the NMF R package was used. Where applicable, linear regression lines and 95% confidence intervals were calculated. For comparing cells, primary tumors, and lung metastases, crRNA array abundances were averaged within sample groups and linear regression was performed using the NTC-NTC arrays as a model for neutral selection. Significant outliers were identified using the outlierTest function from the car R package. For gene/gene pair analyses, the corresponding SKO and DKO arrays were first averaged together, then aggregated by sample type. Linear regression was performed using all SKO/DKO genotypes, and outliers were identified as above.

[0240] Clone-level analysis of MCAP-MET samples: The data were analyzed at the clone level using the barcoded-crRNA abundances. The counts in each sample were first converted to percentages of total reads. Two different frequency cutoffs were used for considering clones: ≥0.01% and ≥0.001%. Differences in the number of clones between sample types was assessed by Wilcoxon rank sum test, and visualized after log₂ transform. Empirical CDFs were calculated after combining all the clones in a given sample group; statistical differences in clone size distributions was assessed by Kolmogorov-Smirnov test. The Shannon diversity index was also calculated on each sample with the vegan R package; statistical differences were assessed by Wilcoxon rank sum test.

[0241] Enrichment analysis of MCAP-MET genotypes: To identify crRNA arrays that were enriched in individual samples, the 1,326 NTC-NTC arrays were utilized for modeling the empirical null distribution. Enriched crRNA arrays were subsequently called at FDR<0.5%. These results were aggregated to the single gene/gene pair level, then tabulated across samples. Finally, all of the significant crRNA arrays associated with each genotype were counted.

[0242] Identification of synergistic mutation combinations: The synergy coefficient (SynCo) for each gene pair was defined with the following formula: SynCo=DKO_{NM}−SKO_{N}−SKO_{M}. The DKO_{NM} value is the average log₂ rpm abundance of all corresponding DKO crRNA arrays (i.e., crN.crM), while SKO_{N} and SKO_{M} values are defined as the average log₂ rpm abundance of all corresponding SKO crRNA arrays. By this definition, a SynCo score>0 would indicate that a given DKO crRNA array is synergistic, as the DKO score would thus be greater than the sum of the individual SKO scores. The SynCo of each gene pair was calculated and it was assessed whether the DKO abundances were statistically significantly higher than both SKO abundances by Wilcoxon rank sum test.

[0243] To generate a library-wide map of the relative selective advantages for each gene pair vs. single gene knockout, the aggregated gene-level abundances were utilized in lung metastasis samples. The abundance of each DKO was compared to its reference SKO, and the data visualized in a heat map. Each column refers to the reference SKO, while each row denotes the modulatory effects of the second KO.

[0244] Statistics: All statistical tests are two-sided.

[0245] Blinding statement: Investigators were not blinded for sequencing data analysis, tumor engraftment, or organ dissection.

[0246] The results of the experiments from Example 8 are now described.

[0247] Metastasis is the major lethal factor of solid cancers. However, the complex genetic interactions underlying the metastatic phenotype of tumor cells have remained elusive. A streamlined approach for constructing global maps of metastasis gene networks is key to understanding metastasis at the systems level. Herein was developed MCAP (Massively-parallel crRNA array profiling), an approach for high-throughput interrogation of genetic combinations in vivo. A UMI-barcoded, high-density, high-redundancy MCAP library was designed with 11,934 crRNA arrays targeting 325 pairwise combinations of genes significantly mutated in human metastases, and the metastatic potential of all combinations were functionally interrogated in parallel in mice. Enrichment, synergy and clonality analyses unveiled a quantitative landscape of genetic interactions in metastasis.

[0248] Metastasis, the major lethal factor of solid tumors, is controlled by a complex network of genetic interactions. However, a systems-level understanding of the genetic interactions driving metastatic spread is lacking. Due to various technological challenges, high-throughput in vivo interrogation of double knockouts in mammalian species has not yet been reported in the literature. Thus, a streamlined approach is essential for rapidly mapping out a global, clinically relevant metastasis gene networks with high resolution.

[0249] The discovery and characterization of the type V CRISPR system Cpf1 (CRISPR from Prevotella and Francisella, also known as Cas12a) has empowered genome editing of multiple loci in individual cells. Cpf1 is a single component RNA-guided nuclease that can mediate target cleavage with a single crRNA. Unlike Cas9, Cpf1 does not require a tracrRNA, which greatly simplifies multiplexed genome editing of two or more loci simultaneously through the use of a single crRNA array targeting different genes. Thus, Cpf1 is an ideal system for investigating genetic interactions in vivo, with substantial advantages in library design and readout when compared to Cas9-based approaches. Leveraging the Cpf1 system, MCAP (Massively-parallel crRNA array profiling) was developed: an approach for in vivo high-throughput quantitative mapping of double or higher dimensional genetic perturbations. A UMI-barcoded high-density MCAP library was designed with 11,934 crRNA arrays (SEQ ID NOs: 9,762-21,695) targeting 325 gene pairs significantly mutated in human metastases, with high-redundancy crRNA array coverage for each gene and gene pair. Using this library, MCAP was demonstrated to be a powerful tool for functional interrogation of hundreds of double knockouts and their single knockout counterparts for their metastatic potential in mice.

[0250] To establish a CRISPR/Cpf1 lentiviral system for characterization of mutation combinations in cancer, a human-codon-optimized LbCpf1 expression vector (pLenti-EFS-Cpf1-blast, LentiCpf1 for short) and a crRNA expression vector (pLenti-U6-DR-crRNA-puro, Lenti-U6-crRNA for short) were generated (FIG. 1A). In order to facilitate direct and targeted double knockout studies using a single crRNA array, oligos were designed with a 5′ homology arm to the base vector, followed by a crRNA, the direct repeat (DR) sequence for Cpf1, a second crRNA, a U6 terminator, and finally a 3′ homology arm (cr1-DR-cr2). As the oligos each contain two crRNAs, these constructs were termed crRNA arrays. Linearization of the Lenti-U6-crRNA vector enables one-step cloning of the crRNA array into the vector by Gibson assembly, producing the double knockout crRNA array expression vector (pLenti-U6-DR-cr1-DR-cr2-puro) (FIG. 1B). These constructs were first tested for their ability to induce double knockouts in a murine cancer cell line (KPD) in vitro. After infection with LentiCpf1 to generate Cpf1⁺ KPD cells, they were transduced with lentiviruses carrying a crRNA array targeting Pten and Nf1 (FIG. 8A). To confirm whether Cpf1 can mediate mutagenesis regardless of the position of each crRNA within the array, two permutations of the Pten and Nf1 crRNA array (crPten.crNf1 and crNf1.crPten, all with 20 nt spacers), were generated. Both crPten.crNf1 and crNf1.crPten crRNA arrays generated indels at both loci in Cpf1+ KPD cells (FIG. 8B). These data confirmed the ability of single crRNA arrays with Cpf1 to generate double knockouts in mammalian cells.

[0251] In order to perform high-throughput genetic investigation of metastasis suppression in vivo, it is important to evaluate the library diversity that can be accommodated upon introduction of the cell pool. To that end, a mock library of degenerate 8 mers was constructed and cloned into the base Lenti-U6-crRNA vector (FIG. 26A). After production of lentivirus, KPD cells were transduced and 4×10⁶ 8 mer-barcoded cells were transplanted into nufnu (n=2) or Rag1^{-/-} mice (n=4). The resultant small nodules from the injection site were harvested 12 days later, and the barcodes were deep sequenced. Out of the 48=65,536 possible 8 mers, nearly 100% of them were recovered in vivo, with an average of 65,534.5/65,536 (99.99%) 8 mers identified in nunu mice, and 64,500.75/65,536 (98.42%) recovered in Rag1^{-/-} mice (FIG. 26B). Their respective abundances followed a log-normal distribution (FIG. 26C), indicating adequate coverage of the degenerate 8 mer library in vivo in the absence of mutagenesis. It was concluded that the in vivo transplant model is sufficiently powered for high-throughput interrogation of metastasis drivers, using libraries containing at least up to 65,536 unique oligos.

[0252] To investigate whether Cpf1 multiplexed gene targeting could be utilized for high-throughput investigation of mutation combinations, massively-parallel Cpf1-crRNA array profiling (MCAP) was developed. Considering the resolution of library complexity under in vivo cellular dynamics, genes significantly mutated in a human metastasis cohort (MET-500) (Robinson, D. R. et al. (2017) Nature 548, 297-303), and the top hits from a single-gene metastasis screen in mice (Chen, S. et al. (2015) Cell 160, 1246-1260) were focused on (FIG. 27A). For these 26 metastasis driver candidates (Trp53, Cdkn2a, Pten, Rb1, Brca2, Atm, Kmt2c, Apc, Kmt2d, Arid1a, Nf1, Zfhx3, Fanca, Wrn, Pole, Ercc5, Notch1, Chd1, Atrx, Jak1, Crebbp, Kdm6a, Arid1b, Nf2, Trim72, Ube2g2), all possible Cpf1 spacer sequences with a PAM sequence of TTTV were identified, subsequently choosing 4 crRNAs for each gene. The selection of crRNAs was based on two criteria: 1) high genome-wide mapping specificity, and 2) a low number of consecutive thymidines, since long stretches of thymidines will terminate U6 transcription. Compiling these 104 gene-targeting crRNAs and 52 additional non-targeting control (NTC) crRNAs, a metastasis-focused MCAP library (MCAP-MET) was designed composed of 1,326 NTC-NTC control arrays, 5,408 single-knockout (SKO) arrays, and 5,200 double-knockout (DKO) arrays, for a total of 11,934 arrays (FIG. 27A, SEQ ID NOs: 9,762-21,695). In the MCAP-MET library, each gene pair double knockout is represented by 16 independent DKO crRNA arrays, while each individual gene knockout is represented by 208 independent SKO crRNA arrays. In addition, a degenerate 10 mer barcode was appended after the U6 terminator sequence for downstream analysis of clonality. After pooled oligo synthesis, the MCAP-MET library was cloned into the base crRNA expression vector, and the plasmid crRNA array representation was subsequently readout by deep-sequencing the crRNA expression cassette. All 11,934/11,934 (100%) of the designed crRNA arrays were successfully cloned and were represented in a log-normal distribution (FIG. 27C). Analysis of the 10 mer barcodes revealed a normal distribution for the number of distinct barcodes associated with each crRNA array (unique barcoded-crRNAs recovered, n=774,295) (FIG. 27D). The abundances of the barcoded-crRNAs within the MCAP-MET library were also evenly distributed (FIG. 28). Thus, a barcoded MCAP library was designed and generated for targeted single and double mutagenesis of relevant metastatic candidate genes and gene pairs with high redundancy of independent targeting constructs.

[0253] Lentiviral pools were generated from the MCAP-MET plasmid library and Cpf1⁺ KPD cells were infected (FIG. 27B). One and two weeks after lentiviral transduction and antibiotic selection, the crRNA expression cassette was sequenced. High correlation to the initial plasmid library was found at both time points (FIG. 27E, FIG. 29A). Having established the successful introduction of the barcoded MCAP-MET library into Cpf1⁺ KPD cells, the metastatic potential of all these 11,934 crRNA arrays targeting 325 mutation combinations and 26 single mutations were quantitatively mapped in vivo. The MCAP-MET cell pool was injected (4×10⁶ cells per mouse, ˜350× coverage) subcutaneously into nu/nu mice (n=10). After 6 weeks, the primary tumors (n=10) and lung lobes (n=37) were collected, and crRNA array sequencing was performed as before (FIG. 27B). The data from the level of barcoded-crRNAs were first analyzed, in order to assess the dynamics of selection in the metastasis model. The number of “clones” (approximated by barcoded-crRNAs) that surpassed 0.001% of the total tumor burden by barcoded-crRNA abundance were quantified (FIG. 30A). Clear evidence of progressive selection was found as the in vitro cell pools formed primary tumors and lung metastases (FIG. 30B). The cell pools had significantly more unique clones represented at ≥0.001% frequency than primary tumors (Wilcoxon rank sum test, p=0.0002) and lung metastases (p=0.0001), as did primary tumors compared to lung metastases (p=0.0162). This result was consistent at an alternate cutoff of ≥0.01% frequency (FIGS. 31A-31B).

[0254] The relative abundances of these various barcoded-crRNA clones were examined (FIG. 30C). Primary tumors and lung metastases, but not cell pools, were dominated by a handful of clones. The empirical cumulative density function of all represented clones in cells, primary tumors, and lung metastases was calculated (FIG. 30D). This analysis demonstrated that lung metastases are more skewed towards higher % frequencies per clone than primary tumors (Kolmogorov-Smirnov test, p<2.2*10-6), though both populations are significantly more skewed than the cell pool. As an alternative measure, the Shannon diversity index was calculated for each sample. The clonal abundances of the cell pools were significantly more diverse than primary tumors or lung metastases (Wilcoxon rank sum test, p=0.0002 and p=3.28*10-7), while primary tumors were in turn more diverse than lung metastases (p=0.0212) (FIG. 31F). These results were consistent at a higher cutoff of ≥0.01% frequency (FIG. 31C-31E). Collectively, the clone-level analyses illustrated the progressive selection pressures on the cells as they formed primary tumors and metastasized to the lung.

[0255] To map the metastatic potential of all these single and double knockouts in an unbiased manner, the barcoded-crRNA counts were collapsed to the crRNA array level (Supplementary FIG. 29B). Utilizing the 1,326 NTC-NTC crRNA arrays as an empirical null distribution, crRNA arrays enriched at false discovery rate (FDR)<0.5% were identified in each sample. Within primary tumors, 24 single genes and 23 gene pairs were consistently enriched in ≥50% of samples. Top single genes included Fanca, Jak1, and Nf2, while top gene pairs included Nf_Arid1b, Nf2_Pten, Nf2_Apc, Nf2_Chd1, and Kmt2d_Chd1. Within lung metastases, 23 single genes and 25 gene pairs were enriched across ≥50% of samples. Top single genes in lung metastases included Nf2, Apc, and Jak, while the top gene pairs were Nf2_Chd1, Nf2_Arid1b, and Nf2_Trim72. Intersecting the DKO lists, 5 gene pairs were enriched in half of primary tumors but not in lung metastases, while 7 gene pairs were enriched in half of lung metastases but not in half of primary tumors (FIG. 30E). Note that each single gene is represented by 208 independent SKO arrays in the MCAP-MET library whereas each gene pair has 16 DKO arrays, to account for this difference, the percentage of arrays that were called as enriched in at least one lung metastasis sample were tabulated, for each single gene and gene pair (FIGS. 30F-30I). This analysis revealed that no single genes were found to have more than 40% of their SKO arrays enriched in lung metastases, with the most consistent performer being Nf2 at 32.21% (FIGS. 30H-30I). For example, 10 independent crRNA arrays out of 16 were enriched in at least one lung metastasis for Nf2_Rb1 double knockout (FIG. 2j), with 9/16 arrays for Nf2_Pten (FIG. 30K) and Nf2_Trim72 (FIG. 30L). In total, 9 gene pairs had ≥43.75% (7/16) of their DKO arrays enriched in a lung metastasis sample. These were Nf2_Rb1, Nf2_Pten, Nf2_Trim72, Nf2_Apc, Nf2_Arid1b, Nf2_Chd1, Nf2_Jak, Nf2_Nf1, and Notch1_Apc.

[0256] In addition to the binary FDR-based enrichment analysis above, the relative metastatic potential of the various genotypes represented in the MCAP-MET library were quantitatively compared using the information of relative abundance for all crRNA arrays in each sample. Aggregating by sample type, the average abundances of each crRNA array in cell pools (n=6), primary tumors (n=10), and lung metastases (n=37) were compared (FIG. 32A, FIG. 32C, FIG. 32E). To obtain a reference of neutrality, the 1,326 NTC-NTC arrays were used to calculate the linear regression between different sample types, as the Spearman correlations of NTC-NTC array average abundance between sample types are highly significant (e.g. FIG. 27E, FIG. 32A, FIG. 32C; p<2.2*10⁻¹⁶ for all comparisons). By comparison to the NTC-NTC linear regression, strong selection between cells and primary tumors was seen (FIG. 32A), as well as cells and lung metastases (FIG. 32C), as evidenced by the existence of outliers. Looking to identify the specific single or double knockouts exhibiting strong selection in vivo, the constituent crRNA arrays for each SKO or DKO genotype were averaged on a sample-by-sample basis, then the data were aggregated by sample type. In order to pinpoint the genotypes with the strongest selective advantage out of the entire MCAP-MET library, for the gene-level analyses all targeting genes/pairs were used for linear regression modeling. The top gene pairs that were significantly favored in primary tumors relative to cell pools (outlier test, p<0.05) included Nf2_Trim72, Nf2_Chd1, Nf2_Arid1b, Nf2_Kdm6a, Kmt2d_Chd1, and Nf2_Rb (FIG. 32B). Nf2 was the only single gene found to be significantly selected for in tumors relative to cells. A similar set of gene pairs were enriched in lung metastases compared to cell pools, with a notable exception of Jak1_Kmt2c, which was not significantly enriched in primary tumors vs. cell pools (FIG. 32D). Primary tumors were directly compared to lung metastases (FIG. 32E), and specific gene pairs were identified with evidence of significant negative or positive selection relative to the entire MCAP-MET library (p<0.05) in lung metastases relative to primary tumors. From the overall library-wide regression, while 18 double knockouts were found to be outliers in metastasis-primary tumor regression, no single knockouts were found to be significantly favored in metastasis over primary tumor. Positively selected mutation combinations in lung metastases included Nf2_Trim72, Nf2_Chd1, Kmt2d_Chd1, Jak1_Kmt2c, Ube2g2_Apc, Kmt2d_Rb1, Nf1_Pten, and Cdkn2a_Rb1. On the other hand, genotypes that were relatively depleted in lung metastases included Nf2_Cdkn2a, Ube2g2_Arid1b, Nf2_Crebbp, Ube2g2_Cdkn2a, Ube2g2_Nf2, and Cdkn2a_Wrn.

[0257] Analyses suggested that certain gene pairs may be especially synergistic in promoting tumorigenesis and/or metastasis. To quantitatively identify such mutation combinations, the gene-level data were utilized to compare the normalized abundances of each DKO gene pair with its two constituent SKO genes across all primary tumors and lung metastases (total n=47) (FIG. 33A). Gene pairs were first identified that were significantly more abundant than their respective single gene counterparts (Wilcoxon rank sum test, p<0.05). Since the effects of a mutational combination may simply be additive rather than truly synergistic, a synergistic coefficient (SynCo=DKO_{NM}−SKO_{N}−SKO_{M}) was also calculated for each gene pair (FIG. 33A). Collectively, 6 DKO genotypes were found that were significantly more abundant than the two corresponding SKO genotypes and with a SynCo>0 (FIGS. 33B-33C). The synergistic gene pairs identified were Nf2_Trim72, Chd1_Nf2, Chd1_Kmt2d, Jak1_Kmt2c, Kmt2d_Pten, and Nf1_Pten (FIGS. 33D-33I). Of note, 5/6 of these gene pairs were found to be among the positively selected genotypes in lung metastases vs. primary tumors (FIG. 33F). Finally, a library-wide map of the selective advantage of each gene pair DKO was constructed relative to the corresponding single gene SKO (FIG. 34). Collectively, these data point to specific mutation combinations with heightened metastatic potential in vivo, and highlight the power of MCAP for high-throughput interrogation of genetic interactions in complex biological systems.

[0258] Due to the complex nature of biological systems, a single gene is far from sufficient to explain the clinical and pathological variation observed across patients. Genetic interactions are the building blocks of highly connected biological networks, and their modular nature enables biological pathways to take on a variety of forms—linear, branching divergent, convergent, feed-forward, feedback, or any combination of the above. These complex interactions may account for a substantial part of variation for intricate phenotypes in complex biological or pathological processes such as cancer. Numerous theories and algorithms have been developed to understand such complex networks and to predict genetic interactions. However, predictions have often been surprised by unexpected experimental findings, urging for experimental testing of combinatorial perturbations in a systems manner.

[0259] High-throughput genetic studies are a powerful approach for mapping genes to their associated phenotypes. Unbiased and quantitative analysis of double knockouts enables phenotypic assessment of all possible combinations of any given gene pairs. Advances in high-throughput technologies utilizing RNA-interference-based gene knockdown or CRISPR/Cas9-based gene knockout, activation and repression, have enabled genome-scale studies in multiple species across various biological applications. While high-throughput genetic perturbation approaches have been developed to map out the landscape of genetic interactions in yeast and in worms, large-scale double knockout studies in mammalian species are relatively scarce, due to the exponentially scaling number of possible gene combinations and the technological challenges of generating and evaluating double knockouts. Recently, several high-throughput double perturbations have been performed in mammalian cells using RNA interference (RNAi) or clustered regularly interspaced short palindromic repeats (CRISPR)/Cas9 technologies. However, RNAi-based methods act on the level of mRNA silencing. Though CRISPR/Cas9-based methods can induce complete knockouts, the dependence of Cas9 on a trans-activating crRNA (tracrRNA) predicates the need for multiple sgRNA cassettes when performing combinatorial knockouts, hindering the scalability of Cas9-mediated high-dimensional studies to in vivo settings.

[0260] Cpf1 is a single-effector RNA-guided endonuclease with two orthologs from Acidaminococcus (AsCpf1) and Lachnospiraceae (LbCpf1) capable of efficient genome-editing activity in human cells. Unlike Cas9, Cpf1 requires only a single 39-42-nt crRNA without the need of an additional trans-activating crRNA, enabling one RNA polymerase III promoter to drive an array of several crRNAs targeting multiple loci simultaneously. This unique feature of the Cpf1 nuclease greatly simplifies the design, synthesis and readout of multiplexed CRISPR studies, making it a suitable system to investigate mutation combinations.

[0261] In summary, the present study demonstrates the utility of MCAP for simultaneous, massively parallel profiling of single and double knockouts, implementing a high-density library design with 16 independent constructs per double knockout and 208 per single knockout. Even in a complex biological process such as metastasis, MCAP is capable of detecting robust signatures of selection in vivo and quantitatively profiling single and double mutants of strong, moderate and weak phenotypes. MCAP thus represents a powerful new tool for mapping genetic interactions in mammalian species in vivo with unparalleled simplicity and throughput.

### Example 9: Cpf1-Flip: A Flexible Sequential Mutagenesis System by Inducible crRNA Array Inversion

[0262] The materials and methods employed in Experimental Example 9 are now described.

[0263] FlipArray design and construction: The empty EFS-Cpf1-Puro; U6-FipArray vector was constructed by modification of the pY109 lentiviral vector (Zetsche, B. et al. (2017) Nat. Biotechnol. 35, 31-34). After BsmbI digestion (FastDigest Esp3I, ThermoScientific) to linearize the U6 crRNA expression cassette, oligo cloning was performed to insert a lox66 sequence, a DR, two BsmbI sites, and an inverted lox71. The empty vector thus expresses LbCpf1 and puromycin resistance from an EFS promoter, while a U6 promoter drives expression of a lox66/lox71 flanked crRNA expression module containing two BsmbI sites. BsmbI digestion and oligo cloning was then used to insert FlipArrays into the empty vector. For a given pair of crRNAs, the following oligo overhangs were used for cloning: Oligo1 5′ overhang: TAGAT; Oligo1 3′ overhang: A; Oligo2 5′ overhang: GTTAT; Oligo2 3′ overhang: A

[0264] The main body of the FlipArray was structured as such: 5′-crRNA 1-6×T -6×A-Rev.Complement(crRNA 2)-Rev.Complement(DR)-3′ In certain embodiments, the vector comprising the FlipArray comprises SEQ ID NO: 21,697.

[0265] In this study, the following oligo sequences were used to target Nf1 and Pten:

crNf1 spacer:
(SEQ ID NO: 9,710)
TAAGCATAATGATGATGCCA
crPten spacer:
(SEQ ID NO: 9,709)
TGCATACGCTATAGCTGCTT
NPF oligo 1 (to clone into vector):
(SEQ ID NO: 9,719)
TAGATTAAGCATAATGATGATGCCATTTTTTA
AAAAAAAGCAGCTATAGCGTATGCAATCTACAC
TTAGTAGAAATTAA
NPF oligo 2 (to clone into vector):
(SEQ ID NO: 9,720)
GTTATTAATTTCTACTAAGTGTAGATTGCATA
CGCTATAGCTGCTTTTTTTTAAAAAATGGCATC
ATCATTATGCTTAA

[0266] The following crRNA spacer sequences were also used, with analogous oligo designs for cloning into the Cpf1-Flip vector:

crDNMT1:
(SEQ ID NO: 9,721)
CTGATGGTCCATGTCTGTTA
crVEGFA:
(SEQ ID NO: 9,722)
CTAGGAATATTGAAGGGGGC
crFasl:
(SEQ ID NO: 9,723)
GTCCGGCCCTCTAGGCCCAC
crIdo1:
(SEQ ID NO: 9,724)
CTACAGGGAATGCACAGATG
crJak2:
(SEQ ID NO: 9,725)
ACATACATCGAGAAGAGTAA
crLgals9:
(SEQ ID NO: 9,726)
TGCAGTACCAACACCGCGTA
crB2m:
(SEQ ID NO: 9,727)
TGCACGCAGAAAGAAATAGC
crCd274:
(SEQ ID NO: 9,728)
TAAAGCACGTACTCACCGAG

[0267] Lenti-Cre vector design and construction: The Lenti-Cre vector was designed to express the Cre recombinase under a constitutive EFS promoter. The plasmid was generated by PCR amplification of Cre and EFS fragments followed by Gibson assembly into a previous lentiviral vector backbone (lentiGuidePuro) Sanjana, et al. (2014) Nat. Methods 11, 783-784).

[0268] Cell culture and genomic DNA extraction: KPD cells, E0771 cells, and HEK293T cells were cultured in DMEM supplemented with 10% FBS and 1% penicillin/streptomycin. Experiments were conducted with at least 2 independent cellular replicates. For genomic DNA extraction, approximately 500,000 cells were isolated. Cells were spun down at 500 rpm for 5 minutes and washed once with 1×PBS. After removing the supernatant, cell pellets were resuspended in 500 ul QuickExtract DNA Extraction Solution (Epicentre). Cells were then incubated at 65° C. for 20 minutes, followed by incubation at 85° C. for 5 minutes to deactivate the enzymes.

[0269] Detection of FlipArray inversion at the genomic DNA level by PCR: The following primers were used to amplify the U6 cassette from genomic DNA:

RdF:
(SEQ ID NO: 9,729)
GAGGGCCTATTTCCCATGATTCCTTCATATTT
RdR:
(SEQ ID NO: 9,730)
ACAGTGCAGGGGAAAGAATAGTAGA

PCR conditions: 98° C. 2 minutes, 32 cycles of (98° C. 1 second, 62° C. 5 seconds, 72° C. 15 seconds), 72° C. 2 minutes, 4° C. hold.

[0270] Following Qiagen PCR purification, 2 ng of the first PCR were used for the second inversion-specific or non-inverted-specific PCR. The following primers were used for detection of non-inverted or inverted FlipArrays:

NPF_F:
(SEQ ID NO: 9,731)
TCTTGTGGAAAGGACGAAACACCG
NPF_R:
(SEQ ID NO: 9,732)
TGCATACGCTATAGCTGCTTTTTTTTAAAAAATGGCA
NPF_R_inv:
(SEQ ID NO: 9,733)
TAAGCATAATGATGATGCCATTTTTTAAAAAAAAGCAG
DVF_F:
(SEQ ID NO: 9,731)
TCTTGTGGAAAGGACGAAACACCG
DVF_R:
(SEQ ID NO: 9,734)
GGGCTTTTTTAAAAAATAACAGACATGGACCATCAG
DVF_R_inv:
(SEQ ID NO: 9,735)
CTGATGGTCCATGTCTGTTATTTTTTAAAAAAGCCC

PCR conditions: 98° C. 2 minutes, 14 cycles of (98° C. 1 second, 62° C. 5 seconds, 72° C. 2 seconds), 72° C. 2 minutes, 4° C. hold. PCR reactions specific to non-inverted and inverted FlipArrays were performed and analyzed simultaneously for each sample. Quantification was done on 2% E-gel using low-range quantitative ladder (ThermoFisher), and was normalized to the first PCR product.

[0271] Detection and quantification of FlipArray inversion at the RNA transcript level: KPD cells were cultured in DMEM supplemented with 10% FBS and 1% penicillin/streptomycin. For RNA extraction, approximately 200,000 cells were isolated and spun down at 500 rpm for 5 minutes. After a PBS wash, cells were resuspended in 450 ul TRIzol. 100 ul of chloroform was then added to each tube, followed by rigorous vortexing for 15 seconds and centrifuging at 14,000 rpm for 10 minutes. The supernatant containing RNA was then purified using a Qiagen RNeasy Kit following the RNA cleanup protocol. cDNA was generated by reverse transcription with random hexamers. PCR detection of inverted crRNA FlipArray transcripts was done using the following primers:

Inv_FlipArray_F:
(SEQ ID NO: 9,736)
TGTAGATAGCGCTATAACTTCGTATAGC
Inv_FlipArray_R:
(SEQ ID NO: 9,737)
AAGCAGCTATAGCGTATGCAATC

PCR conditions: 98° C. 2 minutes, 34 cycles of (98° C. 1 second, 56° C. 5 seconds, 72° C. 5 seconds), 72° C. 2 minutes, 4° C. hold.

[0272] As a normalization control, PCR detection of Cpf1 transcripts was done using the following primers:

Cpf1_F:
(SEQ ID NO: 9,738)
TTCTTTGGCGAGGGCAAGGAGACAA
Cpf1_R:
(SEQ ID NO: 9,739)
GCACGCGCACCTCTGTATTGATCTT

PCR conditions: 98° C. 2 minutes, 40 cycles of (98° C. 1 second, 56° C. 5 seconds, 72° C. 20 seconds), 72° C. 2 minutes, 4° C. hold. Quantification of inverted FlipArray RNA abundance was done on 2% E-gel using low-range quantitative ladder (ThermoFisher), and was normalized to Cpf1 mRNA transcript abundance.

[0273] Detection of Cpf1 mutagenesis: The genomic regions flanking the crRNA target sites were amplified from genomic DNA using the following primers:

Nf1_F:
(SEQ ID NO: 9,740)
GGGTCCGATTGCCAGTACCC
Nf1_R:
(SEQ ID NO: 9,741)
AACGTGCACCTCCCTTGTCA
Pten_F:
(SEQ ID NO: 9,711)
ACTCACCAGTGTTTAACATGCAGGC
Pten_R:
(SEQ ID NO: 9,712)
GGCAAGGTAGGTACGCATTTGCT
DNMT1_F:
(SEQ ID NO: 9,742)
CTGGGACTCAGGCGGGTCAC
DNMT1_R:
(SEQ ID NO: 9,743)
CCTCACACAACAGCTTCATGTCAGC
VEGFA_F:
(SEQ ID NO: 9,744)
CTCAGCTCCACAAACTTGGTGCC
VEGFA_R:
(SEQ ID NO: 9,745)
AGCCCGCCGCAATGAAGG
Cd274_F:
(SEQ ID NO: 9,746)
GAATGGTCCCCAAGACAAAGAAGAAGA
Cd274_R:
(SEQ ID NO: 9,747)
ATTCCCAAAGGAGAACCTGTAATGAGC
Ido1_F:
(SEQ ID NO: 9,748)
TTCATTGTTCTTCACCCCATGATTGGT
Ido1_R:
(SEQ ID NO: 9,749)
CCCATGACTTTCCTAAGGAGTGTGAAA
B2m_F:
(SEQ ID NO: 9,750)
TGTCAGGTGGAGTCTAGTGGTAGAAAA
B2m_R:
(SEQ ID NO: 9,751)
ATTGGGCACAGTGACAGACTTCAATTA
Fasl_F:
(SEQ ID NO: 9,752)
CGCCTGATTCTCCAACTCTAAAGAGAC
Fasl_R:
(SEQ ID NO: 9,753)
GCAAAGAGAAGAGAACAGGAGAAAGGT
Jak2_F:
(SEQ ID NO: 9,754)
AGATTCATAGCTGTCGTTCATCACTGG
Jak2_R:
(SEQ ID NO: 9,755)
GTTAGTTCTCTTTCTGCTTCTCTGCCA
Lgals9_F:
(SEQ ID NO: 9,756)
TTTGGCATCTTCACCAAGGTAGATTGT
Lgals9_R:
(SEQ ID NO: 9,757)
TAAGCCTGGACTAAGTAAGTGAATGCC

PCR conditions: 98° C. 2 minutes, 32 cycles of (98° C. 1 second, 63° C. 5 seconds, 72° C. 20 seconds), 72° C. 2 minutes, 4° C. hold.

[0274] The genomic DNA from approximately 1000 cells was used for PCR with the NPF and DVF FlipArrays. For the TSG-Immune FlipArray library experiments, genomic DNA from approximately 6000 cells were used to account for the pooled nature of the experiment. The resultant PCR products were used for Nextera library preparation following manufacturer protocols. Reads were mapped to the mm10 or hg38 genome using BWA-MEM (Li, H ArXiv13033997 Q-Bio (2013)), with settings -t 8 -w 200. After identification of indel variants using the pileup2indel function in VarScan v2.3.9, a 1% variant frequency threshold was to identify high confidence variants for NPF and DVF experiments. A less stringent 0.2% variant frequency threshold was used for the TSG-Immune experiments due to their pooled nature.

[0275] Sample size determination: No specific methods were used to predetermine sample size.

[0276] Blinding statement: Investigators were blinded for sequencing data analysis with generic sample IDs, but not blinded for PCR or RT-PCR.

[0277] The results of the experiments from Example 9 are now described.

[0278] Mutations and genetic alterations are often sequentially acquired in various biological and pathological processes, such as development, evolution, and cancer. Certain phenotypes only manifest with precise temporal sequences of genetic events. While multiple approaches have been developed to model the effects of mutations in tumorigenesis, few recapitulate the stepwise nature of cancer evolution. A flexible sequential mutagenesis system, Cpf1-Flip, with inducible inversion of a single crRNA array (FlipArray), was created, and its application in stepwise mutagenesis in murine and human cells was demonstrated. As a proof-of-concept, Cpf1-Flip was further utilized in a pooled-library approach to model the acquisition of diverse resistance mutations to cancer immunotherapy. Cpf1-Flip offers a simple, versatile and controlled approach for precise mutagenesis of multiple loci in a sequential manner.

[0279] When loxP sites are arranged such that they point towards each other, Cre recombination leads to inversion of the intervening sequence. However, this process leads to the complete regeneration of the loxP sites, thereby allowing Cre to continually catalyze DNA inversion. As continuous Cre-mediated inversion would be counterproductive in many applications, mutant loxP sites have been characterized that enable unidirectional Cre inversion. When the mutant loxP sites lox66 and lox71 are recombined, they generate a wildtype loxP site and a double-mutant lox72. Cre has a substantially lower affinity for lox72, thus leading to mostly irreversible inversion of the floxed DNA segment.

[0280] A U6 expression cassette was designed containing two inverted BsmbI restriction sites, flanked by a lox66 sequence and an inverted lox71 sequence (FIG. 21A). In the same lentiviral vector, an EFS promoter drives the expression of Lachnospiraceae bacterium Cpf1 (LbCpf1, or Cpf1 for short) and a puromycin resistance gene (EFS-Cpf1-Puro). After BsmbI restriction digest, the vector linearizes and allows for insertion of a crRNA array. To enable stepwise mutagenesis, crRNA arrays were designed in which the first crRNA is encoded on the sense strand, while the second crRNA is inverted. This construct is referred herein as a crRNA FlipArray. Six consecutive thymidines (6×T) are present in cis at the 3′ end of each crRNA, terminating U6 transcription. Each crRNA is preceded by the LbCpf1 direct repeat (DR) sequence, which guides Cpf1 to process the crRNA array.

[0281] Cre-mediated recombination of the lox66 and lox71 mutant loxP sites leads to inversion of the FlipArray, generating a wildtype loxP and a double-mutant loxP, lox72. As the affinity of Cre recombinase for lox72 is substantially lower than for wildtype loxP, inversion of the FlipArray is mostly irreversible. After inversion, the two crRNAs trade places and the second crRNA becomes expressed. Thus, in the absence of Cre, Cpf1 generates indels at the target site of the first crRNA; after Cre recombination, Cpf1 is directed to the target site of the second crRNA. This approach is herein termed Cpf1-Flip. In short, the Cpf1-Flip system leverages CRISPR-Cpf1 mutagenesis and melds it with the inversion capabilities of Cre/lox66/lox71 to enable programmable two-step mutagenesis.

[0282] To demonstrate sequential editing of cancer genes, Cpf1-Flip was first applied to generate Neurofibromatosis I (Nf1) and Phosphatase and tensin homolog (Pten) mutations in a mammalian lung cancer cell line (KPD). A FlipArray containing a spacer targeting Nf1 (crNf1) and an inverted spacer targeting Pten (crPten) (crNf1-crPten FlipArray, or NPF) was cloned in. The cells were infected with lentivirus containing EFS-Cpf1-Puro; U6-NPF (FIG. 21B). The pre-recombination construct was designed to only express crRNA targeting the first locus (Nf1) prior to the introduction of Cre. After 6 days of puromycin selection (one week after the initial lentiviral transduction), the cells were then infected with lentivirus containing an EFS promoter driving the expression of Cre (EFS-Cre). Cre-expressing cells undergo inversion of the crRNA FlipArray, leading to sequential mutagenesis at the second locus (Pten) (FIG. 21C).

[0283] To detect Cre-mediated inversion of the FlipArray, genomic DNA was isolated from the NPF-expressing lung cancer cells before infection with EFS-Cre and 10 days after infection. Primers were designed that would only generate a product if the FlipArray had successfully inverted (FIG. 22A). Primers specific for the non-inverted FlipArray were also designed. These data demonstrated robust FlipArray inversion (FIG. 22B). Specifically, by D10 following EFS-Cre, the FlipArray inversion frequency was 79.07%±8.23% (mean s.e.m.) (FIG. 22C). In order to monitor the induction of functional FlipArray inversion at the transcript level, total RNA was isolated from the double-infected KPD cells at various timepoints. After cDNA synthesis, inversion-specific primers were utilized to detect inverted crRNA FlipArray transcripts (FIG. 22D). The induction of inverted FlipArray transcripts steadily increased through the course of the experiment, illuminating the kinetics of Cre-mediated inversion of the FlipArray and its subsequent transcription. The low-levels of inverted FlipArray transcripts at baseline could be due to spontaneous inversion, or an artifact of the primer design.

[0284] The target sites of crNf1 and crPten were sequenced to determine whether the NPF construct had indeed created mutations in a controlled stepwise manner. Uninfected controls did not have any significant variants at crNf1 or crPten target sites (FIGS. 22E-22K). 7 days following the first lentiviral infection with EFS-Cpf1-Puro; U6-NPF, indels were found at the crNf1 target site, but not the crPten site (FIGS. 22G-22K). Since the second crRNA is not transcribed prior to Cre recombination, this result affirms that inversion of NPF has not yet occurred at this time point. After another 10 days following infection with EFS-Cre lentivirus (17 days following the initial infection with EFS-Cpf1-Puro; U6-NPF), indels were found at both crNf1 and crPten target sites at high frequencies (FIGS. 2I-2K).

[0285] To further demonstrate the utility of Cpf1-Flip in diverse biological systems, a FlipArray was designed targeting two human genes, DNA Methyltransferase 1 (DNMT1) and Vascular Endothelial Growth Factor A (VEGFA). The crRNA in the first position targets DNMT1 (crDNMT1) while the second, inverted crRNA targets VEGFA (crVEGFA) (crDNMT1-crVEGFA FlipArray, or DVF) (FIG. 23A). Cre activation induces recombination of the lox66/lox71 sites, such that crVEGFA becomes expressed. Human HEK293T cells were transduced with EFS-Cpf1; U6-DVF lentivirus, followed by puromycin selection. To assess the functionality of the FlipArray, the cells were then infected with EFS-Cre lentivirus. Using primers specific to the non-inverted or inverted DVF FlipArray, it was confirmed that Cre administration drives efficient inversion (FIG. 23B). In this system, inversion efficiency was 85.42%±2.90% by 2 weeks following EFS-Cre (FIG. 23C).

[0286] Next, to determine whether the Cpf1-Flip system had enabled sequential mutagenesis at the crDNMT1 and crVEGFA target sites, deep sequencing was performed. As anticipated, uninfected controls did not have significant mutations at either site (FIGS. 23D, 23E, 23J, 23K). Seven days after transduction with EFS-Cpf1; U6-DVF lentivirus, significant indels were found at the crDNMT1 target site but not at the crVEGFA target locus (FIGS. 23F, 23G, 23J, 23K). The cells were then infected with EFS-Cre to cause FlipArray inversion, leading to expression of crVEGFA. Twenty-one days after the initial transduction (14 days after EFS-Cre administration), significant indels were observed at both crDNMT1 and crVEGFA target sites (FIGS. 23H-23I). In these data, the DNMT1 cutting efficiency appeared to be consistently lower at D21 than at D7. This is likely a consequence of random sampling, as only a subset of the D7 cells were subsequently taken forward for Cre infection. In addition, it is possible that DNMTJ loss affects cell viability, given its crucial role in maintaining DNA methylation. The cutting efficiency at crVEGFA was notably lower compared to crDNMT1. This contrast may be due to lower efficiency of the crRNA itself, as well as inefficiencies in FlipArray expression or subsequent crRNA array processing. Taken together, these results demonstrate that Cpf1-Flip is a flexible tool for sequential mutagenesis based on the Cpf1.crRNA complex, temporally controlled by Cre recombinase.

[0287] Cpf1-Flip was applied to model acquired resistance to immunotherapy in breast cancer cells (E0771 cell line). A small pool of FlipArrays was designed in which the first crRNA targeted Nf1 while the inverted second crRNA targeted a panel of immunomodulatory factors (Cd274, Ido1, B2m, Fas1, Jak2, and Lgals9; referred to as TSG-Immune FlipArray library). These factors are thought to influence anti-tumor immunity and have been implicated in acquired resistance to checkpoint inhibitors. After pooled lentiviral transduction of E0771 cells with the TSG-Immune FlipArray library, the cells were infected with EFS-Cre lentivirus to induce FlipArray inversion (FIG. 24A). Upon Cre-mediated inversion, the second crRNA is expressed and triggers the knockout of various immunomodulatory factors, thus mimicking the sequential evolution of cancers in the face of immunotherapeutic pressures.

[0288] Targeted amplicon sequencing confirmed efficient mutagenesis of Nf1 (FIG. 24B), followed by mutagenesis of the immunomodulatory factors upon Cre-mediated FlipArray inversion (FIG. 24C). Given the pooled nature of these experiments, lower population-level cutting efficiencies are anticipated at the second loci, as only a sixth of the total cell population, on average, is infected with a given FlipArray. The lack of consistent mutagenesis at the crB2m and crCd274 target sites may be intrinsic to the crRNA sequences themselves, a result of inefficient Cre infection/recombination and FlipArray processing, or simply a consequence of biased representation within the cell pool. Of note, high cutting efficiencies at the Jak2 locus were observed despite the pooled nature of the experiment. Since these cells were processed completely in parallel as a minipool, the observation that crJak2 and crLgals9 showed consistent mutagenesis points to intrinsic differences in crRNA targeting efficiencies as the key factor underlying the lack of consistent cutting by crB2m and crCd274. Collectively, these data demonstrate the application of Cpf1-Flip to facilitate sequential genetic screens—for instance, to model the acquisition of resistance mutations to cancer immunotherapy.

[0289] The present disclosure provides Cpf1-Flip, an inducible sequential mutagenesis system using invertible crRNA FlipArrays. As a proof-of-concept, sequential mutagenesis were demonstrated in both mouse and human cells, while additionally performing pooled sequential mutagenesis in a cancer cell line. These data revealed that the cutting efficiency of the second target loci can be low with certain crRNAs despite successful FlipArray inversion. The most likely explanation for the discordance between FlipArray inversion and subsequent mutagenesis of the second target locus is the differing efficiencies of the crRNAs themselves. This is corroborated by the variance observed across independent crRNAs in the pooled TSG-Immune library (FIG. 24A-24C), where consistent cutting efficiencies were observed at the Jak2 and Lgals9 target sites, but not at B2m or Cd274. Moreover, cells with different crRNAs in a pool can undergo random drift or selection, further diverting their relative fractions and thereby indel frequencies. Nevertheless, the FlipArray library can be readout by barcoded PCR of the specific crRNA cassette followed by high-throughput sequencing. Thus, as with all CRISPR screens, pooled screen studies using Cpf1-Flip would require multiple independent FlipArrays targeting each gene/gene pair to ensure fair representation in the mutant pool. Optimized crRNA sequences, improved FlipArray designs, and engineered Cpf1 enzymes can improve the consistency and efficiency of Cpf1-Flip.

[0290] In certain non-limiting embodiments, by altering the composition and length of the crRNA arrays within the FlipArray, one can readily engineer more complex CRISPR perturbation programs. In other non-limiting embodiments, designs with two or more crRNAs within an invertible FlipArray at baseline can empower stepwise double knockouts (2+2, or quadruple knockouts as an end result) or higher dimensional sequential mutagenesis. In other non-limiting embodiments, the use of modified Cre systems such as CreER, photoactivatable Cre, and split-Cre can provide even greater control of FlipArray inversion. In yet other non-limiting embodiments, utilizing orthogonal recombinases and recognition sites in the crRNA array allows for even more complex multi-step gene editing programs. In yet other non-limiting embodiments, through the use of tethered Cpf1 variants, FlipArrays can also be used for sequential and reversible gene activation, repression, or epigenetic modification (FIG. 25A). Given the scalability and flexibility of FlipArrays, conditional genetic studies for phenotypes that only emerge upon sequential genetic events can be performed using Cpf1-Flip either in culture or in vivo (FIG. 25B). Since new mutations are stochastically acquired by rare individual cells within tumors, Cpf1-Flip can be used for studying the dynamics of rare tumor subclones under varying selection pressures, such as immunotherapy.

[0291] In certain non-limiting embodiments, such applications of Cpf1-Flip and its derivatives can be self-contained within a single viral vector, facilitating direct in vivo sequential genetic manipulations and functional studies.

### Other Embodiments

[0292] The recitation of a listing of elements in any definition of a variable herein includes definitions of that variable as any single element or combination (or subcombination) of listed elements. The recitation of an embodiment herein includes that embodiment as any single embodiment or in combination with any other embodiments or portions thereof.

[0293] The disclosures of each and every patent, patent application, and publication cited herein are hereby incorporated herein by reference in their entirety. While this invention has been disclosed with reference to specific embodiments, it is apparent that other embodiments and variations of this invention may be devised by others skilled in the art without departing from the true spirit and scope of the invention. The appended claims are intended to be construed to include all such embodiments and equivalent variations.

The application's sequence listing, which the Patent Office published only in electronic form, follows.

SEQUENCE LISTING (21697 sequences)

SEQ ID NO: 1 - DNA, 12411 bp, Artificial Sequence
  vector
gtcgacggatcgggagatctcccgatcccctatggtgcactctcagtacaatctgctctgatgccgcatagttaagccagtatctgctccctgcttgtgtgttggaggtcgctgagtagtgcgcgagcaaaatttaagctacaacaaggcaaggcttgaccgacaattgcatgaagaatctgcttagggttaggcgttttgcgctgcttcgcgatgtacgggccagatatacgcgttgacattgattattgactagttattaatagtaatcaattacggggtcattagttcatagcccatatatggagttccgcgttacataacttacggtaaatggcccgcctggctgaccgcccaacgacccccgcccattgacgtcaataatgacgtatgttcccatagtaacgccaatagggactttccattgacgtcaatgggtggagtatttacggtaaactgcccacttggcagtacatcaagtgtatcatatgccaagtacgccccctattgacgtcaatgacggtaaatggcccgcctggcattatgcccagtacatgaccttatgggactttcctacttggcagtacatctacgtattagtcatcgctattaccatggtgatgcggttttggcagtacatcaatgggcgtggatagcggtttgactcacggggatttccaagtctccaccccattgacgtcaatgggagtttgttttggcaccaaaatcaacgggactttccaaaatgtcgtaacaactccgccccattgacgcaaatgggcggtaggcgtgtacggtgggaggtctatataagcagcgcgttttgcctgtactgggtctctctggttagaccagatctgagcctgggagctctctggctaactagggaacccactgcttaagcctcaataaagcttgccttgagtgcttcaagtagtgtgtgcccgtctgttgtgtgactctggtaactagagatccctcagacccttttagtcagtgtggaaaatctctagcagtggcgcccgaacagggacttgaaagcgaaagggaaaccagaggagctctctcgacgcaggactcggcttgctgaagcgcgcacggcaagaggcgaggggcggcgactggtgagtacgccaaaaattttgactagcggaggctagaaggagagagatgggtgcgagagcgtcagtattaagcgggggagaattagatcgcgatgggaaaaaattcggttaaggccagggggaaagaaaaaatataaattaaaacatatagtatgggcaagcagggagctagaacgattcgcagttaatcctggcctgttagaaacatcagaaggctgtagacaaatactgggacagctacaaccatcccttcagacaggatcagaagaacttagatcattatataatacagtagcaaccctctattgtgtgcatcaaaggatagagataaaagacaccaaggaagctttagacaagatagaggaagagcaaaacaaaagtaagaccaccgcacagcaagcggccgctgatcttcagacctggaggaggagatatgagggacaattggagaagtgaattatataaatataaagtagtaaaaattgaaccattaggagtagcacccaccaaggcaaagagaagagtggtgcagagagaaaaaagagcagtgggaataggagctttgttccttgggttcttgggagcagcaggaagcactatgggcgcagcgtcaatgacgctgacggtacaggccagacaattattgtctggtatagtgcagcagcagaacaatttgctgagggctattgaggcgcaacagcatctgttgcaactcacagtctggggcatcaagcagctccaggcaagaatcctggctgtggaaagatacctaaaggatcaacagctcctggggatttggggttgctctggaaaactcatttgcaccactgctgtgccttggaatgctagttggagtaataaatctctggaacagatttggaatcacacgacctggatggagtgggacagagaaattaacaattacacaagcttaatacactccttaattgaagaatcgcaaaaccagcaagaaaagaatgaacaagaattattggaattagataaatgggcaagtttgtggaattggtttaacataacaaattggctgtggtatataaaattattcataatgatagtaggaggcttggtaggtttaagaatagtttttgctgtactttctatagtgaatagagttaggcagggatattcaccattatcgtttcagacccacctcccaaccccgaggggacccgacaggcccgaaggaatagaagaagaaggtggagagagagacagagacagatccattcgattagtgaacggatcggcactgcgtgcgccaattctgcagacaaatggcagtattcatccacaattttaaaagaaaaggggggattggggggtacagtgcaggggaaagaatagtagacataatagcaacagacatacaaactaaagaattacaaaaacaaattacaaaaattcaaaattttcgggtttattacagggacagcagagatccagtttggttaattaatcgagtggctccggtgcccgtcagtgggcagagcgcacatcgcccacagtccccgagaagttggggggaggggtcggcaattgaaccggtgcctagagaaggtggcgcggggtaaactgggaaagtgatgtcgtgtactggctccgcctttttcccgagggtgggggagaaccgtatataagtgcagtagtcgccgtgaacgttctttttcgcaacgggtttgccgccagaacacaggtgtcgtgacgcgggatccatgagcaagctggagaagtttacaaactgctactccctgtctaagaccctgaggttcaaggccatccctgtgggcaagacccaggagaacatcgacaataagcggctgctggtggaggacgagaagagagccgaggattataagggcgtgaagaagctgctggatcgctactatctgtcttttatcaacgacgtgctgcacagcatcaagctgaagaatctgaacaattacatcagcctgttccggaagaaaaccagaaccgagaaggagaataaggagctggagaacctggagatcaatctgcggaaggagatcgccaaggccttcaagggcaacgagggctacaagtccctgtttaagaaggatatcatcgagacaatcctgccagagttcctggacgataaggacgagatcgccctggtgaacagcttcaatggctttaccacagccttcaccggcttctttgataacagagagaatatgttttccgaggaggccaagagcacatccatcgccttcaggtgtatcaacgagaatctgacccgctacatctctaatatggacatcttcgagaaggtggacgccatctttgataagcacgaggtgcaggagatcaaggagaagatcctgaacagcgactatgatgtggaggatttctttgagggcgagttctttaactttgtgctgacacaggagggcatcgacgtgtataacgccatcatcggcggcttcgtgaccgagagcggcgagaagatcaagggcctgaacgagtacatcaacctgtataatcagaaaaccaagcagaagctgcctaagtttaagccactgtataagcaggtgctgagcgatcgggagtctctgagcttctacggcgagggctatacatccgatgaggaggtgctggaggtgtttagaaacaccctgaacaagaacagcgagatcttcagctccatcaagaagctggagaagctgttcaagaattttgacgagtactctagcgccggcatctttgtgaagaacggccccgccatcagcacaatctccaaggatatcttcggcgagtggaacgtgatccgggacaagtggaatgccgagtatgacgatatccacctgaagaagaaggccgtggtgaccgagaagtacgaggacgatcggagaaagtccttcaagaagatcggctccttttctctggagcagctgcaggagtacgccgacgccgatctgtctgtggtggagaagctgaaggagatcatcatccagaaggtggatgagatctacaaggtgtatggctcctctgagaagctgttcgacgccgattttgtgctggagaagagcctgaagaagaacgacgccgtggtggccatcatgaaggacctgctggattctgtgaagagcttcgagaattacatcaaggccttctttggcgagggcaaggagacaaacagggacgagtccttctatggcgattttgtgctggcctacgacatcctgctgaaggtggaccacatctacgatgccatccgcaattatgtgacccagaagccctactctaaggataagttcaagctgtattttcagaaccctcagttcatgggcggctgggacaaggataaggagacagactatcgggccaccatcctgagatacggctccaagtactatctggccatcatggataagaagtacgccaagtgcctgcagaagatcgacaaggacgatgtgaacggcaattacgagaagatcaactataagctgctgcccggccctaataagatgctgccaaaggtgttcttttctaagaagtggatggcctactataaccccagcgaggacatccagaagatctacaagaatggcacattcaagaagggcgatatgtttaacctgaatgactgtcacaagctgatcgacttctttaaggatagcatctcccggtatccaaagtggtccaatgcctacgatttcaacttttctgagacagagaagtataaggacatcgccggcttttacagagaggtggaggagcagggctataaggtgagcttcgagtctgccagcaagaaggaggtggataagctggtggaggagggcaagctgtatatgttccagatctataacaaggacttttccgataagtctcacggcacacccaatctgcacaccatgtacttcaagctgctgtttgacgagaacaatcacggacagatcaggctgagcggaggagcagagctgttcatgaggcgcgcctccctgaagaaggaggagctggtggtgcacccagccaactcccctatcgccaacaagaatccagataatcccaagaaaaccacaaccctgtcctacgacgtgtataaggataagaggttttctgaggaccagtacgagctgcacatcccaatcgccatcaataagtgccccaagaacatcttcaagatcaatacagaggtgcgcgtgctgctgaagcacgacgataacccctatgtgatcggcatcgataggggcgagcgcaatctgctgtatatcgtggtggtggacggcaagggcaacatcgtggagcagtattccctgaacgagatcatcaacaacttcaacggcatcaggatcaagacagattaccactctctgctggacaagaaggagaaggagaggttcgaggcccgccagaactggacctccatcgagaatatcaaggagctgaaggccggctatatctctcaggtggtgcacaagatctgcgagctggtggagaagtacgatgccgtgatcgccctggaggacctgaactctggctttaagaatagccgcgtgaaggtggagaagcaggtgtatcagaagttcgagaagatgctgatcgataagctgaactacatggtggacaagaagtctaatccttgtgcaacaggcggcgccctgaagggctatcagatcaccaataagttcgagagctttaagtccatgtctacccagaacggcttcatcttttacatccctgcctggctgacatccaagatcgatccatctaccggctttgtgaacctgctgaaaaccaagtataccagcatcgccgattccaagaagttcatcagctcctttgacaggatcatgtacgtgcccgaggaggatctgttcgagtttgccctggactataagaacttctctcgcacagacgccgattacatcaagaagtggaagctgtactcctacggcaaccggatcagaatcttccggaatcctaagaagaacaacgtgttcgactgggaggaggtgtgcctgaccagcgcctataaggagctgttcaacaagtacggcatcaattatcagcagggcgatatcagagccctgctgtgcgagcagtccgacaaggccttctactctagctttatggccctgatgagcctgatgctgcagatgcggaacagcatcacaggccgcaccgacgtggattttctgatcagccctgtgaagaactccgacggcatcttctacgatagccggaactatgaggcccaggagaatgccatcctgccaaagaacgccgacgccaatggcgcctataacatcgccagaaaggtgctgtgggccatcggccagttcaagaaggccgaggacgagaagctggataaggtgaagatcgccatctctaacaaggagtggctggagtacgcccagaccagcgtgaagcacaaaaggccggcggccacgaaaaaggccggccaggcaaaaaagaaaaaggattacaaagacgatgacgataagggcagcggcgccaccaacttcagcctgctgaagcaggccggcgacgtggaggagaaccccggccccatggccaagcctttgtctcaagaagaatccaccctcattgaaagagcaacggctacaatcaacagcatccccatctctgaagactacagcgtcgccagcgcagctctctctagcgacggccgcatcttcactggtgtcaatgtatatcattttactgggggaccttgtgcagaactcgtggtgctgggcactgctgctgctgcggcagctggcaacctgacttgtatcgtcgcgatcggaaatgagaacaggggcatcttgagcccctgcggacggtgccgacaggtgcttctcgatctgcatcctgggatcaaagccatagtgaaggacagtgatggacagccgacggcagttgggattcgtgaattgctgccctctggttatgtgtgggagggctaagaattcgatatcaagcttatcgataatcaacctctggattacaaaatttgtgaaagattgactggtattcttaactatgttgctccttttacgctatgtggatacgctgctttaatgcctttgtatcatgctattgcttcccgtatggctttcattttctcctccttgtataaatcctggttgctgtctctttatgaggagttgtggcccgttgtcaggcaacgtggcgtggtgtgcactgtgtttgctgacgcaacccccactggttggggcattgccaccacctgtcagctcctttccgggactttcgctttccccctccctattgccacggcggaactcatcgccgcctgccttgcccgctgctggacaggggctcggctgttgggcactgacaattccgtggtgttgtcggggaaatcatcgtcctttccttggctgctcgcctgtgttgccacctggattctgcgcgggacgtccttctgctacgtcccttcggccctcaatccagcggaccttccttcccgcggcctgctgccggctctgcggcctcttccgcgtcttcgccttcgccctcagacgagtcggatctccctttgggccgcctccccgcatcgataccgtcgacctcgagacctagaaaaacatggagcaatcacaagtagcaatacagcagctaccaatgctgattgtgcctggctagaagcacaagaggaggaggaggtgggttttccagtcacacctcaggtacctttaagaccaatgacttacaaggcagctgtagatcttagccactttttaaaagaaaaggggggactggaagggctaattcactcccaacgaagacaagatatccttgatctgtggatctaccacacacaaggctacttccctgattggcagaactacacaccagggccagggatcagatatccactgacctttggatggtgctacaagctagtaccagttgagcaagagaaggtagaagaagccaatgaaggagagaacacccgcttgttacaccctgtgagcctgcatgggatggatgacccggagagagaagtattagagtggaggtttgacagccgcctagcatttcatcacatggcccgagagctgcatccggactgtactgggtctctctggttagaccagatctgagcctgggagctctctggctaactagggaacccactgcttaagcctcaataaagcttgccttgagtgcttcaagtagtgtgtgcccgtctgttgtgtgactctggtaactagagatccctcagacccttttagtcagtgtggaaaatctctagcagggcccgtttaaacccgctgatcagcctcgactgtgccttctagttgccagccatctgttgtttgcccctcccccgtgccttccttgaccctggaaggtgccactcccactgtcctttcctaataaaatgaggaaattgcatcgcattgtctgagtaggtgtcattctattctggggggtggggtggggcaggacagcaagggggaggattgggaagacaatagcaggcatgctggggatgcggtgggctctatggcttctgaggcggaaagaaccagctggggctctagggggtatccccacgcgccctgtagcggcgcattaagcgcggcgggtgtggtggttacgcgcagcgtgaccgctacacttgccagcgccctagcgcccgctcctttcgctttcttcccttcctttctcgccacgttcgccggctttccccgtcaagctctaaatcgggggctccctttagggttccgatttagtgctttacggcacctcgaccccaaaaaacttgattagggtgatggttcacgtagtgggccatcgccctgatagacggtttttcgccctttgacgttggagtccacgttctttaatagtggactcttgttccaaactggaacaacactcaaccctatctcggtctattcttttgatttataagggattttgccgatttcggcctattggttaaaaaatgagctgatttaacaaaaatttaacgcgaattaattctgtggaatgtgtgtcagttagggtgtggaaagtccccaggctccccagcaggcagaagtatgcaaagcatgcatctcaattagtcagcaaccaggtgtggaaagtccccaggctccccagcaggcagaagtatgcaaagcatgcatctcaattagtcagcaaccatagtcccgcccctaactccgcccatcccgcccctaactccgcccagttccgcccattctccgccccatggctgactaattttttttatttatgcagaggccgaggccgcctctgcctctgagctattccagaagtagtgaggaggcttttttggaggcctaggcttttgcaaaaagctcccgggagcttgtatatccattttcggatctgatcagcacgtgttgacaattaatcatcggcatagtatatcggcatagtataatacgacaaggtgaggaactaaaccatggccaagttgaccagtgccgttccggtgctcaccgcgcgcgacgtcgccggagcggtcgagttctggaccgaccggctcgggttctcccgggacttcgtggaggacgacttcgccggtgtggtccgggacgacgtgaccctgttcatcagcgcggtccaggaccaggtggtgccggacaacaccctggcctgggtgtgggtgcgcggcctggacgagctgtacgccgagtggtcggaggtcgtgtccacgaacttccgggacgcctccgggccggccatgaccgagatcggcgagcagccgtgggggcgggagttcgccctgcgcgacccggccggcaactgcgtgcacttcgtggccgaggagcaggactgacacgtgctacgagatttcgattccaccgccgccttctatgaaaggttgggcttcggaatcgttttccgggacgccggctggatgatcctccagcgcggggatctcatgctggagttcttcgcccaccccaacttgtttattgcagcttataatggttacaaataaagcaatagcatcacaaatttcacaaataaagcatttttttcactgcattctagttgtggtttgtccaaactcatcaatgtatcttatcatgtctgtataccgtcgacctctagctagagcttggcgtaatcatggtcatagctgtttcctgtgtgaaattgttatccgctcacaattccacacaacatacgagccggaagcataaagtgtaaagcctggggtgcctaatgagtgagctaactcacattaattgcgttgcgctcactgcccgctttccagtcgggaaacctgtcgtgccagctgcattaatgaatcggccaacgcgcggggagaggcggtttgcgtattgggcgctcttccgcttcctcgctcactgactcgctgcgctcggtcgttcggctgcggcgagcggtatcagctcactcaaaggcggtaatacggttatccacagaatcaggggataacgcaggaaagaacatgtgagcaaaaggccagcaaaaggccaggaaccgtaaaaaggccgcgttgctggcgtttttccataggctccgcccccctgacgagcatcacaaaaatcgacgctcaagtcagaggtggcgaaacccgacaggactataaagataccaggcgtttccccctggaagctccctcgtgcgctctcctgttccgaccctgccgcttaccggatacctgtccgcctttctcccttcgggaagcgtggcgctttctcatagctcacgctgtaggtatctcagttcggtgtaggtcgttcgctccaagctgggctgtgtgcacgaaccccccgttcagcccgaccgctgcgccttatccggtaactatcgtcttgagtccaacccggtaagacacgacttatcgccactggcagcagccactggtaacaggattagcagagcgaggtatgtaggcggtgctacagagttcttgaagtggtggcctaactacggctacactagaagaacagtatttggtatctgcgctctgctgaagccagttaccttcggaaaaagagttggtagctcttgatccggcaaacaaaccaccgctggtagcggtggtttttttgtttgcaagcagcagattacgcgcagaaaaaaaggatctcaagaagatcctttgatcttttctacggggtctgacgctcagtggaacgaaaactcacgttaagggattttggtcatgagattatcaaaaaggatcttcacctagatccttttaaattaaaaatgaagttttaaatcaatctaaagtatatatgagtaaacttggtctgacagttaccaatgcttaatcagtgaggcacctatctcagcgatctgtctatttcgttcatccatagttgcctgactccccgtcgtgtagataactacgatacgggagggcttaccatctggccccagtgctgcaatgataccgcgagacccacgctcaccggctccagatttatcagcaataaaccagccagccggaagggccgagcgcagaagtggtcctgcaactttatccgcctccatccagtctattaattgttgccgggaagctagagtaagtagttcgccagttaatagtttgcgcaacgttgttgccattgctacaggcatcgtggtgtcacgctcgtcgtttggtatggcttcattcagctccggttcccaacgatcaaggcgagttacatgatcccccatgttgtgcaaaaaagcggttagctccttcggtcctccgatcgttgtcagaagtaagttggccgcagtgttatcactcatggttatggcagcactgcataattctcttactgtcatgccatccgtaagatgcttttctgtgactggtgagtactcaaccaagtcattctgagaatagtgtatgcggcgaccgagttgctcttgcccggcgtcaatacgggataataccgcgccacatagcagaactttaaaagtgctcatcattggaaaacgttcttcggggcgaaaactctcaaggatcttaccgctgttgagatccagttcgatgtaacccactcgtgcacccaactgatcttcagcatcttttactttcaccagcgtttctgggtgagcaaaaacaggaaggcaaaatgccgcaaaaaagggaataagggcgacacggaaatgttgaatactcatactcttcctttttcaatattattgaagcatttatcagggttattgtctcatgagcggatacatatttgaatgtatttagaaaaataaacaaataggggttccgcgcacatttccccgaaaagtgccacctgac

SEQ ID NO: 2 - DNA, 7289 bp, Artificial Sequence
  vector
ttaatgtagtcttatgcaatactcttgtagtcttgcaacatggtaacgatgagttagcaacatgccttacaaggagagaaaaagcaccgtgcatgccgattggtggaagtaaggtggtacgatcgtgccttattaggaaggcaacagacgggtctgacatggattggacgaaccactgaattgccgcattgcagagatattgtatttaagtgcctagctcgatacataaacgggtctctctggttagaccagatctgagcctgggagctctctggctaactagggaacccactgcttaagcctcaataaagcttgccttgagtgcttcaagtagtgtgtgcccgtctgttgtgtgactctggtaactagagatccctcagacccttttagtcagtgtggaaaatctctagcagtggcgcccgaacagggacttgaaagcgaaagggaaaccagaggagctctctcgacgcaggactcggcttgctgaagcgcgcacggcaagaggcgaggggcggcgactggtgagtacgccaaaaattttgactagcggaggctagaaggagagagatgggtgcgagagcgtcagtattaagcgggggagaattagatcgcgatgggaaaaaattcggttaaggccagggggaaagaaaaaatataaattaaaacatatagtatgggcaagcagggagctagaacgattcgcagttaatcctggcctgttagaaacatcagaaggctgtagacaaatactgggacagctacaaccatcccttcagacaggatcagaagaacttagatcattatataatacagtagcaaccctctattgtgtgcatcaaaggatagagataaaagacaccaaggaagctttagacaagatagaggaagagcaaaacaaaagtaagaccaccgcacagcaagcggccgctgatcttcagacctggaggaggagatatgagggacaattggagaagtgaattatataaatataaagtagtaaaaattgaaccattaggagtagcacccaccaaggcaaagagaagagtggtgcagagagaaaaaagagcagtgggaataggagctttgttccttgggttcttgggagcagcaggaagcactatgggcgcagcgtcaatgacgctgacggtacaggccagacaattattgtctggtatagtgcagcagcagaacaatttgctgagggctattgaggcgcaacagcatctgttgcaactcacagtctggggcatcaagcagctccaggcaagaatcctggctgtggaaagatacctaaaggatcaacagctcctggggatttggggttgctctggaaaactcatttgcaccactgctgtgccttggaatgctagttggagtaataaatctctggaacagatttggaatcacacgacctggatggagtgggacagagaaattaacaattacacaagcttaatacactccttaattgaagaatcgcaaaaccagcaagaaaagaatgaacaagaattattggaattagataaatgggcaagtttgtggaattggtttaacataacaaattggctgtggtatataaaattattcataatgatagtaggaggcttggtaggtttaagaatagtttttgctgtactttctatagtgaatagagttaggcagggatattcaccattatcgtttcagacccacctcccaaccccgaggggacccagagagggcctatttcccatgattccttcatatttgcatatacgatacaaggctgttagagagataattagaattaatttgactgtaaacacaaagatattagtacaaaatacgtgacgtagaaagtaataatttcttgggtagtttgcagttttaaaattatgttttaaaatggactatcatatgcttaccgtaacttgaaagtatttcgatttcttggctttatatatcttgtggaaaggacgaaacaccgtaatttctactaagtgtagatgagacggacgtctcaagcttggcgtggatccgatatcaactagatcttgagacaaatggcagtattcatccacaattttaaaagaaaaggggggattggggggtacagtgcaggggaaagaatagtagacataatagcaacagacatacaaactaaagaattacaaaaacaaattacaaaaattcaaaattttcgggtttattacagggacagcagagatccactttggcgccggctcgagggggcccggggaattcgctagctaggtcttgaaaggagtgggaattggctccggtgcccgtcagtgggcagagcgcacatcgcccacagtccccgagaagttggggggaggggtcggcaattgatccggtgcctagagaaggtggcgcggggtaaactgggaaagtgatgtcgtgtactggctccgcctttttcccgagggtgggggagaaccgtatataagtgcagtagtcgccgtgaacgttctttttcgcaacgggtttgccgccagaacacaggaccggttctagacgtacggccaccatgaccgagtacaagcccacggtgcgcctcgccacccgcgacgacgtccccagggccgtacgcaccctcgccgccgcgttcgccgactaccccgccacgcgccacaccgtcgatccggaccgccacatcgagcgggtcaccgagctgcaagaactcttcctcacgcgcgtcgggctcgacatcggcaaggtgtgggtcgcggacgacggcgccgccgtggcggtctggaccacgccggagagcgtcgaagcgggggcggtgttcgccgagatcggcccgcgcatggccgagttgagcggttcccggctggccgcgcagcaacagatggaaggcctcctggcgccgcaccggcccaaggagcccgcgtggttcctggccaccgtcggagtctcgcccgaccaccagggcaagggtctgggcagcgccgtcgtgctccccggagtggaggcggccgagcgcgccggggtgcccgccttcctggagacctccgcgccccgcaacctccccttctacgagcggctcggcttcaccgtcaccgccgacgtcgaggtgcccgaaggaccgcgcacctggtgcatgacccgcaagcccggtgcctgaacgcgttaagtcgacaatcaacctctggattacaaaatttgtgaaagattgactggtattcttaactatgttgctccttttacgctatgtggatacgctgctttaatgcctttgtatcatgctattgcttcccgtatggctttcattttctcctccttgtataaatcctggttgctgtctctttatgaggagttgtggcccgttgtcaggcaacgtggcgtggtgtgcactgtgtttgctgacgcaacccccactggttggggcattgccaccacctgtcagctcctttccgggactttcgctttccccctccctattgccacggcggaactcatcgccgcctgccttgcccgctgctggacaggggctcggctgttgggcactgacaattccgtggtgttgtcggggaaatcatcgtcctttccttggctgctcgcctgtgttgccacctggattctgcgcgggacgtccttctgctacgtcccttcggccctcaatccagcggaccttccttcccgcggcctgctgccggctctgcggcctcttccgcgtcttcgccttcgccctcagacgagtcggatctccctttgggccgcctccccgcgtcgactttaagaccaatgacttacaaggcagctgtagatcttagccactttttaaaagaaaaggggggactggaagggctaattcactcccaacgaagacaagatctgctttttgcttgtactgggtctctctggttagaccagatctgagcctgggagctctctggctaactagggaacccactgcttaagcctcaataaagcttgccttgagtgcttcaagtagtgtgtgcccgtctgttgtgtgactctggtaactagagatccctcagacccttttagtcagtgtggaaaatctctagcagtacgtatagtagttcatgtcatcttattattcagtatttataacttgcaaagaaatgaatatcagagagtgagaggaacttgtttattgcagcttataatggttacaaataaagcaatagcatcacaaatttcacaaataaagcatttttttcactgcattctagttgtggtttgtccaaactcatcaatgtatcttatcatgtctggctctagctatcccgcccctaactccgcccatcccgcccctaactccgcccagttccgcccattctccgccccatggctgactaattttttttatttatgcagaggccgaggccgcctcggcctctgagctattccagaagtagtgaggaggcttttttggaggcctagggacgtacccaattcgccctatagtgagtcgtattacgcgcgctcactggccgtcgttttacaacgtcgtgactgggaaaaccctggcgttacccaacttaatcgccttgcagcacatccccctttcgccagctggcgtaatagcgaagaggcccgcaccgatcgcccttcccaacagttgcgcagcctgaatggcgaatgggacgcgccctgtagcggcgcattaagcgcggcgggtgtggtggttacgcgcagcgtgaccgctacacttgccagcgccctagcgcccgctcctttcgctttcttcccttcctttctcgccacgttcgccggctttccccgtcaagctctaaatcgggggctccctttagggttccgatttagtgctttacggcacctcgaccccaaaaaacttgattagggtgatggttcacgtagtgggccatcgccctgatagacggtttttcgccctttgacgttggagtccacgttctttaatagtggactcttgttccaaactggaacaacactcaaccctatctcggtctattcttttgatttataagggattttgccgatttcggcctattggttaaaaaatgagctgatttaacaaaaatttaacgcgaattttaacaaaatattaacgcttacaatttaggtggcacttttcggggaaatgtgcgcggaacccctatttgtttatttttctaaatacattcaaatatgtatccgctcatgagacaataaccctgataaatgcttcaataatattgaaaaaggaagagtatgagtattcaacatttccgtgtcgcccttattcccttttttgcggcattttgccttcctgtttttgctcacccagaaacgctggtgaaagtaaaagatgctgaagatcagttgggtgcacgagtgggttacatcgaactggatctcaacagcggtaagatccttgagagttttcgccccgaagaacgttttccaatgatgagcacttttaaagttctgctatgtggcgcggtattatcccgtattgacgccgggcaagagcaactcggtcgccgcatacactattctcagaatgacttggttgagtactcaccagtcacagaaaagcatcttacggatggcatgacagtaagagaattatgcagtgctgccataaccatgagtgataacactgcggccaacttacttctgacaacgatcggaggaccgaaggagctaaccgcttttttgcacaacatgggggatcatgtaactcgccttgatcgttgggaaccggagctgaatgaagccataccaaacgacgagcgtgacaccacgatgcctgtagcaatggcaacaacgttgcgcaaactattaactggcgaactacttactctagcttcccggcaacaattaatagactggatggaggcggataaagttgcaggaccacttctgcgctcggcccttccggctggctggtttattgctgataaatctggagccggtgagcgtgggtctcgcggtatcattgcagcactggggccagatggtaagccctcccgtatcgtagttatctacacgacggggagtcaggcaactatggatgaacgaaatagacagatcgctgagataggtgcctcactgattaagcattggtaactgtcagaccaagtttactcatatatactttagattgatttaaaacttcatttttaatttaaaaggatctaggtgaagatcctttttgataatctcatgaccaaaatcccttaacgtgagttttcgttccactgagcgtcagaccccgtagaaaagatcaaaggatcttcttgagatcctttttttctgcgcgtaatctgctgcttgcaaacaaaaaaaccaccgctaccagcggtggtttgtttgccggatcaagagctaccaactctttttccgaaggtaactggcttcagcagagcgcagataccaaatactgttcttctagtgtagccgtagttaggccaccacttcaagaactctgtagcaccgcctacatacctcgctctgctaatcctgttaccagtggctgctgccagtggcgataagtcgtgtcttaccgggttggactcaagacgatagttaccggataaggcgcagcggtcgggctgaacggggggttcgtgcacacagcccagcttggagcgaacgacctacaccgaactgagatacctacagcgtgagctatgagaaagcgccacgcttcccgaagggagaaaggcggacaggtatccggtaagcggcagggtcggaacaggagagcgcacgagggagcttccagggggaaacgcctggtatctttatagtcctgtcgggtttcgccacctctgacttgagcgtcgatttttgtgatgctcgtcaggggggcggagcctatggaaaaacgccagcaacgcggcctttttacggttcctggccttttgctggccttttgctcacatgttctttcctgcgttatcccctgattctgtggataaccgtattaccgcctttgagtgagctgataccgctcgccgcagccgaacgaccgagcgcagcgagtcagtgagcgaggaagcggaagagcgcccaatacgcaaaccgcctctccccgcgcgttggccgattcattaatgcagctggcacgacaggtttcccgactggaaagcgggcagtgagcgcaacgcaattaatgtgagttagctcactcattaggcaccccaggctttacactttatgcttccggctcgtatgttgtgtggaattgtgagcggataacaatttcacacaggaaacagctatgaccatgattacgccaagcgcgcaattaaccctcactaaagggaacaaaagctggagctgcaagc

SEQ ID NO: 3 - DNA, 6636 bp, Artificial Sequence
  vector
ttaatgtagtcttatgcaatactcttgtagtcttgcaacatggtaacgatgagttagcaacatgccttacaaggagagaaaaagcaccgtgcatgccgattggtggaagtaaggtggtacgatcgtgccttattaggaaggcaacagacgggtctgacatggattggacgaaccactgaattgccgcattgcagagatattgtatttaagtgcctagctcgatacataaacgggtctctctggttagaccagatctgagcctgggagctctctggctaactagggaacccactgcttaagcctcaataaagcttgccttgagtgcttcaagtagtgtgtgcccgtctgttgtgtgactctggtaactagagatccctcagacccttttagtcagtgtggaaaatctctagcagtggcgcccgaacagggacttgaaagcgaaagggaaaccagaggagctctctcgacgcaggactcggcttgctgaagcgcgcacggcaagaggcgaggggcggcgactggtgagtacgccaaaaattttgactagcggaggctagaaggagagagatgggtgcgagagcgtcagtattaagcgggggagaattagatcgcgatgggaaaaaattcggttaaggccagggggaaagaaaaaatataaattaaaacatatagtatgggcaagcagggagctagaacgattcgcagttaatcctggcctgttagaaacatcagaaggctgtagacaaatactgggacagctacaaccatcccttcagacaggatcagaagaacttagatcattatataatacagtagcaaccctctattgtgtgcatcaaaggatagagataaaagacaccaaggaagctttagacaagatagaggaagagcaaaacaaaagtaagaccaccgcacagcaagcggccgctgatcttcagacctggaggaggagatatgagggacaattggagaagtgaattatataaatataaagtagtaaaaattgaaccattaggagtagcacccaccaaggcaaagagaagagtggtgcagagagaaaaaagagcagtgggaataggagctttgttccttgggttcttgggagcagcaggaagcactatgggcgcagcgtcaatgacgctgacggtacaggccagacaattattgtctggtatagtgcagcagcagaacaatttgctgagggctattgaggcgcaacagcatctgttgcaactcacagtctggggcatcaagcagctccaggcaagaatcctggctgtggaaagatacctaaaggatcaacagctcctggggatttggggttgctctggaaaactcatttgcaccactgctgtgccttggaatgctagttggagtaataaatctctggaacagatttggaatcacacgacctggatggagtgggacagagaaattaacaattacacaagcttaatacactccttaattgaagaatcgcaaaaccagcaagaaaagaatgaacaagaattattggaattagataaatgggcaagtttgtggaattggtttaacataacaaattggctgtggtatataaaattattcataatgatagtaggaggcttggtaggtttaagaatagtttttgctgtactttctatagtgaatagagttaggcagggatattcaccattatcgtttcagacccacctcccaaccccgaggggacccagagagggcctatttcccatgattccttcatatttgcatatacgatacaaggctgttagagagataattagaattaatttgactgtaaacacaaagatattagtacaaaatacgtgacgtagaaagtaataatttcttgggtagtttgcagttttaaaattatgttttaaaatggactatcatatgcttaccgtaacttgaaagtatttcgatttcttggctttatatatcttgtggaaaggacgaaacaccgtaatttctactaagtgtagatgagacggacgtctcaagcttggcgtggatccgatatcaactagatcttgagacaaatggcagtattcatccacaattttaaaagaaaaggggggattggggggtacagtgcaggggaaagaatagtagacataatagcaacagacatacaaactaaagaattacaaaaacaaattacaaaaattcaaaattttcgggtttattacagggacagcagagatccactttggcgccggctcgagggggcccggggaattcgctagctaggtcttgaaaggagtgggaattggctccggtgcccgtcagtgggcagagcgcacatcgcccacagtccccgagaagttggggggaggggtcggcaattgatccggtgcctagagaaggtggcgcggggtaaactgggaaagtgatgtcgtgtactggctccgcctttttcccgagggtgggggagaaccgtatataagtgcagtagtcgccgtgaacgttctttttcgcaacgggtttgccgccagaacacaggaccggttctagacgtacggccaccatgaacccagccatcagcgtcgctctcctgctctcagtcttgcaggtgtcccgagggcagaaggtgaccagcctgacagcctgcctggtgaaccaaaaccttcgcctggactgccgccatgagaataacaccaaggataactccatccagcatgagttcagcctgacccgagagaagaggaagcacgtgctctcaggcacccttgggatacccgagcacacgtaccgctcccgcgtcaccctctccaaccagccctatatcaaggtccttaccctagccaacttcaccaccaaggatgagggcgactacttttgtgagcttcgcgtaagtggcgcgaatcccatgagctccaataaaagtatcagtgtgtatagagacaagctggtcaagtgtggcggcataagcctgctggttcagaacacatcctggatgctgctgctgctgctttccctctccctcctccaagccctggacttcatttctctgtgaagcgctaataaaagatctttattttcattagatctgtgtgttggttttttgtgtgacgtgcggtcgactttaagaccaatgacttacaaggcagctgtagatcttagccactttttaaaagaaaaggggggactggaagggctaattcactcccaacgaagacaagatctgctttttgcttgtactgggtctctctggttagaccagatctgagcctgggagctctctggctaactagggaacccactgcttaagcctcaataaagcttgccttgagtgcttcaagtagtgtgtgcccgtctgttgtgtgactctggtaactagagatccctcagacccttttagtcagtgtggaaaatctctagcagtacgtatagtagttcatgtcatcttattattcagtatttataacttgcaaagaaatgaatatcagagagtgagaggaacttgtttattgcagcttataatggttacaaataaagcaatagcatcacaaatttcacaaataaagcatttttttcactgcattctagttgtggtttgtccaaactcatcaatgtatcttatcatgtctggctctagctatcccgcccctaactccgcccatcccgcccctaactccgcccagttccgcccattctccgccccatggctgactaattttttttatttatgcagaggccgaggccgcctcggcctctgagctattccagaagtagtgaggaggcttttttggaggcctagggacgtacccaattcgccctatagtgagtcgtattacgcgcgctcactggccgtcgttttacaacgtcgtgactgggaaaaccctggcgttacccaacttaatcgccttgcagcacatccccctttcgccagctggcgtaatagcgaagaggcccgcaccgatcgcccttcccaacagttgcgcagcctgaatggcgaatgggacgcgccctgtagcggcgcattaagcgcggcgggtgtggtggttacgcgcagcgtgaccgctacacttgccagcgccctagcgcccgctcctttcgctttcttcccttcctttctcgccacgttcgccggctttccccgtcaagctctaaatcgggggctccctttagggttccgatttagtgctttacggcacctcgaccccaaaaaacttgattagggtgatggttcacgtagtgggccatcgccctgatagacggtttttcgccctttgacgttggagtccacgttctttaatagtggactcttgttccaaactggaacaacactcaaccctatctcggtctattcttttgatttataagggattttgccgatttcggcctattggttaaaaaatgagctgatttaacaaaaatttaacgcgaattttaacaaaatattaacgcttacaatttaggtggcacttttcggggaaatgtgcgcggaacccctatttgtttatttttctaaatacattcaaatatgtatccgctcatgagacaataaccctgataaatgcttcaataatattgaaaaaggaagagtatgagtattcaacatttccgtgtcgcccttattcccttttttgcggcattttgccttcctgtttttgctcacccagaaacgctggtgaaagtaaaagatgctgaagatcagttgggtgcacgagtgggttacatcgaactggatctcaacagcggtaagatccttgagagttttcgccccgaagaacgttttccaatgatgagcacttttaaagttctgctatgtggcgcggtattatcccgtattgacgccgggcaagagcaactcggtcgccgcatacactattctcagaatgacttggttgagtactcaccagtcacagaaaagcatcttacggatggcatgacagtaagagaattatgcagtgctgccataaccatgagtgataacactgcggccaacttacttctgacaacgatcggaggaccgaaggagctaaccgcttttttgcacaacatgggggatcatgtaactcgccttgatcgttgggaaccggagctgaatgaagccataccaaacgacgagcgtgacaccacgatgcctgtagcaatggcaacaacgttgcgcaaactattaactggcgaactacttactctagcttcccggcaacaattaatagactggatggaggcggataaagttgcaggaccacttctgcgctcggcccttccggctggctggtttattgctgataaatctggagccggtgagcgtgggtctcgcggtatcattgcagcactggggccagatggtaagccctcccgtatcgtagttatctacacgacggggagtcaggcaactatggatgaacgaaatagacagatcgctgagataggtgcctcactgattaagcattggtaactgtcagaccaagtttactcatatatactttagattgatttaaaacttcatttttaatttaaaaggatctaggtgaagatcctttttgataatctcatgaccaaaatcccttaacgtgagttttcgttccactgagcgtcagaccccgtagaaaagatcaaaggatcttcttgagatcctttttttctgcgcgtaatctgctgcttgcaaacaaaaaaaccaccgctaccagcggtggtttgtttgccggatcaagagctaccaactctttttccgaaggtaactggcttcagcagagcgcagataccaaatactgttcttctagtgtagccgtagttaggccaccacttcaagaactctgtagcaccgcctacatacctcgctctgctaatcctgttaccagtggctgctgccagtggcgataagtcgtgtcttaccgggttggactcaagacgatagttaccggataaggcgcagcggtcgggctgaacggggggttcgtgcacacagcccagcttggagcgaacgacctacaccgaactgagatacctacagcgtgagctatgagaaagcgccacgcttcccgaagggagaaaggcggacaggtatccggtaagcggcagggtcggaacaggagagcgcacgagggagcttccagggggaaacgcctggtatctttatagtcctgtcgggtttcgccacctctgacttgagcgtcgatttttgtgatgctcgtcaggggggcggagcctatggaaaaacgccagcaacgcggcctttttacggttcctggccttttgctggccttttgctcacatgttctttcctgcgttatcccctgattctgtggataaccgtattaccgcctttgagtgagctgataccgctcgccgcagccgaacgaccgagcgcagcgagtcagtgagcgaggaagcggaagagcgcccaatacgcaaaccgcctctccccgcgcgttggccgattcattaatgcagctggcacgacaggtttcccgactggaaagcgggcagtgagcgcaacgcaattaatgtgagttagctcactcattaggcaccccaggctttacactttatgcttccggctcgtatgttgtgtggaattgtgagcggataacaatttcacacaggaaacagctatgaccatgattacgccaagcgcgcaattaaccctcactaaagggaacaaaagctggagctgcaagc

SEQ ID NO: 4 - DNA, 170 bp, Artificial sequence
  Acvr2a.155_Apc.21
  crRNA array
cgatttcttggctttatatatcttgtggaaaggacgaaacaccgtaatttctactaagtgtagatggacctggctaatcaagtattaatttctactaagtgtagatgtgatccacacgtgtagctgttttttaagcttggcgtggatccgatatcaactagatcttgaga

SEQ ID NO: 5 - DNA, 170 bp, Artificial sequence
  Acvr2a.155_Apc.867
  crRNA array
cgatttcttggctttatatatcttgtggaaaggacgaaacaccgtaatttctactaagtgtagatggacctggctaatcaagtattaatttctactaagtgtagatcagtcccaggcggcggaagcttttttaagcttggcgtggatccgatatcaactagatcttgaga

SEQ ID NO: 6 - DNA, 170 bp, Artificial sequence
  Acvr2a.155_Arid1a.2
  crRNA array
cgatttcttggctttatatatcttgtggaaaggacgaaacaccgtaatttctactaagtgtagatggacctggctaatcaagtattaatttctactaagtgtagatcccgcgcccccgtcctggggttttttaagcttggcgtggatccgatatcaactagatcttgaga

SEQ ID NO: 7 - DNA, 170 bp, Artificial sequence
  Acvr2a.155_Arid1a.5
  crRNA array
cgatttcttggctttatatatcttgtggaaaggacgaaacaccgtaatttctactaagtgtagatggacctggctaatcaagtattaatttctactaagtgtagatcccgcgctcggccgctgccgttttttaagcttggcgtggatccgatatcaactagatcttgaga

SEQ ID NO: 8 - DNA, 170 bp, Artificial sequence
  Acvr2a.155_Arid2.166
  crRNA array
cgatttcttggctttatatatcttgtggaaaggacgaaacaccgtaatttctactaagtgtagatggacctggctaatcaagtattaatttctactaagtgtagataaccgcgatctgggttttttttttttaagcttggcgtggatccgatatcaactagatcttgaga

SEQ ID NO: 9 - DNA, 170 bp, Artificial sequence
  Acvr2a.155_Arid2.172
  crRNA array
cgatttcttggctttatatatcttgtggaaaggacgaaacaccgtaatttctactaagtgtagatggacctggctaatcaagtattaatttctactaagtgtagatctggacgagctgcggcagttttttttaagcttggcgtggatccgatatcaactagatcttgaga

SEQ ID NO: 10 - DNA, 170 bp, Artificial sequence
  Acvr2a.155_Atm.120
  crRNA array
cgatttcttggctttatatatcttgtggaaaggacgaaacaccgtaatttctactaagtgtagatggacctggctaatcaagtattaatttctactaagtgtagatgacaggtagtcggcagctaattttttaagcttggcgtggatccgatatcaactagatcttgaga

SEQ ID NO: 11 - DNA, 170 bp, Artificial sequence
  Acvr2a.155_Atm.997
  crRNA array
cgatttcttggctttatatatcttgtggaaaggacgaaacaccgtaatttctactaagtgtagatggacctggctaatcaagtattaatttctactaagtgtagatgagaaagtctccgaatcgttttttttaagcttggcgtggatccgatatcaactagatcttgaga

SEQ ID NO: 12 - DNA, 170 bp, Artificial sequence
  Acvr2a.155_Atrx.249
  crRNA array
cgatttcttggctttatatatcttgtggaaaggacgaaacaccgtaatttctactaagtgtagatggacctggctaatcaagtattaatttctactaagtgtagattagccagtcgctcatatctcttttttaagcttggcgtggatccgatatcaactagatcttgaga

SEQ ID NO: 13 - DNA, 170 bp, Artificial sequence
  Acvr2a.155_Atrx.251
  crRNA array
cgatttcttggctttatatatcttgtggaaaggacgaaacaccgtaatttctactaagtgtagatggacctggctaatcaagtattaatttctactaagtgtagatgccagtcgctcatatctctgttttttaagcttggcgtggatccgatatcaactagatcttgaga

SEQ ID NO: 14 - DNA, 170 bp, Artificial sequence
  Acvr2a.155_Bcor.203
  crRNA array
cgatttcttggctttatatatcttgtggaaaggacgaaacaccgtaatttctactaagtgtagatggacctggctaatcaagtattaatttctactaagtgtagatccccggagcggagtccaggcttttttaagcttggcgtggatccgatatcaactagatcttgaga

SEQ ID NO: 15 - DNA, 170 bp, Artificial sequence
  Acvr2a.155_Bcor.475
  crRNA array
cgatttcttggctttatatatcttgtggaaaggacgaaacaccgtaatttctactaagtgtagatggacctggctaatcaagtattaatttctactaagtgtagattgcaacccctctgtatgggattttttaagcttggcgtggatccgatatcaactagatcttgaga

SEQ ID NO: 16 - DNA, 170 bp, Artificial sequence
  Acvr2a.155_Brca1.112
  crRNA array
cgatttcttggctttatatatcttgtggaaaggacgaaacaccgtaatttctactaagtgtagatggacctggctaatcaagtattaatttctactaagtgtagatctagacgctctgtggagactttttttaagcttggcgtggatccgatatcaactagatcttgaga

SEQ ID NO: 17 - DNA, 170 bp, Artificial sequence
  Acvr2a.155_Brca1.53
  crRNA array
cgatttcttggctttatatatcttgtggaaaggacgaaacaccgtaatttctactaagtgtagatggacctggctaatcaagtattaatttctactaagtgtagataatgaggaggcgtcgatcatttttttaagcttggcgtggatccgatatcaactagatcttgaga

SEQ ID NO: 18 - DNA, 170 bp, Artificial sequence
  Acvr2a.155_Casp8.45
  crRNA array
cgatttcttggctttatatatcttgtggaaaggacgaaacaccgtaatttctactaagtgtagatggacctggctaatcaagtattaatttctactaagtgtagatctaccgagatcctgtgaatgttttttaagcttggcgtggatccgatatcaactagatcttgaga

SEQ ID NO: 19 - DNA, 170 bp, Artificial sequence
  Acvr2a.155_Casp8.54
  crRNA array
cgatttcttggctttatatatcttgtggaaaggacgaaacaccgtaatttctactaagtgtagatggacctggctaatcaagtattaatttctactaagtgtagatcagtgcagtcgtcgtaagatttttttaagcttggcgtggatccgatatcaactagatcttgaga

SEQ ID NO: 20 - DNA, 170 bp, Artificial sequence
  Acvr2a.155_Cbwd1.84
  crRNA array
cgatttcttggctttatatatcttgtggaaaggacgaaacaccgtaatttctactaagtgtagatggacctggctaatcaagtattaatttctactaagtgtagatcacagcaggtaacatgccgcttttttaagcttggcgtggatccgatatcaactagatcttgaga

SEQ ID NO: 21 - DNA, 170 bp, Artificial sequence
  Acvr2a.155_Cbwd1.85
  crRNA array
cgatttcttggctttatatatcttgtggaaaggacgaaacaccgtaatttctactaagtgtagatggacctggctaatcaagtattaatttctactaagtgtagatacagcaggtaacatgccgccttttttaagcttggcgtggatccgatatcaactagatcttgaga

SEQ ID NO: 22 - DNA, 170 bp, Artificial sequence
  Acvr2a.155_Cdh1.387
  crRNA array
cgatttcttggctttatatatcttgtggaaaggacgaaacaccgtaatttctactaagtgtagatggacctggctaatcaagtattaatttctactaagtgtagatctcggcgtctgccgggtccgttttttaagcttggcgtggatccgatatcaactagatcttgaga

SEQ ID NO: 23 - DNA, 170 bp, Artificial sequence
  Acvr2a.155_Cdh1.58
  crRNA array
cgatttcttggctttatatatcttgtggaaaggacgaaacaccgtaatttctactaagtgtagatggacctggctaatcaagtattaatttctactaagtgtagatctcgtccgcgcccgggactcttttttaagcttggcgtggatccgatatcaactagatcttgaga

SEQ ID NO: 24 - DNA, 170 bp, Artificial sequence
  Acvr2a.155_Cdkn2a.647
  crRNA array
cgatttcttggctttatatatcttgtggaaaggacgaaacaccgtaatttctactaagtgtagatggacctggctaatcaagtattaatttctactaagtgtagatgcaatcacgggagggagcagttttttaagcttggcgtggatccgatatcaactagatcttgaga

SEQ ID NO: 25 - DNA, 170 bp, Artificial sequence
  Acvr2a.155_Cdkn2a.648
  crRNA array
cgatttcttggctttatatatcttgtggaaaggacgaaacaccgtaatttctactaagtgtagatggacctggctaatcaagtattaatttctactaagtgtagatcaatcacgggagggagcagattttttaagcttggcgtggatccgatatcaactagatcttgaga

SEQ ID NO: 26 - DNA, 170 bp, Artificial sequence
  Acvr2a.155_Cic.162
  crRNA array
cgatttcttggctttatatatcttgtggaaaggacgaaacaccgtaatttctactaagtgtagatggacctggctaatcaagtattaatttctactaagtgtagatcgcaggcgcgcccggcggagttttttaagcttggcgtggatccgatatcaactagatcttgaga

SEQ ID NO: 27 - DNA, 170 bp, Artificial sequence
  Acvr2a.155_Cic.164
  crRNA array
cgatttcttggctttatatatcttgtggaaaggacgaaacaccgtaatttctactaagtgtagatggacctggctaatcaagtattaatttctactaagtgtagatcgggccctgggccggcggctttttttaagcttggcgtggatccgatatcaactagatcttgaga

SEQ ID NO: 28 - DNA, 170 bp, Artificial sequence
  Acvr2a.155_Ctcf.229
  crRNA array
cgatttcttggctttatatatcttgtggaaaggacgaaacaccgtaatttctactaagtgtagatggacctggctaatcaagtattaatttctactaagtgtagatggctggtggctgatagtctgttttttaagcttggcgtggatccgatatcaactagatcttgaga

SEQ ID NO: 29 - DNA, 170 bp, Artificial sequence
  Acvr2a.155_Ctcf.809
  crRNA array
cgatttcttggctttatatatcttgtggaaaggacgaaacaccgtaatttctactaagtgtagatggacctggctaatcaagtattaatttctactaagtgtagataagcgctatcatgatcccaattttttaagcttggcgtggatccgatatcaactagatcttgaga

SEQ ID NO: 30 - DNA, 170 bp, Artificial sequence
  Acvr2a.155_Elf3.826
  crRNA array
cgatttcttggctttatatatcttgtggaaaggacgaaacaccgtaatttctactaagtgtagatggacctggctaatcaagtattaatttctactaagtgtagattccgagacatcctaatccacttttttaagcttggcgtggatccgatatcaactagatcttgaga

SEQ ID NO: 31 - DNA, 170 bp, Artificial sequence
  Acvr2a.155_Elf3.983
  crRNA array
cgatttcttggctttatatatcttgtggaaaggacgaaacaccgtaatttctactaagtgtagatggacctggctaatcaagtattaatttctactaagtgtagattaggccccctaactggaccattttttaagcttggcgtggatccgatatcaactagatcttgaga

SEQ ID NO: 32 - DNA, 170 bp, Artificial sequence
  Acvr2a.155_Ep300.310
  crRNA array
cgatttcttggctttatatatcttgtggaaaggacgaaacaccgtaatttctactaagtgtagatggacctggctaatcaagtattaatttctactaagtgtagatatggtacgacagtgaggaagttttttaagcttggcgtggatccgatatcaactagatcttgaga

SEQ ID NO: 33 - DNA, 170 bp, Artificial sequence
  Acvr2a.155_Ep300.587
  crRNA array
cgatttcttggctttatatatcttgtggaaaggacgaaacaccgtaatttctactaagtgtagatggacctggctaatcaagtattaatttctactaagtgtagatcgccccggggcccccaaccattttttaagcttggcgtggatccgatatcaactagatcttgaga

SEQ ID NO: 34 - DNA, 170 bp, Artificial sequence
  Acvr2a.155_Epha2.126
  crRNA array
cgatttcttggctttatatatcttgtggaaaggacgaaacaccgtaatttctactaagtgtagatggacctggctaatcaagtattaatttctactaagtgtagatcctgtgccgccgcggccgccttttttaagcttggcgtggatccgatatcaactagatcttgaga

SEQ ID NO: 35 - DNA, 170 bp, Artificial sequence
  Acvr2a.155_Epha2.5
  crRNA array
cgatttcttggctttatatatcttgtggaaaggacgaaacaccgtaatttctactaagtgtagatggacctggctaatcaagtattaatttctactaagtgtagatcatgagctggcgccacccggttttttaagcttggcgtggatccgatatcaactagatcttgaga

SEQ ID NO: 36 - DNA, 170 bp, Artificial sequence
  Acvr2a.155_Fat1.105
  crRNA array
cgatttcttggctttatatatcttgtggaaaggacgaaacaccgtaatttctactaagtgtagatggacctggctaatcaagtattaatttctactaagtgtagataactcgaggtgacaacaagtttttttaagcttggcgtggatccgatatcaactagatcttgaga

SEQ ID NO: 37 - DNA, 170 bp, Artificial sequence
  Acvr2a.155_Fat1.122
  crRNA array
cgatttcttggctttatatatcttgtggaaaggacgaaacaccgtaatttctactaagtgtagatggacctggctaatcaagtattaatttctactaagtgtagatccatcgacatggaaacgggattttttaagcttggcgtggatccgatatcaactagatcttgaga

SEQ ID NO: 38 - DNA, 170 bp, Artificial sequence
  Acvr2a.155_Fbxw7.21
  crRNA array
cgatttcttggctttatatatcttgtggaaaggacgaaacaccgtaatttctactaagtgtagatggacctggctaatcaagtattaatttctactaagtgtagattaatgtgccgtagaaacccattttttaagcttggcgtggatccgatatcaactagatcttgaga

SEQ ID NO: 39 - DNA, 170 bp, Artificial sequence
  Acvr2a.155_Fbxw7.23
  crRNA array
cgatttcttggctttatatatcttgtggaaaggacgaaacaccgtaatttctactaagtgtagatggacctggctaatcaagtattaatttctactaagtgtagatatgtgccgtagaaacccatattttttaagcttggcgtggatccgatatcaactagatcttgaga

SEQ ID NO: 40 - DNA, 170 bp, Artificial sequence
  Acvr2a.155_Gata3.34
  crRNA array
cgatttcttggctttatatatcttgtggaaaggacgaaacaccgtaatttctactaagtgtagatggacctggctaatcaagtattaatttctactaagtgtagatctaaactatcccgcaaagatttttttaagcttggcgtggatccgatatcaactagatcttgaga

SEQ ID NO: 41 - DNA, 170 bp, Artificial sequence
  Acvr2a.155_Gata3.47
  crRNA array
cgatttcttggctttatatatcttgtggaaaggacgaaacaccgtaatttctactaagtgtagatggacctggctaatcaagtattaatttctactaagtgtagatcgtagtaggacgggacgtggttttttaagcttggcgtggatccgatatcaactagatcttgaga

SEQ ID NO: 42 - DNA, 170 bp, Artificial sequence
  Acvr2a.155_H2-Q2.1
  crRNA array
cgatttcttggctttatatatcttgtggaaaggacgaaacaccgtaatttctactaagtgtagatggacctggctaatcaagtattaatttctactaagtgtagatagggcggccaccaacagcagttttttaagcttggcgtggatccgatatcaactagatcttgaga

SEQ ID NO: 43 - DNA, 170 bp, Artificial sequence
  Acvr2a.155_H2-Q2.2
  crRNA array
cgatttcttggctttatatatcttgtggaaaggacgaaacaccgtaatttctactaagtgtagatggacctggctaatcaagtattaatttctactaagtgtagattaacctgcgcccgctgctgattttttaagcttggcgtggatccgatatcaactagatcttgaga

SEQ ID NO: 44 - DNA, 170 bp, Artificial sequence
  Acvr2a.155_Kdm5c.1878
  crRNA array
cgatttcttggctttatatatcttgtggaaaggacgaaacaccgtaatttctactaagtgtagatggacctggctaatcaagtattaatttctactaagtgtagatagagcacggcacccgcccccttttttaagcttggcgtggatccgatatcaactagatcttgaga

SEQ ID NO: 45 - DNA, 170 bp, Artificial sequence
  Acvr2a.155_Kdm5c.1879
  crRNA array
cgatttcttggctttatatatcttgtggaaaggacgaaacaccgtaatttctactaagtgtagatggacctggctaatcaagtattaatttctactaagtgtagatgagcacggcacccgccccccttttttaagcttggcgtggatccgatatcaactagatcttgaga

SEQ ID NO: 46 - DNA, 170 bp, Artificial sequence
  Acvr2a.155_Kdm6a.56
  crRNA array
cgatttcttggctttatatatcttgtggaaaggacgaaacaccgtaatttctactaagtgtagatggacctggctaatcaagtattaatttctactaagtgtagattcgctgccgcctctcgcggcttttttaagcttggcgtggatccgatatcaactagatcttgaga

SEQ ID NO: 47 - DNA, 170 bp, Artificial sequence
  Acvr2a.155_Kdm6a.57
  crRNA array
cgatttcttggctttatatatcttgtggaaaggacgaaacaccgtaatttctactaagtgtagatggacctggctaatcaagtattaatttctactaagtgtagatcgctgccgcctctcgcggcattttttaagcttggcgtggatccgatatcaactagatcttgaga

SEQ ID NO: 48 - DNA, 170 bp, Artificial sequence
  Acvr2a.155_Kmt2b.265
  crRNA array
cgatttcttggctttatatatcttgtggaaaggacgaaacaccgtaatttctactaagtgtagatggacctggctaatcaagtattaatttctactaagtgtagatccccaagtgaagcccacctgttttttaagcttggcgtggatccgatatcaactagatcttgaga

SEQ ID NO: 49 - DNA, 170 bp, Artificial sequence
  Acvr2a.155_Kmt2b.298
  crRNA array
cgatttcttggctttatatatcttgtggaaaggacgaaacaccgtaatttctactaagtgtagatggacctggctaatcaagtattaatttctactaagtgtagattccggcagggaccggctggcttttttaagcttggcgtggatccgatatcaactagatcttgaga

SEQ ID NO: 50 - DNA, 170 bp, Artificial sequence
  Acvr2a.155_Kmt2c.1962
  crRNA array
cgatttcttggctttatatatcttgtggaaaggacgaaacaccgtaatttctactaagtgtagatggacctggctaatcaagtattaatttctactaagtgtagatgtgacgatctgtgccacaagttttttaagcttggcgtggatccgatatcaactagatcttgaga

SEQ ID NO: 51 - DNA, 170 bp, Artificial sequence
  Acvr2a.155_Kmt2c.2236
  crRNA array
cgatttcttggctttatatatcttgtggaaaggacgaaacaccgtaatttctactaagtgtagatggacctggctaatcaagtattaatttctactaagtgtagatactcgacctccacctccctattttttaagcttggcgtggatccgatatcaactagatcttgaga

SEQ ID NO: 52 - DNA, 170 bp, Artificial sequence
  Acvr2a.155_Kmt2d.316
  crRNA array
cgatttcttggctttatatatcttgtggaaaggacgaaacaccgtaatttctactaagtgtagatggacctggctaatcaagtattaatttctactaagtgtagatactccaggccacccaggtggttttttaagcttggcgtggatccgatatcaactagatcttgaga

SEQ ID NO: 53 - DNA, 170 bp, Artificial sequence
  Acvr2a.155_Kmt2d.416
  crRNA array
cgatttcttggctttatatatcttgtggaaaggacgaaacaccgtaatttctactaagtgtagatggacctggctaatcaagtattaatttctactaagtgtagattaaacccccgggggaagggtttttttaagcttggcgtggatccgatatcaactagatcttgaga

SEQ ID NO: 54 - DNA, 170 bp, Artificial sequence
  Acvr2a.155_Map2k4.119
  crRNA array
cgatttcttggctttatatatcttgtggaaaggacgaaacaccgtaatttctactaagtgtagatggacctggctaatcaagtattaatttctactaagtgtagattgctgtgtgggcggccacatttttttaagcttggcgtggatccgatatcaactagatcttgaga

SEQ ID NO: 55 - DNA, 170 bp, Artificial sequence
  Acvr2a.155_Map2k4.1261
  crRNA array
cgatttcttggctttatatatcttgtggaaaggacgaaacaccgtaatttctactaagtgtagatggacctggctaatcaagtattaatttctactaagtgtagatgatgtagtaatgcggagtagttttttaagcttggcgtggatccgatatcaactagatcttgaga

SEQ ID NO: 56 - DNA, 170 bp, Artificial sequence
  Acvr2a.155_Map3k1.235
  crRNA array
cgatttcttggctttatatatcttgtggaaaggacgaaacaccgtaatttctactaagtgtagatggacctggctaatcaagtattaatttctactaagtgtagataaaacgctactgatcgatcgttttttaagcttggcgtggatccgatatcaactagatcttgaga

SEQ ID NO: 57 - DNA, 170 bp, Artificial sequence
  Acvr2a.155_Map3k1.3838
  crRNA array
cgatttcttggctttatatatcttgtggaaaggacgaaacaccgtaatttctactaagtgtagatggacctggctaatcaagtattaatttctactaagtgtagatccaacaacagggccccactattttttaagcttggcgtggatccgatatcaactagatcttgaga

SEQ ID NO: 58 - DNA, 170 bp, Artificial sequence
  Acvr2a.155_Mga.1655
  crRNA array
cgatttcttggctttatatatcttgtggaaaggacgaaacaccgtaatttctactaagtgtagatggacctggctaatcaagtattaatttctactaagtgtagatcgagaagtggagagcatattttttttaagcttggcgtggatccgatatcaactagatcttgaga

SEQ ID NO: 59 - DNA, 170 bp, Artificial sequence
  Acvr2a.155_Mga.93
  crRNA array
cgatttcttggctttatatatcttgtggaaaggacgaaacaccgtaatttctactaagtgtagatggacctggctaatcaagtattaatttctactaagtgtagatgagaaggctccccataatgtttttttaagcttggcgtggatccgatatcaactagatcttgaga

SEQ ID NO: 60 - DNA, 170 bp, Artificial sequence
  Acvr2a.155_Nf1.746
  crRNA array
cgatttcttggctttatatatcttgtggaaaggacgaaacaccgtaatttctactaagtgtagatggacctggctaatcaagtattaatttctactaagtgtagattaagcataatgatgatgccattttttaagcttggcgtggatccgatatcaactagatcttgaga

SEQ ID NO: 61 - DNA, 170 bp, Artificial sequence
  Acvr2a.155_Nf1.97
  crRNA array
cgatttcttggctttatatatcttgtggaaaggacgaaacaccgtaatttctactaagtgtagatggacctggctaatcaagtattaatttctactaagtgtagatagcccgctacatgctgatgcttttttaagcttggcgtggatccgatatcaactagatcttgaga

SEQ ID NO: 62 - DNA, 170 bp, Artificial sequence
  Acvr2a.155_Nf2.356
  crRNA array
cgatttcttggctttatatatcttgtggaaaggacgaaacaccgtaatttctactaagtgtagatggacctggctaatcaagtattaatttctactaagtgtagatcggagtcatctgatagagatttttttaagcttggcgtggatccgatatcaactagatcttgaga

SEQ ID NO: 63 - DNA, 170 bp, Artificial sequence
  Acvr2a.155_Nf2.768
  crRNA array
cgatttcttggctttatatatcttgtggaaaggacgaaacaccgtaatttctactaagtgtagatggacctggctaatcaagtattaatttctactaagtgtagatccgaagccccagtgtccggcttttttaagcttggcgtggatccgatatcaactagatcttgaga

SEQ ID NO: 64 - DNA, 170 bp, Artificial sequence
  Acvr2a.155_Notch1.1849
  crRNA array
cgatttcttggctttatatatcttgtggaaaggacgaaacaccgtaatttctactaagtgtagatggacctggctaatcaagtattaatttctactaagtgtagatctggcgggtgggcggcgctgttttttaagcttggcgtggatccgatatcaactagatcttgaga

SEQ ID NO: 65 - DNA, 170 bp, Artificial sequence
  Acvr2a.155_Notch1.649
  crRNA array
cgatttcttggctttatatatcttgtggaaaggacgaaacaccgtaatttctactaagtgtagatggacctggctaatcaagtattaatttctactaagtgtagattgggccaacgatgccaggacttttttaagcttggcgtggatccgatatcaactagatcttgaga

SEQ ID NO: 66 - DNA, 170 bp, Artificial sequence
  Acvr2a.155_Nsd1.70
  crRNA array
cgatttcttggctttatatatcttgtggaaaggacgaaacaccgtaatttctactaagtgtagatggacctggctaatcaagtattaatttctactaagtgtagatactggtgtggacgatgcagattttttaagcttggcgtggatccgatatcaactagatcttgaga

SEQ ID NO: 67 - DNA, 170 bp, Artificial sequence
  Acvr2a.155_Nsd1.90
  crRNA array
cgatttcttggctttatatatcttgtggaaaggacgaaacaccgtaatttctactaagtgtagatggacctggctaatcaagtattaatttctactaagtgtagataggagctaacggcaagaatgttttttaagcttggcgtggatccgatatcaactagatcttgaga

SEQ ID NO: 68 - DNA, 170 bp, Artificial sequence
  Acvr2a.155_Pbrm1.1236
  crRNA array
cgatttcttggctttatatatcttgtggaaaggacgaaacaccgtaatttctactaagtgtagatggacctggctaatcaagtattaatttctactaagtgtagatgccgataaaaccaacagccgttttttaagcttggcgtggatccgatatcaactagatcttgaga

SEQ ID NO: 69 - DNA, 170 bp, Artificial sequence
  Acvr2a.155_Pbrm1.969
  crRNA array
cgatttcttggctttatatatcttgtggaaaggacgaaacaccgtaatttctactaagtgtagatggacctggctaatcaagtattaatttctactaagtgtagatgagccctaatgaacagctcattttttaagcttggcgtggatccgatatcaactagatcttgaga

SEQ ID NO: 70 - DNA, 170 bp, Artificial sequence
  Acvr2a.155_Pik3r1.76
  crRNA array
cgatttcttggctttatatatcttgtggaaaggacgaaacaccgtaatttctactaagtgtagatggacctggctaatcaagtattaatttctactaagtgtagataaaacctatacggcccgcacttttttaagcttggcgtggatccgatatcaactagatcttgaga

SEQ ID NO: 71 - DNA, 170 bp, Artificial sequence
  Acvr2a.155_Pik3r1.77
  crRNA array
cgatttcttggctttatatatcttgtggaaaggacgaaacaccgtaatttctactaagtgtagatggacctggctaatcaagtattaatttctactaagtgtagataaacctatacggcccgcactttttttaagcttggcgtggatccgatatcaactagatcttgaga

SEQ ID NO: 72 - DNA, 170 bp, Artificial sequence
  Acvr2a.155_Pten.240
  crRNA array
cgatttcttggctttatatatcttgtggaaaggacgaaacaccgtaatttctactaagtgtagatggacctggctaatcaagtattaatttctactaagtgtagattgcatacgctatagctgcttttttttaagcttggcgtggatccgatatcaactagatcttgaga

SEQ ID NO: 73 - DNA, 170 bp, Artificial sequence
  Acvr2a.155_Pten.265
  crRNA array
cgatttcttggctttatatatcttgtggaaaggacgaaacaccgtaatttctactaagtgtagatggacctggctaatcaagtattaatttctactaagtgtagataagcgtggtgcgtgacgcacttttttaagcttggcgtggatccgatatcaactagatcttgaga

SEQ ID NO: 74 - DNA, 170 bp, Artificial sequence
  Acvr2a.155_Rasa1.1478
  crRNA array
cgatttcttggctttatatatcttgtggaaaggacgaaacaccgtaatttctactaagtgtagatggacctggctaatcaagtattaatttctactaagtgtagatcgataatggtctatgatgtcttttttaagcttggcgtggatccgatatcaactagatcttgaga

SEQ ID NO: 75 - DNA, 170 bp, Artificial sequence
  Acvr2a.155_Rasa1.223
  crRNA array
cgatttcttggctttatatatcttgtggaaaggacgaaacaccgtaatttctactaagtgtagatggacctggctaatcaagtattaatttctactaagtgtagattccatggagtatcgtgctcgttttttaagcttggcgtggatccgatatcaactagatcttgaga

SEQ ID NO: 76 - DNA, 170 bp, Artificial sequence
  Acvr2a.155_Rb1.211
  crRNA array
cgatttcttggctttatatatcttgtggaaaggacgaaacaccgtaatttctactaagtgtagatggacctggctaatcaagtattaatttctactaagtgtagattctgacatgatcgggtacctttttttaagcttggcgtggatccgatatcaactagatcttgaga

SEQ ID NO: 77 - DNA, 170 bp, Artificial sequence
  Acvr2a.155_Rb1.394
  crRNA array
cgatttcttggctttatatatcttgtggaaaggacgaaacaccgtaatttctactaagtgtagatggacctggctaatcaagtattaatttctactaagtgtagatagaaatctcgaagcaggatcttttttaagcttggcgtggatccgatatcaactagatcttgaga

SEQ ID NO: 78 - DNA, 170 bp, Artificial sequence
  Acvr2a.155_Rbm10.5
  crRNA array
cgatttcttggctttatatatcttgtggaaaggacgaaacaccgtaatttctactaagtgtagatggacctggctaatcaagtattaatttctactaagtgtagatacgaaacctgaacccacacattttttaagcttggcgtggatccgatatcaactagatcttgaga

SEQ ID NO: 79 - DNA, 170 bp, Artificial sequence
  Acvr2a.155_Rbm10.6
  crRNA array
cgatttcttggctttatatatcttgtggaaaggacgaaacaccgtaatttctactaagtgtagatggacctggctaatcaagtattaatttctactaagtgtagatcgaaacctgaacccacacagttttttaagcttggcgtggatccgatatcaactagatcttgaga

SEQ ID NO: 80 - DNA, 170 bp, Artificial sequence
  Acvr2a.155_Rnf43.1920
  crRNA array
cgatttcttggctttatatatcttgtggaaaggacgaaacaccgtaatttctactaagtgtagatggacctggctaatcaagtattaatttctactaagtgtagatatccccgtgccgtggactccttttttaagcttggcgtggatccgatatcaactagatcttgaga

SEQ ID NO: 81 - DNA, 170 bp, Artificial sequence
  Acvr2a.155_Rnf43.39
  crRNA array
cgatttcttggctttatatatcttgtggaaaggacgaaacaccgtaatttctactaagtgtagatggacctggctaatcaagtattaatttctactaagtgtagatcaaggggatcactctgataattttttaagcttggcgtggatccgatatcaactagatcttgaga

SEQ ID NO: 82 - DNA, 170 bp, Artificial sequence
  Acvr2a.155_Runx1.204
  crRNA array
cgatttcttggctttatatatcttgtggaaaggacgaaacaccgtaatttctactaagtgtagatggacctggctaatcaagtattaatttctactaagtgtagattaaataagtccagccgttttttttttaagcttggcgtggatccgatatcaactagatcttgaga

SEQ ID NO: 83 - DNA, 170 bp, Artificial sequence
  Acvr2a.155_Runx1.81
  crRNA array
cgatttcttggctttatatatcttgtggaaaggacgaaacaccgtaatttctactaagtgtagatggacctggctaatcaagtattaatttctactaagtgtagataggacgcgtatgggaattttttttttaagcttggcgtggatccgatatcaactagatcttgaga

SEQ ID NO: 84 - DNA, 170 bp, Artificial sequence
  Acvr2a.155_Setd2.143
  crRNA array
cgatttcttggctttatatatcttgtggaaaggacgaaacaccgtaatttctactaagtgtagatggacctggctaatcaagtattaatttctactaagtgtagatgcacaaccacaacagactggttttttaagcttggcgtggatccgatatcaactagatcttgaga

SEQ ID NO: 85 - DNA, 170 bp, Artificial sequence
  Acvr2a.155_Setd2.508
  crRNA array
cgatttcttggctttatatatcttgtggaaaggacgaaacaccgtaatttctactaagtgtagatggacctggctaatcaagtattaatttctactaagtgtagattacgatcccgagcacccgacttttttaagcttggcgtggatccgatatcaactagatcttgaga

SEQ ID NO: 86 - DNA, 170 bp, Artificial sequence
  Acvr2a.155_Smad4.3038
  crRNA array
cgatttcttggctttatatatcttgtggaaaggacgaaacaccgtaatttctactaagtgtagatggacctggctaatcaagtattaatttctactaagtgtagatatctgcggcagtgtcaccggttttttaagcttggcgtggatccgatatcaactagatcttgaga

SEQ ID NO: 87 - DNA, 170 bp, Artificial sequence
  Acvr2a.155_Smad4.39
  crRNA array
cgatttcttggctttatatatcttgtggaaaggacgaaacaccgtaatttctactaagtgtagatggacctggctaatcaagtattaatttctactaagtgtagatagtcaaacgcatactgacaattttttaagcttggcgtggatccgatatcaactagatcttgaga

SEQ ID NO: 88 - DNA, 170 bp, Artificial sequence
  Acvr2a.155_Stag2.1409
  crRNA array
cgatttcttggctttatatatcttgtggaaaggacgaaacaccgtaatttctactaagtgtagatggacctggctaatcaagtattaatttctactaagtgtagatgctaataactgcggaagggcttttttaagcttggcgtggatccgatatcaactagatcttgaga

SEQ ID NO: 89 - DNA, 170 bp, Artificial sequence
  Acvr2a.155_Stag2.4401
  crRNA array
cgatttcttggctttatatatcttgtggaaaggacgaaacaccgtaatttctactaagtgtagatggacctggctaatcaagtattaatttctactaagtgtagattaatcgtccagtggtgtatattttttaagcttggcgtggatccgatatcaactagatcttgaga

SEQ ID NO: 90 - DNA, 170 bp, Artificial sequence
  Acvr2a.155_Tbl1xr1.1
  crRNA array
cgatttcttggctttatatatcttgtggaaaggacgaaacaccgtaatttctactaagtgtagatggacctggctaatcaagtattaatttctactaagtgtagatggatgcgcatactggtgaagttttttaagcttggcgtggatccgatatcaactagatcttgaga

SEQ ID NO: 91 - DNA, 170 bp, Artificial sequence
  Acvr2a.155_Tbl1xr1.83
  crRNA array
cgatttcttggctttatatatcttgtggaaaggacgaaacaccgtaatttctactaagtgtagatggacctggctaatcaagtattaatttctactaagtgtagatatggtcgacccatcgagtctttttttaagcttggcgtggatccgatatcaactagatcttgaga

SEQ ID NO: 92 - DNA, 170 bp, Artificial sequence
  Acvr2a.155_Tgfbr2.290
  crRNA array
cgatttcttggctttatatatcttgtggaaaggacgaaacaccgtaatttctactaagtgtagatggacctggctaatcaagtattaatttctactaagtgtagatcctctcggcgcccgggtaaattttttaagcttggcgtggatccgatatcaactagatcttgaga

SEQ ID NO: 93 - DNA, 170 bp, Artificial sequence
  Acvr2a.155_Tgfbr2.292
  crRNA array
cgatttcttggctttatatatcttgtggaaaggacgaaacaccgtaatttctactaagtgtagatggacctggctaatcaagtattaatttctactaagtgtagatcccgggcgccgagagggaaattttttaagcttggcgtggatccgatatcaactagatcttgaga

SEQ ID NO: 94 - DNA, 170 bp, Artificial sequence
  Acvr2a.155_Trp53.4
  crRNA array
cgatttcttggctttatatatcttgtggaaaggacgaaacaccgtaatttctactaagtgtagatggacctggctaatcaagtattaatttctactaagtgtagatccctgaactgcccccagggattttttaagcttggcgtggatccgatatcaactagatcttgaga

SEQ ID NO: 95 - DNA, 170 bp, Artificial sequence
  Acvr2a.155_Trp53.528
  crRNA array
cgatttcttggctttatatatcttgtggaaaggacgaaacaccgtaatttctactaagtgtagatggacctggctaatcaagtattaatttctactaagtgtagatgctgggccagcagagacctgttttttaagcttggcgtggatccgatatcaactagatcttgaga

SEQ ID NO: 96 - DNA, 170 bp, Artificial sequence
  Acvr2a.155_Vhl.1
  crRNA array
cgatttcttggctttatatatcttgtggaaaggacgaaacaccgtaatttctactaagtgtagatggacctggctaatcaagtattaatttctactaagtgtagatagggctcccggcggccatttttttttaagcttggcgtggatccgatatcaactagatcttgaga

SEQ ID NO: 97 - DNA, 170 bp, Artificial sequence
  Acvr2a.155_Vhl.151
  crRNA array
cgatttcttggctttatatatcttgtggaaaggacgaaacaccgtaatttctactaagtgtagatggacctggctaatcaagtattaatttctactaagtgtagattagagcactcacccgagggattttttaagcttggcgtggatccgatatcaactagatcttgaga

SEQ ID NO: 98 - DNA, 170 bp, Artificial sequence
  Acvr2a.155_Zc3h13.1387
  crRNA array
cgatttcttggctttatatatcttgtggaaaggacgaaacaccgtaatttctactaagtgtagatggacctggctaatcaagtattaatttctactaagtgtagatgtgacgccggtcatgtgactttttttaagcttggcgtggatccgatatcaactagatcttgaga

SEQ ID NO: 99 - DNA, 170 bp, Artificial sequence
  Acvr2a.155_Zc3h13.1777
  crRNA array
cgatttcttggctttatatatcttgtggaaaggacgaaacaccgtaatttctactaagtgtagatggacctggctaatcaagtattaatttctactaagtgtagatgatgctgccagtgtagcggcttttttaagcttggcgtggatccgatatcaactagatcttgaga

SEQ ID NO: 100 - DNA, 170 bp, Artificial sequence
  Acvr2a.70_Apc.21
  crRNA array
cgatttcttggctttatatatcttgtggaaaggacgaaacaccgtaatttctactaagtgtagatcccgaggcgccggagaagcctaatttctactaagtgtagatgtgatccacacgtgtagctgttttttaagcttggcgtggatccgatatcaactagatcttgaga

SEQ ID NO: 101 - DNA, 170 bp, Artificial sequence
  Acvr2a.70_Apc.867
  crRNA array
cgatttcttggctttatatatcttgtggaaaggacgaaacaccgtaatttctactaagtgtagatcccgaggcgccggagaagcctaatttctactaagtgtagatcagtcccaggcggcggaagcttttttaagcttggcgtggatccgatatcaactagatcttgaga

SEQ ID NO: 102 - DNA, 170 bp, Artificial sequence
  Acvr2a.70_Arid1a.2
  crRNA array
cgatttcttggctttatatatcttgtggaaaggacgaaacaccgtaatttctactaagtgtagatcccgaggcgccggagaagcctaatttctactaagtgtagatcccgcgcccccgtcctggggttttttaagcttggcgtggatccgatatcaactagatcttgaga

SEQ ID NO: 103 - DNA, 170 bp, Artificial sequence
  Acvr2a.70_Arid1a.5
  crRNA array
cgatttcttggctttatatatcttgtggaaaggacgaaacaccgtaatttctactaagtgtagatcccgaggcgccggagaagcctaatttctactaagtgtagatcccgcgctcggccgctgccgttttttaagcttggcgtggatccgatatcaactagatcttgaga

SEQ ID NO: 104 - DNA, 170 bp, Artificial sequence
  Acvr2a.70_Arid2.166
  crRNA array
cgatttcttggctttatatatcttgtggaaaggacgaaacaccgtaatttctactaagtgtagatcccgaggcgccggagaagcctaatttctactaagtgtagataaccgcgatctgggttttttttttttaagcttggcgtggatccgatatcaactagatcttgaga

SEQ ID NO: 105 - DNA, 170 bp, Artificial sequence
  Acvr2a.70_Arid2.172
  crRNA array
cgatttcttggctttatatatcttgtggaaaggacgaaacaccgtaatttctactaagtgtagatcccgaggcgccggagaagcctaatttctactaagtgtagatctggacgagctgcggcagttttttttaagcttggcgtggatccgatatcaactagatcttgaga

SEQ ID NO: 106 - DNA, 170 bp, Artificial sequence
  Acvr2a.70_Atm.120
  crRNA array
cgatttcttggctttatatatcttgtggaaaggacgaaacaccgtaatttctactaagtgtagatcccgaggcgccggagaagcctaatttctactaagtgtagatgacaggtagtcggcagctaattttttaagcttggcgtggatccgatatcaactagatcttgaga

SEQ ID NO: 107 - DNA, 170 bp, Artificial sequence
  Acvr2a.70_Atm.997
  crRNA array
cgatttcttggctttatatatcttgtggaaaggacgaaacaccgtaatttctactaagtgtagatcccgaggcgccggagaagcctaatttctactaagtgtagatgagaaagtctccgaatcgttttttttaagcttggcgtggatccgatatcaactagatcttgaga

SEQ ID NO: 108 - DNA, 170 bp, Artificial sequence
  Acvr2a.70_Atrx.249
  crRNA array
cgatttcttggctttatatatcttgtggaaaggacgaaacaccgtaatttctactaagtgtagatcccgaggcgccggagaagcctaatttctactaagtgtagattagccagtcgctcatatctcttttttaagcttggcgtggatccgatatcaactagatcttgaga

SEQ ID NO: 109 - DNA, 170 bp, Artificial sequence
  Acvr2a.70_Atrx.251
  crRNA array
cgatttcttggctttatatatcttgtggaaaggacgaaacaccgtaatttctactaagtgtagatcccgaggcgccggagaagcctaatttctactaagtgtagatgccagtcgctcatatctctgttttttaagcttggcgtggatccgatatcaactagatcttgaga

SEQ ID NO: 110 - DNA, 170 bp, Artificial sequence
  Acvr2a.70_Bcor.203
  crRNA array
cgatttcttggctttatatatcttgtggaaaggacgaaacaccgtaatttctactaagtgtagatcccgaggcgccggagaagcctaatttctactaagtgtagatccccggagcggagtccaggcttttttaagcttggcgtggatccgatatcaactagatcttgaga

SEQ ID NO: 111 - DNA, 170 bp, Artificial sequence
  Acvr2a.70_Bcor.475
  crRNA array
cgatttcttggctttatatatcttgtggaaaggacgaaacaccgtaatttctactaagtgtagatcccgaggcgccggagaagcctaatttctactaagtgtagattgcaacccctctgtatgggattttttaagcttggcgtggatccgatatcaactagatcttgaga

SEQ ID NO: 112 - DNA, 170 bp, Artificial sequence
  Acvr2a.70_Brca1.112
  crRNA array
cgatttcttggctttatatatcttgtggaaaggacgaaacaccgtaatttctactaagtgtagatcccgaggcgccggagaagcctaatttctactaagtgtagatctagacgctctgtggagactttttttaagcttggcgtggatccgatatcaactagatcttgaga

SEQ ID NO: 113 - DNA, 170 bp, Artificial sequence
  Acvr2a.70_Brca1.53
  crRNA array
cgatttcttggctttatatatcttgtggaaaggacgaaacaccgtaatttctactaagtgtagatcccgaggcgccggagaagcctaatttctactaagtgtagataatgaggaggcgtcgatcatttttttaagcttggcgtggatccgatatcaactagatcttgaga

SEQ ID NO: 114 - DNA, 170 bp, Artificial sequence
  Acvr2a.70_Casp8.45
  crRNA array
cgatttcttggctttatatatcttgtggaaaggacgaaacaccgtaatttctactaagtgtagatcccgaggcgccggagaagcctaatttctactaagtgtagatctaccgagatcctgtgaatgttttttaagcttggcgtggatccgatatcaactagatcttgaga

SEQ ID NO: 115 - DNA, 170 bp, Artificial sequence
  Acvr2a.70_Casp8.54
  crRNA array
cgatttcttggctttatatatcttgtggaaaggacgaaacaccgtaatttctactaagtgtagatcccgaggcgccggagaagcctaatttctactaagtgtagatcagtgcagtcgtcgtaagatttttttaagcttggcgtggatccgatatcaactagatcttgaga

SEQ ID NO: 116 - DNA, 170 bp, Artificial sequence
  Acvr2a.70_Cbwd1.84
  crRNA array
cgatttcttggctttatatatcttgtggaaaggacgaaacaccgtaatttctactaagtgtagatcccgaggcgccggagaagcctaatttctactaagtgtagatcacagcaggtaacatgccgcttttttaagcttggcgtggatccgatatcaactagatcttgaga

SEQ ID NO: 117 - DNA, 170 bp, Artificial sequence
  Acvr2a.70_Cbwd1.85
  crRNA array
cgatttcttggctttatatatcttgtggaaaggacgaaacaccgtaatttctactaagtgtagatcccgaggcgccggagaagcctaatttctactaagtgtagatacagcaggtaacatgccgccttttttaagcttggcgtggatccgatatcaactagatcttgaga

SEQ ID NO: 118 - DNA, 170 bp, Artificial sequence
  Acvr2a.70_Cdh1.387
  crRNA array
cgatttcttggctttatatatcttgtggaaaggacgaaacaccgtaatttctactaagtgtagatcccgaggcgccggagaagcctaatttctactaagtgtagatctcggcgtctgccgggtccgttttttaagcttggcgtggatccgatatcaactagatcttgaga

SEQ ID NO: 119 - DNA, 170 bp, Artificial sequence
  Acvr2a.70_Cdh1.58
  crRNA array
cgatttcttggctttatatatcttgtggaaaggacgaaacaccgtaatttctactaagtgtagatcccgaggcgccggagaagcctaatttctactaagtgtagatctcgtccgcgcccgggactcttttttaagcttggcgtggatccgatatcaactagatcttgaga

SEQ ID NO: 120 - DNA, 170 bp, Artificial sequence
  Acvr2a.70_Cdkn2a.647
  crRNA array
cgatttcttggctttatatatcttgtggaaaggacgaaacaccgtaatttctactaagtgtagatcccgaggcgccggagaagcctaatttctactaagtgtagatgcaatcacgggagggagcagttttttaagcttggcgtggatccgatatcaactagatcttgaga

SEQ ID NO: 121 - DNA, 170 bp, Artificial sequence
  Acvr2a.70_Cdkn2a.648
  crRNA array
cgatttcttggctttatatatcttgtggaaaggacgaaacaccgtaatttctactaagtgtagatcccgaggcgccggagaagcctaatttctactaagtgtagatcaatcacgggagggagcagattttttaagcttggcgtggatccgatatcaactagatcttgaga

SEQ ID NO: 122 - DNA, 170 bp, Artificial sequence
  Acvr2a.70_Cic.162
  crRNA array
cgatttcttggctttatatatcttgtggaaaggacgaaacaccgtaatttctactaagtgtagatcccgaggcgccggagaagcctaatttctactaagtgtagatcgcaggcgcgcccggcggagttttttaagcttggcgtggatccgatatcaactagatcttgaga

SEQ ID NO: 123 - DNA, 170 bp, Artificial sequence
  Acvr2a.70_Cic.164
  crRNA array
cgatttcttggctttatatatcttgtggaaaggacgaaacaccgtaatttctactaagtgtagatcccgaggcgccggagaagcctaatttctactaagtgtagatcgggccctgggccggcggctttttttaagcttggcgtggatccgatatcaactagatcttgaga

SEQ ID NO: 124 - DNA, 170 bp, Artificial sequence
  Acvr2a.70_Ctcf.229
  crRNA array
cgatttcttggctttatatatcttgtggaaaggacgaaacaccgtaatttctactaagtgtagatcccgaggcgccggagaagcctaatttctactaagtgtagatggctggtggctgatagtctgttttttaagcttggcgtggatccgatatcaactagatcttgaga

SEQ ID NO: 125 - DNA, 170 bp, Artificial sequence
  Acvr2a.70_Ctcf.809
  crRNA array
cgatttcttggctttatatatcttgtggaaaggacgaaacaccgtaatttctactaagtgtagatcccgaggcgccggagaagcctaatttctactaagtgtagataagcgctatcatgatcccaattttttaagcttggcgtggatccgatatcaactagatcttgaga

SEQ ID NO: 126 - DNA, 170 bp, Artificial sequence
  Acvr2a.70_Elf3.826
  crRNA array
cgatttcttggctttatatatcttgtggaaaggacgaaacaccgtaatttctactaagtgtagatcccgaggcgccggagaagcctaatttctactaagtgtagattccgagacatcctaatccacttttttaagcttggcgtggatccgatatcaactagatcttgaga

SEQ ID NO: 127 - DNA, 170 bp, Artificial sequence
  Acvr2a.70_Elf3.983
  crRNA array
cgatttcttggctttatatatcttgtggaaaggacgaaacaccgtaatttctactaagtgtagatcccgaggcgccggagaagcctaatttctactaagtgtagattaggccccctaactggaccattttttaagcttggcgtggatccgatatcaactagatcttgaga

SEQ ID NO: 128 - DNA, 170 bp, Artificial sequence
  Acvr2a.70_Ep300.310
  crRNA array
cgatttcttggctttatatatcttgtggaaaggacgaaacaccgtaatttctactaagtgtagatcccgaggcgccggagaagcctaatttctactaagtgtagatatggtacgacagtgaggaagttttttaagcttggcgtggatccgatatcaactagatcttgaga

SEQ ID NO: 129 - DNA, 170 bp, Artificial sequence
  Acvr2a.70_Ep300.587
  crRNA array
cgatttcttggctttatatatcttgtggaaaggacgaaacaccgtaatttctactaagtgtagatcccgaggcgccggagaagcctaatttctactaagtgtagatcgccccggggcccccaaccattttttaagcttggcgtggatccgatatcaactagatcttgaga

SEQ ID NO: 130 - DNA, 170 bp, Artificial sequence
  Acvr2a.70_Epha2.126
  crRNA array
cgatttcttggctttatatatcttgtggaaaggacgaaacaccgtaatttctactaagtgtagatcccgaggcgccggagaagcctaatttctactaagtgtagatcctgtgccgccgcggccgccttttttaagcttggcgtggatccgatatcaactagatcttgaga

SEQ ID NO: 131 - DNA, 170 bp, Artificial sequence
  Acvr2a.70_Epha2.5
  crRNA array
cgatttcttggctttatatatcttgtggaaaggacgaaacaccgtaatttctactaagtgtagatcccgaggcgccggagaagcctaatttctactaagtgtagatcatgagctggcgccacccggttttttaagcttggcgtggatccgatatcaactagatcttgaga

SEQ ID NO: 132 - DNA, 170 bp, Artificial sequence
  Acvr2a.70_Fat1.105
  crRNA array
cgatttcttggctttatatatcttgtggaaaggacgaaacaccgtaatttctactaagtgtagatcccgaggcgccggagaagcctaatttctactaagtgtagataactcgaggtgacaacaagtttttttaagcttggcgtggatccgatatcaactagatcttgaga

SEQ ID NO: 133 - DNA, 170 bp, Artificial sequence
  Acvr2a.70_Fat1.122
  crRNA array
cgatttcttggctttatatatcttgtggaaaggacgaaacaccgtaatttctactaagtgtagatcccgaggcgccggagaagcctaatttctactaagtgtagatccatcgacatggaaacgggattttttaagcttggcgtggatccgatatcaactagatcttgaga

SEQ ID NO: 134 - DNA, 170 bp, Artificial sequence
  Acvr2a.70_Fbxw7.21
  crRNA array
cgatttcttggctttatatatcttgtggaaaggacgaaacaccgtaatttctactaagtgtagatcccgaggcgccggagaagcctaatttctactaagtgtagattaatgtgccgtagaaacccattttttaagcttggcgtggatccgatatcaactagatcttgaga

SEQ ID NO: 135 - DNA, 170 bp, Artificial sequence
  Acvr2a.70_Fbxw7.23
  crRNA array
cgatttcttggctttatatatcttgtggaaaggacgaaacaccgtaatttctactaagtgtagatcccgaggcgccggagaagcctaatttctactaagtgtagatatgtgccgtagaaacccatattttttaagcttggcgtggatccgatatcaactagatcttgaga

SEQ ID NO: 136 - DNA, 170 bp, Artificial sequence
  Acvr2a.70_Gata3.34
  crRNA array
cgatttcttggctttatatatcttgtggaaaggacgaaacaccgtaatttctactaagtgtagatcccgaggcgccggagaagcctaatttctactaagtgtagatctaaactatcccgcaaagatttttttaagcttggcgtggatccgatatcaactagatcttgaga

SEQ ID NO: 137 - DNA, 170 bp, Artificial sequence
  Acvr2a.70_Gata3.47
  crRNA array
cgatttcttggctttatatatcttgtggaaaggacgaaacaccgtaatttctactaagtgtagatcccgaggcgccggagaagcctaatttctactaagtgtagatcgtagtaggacgggacgtggttttttaagcttggcgtggatccgatatcaactagatcttgaga

SEQ ID NO: 138 - DNA, 170 bp, Artificial sequence
  Acvr2a.70_H2-Q2.1
  crRNA array
cgatttcttggctttatatatcttgtggaaaggacgaaacaccgtaatttctactaagtgtagatcccgaggcgccggagaagcctaatttctactaagtgtagatagggcggccaccaacagcagttttttaagcttggcgtggatccgatatcaactagatcttgaga

SEQ ID NO: 139 - DNA, 170 bp, Artificial sequence
  Acvr2a.70_H2-Q2.2
  crRNA array
cgatttcttggctttatatatcttgtggaaaggacgaaacaccgtaatttctactaagtgtagatcccgaggcgccggagaagcctaatttctactaagtgtagattaacctgcgcccgctgctgattttttaagcttggcgtggatccgatatcaactagatcttgaga

SEQ ID NO: 140 - DNA, 170 bp, Artificial sequence
  Acvr2a.70_Kdm5c.1878
  crRNA array
cgatttcttggctttatatatcttgtggaaaggacgaaacaccgtaatttctactaagtgtagatcccgaggcgccggagaagcctaatttctactaagtgtagatagagcacggcacccgcccccttttttaagcttggcgtggatccgatatcaactagatcttgaga

SEQ ID NO: 141 - DNA, 170 bp, Artificial sequence
  Acvr2a.70_Kdm5c.1879
  crRNA array
cgatttcttggctttatatatcttgtggaaaggacgaaacaccgtaatttctactaagtgtagatcccgaggcgccggagaagcctaatttctactaagtgtagatgagcacggcacccgccccccttttttaagcttggcgtggatccgatatcaactagatcttgaga

SEQ ID NO: 142 - DNA, 170 bp, Artificial sequence
  Acvr2a.70_Kdm6a.56
  crRNA array
cgatttcttggctttatatatcttgtggaaaggacgaaacaccgtaatttctactaagtgtagatcccgaggcgccggagaagcctaatttctactaagtgtagattcgctgccgcctctcgcggcttttttaagcttggcgtggatccgatatcaactagatcttgaga

SEQ ID NO: 143 - DNA, 170 bp, Artificial sequence
  Acvr2a.70_Kdm6a.57
  crRNA array
cgatttcttggctttatatatcttgtggaaaggacgaaacaccgtaatttctactaagtgtagatcccgaggcgccggagaagcctaatttctactaagtgtagatcgctgccgcctctcgcggcattttttaagcttggcgtggatccgatatcaactagatcttgaga

SEQ ID NO: 144 - DNA, 170 bp, Artificial sequence
  Acvr2a.70_Kmt2b.265
  crRNA array
cgatttcttggctttatatatcttgtggaaaggacgaaacaccgtaatttctactaagtgtagatcccgaggcgccggagaagcctaatttctactaagtgtagatccccaagtgaagcccacctgttttttaagcttggcgtggatccgatatcaactagatcttgaga

SEQ ID NO: 145 - DNA, 170 bp, Artificial sequence
  Acvr2a.70_Kmt2b.298
  crRNA array
cgatttcttggctttatatatcttgtggaaaggacgaaacaccgtaatttctactaagtgtagatcccgaggcgccggagaagcctaatttctactaagtgtagattccggcagggaccggctggcttttttaagcttggcgtggatccgatatcaactagatcttgaga

SEQ ID NO: 146 - DNA, 170 bp, Artificial sequence
  Acvr2a.70_Kmt2c.1962
  crRNA array
cgatttcttggctttatatatcttgtggaaaggacgaaacaccgtaatttctactaagtgtagatcccgaggcgccggagaagcctaatttctactaagtgtagatgtgacgatctgtgccacaagttttttaagcttggcgtggatccgatatcaactagatcttgaga

SEQ ID NO: 147 - DNA, 170 bp, Artificial sequence
  Acvr2a.70_Kmt2c.2236
  crRNA array
cgatttcttggctttatatatcttgtggaaaggacgaaacaccgtaatttctactaagtgtagatcccgaggcgccggagaagcctaatttctactaagtgtagatactcgacctccacctccctattttttaagcttggcgtggatccgatatcaactagatcttgaga

SEQ ID NO: 148 - DNA, 170 bp, Artificial sequence
  Acvr2a.70_Kmt2d.316
  crRNA array
cgatttcttggctttatatatcttgtggaaaggacgaaacaccgtaatttctactaagtgtagatcccgaggcgccggagaagcctaatttctactaagtgtagatactccaggccacccaggtggttttttaagcttggcgtggatccgatatcaactagatcttgaga

SEQ ID NO: 149 - DNA, 170 bp, Artificial sequence
  Acvr2a.70_Kmt2d.416
  crRNA array
cgatttcttggctttatatatcttgtggaaaggacgaaacaccgtaatttctactaagtgtagatcccgaggcgccggagaagcctaatttctactaagtgtagattaaacccccgggggaagggtttttttaagcttggcgtggatccgatatcaactagatcttgaga

SEQ ID NO: 150 - DNA, 170 bp, Artificial sequence
  Acvr2a.70_Map2k4.119
  crRNA array
cgatttcttggctttatatatcttgtggaaaggacgaaacaccgtaatttctactaagtgtagatcccgaggcgccggagaagcctaatttctactaagtgtagattgctgtgtgggcggccacatttttttaagcttggcgtggatccgatatcaactagatcttgaga

SEQ ID NO: 151 - DNA, 170 bp, Artificial sequence
  Acvr2a.70_Map2k4.1261
  crRNA array
cgatttcttggctttatatatcttgtggaaaggacgaaacaccgtaatttctactaagtgtagatcccgaggcgccggagaagcctaatttctactaagtgtagatgatgtagtaatgcggagtagttttttaagcttggcgtggatccgatatcaactagatcttgaga

SEQ ID NO: 152 - DNA, 170 bp, Artificial sequence
  Acvr2a.70_Map3k1.235
  crRNA array
cgatttcttggctttatatatcttgtggaaaggacgaaacaccgtaatttctactaagtgtagatcccgaggcgccggagaagcctaatttctactaagtgtagataaaacgctactgatcgatcgttttttaagcttggcgtggatccgatatcaactagatcttgaga

SEQ ID NO: 153 - DNA, 170 bp, Artificial sequence
  Acvr2a.70_Map3k1.3838
  crRNA array
cgatttcttggctttatatatcttgtggaaaggacgaaacaccgtaatttctactaagtgtagatcccgaggcgccggagaagcctaatttctactaagtgtagatccaacaacagggccccactattttttaagcttggcgtggatccgatatcaactagatcttgaga

SEQ ID NO: 154 - DNA, 170 bp, Artificial sequence
  Acvr2a.70_Mga.1655
  crRNA array
cgatttcttggctttatatatcttgtggaaaggacgaaacaccgtaatttctactaagtgtagatcccgaggcgccggagaagcctaatttctactaagtgtagatcgagaagtggagagcatattttttttaagcttggcgtggatccgatatcaactagatcttgaga

SEQ ID NO: 155 - DNA, 170 bp, Artificial sequence
  Acvr2a.70_Mga.93
  crRNA array
cgatttcttggctttatatatcttgtggaaaggacgaaacaccgtaatttctactaagtgtagatcccgaggcgccggagaagcctaatttctactaagtgtagatgagaaggctccccataatgtttttttaagcttggcgtggatccgatatcaactagatcttgaga

SEQ ID NO: 156 - DNA, 170 bp, Artificial sequence
  Acvr2a.70_Nf1.746
  crRNA array
cgatttcttggctttatatatcttgtggaaaggacgaaacaccgtaatttctactaagtgtagatcccgaggcgccggagaagcctaatttctactaagtgtagattaagcataatgatgatgccattttttaagcttggcgtggatccgatatcaactagatcttgaga

SEQ ID NO: 157 - DNA, 170 bp, Artificial sequence
  Acvr2a.70_Nf1.97
  crRNA array
cgatttcttggctttatatatcttgtggaaaggacgaaacaccgtaatttctactaagtgtagatcccgaggcgccggagaagcctaatttctactaagtgtagatagcccgctacatgctgatgcttttttaagcttggcgtggatccgatatcaactagatcttgaga

SEQ ID NO: 158 - DNA, 170 bp, Artificial sequence
  Acvr2a.70_Nf2.356
  crRNA array
cgatttcttggctttatatatcttgtggaaaggacgaaacaccgtaatttctactaagtgtagatcccgaggcgccggagaagcctaatttctactaagtgtagatcggagtcatctgatagagatttttttaagcttggcgtggatccgatatcaactagatcttgaga

SEQ ID NO: 159 - DNA, 170 bp, Artificial sequence
  Acvr2a.70_Nf2.768
  crRNA array
cgatttcttggctttatatatcttgtggaaaggacgaaacaccgtaatttctactaagtgtagatcccgaggcgccggagaagcctaatttctactaagtgtagatccgaagccccagtgtccggcttttttaagcttggcgtggatccgatatcaactagatcttgaga

SEQ ID NO: 160 - DNA, 170 bp, Artificial sequence
  Acvr2a.70_Notch1.1849
  crRNA array
cgatttcttggctttatatatcttgtggaaaggacgaaacaccgtaatttctactaagtgtagatcccgaggcgccggagaagcctaatttctactaagtgtagatctggcgggtgggcggcgctgttttttaagcttggcgtggatccgatatcaactagatcttgaga

SEQ ID NO: 161 - DNA, 170 bp, Artificial sequence
  Acvr2a.70_Notch1.649
  crRNA array
cgatttcttggctttatatatcttgtggaaaggacgaaacaccgtaatttctactaagtgtagatcccgaggcgccggagaagcctaatttctactaagtgtagattgggccaacgatgccaggacttttttaagcttggcgtggatccgatatcaactagatcttgaga

SEQ ID NO: 162 - DNA, 170 bp, Artificial sequence
  Acvr2a.70_Nsd1.70
  crRNA array
cgatttcttggctttatatatcttgtggaaaggacgaaacaccgtaatttctactaagtgtagatcccgaggcgccggagaagcctaatttctactaagtgtagatactggtgtggacgatgcagattttttaagcttggcgtggatccgatatcaactagatcttgaga

SEQ ID NO: 163 - DNA, 170 bp, Artificial sequence
  Acvr2a.70_Nsd1.90
  crRNA array
cgatttcttggctttatatatcttgtggaaaggacgaaacaccgtaatttctactaagtgtagatcccgaggcgccggagaagcctaatttctactaagtgtagataggagctaacggcaagaatgttttttaagcttggcgtggatccgatatcaactagatcttgaga

SEQ ID NO: 164 - DNA, 170 bp, Artificial sequence
  Acvr2a.70_Pbrm1.1236
  crRNA array
cgatttcttggctttatatatcttgtggaaaggacgaaacaccgtaatttctactaagtgtagatcccgaggcgccggagaagcctaatttctactaagtgtagatgccgataaaaccaacagccgttttttaagcttggcgtggatccgatatcaactagatcttgaga

SEQ ID NO: 165 - DNA, 170 bp, Artificial sequence
  Acvr2a.70_Pbrm1.969
  crRNA array
cgatttcttggctttatatatcttgtggaaaggacgaaacaccgtaatttctactaagtgtagatcccgaggcgccggagaagcctaatttctactaagtgtagatgagccctaatgaacagctcattttttaagcttggcgtggatccgatatcaactagatcttgaga

SEQ ID NO: 166 - DNA, 170 bp, Artificial sequence
  Acvr2a.70_Pik3r1.76
  crRNA array
cgatttcttggctttatatatcttgtggaaaggacgaaacaccgtaatttctactaagtgtagatcccgaggcgccggagaagcctaatttctactaagtgtagataaaacctatacggcccgcacttttttaagcttggcgtggatccgatatcaactagatcttgaga

SEQ ID NO: 167 - DNA, 170 bp, Artificial sequence
  Acvr2a.70_Pik3r1.77
  crRNA array
cgatttcttggctttatatatcttgtggaaaggacgaaacaccgtaatttctactaagtgtagatcccgaggcgccggagaagcctaatttctactaagtgtagataaacctatacggcccgcactttttttaagcttggcgtggatccgatatcaactagatcttgaga

SEQ ID NO: 168 - DNA, 170 bp, Artificial sequence
  Acvr2a.70_Pten.240
  crRNA array
cgatttcttggctttatatatcttgtggaaaggacgaaacaccgtaatttctactaagtgtagatcccgaggcgccggagaagcctaatttctactaagtgtagattgcatacgctatagctgcttttttttaagcttggcgtggatccgatatcaactagatcttgaga

SEQ ID NO: 169 - DNA, 170 bp, Artificial sequence
  Acvr2a.70_Pten.265
  crRNA array
cgatttcttggctttatatatcttgtggaaaggacgaaacaccgtaatttctactaagtgtagatcccgaggcgccggagaagcctaatttctactaagtgtagataagcgtggtgcgtgacgcacttttttaagcttggcgtggatccgatatcaactagatcttgaga

SEQ ID NO: 170 - DNA, 170 bp, Artificial sequence
  Acvr2a.70_Rasa1.1478
  crRNA array
cgatttcttggctttatatatcttgtggaaaggacgaaacaccgtaatttctactaagtgtagatcccgaggcgccggagaagcctaatttctactaagtgtagatcgataatggtctatgatgtcttttttaagcttggcgtggatccgatatcaactagatcttgaga

SEQ ID NO: 171 - DNA, 170 bp, Artificial sequence
  Acvr2a.70_Rasa1.223
  crRNA array
cgatttcttggctttatatatcttgtggaaaggacgaaacaccgtaatttctactaagtgtagatcccgaggcgccggagaagcctaatttctactaagtgtagattccatggagtatcgtgctcgttttttaagcttggcgtggatccgatatcaactagatcttgaga

SEQ ID NO: 172 - DNA, 170 bp, Artificial sequence
  Acvr2a.70_Rb1.211
  crRNA array
cgatttcttggctttatatatcttgtggaaaggacgaaacaccgtaatttctactaagtgtagatcccgaggcgccggagaagcctaatttctactaagtgtagattctgacatgatcgggtacctttttttaagcttggcgtggatccgatatcaactagatcttgaga

SEQ ID NO: 173 - DNA, 170 bp, Artificial sequence
  Acvr2a.70_Rb1.394
  crRNA array
cgatttcttggctttatatatcttgtggaaaggacgaaacaccgtaatttctactaagtgtagatcccgaggcgccggagaagcctaatttctactaagtgtagatagaaatctcgaagcaggatcttttttaagcttggcgtggatccgatatcaactagatcttgaga

SEQ ID NO: 174 - DNA, 170 bp, Artificial sequence
  Acvr2a.70_Rbm10.5
  crRNA array
cgatttcttggctttatatatcttgtggaaaggacgaaacaccgtaatttctactaagtgtagatcccgaggcgccggagaagcctaatttctactaagtgtagatacgaaacctgaacccacacattttttaagcttggcgtggatccgatatcaactagatcttgaga

SEQ ID NO: 175 - DNA, 170 bp, Artificial sequence
  Acvr2a.70_Rbm10.6
  crRNA array
cgatttcttggctttatatatcttgtggaaaggacgaaacaccgtaatttctactaagtgtagatcccgaggcgccggagaagcctaatttctactaagtgtagatcgaaacctgaacccacacagttttttaagcttggcgtggatccgatatcaactagatcttgaga

SEQ ID NO: 176 - DNA, 170 bp, Artificial sequence
  Acvr2a.70_Rnf43.1920
  crRNA array
cgatttcttggctttatatatcttgtggaaaggacgaaacaccgtaatttctactaagtgtagatcccgaggcgccggagaagcctaatttctactaagtgtagatatccccgtgccgtggactccttttttaagcttggcgtggatccgatatcaactagatcttgaga

SEQ ID NO: 177 - DNA, 170 bp, Artificial sequence
  Acvr2a.70_Rnf43.39
  crRNA array
cgatttcttggctttatatatcttgtggaaaggacgaaacaccgtaatttctactaagtgtagatcccgaggcgccggagaagcctaatttctactaagtgtagatcaaggggatcactctgataattttttaagcttggcgtggatccgatatcaactagatcttgaga

SEQ ID NO: 178 - DNA, 170 bp, Artificial sequence
  Acvr2a.70_Runx1.204
  crRNA array
cgatttcttggctttatatatcttgtggaaaggacgaaacaccgtaatttctactaagtgtagatcccgaggcgccggagaagcctaatttctactaagtgtagattaaataagtccagccgttttttttttaagcttggcgtggatccgatatcaactagatcttgaga

SEQ ID NO: 179 - DNA, 170 bp, Artificial sequence
  Acvr2a.70_Runx1.81
  crRNA array
cgatttcttggctttatatatcttgtggaaaggacgaaacaccgtaatttctactaagtgtagatcccgaggcgccggagaagcctaatttctactaagtgtagataggacgcgtatgggaattttttttttaagcttggcgtggatccgatatcaactagatcttgaga

SEQ ID NO: 180 - DNA, 170 bp, Artificial sequence
  Acvr2a.70_Setd2.143
  crRNA array
cgatttcttggctttatatatcttgtggaaaggacgaaacaccgtaatttctactaagtgtagatcccgaggcgccggagaagcctaatttctactaagtgtagatgcacaaccacaacagactggttttttaagcttggcgtggatccgatatcaactagatcttgaga

SEQ ID NO: 181 - DNA, 170 bp, Artificial sequence
  Acvr2a.70_Setd2.508
  crRNA array
cgatttcttggctttatatatcttgtggaaaggacgaaacaccgtaatttctactaagtgtagatcccgaggcgccggagaagcctaatttctactaagtgtagattacgatcccgagcacccgacttttttaagcttggcgtggatccgatatcaactagatcttgaga

SEQ ID NO: 182 - DNA, 170 bp, Artificial sequence
  Acvr2a.70_Smad4.3038
  crRNA array
cgatttcttggctttatatatcttgtggaaaggacgaaacaccgtaatttctactaagtgtagatcccgaggcgccggagaagcctaatttctactaagtgtagatatctgcggcagtgtcaccggttttttaagcttggcgtggatccgatatcaactagatcttgaga

SEQ ID NO: 183 - DNA, 170 bp, Artificial sequence
  Acvr2a.70_Smad4.39
  crRNA array
cgatttcttggctttatatatcttgtggaaaggacgaaacaccgtaatttctactaagtgtagatcccgaggcgccggagaagcctaatttctactaagtgtagatagtcaaacgcatactgacaattttttaagcttggcgtggatccgatatcaactagatcttgaga

SEQ ID NO: 184 - DNA, 170 bp, Artificial sequence
  Acvr2a.70_Stag2.1409
  crRNA array
cgatttcttggctttatatatcttgtggaaaggacgaaacaccgtaatttctactaagtgtagatcccgaggcgccggagaagcctaatttctactaagtgtagatgctaataactgcggaagggcttttttaagcttggcgtggatccgatatcaactagatcttgaga

SEQ ID NO: 185 - DNA, 170 bp, Artificial sequence
  Acvr2a.70_Stag2.4401
  crRNA array
cgatttcttggctttatatatcttgtggaaaggacgaaacaccgtaatttctactaagtgtagatcccgaggcgccggagaagcctaatttctactaagtgtagattaatcgtccagtggtgtatattttttaagcttggcgtggatccgatatcaactagatcttgaga

SEQ ID NO: 186 - DNA, 170 bp, Artificial sequence
  Acvr2a.70_Tbl1xr1.1
  crRNA array
cgatttcttggctttatatatcttgtggaaaggacgaaacaccgtaatttctactaagtgtagatcccgaggcgccggagaagcctaatttctactaagtgtagatggatgcgcatactggtgaagttttttaagcttggcgtggatccgatatcaactagatcttgaga

SEQ ID NO: 187 - DNA, 170 bp, Artificial sequence
  Acvr2a.70_Tbl1xr1.83
  crRNA array
cgatttcttggctttatatatcttgtggaaaggacgaaacaccgtaatttctactaagtgtagatcccgaggcgccggagaagcctaatttctactaagtgtagatatggtcgacccatcgagtctttttttaagcttggcgtggatccgatatcaactagatcttgaga

SEQ ID NO: 188 - DNA, 170 bp, Artificial sequence
  Acvr2a.70_Tgfbr2.290
  crRNA array
cgatttcttggctttatatatcttgtggaaaggacgaaacaccgtaatttctactaagtgtagatcccgaggcgccggagaagcctaatttctactaagtgtagatcctctcggcgcccgggtaaattttttaagcttggcgtggatccgatatcaactagatcttgaga

SEQ ID NO: 189 - DNA, 170 bp, Artificial sequence
  Acvr2a.70_Tgfbr2.292
  crRNA array
cgatttcttggctttatatatcttgtggaaaggacgaaacaccgtaatttctactaagtgtagatcccgaggcgccggagaagcctaatttctactaagtgtagatcccgggcgccgagagggaaattttttaagcttggcgtggatccgatatcaactagatcttgaga

SEQ ID NO: 190 - DNA, 170 bp, Artificial sequence
  Acvr2a.70_Trp53.4
  crRNA array
cgatttcttggctttatatatcttgtggaaaggacgaaacaccgtaatttctactaagtgtagatcccgaggcgccggagaagcctaatttctactaagtgtagatccctgaactgcccccagggattttttaagcttggcgtggatccgatatcaactagatcttgaga

SEQ ID NO: 191 - DNA, 170 bp, Artificial sequence
  Acvr2a.70_Trp53.528
  crRNA array
cgatttcttggctttatatatcttgtggaaaggacgaaacaccgtaatttctactaagtgtagatcccgaggcgccggagaagcctaatttctactaagtgtagatgctgggccagcagagacctgttttttaagcttggcgtggatccgatatcaactagatcttgaga

SEQ ID NO: 192 - DNA, 170 bp, Artificial sequence
  Acvr2a.70_Vhl.1
  crRNA array
cgatttcttggctttatatatcttgtggaaaggacgaaacaccgtaatttctactaagtgtagatcccgaggcgccggagaagcctaatttctactaagtgtagatagggctcccggcggccatttttttttaagcttggcgtggatccgatatcaactagatcttgaga

SEQ ID NO: 193 - DNA, 170 bp, Artificial sequence
  Acvr2a.70_Vhl.151
  crRNA array
cgatttcttggctttatatatcttgtggaaaggacgaaacaccgtaatttctactaagtgtagatcccgaggcgccggagaagcctaatttctactaagtgtagattagagcactcacccgagggattttttaagcttggcgtggatccgatatcaactagatcttgaga

SEQ ID NO: 194 - DNA, 170 bp, Artificial sequence
  Acvr2a.70_Zc3h13.1387
  crRNA array
cgatttcttggctttatatatcttgtggaaaggacgaaacaccgtaatttctactaagtgtagatcccgaggcgccggagaagcctaatttctactaagtgtagatgtgacgccggtcatgtgactttttttaagcttggcgtggatccgatatcaactagatcttgaga

SEQ ID NO: 195 - DNA, 170 bp, Artificial sequence
  Acvr2a.70_Zc3h13.1777
  crRNA array
cgatttcttggctttatatatcttgtggaaaggacgaaacaccgtaatttctactaagtgtagatcccgaggcgccggagaagcctaatttctactaagtgtagatgatgctgccagtgtagcggcttttttaagcttggcgtggatccgatatcaactagatcttgaga

SEQ ID NO: 196 - DNA, 170 bp, Artificial sequence
  Apc.21_Acvr2a.155
  crRNA array
cgatttcttggctttatatatcttgtggaaaggacgaaacaccgtaatttctactaagtgtagatgtgatccacacgtgtagctgtaatttctactaagtgtagatggacctggctaatcaagtatttttttaagcttggcgtggatccgatatcaactagatcttgaga

SEQ ID NO: 197 - DNA, 170 bp, Artificial sequence
  Apc.21_Acvr2a.70
  crRNA array
cgatttcttggctttatatatcttgtggaaaggacgaaacaccgtaatttctactaagtgtagatgtgatccacacgtgtagctgtaatttctactaagtgtagatcccgaggcgccggagaagccttttttaagcttggcgtggatccgatatcaactagatcttgaga

SEQ ID NO: 198 - DNA, 170 bp, Artificial sequence
  Apc.21_Arid1a.2
  crRNA array
cgatttcttggctttatatatcttgtggaaaggacgaaacaccgtaatttctactaagtgtagatgtgatccacacgtgtagctgtaatttctactaagtgtagatcccgcgcccccgtcctggggttttttaagcttggcgtggatccgatatcaactagatcttgaga

SEQ ID NO: 199 - DNA, 170 bp, Artificial sequence
  Apc.21_Arid1a.5
  crRNA array
cgatttcttggctttatatatcttgtggaaaggacgaaacaccgtaatttctactaagtgtagatgtgatccacacgtgtagctgtaatttctactaagtgtagatcccgcgctcggccgctgccgttttttaagcttggcgtggatccgatatcaactagatcttgaga

SEQ ID NO: 200 - DNA, 170 bp, Artificial sequence
  Apc.21_Arid2.166
  crRNA array
cgatttcttggctttatatatcttgtggaaaggacgaaacaccgtaatttctactaagtgtagatgtgatccacacgtgtagctgtaatttctactaagtgtagataaccgcgatctgggttttttttttttaagcttggcgtggatccgatatcaactagatcttgaga

SEQ ID NO: 201 - DNA, 170 bp, Artificial sequence
  Apc.21_Arid2.172
  crRNA array
cgatttcttggctttatatatcttgtggaaaggacgaaacaccgtaatttctactaagtgtagatgtgatccacacgtgtagctgtaatttctactaagtgtagatctggacgagctgcggcagttttttttaagcttggcgtggatccgatatcaactagatcttgaga

SEQ ID NO: 202 - DNA, 170 bp, Artificial sequence
  Apc.21_Atm.120
  crRNA array
cgatttcttggctttatatatcttgtggaaaggacgaaacaccgtaatttctactaagtgtagatgtgatccacacgtgtagctgtaatttctactaagtgtagatgacaggtagtcggcagctaattttttaagcttggcgtggatccgatatcaactagatcttgaga

SEQ ID NO: 203 - DNA, 170 bp, Artificial sequence
  Apc.21_Atm.997
  crRNA array
cgatttcttggctttatatatcttgtggaaaggacgaaacaccgtaatttctactaagtgtagatgtgatccacacgtgtagctgtaatttctactaagtgtagatgagaaagtctccgaatcgttttttttaagcttggcgtggatccgatatcaactagatcttgaga

SEQ ID NO: 204 - DNA, 170 bp, Artificial sequence
  Apc.21_Atrx.249
  crRNA array
cgatttcttggctttatatatcttgtggaaaggacgaaacaccgtaatttctactaagtgtagatgtgatccacacgtgtagctgtaatttctactaagtgtagattagccagtcgctcatatctcttttttaagcttggcgtggatccgatatcaactagatcttgaga

SEQ ID NO: 205 - DNA, 170 bp, Artificial sequence
  Apc.21_Atrx.251
  crRNA array
cgatttcttggctttatatatcttgtggaaaggacgaaacaccgtaatttctactaagtgtagatgtgatccacacgtgtagctgtaatttctactaagtgtagatgccagtcgctcatatctctgttttttaagcttggcgtggatccgatatcaactagatcttgaga

SEQ ID NO: 206 - DNA, 170 bp, Artificial sequence
  Apc.21_Bcor.203
  crRNA array
cgatttcttggctttatatatcttgtggaaaggacgaaacaccgtaatttctactaagtgtagatgtgatccacacgtgtagctgtaatttctactaagtgtagatccccggagcggagtccaggcttttttaagcttggcgtggatccgatatcaactagatcttgaga

SEQ ID NO: 207 - DNA, 170 bp, Artificial sequence
  Apc.21_Bcor.475
  crRNA array
cgatttcttggctttatatatcttgtggaaaggacgaaacaccgtaatttctactaagtgtagatgtgatccacacgtgtagctgtaatttctactaagtgtagattgcaacccctctgtatgggattttttaagcttggcgtggatccgatatcaactagatcttgaga

SEQ ID NO: 208 - DNA, 170 bp, Artificial sequence
  Apc.21_Brca1.112
  crRNA array
cgatttcttggctttatatatcttgtggaaaggacgaaacaccgtaatttctactaagtgtagatgtgatccacacgtgtagctgtaatttctactaagtgtagatctagacgctctgtggagactttttttaagcttggcgtggatccgatatcaactagatcttgaga

SEQ ID NO: 209 - DNA, 170 bp, Artificial sequence
  Apc.21_Brca1.53
  crRNA array
cgatttcttggctttatatatcttgtggaaaggacgaaacaccgtaatttctactaagtgtagatgtgatccacacgtgtagctgtaatttctactaagtgtagataatgaggaggcgtcgatcatttttttaagcttggcgtggatccgatatcaactagatcttgaga

SEQ ID NO: 210 - DNA, 170 bp, Artificial sequence
  Apc.21_Casp8.45
  crRNA array
cgatttcttggctttatatatcttgtggaaaggacgaaacaccgtaatttctactaagtgtagatgtgatccacacgtgtagctgtaatttctactaagtgtagatctaccgagatcctgtgaatgttttttaagcttggcgtggatccgatatcaactagatcttgaga

SEQ ID NO: 211 - DNA, 170 bp, Artificial sequence
  Apc.21_Casp8.54
  crRNA array
cgatttcttggctttatatatcttgtggaaaggacgaaacaccgtaatttctactaagtgtagatgtgatccacacgtgtagctgtaatttctactaagtgtagatcagtgcagtcgtcgtaagatttttttaagcttggcgtggatccgatatcaactagatcttgaga

SEQ ID NO: 212 - DNA, 170 bp, Artificial sequence
  Apc.21_Cbwd1.84
  crRNA array
cgatttcttggctttatatatcttgtggaaaggacgaaacaccgtaatttctactaagtgtagatgtgatccacacgtgtagctgtaatttctactaagtgtagatcacagcaggtaacatgccgcttttttaagcttggcgtggatccgatatcaactagatcttgaga

SEQ ID NO: 213 - DNA, 170 bp, Artificial sequence
  Apc.21_Cbwd1.85
  crRNA array
cgatttcttggctttatatatcttgtggaaaggacgaaacaccgtaatttctactaagtgtagatgtgatccacacgtgtagctgtaatttctactaagtgtagatacagcaggtaacatgccgccttttttaagcttggcgtggatccgatatcaactagatcttgaga

SEQ ID NO: 214 - DNA, 170 bp, Artificial sequence
  Apc.21_Cdh1.387
  crRNA array
cgatttcttggctttatatatcttgtggaaaggacgaaacaccgtaatttctactaagtgtagatgtgatccacacgtgtagctgtaatttctactaagtgtagatctcggcgtctgccgggtccgttttttaagcttggcgtggatccgatatcaactagatcttgaga

SEQ ID NO: 215 - DNA, 170 bp, Artificial sequence
  Apc.21_Cdh1.58
  crRNA array
cgatttcttggctttatatatcttgtggaaaggacgaaacaccgtaatttctactaagtgtagatgtgatccacacgtgtagctgtaatttctactaagtgtagatctcgtccgcgcccgggactcttttttaagcttggcgtggatccgatatcaactagatcttgaga

SEQ ID NO: 216 - DNA, 170 bp, Artificial sequence
  Apc.21_Cdkn2a.647
  crRNA array
cgatttcttggctttatatatcttgtggaaaggacgaaacaccgtaatttctactaagtgtagatgtgatccacacgtgtagctgtaatttctactaagtgtagatgcaatcacgggagggagcagttttttaagcttggcgtggatccgatatcaactagatcttgaga

SEQ ID NO: 217 - DNA, 170 bp, Artificial sequence
  Apc.21_Cdkn2a.648
  crRNA array
cgatttcttggctttatatatcttgtggaaaggacgaaacaccgtaatttctactaagtgtagatgtgatccacacgtgtagctgtaatttctactaagtgtagatcaatcacgggagggagcagattttttaagcttggcgtggatccgatatcaactagatcttgaga

SEQ ID NO: 218 - DNA, 170 bp, Artificial sequence
  Apc.21_Cic.162
  crRNA array
cgatttcttggctttatatatcttgtggaaaggacgaaacaccgtaatttctactaagtgtagatgtgatccacacgtgtagctgtaatttctactaagtgtagatcgcaggcgcgcccggcggagttttttaagcttggcgtggatccgatatcaactagatcttgaga

SEQ ID NO: 219 - DNA, 170 bp, Artificial sequence
  Apc.21_Cic.164
  crRNA array
cgatttcttggctttatatatcttgtggaaaggacgaaacaccgtaatttctactaagtgtagatgtgatccacacgtgtagctgtaatttctactaagtgtagatcgggccctgggccggcggctttttttaagcttggcgtggatccgatatcaactagatcttgaga

SEQ ID NO: 220 - DNA, 170 bp, Artificial sequence
  Apc.21_Ctcf.229
  crRNA array
cgatttcttggctttatatatcttgtggaaaggacgaaacaccgtaatttctactaagtgtagatgtgatccacacgtgtagctgtaatttctactaagtgtagatggctggtggctgatagtctgttttttaagcttggcgtggatccgatatcaactagatcttgaga

SEQ ID NO: 221 - DNA, 170 bp, Artificial sequence
  Apc.21_Ctcf.809
  crRNA array
cgatttcttggctttatatatcttgtggaaaggacgaaacaccgtaatttctactaagtgtagatgtgatccacacgtgtagctgtaatttctactaagtgtagataagcgctatcatgatcccaattttttaagcttggcgtggatccgatatcaactagatcttgaga

SEQ ID NO: 222 - DNA, 170 bp, Artificial sequence
  Apc.21_Elf3.826
  crRNA array
cgatttcttggctttatatatcttgtggaaaggacgaaacaccgtaatttctactaagtgtagatgtgatccacacgtgtagctgtaatttctactaagtgtagattccgagacatcctaatccacttttttaagcttggcgtggatccgatatcaactagatcttgaga

SEQ ID NO: 223 - DNA, 170 bp, Artificial sequence
  Apc.21_Elf3.983
  crRNA array
cgatttcttggctttatatatcttgtggaaaggacgaaacaccgtaatttctactaagtgtagatgtgatccacacgtgtagctgtaatttctactaagtgtagattaggccccctaactggaccattttttaagcttggcgtggatccgatatcaactagatcttgaga

SEQ ID NO: 224 - DNA, 170 bp, Artificial sequence
  Apc.21_Ep300.310
  crRNA array
cgatttcttggctttatatatcttgtggaaaggacgaaacaccgtaatttctactaagtgtagatgtgatccacacgtgtagctgtaatttctactaagtgtagatatggtacgacagtgaggaagttttttaagcttggcgtggatccgatatcaactagatcttgaga

SEQ ID NO: 225 - DNA, 170 bp, Artificial sequence
  Apc.21_Ep300.587
  crRNA array
cgatttcttggctttatatatcttgtggaaaggacgaaacaccgtaatttctactaagtgtagatgtgatccacacgtgtagctgtaatttctactaagtgtagatcgccccggggcccccaaccattttttaagcttggcgtggatccgatatcaactagatcttgaga

SEQ ID NO: 226 - DNA, 170 bp, Artificial sequence
  Apc.21_Epha2.126
  crRNA array
cgatttcttggctttatatatcttgtggaaaggacgaaacaccgtaatttctactaagtgtagatgtgatccacacgtgtagctgtaatttctactaagtgtagatcctgtgccgccgcggccgccttttttaagcttggcgtggatccgatatcaactagatcttgaga

SEQ ID NO: 227 - DNA, 170 bp, Artificial sequence
  Apc.21_Epha2.5
  crRNA array
cgatttcttggctttatatatcttgtggaaaggacgaaacaccgtaatttctactaagtgtagatgtgatccacacgtgtagctgtaatttctactaagtgtagatcatgagctggcgccacccggttttttaagcttggcgtggatccgatatcaactagatcttgaga

SEQ ID NO: 228 - DNA, 170 bp, Artificial sequence
  Apc.21_Fat1.105
  crRNA array
cgatttcttggctttatatatcttgtggaaaggacgaaacaccgtaatttctactaagtgtagatgtgatccacacgtgtagctgtaatttctactaagtgtagataactcgaggtgacaacaagtttttttaagcttggcgtggatccgatatcaactagatcttgaga

SEQ ID NO: 229 - DNA, 170 bp, Artificial sequence
  Apc.21_Fat1.122
  crRNA array
cgatttcttggctttatatatcttgtggaaaggacgaaacaccgtaatttctactaagtgtagatgtgatccacacgtgtagctgtaatttctactaagtgtagatccatcgacatggaaacgggattttttaagcttggcgtggatccgatatcaactagatcttgaga

SEQ ID NO: 230 - DNA, 170 bp, Artificial sequence
  Apc.21_Fbxw7.21
  crRNA array
cgatttcttggctttatatatcttgtggaaaggacgaaacaccgtaatttctactaagtgtagatgtgatccacacgtgtagctgtaatttctactaagtgtagattaatgtgccgtagaaacccattttttaagcttggcgtggatccgatatcaactagatcttgaga

SEQ ID NO: 231 - DNA, 170 bp, Artificial sequence
  Apc.21_Fbxw7.23
  crRNA array
cgatttcttggctttatatatcttgtggaaaggacgaaacaccgtaatttctactaagtgtagatgtgatccacacgtgtagctgtaatttctactaagtgtagatatgtgccgtagaaacccatattttttaagcttggcgtggatccgatatcaactagatcttgaga

SEQ ID NO: 232 - DNA, 170 bp, Artificial sequence
  Apc.21_Gata3.34
  crRNA array
cgatttcttggctttatatatcttgtggaaaggacgaaacaccgtaatttctactaagtgtagatgtgatccacacgtgtagctgtaatttctactaagtgtagatctaaactatcccgcaaagatttttttaagcttggcgtggatccgatatcaactagatcttgaga

SEQ ID NO: 233 - DNA, 170 bp, Artificial sequence
  Apc.21_Gata3.47
  crRNA array
cgatttcttggctttatatatcttgtggaaaggacgaaacaccgtaatttctactaagtgtagatgtgatccacacgtgtagctgtaatttctactaagtgtagatcgtagtaggacgggacgtggttttttaagcttggcgtggatccgatatcaactagatcttgaga

SEQ ID NO: 234 - DNA, 170 bp, Artificial sequence
  Apc.21_H2-Q2.1
  crRNA array
cgatttcttggctttatatatcttgtggaaaggacgaaacaccgtaatttctactaagtgtagatgtgatccacacgtgtagctgtaatttctactaagtgtagatagggcggccaccaacagcagttttttaagcttggcgtggatccgatatcaactagatcttgaga

SEQ ID NO: 235 - DNA, 170 bp, Artificial sequence
  Apc.21_H2-Q2.2
  crRNA array
cgatttcttggctttatatatcttgtggaaaggacgaaacaccgtaatttctactaagtgtagatgtgatccacacgtgtagctgtaatttctactaagtgtagattaacctgcgcccgctgctgattttttaagcttggcgtggatccgatatcaactagatcttgaga

SEQ ID NO: 236 - DNA, 170 bp, Artificial sequence
  Apc.21_Kdm5c.1878
  crRNA array
cgatttcttggctttatatatcttgtggaaaggacgaaacaccgtaatttctactaagtgtagatgtgatccacacgtgtagctgtaatttctactaagtgtagatagagcacggcacccgcccccttttttaagcttggcgtggatccgatatcaactagatcttgaga

SEQ ID NO: 237 - DNA, 170 bp, Artificial sequence
  Apc.21_Kdm5c.1879
  crRNA array
cgatttcttggctttatatatcttgtggaaaggacgaaacaccgtaatttctactaagtgtagatgtgatccacacgtgtagctgtaatttctactaagtgtagatgagcacggcacccgccccccttttttaagcttggcgtggatccgatatcaactagatcttgaga

SEQ ID NO: 238 - DNA, 170 bp, Artificial sequence
  Apc.21_Kdm6a.56
  crRNA array
cgatttcttggctttatatatcttgtggaaaggacgaaacaccgtaatttctactaagtgtagatgtgatccacacgtgtagctgtaatttctactaagtgtagattcgctgccgcctctcgcggcttttttaagcttggcgtggatccgatatcaactagatcttgaga

SEQ ID NO: 239 - DNA, 170 bp, Artificial sequence
  Apc.21_Kdm6a.57
  crRNA array
cgatttcttggctttatatatcttgtggaaaggacgaaacaccgtaatttctactaagtgtagatgtgatccacacgtgtagctgtaatttctactaagtgtagatcgctgccgcctctcgcggcattttttaagcttggcgtggatccgatatcaactagatcttgaga

SEQ ID NO: 240 - DNA, 170 bp, Artificial sequence
  Apc.21_Kmt2b.265
  crRNA array
cgatttcttggctttatatatcttgtggaaaggacgaaacaccgtaatttctactaagtgtagatgtgatccacacgtgtagctgtaatttctactaagtgtagatccccaagtgaagcccacctgttttttaagcttggcgtggatccgatatcaactagatcttgaga

SEQ ID NO: 241 - DNA, 170 bp, Artificial sequence
  Apc.21_Kmt2b.298
  crRNA array
cgatttcttggctttatatatcttgtggaaaggacgaaacaccgtaatttctactaagtgtagatgtgatccacacgtgtagctgtaatttctactaagtgtagattccggcagggaccggctggcttttttaagcttggcgtggatccgatatcaactagatcttgaga

SEQ ID NO: 242 - DNA, 170 bp, Artificial sequence
  Apc.21_Kmt2c.1962
  crRNA array
cgatttcttggctttatatatcttgtggaaaggacgaaacaccgtaatttctactaagtgtagatgtgatccacacgtgtagctgtaatttctactaagtgtagatgtgacgatctgtgccacaagttttttaagcttggcgtggatccgatatcaactagatcttgaga

SEQ ID NO: 243 - DNA, 170 bp, Artificial sequence
  Apc.21_Kmt2c.2236
  crRNA array
cgatttcttggctttatatatcttgtggaaaggacgaaacaccgtaatttctactaagtgtagatgtgatccacacgtgtagctgtaatttctactaagtgtagatactcgacctccacctccctattttttaagcttggcgtggatccgatatcaactagatcttgaga

SEQ ID NO: 244 - DNA, 170 bp, Artificial sequence
  Apc.21_Kmt2d.316
  crRNA array
cgatttcttggctttatatatcttgtggaaaggacgaaacaccgtaatttctactaagtgtagatgtgatccacacgtgtagctgtaatttctactaagtgtagatactccaggccacccaggtggttttttaagcttggcgtggatccgatatcaactagatcttgaga

SEQ ID NO: 245 - DNA, 170 bp, Artificial sequence
  Apc.21_Kmt2d.416
  crRNA array
cgatttcttggctttatatatcttgtggaaaggacgaaacaccgtaatttctactaagtgtagatgtgatccacacgtgtagctgtaatttctactaagtgtagattaaacccccgggggaagggtttttttaagcttggcgtggatccgatatcaactagatcttgaga

SEQ ID NO: 246 - DNA, 170 bp, Artificial sequence
  Apc.21_Map2k4.119
  crRNA array
cgatttcttggctttatatatcttgtggaaaggacgaaacaccgtaatttctactaagtgtagatgtgatccacacgtgtagctgtaatttctactaagtgtagattgctgtgtgggcggccacatttttttaagcttggcgtggatccgatatcaactagatcttgaga

SEQ ID NO: 247 - DNA, 170 bp, Artificial sequence
  Apc.21_Map2k4.1261
  crRNA array
cgatttcttggctttatatatcttgtggaaaggacgaaacaccgtaatttctactaagtgtagatgtgatccacacgtgtagctgtaatttctactaagtgtagatgatgtagtaatgcggagtagttttttaagcttggcgtggatccgatatcaactagatcttgaga

SEQ ID NO: 248 - DNA, 170 bp, Artificial sequence
  Apc.21_Map3k1.235
  crRNA array
cgatttcttggctttatatatcttgtggaaaggacgaaacaccgtaatttctactaagtgtagatgtgatccacacgtgtagctgtaatttctactaagtgtagataaaacgctactgatcgatcgttttttaagcttggcgtggatccgatatcaactagatcttgaga

SEQ ID NO: 249 - DNA, 170 bp, Artificial sequence
  Apc.21_Map3k1.3838
  crRNA array
cgatttcttggctttatatatcttgtggaaaggacgaaacaccgtaatttctactaagtgtagatgtgatccacacgtgtagctgtaatttctactaagtgtagatccaacaacagggccccactattttttaagcttggcgtggatccgatatcaactagatcttgaga

SEQ ID NO: 250 - DNA, 170 bp, Artificial sequence
  Apc.21_Mga.1655
  crRNA array
cgatttcttggctttatatatcttgtggaaaggacgaaacaccgtaatttctactaagtgtagatgtgatccacacgtgtagctgtaatttctactaagtgtagatcgagaagtggagagcatattttttttaagcttggcgtggatccgatatcaactagatcttgaga

SEQ ID NO: 251 - DNA, 170 bp, Artificial sequence
  Apc.21_Mga.93
  crRNA array
cgatttcttggctttatatatcttgtggaaaggacgaaacaccgtaatttctactaagtgtagatgtgatccacacgtgtagctgtaatttctactaagtgtagatgagaaggctccccataatgtttttttaagcttggcgtggatccgatatcaactagatcttgaga

SEQ ID NO: 252 - DNA, 170 bp, Artificial sequence
  Apc.21_Nf1.746
  crRNA array
cgatttcttggctttatatatcttgtggaaaggacgaaacaccgtaatttctactaagtgtagatgtgatccacacgtgtagctgtaatttctactaagtgtagattaagcataatgatgatgccattttttaagcttggcgtggatccgatatcaactagatcttgaga

SEQ ID NO: 253 - DNA, 170 bp, Artificial sequence
  Apc.21_Nf1.97
  crRNA array
cgatttcttggctttatatatcttgtggaaaggacgaaacaccgtaatttctactaagtgtagatgtgatccacacgtgtagctgtaatttctactaagtgtagatagcccgctacatgctgatgcttttttaagcttggcgtggatccgatatcaactagatcttgaga

SEQ ID NO: 254 - DNA, 170 bp, Artificial sequence
  Apc.21_Nf2.356
  crRNA array
cgatttcttggctttatatatcttgtggaaaggacgaaacaccgtaatttctactaagtgtagatgtgatccacacgtgtagctgtaatttctactaagtgtagatcggagtcatctgatagagatttttttaagcttggcgtggatccgatatcaactagatcttgaga

SEQ ID NO: 255 - DNA, 170 bp, Artificial sequence
  Apc.21_Nf2.768
  crRNA array
cgatttcttggctttatatatcttgtggaaaggacgaaacaccgtaatttctactaagtgtagatgtgatccacacgtgtagctgtaatttctactaagtgtagatccgaagccccagtgtccggcttttttaagcttggcgtggatccgatatcaactagatcttgaga

SEQ ID NO: 256 - DNA, 170 bp, Artificial sequence
  Apc.21_Notch1.1849
  crRNA array
cgatttcttggctttatatatcttgtggaaaggacgaaacaccgtaatttctactaagtgtagatgtgatccacacgtgtagctgtaatttctactaagtgtagatctggcgggtgggcggcgctgttttttaagcttggcgtggatccgatatcaactagatcttgaga

SEQ ID NO: 257 - DNA, 170 bp, Artificial sequence
  Apc.21_Notch1.649
  crRNA array
cgatttcttggctttatatatcttgtggaaaggacgaaacaccgtaatttctactaagtgtagatgtgatccacacgtgtagctgtaatttctactaagtgtagattgggccaacgatgccaggacttttttaagcttggcgtggatccgatatcaactagatcttgaga

SEQ ID NO: 258 - DNA, 170 bp, Artificial sequence
  Apc.21_Nsd1.70
  crRNA array
cgatttcttggctttatatatcttgtggaaaggacgaaacaccgtaatttctactaagtgtagatgtgatccacacgtgtagctgtaatttctactaagtgtagatactggtgtggacgatgcagattttttaagcttggcgtggatccgatatcaactagatcttgaga

SEQ ID NO: 259 - DNA, 170 bp, Artificial sequence
  Apc.21_Nsd1.90
  crRNA array
cgatttcttggctttatatatcttgtggaaaggacgaaacaccgtaatttctactaagtgtagatgtgatccacacgtgtagctgtaatttctactaagtgtagataggagctaacggcaagaatgttttttaagcttggcgtggatccgatatcaactagatcttgaga

SEQ ID NO: 260 - DNA, 170 bp, Artificial sequence
  Apc.21_Pbrm1.1236
  crRNA array
cgatttcttggctttatatatcttgtggaaaggacgaaacaccgtaatttctactaagtgtagatgtgatccacacgtgtagctgtaatttctactaagtgtagatgccgataaaaccaacagccgttttttaagcttggcgtggatccgatatcaactagatcttgaga

SEQ ID NO: 261 - DNA, 170 bp, Artificial sequence
  Apc.21_Pbrm1.969
  crRNA array
cgatttcttggctttatatatcttgtggaaaggacgaaacaccgtaatttctactaagtgtagatgtgatccacacgtgtagctgtaatttctactaagtgtagatgagccctaatgaacagctcattttttaagcttggcgtggatccgatatcaactagatcttgaga

SEQ ID NO: 262 - DNA, 170 bp, Artificial sequence
  Apc.21_Pik3r1.76
  crRNA array
cgatttcttggctttatatatcttgtggaaaggacgaaacaccgtaatttctactaagtgtagatgtgatccacacgtgtagctgtaatttctactaagtgtagataaaacctatacggcccgcacttttttaagcttggcgtggatccgatatcaactagatcttgaga

SEQ ID NO: 263 - DNA, 170 bp, Artificial sequence
  Apc.21_Pik3r1.77
  crRNA array
cgatttcttggctttatatatcttgtggaaaggacgaaacaccgtaatttctactaagtgtagatgtgatccacacgtgtagctgtaatttctactaagtgtagataaacctatacggcccgcactttttttaagcttggcgtggatccgatatcaactagatcttgaga

SEQ ID NO: 264 - DNA, 170 bp, Artificial sequence
  Apc.21_Pten.240
  crRNA array
cgatttcttggctttatatatcttgtggaaaggacgaaacaccgtaatttctactaagtgtagatgtgatccacacgtgtagctgtaatttctactaagtgtagattgcatacgctatagctgcttttttttaagcttggcgtggatccgatatcaactagatcttgaga

SEQ ID NO: 265 - DNA, 170 bp, Artificial sequence
  Apc.21_Pten.265
  crRNA array
cgatttcttggctttatatatcttgtggaaaggacgaaacaccgtaatttctactaagtgtagatgtgatccacacgtgtagctgtaatttctactaagtgtagataagcgtggtgcgtgacgcacttttttaagcttggcgtggatccgatatcaactagatcttgaga

SEQ ID NO: 266 - DNA, 170 bp, Artificial sequence
  Apc.21_Rasa1.1478
  crRNA array
cgatttcttggctttatatatcttgtggaaaggacgaaacaccgtaatttctactaagtgtagatgtgatccacacgtgtagctgtaatttctactaagtgtagatcgataatggtctatgatgtcttttttaagcttggcgtggatccgatatcaactagatcttgaga

SEQ ID NO: 267 - DNA, 170 bp, Artificial sequence
  Apc.21_Rasa1.223
  crRNA array
cgatttcttggctttatatatcttgtggaaaggacgaaacaccgtaatttctactaagtgtagatgtgatccacacgtgtagctgtaatttctactaagtgtagattccatggagtatcgtgctcgttttttaagcttggcgtggatccgatatcaactagatcttgaga

SEQ ID NO: 268 - DNA, 170 bp, Artificial sequence
  Apc.21_Rb1.211
  crRNA array
cgatttcttggctttatatatcttgtggaaaggacgaaacaccgtaatttctactaagtgtagatgtgatccacacgtgtagctgtaatttctactaagtgtagattctgacatgatcgggtacctttttttaagcttggcgtggatccgatatcaactagatcttgaga

SEQ ID NO: 269 - DNA, 170 bp, Artificial sequence
  Apc.21_Rb1.394
  crRNA array
cgatttcttggctttatatatcttgtggaaaggacgaaacaccgtaatttctactaagtgtagatgtgatccacacgtgtagctgtaatttctactaagtgtagatagaaatctcgaagcaggatcttttttaagcttggcgtggatccgatatcaactagatcttgaga

SEQ ID NO: 270 - DNA, 170 bp, Artificial sequence
  Apc.21_Rbm10.5
  crRNA array
cgatttcttggctttatatatcttgtggaaaggacgaaacaccgtaatttctactaagtgtagatgtgatccacacgtgtagctgtaatttctactaagtgtagatacgaaacctgaacccacacattttttaagcttggcgtggatccgatatcaactagatcttgaga

SEQ ID NO: 271 - DNA, 170 bp, Artificial sequence
  Apc.21_Rbm10.6
  crRNA array
cgatttcttggctttatatatcttgtggaaaggacgaaacaccgtaatttctactaagtgtagatgtgatccacacgtgtagctgtaatttctactaagtgtagatcgaaacctgaacccacacagttttttaagcttggcgtggatccgatatcaactagatcttgaga

SEQ ID NO: 272 - DNA, 170 bp, Artificial sequence
  Apc.21_Rnf43.1920
  crRNA array
cgatttcttggctttatatatcttgtggaaaggacgaaacaccgtaatttctactaagtgtagatgtgatccacacgtgtagctgtaatttctactaagtgtagatatccccgtgccgtggactccttttttaagcttggcgtggatccgatatcaactagatcttgaga

SEQ ID NO: 273 - DNA, 170 bp, Artificial sequence
  Apc.21_Rnf43.39
  crRNA array
cgatttcttggctttatatatcttgtggaaaggacgaaacaccgtaatttctactaagtgtagatgtgatccacacgtgtagctgtaatttctactaagtgtagatcaaggggatcactctgataattttttaagcttggcgtggatccgatatcaactagatcttgaga

SEQ ID NO: 274 - DNA, 170 bp, Artificial sequence
  Apc.21_Runx1.204
  crRNA array
cgatttcttggctttatatatcttgtggaaaggacgaaacaccgtaatttctactaagtgtagatgtgatccacacgtgtagctgtaatttctactaagtgtagattaaataagtccagccgttttttttttaagcttggcgtggatccgatatcaactagatcttgaga

SEQ ID NO: 275 - DNA, 170 bp, Artificial sequence
  Apc.21_Runx1.81
  crRNA array
cgatttcttggctttatatatcttgtggaaaggacgaaacaccgtaatttctactaagtgtagatgtgatccacacgtgtagctgtaatttctactaagtgtagataggacgcgtatgggaattttttttttaagcttggcgtggatccgatatcaactagatcttgaga

SEQ ID NO: 276 - DNA, 170 bp, Artificial sequence
  Apc.21_Setd2.143
  crRNA array
cgatttcttggctttatatatcttgtggaaaggacgaaacaccgtaatttctactaagtgtagatgtgatccacacgtgtagctgtaatttctactaagtgtagatgcacaaccacaacagactggttttttaagcttggcgtggatccgatatcaactagatcttgaga

SEQ ID NO: 277 - DNA, 170 bp, Artificial sequence
  Apc.21_Setd2.508
  crRNA array
cgatttcttggctttatatatcttgtggaaaggacgaaacaccgtaatttctactaagtgtagatgtgatccacacgtgtagctgtaatttctactaagtgtagattacgatcccgagcacccgacttttttaagcttggcgtggatccgatatcaactagatcttgaga

SEQ ID NO: 278 - DNA, 170 bp, Artificial sequence
  Apc.21_Smad4.3038
  crRNA array
cgatttcttggctttatatatcttgtggaaaggacgaaacaccgtaatttctactaagtgtagatgtgatccacacgtgtagctgtaatttctactaagtgtagatatctgcggcagtgtcaccggttttttaagcttggcgtggatccgatatcaactagatcttgaga

SEQ ID NO: 279 - DNA, 170 bp, Artificial sequence
  Apc.21_Smad4.39
  crRNA array
cgatttcttggctttatatatcttgtggaaaggacgaaacaccgtaatttctactaagtgtagatgtgatccacacgtgtagctgtaatttctactaagtgtagatagtcaaacgcatactgacaattttttaagcttggcgtggatccgatatcaactagatcttgaga

SEQ ID NO: 280 - DNA, 170 bp, Artificial sequence
  Apc.21_Stag2.1409
  crRNA array
cgatttcttggctttatatatcttgtggaaaggacgaaacaccgtaatttctactaagtgtagatgtgatccacacgtgtagctgtaatttctactaagtgtagatgctaataactgcggaagggcttttttaagcttggcgtggatccgatatcaactagatcttgaga

SEQ ID NO: 281 - DNA, 170 bp, Artificial sequence
  Apc.21_Stag2.4401
  crRNA array
cgatttcttggctttatatatcttgtggaaaggacgaaacaccgtaatttctactaagtgtagatgtgatccacacgtgtagctgtaatttctactaagtgtagattaatcgtccagtggtgtatattttttaagcttggcgtggatccgatatcaactagatcttgaga

SEQ ID NO: 282 - DNA, 170 bp, Artificial sequence
  Apc.21_Tbl1xr1.1
  crRNA array
cgatttcttggctttatatatcttgtggaaaggacgaaacaccgtaatttctactaagtgtagatgtgatccacacgtgtagctgtaatttctactaagtgtagatggatgcgcatactggtgaagttttttaagcttggcgtggatccgatatcaactagatcttgaga

SEQ ID NO: 283 - DNA, 170 bp, Artificial sequence
  Apc.21_Tbl1xr1.83
  crRNA array
cgatttcttggctttatatatcttgtggaaaggacgaaacaccgtaatttctactaagtgtagatgtgatccacacgtgtagctgtaatttctactaagtgtagatatggtcgacccatcgagtctttttttaagcttggcgtggatccgatatcaactagatcttgaga

SEQ ID NO: 284 - DNA, 170 bp, Artificial sequence
  Apc.21_Tgfbr2.290
  crRNA array
cgatttcttggctttatatatcttgtggaaaggacgaaacaccgtaatttctactaagtgtagatgtgatccacacgtgtagctgtaatttctactaagtgtagatcctctcggcgcccgggtaaattttttaagcttggcgtggatccgatatcaactagatcttgaga

SEQ ID NO: 285 - DNA, 170 bp, Artificial sequence
  Apc.21_Tgfbr2.292
  crRNA array
cgatttcttggctttatatatcttgtggaaaggacgaaacaccgtaatttctactaagtgtagatgtgatccacacgtgtagctgtaatttctactaagtgtagatcccgggcgccgagagggaaattttttaagcttggcgtggatccgatatcaactagatcttgaga

SEQ ID NO: 286 - DNA, 170 bp, Artificial sequence
  Apc.21_Trp53.4
  crRNA array
cgatttcttggctttatatatcttgtggaaaggacgaaacaccgtaatttctactaagtgtagatgtgatccacacgtgtagctgtaatttctactaagtgtagatccctgaactgcccccagggattttttaagcttggcgtggatccgatatcaactagatcttgaga

SEQ ID NO: 287 - DNA, 170 bp, Artificial sequence
  Apc.21_Trp53.528
  crRNA array
cgatttcttggctttatatatcttgtggaaaggacgaaacaccgtaatttctactaagtgtagatgtgatccacacgtgtagctgtaatttctactaagtgtagatgctgggccagcagagacctgttttttaagcttggcgtggatccgatatcaactagatcttgaga

SEQ ID NO: 288 - DNA, 170 bp, Artificial sequence
  Apc.21_Vhl.1
  crRNA array
cgatttcttggctttatatatcttgtggaaaggacgaaacaccgtaatttctactaagtgtagatgtgatccacacgtgtagctgtaatttctactaagtgtagatagggctcccggcggccatttttttttaagcttggcgtggatccgatatcaactagatcttgaga

SEQ ID NO: 289 - DNA, 170 bp, Artificial sequence
  Apc.21_Vhl.151
  crRNA array
cgatttcttggctttatatatcttgtggaaaggacgaaacaccgtaatttctactaagtgtagatgtgatccacacgtgtagctgtaatttctactaagtgtagattagagcactcacccgagggattttttaagcttggcgtggatccgatatcaactagatcttgaga

SEQ ID NO: 290 - DNA, 170 bp, Artificial sequence
  Apc.21_Zc3h13.1387
  crRNA array
cgatttcttggctttatatatcttgtggaaaggacgaaacaccgtaatttctactaagtgtagatgtgatccacacgtgtagctgtaatttctactaagtgtagatgtgacgccggtcatgtgactttttttaagcttggcgtggatccgatatcaactagatcttgaga

SEQ ID NO: 291 - DNA, 170 bp, Artificial sequence
  Apc.21_Zc3h13.1777
  crRNA array
cgatttcttggctttatatatcttgtggaaaggacgaaacaccgtaatttctactaagtgtagatgtgatccacacgtgtagctgtaatttctactaagtgtagatgatgctgccagtgtagcggcttttttaagcttggcgtggatccgatatcaactagatcttgaga

SEQ ID NO: 292 - DNA, 170 bp, Artificial sequence
  Apc.867_Acvr2a.155
  crRNA array
cgatttcttggctttatatatcttgtggaaaggacgaaacaccgtaatttctactaagtgtagatcagtcccaggcggcggaagctaatttctactaagtgtagatggacctggctaatcaagtatttttttaagcttggcgtggatccgatatcaactagatcttgaga

SEQ ID NO: 293 - DNA, 170 bp, Artificial sequence
  Apc.867_Acvr2a.70
  crRNA array
cgatttcttggctttatatatcttgtggaaaggacgaaacaccgtaatttctactaagtgtagatcagtcccaggcggcggaagctaatttctactaagtgtagatcccgaggcgccggagaagccttttttaagcttggcgtggatccgatatcaactagatcttgaga

SEQ ID NO: 294 - DNA, 170 bp, Artificial sequence
  Apc.867_Arid1a.2
  crRNA array
cgatttcttggctttatatatcttgtggaaaggacgaaacaccgtaatttctactaagtgtagatcagtcccaggcggcggaagctaatttctactaagtgtagatcccgcgcccccgtcctggggttttttaagcttggcgtggatccgatatcaactagatcttgaga

SEQ ID NO: 295 - DNA, 170 bp, Artificial sequence
  Apc.867_Arid1a.5
  crRNA array
cgatttcttggctttatatatcttgtggaaaggacgaaacaccgtaatttctactaagtgtagatcagtcccaggcggcggaagctaatttctactaagtgtagatcccgcgctcggccgctgccgttttttaagcttggcgtggatccgatatcaactagatcttgaga

SEQ ID NO: 296 - DNA, 170 bp, Artificial sequence
  Apc.867_Arid2.166
  crRNA array
cgatttcttggctttatatatcttgtggaaaggacgaaacaccgtaatttctactaagtgtagatcagtcccaggcggcggaagctaatttctactaagtgtagataaccgcgatctgggttttttttttttaagcttggcgtggatccgatatcaactagatcttgaga

SEQ ID NO: 297 - DNA, 170 bp, Artificial sequence
  Apc.867_Arid2.172
  crRNA array
cgatttcttggctttatatatcttgtggaaaggacgaaacaccgtaatttctactaagtgtagatcagtcccaggcggcggaagctaatttctactaagtgtagatctggacgagctgcggcagttttttttaagcttggcgtggatccgatatcaactagatcttgaga

SEQ ID NO: 298 - DNA, 170 bp, Artificial sequence
  Apc.867_Atm.120
  crRNA array
cgatttcttggctttatatatcttgtggaaaggacgaaacaccgtaatttctactaagtgtagatcagtcccaggcggcggaagctaatttctactaagtgtagatgacaggtagtcggcagctaattttttaagcttggcgtggatccgatatcaactagatcttgaga

SEQ ID NO: 299 - DNA, 170 bp, Artificial sequence
  Apc.867_Atm.997
  crRNA array
cgatttcttggctttatatatcttgtggaaaggacgaaacaccgtaatttctactaagtgtagatcagtcccaggcggcggaagctaatttctactaagtgtagatgagaaagtctccgaatcgttttttttaagcttggcgtggatccgatatcaactagatcttgaga

SEQ ID NO: 300 - DNA, 170 bp, Artificial sequence
  Apc.867_Atrx.249
  crRNA array
cgatttcttggctttatatatcttgtggaaaggacgaaacaccgtaatttctactaagtgtagatcagtcccaggcggcggaagctaatttctactaagtgtagattagccagtcgctcatatctcttttttaagcttggcgtggatccgatatcaactagatcttgaga

SEQ ID NO: 301 - DNA, 170 bp, Artificial sequence
  Apc.867_Atrx.251
  crRNA array
cgatttcttggctttatatatcttgtggaaaggacgaaacaccgtaatttctactaagtgtagatcagtcccaggcggcggaagctaatttctactaagtgtagatgccagtcgctcatatctctgttttttaagcttggcgtggatccgatatcaactagatcttgaga

SEQ ID NO: 302 - DNA, 170 bp, Artificial sequence
  Apc.867_Bcor.203
  crRNA array
cgatttcttggctttatatatcttgtggaaaggacgaaacaccgtaatttctactaagtgtagatcagtcccaggcggcggaagctaatttctactaagtgtagatccccggagcggagtccaggcttttttaagcttggcgtggatccgatatcaactagatcttgaga

SEQ ID NO: 303 - DNA, 170 bp, Artificial sequence
  Apc.867_Bcor.475
  crRNA array
cgatttcttggctttatatatcttgtggaaaggacgaaacaccgtaatttctactaagtgtagatcagtcccaggcggcggaagctaatttctactaagtgtagattgcaacccctctgtatgggattttttaagcttggcgtggatccgatatcaactagatcttgaga

SEQ ID NO: 304 - DNA, 170 bp, Artificial sequence
  Apc.867_Brca1.112
  crRNA array
cgatttcttggctttatatatcttgtggaaaggacgaaacaccgtaatttctactaagtgtagatcagtcccaggcggcggaagctaatttctactaagtgtagatctagacgctctgtggagactttttttaagcttggcgtggatccgatatcaactagatcttgaga

SEQ ID NO: 305 - DNA, 170 bp, Artificial sequence
  Apc.867_Brca1.53
  crRNA array
cgatttcttggctttatatatcttgtggaaaggacgaaacaccgtaatttctactaagtgtagatcagtcccaggcggcggaagctaatttctactaagtgtagataatgaggaggcgtcgatcatttttttaagcttggcgtggatccgatatcaactagatcttgaga

SEQ ID NO: 306 - DNA, 170 bp, Artificial sequence
  Apc.867_Casp8.45
  crRNA array
cgatttcttggctttatatatcttgtggaaaggacgaaacaccgtaatttctactaagtgtagatcagtcccaggcggcggaagctaatttctactaagtgtagatctaccgagatcctgtgaatgttttttaagcttggcgtggatccgatatcaactagatcttgaga

SEQ ID NO: 307 - DNA, 170 bp, Artificial sequence
  Apc.867_Casp8.54
  crRNA array
cgatttcttggctttatatatcttgtggaaaggacgaaacaccgtaatttctactaagtgtagatcagtcccaggcggcggaagctaatttctactaagtgtagatcagtgcagtcgtcgtaagatttttttaagcttggcgtggatccgatatcaactagatcttgaga

SEQ ID NO: 308 - DNA, 170 bp, Artificial sequence
  Apc.867_Cbwd1.84
  crRNA array
cgatttcttggctttatatatcttgtggaaaggacgaaacaccgtaatttctactaagtgtagatcagtcccaggcggcggaagctaatttctactaagtgtagatcacagcaggtaacatgccgcttttttaagcttggcgtggatccgatatcaactagatcttgaga

SEQ ID NO: 309 - DNA, 170 bp, Artificial sequence
  Apc.867_Cbwd1.85
  crRNA array
cgatttcttggctttatatatcttgtggaaaggacgaaacaccgtaatttctactaagtgtagatcagtcccaggcggcggaagctaatttctactaagtgtagatacagcaggtaacatgccgccttttttaagcttggcgtggatccgatatcaactagatcttgaga

SEQ ID NO: 310 - DNA, 170 bp, Artificial sequence
  Apc.867_Cdh1.387
  crRNA array
cgatttcttggctttatatatcttgtggaaaggacgaaacaccgtaatttctactaagtgtagatcagtcccaggcggcggaagctaatttctactaagtgtagatctcggcgtctgccgggtccgttttttaagcttggcgtggatccgatatcaactagatcttgaga

SEQ ID NO: 311 - DNA, 170 bp, Artificial sequence
  Apc.867_Cdh1.58
  crRNA array
cgatttcttggctttatatatcttgtggaaaggacgaaacaccgtaatttctactaagtgtagatcagtcccaggcggcggaagctaatttctactaagtgtagatctcgtccgcgcccgggactcttttttaagcttggcgtggatccgatatcaactagatcttgaga

SEQ ID NO: 312 - DNA, 170 bp, Artificial sequence
  Apc.867_Cdkn2a.647
  crRNA array
cgatttcttggctttatatatcttgtggaaaggacgaaacaccgtaatttctactaagtgtagatcagtcccaggcggcggaagctaatttctactaagtgtagatgcaatcacgggagggagcagttttttaagcttggcgtggatccgatatcaactagatcttgaga

SEQ ID NO: 313 - DNA, 170 bp, Artificial sequence
  Apc.867_Cdkn2a.648
  crRNA array
cgatttcttggctttatatatcttgtggaaaggacgaaacaccgtaatttctactaagtgtagatcagtcccaggcggcggaagctaatttctactaagtgtagatcaatcacgggagggagcagattttttaagcttggcgtggatccgatatcaactagatcttgaga

SEQ ID NO: 314 - DNA, 170 bp, Artificial sequence
  Apc.867_Cic.162
  crRNA array
cgatttcttggctttatatatcttgtggaaaggacgaaacaccgtaatttctactaagtgtagatcagtcccaggcggcggaagctaatttctactaagtgtagatcgcaggcgcgcccggcggagttttttaagcttggcgtggatccgatatcaactagatcttgaga

SEQ ID NO: 315 - DNA, 170 bp, Artificial sequence
  Apc.867_Cic.164
  crRNA array
cgatttcttggctttatatatcttgtggaaaggacgaaacaccgtaatttctactaagtgtagatcagtcccaggcggcggaagctaatttctactaagtgtagatcgggccctgggccggcggctttttttaagcttggcgtggatccgatatcaactagatcttgaga

SEQ ID NO: 316 - DNA, 170 bp, Artificial sequence
  Apc.867_Ctcf.229
  crRNA array
cgatttcttggctttatatatcttgtggaaaggacgaaacaccgtaatttctactaagtgtagatcagtcccaggcggcggaagctaatttctactaagtgtagatggctggtggctgatagtctgttttttaagcttggcgtggatccgatatcaactagatcttgaga

SEQ ID NO: 317 - DNA, 170 bp, Artificial sequence
  Apc.867_Ctcf.809
  crRNA array
cgatttcttggctttatatatcttgtggaaaggacgaaacaccgtaatttctactaagtgtagatcagtcccaggcggcggaagctaatttctactaagtgtagataagcgctatcatgatcccaattttttaagcttggcgtggatccgatatcaactagatcttgaga

SEQ ID NO: 318 - DNA, 170 bp, Artificial sequence
  Apc.867_Elf3.826
  crRNA array
cgatttcttggctttatatatcttgtggaaaggacgaaacaccgtaatttctactaagtgtagatcagtcccaggcggcggaagctaatttctactaagtgtagattccgagacatcctaatccacttttttaagcttggcgtggatccgatatcaactagatcttgaga

SEQ ID NO: 319 - DNA, 170 bp, Artificial sequence
  Apc.867_Elf3.983
  crRNA array
cgatttcttggctttatatatcttgtggaaaggacgaaacaccgtaatttctactaagtgtagatcagtcccaggcggcggaagctaatttctactaagtgtagattaggccccctaactggaccattttttaagcttggcgtggatccgatatcaactagatcttgaga

SEQ ID NO: 320 - DNA, 170 bp, Artificial sequence
  Apc.867_Ep300.310
  crRNA array
cgatttcttggctttatatatcttgtggaaaggacgaaacaccgtaatttctactaagtgtagatcagtcccaggcggcggaagctaatttctactaagtgtagatatggtacgacagtgaggaagttttttaagcttggcgtggatccgatatcaactagatcttgaga

SEQ ID NO: 321 - DNA, 170 bp, Artificial sequence
  Apc.867_Ep300.587
  crRNA array
cgatttcttggctttatatatcttgtggaaaggacgaaacaccgtaatttctactaagtgtagatcagtcccaggcggcggaagctaatttctactaagtgtagatcgccccggggcccccaaccattttttaagcttggcgtggatccgatatcaactagatcttgaga

SEQ ID NO: 322 - DNA, 170 bp, Artificial sequence
  Apc.867_Epha2.126
  crRNA array
cgatttcttggctttatatatcttgtggaaaggacgaaacaccgtaatttctactaagtgtagatcagtcccaggcggcggaagctaatttctactaagtgtagatcctgtgccgccgcggccgccttttttaagcttggcgtggatccgatatcaactagatcttgaga

SEQ ID NO: 323 - DNA, 170 bp, Artificial sequence
  Apc.867_Epha2.5
  crRNA array
cgatttcttggctttatatatcttgtggaaaggacgaaacaccgtaatttctactaagtgtagatcagtcccaggcggcggaagctaatttctactaagtgtagatcatgagctggcgccacccggttttttaagcttggcgtggatccgatatcaactagatcttgaga

SEQ ID NO: 324 - DNA, 170 bp, Artificial sequence
  Apc.867_Fat1.105
  crRNA array
cgatttcttggctttatatatcttgtggaaaggacgaaacaccgtaatttctactaagtgtagatcagtcccaggcggcggaagctaatttctactaagtgtagataactcgaggtgacaacaagtttttttaagcttggcgtggatccgatatcaactagatcttgaga

SEQ ID NO: 325 - DNA, 170 bp, Artificial sequence
  Apc.867_Fat1.122
  crRNA array
cgatttcttggctttatatatcttgtggaaaggacgaaacaccgtaatttctactaagtgtagatcagtcccaggcggcggaagctaatttctactaagtgtagatccatcgacatggaaacgggattttttaagcttggcgtggatccgatatcaactagatcttgaga

SEQ ID NO: 326 - DNA, 170 bp, Artificial sequence
  Apc.867_Fbxw7.21
  crRNA array
cgatttcttggctttatatatcttgtggaaaggacgaaacaccgtaatttctactaagtgtagatcagtcccaggcggcggaagctaatttctactaagtgtagattaatgtgccgtagaaacccattttttaagcttggcgtggatccgatatcaactagatcttgaga

SEQ ID NO: 327 - DNA, 170 bp, Artificial sequence
  Apc.867_Fbxw7.23
  crRNA array
cgatttcttggctttatatatcttgtggaaaggacgaaacaccgtaatttctactaagtgtagatcagtcccaggcggcggaagctaatttctactaagtgtagatatgtgccgtagaaacccatattttttaagcttggcgtggatccgatatcaactagatcttgaga

SEQ ID NO: 328 - DNA, 170 bp, Artificial sequence
  Apc.867_Gata3.34
  crRNA array
cgatttcttggctttatatatcttgtggaaaggacgaaacaccgtaatttctactaagtgtagatcagtcccaggcggcggaagctaatttctactaagtgtagatctaaactatcccgcaaagatttttttaagcttggcgtggatccgatatcaactagatcttgaga

SEQ ID NO: 329 - DNA, 170 bp, Artificial sequence
  Apc.867_Gata3.47
  crRNA array
cgatttcttggctttatatatcttgtggaaaggacgaaacaccgtaatttctactaagtgtagatcagtcccaggcggcggaagctaatttctactaagtgtagatcgtagtaggacgggacgtggttttttaagcttggcgtggatccgatatcaactagatcttgaga

SEQ ID NO: 330 - DNA, 170 bp, Artificial sequence
  Apc.867_H2-Q2.1
  crRNA array
cgatttcttggctttatatatcttgtggaaaggacgaaacaccgtaatttctactaagtgtagatcagtcccaggcggcggaagctaatttctactaagtgtagatagggcggccaccaacagcagttttttaagcttggcgtggatccgatatcaactagatcttgaga

SEQ ID NO: 331 - DNA, 170 bp, Artificial sequence
  Apc.867_H2-Q2.2
  crRNA array
cgatttcttggctttatatatcttgtggaaaggacgaaacaccgtaatttctactaagtgtagatcagtcccaggcggcggaagctaatttctactaagtgtagattaacctgcgcccgctgctgattttttaagcttggcgtggatccgatatcaactagatcttgaga

SEQ ID NO: 332 - DNA, 170 bp, Artificial sequence
  Apc.867_Kdm5c.1878
  crRNA array
cgatttcttggctttatatatcttgtggaaaggacgaaacaccgtaatttctactaagtgtagatcagtcccaggcggcggaagctaatttctactaagtgtagatagagcacggcacccgcccccttttttaagcttggcgtggatccgatatcaactagatcttgaga

SEQ ID NO: 333 - DNA, 170 bp, Artificial sequence
  Apc.867_Kdm5c.1879
  crRNA array
cgatttcttggctttatatatcttgtggaaaggacgaaacaccgtaatttctactaagtgtagatcagtcccaggcggcggaagctaatttctactaagtgtagatgagcacggcacccgccccccttttttaagcttggcgtggatccgatatcaactagatcttgaga

SEQ ID NO: 334 - DNA, 170 bp, Artificial sequence
  Apc.867_Kdm6a.56
  crRNA array
cgatttcttggctttatatatcttgtggaaaggacgaaacaccgtaatttctactaagtgtagatcagtcccaggcggcggaagctaatttctactaagtgtagattcgctgccgcctctcgcggcttttttaagcttggcgtggatccgatatcaactagatcttgaga

SEQ ID NO: 335 - DNA, 170 bp, Artificial sequence
  Apc.867_Kdm6a.57
  crRNA array
cgatttcttggctttatatatcttgtggaaaggacgaaacaccgtaatttctactaagtgtagatcagtcccaggcggcggaagctaatttctactaagtgtagatcgctgccgcctctcgcggcattttttaagcttggcgtggatccgatatcaactagatcttgaga

SEQ ID NO: 336 - DNA, 170 bp, Artificial sequence
  Apc.867_Kmt2b.265
  crRNA array
cgatttcttggctttatatatcttgtggaaaggacgaaacaccgtaatttctactaagtgtagatcagtcccaggcggcggaagctaatttctactaagtgtagatccccaagtgaagcccacctgttttttaagcttggcgtggatccgatatcaactagatcttgaga

SEQ ID NO: 337 - DNA, 170 bp, Artificial sequence
  Apc.867_Kmt2b.298
  crRNA array
cgatttcttggctttatatatcttgtggaaaggacgaaacaccgtaatttctactaagtgtagatcagtcccaggcggcggaagctaatttctactaagtgtagattccggcagggaccggctggcttttttaagcttggcgtggatccgatatcaactagatcttgaga

SEQ ID NO: 338 - DNA, 170 bp, Artificial sequence
  Apc.867_Kmt2c.1962
  crRNA array
cgatttcttggctttatatatcttgtggaaaggacgaaacaccgtaatttctactaagtgtagatcagtcccaggcggcggaagctaatttctactaagtgtagatgtgacgatctgtgccacaagttttttaagcttggcgtggatccgatatcaactagatcttgaga

SEQ ID NO: 339 - DNA, 170 bp, Artificial sequence
  Apc.867_Kmt2c.2236
  crRNA array
cgatttcttggctttatatatcttgtggaaaggacgaaacaccgtaatttctactaagtgtagatcagtcccaggcggcggaagctaatttctactaagtgtagatactcgacctccacctccctattttttaagcttggcgtggatccgatatcaactagatcttgaga

SEQ ID NO: 340 - DNA, 170 bp, Artificial sequence
  Apc.867_Kmt2d.316
  crRNA array
cgatttcttggctttatatatcttgtggaaaggacgaaacaccgtaatttctactaagtgtagatcagtcccaggcggcggaagctaatttctactaagtgtagatactccaggccacccaggtggttttttaagcttggcgtggatccgatatcaactagatcttgaga

SEQ ID NO: 341 - DNA, 170 bp, Artificial sequence
  Apc.867_Kmt2d.416
  crRNA array
cgatttcttggctttatatatcttgtggaaaggacgaaacaccgtaatttctactaagtgtagatcagtcccaggcggcggaagctaatttctactaagtgtagattaaacccccgggggaagggtttttttaagcttggcgtggatccgatatcaactagatcttgaga

SEQ ID NO: 342 - DNA, 170 bp, Artificial sequence
  Apc.867_Map2k4.119
  crRNA array
cgatttcttggctttatatatcttgtggaaaggacgaaacaccgtaatttctactaagtgtagatcagtcccaggcggcggaagctaatttctactaagtgtagattgctgtgtgggcggccacatttttttaagcttggcgtggatccgatatcaactagatcttgaga

SEQ ID NO: 343 - DNA, 170 bp, Artificial sequence
  Apc.867_Map2k4.1261
  crRNA array
cgatttcttggctttatatatcttgtggaaaggacgaaacaccgtaatttctactaagtgtagatcagtcccaggcggcggaagctaatttctactaagtgtagatgatgtagtaatgcggagtagttttttaagcttggcgtggatccgatatcaactagatcttgaga

SEQ ID NO: 344 - DNA, 170 bp, Artificial sequence
  Apc.867_Map3k1.235
  crRNA array
cgatttcttggctttatatatcttgtggaaaggacgaaacaccgtaatttctactaagtgtagatcagtcccaggcggcggaagctaatttctactaagtgtagataaaacgctactgatcgatcgttttttaagcttggcgtggatccgatatcaactagatcttgaga

SEQ ID NO: 345 - DNA, 170 bp, Artificial sequence
  Apc.867_Map3k1.3838
  crRNA array
cgatttcttggctttatatatcttgtggaaaggacgaaacaccgtaatttctactaagtgtagatcagtcccaggcggcggaagctaatttctactaagtgtagatccaacaacagggccccactattttttaagcttggcgtggatccgatatcaactagatcttgaga

SEQ ID NO: 346 - DNA, 170 bp, Artificial sequence
  Apc.867_Mga.1655
  crRNA array
cgatttcttggctttatatatcttgtggaaaggacgaaacaccgtaatttctactaagtgtagatcagtcccaggcggcggaagctaatttctactaagtgtagatcgagaagtggagagcatattttttttaagcttggcgtggatccgatatcaactagatcttgaga

SEQ ID NO: 347 - DNA, 170 bp, Artificial sequence
  Apc.867_Mga.93
  crRNA array
cgatttcttggctttatatatcttgtggaaaggacgaaacaccgtaatttctactaagtgtagatcagtcccaggcggcggaagctaatttctactaagtgtagatgagaaggctccccataatgtttttttaagcttggcgtggatccgatatcaactagatcttgaga

SEQ ID NO: 348 - DNA, 170 bp, Artificial sequence
  Apc.867_Nf1.746
  crRNA array
cgatttcttggctttatatatcttgtggaaaggacgaaacaccgtaatttctactaagtgtagatcagtcccaggcggcggaagctaatttctactaagtgtagattaagcataatgatgatgccattttttaagcttggcgtggatccgatatcaactagatcttgaga

SEQ ID NO: 349 - DNA, 170 bp, Artificial sequence
  Apc.867_Nf1.97
  crRNA array
cgatttcttggctttatatatcttgtggaaaggacgaaacaccgtaatttctactaagtgtagatcagtcccaggcggcggaagctaatttctactaagtgtagatagcccgctacatgctgatgcttttttaagcttggcgtggatccgatatcaactagatcttgaga

SEQ ID NO: 350 - DNA, 170 bp, Artificial sequence
  Apc.867_Nf2.356
  crRNA array
cgatttcttggctttatatatcttgtggaaaggacgaaacaccgtaatttctactaagtgtagatcagtcccaggcggcggaagctaatttctactaagtgtagatcggagtcatctgatagagatttttttaagcttggcgtggatccgatatcaactagatcttgaga

SEQ ID NO: 351 - DNA, 170 bp, Artificial sequence
  Apc.867_Nf2.768
  crRNA array
cgatttcttggctttatatatcttgtggaaaggacgaaacaccgtaatttctactaagtgtagatcagtcccaggcggcggaagctaatttctactaagtgtagatccgaagccccagtgtccggcttttttaagcttggcgtggatccgatatcaactagatcttgaga

SEQ ID NO: 352 - DNA, 170 bp, Artificial sequence
  Apc.867_Notch1.1849
  crRNA array
cgatttcttggctttatatatcttgtggaaaggacgaaacaccgtaatttctactaagtgtagatcagtcccaggcggcggaagctaatttctactaagtgtagatctggcgggtgggcggcgctgttttttaagcttggcgtggatccgatatcaactagatcttgaga

SEQ ID NO: 353 - DNA, 170 bp, Artificial sequence
  Apc.867_Notch1.649
  crRNA array
cgatttcttggctttatatatcttgtggaaaggacgaaacaccgtaatttctactaagtgtagatcagtcccaggcggcggaagctaatttctactaagtgtagattgggccaacgatgccaggacttttttaagcttggcgtggatccgatatcaactagatcttgaga

SEQ ID NO: 354 - DNA, 170 bp, Artificial sequence
  Apc.867_Nsd1.70
  crRNA array
cgatttcttggctttatatatcttgtggaaaggacgaaacaccgtaatttctactaagtgtagatcagtcccaggcggcggaagctaatttctactaagtgtagatactggtgtggacgatgcagattttttaagcttggcgtggatccgatatcaactagatcttgaga

SEQ ID NO: 355 - DNA, 170 bp, Artificial sequence
  Apc.867_Nsd1.90
  crRNA array
cgatttcttggctttatatatcttgtggaaaggacgaaacaccgtaatttctactaagtgtagatcagtcccaggcggcggaagctaatttctactaagtgtagataggagctaacggcaagaatgttttttaagcttggcgtggatccgatatcaactagatcttgaga

SEQ ID NO: 356 - DNA, 170 bp, Artificial sequence
  Apc.867_Pbrm1.1236
  crRNA array
cgatttcttggctttatatatcttgtggaaaggacgaaacaccgtaatttctactaagtgtagatcagtcccaggcggcggaagctaatttctactaagtgtagatgccgataaaaccaacagccgttttttaagcttggcgtggatccgatatcaactagatcttgaga

SEQ ID NO: 357 - DNA, 170 bp, Artificial sequence
  Apc.867_Pbrm1.969
  crRNA array
cgatttcttggctttatatatcttgtggaaaggacgaaacaccgtaatttctactaagtgtagatcagtcccaggcggcggaagctaatttctactaagtgtagatgagccctaatgaacagctcattttttaagcttggcgtggatccgatatcaactagatcttgaga

SEQ ID NO: 358 - DNA, 170 bp, Artificial sequence
  Apc.867_Pik3r1.76
  crRNA array
cgatttcttggctttatatatcttgtggaaaggacgaaacaccgtaatttctactaagtgtagatcagtcccaggcggcggaagctaatttctactaagtgtagataaaacctatacggcccgcacttttttaagcttggcgtggatccgatatcaactagatcttgaga

SEQ ID NO: 359 - DNA, 170 bp, Artificial sequence
  Apc.867_Pik3r1.77
  crRNA array
cgatttcttggctttatatatcttgtggaaaggacgaaacaccgtaatttctactaagtgtagatcagtcccaggcggcggaagctaatttctactaagtgtagataaacctatacggcccgcactttttttaagcttggcgtggatccgatatcaactagatcttgaga

SEQ ID NO: 360 - DNA, 170 bp, Artificial sequence
  Apc.867_Pten.240
  crRNA array
cgatttcttggctttatatatcttgtggaaaggacgaaacaccgtaatttctactaagtgtagatcagtcccaggcggcggaagctaatttctactaagtgtagattgcatacgctatagctgcttttttttaagcttggcgtggatccgatatcaactagatcttgaga

SEQ ID NO: 361 - DNA, 170 bp, Artificial sequence
  Apc.867_Pten.265
  crRNA array
cgatttcttggctttatatatcttgtggaaaggacgaaacaccgtaatttctactaagtgtagatcagtcccaggcggcggaagctaatttctactaagtgtagataagcgtggtgcgtgacgcacttttttaagcttggcgtggatccgatatcaactagatcttgaga

SEQ ID NO: 362 - DNA, 170 bp, Artificial sequence
  Apc.867_Rasa1.1478
  crRNA array
cgatttcttggctttatatatcttgtggaaaggacgaaacaccgtaatttctactaagtgtagatcagtcccaggcggcggaagctaatttctactaagtgtagatcgataatggtctatgatgtcttttttaagcttggcgtggatccgatatcaactagatcttgaga

SEQ ID NO: 363 - DNA, 170 bp, Artificial sequence
  Apc.867_Rasa1.223
  crRNA array
cgatttcttggctttatatatcttgtggaaaggacgaaacaccgtaatttctactaagtgtagatcagtcccaggcggcggaagctaatttctactaagtgtagattccatggagtatcgtgctcgttttttaagcttggcgtggatccgatatcaactagatcttgaga

SEQ ID NO: 364 - DNA, 170 bp, Artificial sequence
  Apc.867_Rb1.211
  crRNA array
cgatttcttggctttatatatcttgtggaaaggacgaaacaccgtaatttctactaagtgtagatcagtcccaggcggcggaagctaatttctactaagtgtagattctgacatgatcgggtacctttttttaagcttggcgtggatccgatatcaactagatcttgaga

SEQ ID NO: 365 - DNA, 170 bp, Artificial sequence
  Apc.867_Rb1.394
  crRNA array
cgatttcttggctttatatatcttgtggaaaggacgaaacaccgtaatttctactaagtgtagatcagtcccaggcggcggaagctaatttctactaagtgtagatagaaatctcgaagcaggatcttttttaagcttggcgtggatccgatatcaactagatcttgaga

SEQ ID NO: 366 - DNA, 170 bp, Artificial sequence
  Apc.867_Rbm10.5
  crRNA array
cgatttcttggctttatatatcttgtggaaaggacgaaacaccgtaatttctactaagtgtagatcagtcccaggcggcggaagctaatttctactaagtgtagatacgaaacctgaacccacacattttttaagcttggcgtggatccgatatcaactagatcttgaga

SEQ ID NO: 367 - DNA, 170 bp, Artificial sequence
  Apc.867_Rbm10.6
  crRNA array
cgatttcttggctttatatatcttgtggaaaggacgaaacaccgtaatttctactaagtgtagatcagtcccaggcggcggaagctaatttctactaagtgtagatcgaaacctgaacccacacagttttttaagcttggcgtggatccgatatcaactagatcttgaga

SEQ ID NO: 368 - DNA, 170 bp, Artificial sequence
  Apc.867_Rnf43.1920
  crRNA array
cgatttcttggctttatatatcttgtggaaaggacgaaacaccgtaatttctactaagtgtagatcagtcccaggcggcggaagctaatttctactaagtgtagatatccccgtgccgtggactccttttttaagcttggcgtggatccgatatcaactagatcttgaga

SEQ ID NO: 369 - DNA, 170 bp, Artificial sequence
  Apc.867_Rnf43.39
  crRNA array
cgatttcttggctttatatatcttgtggaaaggacgaaacaccgtaatttctactaagtgtagatcagtcccaggcggcggaagctaatttctactaagtgtagatcaaggggatcactctgataattttttaagcttggcgtggatccgatatcaactagatcttgaga

SEQ ID NO: 370 - DNA, 170 bp, Artificial sequence
  Apc.867_Runx1.204
  crRNA array
cgatttcttggctttatatatcttgtggaaaggacgaaacaccgtaatttctactaagtgtagatcagtcccaggcggcggaagctaatttctactaagtgtagattaaataagtccagccgttttttttttaagcttggcgtggatccgatatcaactagatcttgaga

SEQ ID NO: 371 - DNA, 170 bp, Artificial sequence
  Apc.867_Runx1.81
  crRNA array
cgatttcttggctttatatatcttgtggaaaggacgaaacaccgtaatttctactaagtgtagatcagtcccaggcggcggaagctaatttctactaagtgtagataggacgcgtatgggaattttttttttaagcttggcgtggatccgatatcaactagatcttgaga

SEQ ID NO: 372 - DNA, 170 bp, Artificial sequence
  Apc.867_Setd2.143
  crRNA array
cgatttcttggctttatatatcttgtggaaaggacgaaacaccgtaatttctactaagtgtagatcagtcccaggcggcggaagctaatttctactaagtgtagatgcacaaccacaacagactggttttttaagcttggcgtggatccgatatcaactagatcttgaga

SEQ ID NO: 373 - DNA, 170 bp, Artificial sequence
  Apc.867_Setd2.508
  crRNA array
cgatttcttggctttatatatcttgtggaaaggacgaaacaccgtaatttctactaagtgtagatcagtcccaggcggcggaagctaatttctactaagtgtagattacgatcccgagcacccgacttttttaagcttggcgtggatccgatatcaactagatcttgaga

SEQ ID NO: 374 - DNA, 170 bp, Artificial sequence
  Apc.867_Smad4.3038
  crRNA array
cgatttcttggctttatatatcttgtggaaaggacgaaacaccgtaatttctactaagtgtagatcagtcccaggcggcggaagctaatttctactaagtgtagatatctgcggcagtgtcaccggttttttaagcttggcgtggatccgatatcaactagatcttgaga

SEQ ID NO: 375 - DNA, 170 bp, Artificial sequence
  Apc.867_Smad4.39
  crRNA array
cgatttcttggctttatatatcttgtggaaaggacgaaacaccgtaatttctactaagtgtagatcagtcccaggcggcggaagctaatttctactaagtgtagatagtcaaacgcatactgacaattttttaagcttggcgtggatccgatatcaactagatcttgaga

SEQ ID NO: 376 - DNA, 170 bp, Artificial sequence
  Apc.867_Stag2.1409
  crRNA array
cgatttcttggctttatatatcttgtggaaaggacgaaacaccgtaatttctactaagtgtagatcagtcccaggcggcggaagctaatttctactaagtgtagatgctaataactgcggaagggcttttttaagcttggcgtggatccgatatcaactagatcttgaga

SEQ ID NO: 377 - DNA, 170 bp, Artificial sequence
  Apc.867_Stag2.4401
  crRNA array
cgatttcttggctttatatatcttgtggaaaggacgaaacaccgtaatttctactaagtgtagatcagtcccaggcggcggaagctaatttctactaagtgtagattaatcgtccagtggtgtatattttttaagcttggcgtggatccgatatcaactagatcttgaga

SEQ ID NO: 378 - DNA, 170 bp, Artificial sequence
  Apc.867_Tbl1xr1.1
  crRNA array
cgatttcttggctttatatatcttgtggaaaggacgaaacaccgtaatttctactaagtgtagatcagtcccaggcggcggaagctaatttctactaagtgtagatggatgcgcatactggtgaagttttttaagcttggcgtggatccgatatcaactagatcttgaga

SEQ ID NO: 379 - DNA, 170 bp, Artificial sequence
  Apc.867_Tbl1xr1.83
  crRNA array
cgatttcttggctttatatatcttgtggaaaggacgaaacaccgtaatttctactaagtgtagatcagtcccaggcggcggaagctaatttctactaagtgtagatatggtcgacccatcgagtctttttttaagcttggcgtggatccgatatcaactagatcttgaga

SEQ ID NO: 380 - DNA, 170 bp, Artificial sequence
  Apc.867_Tgfbr2.290
  crRNA array
cgatttcttggctttatatatcttgtggaaaggacgaaacaccgtaatttctactaagtgtagatcagtcccaggcggcggaagctaatttctactaagtgtagatcctctcggcgcccgggtaaattttttaagcttggcgtggatccgatatcaactagatcttgaga

SEQ ID NO: 381 - DNA, 170 bp, Artificial sequence
  Apc.867_Tgfbr2.292
  crRNA array
cgatttcttggctttatatatcttgtggaaaggacgaaacaccgtaatttctactaagtgtagatcagtcccaggcggcggaagctaatttctactaagtgtagatcccgggcgccgagagggaaattttttaagcttggcgtggatccgatatcaactagatcttgaga

SEQ ID NO: 382 - DNA, 170 bp, Artificial sequence
  Apc.867_Trp53.4
  crRNA array
cgatttcttggctttatatatcttgtggaaaggacgaaacaccgtaatttctactaagtgtagatcagtcccaggcggcggaagctaatttctactaagtgtagatccctgaactgcccccagggattttttaagcttggcgtggatccgatatcaactagatcttgaga

SEQ ID NO: 383 - DNA, 170 bp, Artificial sequence
  Apc.867_Trp53.528
  crRNA array
cgatttcttggctttatatatcttgtggaaaggacgaaacaccgtaatttctactaagtgtagatcagtcccaggcggcggaagctaatttctactaagtgtagatgctgggccagcagagacctgttttttaagcttggcgtggatccgatatcaactagatcttgaga

SEQ ID NO: 384 - DNA, 170 bp, Artificial sequence
  Apc.867_Vhl.1
  crRNA array
cgatttcttggctttatatatcttgtggaaaggacgaaacaccgtaatttctactaagtgtagatcagtcccaggcggcggaagctaatttctactaagtgtagatagggctcccggcggccatttttttttaagcttggcgtggatccgatatcaactagatcttgaga

SEQ ID NO: 385 - DNA, 170 bp, Artificial sequence
  Apc.867_Vhl.151
  crRNA array
cgatttcttggctttatatatcttgtggaaaggacgaaacaccgtaatttctactaagtgtagatcagtcccaggcggcggaagctaatttctactaagtgtagattagagcactcacccgagggattttttaagcttggcgtggatccgatatcaactagatcttgaga

SEQ ID NO: 386 - DNA, 170 bp, Artificial sequence
  Apc.867_Zc3h13.1387
  crRNA array
cgatttcttggctttatatatcttgtggaaaggacgaaacaccgtaatttctactaagtgtagatcagtcccaggcggcggaagctaatttctactaagtgtagatgtgacgccggtcatgtgactttttttaagcttggcgtggatccgatatcaactagatcttgaga

SEQ ID NO: 387 - DNA, 170 bp, Artificial sequence
  Apc.867_Zc3h13.1777
  crRNA array
cgatttcttggctttatatatcttgtggaaaggacgaaacaccgtaatttctactaagtgtagatcagtcccaggcggcggaagctaatttctactaagtgtagatgatgctgccagtgtagcggcttttttaagcttggcgtggatccgatatcaactagatcttgaga

SEQ ID NO: 388 - DNA, 170 bp, Artificial sequence
  Arid1a.2_Acvr2a.155
  crRNA array
cgatttcttggctttatatatcttgtggaaaggacgaaacaccgtaatttctactaagtgtagatcccgcgcccccgtcctggggtaatttctactaagtgtagatggacctggctaatcaagtatttttttaagcttggcgtggatccgatatcaactagatcttgaga

SEQ ID NO: 389 - DNA, 170 bp, Artificial sequence
  Arid1a.2_Acvr2a.70
  crRNA array
cgatttcttggctttatatatcttgtggaaaggacgaaacaccgtaatttctactaagtgtagatcccgcgcccccgtcctggggtaatttctactaagtgtagatcccgaggcgccggagaagccttttttaagcttggcgtggatccgatatcaactagatcttgaga

SEQ ID NO: 390 - DNA, 170 bp, Artificial sequence
  Arid1a.2_Apc.21
  crRNA array
cgatttcttggctttatatatcttgtggaaaggacgaaacaccgtaatttctactaagtgtagatcccgcgcccccgtcctggggtaatttctactaagtgtagatgtgatccacacgtgtagctgttttttaagcttggcgtggatccgatatcaactagatcttgaga

SEQ ID NO: 391 - DNA, 170 bp, Artificial sequence
  Arid1a.2_Apc.867
  crRNA array
cgatttcttggctttatatatcttgtggaaaggacgaaacaccgtaatttctactaagtgtagatcccgcgcccccgtcctggggtaatttctactaagtgtagatcagtcccaggcggcggaagcttttttaagcttggcgtggatccgatatcaactagatcttgaga

SEQ ID NO: 392 - DNA, 170 bp, Artificial sequence
  Arid1a.2_Arid2.166
  crRNA array
cgatttcttggctttatatatcttgtggaaaggacgaaacaccgtaatttctactaagtgtagatcccgcgcccccgtcctggggtaatttctactaagtgtagataaccgcgatctgggttttttttttttaagcttggcgtggatccgatatcaactagatcttgaga

SEQ ID NO: 393 - DNA, 170 bp, Artificial sequence
  Arid1a.2_Arid2.172
  crRNA array
cgatttcttggctttatatatcttgtggaaaggacgaaacaccgtaatttctactaagtgtagatcccgcgcccccgtcctggggtaatttctactaagtgtagatctggacgagctgcggcagttttttttaagcttggcgtggatccgatatcaactagatcttgaga

SEQ ID NO: 394 - DNA, 170 bp, Artificial sequence
  Arid1a.2_Atm.120
  crRNA array
cgatttcttggctttatatatcttgtggaaaggacgaaacaccgtaatttctactaagtgtagatcccgcgcccccgtcctggggtaatttctactaagtgtagatgacaggtagtcggcagctaattttttaagcttggcgtggatccgatatcaactagatcttgaga

SEQ ID NO: 395 - DNA, 170 bp, Artificial sequence
  Arid1a.2_Atm.997
  crRNA array
cgatttcttggctttatatatcttgtggaaaggacgaaacaccgtaatttctactaagtgtagatcccgcgcccccgtcctggggtaatttctactaagtgtagatgagaaagtctccgaatcgttttttttaagcttggcgtggatccgatatcaactagatcttgaga

SEQ ID NO: 396 - DNA, 170 bp, Artificial sequence
  Arid1a.2_Atrx.249
  crRNA array
cgatttcttggctttatatatcttgtggaaaggacgaaacaccgtaatttctactaagtgtagatcccgcgcccccgtcctggggtaatttctactaagtgtagattagccagtcgctcatatctcttttttaagcttggcgtggatccgatatcaactagatcttgaga

SEQ ID NO: 397 - DNA, 170 bp, Artificial sequence
  Arid1a.2_Atrx.251
  crRNA array
cgatttcttggctttatatatcttgtggaaaggacgaaacaccgtaatttctactaagtgtagatcccgcgcccccgtcctggggtaatttctactaagtgtagatgccagtcgctcatatctctgttttttaagcttggcgtggatccgatatcaactagatcttgaga

SEQ ID NO: 398 - DNA, 170 bp, Artificial sequence
  Arid1a.2_Bcor.203
  crRNA array
cgatttcttggctttatatatcttgtggaaaggacgaaacaccgtaatttctactaagtgtagatcccgcgcccccgtcctggggtaatttctactaagtgtagatccccggagcggagtccaggcttttttaagcttggcgtggatccgatatcaactagatcttgaga

SEQ ID NO: 399 - DNA, 170 bp, Artificial sequence
  Arid1a.2_Bcor.475
  crRNA array
cgatttcttggctttatatatcttgtggaaaggacgaaacaccgtaatttctactaagtgtagatcccgcgcccccgtcctggggtaatttctactaagtgtagattgcaacccctctgtatgggattttttaagcttggcgtggatccgatatcaactagatcttgaga

SEQ ID NO: 400 - DNA, 170 bp, Artificial sequence
  Arid1a.2_Brca1.112
  crRNA array
cgatttcttggctttatatatcttgtggaaaggacgaaacaccgtaatttctactaagtgtagatcccgcgcccccgtcctggggtaatttctactaagtgtagatctagacgctctgtggagactttttttaagcttggcgtggatccgatatcaactagatcttgaga

SEQ ID NO: 401 - DNA, 170 bp, Artificial sequence
  Arid1a.2_Brca1.53
  crRNA array
cgatttcttggctttatatatcttgtggaaaggacgaaacaccgtaatttctactaagtgtagatcccgcgcccccgtcctggggtaatttctactaagtgtagataatgaggaggcgtcgatcatttttttaagcttggcgtggatccgatatcaactagatcttgaga

SEQ ID NO: 402 - DNA, 170 bp, Artificial sequence
  Arid1a.2_Casp8.45
  crRNA array
cgatttcttggctttatatatcttgtggaaaggacgaaacaccgtaatttctactaagtgtagatcccgcgcccccgtcctggggtaatttctactaagtgtagatctaccgagatcctgtgaatgttttttaagcttggcgtggatccgatatcaactagatcttgaga

SEQ ID NO: 403 - DNA, 170 bp, Artificial sequence
  Arid1a.2_Casp8.54
  crRNA array
cgatttcttggctttatatatcttgtggaaaggacgaaacaccgtaatttctactaagtgtagatcccgcgcccccgtcctggggtaatttctactaagtgtagatcagtgcagtcgtcgtaagatttttttaagcttggcgtggatccgatatcaactagatcttgaga

SEQ ID NO: 404 - DNA, 170 bp, Artificial sequence
  Arid1a.2_Cbwd1.84
  crRNA array
cgatttcttggctttatatatcttgtggaaaggacgaaacaccgtaatttctactaagtgtagatcccgcgcccccgtcctggggtaatttctactaagtgtagatcacagcaggtaacatgccgcttttttaagcttggcgtggatccgatatcaactagatcttgaga

SEQ ID NO: 405 - DNA, 170 bp, Artificial sequence
  Arid1a.2_Cbwd1.85
  crRNA array
cgatttcttggctttatatatcttgtggaaaggacgaaacaccgtaatttctactaagtgtagatcccgcgcccccgtcctggggtaatttctactaagtgtagatacagcaggtaacatgccgccttttttaagcttggcgtggatccgatatcaactagatcttgaga

SEQ ID NO: 406 - DNA, 170 bp, Artificial sequence
  Arid1a.2_Cdh1.387
  crRNA array
cgatttcttggctttatatatcttgtggaaaggacgaaacaccgtaatttctactaagtgtagatcccgcgcccccgtcctggggtaatttctactaagtgtagatctcggcgtctgccgggtccgttttttaagcttggcgtggatccgatatcaactagatcttgaga

SEQ ID NO: 407 - DNA, 170 bp, Artificial sequence
  Arid1a.2_Cdh1.58
  crRNA array
cgatttcttggctttatatatcttgtggaaaggacgaaacaccgtaatttctactaagtgtagatcccgcgcccccgtcctggggtaatttctactaagtgtagatctcgtccgcgcccgggactcttttttaagcttggcgtggatccgatatcaactagatcttgaga

SEQ ID NO: 408 - DNA, 170 bp, Artificial sequence
  Arid1a.2_Cdkn2a.647
  crRNA array
cgatttcttggctttatatatcttgtggaaaggacgaaacaccgtaatttctactaagtgtagatcccgcgcccccgtcctggggtaatttctactaagtgtagatgcaatcacgggagggagcagttttttaagcttggcgtggatccgatatcaactagatcttgaga

SEQ ID NO: 409 - DNA, 170 bp, Artificial sequence
  Arid1a.2_Cdkn2a.648
  crRNA array
cgatttcttggctttatatatcttgtggaaaggacgaaacaccgtaatttctactaagtgtagatcccgcgcccccgtcctggggtaatttctactaagtgtagatcaatcacgggagggagcagattttttaagcttggcgtggatccgatatcaactagatcttgaga

SEQ ID NO: 410 - DNA, 170 bp, Artificial sequence
  Arid1a.2_Cic.162
  crRNA array
cgatttcttggctttatatatcttgtggaaaggacgaaacaccgtaatttctactaagtgtagatcccgcgcccccgtcctggggtaatttctactaagtgtagatcgcaggcgcgcccggcggagttttttaagcttggcgtggatccgatatcaactagatcttgaga

SEQ ID NO: 411 - DNA, 170 bp, Artificial sequence
  Arid1a.2_Cic.164
  crRNA array
cgatttcttggctttatatatcttgtggaaaggacgaaacaccgtaatttctactaagtgtagatcccgcgcccccgtcctggggtaatttctactaagtgtagatcgggccctgggccggcggctttttttaagcttggcgtggatccgatatcaactagatcttgaga

SEQ ID NO: 412 - DNA, 170 bp, Artificial sequence
  Arid1a.2_Ctcf.229
  crRNA array
cgatttcttggctttatatatcttgtggaaaggacgaaacaccgtaatttctactaagtgtagatcccgcgcccccgtcctggggtaatttctactaagtgtagatggctggtggctgatagtctgttttttaagcttggcgtggatccgatatcaactagatcttgaga

SEQ ID NO: 413 - DNA, 170 bp, Artificial sequence
  Arid1a.2_Ctcf.809
  crRNA array
cgatttcttggctttatatatcttgtggaaaggacgaaacaccgtaatttctactaagtgtagatcccgcgcccccgtcctggggtaatttctactaagtgtagataagcgctatcatgatcccaattttttaagcttggcgtggatccgatatcaactagatcttgaga

SEQ ID NO: 414 - DNA, 170 bp, Artificial sequence
  Arid1a.2_Elf3.826
  crRNA array
cgatttcttggctttatatatcttgtggaaaggacgaaacaccgtaatttctactaagtgtagatcccgcgcccccgtcctggggtaatttctactaagtgtagattccgagacatcctaatccacttttttaagcttggcgtggatccgatatcaactagatcttgaga

SEQ ID NO: 415 - DNA, 170 bp, Artificial sequence
  Arid1a.2_Elf3.983
  crRNA array
cgatttcttggctttatatatcttgtggaaaggacgaaacaccgtaatttctactaagtgtagatcccgcgcccccgtcctggggtaatttctactaagtgtagattaggccccctaactggaccattttttaagcttggcgtggatccgatatcaactagatcttgaga

SEQ ID NO: 416 - DNA, 170 bp, Artificial sequence
  Arid1a.2_Ep300.310
  crRNA array
cgatttcttggctttatatatcttgtggaaaggacgaaacaccgtaatttctactaagtgtagatcccgcgcccccgtcctggggtaatttctactaagtgtagatatggtacgacagtgaggaagttttttaagcttggcgtggatccgatatcaactagatcttgaga

SEQ ID NO: 417 - DNA, 170 bp, Artificial sequence
  Arid1a.2_Ep300.587
  crRNA array
cgatttcttggctttatatatcttgtggaaaggacgaaacaccgtaatttctactaagtgtagatcccgcgcccccgtcctggggtaatttctactaagtgtagatcgccccggggcccccaaccattttttaagcttggcgtggatccgatatcaactagatcttgaga

SEQ ID NO: 418 - DNA, 170 bp, Artificial sequence
  Arid1a.2_Epha2.126
  crRNA array
cgatttcttggctttatatatcttgtggaaaggacgaaacaccgtaatttctactaagtgtagatcccgcgcccccgtcctggggtaatttctactaagtgtagatcctgtgccgccgcggccgccttttttaagcttggcgtggatccgatatcaactagatcttgaga

SEQ ID NO: 419 - DNA, 170 bp, Artificial sequence
  Arid1a.2_Epha2.5
  crRNA array
cgatttcttggctttatatatcttgtggaaaggacgaaacaccgtaatttctactaagtgtagatcccgcgcccccgtcctggggtaatttctactaagtgtagatcatgagctggcgccacccggttttttaagcttggcgtggatccgatatcaactagatcttgaga

SEQ ID NO: 420 - DNA, 170 bp, Artificial sequence
  Arid1a.2_Fat1.105
  crRNA array
cgatttcttggctttatatatcttgtggaaaggacgaaacaccgtaatttctactaagtgtagatcccgcgcccccgtcctggggtaatttctactaagtgtagataactcgaggtgacaacaagtttttttaagcttggcgtggatccgatatcaactagatcttgaga

SEQ ID NO: 421 - DNA, 170 bp, Artificial sequence
  Arid1a.2_Fat1.122
  crRNA array
cgatttcttggctttatatatcttgtggaaaggacgaaacaccgtaatttctactaagtgtagatcccgcgcccccgtcctggggtaatttctactaagtgtagatccatcgacatggaaacgggattttttaagcttggcgtggatccgatatcaactagatcttgaga

SEQ ID NO: 422 - DNA, 170 bp, Artificial sequence
  Arid1a.2_Fbxw7.21
  crRNA array
cgatttcttggctttatatatcttgtggaaaggacgaaacaccgtaatttctactaagtgtagatcccgcgcccccgtcctggggtaatttctactaagtgtagattaatgtgccgtagaaacccattttttaagcttggcgtggatccgatatcaactagatcttgaga

SEQ ID NO: 423 - DNA, 170 bp, Artificial sequence
  Arid1a.2_Fbxw7.23
  crRNA array
cgatttcttggctttatatatcttgtggaaaggacgaaacaccgtaatttctactaagtgtagatcccgcgcccccgtcctggggtaatttctactaagtgtagatatgtgccgtagaaacccatattttttaagcttggcgtggatccgatatcaactagatcttgaga

SEQ ID NO: 424 - DNA, 170 bp, Artificial sequence
  Arid1a.2_Gata3.34
  crRNA array
cgatttcttggctttatatatcttgtggaaaggacgaaacaccgtaatttctactaagtgtagatcccgcgcccccgtcctggggtaatttctactaagtgtagatctaaactatcccgcaaagatttttttaagcttggcgtggatccgatatcaactagatcttgaga

SEQ ID NO: 425 - DNA, 170 bp, Artificial sequence
  Arid1a.2_Gata3.47
  crRNA array
cgatttcttggctttatatatcttgtggaaaggacgaaacaccgtaatttctactaagtgtagatcccgcgcccccgtcctggggtaatttctactaagtgtagatcgtagtaggacgggacgtggttttttaagcttggcgtggatccgatatcaactagatcttgaga

SEQ ID NO: 426 - DNA, 170 bp, Artificial sequence
  Arid1a.2_H2-Q2.1
  crRNA array
cgatttcttggctttatatatcttgtggaaaggacgaaacaccgtaatttctactaagtgtagatcccgcgcccccgtcctggggtaatttctactaagtgtagatagggcggccaccaacagcagttttttaagcttggcgtggatccgatatcaactagatcttgaga

SEQ ID NO: 427 - DNA, 170 bp, Artificial sequence
  Arid1a.2_H2-Q2.2
  crRNA array
cgatttcttggctttatatatcttgtggaaaggacgaaacaccgtaatttctactaagtgtagatcccgcgcccccgtcctggggtaatttctactaagtgtagattaacctgcgcccgctgctgattttttaagcttggcgtggatccgatatcaactagatcttgaga

SEQ ID NO: 428 - DNA, 170 bp, Artificial sequence
  Arid1a.2_Kdm5c.1878
  crRNA array
cgatttcttggctttatatatcttgtggaaaggacgaaacaccgtaatttctactaagtgtagatcccgcgcccccgtcctggggtaatttctactaagtgtagatagagcacggcacccgcccccttttttaagcttggcgtggatccgatatcaactagatcttgaga

SEQ ID NO: 429 - DNA, 170 bp, Artificial sequence
  Arid1a.2_Kdm5c.1879
  crRNA array
cgatttcttggctttatatatcttgtggaaaggacgaaacaccgtaatttctactaagtgtagatcccgcgcccccgtcctggggtaatttctactaagtgtagatgagcacggcacccgccccccttttttaagcttggcgtggatccgatatcaactagatcttgaga

SEQ ID NO: 430 - DNA, 170 bp, Artificial sequence
  Arid1a.2_Kdm6a.56
  crRNA array
cgatttcttggctttatatatcttgtggaaaggacgaaacaccgtaatttctactaagtgtagatcccgcgcccccgtcctggggtaatttctactaagtgtagattcgctgccgcctctcgcggcttttttaagcttggcgtggatccgatatcaactagatcttgaga

SEQ ID NO: 431 - DNA, 170 bp, Artificial sequence
  Arid1a.2_Kdm6a.57
  crRNA array
cgatttcttggctttatatatcttgtggaaaggacgaaacaccgtaatttctactaagtgtagatcccgcgcccccgtcctggggtaatttctactaagtgtagatcgctgccgcctctcgcggcattttttaagcttggcgtggatccgatatcaactagatcttgaga

SEQ ID NO: 432 - DNA, 170 bp, Artificial sequence
  Arid1a.2_Kmt2b.265
  crRNA array
cgatttcttggctttatatatcttgtggaaaggacgaaacaccgtaatttctactaagtgtagatcccgcgcccccgtcctggggtaatttctactaagtgtagatccccaagtgaagcccacctgttttttaagcttggcgtggatccgatatcaactagatcttgaga

SEQ ID NO: 433 - DNA, 170 bp, Artificial sequence
  Arid1a.2_Kmt2b.298
  crRNA array
cgatttcttggctttatatatcttgtggaaaggacgaaacaccgtaatttctactaagtgtagatcccgcgcccccgtcctggggtaatttctactaagtgtagattccggcagggaccggctggcttttttaagcttggcgtggatccgatatcaactagatcttgaga

SEQ ID NO: 434 - DNA, 170 bp, Artificial sequence
  Arid1a.2_Kmt2c.1962
  crRNA array
cgatttcttggctttatatatcttgtggaaaggacgaaacaccgtaatttctactaagtgtagatcccgcgcccccgtcctggggtaatttctactaagtgtagatgtgacgatctgtgccacaagttttttaagcttggcgtggatccgatatcaactagatcttgaga

SEQ ID NO: 435 - DNA, 170 bp, Artificial sequence
  Arid1a.2_Kmt2c.2236
  crRNA array
cgatttcttggctttatatatcttgtggaaaggacgaaacaccgtaatttctactaagtgtagatcccgcgcccccgtcctggggtaatttctactaagtgtagatactcgacctccacctccctattttttaagcttggcgtggatccgatatcaactagatcttgaga

SEQ ID NO: 436 - DNA, 170 bp, Artificial sequence
  Arid1a.2_Kmt2d.316
  crRNA array
cgatttcttggctttatatatcttgtggaaaggacgaaacaccgtaatttctactaagtgtagatcccgcgcccccgtcctggggtaatttctactaagtgtagatactccaggccacccaggtggttttttaagcttggcgtggatccgatatcaactagatcttgaga

SEQ ID NO: 437 - DNA, 170 bp, Artificial sequence
  Arid1a.2_Kmt2d.416
  crRNA array
cgatttcttggctttatatatcttgtggaaaggacgaaacaccgtaatttctactaagtgtagatcccgcgcccccgtcctggggtaatttctactaagtgtagattaaacccccgggggaagggtttttttaagcttggcgtggatccgatatcaactagatcttgaga

SEQ ID NO: 438 - DNA, 170 bp, Artificial sequence
  Arid1a.2_Map2k4.119
  crRNA array
cgatttcttggctttatatatcttgtggaaaggacgaaacaccgtaatttctactaagtgtagatcccgcgcccccgtcctggggtaatttctactaagtgtagattgctgtgtgggcggccacatttttttaagcttggcgtggatccgatatcaactagatcttgaga

SEQ ID NO: 439 - DNA, 170 bp, Artificial sequence
  Arid1a.2_Map2k4.1261
  crRNA array
cgatttcttggctttatatatcttgtggaaaggacgaaacaccgtaatttctactaagtgtagatcccgcgcccccgtcctggggtaatttctactaagtgtagatgatgtagtaatgcggagtagttttttaagcttggcgtggatccgatatcaactagatcttgaga

SEQ ID NO: 440 - DNA, 170 bp, Artificial sequence
  Arid1a.2_Map3k1.235
  crRNA array
cgatttcttggctttatatatcttgtggaaaggacgaaacaccgtaatttctactaagtgtagatcccgcgcccccgtcctggggtaatttctactaagtgtagataaaacgctactgatcgatcgttttttaagcttggcgtggatccgatatcaactagatcttgaga

SEQ ID NO: 441 - DNA, 170 bp, Artificial sequence
  Arid1a.2_Map3k1.3838
  crRNA array
cgatttcttggctttatatatcttgtggaaaggacgaaacaccgtaatttctactaagtgtagatcccgcgcccccgtcctggggtaatttctactaagtgtagatccaacaacagggccccactattttttaagcttggcgtggatccgatatcaactagatcttgaga

SEQ ID NO: 442 - DNA, 170 bp, Artificial sequence
  Arid1a.2_Mga.1655
  crRNA array
cgatttcttggctttatatatcttgtggaaaggacgaaacaccgtaatttctactaagtgtagatcccgcgcccccgtcctggggtaatttctactaagtgtagatcgagaagtggagagcatattttttttaagcttggcgtggatccgatatcaactagatcttgaga

SEQ ID NO: 443 - DNA, 170 bp, Artificial sequence
  Arid1a.2_Mga.93
  crRNA array
cgatttcttggctttatatatcttgtggaaaggacgaaacaccgtaatttctactaagtgtagatcccgcgcccccgtcctggggtaatttctactaagtgtagatgagaaggctccccataatgtttttttaagcttggcgtggatccgatatcaactagatcttgaga

SEQ ID NO: 444 - DNA, 170 bp, Artificial sequence
  Arid1a.2_Nf1.746
  crRNA array
cgatttcttggctttatatatcttgtggaaaggacgaaacaccgtaatttctactaagtgtagatcccgcgcccccgtcctggggtaatttctactaagtgtagattaagcataatgatgatgccattttttaagcttggcgtggatccgatatcaactagatcttgaga

SEQ ID NO: 445 - DNA, 170 bp, Artificial sequence
  Arid1a.2_Nf1.97
  crRNA array
cgatttcttggctttatatatcttgtggaaaggacgaaacaccgtaatttctactaagtgtagatcccgcgcccccgtcctggggtaatttctactaagtgtagatagcccgctacatgctgatgcttttttaagcttggcgtggatccgatatcaactagatcttgaga

SEQ ID NO: 446 - DNA, 170 bp, Artificial sequence
  Arid1a.2_Nf2.356
  crRNA array
cgatttcttggctttatatatcttgtggaaaggacgaaacaccgtaatttctactaagtgtagatcccgcgcccccgtcctggggtaatttctactaagtgtagatcggagtcatctgatagagatttttttaagcttggcgtggatccgatatcaactagatcttgaga

SEQ ID NO: 447 - DNA, 170 bp, Artificial sequence
  Arid1a.2_Nf2.768
  crRNA array
cgatttcttggctttatatatcttgtggaaaggacgaaacaccgtaatttctactaagtgtagatcccgcgcccccgtcctggggtaatttctactaagtgtagatccgaagccccagtgtccggcttttttaagcttggcgtggatccgatatcaactagatcttgaga

SEQ ID NO: 448 - DNA, 170 bp, Artificial sequence
  Arid1a.2_Notch1.1849
  crRNA array
cgatttcttggctttatatatcttgtggaaaggacgaaacaccgtaatttctactaagtgtagatcccgcgcccccgtcctggggtaatttctactaagtgtagatctggcgggtgggcggcgctgttttttaagcttggcgtggatccgatatcaactagatcttgaga

SEQ ID NO: 449 - DNA, 170 bp, Artificial sequence
  Arid1a.2_Notch1.649
  crRNA array
cgatttcttggctttatatatcttgtggaaaggacgaaacaccgtaatttctactaagtgtagatcccgcgcccccgtcctggggtaatttctactaagtgtagattgggccaacgatgccaggacttttttaagcttggcgtggatccgatatcaactagatcttgaga

SEQ ID NO: 450 - DNA, 170 bp, Artificial sequence
  Arid1a.2_Nsd1.70
  crRNA array
cgatttcttggctttatatatcttgtggaaaggacgaaacaccgtaatttctactaagtgtagatcccgcgcccccgtcctggggtaatttctactaagtgtagatactggtgtggacgatgcagattttttaagcttggcgtggatccgatatcaactagatcttgaga

SEQ ID NO: 451 - DNA, 170 bp, Artificial sequence
  Arid1a.2_Nsd1.90
  crRNA array
cgatttcttggctttatatatcttgtggaaaggacgaaacaccgtaatttctactaagtgtagatcccgcgcccccgtcctggggtaatttctactaagtgtagataggagctaacggcaagaatgttttttaagcttggcgtggatccgatatcaactagatcttgaga

SEQ ID NO: 452 - DNA, 170 bp, Artificial sequence
  Arid1a.2_Pbrm1.1236
  crRNA array
cgatttcttggctttatatatcttgtggaaaggacgaaacaccgtaatttctactaagtgtagatcccgcgcccccgtcctggggtaatttctactaagtgtagatgccgataaaaccaacagccgttttttaagcttggcgtggatccgatatcaactagatcttgaga

SEQ ID NO: 453 - DNA, 170 bp, Artificial sequence
  Arid1a.2_Pbrm1.969
  crRNA array
cgatttcttggctttatatatcttgtggaaaggacgaaacaccgtaatttctactaagtgtagatcccgcgcccccgtcctggggtaatttctactaagtgtagatgagccctaatgaacagctcattttttaagcttggcgtggatccgatatcaactagatcttgaga

SEQ ID NO: 454 - DNA, 170 bp, Artificial sequence
  Arid1a.2_Pik3r1.76
  crRNA array
cgatttcttggctttatatatcttgtggaaaggacgaaacaccgtaatttctactaagtgtagatcccgcgcccccgtcctggggtaatttctactaagtgtagataaaacctatacggcccgcacttttttaagcttggcgtggatccgatatcaactagatcttgaga

SEQ ID NO: 455 - DNA, 170 bp, Artificial sequence
  Arid1a.2_Pik3r1.77
  crRNA array
cgatttcttggctttatatatcttgtggaaaggacgaaacaccgtaatttctactaagtgtagatcccgcgcccccgtcctggggtaatttctactaagtgtagataaacctatacggcccgcactttttttaagcttggcgtggatccgatatcaactagatcttgaga

SEQ ID NO: 456 - DNA, 170 bp, Artificial sequence
  Arid1a.2_Pten.240
  crRNA array
cgatttcttggctttatatatcttgtggaaaggacgaaacaccgtaatttctactaagtgtagatcccgcgcccccgtcctggggtaatttctactaagtgtagattgcatacgctatagctgcttttttttaagcttggcgtggatccgatatcaactagatcttgaga

SEQ ID NO: 457 - DNA, 170 bp, Artificial sequence
  Arid1a.2_Pten.265
  crRNA array
cgatttcttggctttatatatcttgtggaaaggacgaaacaccgtaatttctactaagtgtagatcccgcgcccccgtcctggggtaatttctactaagtgtagataagcgtggtgcgtgacgcacttttttaagcttggcgtggatccgatatcaactagatcttgaga

SEQ ID NO: 458 - DNA, 170 bp, Artificial sequence
  Arid1a.2_Rasa1.1478
  crRNA array
cgatttcttggctttatatatcttgtggaaaggacgaaacaccgtaatttctactaagtgtagatcccgcgcccccgtcctggggtaatttctactaagtgtagatcgataatggtctatgatgtcttttttaagcttggcgtggatccgatatcaactagatcttgaga

SEQ ID NO: 459 - DNA, 170 bp, Artificial sequence
  Arid1a.2_Rasa1.223
  crRNA array
cgatttcttggctttatatatcttgtggaaaggacgaaacaccgtaatttctactaagtgtagatcccgcgcccccgtcctggggtaatttctactaagtgtagattccatggagtatcgtgctcgttttttaagcttggcgtggatccgatatcaactagatcttgaga

SEQ ID NO: 460 - DNA, 170 bp, Artificial sequence
  Arid1a.2_Rb1.211
  crRNA array
cgatttcttggctttatatatcttgtggaaaggacgaaacaccgtaatttctactaagtgtagatcccgcgcccccgtcctggggtaatttctactaagtgtagattctgacatgatcgggtacctttttttaagcttggcgtggatccgatatcaactagatcttgaga

SEQ ID NO: 461 - DNA, 170 bp, Artificial sequence
  Arid1a.2_Rb1.394
  crRNA array
cgatttcttggctttatatatcttgtggaaaggacgaaacaccgtaatttctactaagtgtagatcccgcgcccccgtcctggggtaatttctactaagtgtagatagaaatctcgaagcaggatcttttttaagcttggcgtggatccgatatcaactagatcttgaga

SEQ ID NO: 462 - DNA, 170 bp, Artificial sequence
  Arid1a.2_Rbm10.5
  crRNA array
cgatttcttggctttatatatcttgtggaaaggacgaaacaccgtaatttctactaagtgtagatcccgcgcccccgtcctggggtaatttctactaagtgtagatacgaaacctgaacccacacattttttaagcttggcgtggatccgatatcaactagatcttgaga

SEQ ID NO: 463 - DNA, 170 bp, Artificial sequence
  Arid1a.2_Rbm10.6
  crRNA array
cgatttcttggctttatatatcttgtggaaaggacgaaacaccgtaatttctactaagtgtagatcccgcgcccccgtcctggggtaatttctactaagtgtagatcgaaacctgaacccacacagttttttaagcttggcgtggatccgatatcaactagatcttgaga

SEQ ID NO: 464 - DNA, 170 bp, Artificial sequence
  Arid1a.2_Rnf43.1920
  crRNA array
cgatttcttggctttatatatcttgtggaaaggacgaaacaccgtaatttctactaagtgtagatcccgcgcccccgtcctggggtaatttctactaagtgtagatatccccgtgccgtggactccttttttaagcttggcgtggatccgatatcaactagatcttgaga

SEQ ID NO: 465 - DNA, 170 bp, Artificial sequence
  Arid1a.2_Rnf43.39
  crRNA array
cgatttcttggctttatatatcttgtggaaaggacgaaacaccgtaatttctactaagtgtagatcccgcgcccccgtcctggggtaatttctactaagtgtagatcaaggggatcactctgataattttttaagcttggcgtggatccgatatcaactagatcttgaga

SEQ ID NO: 466 - DNA, 170 bp, Artificial sequence
  Arid1a.2_Runx1.204
  crRNA array
cgatttcttggctttatatatcttgtggaaaggacgaaacaccgtaatttctactaagtgtagatcccgcgcccccgtcctggggtaatttctactaagtgtagattaaataagtccagccgttttttttttaagcttggcgtggatccgatatcaactagatcttgaga

SEQ ID NO: 467 - DNA, 170 bp, Artificial sequence
  Arid1a.2_Runx1.81
  crRNA array
cgatttcttggctttatatatcttgtggaaaggacgaaacaccgtaatttctactaagtgtagatcccgcgcccccgtcctggggtaatttctactaagtgtagataggacgcgtatgggaattttttttttaagcttggcgtggatccgatatcaactagatcttgaga

SEQ ID NO: 468 - DNA, 170 bp, Artificial sequence
  Arid1a.2_Setd2.143
  crRNA array
cgatttcttggctttatatatcttgtggaaaggacgaaacaccgtaatttctactaagtgtagatcccgcgcccccgtcctggggtaatttctactaagtgtagatgcacaaccacaacagactggttttttaagcttggcgtggatccgatatcaactagatcttgaga

SEQ ID NO: 469 - DNA, 170 bp, Artificial sequence
  Arid1a.2_Setd2.508
  crRNA array
cgatttcttggctttatatatcttgtggaaaggacgaaacaccgtaatttctactaagtgtagatcccgcgcccccgtcctggggtaatttctactaagtgtagattacgatcccgagcacccgacttttttaagcttggcgtggatccgatatcaactagatcttgaga

SEQ ID NO: 470 - DNA, 170 bp, Artificial sequence
  Arid1a.2_Smad4.3038
  crRNA array
cgatttcttggctttatatatcttgtggaaaggacgaaacaccgtaatttctactaagtgtagatcccgcgcccccgtcctggggtaatttctactaagtgtagatatctgcggcagtgtcaccggttttttaagcttggcgtggatccgatatcaactagatcttgaga

SEQ ID NO: 471 - DNA, 170 bp, Artificial sequence
  Arid1a.2_Smad4.39
  crRNA array
cgatttcttggctttatatatcttgtggaaaggacgaaacaccgtaatttctactaagtgtagatcccgcgcccccgtcctggggtaatttctactaagtgtagatagtcaaacgcatactgacaattttttaagcttggcgtggatccgatatcaactagatcttgaga

SEQ ID NO: 472 - DNA, 170 bp, Artificial sequence
  Arid1a.2_Stag2.1409
  crRNA array
cgatttcttggctttatatatcttgtggaaaggacgaaacaccgtaatttctactaagtgtagatcccgcgcccccgtcctggggtaatttctactaagtgtagatgctaataactgcggaagggcttttttaagcttggcgtggatccgatatcaactagatcttgaga

SEQ ID NO: 473 - DNA, 170 bp, Artificial sequence
  Arid1a.2_Stag2.4401
  crRNA array
cgatttcttggctttatatatcttgtggaaaggacgaaacaccgtaatttctactaagtgtagatcccgcgcccccgtcctggggtaatttctactaagtgtagattaatcgtccagtggtgtatattttttaagcttggcgtggatccgatatcaactagatcttgaga

SEQ ID NO: 474 - DNA, 170 bp, Artificial sequence
  Arid1a.2_Tbl1xr1.1
  crRNA array
cgatttcttggctttatatatcttgtggaaaggacgaaacaccgtaatttctactaagtgtagatcccgcgcccccgtcctggggtaatttctactaagtgtagatggatgcgcatactggtgaagttttttaagcttggcgtggatccgatatcaactagatcttgaga

SEQ ID NO: 475 - DNA, 170 bp, Artificial sequence
  Arid1a.2_Tbl1xr1.83
  crRNA array
cgatttcttggctttatatatcttgtggaaaggacgaaacaccgtaatttctactaagtgtagatcccgcgcccccgtcctggggtaatttctactaagtgtagatatggtcgacccatcgagtctttttttaagcttggcgtggatccgatatcaactagatcttgaga

SEQ ID NO: 476 - DNA, 170 bp, Artificial sequence
  Arid1a.2_Tgfbr2.290
  crRNA array
cgatttcttggctttatatatcttgtggaaaggacgaaacaccgtaatttctactaagtgtagatcccgcgcccccgtcctggggtaatttctactaagtgtagatcctctcggcgcccgggtaaattttttaagcttggcgtggatccgatatcaactagatcttgaga

SEQ ID NO: 477 - DNA, 170 bp, Artificial sequence
  Arid1a.2_Tgfbr2.292
  crRNA array
cgatttcttggctttatatatcttgtggaaaggacgaaacaccgtaatttctactaagtgtagatcccgcgcccccgtcctggggtaatttctactaagtgtagatcccgggcgccgagagggaaattttttaagcttggcgtggatccgatatcaactagatcttgaga

SEQ ID NO: 478 - DNA, 170 bp, Artificial sequence
  Arid1a.2_Trp53.4
  crRNA array
cgatttcttggctttatatatcttgtggaaaggacgaaacaccgtaatttctactaagtgtagatcccgcgcccccgtcctggggtaatttctactaagtgtagatccctgaactgcccccagggattttttaagcttggcgtggatccgatatcaactagatcttgaga

SEQ ID NO: 479 - DNA, 170 bp, Artificial sequence
  Arid1a.2_Trp53.528
  crRNA array
cgatttcttggctttatatatcttgtggaaaggacgaaacaccgtaatttctactaagtgtagatcccgcgcccccgtcctggggtaatttctactaagtgtagatgctgggccagcagagacctgttttttaagcttggcgtggatccgatatcaactagatcttgaga

SEQ ID NO: 480 - DNA, 170 bp, Artificial sequence
  Arid1a.2_Vhl.1
  crRNA array
cgatttcttggctttatatatcttgtggaaaggacgaaacaccgtaatttctactaagtgtagatcccgcgcccccgtcctggggtaatttctactaagtgtagatagggctcccggcggccatttttttttaagcttggcgtggatccgatatcaactagatcttgaga

SEQ ID NO: 481 - DNA, 170 bp, Artificial sequence
  Arid1a.2_Vhl.151
  crRNA array
cgatttcttggctttatatatcttgtggaaaggacgaaacaccgtaatttctactaagtgtagatcccgcgcccccgtcctggggtaatttctactaagtgtagattagagcactcacccgagggattttttaagcttggcgtggatccgatatcaactagatcttgaga

SEQ ID NO: 482 - DNA, 170 bp, Artificial sequence
  Arid1a.2_Zc3h13.1387
  crRNA array
cgatttcttggctttatatatcttgtggaaaggacgaaacaccgtaatttctactaagtgtagatcccgcgcccccgtcctggggtaatttctactaagtgtagatgtgacgccggtcatgtgactttttttaagcttggcgtggatccgatatcaactagatcttgaga

SEQ ID NO: 483 - DNA, 170 bp, Artificial sequence
  Arid1a.2_Zc3h13.1777
  crRNA array
cgatttcttggctttatatatcttgtggaaaggacgaaacaccgtaatttctactaagtgtagatcccgcgcccccgtcctggggtaatttctactaagtgtagatgatgctgccagtgtagcggcttttttaagcttggcgtggatccgatatcaactagatcttgaga

SEQ ID NO: 484 - DNA, 170 bp, Artificial sequence
  Arid1a.5_Acvr2a.155
  crRNA array
cgatttcttggctttatatatcttgtggaaaggacgaaacaccgtaatttctactaagtgtagatcccgcgctcggccgctgccgtaatttctactaagtgtagatggacctggctaatcaagtatttttttaagcttggcgtggatccgatatcaactagatcttgaga

SEQ ID NO: 485 - DNA, 170 bp, Artificial sequence
  Arid1a.5_Acvr2a.70
  crRNA array
cgatttcttggctttatatatcttgtggaaaggacgaaacaccgtaatttctactaagtgtagatcccgcgctcggccgctgccgtaatttctactaagtgtagatcccgaggcgccggagaagccttttttaagcttggcgtggatccgatatcaactagatcttgaga

SEQ ID NO: 486 - DNA, 170 bp, Artificial sequence
  Arid1a.5_Apc.21
  crRNA array
cgatttcttggctttatatatcttgtggaaaggacgaaacaccgtaatttctactaagtgtagatcccgcgctcggccgctgccgtaatttctactaagtgtagatgtgatccacacgtgtagctgttttttaagcttggcgtggatccgatatcaactagatcttgaga

SEQ ID NO: 487 - DNA, 170 bp, Artificial sequence
  Arid1a.5_Apc.867
  crRNA array
cgatttcttggctttatatatcttgtggaaaggacgaaacaccgtaatttctactaagtgtagatcccgcgctcggccgctgccgtaatttctactaagtgtagatcagtcccaggcggcggaagcttttttaagcttggcgtggatccgatatcaactagatcttgaga

SEQ ID NO: 488 - DNA, 170 bp, Artificial sequence
  Arid1a.5_Arid2.166
  crRNA array
cgatttcttggctttatatatcttgtggaaaggacgaaacaccgtaatttctactaagtgtagatcccgcgctcggccgctgccgtaatttctactaagtgtagataaccgcgatctgggttttttttttttaagcttggcgtggatccgatatcaactagatcttgaga

SEQ ID NO: 489 - DNA, 170 bp, Artificial sequence
  Arid1a.5_Arid2.172
  crRNA array
cgatttcttggctttatatatcttgtggaaaggacgaaacaccgtaatttctactaagtgtagatcccgcgctcggccgctgccgtaatttctactaagtgtagatctggacgagctgcggcagttttttttaagcttggcgtggatccgatatcaactagatcttgaga

SEQ ID NO: 490 - DNA, 170 bp, Artificial sequence
  Arid1a.5_Atm.120
  crRNA array
cgatttcttggctttatatatcttgtggaaaggacgaaacaccgtaatttctactaagtgtagatcccgcgctcggccgctgccgtaatttctactaagtgtagatgacaggtagtcggcagctaattttttaagcttggcgtggatccgatatcaactagatcttgaga

SEQ ID NO: 491 - DNA, 170 bp, Artificial sequence
  Arid1a.5_Atm.997
  crRNA array
cgatttcttggctttatatatcttgtggaaaggacgaaacaccgtaatttctactaagtgtagatcccgcgctcggccgctgccgtaatttctactaagtgtagatgagaaagtctccgaatcgttttttttaagcttggcgtggatccgatatcaactagatcttgaga

SEQ ID NO: 492 - DNA, 170 bp, Artificial sequence
  Arid1a.5_Atrx.249
  crRNA array
cgatttcttggctttatatatcttgtggaaaggacgaaacaccgtaatttctactaagtgtagatcccgcgctcggccgctgccgtaatttctactaagtgtagattagccagtcgctcatatctcttttttaagcttggcgtggatccgatatcaactagatcttgaga

SEQ ID NO: 493 - DNA, 170 bp, Artificial sequence
  Arid1a.5_Atrx.251
  crRNA array
cgatttcttggctttatatatcttgtggaaaggacgaaacaccgtaatttctactaagtgtagatcccgcgctcggccgctgccgtaatttctactaagtgtagatgccagtcgctcatatctctgttttttaagcttggcgtggatccgatatcaactagatcttgaga

SEQ ID NO: 494 - DNA, 170 bp, Artificial sequence
  Arid1a.5_Bcor.203
  crRNA array
cgatttcttggctttatatatcttgtggaaaggacgaaacaccgtaatttctactaagtgtagatcccgcgctcggccgctgccgtaatttctactaagtgtagatccccggagcggagtccaggcttttttaagcttggcgtggatccgatatcaactagatcttgaga

SEQ ID NO: 495 - DNA, 170 bp, Artificial sequence
  Arid1a.5_Bcor.475
  crRNA array
cgatttcttggctttatatatcttgtggaaaggacgaaacaccgtaatttctactaagtgtagatcccgcgctcggccgctgccgtaatttctactaagtgtagattgcaacccctctgtatgggattttttaagcttggcgtggatccgatatcaactagatcttgaga

SEQ ID NO: 496 - DNA, 170 bp, Artificial sequence
  Arid1a.5_Brca1.112
  crRNA array
cgatttcttggctttatatatcttgtggaaaggacgaaacaccgtaatttctactaagtgtagatcccgcgctcggccgctgccgtaatttctactaagtgtagatctagacgctctgtggagactttttttaagcttggcgtggatccgatatcaactagatcttgaga

SEQ ID NO: 497 - DNA, 170 bp, Artificial sequence
  Arid1a.5_Brca1.53
  crRNA array
cgatttcttggctttatatatcttgtggaaaggacgaaacaccgtaatttctactaagtgtagatcccgcgctcggccgctgccgtaatttctactaagtgtagataatgaggaggcgtcgatcatttttttaagcttggcgtggatccgatatcaactagatcttgaga

SEQ ID NO: 498 - DNA, 170 bp, Artificial sequence
  Arid1a.5_Casp8.45
  crRNA array
cgatttcttggctttatatatcttgtggaaaggacgaaacaccgtaatttctactaagtgtagatcccgcgctcggccgctgccgtaatttctactaagtgtagatctaccgagatcctgtgaatgttttttaagcttggcgtggatccgatatcaactagatcttgaga

SEQ ID NO: 499 - DNA, 170 bp, Artificial sequence
  Arid1a.5_Casp8.54
  crRNA array
cgatttcttggctttatatatcttgtggaaaggacgaaacaccgtaatttctactaagtgtagatcccgcgctcggccgctgccgtaatttctactaagtgtagatcagtgcagtcgtcgtaagatttttttaagcttggcgtggatccgatatcaactagatcttgaga

SEQ ID NO: 500 - DNA, 170 bp, Artificial sequence
  Arid1a.5_Cbwd1.84
  crRNA array
cgatttcttggctttatatatcttgtggaaaggacgaaacaccgtaatttctactaagtgtagatcccgcgctcggccgctgccgtaatttctactaagtgtagatcacagcaggtaacatgccgcttttttaagcttggcgtggatccgatatcaactagatcttgaga

SEQ ID NO: 501 - DNA, 170 bp, Artificial sequence
  Arid1a.5_Cbwd1.85
  crRNA array
cgatttcttggctttatatatcttgtggaaaggacgaaacaccgtaatttctactaagtgtagatcccgcgctcggccgctgccgtaatttctactaagtgtagatacagcaggtaacatgccgccttttttaagcttggcgtggatccgatatcaactagatcttgaga

SEQ ID NO: 502 - DNA, 170 bp, Artificial sequence
  Arid1a.5_Cdh1.387
  crRNA array
cgatttcttggctttatatatcttgtggaaaggacgaaacaccgtaatttctactaagtgtagatcccgcgctcggccgctgccgtaatttctactaagtgtagatctcggcgtctgccgggtccgttttttaagcttggcgtggatccgatatcaactagatcttgaga

SEQ ID NO: 503 - DNA, 170 bp, Artificial sequence
  Arid1a.5_Cdh1.58
  crRNA array
cgatttcttggctttatatatcttgtggaaaggacgaaacaccgtaatttctactaagtgtagatcccgcgctcggccgctgccgtaatttctactaagtgtagatctcgtccgcgcccgggactcttttttaagcttggcgtggatccgatatcaactagatcttgaga

SEQ ID NO: 504 - DNA, 170 bp, Artificial sequence
  Arid1a.5_Cdkn2a.647
  crRNA array
cgatttcttggctttatatatcttgtggaaaggacgaaacaccgtaatttctactaagtgtagatcccgcgctcggccgctgccgtaatttctactaagtgtagatgcaatcacgggagggagcagttttttaagcttggcgtggatccgatatcaactagatcttgaga

SEQ ID NO: 505 - DNA, 170 bp, Artificial sequence
  Arid1a.5_Cdkn2a.648
  crRNA array
cgatttcttggctttatatatcttgtggaaaggacgaaacaccgtaatttctactaagtgtagatcccgcgctcggccgctgccgtaatttctactaagtgtagatcaatcacgggagggagcagattttttaagcttggcgtggatccgatatcaactagatcttgaga

SEQ ID NO: 506 - DNA, 170 bp, Artificial sequence
  Arid1a.5_Cic.162
  crRNA array
cgatttcttggctttatatatcttgtggaaaggacgaaacaccgtaatttctactaagtgtagatcccgcgctcggccgctgccgtaatttctactaagtgtagatcgcaggcgcgcccggcggagttttttaagcttggcgtggatccgatatcaactagatcttgaga

SEQ ID NO: 507 - DNA, 170 bp, Artificial sequence
  Arid1a.5_Cic.164
  crRNA array
cgatttcttggctttatatatcttgtggaaaggacgaaacaccgtaatttctactaagtgtagatcccgcgctcggccgctgccgtaatttctactaagtgtagatcgggccctgggccggcggctttttttaagcttggcgtggatccgatatcaactagatcttgaga

SEQ ID NO: 508 - DNA, 170 bp, Artificial sequence
  Arid1a.5_Ctcf.229
  crRNA array
cgatttcttggctttatatatcttgtggaaaggacgaaacaccgtaatttctactaagtgtagatcccgcgctcggccgctgccgtaatttctactaagtgtagatggctggtggctgatagtctgttttttaagcttggcgtggatccgatatcaactagatcttgaga

SEQ ID NO: 509 - DNA, 170 bp, Artificial sequence
  Arid1a.5_Ctcf.809
  crRNA array
cgatttcttggctttatatatcttgtggaaaggacgaaacaccgtaatttctactaagtgtagatcccgcgctcggccgctgccgtaatttctactaagtgtagataagcgctatcatgatcccaattttttaagcttggcgtggatccgatatcaactagatcttgaga

SEQ ID NO: 510 - DNA, 170 bp, Artificial sequence
  Arid1a.5_Elf3.826
  crRNA array
cgatttcttggctttatatatcttgtggaaaggacgaaacaccgtaatttctactaagtgtagatcccgcgctcggccgctgccgtaatttctactaagtgtagattccgagacatcctaatccacttttttaagcttggcgtggatccgatatcaactagatcttgaga

SEQ ID NO: 511 - DNA, 170 bp, Artificial sequence
  Arid1a.5_Elf3.983
  crRNA array
cgatttcttggctttatatatcttgtggaaaggacgaaacaccgtaatttctactaagtgtagatcccgcgctcggccgctgccgtaatttctactaagtgtagattaggccccctaactggaccattttttaagcttggcgtggatccgatatcaactagatcttgaga

SEQ ID NO: 512 - DNA, 170 bp, Artificial sequence
  Arid1a.5_Ep300.310
  crRNA array
cgatttcttggctttatatatcttgtggaaaggacgaaacaccgtaatttctactaagtgtagatcccgcgctcggccgctgccgtaatttctactaagtgtagatatggtacgacagtgaggaagttttttaagcttggcgtggatccgatatcaactagatcttgaga

SEQ ID NO: 513 - DNA, 170 bp, Artificial sequence
  Arid1a.5_Ep300.587
  crRNA array
cgatttcttggctttatatatcttgtggaaaggacgaaacaccgtaatttctactaagtgtagatcccgcgctcggccgctgccgtaatttctactaagtgtagatcgccccggggcccccaaccattttttaagcttggcgtggatccgatatcaactagatcttgaga

SEQ ID NO: 514 - DNA, 170 bp, Artificial sequence
  Arid1a.5_Epha2.126
  crRNA array
cgatttcttggctttatatatcttgtggaaaggacgaaacaccgtaatttctactaagtgtagatcccgcgctcggccgctgccgtaatttctactaagtgtagatcctgtgccgccgcggccgccttttttaagcttggcgtggatccgatatcaactagatcttgaga

SEQ ID NO: 515 - DNA, 170 bp, Artificial sequence
  Arid1a.5_Epha2.5
  crRNA array
cgatttcttggctttatatatcttgtggaaaggacgaaacaccgtaatttctactaagtgtagatcccgcgctcggccgctgccgtaatttctactaagtgtagatcatgagctggcgccacccggttttttaagcttggcgtggatccgatatcaactagatcttgaga

SEQ ID NO: 516 - DNA, 170 bp, Artificial sequence
  Arid1a.5_Fat1.105
  crRNA array
cgatttcttggctttatatatcttgtggaaaggacgaaacaccgtaatttctactaagtgtagatcccgcgctcggccgctgccgtaatttctactaagtgtagataactcgaggtgacaacaagtttttttaagcttggcgtggatccgatatcaactagatcttgaga

SEQ ID NO: 517 - DNA, 170 bp, Artificial sequence
  Arid1a.5_Fat1.122
  crRNA array
cgatttcttggctttatatatcttgtggaaaggacgaaacaccgtaatttctactaagtgtagatcccgcgctcggccgctgccgtaatttctactaagtgtagatccatcgacatggaaacgggattttttaagcttggcgtggatccgatatcaactagatcttgaga

SEQ ID NO: 518 - DNA, 170 bp, Artificial sequence
  Arid1a.5_Fbxw7.21
  crRNA array
cgatttcttggctttatatatcttgtggaaaggacgaaacaccgtaatttctactaagtgtagatcccgcgctcggccgctgccgtaatttctactaagtgtagattaatgtgccgtagaaacccattttttaagcttggcgtggatccgatatcaactagatcttgaga

SEQ ID NO: 519 - DNA, 170 bp, Artificial sequence
  Arid1a.5_Fbxw7.23
  crRNA array
cgatttcttggctttatatatcttgtggaaaggacgaaacaccgtaatttctactaagtgtagatcccgcgctcggccgctgccgtaatttctactaagtgtagatatgtgccgtagaaacccatattttttaagcttggcgtggatccgatatcaactagatcttgaga

SEQ ID NO: 520 - DNA, 170 bp, Artificial sequence
  Arid1a.5_Gata3.34
  crRNA array
cgatttcttggctttatatatcttgtggaaaggacgaaacaccgtaatttctactaagtgtagatcccgcgctcggccgctgccgtaatttctactaagtgtagatctaaactatcccgcaaagatttttttaagcttggcgtggatccgatatcaactagatcttgaga

SEQ ID NO: 521 - DNA, 170 bp, Artificial sequence
  Arid1a.5_Gata3.47
  crRNA array
cgatttcttggctttatatatcttgtggaaaggacgaaacaccgtaatttctactaagtgtagatcccgcgctcggccgctgccgtaatttctactaagtgtagatcgtagtaggacgggacgtggttttttaagcttggcgtggatccgatatcaactagatcttgaga

SEQ ID NO: 522 - DNA, 170 bp, Artificial sequence
  Arid1a.5_H2-Q2.1
  crRNA array
cgatttcttggctttatatatcttgtggaaaggacgaaacaccgtaatttctactaagtgtagatcccgcgctcggccgctgccgtaatttctactaagtgtagatagggcggccaccaacagcagttttttaagcttggcgtggatccgatatcaactagatcttgaga

SEQ ID NO: 523 - DNA, 170 bp, Artificial sequence
  Arid1a.5_H2-Q2.2
  crRNA array
cgatttcttggctttatatatcttgtggaaaggacgaaacaccgtaatttctactaagtgtagatcccgcgctcggccgctgccgtaatttctactaagtgtagattaacctgcgcccgctgctgattttttaagcttggcgtggatccgatatcaactagatcttgaga

SEQ ID NO: 524 - DNA, 170 bp, Artificial sequence
  Arid1a.5_Kdm5c.1878
  crRNA array
cgatttcttggctttatatatcttgtggaaaggacgaaacaccgtaatttctactaagtgtagatcccgcgctcggccgctgccgtaatttctactaagtgtagatagagcacggcacccgcccccttttttaagcttggcgtggatccgatatcaactagatcttgaga

SEQ ID NO: 525 - DNA, 170 bp, Artificial sequence
  Arid1a.5_Kdm5c.1879
  crRNA array
cgatttcttggctttatatatcttgtggaaaggacgaaacaccgtaatttctactaagtgtagatcccgcgctcggccgctgccgtaatttctactaagtgtagatgagcacggcacccgccccccttttttaagcttggcgtggatccgatatcaactagatcttgaga

SEQ ID NO: 526 - DNA, 170 bp, Artificial sequence
  Arid1a.5_Kdm6a.56
  crRNA array
cgatttcttggctttatatatcttgtggaaaggacgaaacaccgtaatttctactaagtgtagatcccgcgctcggccgctgccgtaatttctactaagtgtagattcgctgccgcctctcgcggcttttttaagcttggcgtggatccgatatcaactagatcttgaga

SEQ ID NO: 527 - DNA, 170 bp, Artificial sequence
  Arid1a.5_Kdm6a.57
  crRNA array
cgatttcttggctttatatatcttgtggaaaggacgaaacaccgtaatttctactaagtgtagatcccgcgctcggccgctgccgtaatttctactaagtgtagatcgctgccgcctctcgcggcattttttaagcttggcgtggatccgatatcaactagatcttgaga

SEQ ID NO: 528 - DNA, 170 bp, Artificial sequence
  Arid1a.5_Kmt2b.265
  crRNA array
cgatttcttggctttatatatcttgtggaaaggacgaaacaccgtaatttctactaagtgtagatcccgcgctcggccgctgccgtaatttctactaagtgtagatccccaagtgaagcccacctgttttttaagcttggcgtggatccgatatcaactagatcttgaga

SEQ ID NO: 529 - DNA, 170 bp, Artificial sequence
  Arid1a.5_Kmt2b.298
  crRNA array
cgatttcttggctttatatatcttgtggaaaggacgaaacaccgtaatttctactaagtgtagatcccgcgctcggccgctgccgtaatttctactaagtgtagattccggcagggaccggctggcttttttaagcttggcgtggatccgatatcaactagatcttgaga

SEQ ID NO: 530 - DNA, 170 bp, Artificial sequence
  Arid1a.5_Kmt2c.1962
  crRNA array
cgatttcttggctttatatatcttgtggaaaggacgaaacaccgtaatttctactaagtgtagatcccgcgctcggccgctgccgtaatttctactaagtgtagatgtgacgatctgtgccacaagttttttaagcttggcgtggatccgatatcaactagatcttgaga

SEQ ID NO: 531 - DNA, 170 bp, Artificial sequence
  Arid1a.5_Kmt2c.2236
  crRNA array
cgatttcttggctttatatatcttgtggaaaggacgaaacaccgtaatttctactaagtgtagatcccgcgctcggccgctgccgtaatttctactaagtgtagatactcgacctccacctccctattttttaagcttggcgtggatccgatatcaactagatcttgaga

SEQ ID NO: 532 - DNA, 170 bp, Artificial sequence
  Arid1a.5_Kmt2d.316
  crRNA array
cgatttcttggctttatatatcttgtggaaaggacgaaacaccgtaatttctactaagtgtagatcccgcgctcggccgctgccgtaatttctactaagtgtagatactccaggccacccaggtggttttttaagcttggcgtggatccgatatcaactagatcttgaga

SEQ ID NO: 533 - DNA, 170 bp, Artificial sequence
  Arid1a.5_Kmt2d.416
  crRNA array
cgatttcttggctttatatatcttgtggaaaggacgaaacaccgtaatttctactaagtgtagatcccgcgctcggccgctgccgtaatttctactaagtgtagattaaacccccgggggaagggtttttttaagcttggcgtggatccgatatcaactagatcttgaga

SEQ ID NO: 534 - DNA, 170 bp, Artificial sequence
  Arid1a.5_Map2k4.119
  crRNA array
cgatttcttggctttatatatcttgtggaaaggacgaaacaccgtaatttctactaagtgtagatcccgcgctcggccgctgccgtaatttctactaagtgtagattgctgtgtgggcggccacatttttttaagcttggcgtggatccgatatcaactagatcttgaga

SEQ ID NO: 535 - DNA, 170 bp, Artificial sequence
  Arid1a.5_Map2k4.1261
  crRNA array
cgatttcttggctttatatatcttgtggaaaggacgaaacaccgtaatttctactaagtgtagatcccgcgctcggccgctgccgtaatttctactaagtgtagatgatgtagtaatgcggagtagttttttaagcttggcgtggatccgatatcaactagatcttgaga

SEQ ID NO: 536 - DNA, 170 bp, Artificial sequence
  Arid1a.5_Map3k1.235
  crRNA array
cgatttcttggctttatatatcttgtggaaaggacgaaacaccgtaatttctactaagtgtagatcccgcgctcggccgctgccgtaatttctactaagtgtagataaaacgctactgatcgatcgttttttaagcttggcgtggatccgatatcaactagatcttgaga

SEQ ID NO: 537 - DNA, 170 bp, Artificial sequence
  Arid1a.5_Map3k1.3838
  crRNA array
cgatttcttggctttatatatcttgtggaaaggacgaaacaccgtaatttctactaagtgtagatcccgcgctcggccgctgccgtaatttctactaagtgtagatccaacaacagggccccactattttttaagcttggcgtggatccgatatcaactagatcttgaga

SEQ ID NO: 538 - DNA, 170 bp, Artificial sequence
  Arid1a.5_Mga.1655
  crRNA array
cgatttcttggctttatatatcttgtggaaaggacgaaacaccgtaatttctactaagtgtagatcccgcgctcggccgctgccgtaatttctactaagtgtagatcgagaagtggagagcatattttttttaagcttggcgtggatccgatatcaactagatcttgaga

SEQ ID NO: 539 - DNA, 170 bp, Artificial sequence
  Arid1a.5_Mga.93
  crRNA array
cgatttcttggctttatatatcttgtggaaaggacgaaacaccgtaatttctactaagtgtagatcccgcgctcggccgctgccgtaatttctactaagtgtagatgagaaggctccccataatgtttttttaagcttggcgtggatccgatatcaactagatcttgaga

SEQ ID NO: 540 - DNA, 170 bp, Artificial sequence
  Arid1a.5_Nf1.746
  crRNA array
cgatttcttggctttatatatcttgtggaaaggacgaaacaccgtaatttctactaagtgtagatcccgcgctcggccgctgccgtaatttctactaagtgtagattaagcataatgatgatgccattttttaagcttggcgtggatccgatatcaactagatcttgaga

SEQ ID NO: 541 - DNA, 170 bp, Artificial sequence
  Arid1a.5_Nf1.97
  crRNA array
cgatttcttggctttatatatcttgtggaaaggacgaaacaccgtaatttctactaagtgtagatcccgcgctcggccgctgccgtaatttctactaagtgtagatagcccgctacatgctgatgcttttttaagcttggcgtggatccgatatcaactagatcttgaga

SEQ ID NO: 542 - DNA, 170 bp, Artificial sequence
  Arid1a.5_Nf2.356
  crRNA array
cgatttcttggctttatatatcttgtggaaaggacgaaacaccgtaatttctactaagtgtagatcccgcgctcggccgctgccgtaatttctactaagtgtagatcggagtcatctgatagagatttttttaagcttggcgtggatccgatatcaactagatcttgaga

SEQ ID NO: 543 - DNA, 170 bp, Artificial sequence
  Arid1a.5_Nf2.768
  crRNA array
cgatttcttggctttatatatcttgtggaaaggacgaaacaccgtaatttctactaagtgtagatcccgcgctcggccgctgccgtaatttctactaagtgtagatccgaagccccagtgtccggcttttttaagcttggcgtggatccgatatcaactagatcttgaga

SEQ ID NO: 544 - DNA, 170 bp, Artificial sequence
  Arid1a.5_Notch1.1849
  crRNA array
cgatttcttggctttatatatcttgtggaaaggacgaaacaccgtaatttctactaagtgtagatcccgcgctcggccgctgccgtaatttctactaagtgtagatctggcgggtgggcggcgctgttttttaagcttggcgtggatccgatatcaactagatcttgaga

SEQ ID NO: 545 - DNA, 170 bp, Artificial sequence
  Arid1a.5_Notch1.649
  crRNA array
cgatttcttggctttatatatcttgtggaaaggacgaaacaccgtaatttctactaagtgtagatcccgcgctcggccgctgccgtaatttctactaagtgtagattgggccaacgatgccaggacttttttaagcttggcgtggatccgatatcaactagatcttgaga

SEQ ID NO: 546 - DNA, 170 bp, Artificial sequence
  Arid1a.5_Nsd1.70
  crRNA array
cgatttcttggctttatatatcttgtggaaaggacgaaacaccgtaatttctactaagtgtagatcccgcgctcggccgctgccgtaatttctactaagtgtagatactggtgtggacgatgcagattttttaagcttggcgtggatccgatatcaactagatcttgaga

SEQ ID NO: 547 - DNA, 170 bp, Artificial sequence
  Arid1a.5_Nsd1.90
  crRNA array
cgatttcttggctttatatatcttgtggaaaggacgaaacaccgtaatttctactaagtgtagatcccgcgctcggccgctgccgtaatttctactaagtgtagataggagctaacggcaagaatgttttttaagcttggcgtggatccgatatcaactagatcttgaga

SEQ ID NO: 548 - DNA, 170 bp, Artificial sequence
  Arid1a.5_Pbrm1.1236
  crRNA array
cgatttcttggctttatatatcttgtggaaaggacgaaacaccgtaatttctactaagtgtagatcccgcgctcggccgctgccgtaatttctactaagtgtagatgccgataaaaccaacagccgttttttaagcttggcgtggatccgatatcaactagatcttgaga

SEQ ID NO: 549 - DNA, 170 bp, Artificial sequence
  Arid1a.5_Pbrm1.969
  crRNA array
cgatttcttggctttatatatcttgtggaaaggacgaaacaccgtaatttctactaagtgtagatcccgcgctcggccgctgccgtaatttctactaagtgtagatgagccctaatgaacagctcattttttaagcttggcgtggatccgatatcaactagatcttgaga

SEQ ID NO: 550 - DNA, 170 bp, Artificial sequence
  Arid1a.5_Pik3r1.76
  crRNA array
cgatttcttggctttatatatcttgtggaaaggacgaaacaccgtaatttctactaagtgtagatcccgcgctcggccgctgccgtaatttctactaagtgtagataaaacctatacggcccgcacttttttaagcttggcgtggatccgatatcaactagatcttgaga

SEQ ID NO: 551 - DNA, 170 bp, Artificial sequence
  Arid1a.5_Pik3r1.77
  crRNA array
cgatttcttggctttatatatcttgtggaaaggacgaaacaccgtaatttctactaagtgtagatcccgcgctcggccgctgccgtaatttctactaagtgtagataaacctatacggcccgcactttttttaagcttggcgtggatccgatatcaactagatcttgaga

SEQ ID NO: 552 - DNA, 170 bp, Artificial sequence
  Arid1a.5_Pten.240
  crRNA array
cgatttcttggctttatatatcttgtggaaaggacgaaacaccgtaatttctactaagtgtagatcccgcgctcggccgctgccgtaatttctactaagtgtagattgcatacgctatagctgcttttttttaagcttggcgtggatccgatatcaactagatcttgaga

SEQ ID NO: 553 - DNA, 170 bp, Artificial sequence
  Arid1a.5_Pten.265
  crRNA array
cgatttcttggctttatatatcttgtggaaaggacgaaacaccgtaatttctactaagtgtagatcccgcgctcggccgctgccgtaatttctactaagtgtagataagcgtggtgcgtgacgcacttttttaagcttggcgtggatccgatatcaactagatcttgaga

SEQ ID NO: 554 - DNA, 170 bp, Artificial sequence
  Arid1a.5_Rasa1.1478
  crRNA array
cgatttcttggctttatatatcttgtggaaaggacgaaacaccgtaatttctactaagtgtagatcccgcgctcggccgctgccgtaatttctactaagtgtagatcgataatggtctatgatgtcttttttaagcttggcgtggatccgatatcaactagatcttgaga

SEQ ID NO: 555 - DNA, 170 bp, Artificial sequence
  Arid1a.5_Rasa1.223
  crRNA array
cgatttcttggctttatatatcttgtggaaaggacgaaacaccgtaatttctactaagtgtagatcccgcgctcggccgctgccgtaatttctactaagtgtagattccatggagtatcgtgctcgttttttaagcttggcgtggatccgatatcaactagatcttgaga

SEQ ID NO: 556 - DNA, 170 bp, Artificial sequence
  Arid1a.5_Rb1.211
  crRNA array
cgatttcttggctttatatatcttgtggaaaggacgaaacaccgtaatttctactaagtgtagatcccgcgctcggccgctgccgtaatttctactaagtgtagattctgacatgatcgggtacctttttttaagcttggcgtggatccgatatcaactagatcttgaga

SEQ ID NO: 557 - DNA, 170 bp, Artificial sequence
  Arid1a.5_Rb1.394
  crRNA array
cgatttcttggctttatatatcttgtggaaaggacgaaacaccgtaatttctactaagtgtagatcccgcgctcggccgctgccgtaatttctactaagtgtagatagaaatctcgaagcaggatcttttttaagcttggcgtggatccgatatcaactagatcttgaga

SEQ ID NO: 558 - DNA, 170 bp, Artificial sequence
  Arid1a.5_Rbm10.5
  crRNA array
cgatttcttggctttatatatcttgtggaaaggacgaaacaccgtaatttctactaagtgtagatcccgcgctcggccgctgccgtaatttctactaagtgtagatacgaaacctgaacccacacattttttaagcttggcgtggatccgatatcaactagatcttgaga

SEQ ID NO: 559 - DNA, 170 bp, Artificial sequence
  Arid1a.5_Rbm10.6
  crRNA array
cgatttcttggctttatatatcttgtggaaaggacgaaacaccgtaatttctactaagtgtagatcccgcgctcggccgctgccgtaatttctactaagtgtagatcgaaacctgaacccacacagttttttaagcttggcgtggatccgatatcaactagatcttgaga

SEQ ID NO: 560 - DNA, 170 bp, Artificial sequence
  Arid1a.5_Rnf43.1920
  crRNA array
cgatttcttggctttatatatcttgtggaaaggacgaaacaccgtaatttctactaagtgtagatcccgcgctcggccgctgccgtaatttctactaagtgtagatatccccgtgccgtggactccttttttaagcttggcgtggatccgatatcaactagatcttgaga

SEQ ID NO: 561 - DNA, 170 bp, Artificial sequence
  Arid1a.5_Rnf43.39
  crRNA array
cgatttcttggctttatatatcttgtggaaaggacgaaacaccgtaatttctactaagtgtagatcccgcgctcggccgctgccgtaatttctactaagtgtagatcaaggggatcactctgataattttttaagcttggcgtggatccgatatcaactagatcttgaga

SEQ ID NO: 562 - DNA, 170 bp, Artificial sequence
  Arid1a.5_Runx1.204
  crRNA array
cgatttcttggctttatatatcttgtggaaaggacgaaacaccgtaatttctactaagtgtagatcccgcgctcggccgctgccgtaatttctactaagtgtagattaaataagtccagccgttttttttttaagcttggcgtggatccgatatcaactagatcttgaga

SEQ ID NO: 563 - DNA, 170 bp, Artificial sequence
  Arid1a.5_Runx1.81
  crRNA array
cgatttcttggctttatatatcttgtggaaaggacgaaacaccgtaatttctactaagtgtagatcccgcgctcggccgctgccgtaatttctactaagtgtagataggacgcgtatgggaattttttttttaagcttggcgtggatccgatatcaactagatcttgaga

SEQ ID NO: 564 - DNA, 170 bp, Artificial sequence
  Arid1a.5_Setd2.143
  crRNA array
cgatttcttggctttatatatcttgtggaaaggacgaaacaccgtaatttctactaagtgtagatcccgcgctcggccgctgccgtaatttctactaagtgtagatgcacaaccacaacagactggttttttaagcttggcgtggatccgatatcaactagatcttgaga

SEQ ID NO: 565 - DNA, 170 bp, Artificial sequence
  Arid1a.5_Setd2.508
  crRNA array
cgatttcttggctttatatatcttgtggaaaggacgaaacaccgtaatttctactaagtgtagatcccgcgctcggccgctgccgtaatttctactaagtgtagattacgatcccgagcacccgacttttttaagcttggcgtggatccgatatcaactagatcttgaga

SEQ ID NO: 566 - DNA, 170 bp, Artificial sequence
  Arid1a.5_Smad4.3038
  crRNA array
cgatttcttggctttatatatcttgtggaaaggacgaaacaccgtaatttctactaagtgtagatcccgcgctcggccgctgccgtaatttctactaagtgtagatatctgcggcagtgtcaccggttttttaagcttggcgtggatccgatatcaactagatcttgaga

SEQ ID NO: 567 - DNA, 170 bp, Artificial sequence
  Arid1a.5_Smad4.39
  crRNA array
cgatttcttggctttatatatcttgtggaaaggacgaaacaccgtaatttctactaagtgtagatcccgcgctcggccgctgccgtaatttctactaagtgtagatagtcaaacgcatactgacaattttttaagcttggcgtggatccgatatcaactagatcttgaga

SEQ ID NO: 568 - DNA, 170 bp, Artificial sequence
  Arid1a.5_Stag2.1409
  crRNA array
cgatttcttggctttatatatcttgtggaaaggacgaaacaccgtaatttctactaagtgtagatcccgcgctcggccgctgccgtaatttctactaagtgtagatgctaataactgcggaagggcttttttaagcttggcgtggatccgatatcaactagatcttgaga

SEQ ID NO: 569 - DNA, 170 bp, Artificial sequence
  Arid1a.5_Stag2.4401
  crRNA array
cgatttcttggctttatatatcttgtggaaaggacgaaacaccgtaatttctactaagtgtagatcccgcgctcggccgctgccgtaatttctactaagtgtagattaatcgtccagtggtgtatattttttaagcttggcgtggatccgatatcaactagatcttgaga

SEQ ID NO: 570 - DNA, 170 bp, Artificial sequence
  Arid1a.5_Tbl1xr1.1
  crRNA array
cgatttcttggctttatatatcttgtggaaaggacgaaacaccgtaatttctactaagtgtagatcccgcgctcggccgctgccgtaatttctactaagtgtagatggatgcgcatactggtgaagttttttaagcttggcgtggatccgatatcaactagatcttgaga

SEQ ID NO: 571 - DNA, 170 bp, Artificial sequence
  Arid1a.5_Tbl1xr1.83
  crRNA array
cgatttcttggctttatatatcttgtggaaaggacgaaacaccgtaatttctactaagtgtagatcccgcgctcggccgctgccgtaatttctactaagtgtagatatggtcgacccatcgagtctttttttaagcttggcgtggatccgatatcaactagatcttgaga

SEQ ID NO: 572 - DNA, 170 bp, Artificial sequence
  Arid1a.5_Tgfbr2.290
  crRNA array
cgatttcttggctttatatatcttgtggaaaggacgaaacaccgtaatttctactaagtgtagatcccgcgctcggccgctgccgtaatttctactaagtgtagatcctctcggcgcccgggtaaattttttaagcttggcgtggatccgatatcaactagatcttgaga

SEQ ID NO: 573 - DNA, 170 bp, Artificial sequence
  Arid1a.5_Tgfbr2.292
  crRNA array
cgatttcttggctttatatatcttgtggaaaggacgaaacaccgtaatttctactaagtgtagatcccgcgctcggccgctgccgtaatttctactaagtgtagatcccgggcgccgagagggaaattttttaagcttggcgtggatccgatatcaactagatcttgaga

SEQ ID NO: 574 - DNA, 170 bp, Artificial sequence
  Arid1a.5_Trp53.4
  crRNA array
cgatttcttggctttatatatcttgtggaaaggacgaaacaccgtaatttctactaagtgtagatcccgcgctcggccgctgccgtaatttctactaagtgtagatccctgaactgcccccagggattttttaagcttggcgtggatccgatatcaactagatcttgaga

SEQ ID NO: 575 - DNA, 170 bp, Artificial sequence
  Arid1a.5_Trp53.528
  crRNA array
cgatttcttggctttatatatcttgtggaaaggacgaaacaccgtaatttctactaagtgtagatcccgcgctcggccgctgccgtaatttctactaagtgtagatgctgggccagcagagacctgttttttaagcttggcgtggatccgatatcaactagatcttgaga

SEQ ID NO: 576 - DNA, 170 bp, Artificial sequence
  Arid1a.5_Vhl.1
  crRNA array
cgatttcttggctttatatatcttgtggaaaggacgaaacaccgtaatttctactaagtgtagatcccgcgctcggccgctgccgtaatttctactaagtgtagatagggctcccggcggccatttttttttaagcttggcgtggatccgatatcaactagatcttgaga

SEQ ID NO: 577 - DNA, 170 bp, Artificial sequence
  Arid1a.5_Vhl.151
  crRNA array
cgatttcttggctttatatatcttgtggaaaggacgaaacaccgtaatttctactaagtgtagatcccgcgctcggccgctgccgtaatttctactaagtgtagattagagcactcacccgagggattttttaagcttggcgtggatccgatatcaactagatcttgaga

SEQ ID NO: 578 - DNA, 170 bp, Artificial sequence
  Arid1a.5_Zc3h13.1387
  crRNA array
cgatttcttggctttatatatcttgtggaaaggacgaaacaccgtaatttctactaagtgtagatcccgcgctcggccgctgccgtaatttctactaagtgtagatgtgacgccggtcatgtgactttttttaagcttggcgtggatccgatatcaactagatcttgaga

SEQ ID NO: 579 - DNA, 170 bp, Artificial sequence
  Arid1a.5_Zc3h13.1777
  crRNA array
cgatttcttggctttatatatcttgtggaaaggacgaaacaccgtaatttctactaagtgtagatcccgcgctcggccgctgccgtaatttctactaagtgtagatgatgctgccagtgtagcggcttttttaagcttggcgtggatccgatatcaactagatcttgaga

SEQ ID NO: 580 - DNA, 170 bp, Artificial sequence
  Arid2.166_Acvr2a.155
  crRNA array
cgatttcttggctttatatatcttgtggaaaggacgaaacaccgtaatttctactaagtgtagataaccgcgatctgggtttttttaatttctactaagtgtagatggacctggctaatcaagtatttttttaagcttggcgtggatccgatatcaactagatcttgaga

SEQ ID NO: 581 - DNA, 170 bp, Artificial sequence
  Arid2.166_Acvr2a.70
  crRNA array
cgatttcttggctttatatatcttgtggaaaggacgaaacaccgtaatttctactaagtgtagataaccgcgatctgggtttttttaatttctactaagtgtagatcccgaggcgccggagaagccttttttaagcttggcgtggatccgatatcaactagatcttgaga

SEQ ID NO: 582 - DNA, 170 bp, Artificial sequence
  Arid2.166_Apc.21
  crRNA array
cgatttcttggctttatatatcttgtggaaaggacgaaacaccgtaatttctactaagtgtagataaccgcgatctgggtttttttaatttctactaagtgtagatgtgatccacacgtgtagctgttttttaagcttggcgtggatccgatatcaactagatcttgaga

SEQ ID NO: 583 - DNA, 170 bp, Artificial sequence
  Arid2.166_Apc.867
  crRNA array
cgatttcttggctttatatatcttgtggaaaggacgaaacaccgtaatttctactaagtgtagataaccgcgatctgggtttttttaatttctactaagtgtagatcagtcccaggcggcggaagcttttttaagcttggcgtggatccgatatcaactagatcttgaga

SEQ ID NO: 584 - DNA, 170 bp, Artificial sequence
  Arid2.166_Arid1a.2
  crRNA array
cgatttcttggctttatatatcttgtggaaaggacgaaacaccgtaatttctactaagtgtagataaccgcgatctgggtttttttaatttctactaagtgtagatcccgcgcccccgtcctggggttttttaagcttggcgtggatccgatatcaactagatcttgaga

SEQ ID NO: 585 - DNA, 170 bp, Artificial sequence
  Arid2.166_Arid1a.5
  crRNA array
cgatttcttggctttatatatcttgtggaaaggacgaaacaccgtaatttctactaagtgtagataaccgcgatctgggtttttttaatttctactaagtgtagatcccgcgctcggccgctgccgttttttaagcttggcgtggatccgatatcaactagatcttgaga

SEQ ID NO: 586 - DNA, 170 bp, Artificial sequence
  Arid2.166_Atm.120
  crRNA array
cgatttcttggctttatatatcttgtggaaaggacgaaacaccgtaatttctactaagtgtagataaccgcgatctgggtttttttaatttctactaagtgtagatgacaggtagtcggcagctaattttttaagcttggcgtggatccgatatcaactagatcttgaga

SEQ ID NO: 587 - DNA, 170 bp, Artificial sequence
  Arid2.166_Atm.997
  crRNA array
cgatttcttggctttatatatcttgtggaaaggacgaaacaccgtaatttctactaagtgtagataaccgcgatctgggtttttttaatttctactaagtgtagatgagaaagtctccgaatcgttttttttaagcttggcgtggatccgatatcaactagatcttgaga

SEQ ID NO: 588 - DNA, 170 bp, Artificial sequence
  Arid2.166_Atrx.249
  crRNA array
cgatttcttggctttatatatcttgtggaaaggacgaaacaccgtaatttctactaagtgtagataaccgcgatctgggtttttttaatttctactaagtgtagattagccagtcgctcatatctcttttttaagcttggcgtggatccgatatcaactagatcttgaga

SEQ ID NO: 589 - DNA, 170 bp, Artificial sequence
  Arid2.166_Atrx.251
  crRNA array
cgatttcttggctttatatatcttgtggaaaggacgaaacaccgtaatttctactaagtgtagataaccgcgatctgggtttttttaatttctactaagtgtagatgccagtcgctcatatctctgttttttaagcttggcgtggatccgatatcaactagatcttgaga

SEQ ID NO: 590 - DNA, 170 bp, Artificial sequence
  Arid2.166_Bcor.203
  crRNA array
cgatttcttggctttatatatcttgtggaaaggacgaaacaccgtaatttctactaagtgtagataaccgcgatctgggtttttttaatttctactaagtgtagatccccggagcggagtccaggcttttttaagcttggcgtggatccgatatcaactagatcttgaga

SEQ ID NO: 591 - DNA, 170 bp, Artificial sequence
  Arid2.166_Bcor.475
  crRNA array
cgatttcttggctttatatatcttgtggaaaggacgaaacaccgtaatttctactaagtgtagataaccgcgatctgggtttttttaatttctactaagtgtagattgcaacccctctgtatgggattttttaagcttggcgtggatccgatatcaactagatcttgaga

SEQ ID NO: 592 - DNA, 170 bp, Artificial sequence
  Arid2.166_Brca1.112
  crRNA array
cgatttcttggctttatatatcttgtggaaaggacgaaacaccgtaatttctactaagtgtagataaccgcgatctgggtttttttaatttctactaagtgtagatctagacgctctgtggagactttttttaagcttggcgtggatccgatatcaactagatcttgaga

SEQ ID NO: 593 - DNA, 170 bp, Artificial sequence
  Arid2.166_Brca1.53
  crRNA array
cgatttcttggctttatatatcttgtggaaaggacgaaacaccgtaatttctactaagtgtagataaccgcgatctgggtttttttaatttctactaagtgtagataatgaggaggcgtcgatcatttttttaagcttggcgtggatccgatatcaactagatcttgaga

SEQ ID NO: 594 - DNA, 170 bp, Artificial sequence
  Arid2.166_Casp8.45
  crRNA array
cgatttcttggctttatatatcttgtggaaaggacgaaacaccgtaatttctactaagtgtagataaccgcgatctgggtttttttaatttctactaagtgtagatctaccgagatcctgtgaatgttttttaagcttggcgtggatccgatatcaactagatcttgaga

SEQ ID NO: 595 - DNA, 170 bp, Artificial sequence
  Arid2.166_Casp8.54
  crRNA array
cgatttcttggctttatatatcttgtggaaaggacgaaacaccgtaatttctactaagtgtagataaccgcgatctgggtttttttaatttctactaagtgtagatcagtgcagtcgtcgtaagatttttttaagcttggcgtggatccgatatcaactagatcttgaga

SEQ ID NO: 596 - DNA, 170 bp, Artificial sequence
  Arid2.166_Cbwd1.84
  crRNA array
cgatttcttggctttatatatcttgtggaaaggacgaaacaccgtaatttctactaagtgtagataaccgcgatctgggtttttttaatttctactaagtgtagatcacagcaggtaacatgccgcttttttaagcttggcgtggatccgatatcaactagatcttgaga

SEQ ID NO: 597 - DNA, 170 bp, Artificial sequence
  Arid2.166_Cbwd1.85
  crRNA array
cgatttcttggctttatatatcttgtggaaaggacgaaacaccgtaatttctactaagtgtagataaccgcgatctgggtttttttaatttctactaagtgtagatacagcaggtaacatgccgccttttttaagcttggcgtggatccgatatcaactagatcttgaga

SEQ ID NO: 598 - DNA, 170 bp, Artificial sequence
  Arid2.166_Cdh1.387
  crRNA array
cgatttcttggctttatatatcttgtggaaaggacgaaacaccgtaatttctactaagtgtagataaccgcgatctgggtttttttaatttctactaagtgtagatctcggcgtctgccgggtccgttttttaagcttggcgtggatccgatatcaactagatcttgaga

SEQ ID NO: 599 - DNA, 170 bp, Artificial sequence
  Arid2.166_Cdh1.58
  crRNA array
cgatttcttggctttatatatcttgtggaaaggacgaaacaccgtaatttctactaagtgtagataaccgcgatctgggtttttttaatttctactaagtgtagatctcgtccgcgcccgggactcttttttaagcttggcgtggatccgatatcaactagatcttgaga

SEQ ID NO: 600 - DNA, 170 bp, Artificial sequence
  Arid2.166_Cdkn2a.647
  crRNA array
cgatttcttggctttatatatcttgtggaaaggacgaaacaccgtaatttctactaagtgtagataaccgcgatctgggtttttttaatttctactaagtgtagatgcaatcacgggagggagcagttttttaagcttggcgtggatccgatatcaactagatcttgaga

SEQ ID NO: 601 - DNA, 170 bp, Artificial sequence
  Arid2.166_Cdkn2a.648
  crRNA array
cgatttcttggctttatatatcttgtggaaaggacgaaacaccgtaatttctactaagtgtagataaccgcgatctgggtttttttaatttctactaagtgtagatcaatcacgggagggagcagattttttaagcttggcgtggatccgatatcaactagatcttgaga

SEQ ID NO: 602 - DNA, 170 bp, Artificial sequence
  Arid2.166_Cic.162
  crRNA array
cgatttcttggctttatatatcttgtggaaaggacgaaacaccgtaatttctactaagtgtagataaccgcgatctgggtttttttaatttctactaagtgtagatcgcaggcgcgcccggcggagttttttaagcttggcgtggatccgatatcaactagatcttgaga

SEQ ID NO: 603 - DNA, 170 bp, Artificial sequence
  Arid2.166_Cic.164
  crRNA array
cgatttcttggctttatatatcttgtggaaaggacgaaacaccgtaatttctactaagtgtagataaccgcgatctgggtttttttaatttctactaagtgtagatcgggccctgggccggcggctttttttaagcttggcgtggatccgatatcaactagatcttgaga

SEQ ID NO: 604 - DNA, 170 bp, Artificial sequence
  Arid2.166_Ctcf.229
  crRNA array
cgatttcttggctttatatatcttgtggaaaggacgaaacaccgtaatttctactaagtgtagataaccgcgatctgggtttttttaatttctactaagtgtagatggctggtggctgatagtctgttttttaagcttggcgtggatccgatatcaactagatcttgaga

SEQ ID NO: 605 - DNA, 170 bp, Artificial sequence
  Arid2.166_Ctcf.809
  crRNA array
cgatttcttggctttatatatcttgtggaaaggacgaaacaccgtaatttctactaagtgtagataaccgcgatctgggtttttttaatttctactaagtgtagataagcgctatcatgatcccaattttttaagcttggcgtggatccgatatcaactagatcttgaga

SEQ ID NO: 606 - DNA, 170 bp, Artificial sequence
  Arid2.166_Elf3.826
  crRNA array
cgatttcttggctttatatatcttgtggaaaggacgaaacaccgtaatttctactaagtgtagataaccgcgatctgggtttttttaatttctactaagtgtagattccgagacatcctaatccacttttttaagcttggcgtggatccgatatcaactagatcttgaga

SEQ ID NO: 607 - DNA, 170 bp, Artificial sequence
  Arid2.166_Elf3.983
  crRNA array
cgatttcttggctttatatatcttgtggaaaggacgaaacaccgtaatttctactaagtgtagataaccgcgatctgggtttttttaatttctactaagtgtagattaggccccctaactggaccattttttaagcttggcgtggatccgatatcaactagatcttgaga

SEQ ID NO: 608 - DNA, 170 bp, Artificial sequence
  Arid2.166_Ep300.310
  crRNA array
cgatttcttggctttatatatcttgtggaaaggacgaaacaccgtaatttctactaagtgtagataaccgcgatctgggtttttttaatttctactaagtgtagatatggtacgacagtgaggaagttttttaagcttggcgtggatccgatatcaactagatcttgaga

SEQ ID NO: 609 - DNA, 170 bp, Artificial sequence
  Arid2.166_Ep300.587
  crRNA array
cgatttcttggctttatatatcttgtggaaaggacgaaacaccgtaatttctactaagtgtagataaccgcgatctgggtttttttaatttctactaagtgtagatcgccccggggcccccaaccattttttaagcttggcgtggatccgatatcaactagatcttgaga

SEQ ID NO: 610 - DNA, 170 bp, Artificial sequence
  Arid2.166_Epha2.126
  crRNA array
cgatttcttggctttatatatcttgtggaaaggacgaaacaccgtaatttctactaagtgtagataaccgcgatctgggtttttttaatttctactaagtgtagatcctgtgccgccgcggccgccttttttaagcttggcgtggatccgatatcaactagatcttgaga

SEQ ID NO: 611 - DNA, 170 bp, Artificial sequence
  Arid2.166_Epha2.5
  crRNA array
cgatttcttggctttatatatcttgtggaaaggacgaaacaccgtaatttctactaagtgtagataaccgcgatctgggtttttttaatttctactaagtgtagatcatgagctggcgccacccggttttttaagcttggcgtggatccgatatcaactagatcttgaga

SEQ ID NO: 612 - DNA, 170 bp, Artificial sequence
  Arid2.166_Fat1.105
  crRNA array
cgatttcttggctttatatatcttgtggaaaggacgaaacaccgtaatttctactaagtgtagataaccgcgatctgggtttttttaatttctactaagtgtagataactcgaggtgacaacaagtttttttaagcttggcgtggatccgatatcaactagatcttgaga

SEQ ID NO: 613 - DNA, 170 bp, Artificial sequence
  Arid2.166_Fat1.122
  crRNA array
cgatttcttggctttatatatcttgtggaaaggacgaaacaccgtaatttctactaagtgtagataaccgcgatctgggtttttttaatttctactaagtgtagatccatcgacatggaaacgggattttttaagcttggcgtggatccgatatcaactagatcttgaga

SEQ ID NO: 614 - DNA, 170 bp, Artificial sequence
  Arid2.166_Fbxw7.21
  crRNA array
cgatttcttggctttatatatcttgtggaaaggacgaaacaccgtaatttctactaagtgtagataaccgcgatctgggtttttttaatttctactaagtgtagattaatgtgccgtagaaacccattttttaagcttggcgtggatccgatatcaactagatcttgaga

SEQ ID NO: 615 - DNA, 170 bp, Artificial sequence
  Arid2.166_Fbxw7.23
  crRNA array
cgatttcttggctttatatatcttgtggaaaggacgaaacaccgtaatttctactaagtgtagataaccgcgatctgggtttttttaatttctactaagtgtagatatgtgccgtagaaacccatattttttaagcttggcgtggatccgatatcaactagatcttgaga

SEQ ID NO: 616 - DNA, 170 bp, Artificial sequence
  Arid2.166_Gata3.34
  crRNA array
cgatttcttggctttatatatcttgtggaaaggacgaaacaccgtaatttctactaagtgtagataaccgcgatctgggtttttttaatttctactaagtgtagatctaaactatcccgcaaagatttttttaagcttggcgtggatccgatatcaactagatcttgaga

SEQ ID NO: 617 - DNA, 170 bp, Artificial sequence
  Arid2.166_Gata3.47
  crRNA array
cgatttcttggctttatatatcttgtggaaaggacgaaacaccgtaatttctactaagtgtagataaccgcgatctgggtttttttaatttctactaagtgtagatcgtagtaggacgggacgtggttttttaagcttggcgtggatccgatatcaactagatcttgaga

SEQ ID NO: 618 - DNA, 170 bp, Artificial sequence
  Arid2.166_H2-Q2.1
  crRNA array
cgatttcttggctttatatatcttgtggaaaggacgaaacaccgtaatttctactaagtgtagataaccgcgatctgggtttttttaatttctactaagtgtagatagggcggccaccaacagcagttttttaagcttggcgtggatccgatatcaactagatcttgaga

SEQ ID NO: 619 - DNA, 170 bp, Artificial sequence
  Arid2.166_H2-Q2.2
  crRNA array
cgatttcttggctttatatatcttgtggaaaggacgaaacaccgtaatttctactaagtgtagataaccgcgatctgggtttttttaatttctactaagtgtagattaacctgcgcccgctgctgattttttaagcttggcgtggatccgatatcaactagatcttgaga

SEQ ID NO: 620 - DNA, 170 bp, Artificial sequence
  Arid2.166_Kdm5c.1878
  crRNA array
cgatttcttggctttatatatcttgtggaaaggacgaaacaccgtaatttctactaagtgtagataaccgcgatctgggtttttttaatttctactaagtgtagatagagcacggcacccgcccccttttttaagcttggcgtggatccgatatcaactagatcttgaga

SEQ ID NO: 621 - DNA, 170 bp, Artificial sequence
  Arid2.166_Kdm5c.1879
  crRNA array
cgatttcttggctttatatatcttgtggaaaggacgaaacaccgtaatttctactaagtgtagataaccgcgatctgggtttttttaatttctactaagtgtagatgagcacggcacccgccccccttttttaagcttggcgtggatccgatatcaactagatcttgaga

SEQ ID NO: 622 - DNA, 170 bp, Artificial sequence
  Arid2.166_Kdm6a.56
  crRNA array
cgatttcttggctttatatatcttgtggaaaggacgaaacaccgtaatttctactaagtgtagataaccgcgatctgggtttttttaatttctactaagtgtagattcgctgccgcctctcgcggcttttttaagcttggcgtggatccgatatcaactagatcttgaga

SEQ ID NO: 623 - DNA, 170 bp, Artificial sequence
  Arid2.166_Kdm6a.57
  crRNA array
cgatttcttggctttatatatcttgtggaaaggacgaaacaccgtaatttctactaagtgtagataaccgcgatctgggtttttttaatttctactaagtgtagatcgctgccgcctctcgcggcattttttaagcttggcgtggatccgatatcaactagatcttgaga

SEQ ID NO: 624 - DNA, 170 bp, Artificial sequence
  Arid2.166_Kmt2b.265
  crRNA array
cgatttcttggctttatatatcttgtggaaaggacgaaacaccgtaatttctactaagtgtagataaccgcgatctgggtttttttaatttctactaagtgtagatccccaagtgaagcccacctgttttttaagcttggcgtggatccgatatcaactagatcttgaga

SEQ ID NO: 625 - DNA, 170 bp, Artificial sequence
  Arid2.166_Kmt2b.298
  crRNA array
cgatttcttggctttatatatcttgtggaaaggacgaaacaccgtaatttctactaagtgtagataaccgcgatctgggtttttttaatttctactaagtgtagattccggcagggaccggctggcttttttaagcttggcgtggatccgatatcaactagatcttgaga

SEQ ID NO: 626 - DNA, 170 bp, Artificial sequence
  Arid2.166_Kmt2c.1962
  crRNA array
cgatttcttggctttatatatcttgtggaaaggacgaaacaccgtaatttctactaagtgtagataaccgcgatctgggtttttttaatttctactaagtgtagatgtgacgatctgtgccacaagttttttaagcttggcgtggatccgatatcaactagatcttgaga

SEQ ID NO: 627 - DNA, 170 bp, Artificial sequence
  Arid2.166_Kmt2c.2236
  crRNA array
cgatttcttggctttatatatcttgtggaaaggacgaaacaccgtaatttctactaagtgtagataaccgcgatctgggtttttttaatttctactaagtgtagatactcgacctccacctccctattttttaagcttggcgtggatccgatatcaactagatcttgaga

SEQ ID NO: 628 - DNA, 170 bp, Artificial sequence
  Arid2.166_Kmt2d.316
  crRNA array
cgatttcttggctttatatatcttgtggaaaggacgaaacaccgtaatttctactaagtgtagataaccgcgatctgggtttttttaatttctactaagtgtagatactccaggccacccaggtggttttttaagcttggcgtggatccgatatcaactagatcttgaga

SEQ ID NO: 629 - DNA, 170 bp, Artificial sequence
  Arid2.166_Kmt2d.416
  crRNA array
cgatttcttggctttatatatcttgtggaaaggacgaaacaccgtaatttctactaagtgtagataaccgcgatctgggtttttttaatttctactaagtgtagattaaacccccgggggaagggtttttttaagcttggcgtggatccgatatcaactagatcttgaga

SEQ ID NO: 630 - DNA, 170 bp, Artificial sequence
  Arid2.166_Map2k4.119
  crRNA array
cgatttcttggctttatatatcttgtggaaaggacgaaacaccgtaatttctactaagtgtagataaccgcgatctgggtttttttaatttctactaagtgtagattgctgtgtgggcggccacatttttttaagcttggcgtggatccgatatcaactagatcttgaga

SEQ ID NO: 631 - DNA, 170 bp, Artificial sequence
  Arid2.166_Map2k4.1261
  crRNA array
cgatttcttggctttatatatcttgtggaaaggacgaaacaccgtaatttctactaagtgtagataaccgcgatctgggtttttttaatttctactaagtgtagatgatgtagtaatgcggagtagttttttaagcttggcgtggatccgatatcaactagatcttgaga

SEQ ID NO: 632 - DNA, 170 bp, Artificial sequence
  Arid2.166_Map3k1.235
  crRNA array
cgatttcttggctttatatatcttgtggaaaggacgaaacaccgtaatttctactaagtgtagataaccgcgatctgggtttttttaatttctactaagtgtagataaaacgctactgatcgatcgttttttaagcttggcgtggatccgatatcaactagatcttgaga

SEQ ID NO: 633 - DNA, 170 bp, Artificial sequence
  Arid2.166_Map3k1.3838
  crRNA array
cgatttcttggctttatatatcttgtggaaaggacgaaacaccgtaatttctactaagtgtagataaccgcgatctgggtttttttaatttctactaagtgtagatccaacaacagggccccactattttttaagcttggcgtggatccgatatcaactagatcttgaga

SEQ ID NO: 634 - DNA, 170 bp, Artificial sequence
  Arid2.166_Mga.1655
  crRNA array
cgatttcttggctttatatatcttgtggaaaggacgaaacaccgtaatttctactaagtgtagataaccgcgatctgggtttttttaatttctactaagtgtagatcgagaagtggagagcatattttttttaagcttggcgtggatccgatatcaactagatcttgaga

SEQ ID NO: 635 - DNA, 170 bp, Artificial sequence
  Arid2.166_Mga.93
  crRNA array
cgatttcttggctttatatatcttgtggaaaggacgaaacaccgtaatttctactaagtgtagataaccgcgatctgggtttttttaatttctactaagtgtagatgagaaggctccccataatgtttttttaagcttggcgtggatccgatatcaactagatcttgaga

SEQ ID NO: 636 - DNA, 170 bp, Artificial sequence
  Arid2.166_Nf1.746
  crRNA array
cgatttcttggctttatatatcttgtggaaaggacgaaacaccgtaatttctactaagtgtagataaccgcgatctgggtttttttaatttctactaagtgtagattaagcataatgatgatgccattttttaagcttggcgtggatccgatatcaactagatcttgaga

SEQ ID NO: 637 - DNA, 170 bp, Artificial sequence
  Arid2.166_Nf1.97
  crRNA array
cgatttcttggctttatatatcttgtggaaaggacgaaacaccgtaatttctactaagtgtagataaccgcgatctgggtttttttaatttctactaagtgtagatagcccgctacatgctgatgcttttttaagcttggcgtggatccgatatcaactagatcttgaga

SEQ ID NO: 638 - DNA, 170 bp, Artificial sequence
  Arid2.166_Nf2.356
  crRNA array
cgatttcttggctttatatatcttgtggaaaggacgaaacaccgtaatttctactaagtgtagataaccgcgatctgggtttttttaatttctactaagtgtagatcggagtcatctgatagagatttttttaagcttggcgtggatccgatatcaactagatcttgaga

SEQ ID NO: 639 - DNA, 170 bp, Artificial sequence
  Arid2.166_Nf2.768
  crRNA array
cgatttcttggctttatatatcttgtggaaaggacgaaacaccgtaatttctactaagtgtagataaccgcgatctgggtttttttaatttctactaagtgtagatccgaagccccagtgtccggcttttttaagcttggcgtggatccgatatcaactagatcttgaga

SEQ ID NO: 640 - DNA, 170 bp, Artificial sequence
  Arid2.166_Notch1.1849
  crRNA array
cgatttcttggctttatatatcttgtggaaaggacgaaacaccgtaatttctactaagtgtagataaccgcgatctgggtttttttaatttctactaagtgtagatctggcgggtgggcggcgctgttttttaagcttggcgtggatccgatatcaactagatcttgaga

SEQ ID NO: 641 - DNA, 170 bp, Artificial sequence
  Arid2.166_Notch1.649
  crRNA array
cgatttcttggctttatatatcttgtggaaaggacgaaacaccgtaatttctactaagtgtagataaccgcgatctgggtttttttaatttctactaagtgtagattgggccaacgatgccaggacttttttaagcttggcgtggatccgatatcaactagatcttgaga

SEQ ID NO: 642 - DNA, 170 bp, Artificial sequence
  Arid2.166_Nsd1.70
  crRNA array
cgatttcttggctttatatatcttgtggaaaggacgaaacaccgtaatttctactaagtgtagataaccgcgatctgggtttttttaatttctactaagtgtagatactggtgtggacgatgcagattttttaagcttggcgtggatccgatatcaactagatcttgaga

SEQ ID NO: 643 - DNA, 170 bp, Artificial sequence
  Arid2.166_Nsd1.90
  crRNA array
cgatttcttggctttatatatcttgtggaaaggacgaaacaccgtaatttctactaagtgtagataaccgcgatctgggtttttttaatttctactaagtgtagataggagctaacggcaagaatgttttttaagcttggcgtggatccgatatcaactagatcttgaga

SEQ ID NO: 644 - DNA, 170 bp, Artificial sequence
  Arid2.166_Pbrm1.1236
  crRNA array
cgatttcttggctttatatatcttgtggaaaggacgaaacaccgtaatttctactaagtgtagataaccgcgatctgggtttttttaatttctactaagtgtagatgccgataaaaccaacagccgttttttaagcttggcgtggatccgatatcaactagatcttgaga

SEQ ID NO: 645 - DNA, 170 bp, Artificial sequence
  Arid2.166_Pbrm1.969
  crRNA array
cgatttcttggctttatatatcttgtggaaaggacgaaacaccgtaatttctactaagtgtagataaccgcgatctgggtttttttaatttctactaagtgtagatgagccctaatgaacagctcattttttaagcttggcgtggatccgatatcaactagatcttgaga

SEQ ID NO: 646 - DNA, 170 bp, Artificial sequence
  Arid2.166_Pik3r1.76
  crRNA array
cgatttcttggctttatatatcttgtggaaaggacgaaacaccgtaatttctactaagtgtagataaccgcgatctgggtttttttaatttctactaagtgtagataaaacctatacggcccgcacttttttaagcttggcgtggatccgatatcaactagatcttgaga

SEQ ID NO: 647 - DNA, 170 bp, Artificial sequence
  Arid2.166_Pik3r1.77
  crRNA array
cgatttcttggctttatatatcttgtggaaaggacgaaacaccgtaatttctactaagtgtagataaccgcgatctgggtttttttaatttctactaagtgtagataaacctatacggcccgcactttttttaagcttggcgtggatccgatatcaactagatcttgaga

SEQ ID NO: 648 - DNA, 170 bp, Artificial sequence
  Arid2.166_Pten.240
  crRNA array
cgatttcttggctttatatatcttgtggaaaggacgaaacaccgtaatttctactaagtgtagataaccgcgatctgggtttttttaatttctactaagtgtagattgcatacgctatagctgcttttttttaagcttggcgtggatccgatatcaactagatcttgaga

SEQ ID NO: 649 - DNA, 170 bp, Artificial sequence
  Arid2.166_Pten.265
  crRNA array
cgatttcttggctttatatatcttgtggaaaggacgaaacaccgtaatttctactaagtgtagataaccgcgatctgggtttttttaatttctactaagtgtagataagcgtggtgcgtgacgcacttttttaagcttggcgtggatccgatatcaactagatcttgaga

SEQ ID NO: 650 - DNA, 170 bp, Artificial sequence
  Arid2.166_Rasa1.1478
  crRNA array
cgatttcttggctttatatatcttgtggaaaggacgaaacaccgtaatttctactaagtgtagataaccgcgatctgggtttttttaatttctactaagtgtagatcgataatggtctatgatgtcttttttaagcttggcgtggatccgatatcaactagatcttgaga

SEQ ID NO: 651 - DNA, 170 bp, Artificial sequence
  Arid2.166_Rasa1.223
  crRNA array
cgatttcttggctttatatatcttgtggaaaggacgaaacaccgtaatttctactaagtgtagataaccgcgatctgggtttttttaatttctactaagtgtagattccatggagtatcgtgctcgttttttaagcttggcgtggatccgatatcaactagatcttgaga

SEQ ID NO: 652 - DNA, 170 bp, Artificial sequence
  Arid2.166_Rb1.211
  crRNA array
cgatttcttggctttatatatcttgtggaaaggacgaaacaccgtaatttctactaagtgtagataaccgcgatctgggtttttttaatttctactaagtgtagattctgacatgatcgggtacctttttttaagcttggcgtggatccgatatcaactagatcttgaga

SEQ ID NO: 653 - DNA, 170 bp, Artificial sequence
  Arid2.166_Rb1.394
  crRNA array
cgatttcttggctttatatatcttgtggaaaggacgaaacaccgtaatttctactaagtgtagataaccgcgatctgggtttttttaatttctactaagtgtagatagaaatctcgaagcaggatcttttttaagcttggcgtggatccgatatcaactagatcttgaga

SEQ ID NO: 654 - DNA, 170 bp, Artificial sequence
  Arid2.166_Rbm10.5
  crRNA array
cgatttcttggctttatatatcttgtggaaaggacgaaacaccgtaatttctactaagtgtagataaccgcgatctgggtttttttaatttctactaagtgtagatacgaaacctgaacccacacattttttaagcttggcgtggatccgatatcaactagatcttgaga

SEQ ID NO: 655 - DNA, 170 bp, Artificial sequence
  Arid2.166_Rbm10.6
  crRNA array
cgatttcttggctttatatatcttgtggaaaggacgaaacaccgtaatttctactaagtgtagataaccgcgatctgggtttttttaatttctactaagtgtagatcgaaacctgaacccacacagttttttaagcttggcgtggatccgatatcaactagatcttgaga

SEQ ID NO: 656 - DNA, 170 bp, Artificial sequence
  Arid2.166_Rnf43.1920
  crRNA array
cgatttcttggctttatatatcttgtggaaaggacgaaacaccgtaatttctactaagtgtagataaccgcgatctgggtttttttaatttctactaagtgtagatatccccgtgccgtggactccttttttaagcttggcgtggatccgatatcaactagatcttgaga

SEQ ID NO: 657 - DNA, 170 bp, Artificial sequence
  Arid2.166_Rnf43.39
  crRNA array
cgatttcttggctttatatatcttgtggaaaggacgaaacaccgtaatttctactaagtgtagataaccgcgatctgggtttttttaatttctactaagtgtagatcaaggggatcactctgataattttttaagcttggcgtggatccgatatcaactagatcttgaga

SEQ ID NO: 658 - DNA, 170 bp, Artificial sequence
  Arid2.166_Runx1.204
  crRNA array
cgatttcttggctttatatatcttgtggaaaggacgaaacaccgtaatttctactaagtgtagataaccgcgatctgggtttttttaatttctactaagtgtagattaaataagtccagccgttttttttttaagcttggcgtggatccgatatcaactagatcttgaga

SEQ ID NO: 659 - DNA, 170 bp, Artificial sequence
  Arid2.166_Runx1.81
  crRNA array
cgatttcttggctttatatatcttgtggaaaggacgaaacaccgtaatttctactaagtgtagataaccgcgatctgggtttttttaatttctactaagtgtagataggacgcgtatgggaattttttttttaagcttggcgtggatccgatatcaactagatcttgaga

SEQ ID NO: 660 - DNA, 170 bp, Artificial sequence
  Arid2.166_Setd2.143
  crRNA array
cgatttcttggctttatatatcttgtggaaaggacgaaacaccgtaatttctactaagtgtagataaccgcgatctgggtttttttaatttctactaagtgtagatgcacaaccacaacagactggttttttaagcttggcgtggatccgatatcaactagatcttgaga

SEQ ID NO: 661 - DNA, 170 bp, Artificial sequence
  Arid2.166_Setd2.508
  crRNA array
cgatttcttggctttatatatcttgtggaaaggacgaaacaccgtaatttctactaagtgtagataaccgcgatctgggtttttttaatttctactaagtgtagattacgatcccgagcacccgacttttttaagcttggcgtggatccgatatcaactagatcttgaga

SEQ ID NO: 662 - DNA, 170 bp, Artificial sequence
  Arid2.166_Smad4.3038
  crRNA array
cgatttcttggctttatatatcttgtggaaaggacgaaacaccgtaatttctactaagtgtagataaccgcgatctgggtttttttaatttctactaagtgtagatatctgcggcagtgtcaccggttttttaagcttggcgtggatccgatatcaactagatcttgaga

SEQ ID NO: 663 - DNA, 170 bp, Artificial sequence
  Arid2.166_Smad4.39
  crRNA array
cgatttcttggctttatatatcttgtggaaaggacgaaacaccgtaatttctactaagtgtagataaccgcgatctgggtttttttaatttctactaagtgtagatagtcaaacgcatactgacaattttttaagcttggcgtggatccgatatcaactagatcttgaga

SEQ ID NO: 664 - DNA, 170 bp, Artificial sequence
  Arid2.166_Stag2.1409
  crRNA array
cgatttcttggctttatatatcttgtggaaaggacgaaacaccgtaatttctactaagtgtagataaccgcgatctgggtttttttaatttctactaagtgtagatgctaataactgcggaagggcttttttaagcttggcgtggatccgatatcaactagatcttgaga

SEQ ID NO: 665 - DNA, 170 bp, Artificial sequence
  Arid2.166_Stag2.4401
  crRNA array
cgatttcttggctttatatatcttgtggaaaggacgaaacaccgtaatttctactaagtgtagataaccgcgatctgggtttttttaatttctactaagtgtagattaatcgtccagtggtgtatattttttaagcttggcgtggatccgatatcaactagatcttgaga

SEQ ID NO: 666 - DNA, 170 bp, Artificial sequence
  Arid2.166_Tbl1xr1.1
  crRNA array
cgatttcttggctttatatatcttgtggaaaggacgaaacaccgtaatttctactaagtgtagataaccgcgatctgggtttttttaatttctactaagtgtagatggatgcgcatactggtgaagttttttaagcttggcgtggatccgatatcaactagatcttgaga

SEQ ID NO: 667 - DNA, 170 bp, Artificial sequence
  Arid2.166_Tbl1xr1.83
  crRNA array
cgatttcttggctttatatatcttgtggaaaggacgaaacaccgtaatttctactaagtgtagataaccgcgatctgggtttttttaatttctactaagtgtagatatggtcgacccatcgagtctttttttaagcttggcgtggatccgatatcaactagatcttgaga

SEQ ID NO: 668 - DNA, 170 bp, Artificial sequence
  Arid2.166_Tgfbr2.290
  crRNA array
cgatttcttggctttatatatcttgtggaaaggacgaaacaccgtaatttctactaagtgtagataaccgcgatctgggtttttttaatttctactaagtgtagatcctctcggcgcccgggtaaattttttaagcttggcgtggatccgatatcaactagatcttgaga

SEQ ID NO: 669 - DNA, 170 bp, Artificial sequence
  Arid2.166_Tgfbr2.292
  crRNA array
cgatttcttggctttatatatcttgtggaaaggacgaaacaccgtaatttctactaagtgtagataaccgcgatctgggtttttttaatttctactaagtgtagatcccgggcgccgagagggaaattttttaagcttggcgtggatccgatatcaactagatcttgaga

SEQ ID NO: 670 - DNA, 170 bp, Artificial sequence
  Arid2.166_Trp53.4
  crRNA array
cgatttcttggctttatatatcttgtggaaaggacgaaacaccgtaatttctactaagtgtagataaccgcgatctgggtttttttaatttctactaagtgtagatccctgaactgcccccagggattttttaagcttggcgtggatccgatatcaactagatcttgaga

SEQ ID NO: 671 - DNA, 170 bp, Artificial sequence
  Arid2.166_Trp53.528
  crRNA array
cgatttcttggctttatatatcttgtggaaaggacgaaacaccgtaatttctactaagtgtagataaccgcgatctgggtttttttaatttctactaagtgtagatgctgggccagcagagacctgttttttaagcttggcgtggatccgatatcaactagatcttgaga

SEQ ID NO: 672 - DNA, 170 bp, Artificial sequence
  Arid2.166_Vhl.1
  crRNA array
cgatttcttggctttatatatcttgtggaaaggacgaaacaccgtaatttctactaagtgtagataaccgcgatctgggtttttttaatttctactaagtgtagatagggctcccggcggccatttttttttaagcttggcgtggatccgatatcaactagatcttgaga

SEQ ID NO: 673 - DNA, 170 bp, Artificial sequence
  Arid2.166_Vhl.151
  crRNA array
cgatttcttggctttatatatcttgtggaaaggacgaaacaccgtaatttctactaagtgtagataaccgcgatctgggtttttttaatttctactaagtgtagattagagcactcacccgagggattttttaagcttggcgtggatccgatatcaactagatcttgaga

SEQ ID NO: 674 - DNA, 170 bp, Artificial sequence
  Arid2.166_Zc3h13.1387
  crRNA array
cgatttcttggctttatatatcttgtggaaaggacgaaacaccgtaatttctactaagtgtagataaccgcgatctgggtttttttaatttctactaagtgtagatgtgacgccggtcatgtgactttttttaagcttggcgtggatccgatatcaactagatcttgaga

SEQ ID NO: 675 - DNA, 170 bp, Artificial sequence
  Arid2.166_Zc3h13.1777
  crRNA array
cgatttcttggctttatatatcttgtggaaaggacgaaacaccgtaatttctactaagtgtagataaccgcgatctgggtttttttaatttctactaagtgtagatgatgctgccagtgtagcggcttttttaagcttggcgtggatccgatatcaactagatcttgaga

SEQ ID NO: 676 - DNA, 170 bp, Artificial sequence
  Arid2.172_Acvr2a.155
  crRNA array
cgatttcttggctttatatatcttgtggaaaggacgaaacaccgtaatttctactaagtgtagatctggacgagctgcggcagtttaatttctactaagtgtagatggacctggctaatcaagtatttttttaagcttggcgtggatccgatatcaactagatcttgaga

SEQ ID NO: 677 - DNA, 170 bp, Artificial sequence
  Arid2.172_Acvr2a.70
  crRNA array
cgatttcttggctttatatatcttgtggaaaggacgaaacaccgtaatttctactaagtgtagatctggacgagctgcggcagtttaatttctactaagtgtagatcccgaggcgccggagaagccttttttaagcttggcgtggatccgatatcaactagatcttgaga

SEQ ID NO: 678 - DNA, 170 bp, Artificial sequence
  Arid2.172_Apc.21
  crRNA array
cgatttcttggctttatatatcttgtggaaaggacgaaacaccgtaatttctactaagtgtagatctggacgagctgcggcagtttaatttctactaagtgtagatgtgatccacacgtgtagctgttttttaagcttggcgtggatccgatatcaactagatcttgaga

SEQ ID NO: 679 - DNA, 170 bp, Artificial sequence
  Arid2.172_Apc.867
  crRNA array
cgatttcttggctttatatatcttgtggaaaggacgaaacaccgtaatttctactaagtgtagatctggacgagctgcggcagtttaatttctactaagtgtagatcagtcccaggcggcggaagcttttttaagcttggcgtggatccgatatcaactagatcttgaga

SEQ ID NO: 680 - DNA, 170 bp, Artificial sequence
  Arid2.172_Arid1a.2
  crRNA array
cgatttcttggctttatatatcttgtggaaaggacgaaacaccgtaatttctactaagtgtagatctggacgagctgcggcagtttaatttctactaagtgtagatcccgcgcccccgtcctggggttttttaagcttggcgtggatccgatatcaactagatcttgaga

SEQ ID NO: 681 - DNA, 170 bp, Artificial sequence
  Arid2.172_Arid1a.5
  crRNA array
cgatttcttggctttatatatcttgtggaaaggacgaaacaccgtaatttctactaagtgtagatctggacgagctgcggcagtttaatttctactaagtgtagatcccgcgctcggccgctgccgttttttaagcttggcgtggatccgatatcaactagatcttgaga

SEQ ID NO: 682 - DNA, 170 bp, Artificial sequence
  Arid2.172_Atm.120
  crRNA array
cgatttcttggctttatatatcttgtggaaaggacgaaacaccgtaatttctactaagtgtagatctggacgagctgcggcagtttaatttctactaagtgtagatgacaggtagtcggcagctaattttttaagcttggcgtggatccgatatcaactagatcttgaga

SEQ ID NO: 683 - DNA, 170 bp, Artificial sequence
  Arid2.172_Atm.997
  crRNA array
cgatttcttggctttatatatcttgtggaaaggacgaaacaccgtaatttctactaagtgtagatctggacgagctgcggcagtttaatttctactaagtgtagatgagaaagtctccgaatcgttttttttaagcttggcgtggatccgatatcaactagatcttgaga

SEQ ID NO: 684 - DNA, 170 bp, Artificial sequence
  Arid2.172_Atrx.249
  crRNA array
cgatttcttggctttatatatcttgtggaaaggacgaaacaccgtaatttctactaagtgtagatctggacgagctgcggcagtttaatttctactaagtgtagattagccagtcgctcatatctcttttttaagcttggcgtggatccgatatcaactagatcttgaga

SEQ ID NO: 685 - DNA, 170 bp, Artificial sequence
  Arid2.172_Atrx.251
  crRNA array
cgatttcttggctttatatatcttgtggaaaggacgaaacaccgtaatttctactaagtgtagatctggacgagctgcggcagtttaatttctactaagtgtagatgccagtcgctcatatctctgttttttaagcttggcgtggatccgatatcaactagatcttgaga

SEQ ID NO: 686 - DNA, 170 bp, Artificial sequence
  Arid2.172_Bcor.203
  crRNA array
cgatttcttggctttatatatcttgtggaaaggacgaaacaccgtaatttctactaagtgtagatctggacgagctgcggcagtttaatttctactaagtgtagatccccggagcggagtccaggcttttttaagcttggcgtggatccgatatcaactagatcttgaga

SEQ ID NO: 687 - DNA, 170 bp, Artificial sequence
  Arid2.172_Bcor.475
  crRNA array
cgatttcttggctttatatatcttgtggaaaggacgaaacaccgtaatttctactaagtgtagatctggacgagctgcggcagtttaatttctactaagtgtagattgcaacccctctgtatgggattttttaagcttggcgtggatccgatatcaactagatcttgaga

SEQ ID NO: 688 - DNA, 170 bp, Artificial sequence
  Arid2.172_Brca1.112
  crRNA array
cgatttcttggctttatatatcttgtggaaaggacgaaacaccgtaatttctactaagtgtagatctggacgagctgcggcagtttaatttctactaagtgtagatctagacgctctgtggagactttttttaagcttggcgtggatccgatatcaactagatcttgaga

SEQ ID NO: 689 - DNA, 170 bp, Artificial sequence
  Arid2.172_Brca1.53
  crRNA array
cgatttcttggctttatatatcttgtggaaaggacgaaacaccgtaatttctactaagtgtagatctggacgagctgcggcagtttaatttctactaagtgtagataatgaggaggcgtcgatcatttttttaagcttggcgtggatccgatatcaactagatcttgaga

SEQ ID NO: 690 - DNA, 170 bp, Artificial sequence
  Arid2.172_Casp8.45
  crRNA array
cgatttcttggctttatatatcttgtggaaaggacgaaacaccgtaatttctactaagtgtagatctggacgagctgcggcagtttaatttctactaagtgtagatctaccgagatcctgtgaatgttttttaagcttggcgtggatccgatatcaactagatcttgaga

SEQ ID NO: 691 - DNA, 170 bp, Artificial sequence
  Arid2.172_Casp8.54
  crRNA array
cgatttcttggctttatatatcttgtggaaaggacgaaacaccgtaatttctactaagtgtagatctggacgagctgcggcagtttaatttctactaagtgtagatcagtgcagtcgtcgtaagatttttttaagcttggcgtggatccgatatcaactagatcttgaga

SEQ ID NO: 692 - DNA, 170 bp, Artificial sequence
  Arid2.172_Cbwd1.84
  crRNA array
cgatttcttggctttatatatcttgtggaaaggacgaaacaccgtaatttctactaagtgtagatctggacgagctgcggcagtttaatttctactaagtgtagatcacagcaggtaacatgccgcttttttaagcttggcgtggatccgatatcaactagatcttgaga

SEQ ID NO: 693 - DNA, 170 bp, Artificial sequence
  Arid2.172_Cbwd1.85
  crRNA array
cgatttcttggctttatatatcttgtggaaaggacgaaacaccgtaatttctactaagtgtagatctggacgagctgcggcagtttaatttctactaagtgtagatacagcaggtaacatgccgccttttttaagcttggcgtggatccgatatcaactagatcttgaga

SEQ ID NO: 694 - DNA, 170 bp, Artificial sequence
  Arid2.172_Cdh1.387
  crRNA array
cgatttcttggctttatatatcttgtggaaaggacgaaacaccgtaatttctactaagtgtagatctggacgagctgcggcagtttaatttctactaagtgtagatctcggcgtctgccgggtccgttttttaagcttggcgtggatccgatatcaactagatcttgaga

SEQ ID NO: 695 - DNA, 170 bp, Artificial sequence
  Arid2.172_Cdh1.58
  crRNA array
cgatttcttggctttatatatcttgtggaaaggacgaaacaccgtaatttctactaagtgtagatctggacgagctgcggcagtttaatttctactaagtgtagatctcgtccgcgcccgggactcttttttaagcttggcgtggatccgatatcaactagatcttgaga

SEQ ID NO: 696 - DNA, 170 bp, Artificial sequence
  Arid2.172_Cdkn2a.647
  crRNA array
cgatttcttggctttatatatcttgtggaaaggacgaaacaccgtaatttctactaagtgtagatctggacgagctgcggcagtttaatttctactaagtgtagatgcaatcacgggagggagcagttttttaagcttggcgtggatccgatatcaactagatcttgaga

SEQ ID NO: 697 - DNA, 170 bp, Artificial sequence
  Arid2.172_Cdkn2a.648
  crRNA array
cgatttcttggctttatatatcttgtggaaaggacgaaacaccgtaatttctactaagtgtagatctggacgagctgcggcagtttaatttctactaagtgtagatcaatcacgggagggagcagattttttaagcttggcgtggatccgatatcaactagatcttgaga

SEQ ID NO: 698 - DNA, 170 bp, Artificial sequence
  Arid2.172_Cic.162
  crRNA array
cgatttcttggctttatatatcttgtggaaaggacgaaacaccgtaatttctactaagtgtagatctggacgagctgcggcagtttaatttctactaagtgtagatcgcaggcgcgcccggcggagttttttaagcttggcgtggatccgatatcaactagatcttgaga

SEQ ID NO: 699 - DNA, 170 bp, Artificial sequence
  Arid2.172_Cic.164
  crRNA array
cgatttcttggctttatatatcttgtggaaaggacgaaacaccgtaatttctactaagtgtagatctggacgagctgcggcagtttaatttctactaagtgtagatcgggccctgggccggcggctttttttaagcttggcgtggatccgatatcaactagatcttgaga

SEQ ID NO: 700 - DNA, 170 bp, Artificial sequence
  Arid2.172_Ctcf.229
  crRNA array
cgatttcttggctttatatatcttgtggaaaggacgaaacaccgtaatttctactaagtgtagatctggacgagctgcggcagtttaatttctactaagtgtagatggctggtggctgatagtctgttttttaagcttggcgtggatccgatatcaactagatcttgaga

SEQ ID NO: 701 - DNA, 170 bp, Artificial sequence
  Arid2.172_Ctcf.809
  crRNA array
cgatttcttggctttatatatcttgtggaaaggacgaaacaccgtaatttctactaagtgtagatctggacgagctgcggcagtttaatttctactaagtgtagataagcgctatcatgatcccaattttttaagcttggcgtggatccgatatcaactagatcttgaga

SEQ ID NO: 702 - DNA, 170 bp, Artificial sequence
  Arid2.172_Elf3.826
  crRNA array
cgatttcttggctttatatatcttgtggaaaggacgaaacaccgtaatttctactaagtgtagatctggacgagctgcggcagtttaatttctactaagtgtagattccgagacatcctaatccacttttttaagcttggcgtggatccgatatcaactagatcttgaga

SEQ ID NO: 703 - DNA, 170 bp, Artificial sequence
  Arid2.172_Elf3.983
  crRNA array
cgatttcttggctttatatatcttgtggaaaggacgaaacaccgtaatttctactaagtgtagatctggacgagctgcggcagtttaatttctactaagtgtagattaggccccctaactggaccattttttaagcttggcgtggatccgatatcaactagatcttgaga

SEQ ID NO: 704 - DNA, 170 bp, Artificial sequence
  Arid2.172_Ep300.310
  crRNA array
cgatttcttggctttatatatcttgtggaaaggacgaaacaccgtaatttctactaagtgtagatctggacgagctgcggcagtttaatttctactaagtgtagatatggtacgacagtgaggaagttttttaagcttggcgtggatccgatatcaactagatcttgaga

SEQ ID NO: 705 - DNA, 170 bp, Artificial sequence
  Arid2.172_Ep300.587
  crRNA array
cgatttcttggctttatatatcttgtggaaaggacgaaacaccgtaatttctactaagtgtagatctggacgagctgcggcagtttaatttctactaagtgtagatcgccccggggcccccaaccattttttaagcttggcgtggatccgatatcaactagatcttgaga

SEQ ID NO: 706 - DNA, 170 bp, Artificial sequence
  Arid2.172_Epha2.126
  crRNA array
cgatttcttggctttatatatcttgtggaaaggacgaaacaccgtaatttctactaagtgtagatctggacgagctgcggcagtttaatttctactaagtgtagatcctgtgccgccgcggccgccttttttaagcttggcgtggatccgatatcaactagatcttgaga

SEQ ID NO: 707 - DNA, 170 bp, Artificial sequence
  Arid2.172_Epha2.5
  crRNA array
cgatttcttggctttatatatcttgtggaaaggacgaaacaccgtaatttctactaagtgtagatctggacgagctgcggcagtttaatttctactaagtgtagatcatgagctggcgccacccggttttttaagcttggcgtggatccgatatcaactagatcttgaga

SEQ ID NO: 708 - DNA, 170 bp, Artificial sequence
  Arid2.172_Fat1.105
  crRNA array
cgatttcttggctttatatatcttgtggaaaggacgaaacaccgtaatttctactaagtgtagatctggacgagctgcggcagtttaatttctactaagtgtagataactcgaggtgacaacaagtttttttaagcttggcgtggatccgatatcaactagatcttgaga

SEQ ID NO: 709 - DNA, 170 bp, Artificial sequence
  Arid2.172_Fat1.122
  crRNA array
cgatttcttggctttatatatcttgtggaaaggacgaaacaccgtaatttctactaagtgtagatctggacgagctgcggcagtttaatttctactaagtgtagatccatcgacatggaaacgggattttttaagcttggcgtggatccgatatcaactagatcttgaga

SEQ ID NO: 710 - DNA, 170 bp, Artificial sequence
  Arid2.172_Fbxw7.21
  crRNA array
cgatttcttggctttatatatcttgtggaaaggacgaaacaccgtaatttctactaagtgtagatctggacgagctgcggcagtttaatttctactaagtgtagattaatgtgccgtagaaacccattttttaagcttggcgtggatccgatatcaactagatcttgaga

SEQ ID NO: 711 - DNA, 170 bp, Artificial sequence
  Arid2.172_Fbxw7.23
  crRNA array
cgatttcttggctttatatatcttgtggaaaggacgaaacaccgtaatttctactaagtgtagatctggacgagctgcggcagtttaatttctactaagtgtagatatgtgccgtagaaacccatattttttaagcttggcgtggatccgatatcaactagatcttgaga

SEQ ID NO: 712 - DNA, 170 bp, Artificial sequence
  Arid2.172_Gata3.34
  crRNA array
cgatttcttggctttatatatcttgtggaaaggacgaaacaccgtaatttctactaagtgtagatctggacgagctgcggcagtttaatttctactaagtgtagatctaaactatcccgcaaagatttttttaagcttggcgtggatccgatatcaactagatcttgaga

SEQ ID NO: 713 - DNA, 170 bp, Artificial sequence
  Arid2.172_Gata3.47
  crRNA array
cgatttcttggctttatatatcttgtggaaaggacgaaacaccgtaatttctactaagtgtagatctggacgagctgcggcagtttaatttctactaagtgtagatcgtagtaggacgggacgtggttttttaagcttggcgtggatccgatatcaactagatcttgaga

SEQ ID NO: 714 - DNA, 170 bp, Artificial sequence
  Arid2.172_H2-Q2.1
  crRNA array
cgatttcttggctttatatatcttgtggaaaggacgaaacaccgtaatttctactaagtgtagatctggacgagctgcggcagtttaatttctactaagtgtagatagggcggccaccaacagcagttttttaagcttggcgtggatccgatatcaactagatcttgaga

SEQ ID NO: 715 - DNA, 170 bp, Artificial sequence
  Arid2.172_H2-Q2.2
  crRNA array
cgatttcttggctttatatatcttgtggaaaggacgaaacaccgtaatttctactaagtgtagatctggacgagctgcggcagtttaatttctactaagtgtagattaacctgcgcccgctgctgattttttaagcttggcgtggatccgatatcaactagatcttgaga

SEQ ID NO: 716 - DNA, 170 bp, Artificial sequence
  Arid2.172_Kdm5c.1878
  crRNA array
cgatttcttggctttatatatcttgtggaaaggacgaaacaccgtaatttctactaagtgtagatctggacgagctgcggcagtttaatttctactaagtgtagatagagcacggcacccgcccccttttttaagcttggcgtggatccgatatcaactagatcttgaga

SEQ ID NO: 717 - DNA, 170 bp, Artificial sequence
  Arid2.172_Kdm5c.1879
  crRNA array
cgatttcttggctttatatatcttgtggaaaggacgaaacaccgtaatttctactaagtgtagatctggacgagctgcggcagtttaatttctactaagtgtagatgagcacggcacccgccccccttttttaagcttggcgtggatccgatatcaactagatcttgaga

SEQ ID NO: 718 - DNA, 170 bp, Artificial sequence
  Arid2.172_Kdm6a.56
  crRNA array
cgatttcttggctttatatatcttgtggaaaggacgaaacaccgtaatttctactaagtgtagatctggacgagctgcggcagtttaatttctactaagtgtagattcgctgccgcctctcgcggcttttttaagcttggcgtggatccgatatcaactagatcttgaga

SEQ ID NO: 719 - DNA, 170 bp, Artificial sequence
  Arid2.172_Kdm6a.57
  crRNA array
cgatttcttggctttatatatcttgtggaaaggacgaaacaccgtaatttctactaagtgtagatctggacgagctgcggcagtttaatttctactaagtgtagatcgctgccgcctctcgcggcattttttaagcttggcgtggatccgatatcaactagatcttgaga

SEQ ID NO: 720 - DNA, 170 bp, Artificial sequence
  Arid2.172_Kmt2b.265
  crRNA array
cgatttcttggctttatatatcttgtggaaaggacgaaacaccgtaatttctactaagtgtagatctggacgagctgcggcagtttaatttctactaagtgtagatccccaagtgaagcccacctgttttttaagcttggcgtggatccgatatcaactagatcttgaga

SEQ ID NO: 721 - DNA, 170 bp, Artificial sequence
  Arid2.172_Kmt2b.298
  crRNA array
cgatttcttggctttatatatcttgtggaaaggacgaaacaccgtaatttctactaagtgtagatctggacgagctgcggcagtttaatttctactaagtgtagattccggcagggaccggctggcttttttaagcttggcgtggatccgatatcaactagatcttgaga

SEQ ID NO: 722 - DNA, 170 bp, Artificial sequence
  Arid2.172_Kmt2c.1962
  crRNA array
cgatttcttggctttatatatcttgtggaaaggacgaaacaccgtaatttctactaagtgtagatctggacgagctgcggcagtttaatttctactaagtgtagatgtgacgatctgtgccacaagttttttaagcttggcgtggatccgatatcaactagatcttgaga

SEQ ID NO: 723 - DNA, 170 bp, Artificial sequence
  Arid2.172_Kmt2c.2236
  crRNA array
cgatttcttggctttatatatcttgtggaaaggacgaaacaccgtaatttctactaagtgtagatctggacgagctgcggcagtttaatttctactaagtgtagatactcgacctccacctccctattttttaagcttggcgtggatccgatatcaactagatcttgaga

SEQ ID NO: 724 - DNA, 170 bp, Artificial sequence
  Arid2.172_Kmt2d.316
  crRNA array
cgatttcttggctttatatatcttgtggaaaggacgaaacaccgtaatttctactaagtgtagatctggacgagctgcggcagtttaatttctactaagtgtagatactccaggccacccaggtggttttttaagcttggcgtggatccgatatcaactagatcttgaga

SEQ ID NO: 725 - DNA, 170 bp, Artificial sequence
  Arid2.172_Kmt2d.416
  crRNA array
cgatttcttggctttatatatcttgtggaaaggacgaaacaccgtaatttctactaagtgtagatctggacgagctgcggcagtttaatttctactaagtgtagattaaacccccgggggaagggtttttttaagcttggcgtggatccgatatcaactagatcttgaga

SEQ ID NO: 726 - DNA, 170 bp, Artificial sequence
  Arid2.172_Map2k4.119
  crRNA array
cgatttcttggctttatatatcttgtggaaaggacgaaacaccgtaatttctactaagtgtagatctggacgagctgcggcagtttaatttctactaagtgtagattgctgtgtgggcggccacatttttttaagcttggcgtggatccgatatcaactagatcttgaga

SEQ ID NO: 727 - DNA, 170 bp, Artificial sequence
  Arid2.172_Map2k4.1261
  crRNA array
cgatttcttggctttatatatcttgtggaaaggacgaaacaccgtaatttctactaagtgtagatctggacgagctgcggcagtttaatttctactaagtgtagatgatgtagtaatgcggagtagttttttaagcttggcgtggatccgatatcaactagatcttgaga

SEQ ID NO: 728 - DNA, 170 bp, Artificial sequence
  Arid2.172_Map3k1.235
  crRNA array
cgatttcttggctttatatatcttgtggaaaggacgaaacaccgtaatttctactaagtgtagatctggacgagctgcggcagtttaatttctactaagtgtagataaaacgctactgatcgatcgttttttaagcttggcgtggatccgatatcaactagatcttgaga

SEQ ID NO: 729 - DNA, 170 bp, Artificial sequence
  Arid2.172_Map3k1.3838
  crRNA array
cgatttcttggctttatatatcttgtggaaaggacgaaacaccgtaatttctactaagtgtagatctggacgagctgcggcagtttaatttctactaagtgtagatccaacaacagggccccactattttttaagcttggcgtggatccgatatcaactagatcttgaga

SEQ ID NO: 730 - DNA, 170 bp, Artificial sequence
  Arid2.172_Mga.1655
  crRNA array
cgatttcttggctttatatatcttgtggaaaggacgaaacaccgtaatttctactaagtgtagatctggacgagctgcggcagtttaatttctactaagtgtagatcgagaagtggagagcatattttttttaagcttggcgtggatccgatatcaactagatcttgaga

SEQ ID NO: 731 - DNA, 170 bp, Artificial sequence
  Arid2.172_Mga.93
  crRNA array
cgatttcttggctttatatatcttgtggaaaggacgaaacaccgtaatttctactaagtgtagatctggacgagctgcggcagtttaatttctactaagtgtagatgagaaggctccccataatgtttttttaagcttggcgtggatccgatatcaactagatcttgaga

SEQ ID NO: 732 - DNA, 170 bp, Artificial sequence
  Arid2.172_Nf1.746
  crRNA array
cgatttcttggctttatatatcttgtggaaaggacgaaacaccgtaatttctactaagtgtagatctggacgagctgcggcagtttaatttctactaagtgtagattaagcataatgatgatgccattttttaagcttggcgtggatccgatatcaactagatcttgaga

SEQ ID NO: 733 - DNA, 170 bp, Artificial sequence
  Arid2.172_Nf1.97
  crRNA array
cgatttcttggctttatatatcttgtggaaaggacgaaacaccgtaatttctactaagtgtagatctggacgagctgcggcagtttaatttctactaagtgtagatagcccgctacatgctgatgcttttttaagcttggcgtggatccgatatcaactagatcttgaga

SEQ ID NO: 734 - DNA, 170 bp, Artificial sequence
  Arid2.172_Nf2.356
  crRNA array
cgatttcttggctttatatatcttgtggaaaggacgaaacaccgtaatttctactaagtgtagatctggacgagctgcggcagtttaatttctactaagtgtagatcggagtcatctgatagagatttttttaagcttggcgtggatccgatatcaactagatcttgaga

SEQ ID NO: 735 - DNA, 170 bp, Artificial sequence
  Arid2.172_Nf2.768
  crRNA array
cgatttcttggctttatatatcttgtggaaaggacgaaacaccgtaatttctactaagtgtagatctggacgagctgcggcagtttaatttctactaagtgtagatccgaagccccagtgtccggcttttttaagcttggcgtggatccgatatcaactagatcttgaga

SEQ ID NO: 736 - DNA, 170 bp, Artificial sequence
  Arid2.172_Notch1.1849
  crRNA array
cgatttcttggctttatatatcttgtggaaaggacgaaacaccgtaatttctactaagtgtagatctggacgagctgcggcagtttaatttctactaagtgtagatctggcgggtgggcggcgctgttttttaagcttggcgtggatccgatatcaactagatcttgaga

SEQ ID NO: 737 - DNA, 170 bp, Artificial sequence
  Arid2.172_Notch1.649
  crRNA array
cgatttcttggctttatatatcttgtggaaaggacgaaacaccgtaatttctactaagtgtagatctggacgagctgcggcagtttaatttctactaagtgtagattgggccaacgatgccaggacttttttaagcttggcgtggatccgatatcaactagatcttgaga

SEQ ID NO: 738 - DNA, 170 bp, Artificial sequence
  Arid2.172_Nsd1.70
  crRNA array
cgatttcttggctttatatatcttgtggaaaggacgaaacaccgtaatttctactaagtgtagatctggacgagctgcggcagtttaatttctactaagtgtagatactggtgtggacgatgcagattttttaagcttggcgtggatccgatatcaactagatcttgaga

SEQ ID NO: 739 - DNA, 170 bp, Artificial sequence
  Arid2.172_Nsd1.90
  crRNA array
cgatttcttggctttatatatcttgtggaaaggacgaaacaccgtaatttctactaagtgtagatctggacgagctgcggcagtttaatttctactaagtgtagataggagctaacggcaagaatgttttttaagcttggcgtggatccgatatcaactagatcttgaga

SEQ ID NO: 740 - DNA, 170 bp, Artificial sequence
  Arid2.172_Pbrm1.1236
  crRNA array
cgatttcttggctttatatatcttgtggaaaggacgaaacaccgtaatttctactaagtgtagatctggacgagctgcggcagtttaatttctactaagtgtagatgccgataaaaccaacagccgttttttaagcttggcgtggatccgatatcaactagatcttgaga

SEQ ID NO: 741 - DNA, 170 bp, Artificial sequence
  Arid2.172_Pbrm1.969
  crRNA array
cgatttcttggctttatatatcttgtggaaaggacgaaacaccgtaatttctactaagtgtagatctggacgagctgcggcagtttaatttctactaagtgtagatgagccctaatgaacagctcattttttaagcttggcgtggatccgatatcaactagatcttgaga

SEQ ID NO: 742 - DNA, 170 bp, Artificial sequence
  Arid2.172_Pik3r1.76
  crRNA array
cgatttcttggctttatatatcttgtggaaaggacgaaacaccgtaatttctactaagtgtagatctggacgagctgcggcagtttaatttctactaagtgtagataaaacctatacggcccgcacttttttaagcttggcgtggatccgatatcaactagatcttgaga

SEQ ID NO: 743 - DNA, 170 bp, Artificial sequence
  Arid2.172_Pik3r1.77
  crRNA array
cgatttcttggctttatatatcttgtggaaaggacgaaacaccgtaatttctactaagtgtagatctggacgagctgcggcagtttaatttctactaagtgtagataaacctatacggcccgcactttttttaagcttggcgtggatccgatatcaactagatcttgaga

SEQ ID NO: 744 - DNA, 170 bp, Artificial sequence
  Arid2.172_Pten.240
  crRNA array
cgatttcttggctttatatatcttgtggaaaggacgaaacaccgtaatttctactaagtgtagatctggacgagctgcggcagtttaatttctactaagtgtagattgcatacgctatagctgcttttttttaagcttggcgtggatccgatatcaactagatcttgaga

SEQ ID NO: 745 - DNA, 170 bp, Artificial sequence
  Arid2.172_Pten.265
  crRNA array
cgatttcttggctttatatatcttgtggaaaggacgaaacaccgtaatttctactaagtgtagatctggacgagctgcggcagtttaatttctactaagtgtagataagcgtggtgcgtgacgcacttttttaagcttggcgtggatccgatatcaactagatcttgaga

SEQ ID NO: 746 - DNA, 170 bp, Artificial sequence
  Arid2.172_Rasa1.1478
  crRNA array
cgatttcttggctttatatatcttgtggaaaggacgaaacaccgtaatttctactaagtgtagatctggacgagctgcggcagtttaatttctactaagtgtagatcgataatggtctatgatgtcttttttaagcttggcgtggatccgatatcaactagatcttgaga

SEQ ID NO: 747 - DNA, 170 bp, Artificial sequence
  Arid2.172_Rasa1.223
  crRNA array
cgatttcttggctttatatatcttgtggaaaggacgaaacaccgtaatttctactaagtgtagatctggacgagctgcggcagtttaatttctactaagtgtagattccatggagtatcgtgctcgttttttaagcttggcgtggatccgatatcaactagatcttgaga

SEQ ID NO: 748 - DNA, 170 bp, Artificial sequence
  Arid2.172_Rb1.211
  crRNA array
cgatttcttggctttatatatcttgtggaaaggacgaaacaccgtaatttctactaagtgtagatctggacgagctgcggcagtttaatttctactaagtgtagattctgacatgatcgggtacctttttttaagcttggcgtggatccgatatcaactagatcttgaga

SEQ ID NO: 749 - DNA, 170 bp, Artificial sequence
  Arid2.172_Rb1.394
  crRNA array
cgatttcttggctttatatatcttgtggaaaggacgaaacaccgtaatttctactaagtgtagatctggacgagctgcggcagtttaatttctactaagtgtagatagaaatctcgaagcaggatcttttttaagcttggcgtggatccgatatcaactagatcttgaga

SEQ ID NO: 750 - DNA, 170 bp, Artificial sequence
  Arid2.172_Rbm10.5
  crRNA array
cgatttcttggctttatatatcttgtggaaaggacgaaacaccgtaatttctactaagtgtagatctggacgagctgcggcagtttaatttctactaagtgtagatacgaaacctgaacccacacattttttaagcttggcgtggatccgatatcaactagatcttgaga

SEQ ID NO: 751 - DNA, 170 bp, Artificial sequence
  Arid2.172_Rbm10.6
  crRNA array
cgatttcttggctttatatatcttgtggaaaggacgaaacaccgtaatttctactaagtgtagatctggacgagctgcggcagtttaatttctactaagtgtagatcgaaacctgaacccacacagttttttaagcttggcgtggatccgatatcaactagatcttgaga

SEQ ID NO: 752 - DNA, 170 bp, Artificial sequence
  Arid2.172_Rnf43.1920
  crRNA array
cgatttcttggctttatatatcttgtggaaaggacgaaacaccgtaatttctactaagtgtagatctggacgagctgcggcagtttaatttctactaagtgtagatatccccgtgccgtggactccttttttaagcttggcgtggatccgatatcaactagatcttgaga

SEQ ID NO: 753 - DNA, 170 bp, Artificial sequence
  Arid2.172_Rnf43.39
  crRNA array
cgatttcttggctttatatatcttgtggaaaggacgaaacaccgtaatttctactaagtgtagatctggacgagctgcggcagtttaatttctactaagtgtagatcaaggggatcactctgataattttttaagcttggcgtggatccgatatcaactagatcttgaga

SEQ ID NO: 754 - DNA, 170 bp, Artificial sequence
  Arid2.172_Runx1.204
  crRNA array
cgatttcttggctttatatatcttgtggaaaggacgaaacaccgtaatttctactaagtgtagatctggacgagctgcggcagtttaatttctactaagtgtagattaaataagtccagccgttttttttttaagcttggcgtggatccgatatcaactagatcttgaga

SEQ ID NO: 755 - DNA, 170 bp, Artificial sequence
  Arid2.172_Runx1.81
  crRNA array
cgatttcttggctttatatatcttgtggaaaggacgaaacaccgtaatttctactaagtgtagatctggacgagctgcggcagtttaatttctactaagtgtagataggacgcgtatgggaattttttttttaagcttggcgtggatccgatatcaactagatcttgaga

SEQ ID NO: 756 - DNA, 170 bp, Artificial sequence
  Arid2.172_Setd2.143
  crRNA array
cgatttcttggctttatatatcttgtggaaaggacgaaacaccgtaatttctactaagtgtagatctggacgagctgcggcagtttaatttctactaagtgtagatgcacaaccacaacagactggttttttaagcttggcgtggatccgatatcaactagatcttgaga

SEQ ID NO: 757 - DNA, 170 bp, Artificial sequence
  Arid2.172_Setd2.508
  crRNA array
cgatttcttggctttatatatcttgtggaaaggacgaaacaccgtaatttctactaagtgtagatctggacgagctgcggcagtttaatttctactaagtgtagattacgatcccgagcacccgacttttttaagcttggcgtggatccgatatcaactagatcttgaga

SEQ ID NO: 758 - DNA, 170 bp, Artificial sequence
  Arid2.172_Smad4.3038
  crRNA array
cgatttcttggctttatatatcttgtggaaaggacgaaacaccgtaatttctactaagtgtagatctggacgagctgcggcagtttaatttctactaagtgtagatatctgcggcagtgtcaccggttttttaagcttggcgtggatccgatatcaactagatcttgaga

SEQ ID NO: 759 - DNA, 170 bp, Artificial sequence
  Arid2.172_Smad4.39
  crRNA array
cgatttcttggctttatatatcttgtggaaaggacgaaacaccgtaatttctactaagtgtagatctggacgagctgcggcagtttaatttctactaagtgtagatagtcaaacgcatactgacaattttttaagcttggcgtggatccgatatcaactagatcttgaga

SEQ ID NO: 760 - DNA, 170 bp, Artificial sequence
  Arid2.172_Stag2.1409
  crRNA array
cgatttcttggctttatatatcttgtggaaaggacgaaacaccgtaatttctactaagtgtagatctggacgagctgcggcagtttaatttctactaagtgtagatgctaataactgcggaagggcttttttaagcttggcgtggatccgatatcaactagatcttgaga

SEQ ID NO: 761 - DNA, 170 bp, Artificial sequence
  Arid2.172_Stag2.4401
  crRNA array
cgatttcttggctttatatatcttgtggaaaggacgaaacaccgtaatttctactaagtgtagatctggacgagctgcggcagtttaatttctactaagtgtagattaatcgtccagtggtgtatattttttaagcttggcgtggatccgatatcaactagatcttgaga

SEQ ID NO: 762 - DNA, 170 bp, Artificial sequence
  Arid2.172_Tbl1xr1.1
  crRNA array
cgatttcttggctttatatatcttgtggaaaggacgaaacaccgtaatttctactaagtgtagatctggacgagctgcggcagtttaatttctactaagtgtagatggatgcgcatactggtgaagttttttaagcttggcgtggatccgatatcaactagatcttgaga

SEQ ID NO: 763 - DNA, 170 bp, Artificial sequence
  Arid2.172_Tbl1xr1.83
  crRNA array
cgatttcttggctttatatatcttgtggaaaggacgaaacaccgtaatttctactaagtgtagatctggacgagctgcggcagtttaatttctactaagtgtagatatggtcgacccatcgagtctttttttaagcttggcgtggatccgatatcaactagatcttgaga

SEQ ID NO: 764 - DNA, 170 bp, Artificial sequence
  Arid2.172_Tgfbr2.290
  crRNA array
cgatttcttggctttatatatcttgtggaaaggacgaaacaccgtaatttctactaagtgtagatctggacgagctgcggcagtttaatttctactaagtgtagatcctctcggcgcccgggtaaattttttaagcttggcgtggatccgatatcaactagatcttgaga

SEQ ID NO: 765 - DNA, 170 bp, Artificial sequence
  Arid2.172_Tgfbr2.292
  crRNA array
cgatttcttggctttatatatcttgtggaaaggacgaaacaccgtaatttctactaagtgtagatctggacgagctgcggcagtttaatttctactaagtgtagatcccgggcgccgagagggaaattttttaagcttggcgtggatccgatatcaactagatcttgaga

SEQ ID NO: 766 - DNA, 170 bp, Artificial sequence
  Arid2.172_Trp53.4
  crRNA array
cgatttcttggctttatatatcttgtggaaaggacgaaacaccgtaatttctactaagtgtagatctggacgagctgcggcagtttaatttctactaagtgtagatccctgaactgcccccagggattttttaagcttggcgtggatccgatatcaactagatcttgaga

SEQ ID NO: 767 - DNA, 170 bp, Artificial sequence
  Arid2.172_Trp53.528
  crRNA array
cgatttcttggctttatatatcttgtggaaaggacgaaacaccgtaatttctactaagtgtagatctggacgagctgcggcagtttaatttctactaagtgtagatgctgggccagcagagacctgttttttaagcttggcgtggatccgatatcaactagatcttgaga

SEQ ID NO: 768 - DNA, 170 bp, Artificial sequence
  Arid2.172_Vhl.1
  crRNA array
cgatttcttggctttatatatcttgtggaaaggacgaaacaccgtaatttctactaagtgtagatctggacgagctgcggcagtttaatttctactaagtgtagatagggctcccggcggccatttttttttaagcttggcgtggatccgatatcaactagatcttgaga

SEQ ID NO: 769 - DNA, 170 bp, Artificial sequence
  Arid2.172_Vhl.151
  crRNA array
cgatttcttggctttatatatcttgtggaaaggacgaaacaccgtaatttctactaagtgtagatctggacgagctgcggcagtttaatttctactaagtgtagattagagcactcacccgagggattttttaagcttggcgtggatccgatatcaactagatcttgaga

SEQ ID NO: 770 - DNA, 170 bp, Artificial sequence
  Arid2.172_Zc3h13.1387
  crRNA array
cgatttcttggctttatatatcttgtggaaaggacgaaacaccgtaatttctactaagtgtagatctggacgagctgcggcagtttaatttctactaagtgtagatgtgacgccggtcatgtgactttttttaagcttggcgtggatccgatatcaactagatcttgaga

SEQ ID NO: 771 - DNA, 170 bp, Artificial sequence
  Arid2.172_Zc3h13.1777
  crRNA array
cgatttcttggctttatatatcttgtggaaaggacgaaacaccgtaatttctactaagtgtagatctggacgagctgcggcagtttaatttctactaagtgtagatgatgctgccagtgtagcggcttttttaagcttggcgtggatccgatatcaactagatcttgaga

SEQ ID NO: 772 - DNA, 170 bp, Artificial sequence
  Atm.120_Acvr2a.155
  crRNA array
cgatttcttggctttatatatcttgtggaaaggacgaaacaccgtaatttctactaagtgtagatgacaggtagtcggcagctaataatttctactaagtgtagatggacctggctaatcaagtatttttttaagcttggcgtggatccgatatcaactagatcttgaga

SEQ ID NO: 773 - DNA, 170 bp, Artificial sequence
  Atm.120_Acvr2a.70
  crRNA array
cgatttcttggctttatatatcttgtggaaaggacgaaacaccgtaatttctactaagtgtagatgacaggtagtcggcagctaataatttctactaagtgtagatcccgaggcgccggagaagccttttttaagcttggcgtggatccgatatcaactagatcttgaga

SEQ ID NO: 774 - DNA, 170 bp, Artificial sequence
  Atm.120_Apc.21
  crRNA array
cgatttcttggctttatatatcttgtggaaaggacgaaacaccgtaatttctactaagtgtagatgacaggtagtcggcagctaataatttctactaagtgtagatgtgatccacacgtgtagctgttttttaagcttggcgtggatccgatatcaactagatcttgaga

SEQ ID NO: 775 - DNA, 170 bp, Artificial sequence
  Atm.120_Apc.867
  crRNA array
cgatttcttggctttatatatcttgtggaaaggacgaaacaccgtaatttctactaagtgtagatgacaggtagtcggcagctaataatttctactaagtgtagatcagtcccaggcggcggaagcttttttaagcttggcgtggatccgatatcaactagatcttgaga

SEQ ID NO: 776 - DNA, 170 bp, Artificial sequence
  Atm.120_Arid1a.2
  crRNA array
cgatttcttggctttatatatcttgtggaaaggacgaaacaccgtaatttctactaagtgtagatgacaggtagtcggcagctaataatttctactaagtgtagatcccgcgcccccgtcctggggttttttaagcttggcgtggatccgatatcaactagatcttgaga

SEQ ID NO: 777 - DNA, 170 bp, Artificial sequence
  Atm.120_Arid1a.5
  crRNA array
cgatttcttggctttatatatcttgtggaaaggacgaaacaccgtaatttctactaagtgtagatgacaggtagtcggcagctaataatttctactaagtgtagatcccgcgctcggccgctgccgttttttaagcttggcgtggatccgatatcaactagatcttgaga

SEQ ID NO: 778 - DNA, 170 bp, Artificial sequence
  Atm.120_Arid2.166
  crRNA array
cgatttcttggctttatatatcttgtggaaaggacgaaacaccgtaatttctactaagtgtagatgacaggtagtcggcagctaataatttctactaagtgtagataaccgcgatctgggttttttttttttaagcttggcgtggatccgatatcaactagatcttgaga

SEQ ID NO: 779 - DNA, 170 bp, Artificial sequence
  Atm.120_Arid2.172
  crRNA array
cgatttcttggctttatatatcttgtggaaaggacgaaacaccgtaatttctactaagtgtagatgacaggtagtcggcagctaataatttctactaagtgtagatctggacgagctgcggcagttttttttaagcttggcgtggatccgatatcaactagatcttgaga

SEQ ID NO: 780 - DNA, 170 bp, Artificial sequence
  Atm.120_Atrx.249
  crRNA array
cgatttcttggctttatatatcttgtggaaaggacgaaacaccgtaatttctactaagtgtagatgacaggtagtcggcagctaataatttctactaagtgtagattagccagtcgctcatatctcttttttaagcttggcgtggatccgatatcaactagatcttgaga

SEQ ID NO: 781 - DNA, 170 bp, Artificial sequence
  Atm.120_Atrx.251
  crRNA array
cgatttcttggctttatatatcttgtggaaaggacgaaacaccgtaatttctactaagtgtagatgacaggtagtcggcagctaataatttctactaagtgtagatgccagtcgctcatatctctgttttttaagcttggcgtggatccgatatcaactagatcttgaga

SEQ ID NO: 782 - DNA, 170 bp, Artificial sequence
  Atm.120_Bcor.203
  crRNA array
cgatttcttggctttatatatcttgtggaaaggacgaaacaccgtaatttctactaagtgtagatgacaggtagtcggcagctaataatttctactaagtgtagatccccggagcggagtccaggcttttttaagcttggcgtggatccgatatcaactagatcttgaga

SEQ ID NO: 783 - DNA, 170 bp, Artificial sequence
  Atm.120_Bcor.475
  crRNA array
cgatttcttggctttatatatcttgtggaaaggacgaaacaccgtaatttctactaagtgtagatgacaggtagtcggcagctaataatttctactaagtgtagattgcaacccctctgtatgggattttttaagcttggcgtggatccgatatcaactagatcttgaga

SEQ ID NO: 784 - DNA, 170 bp, Artificial sequence
  Atm.120_Brca1.112
  crRNA array
cgatttcttggctttatatatcttgtggaaaggacgaaacaccgtaatttctactaagtgtagatgacaggtagtcggcagctaataatttctactaagtgtagatctagacgctctgtggagactttttttaagcttggcgtggatccgatatcaactagatcttgaga

SEQ ID NO: 785 - DNA, 170 bp, Artificial sequence
  Atm.120_Brca1.53
  crRNA array
cgatttcttggctttatatatcttgtggaaaggacgaaacaccgtaatttctactaagtgtagatgacaggtagtcggcagctaataatttctactaagtgtagataatgaggaggcgtcgatcatttttttaagcttggcgtggatccgatatcaactagatcttgaga

SEQ ID NO: 786 - DNA, 170 bp, Artificial sequence
  Atm.120_Casp8.45
  crRNA array
cgatttcttggctttatatatcttgtggaaaggacgaaacaccgtaatttctactaagtgtagatgacaggtagtcggcagctaataatttctactaagtgtagatctaccgagatcctgtgaatgttttttaagcttggcgtggatccgatatcaactagatcttgaga

SEQ ID NO: 787 - DNA, 170 bp, Artificial sequence
  Atm.120_Casp8.54
  crRNA array
cgatttcttggctttatatatcttgtggaaaggacgaaacaccgtaatttctactaagtgtagatgacaggtagtcggcagctaataatttctactaagtgtagatcagtgcagtcgtcgtaagatttttttaagcttggcgtggatccgatatcaactagatcttgaga

SEQ ID NO: 788 - DNA, 170 bp, Artificial sequence
  Atm.120_Cbwd1.84
  crRNA array
cgatttcttggctttatatatcttgtggaaaggacgaaacaccgtaatttctactaagtgtagatgacaggtagtcggcagctaataatttctactaagtgtagatcacagcaggtaacatgccgcttttttaagcttggcgtggatccgatatcaactagatcttgaga

SEQ ID NO: 789 - DNA, 170 bp, Artificial sequence
  Atm.120_Cbwd1.85
  crRNA array
cgatttcttggctttatatatcttgtggaaaggacgaaacaccgtaatttctactaagtgtagatgacaggtagtcggcagctaataatttctactaagtgtagatacagcaggtaacatgccgccttttttaagcttggcgtggatccgatatcaactagatcttgaga

SEQ ID NO: 790 - DNA, 170 bp, Artificial sequence
  Atm.120_Cdh1.387
  crRNA array
cgatttcttggctttatatatcttgtggaaaggacgaaacaccgtaatttctactaagtgtagatgacaggtagtcggcagctaataatttctactaagtgtagatctcggcgtctgccgggtccgttttttaagcttggcgtggatccgatatcaactagatcttgaga

SEQ ID NO: 791 - DNA, 170 bp, Artificial sequence
  Atm.120_Cdh1.58
  crRNA array
cgatttcttggctttatatatcttgtggaaaggacgaaacaccgtaatttctactaagtgtagatgacaggtagtcggcagctaataatttctactaagtgtagatctcgtccgcgcccgggactcttttttaagcttggcgtggatccgatatcaactagatcttgaga

SEQ ID NO: 792 - DNA, 170 bp, Artificial sequence
  Atm.120_Cdkn2a.647
  crRNA array
cgatttcttggctttatatatcttgtggaaaggacgaaacaccgtaatttctactaagtgtagatgacaggtagtcggcagctaataatttctactaagtgtagatgcaatcacgggagggagcagttttttaagcttggcgtggatccgatatcaactagatcttgaga

SEQ ID NO: 793 - DNA, 170 bp, Artificial sequence
  Atm.120_Cdkn2a.648
  crRNA array
cgatttcttggctttatatatcttgtggaaaggacgaaacaccgtaatttctactaagtgtagatgacaggtagtcggcagctaataatttctactaagtgtagatcaatcacgggagggagcagattttttaagcttggcgtggatccgatatcaactagatcttgaga

SEQ ID NO: 794 - DNA, 170 bp, Artificial sequence
  Atm.120_Cic.162
  crRNA array
cgatttcttggctttatatatcttgtggaaaggacgaaacaccgtaatttctactaagtgtagatgacaggtagtcggcagctaataatttctactaagtgtagatcgcaggcgcgcccggcggagttttttaagcttggcgtggatccgatatcaactagatcttgaga

SEQ ID NO: 795 - DNA, 170 bp, Artificial sequence
  Atm.120_Cic.164
  crRNA array
cgatttcttggctttatatatcttgtggaaaggacgaaacaccgtaatttctactaagtgtagatgacaggtagtcggcagctaataatttctactaagtgtagatcgggccctgggccggcggctttttttaagcttggcgtggatccgatatcaactagatcttgaga

SEQ ID NO: 796 - DNA, 170 bp, Artificial sequence
  Atm.120_Ctcf.229
  crRNA array
cgatttcttggctttatatatcttgtggaaaggacgaaacaccgtaatttctactaagtgtagatgacaggtagtcggcagctaataatttctactaagtgtagatggctggtggctgatagtctgttttttaagcttggcgtggatccgatatcaactagatcttgaga

SEQ ID NO: 797 - DNA, 170 bp, Artificial sequence
  Atm.120_Ctcf.809
  crRNA array
cgatttcttggctttatatatcttgtggaaaggacgaaacaccgtaatttctactaagtgtagatgacaggtagtcggcagctaataatttctactaagtgtagataagcgctatcatgatcccaattttttaagcttggcgtggatccgatatcaactagatcttgaga

SEQ ID NO: 798 - DNA, 170 bp, Artificial sequence
  Atm.120_Elf3.826
  crRNA array
cgatttcttggctttatatatcttgtggaaaggacgaaacaccgtaatttctactaagtgtagatgacaggtagtcggcagctaataatttctactaagtgtagattccgagacatcctaatccacttttttaagcttggcgtggatccgatatcaactagatcttgaga

SEQ ID NO: 799 - DNA, 170 bp, Artificial sequence
  Atm.120_Elf3.983
  crRNA array
cgatttcttggctttatatatcttgtggaaaggacgaaacaccgtaatttctactaagtgtagatgacaggtagtcggcagctaataatttctactaagtgtagattaggccccctaactggaccattttttaagcttggcgtggatccgatatcaactagatcttgaga

SEQ ID NO: 800 - DNA, 170 bp, Artificial sequence
  Atm.120_Ep300.310
  crRNA array
cgatttcttggctttatatatcttgtggaaaggacgaaacaccgtaatttctactaagtgtagatgacaggtagtcggcagctaataatttctactaagtgtagatatggtacgacagtgaggaagttttttaagcttggcgtggatccgatatcaactagatcttgaga

SEQ ID NO: 801 - DNA, 170 bp, Artificial sequence
  Atm.120_Ep300.587
  crRNA array
cgatttcttggctttatatatcttgtggaaaggacgaaacaccgtaatttctactaagtgtagatgacaggtagtcggcagctaataatttctactaagtgtagatcgccccggggcccccaaccattttttaagcttggcgtggatccgatatcaactagatcttgaga

SEQ ID NO: 802 - DNA, 170 bp, Artificial sequence
  Atm.120_Epha2.126
  crRNA array
cgatttcttggctttatatatcttgtggaaaggacgaaacaccgtaatttctactaagtgtagatgacaggtagtcggcagctaataatttctactaagtgtagatcctgtgccgccgcggccgccttttttaagcttggcgtggatccgatatcaactagatcttgaga

SEQ ID NO: 803 - DNA, 170 bp, Artificial sequence
  Atm.120_Epha2.5
  crRNA array
cgatttcttggctttatatatcttgtggaaaggacgaaacaccgtaatttctactaagtgtagatgacaggtagtcggcagctaataatttctactaagtgtagatcatgagctggcgccacccggttttttaagcttggcgtggatccgatatcaactagatcttgaga

SEQ ID NO: 804 - DNA, 170 bp, Artificial sequence
  Atm.120_Fat1.105
  crRNA array
cgatttcttggctttatatatcttgtggaaaggacgaaacaccgtaatttctactaagtgtagatgacaggtagtcggcagctaataatttctactaagtgtagataactcgaggtgacaacaagtttttttaagcttggcgtggatccgatatcaactagatcttgaga

SEQ ID NO: 805 - DNA, 170 bp, Artificial sequence
  Atm.120_Fat1.122
  crRNA array
cgatttcttggctttatatatcttgtggaaaggacgaaacaccgtaatttctactaagtgtagatgacaggtagtcggcagctaataatttctactaagtgtagatccatcgacatggaaacgggattttttaagcttggcgtggatccgatatcaactagatcttgaga

SEQ ID NO: 806 - DNA, 170 bp, Artificial sequence
  Atm.120_Fbxw7.21
  crRNA array
cgatttcttggctttatatatcttgtggaaaggacgaaacaccgtaatttctactaagtgtagatgacaggtagtcggcagctaataatttctactaagtgtagattaatgtgccgtagaaacccattttttaagcttggcgtggatccgatatcaactagatcttgaga

SEQ ID NO: 807 - DNA, 170 bp, Artificial sequence
  Atm.120_Fbxw7.23
  crRNA array
cgatttcttggctttatatatcttgtggaaaggacgaaacaccgtaatttctactaagtgtagatgacaggtagtcggcagctaataatttctactaagtgtagatatgtgccgtagaaacccatattttttaagcttggcgtggatccgatatcaactagatcttgaga

SEQ ID NO: 808 - DNA, 170 bp, Artificial sequence
  Atm.120_Gata3.34
  crRNA array
cgatttcttggctttatatatcttgtggaaaggacgaaacaccgtaatttctactaagtgtagatgacaggtagtcggcagctaataatttctactaagtgtagatctaaactatcccgcaaagatttttttaagcttggcgtggatccgatatcaactagatcttgaga

SEQ ID NO: 809 - DNA, 170 bp, Artificial sequence
  Atm.120_Gata3.47
  crRNA array
cgatttcttggctttatatatcttgtggaaaggacgaaacaccgtaatttctactaagtgtagatgacaggtagtcggcagctaataatttctactaagtgtagatcgtagtaggacgggacgtggttttttaagcttggcgtggatccgatatcaactagatcttgaga

SEQ ID NO: 810 - DNA, 170 bp, Artificial sequence
  Atm.120_H2-Q2.1
  crRNA array
cgatttcttggctttatatatcttgtggaaaggacgaaacaccgtaatttctactaagtgtagatgacaggtagtcggcagctaataatttctactaagtgtagatagggcggccaccaacagcagttttttaagcttggcgtggatccgatatcaactagatcttgaga

SEQ ID NO: 811 - DNA, 170 bp, Artificial sequence
  Atm.120_H2-Q2.2
  crRNA array
cgatttcttggctttatatatcttgtggaaaggacgaaacaccgtaatttctactaagtgtagatgacaggtagtcggcagctaataatttctactaagtgtagattaacctgcgcccgctgctgattttttaagcttggcgtggatccgatatcaactagatcttgaga

SEQ ID NO: 812 - DNA, 170 bp, Artificial sequence
  Atm.120_Kdm5c.1878
  crRNA array
cgatttcttggctttatatatcttgtggaaaggacgaaacaccgtaatttctactaagtgtagatgacaggtagtcggcagctaataatttctactaagtgtagatagagcacggcacccgcccccttttttaagcttggcgtggatccgatatcaactagatcttgaga

SEQ ID NO: 813 - DNA, 170 bp, Artificial sequence
  Atm.120_Kdm5c.1879
  crRNA array
cgatttcttggctttatatatcttgtggaaaggacgaaacaccgtaatttctactaagtgtagatgacaggtagtcggcagctaataatttctactaagtgtagatgagcacggcacccgccccccttttttaagcttggcgtggatccgatatcaactagatcttgaga

SEQ ID NO: 814 - DNA, 170 bp, Artificial sequence
  Atm.120_Kdm6a.56
  crRNA array
cgatttcttggctttatatatcttgtggaaaggacgaaacaccgtaatttctactaagtgtagatgacaggtagtcggcagctaataatttctactaagtgtagattcgctgccgcctctcgcggcttttttaagcttggcgtggatccgatatcaactagatcttgaga

SEQ ID NO: 815 - DNA, 170 bp, Artificial sequence
  Atm.120_Kdm6a.57
  crRNA array
cgatttcttggctttatatatcttgtggaaaggacgaaacaccgtaatttctactaagtgtagatgacaggtagtcggcagctaataatttctactaagtgtagatcgctgccgcctctcgcggcattttttaagcttggcgtggatccgatatcaactagatcttgaga

SEQ ID NO: 816 - DNA, 170 bp, Artificial sequence
  Atm.120_Kmt2b.265
  crRNA array
cgatttcttggctttatatatcttgtggaaaggacgaaacaccgtaatttctactaagtgtagatgacaggtagtcggcagctaataatttctactaagtgtagatccccaagtgaagcccacctgttttttaagcttggcgtggatccgatatcaactagatcttgaga

SEQ ID NO: 817 - DNA, 170 bp, Artificial sequence
  Atm.120_Kmt2b.298
  crRNA array
cgatttcttggctttatatatcttgtggaaaggacgaaacaccgtaatttctactaagtgtagatgacaggtagtcggcagctaataatttctactaagtgtagattccggcagggaccggctggcttttttaagcttggcgtggatccgatatcaactagatcttgaga

SEQ ID NO: 818 - DNA, 170 bp, Artificial sequence
  Atm.120_Kmt2c.1962
  crRNA array
cgatttcttggctttatatatcttgtggaaaggacgaaacaccgtaatttctactaagtgtagatgacaggtagtcggcagctaataatttctactaagtgtagatgtgacgatctgtgccacaagttttttaagcttggcgtggatccgatatcaactagatcttgaga

SEQ ID NO: 819 - DNA, 170 bp, Artificial sequence
  Atm.120_Kmt2c.2236
  crRNA array
cgatttcttggctttatatatcttgtggaaaggacgaaacaccgtaatttctactaagtgtagatgacaggtagtcggcagctaataatttctactaagtgtagatactcgacctccacctccctattttttaagcttggcgtggatccgatatcaactagatcttgaga

SEQ ID NO: 820 - DNA, 170 bp, Artificial sequence
  Atm.120_Kmt2d.316
  crRNA array
cgatttcttggctttatatatcttgtggaaaggacgaaacaccgtaatttctactaagtgtagatgacaggtagtcggcagctaataatttctactaagtgtagatactccaggccacccaggtggttttttaagcttggcgtggatccgatatcaactagatcttgaga

SEQ ID NO: 821 - DNA, 170 bp, Artificial sequence
  Atm.120_Kmt2d.416
  crRNA array
cgatttcttggctttatatatcttgtggaaaggacgaaacaccgtaatttctactaagtgtagatgacaggtagtcggcagctaataatttctactaagtgtagattaaacccccgggggaagggtttttttaagcttggcgtggatccgatatcaactagatcttgaga

SEQ ID NO: 822 - DNA, 170 bp, Artificial sequence
  Atm.120_Map2k4.119
  crRNA array
cgatttcttggctttatatatcttgtggaaaggacgaaacaccgtaatttctactaagtgtagatgacaggtagtcggcagctaataatttctactaagtgtagattgctgtgtgggcggccacatttttttaagcttggcgtggatccgatatcaactagatcttgaga

SEQ ID NO: 823 - DNA, 170 bp, Artificial sequence
  Atm.120_Map2k4.1261
  crRNA array
cgatttcttggctttatatatcttgtggaaaggacgaaacaccgtaatttctactaagtgtagatgacaggtagtcggcagctaataatttctactaagtgtagatgatgtagtaatgcggagtagttttttaagcttggcgtggatccgatatcaactagatcttgaga

SEQ ID NO: 824 - DNA, 170 bp, Artificial sequence
  Atm.120_Map3k1.235
  crRNA array
cgatttcttggctttatatatcttgtggaaaggacgaaacaccgtaatttctactaagtgtagatgacaggtagtcggcagctaataatttctactaagtgtagataaaacgctactgatcgatcgttttttaagcttggcgtggatccgatatcaactagatcttgaga

SEQ ID NO: 825 - DNA, 170 bp, Artificial sequence
  Atm.120_Map3k1.3838
  crRNA array
cgatttcttggctttatatatcttgtggaaaggacgaaacaccgtaatttctactaagtgtagatgacaggtagtcggcagctaataatttctactaagtgtagatccaacaacagggccccactattttttaagcttggcgtggatccgatatcaactagatcttgaga

SEQ ID NO: 826 - DNA, 170 bp, Artificial sequence
  Atm.120_Mga.1655
  crRNA array
cgatttcttggctttatatatcttgtggaaaggacgaaacaccgtaatttctactaagtgtagatgacaggtagtcggcagctaataatttctactaagtgtagatcgagaagtggagagcatattttttttaagcttggcgtggatccgatatcaactagatcttgaga

SEQ ID NO: 827 - DNA, 170 bp, Artificial sequence
  Atm.120_Mga.93
  crRNA array
cgatttcttggctttatatatcttgtggaaaggacgaaacaccgtaatttctactaagtgtagatgacaggtagtcggcagctaataatttctactaagtgtagatgagaaggctccccataatgtttttttaagcttggcgtggatccgatatcaactagatcttgaga

SEQ ID NO: 828 - DNA, 170 bp, Artificial sequence
  Atm.120_Nf1.746
  crRNA array
cgatttcttggctttatatatcttgtggaaaggacgaaacaccgtaatttctactaagtgtagatgacaggtagtcggcagctaataatttctactaagtgtagattaagcataatgatgatgccattttttaagcttggcgtggatccgatatcaactagatcttgaga

SEQ ID NO: 829 - DNA, 170 bp, Artificial sequence
  Atm.120_Nf1.97
  crRNA array
cgatttcttggctttatatatcttgtggaaaggacgaaacaccgtaatttctactaagtgtagatgacaggtagtcggcagctaataatttctactaagtgtagatagcccgctacatgctgatgcttttttaagcttggcgtggatccgatatcaactagatcttgaga

SEQ ID NO: 830 - DNA, 170 bp, Artificial sequence
  Atm.120_Nf2.356
  crRNA array
cgatttcttggctttatatatcttgtggaaaggacgaaacaccgtaatttctactaagtgtagatgacaggtagtcggcagctaataatttctactaagtgtagatcggagtcatctgatagagatttttttaagcttggcgtggatccgatatcaactagatcttgaga

SEQ ID NO: 831 - DNA, 170 bp, Artificial sequence
  Atm.120_Nf2.768
  crRNA array
cgatttcttggctttatatatcttgtggaaaggacgaaacaccgtaatttctactaagtgtagatgacaggtagtcggcagctaataatttctactaagtgtagatccgaagccccagtgtccggcttttttaagcttggcgtggatccgatatcaactagatcttgaga

SEQ ID NO: 832 - DNA, 170 bp, Artificial sequence
  Atm.120_Notch1.1849
  crRNA array
cgatttcttggctttatatatcttgtggaaaggacgaaacaccgtaatttctactaagtgtagatgacaggtagtcggcagctaataatttctactaagtgtagatctggcgggtgggcggcgctgttttttaagcttggcgtggatccgatatcaactagatcttgaga

SEQ ID NO: 833 - DNA, 170 bp, Artificial sequence
  Atm.120_Notch1.649
  crRNA array
cgatttcttggctttatatatcttgtggaaaggacgaaacaccgtaatttctactaagtgtagatgacaggtagtcggcagctaataatttctactaagtgtagattgggccaacgatgccaggacttttttaagcttggcgtggatccgatatcaactagatcttgaga

SEQ ID NO: 834 - DNA, 170 bp, Artificial sequence
  Atm.120_Nsd1.70
  crRNA array
cgatttcttggctttatatatcttgtggaaaggacgaaacaccgtaatttctactaagtgtagatgacaggtagtcggcagctaataatttctactaagtgtagatactggtgtggacgatgcagattttttaagcttggcgtggatccgatatcaactagatcttgaga

SEQ ID NO: 835 - DNA, 170 bp, Artificial sequence
  Atm.120_Nsd1.90
  crRNA array
cgatttcttggctttatatatcttgtggaaaggacgaaacaccgtaatttctactaagtgtagatgacaggtagtcggcagctaataatttctactaagtgtagataggagctaacggcaagaatgttttttaagcttggcgtggatccgatatcaactagatcttgaga

SEQ ID NO: 836 - DNA, 170 bp, Artificial sequence
  Atm.120_Pbrm1.1236
  crRNA array
cgatttcttggctttatatatcttgtggaaaggacgaaacaccgtaatttctactaagtgtagatgacaggtagtcggcagctaataatttctactaagtgtagatgccgataaaaccaacagccgttttttaagcttggcgtggatccgatatcaactagatcttgaga

SEQ ID NO: 837 - DNA, 170 bp, Artificial sequence
  Atm.120_Pbrm1.969
  crRNA array
cgatttcttggctttatatatcttgtggaaaggacgaaacaccgtaatttctactaagtgtagatgacaggtagtcggcagctaataatttctactaagtgtagatgagccctaatgaacagctcattttttaagcttggcgtggatccgatatcaactagatcttgaga

SEQ ID NO: 838 - DNA, 170 bp, Artificial sequence
  Atm.120_Pik3r1.76
  crRNA array
cgatttcttggctttatatatcttgtggaaaggacgaaacaccgtaatttctactaagtgtagatgacaggtagtcggcagctaataatttctactaagtgtagataaaacctatacggcccgcacttttttaagcttggcgtggatccgatatcaactagatcttgaga

SEQ ID NO: 839 - DNA, 170 bp, Artificial sequence
  Atm.120_Pik3r1.77
  crRNA array
cgatttcttggctttatatatcttgtggaaaggacgaaacaccgtaatttctactaagtgtagatgacaggtagtcggcagctaataatttctactaagtgtagataaacctatacggcccgcactttttttaagcttggcgtggatccgatatcaactagatcttgaga

SEQ ID NO: 840 - DNA, 170 bp, Artificial sequence
  Atm.120_Pten.240
  crRNA array
cgatttcttggctttatatatcttgtggaaaggacgaaacaccgtaatttctactaagtgtagatgacaggtagtcggcagctaataatttctactaagtgtagattgcatacgctatagctgcttttttttaagcttggcgtggatccgatatcaactagatcttgaga

SEQ ID NO: 841 - DNA, 170 bp, Artificial sequence
  Atm.120_Pten.265
  crRNA array
cgatttcttggctttatatatcttgtggaaaggacgaaacaccgtaatttctactaagtgtagatgacaggtagtcggcagctaataatttctactaagtgtagataagcgtggtgcgtgacgcacttttttaagcttggcgtggatccgatatcaactagatcttgaga

SEQ ID NO: 842 - DNA, 170 bp, Artificial sequence
  Atm.120_Rasa1.1478
  crRNA array
cgatttcttggctttatatatcttgtggaaaggacgaaacaccgtaatttctactaagtgtagatgacaggtagtcggcagctaataatttctactaagtgtagatcgataatggtctatgatgtcttttttaagcttggcgtggatccgatatcaactagatcttgaga

SEQ ID NO: 843 - DNA, 170 bp, Artificial sequence
  Atm.120_Rasa1.223
  crRNA array
cgatttcttggctttatatatcttgtggaaaggacgaaacaccgtaatttctactaagtgtagatgacaggtagtcggcagctaataatttctactaagtgtagattccatggagtatcgtgctcgttttttaagcttggcgtggatccgatatcaactagatcttgaga

SEQ ID NO: 844 - DNA, 170 bp, Artificial sequence
  Atm.120_Rb1.211
  crRNA array
cgatttcttggctttatatatcttgtggaaaggacgaaacaccgtaatttctactaagtgtagatgacaggtagtcggcagctaataatttctactaagtgtagattctgacatgatcgggtacctttttttaagcttggcgtggatccgatatcaactagatcttgaga

SEQ ID NO: 845 - DNA, 170 bp, Artificial sequence
  Atm.120_Rb1.394
  crRNA array
cgatttcttggctttatatatcttgtggaaaggacgaaacaccgtaatttctactaagtgtagatgacaggtagtcggcagctaataatttctactaagtgtagatagaaatctcgaagcaggatcttttttaagcttggcgtggatccgatatcaactagatcttgaga

SEQ ID NO: 846 - DNA, 170 bp, Artificial sequence
  Atm.120_Rbm10.5
  crRNA array
cgatttcttggctttatatatcttgtggaaaggacgaaacaccgtaatttctactaagtgtagatgacaggtagtcggcagctaataatttctactaagtgtagatacgaaacctgaacccacacattttttaagcttggcgtggatccgatatcaactagatcttgaga

SEQ ID NO: 847 - DNA, 170 bp, Artificial sequence
  Atm.120_Rbm10.6
  crRNA array
cgatttcttggctttatatatcttgtggaaaggacgaaacaccgtaatttctactaagtgtagatgacaggtagtcggcagctaataatttctactaagtgtagatcgaaacctgaacccacacagttttttaagcttggcgtggatccgatatcaactagatcttgaga

SEQ ID NO: 848 - DNA, 170 bp, Artificial sequence
  Atm.120_Rnf43.1920
  crRNA array
cgatttcttggctttatatatcttgtggaaaggacgaaacaccgtaatttctactaagtgtagatgacaggtagtcggcagctaataatttctactaagtgtagatatccccgtgccgtggactccttttttaagcttggcgtggatccgatatcaactagatcttgaga

SEQ ID NO: 849 - DNA, 170 bp, Artificial sequence
  Atm.120_Rnf43.39
  crRNA array
cgatttcttggctttatatatcttgtggaaaggacgaaacaccgtaatttctactaagtgtagatgacaggtagtcggcagctaataatttctactaagtgtagatcaaggggatcactctgataattttttaagcttggcgtggatccgatatcaactagatcttgaga

SEQ ID NO: 850 - DNA, 170 bp, Artificial sequence
  Atm.120_Runx1.204
  crRNA array
cgatttcttggctttatatatcttgtggaaaggacgaaacaccgtaatttctactaagtgtagatgacaggtagtcggcagctaataatttctactaagtgtagattaaataagtccagccgttttttttttaagcttggcgtggatccgatatcaactagatcttgaga

SEQ ID NO: 851 - DNA, 170 bp, Artificial sequence
  Atm.120_Runx1.81
  crRNA array
cgatttcttggctttatatatcttgtggaaaggacgaaacaccgtaatttctactaagtgtagatgacaggtagtcggcagctaataatttctactaagtgtagataggacgcgtatgggaattttttttttaagcttggcgtggatccgatatcaactagatcttgaga

SEQ ID NO: 852 - DNA, 170 bp, Artificial sequence
  Atm.120_Setd2.143
  crRNA array
cgatttcttggctttatatatcttgtggaaaggacgaaacaccgtaatttctactaagtgtagatgacaggtagtcggcagctaataatttctactaagtgtagatgcacaaccacaacagactggttttttaagcttggcgtggatccgatatcaactagatcttgaga

SEQ ID NO: 853 - DNA, 170 bp, Artificial sequence
  Atm.120_Setd2.508
  crRNA array
cgatttcttggctttatatatcttgtggaaaggacgaaacaccgtaatttctactaagtgtagatgacaggtagtcggcagctaataatttctactaagtgtagattacgatcccgagcacccgacttttttaagcttggcgtggatccgatatcaactagatcttgaga

SEQ ID NO: 854 - DNA, 170 bp, Artificial sequence
  Atm.120_Smad4.3038
  crRNA array
cgatttcttggctttatatatcttgtggaaaggacgaaacaccgtaatttctactaagtgtagatgacaggtagtcggcagctaataatttctactaagtgtagatatctgcggcagtgtcaccggttttttaagcttggcgtggatccgatatcaactagatcttgaga

SEQ ID NO: 855 - DNA, 170 bp, Artificial sequence
  Atm.120_Smad4.39
  crRNA array
cgatttcttggctttatatatcttgtggaaaggacgaaacaccgtaatttctactaagtgtagatgacaggtagtcggcagctaataatttctactaagtgtagatagtcaaacgcatactgacaattttttaagcttggcgtggatccgatatcaactagatcttgaga

SEQ ID NO: 856 - DNA, 170 bp, Artificial sequence
  Atm.120_Stag2.1409
  crRNA array
cgatttcttggctttatatatcttgtggaaaggacgaaacaccgtaatttctactaagtgtagatgacaggtagtcggcagctaataatttctactaagtgtagatgctaataactgcggaagggcttttttaagcttggcgtggatccgatatcaactagatcttgaga

SEQ ID NO: 857 - DNA, 170 bp, Artificial sequence
  Atm.120_Stag2.4401
  crRNA array
cgatttcttggctttatatatcttgtggaaaggacgaaacaccgtaatttctactaagtgtagatgacaggtagtcggcagctaataatttctactaagtgtagattaatcgtccagtggtgtatattttttaagcttggcgtggatccgatatcaactagatcttgaga

SEQ ID NO: 858 - DNA, 170 bp, Artificial sequence
  Atm.120_Tbl1xr1.1
  crRNA array
cgatttcttggctttatatatcttgtggaaaggacgaaacaccgtaatttctactaagtgtagatgacaggtagtcggcagctaataatttctactaagtgtagatggatgcgcatactggtgaagttttttaagcttggcgtggatccgatatcaactagatcttgaga

SEQ ID NO: 859 - DNA, 170 bp, Artificial sequence
  Atm.120_Tbl1xr1.83
  crRNA array
cgatttcttggctttatatatcttgtggaaaggacgaaacaccgtaatttctactaagtgtagatgacaggtagtcggcagctaataatttctactaagtgtagatatggtcgacccatcgagtctttttttaagcttggcgtggatccgatatcaactagatcttgaga

SEQ ID NO: 860 - DNA, 170 bp, Artificial sequence
  Atm.120_Tgfbr2.290
  crRNA array
cgatttcttggctttatatatcttgtggaaaggacgaaacaccgtaatttctactaagtgtagatgacaggtagtcggcagctaataatttctactaagtgtagatcctctcggcgcccgggtaaattttttaagcttggcgtggatccgatatcaactagatcttgaga

SEQ ID NO: 861 - DNA, 170 bp, Artificial sequence
  Atm.120_Tgfbr2.292
  crRNA array
cgatttcttggctttatatatcttgtggaaaggacgaaacaccgtaatttctactaagtgtagatgacaggtagtcggcagctaataatttctactaagtgtagatcccgggcgccgagagggaaattttttaagcttggcgtggatccgatatcaactagatcttgaga

SEQ ID NO: 862 - DNA, 170 bp, Artificial sequence
  Atm.120_Trp53.4
  crRNA array
cgatttcttggctttatatatcttgtggaaaggacgaaacaccgtaatttctactaagtgtagatgacaggtagtcggcagctaataatttctactaagtgtagatccctgaactgcccccagggattttttaagcttggcgtggatccgatatcaactagatcttgaga

SEQ ID NO: 863 - DNA, 170 bp, Artificial sequence
  Atm.120_Trp53.528
  crRNA array
cgatttcttggctttatatatcttgtggaaaggacgaaacaccgtaatttctactaagtgtagatgacaggtagtcggcagctaataatttctactaagtgtagatgctgggccagcagagacctgttttttaagcttggcgtggatccgatatcaactagatcttgaga

SEQ ID NO: 864 - DNA, 170 bp, Artificial sequence
  Atm.120_Vhl.1
  crRNA array
cgatttcttggctttatatatcttgtggaaaggacgaaacaccgtaatttctactaagtgtagatgacaggtagtcggcagctaataatttctactaagtgtagatagggctcccggcggccatttttttttaagcttggcgtggatccgatatcaactagatcttgaga

SEQ ID NO: 865 - DNA, 170 bp, Artificial sequence
  Atm.120_Vhl.151
  crRNA array
cgatttcttggctttatatatcttgtggaaaggacgaaacaccgtaatttctactaagtgtagatgacaggtagtcggcagctaataatttctactaagtgtagattagagcactcacccgagggattttttaagcttggcgtggatccgatatcaactagatcttgaga

SEQ ID NO: 866 - DNA, 170 bp, Artificial sequence
  Atm.120_Zc3h13.1387
  crRNA array
cgatttcttggctttatatatcttgtggaaaggacgaaacaccgtaatttctactaagtgtagatgacaggtagtcggcagctaataatttctactaagtgtagatgtgacgccggtcatgtgactttttttaagcttggcgtggatccgatatcaactagatcttgaga

SEQ ID NO: 867 - DNA, 170 bp, Artificial sequence
  Atm.120_Zc3h13.1777
  crRNA array
cgatttcttggctttatatatcttgtggaaaggacgaaacaccgtaatttctactaagtgtagatgacaggtagtcggcagctaataatttctactaagtgtagatgatgctgccagtgtagcggcttttttaagcttggcgtggatccgatatcaactagatcttgaga

SEQ ID NO: 868 - DNA, 170 bp, Artificial sequence
  Atm.997_Acvr2a.155
  crRNA array
cgatttcttggctttatatatcttgtggaaaggacgaaacaccgtaatttctactaagtgtagatgagaaagtctccgaatcgtttaatttctactaagtgtagatggacctggctaatcaagtatttttttaagcttggcgtggatccgatatcaactagatcttgaga

SEQ ID NO: 869 - DNA, 170 bp, Artificial sequence
  Atm.997_Acvr2a.70
  crRNA array
cgatttcttggctttatatatcttgtggaaaggacgaaacaccgtaatttctactaagtgtagatgagaaagtctccgaatcgtttaatttctactaagtgtagatcccgaggcgccggagaagccttttttaagcttggcgtggatccgatatcaactagatcttgaga

SEQ ID NO: 870 - DNA, 170 bp, Artificial sequence
  Atm.997_Apc.21
  crRNA array
cgatttcttggctttatatatcttgtggaaaggacgaaacaccgtaatttctactaagtgtagatgagaaagtctccgaatcgtttaatttctactaagtgtagatgtgatccacacgtgtagctgttttttaagcttggcgtggatccgatatcaactagatcttgaga

SEQ ID NO: 871 - DNA, 170 bp, Artificial sequence
  Atm.997_Apc.867
  crRNA array
cgatttcttggctttatatatcttgtggaaaggacgaaacaccgtaatttctactaagtgtagatgagaaagtctccgaatcgtttaatttctactaagtgtagatcagtcccaggcggcggaagcttttttaagcttggcgtggatccgatatcaactagatcttgaga

SEQ ID NO: 872 - DNA, 170 bp, Artificial sequence
  Atm.997_Arid1a.2
  crRNA array
cgatttcttggctttatatatcttgtggaaaggacgaaacaccgtaatttctactaagtgtagatgagaaagtctccgaatcgtttaatttctactaagtgtagatcccgcgcccccgtcctggggttttttaagcttggcgtggatccgatatcaactagatcttgaga

SEQ ID NO: 873 - DNA, 170 bp, Artificial sequence
  Atm.997_Arid1a.5
  crRNA array
cgatttcttggctttatatatcttgtggaaaggacgaaacaccgtaatttctactaagtgtagatgagaaagtctccgaatcgtttaatttctactaagtgtagatcccgcgctcggccgctgccgttttttaagcttggcgtggatccgatatcaactagatcttgaga

SEQ ID NO: 874 - DNA, 170 bp, Artificial sequence
  Atm.997_Arid2.166
  crRNA array
cgatttcttggctttatatatcttgtggaaaggacgaaacaccgtaatttctactaagtgtagatgagaaagtctccgaatcgtttaatttctactaagtgtagataaccgcgatctgggttttttttttttaagcttggcgtggatccgatatcaactagatcttgaga

SEQ ID NO: 875 - DNA, 170 bp, Artificial sequence
  Atm.997_Arid2.172
  crRNA array
cgatttcttggctttatatatcttgtggaaaggacgaaacaccgtaatttctactaagtgtagatgagaaagtctccgaatcgtttaatttctactaagtgtagatctggacgagctgcggcagttttttttaagcttggcgtggatccgatatcaactagatcttgaga

SEQ ID NO: 876 - DNA, 170 bp, Artificial sequence
  Atm.997_Atrx.249
  crRNA array
cgatttcttggctttatatatcttgtggaaaggacgaaacaccgtaatttctactaagtgtagatgagaaagtctccgaatcgtttaatttctactaagtgtagattagccagtcgctcatatctcttttttaagcttggcgtggatccgatatcaactagatcttgaga

SEQ ID NO: 877 - DNA, 170 bp, Artificial sequence
  Atm.997_Atrx.251
  crRNA array
cgatttcttggctttatatatcttgtggaaaggacgaaacaccgtaatttctactaagtgtagatgagaaagtctccgaatcgtttaatttctactaagtgtagatgccagtcgctcatatctctgttttttaagcttggcgtggatccgatatcaactagatcttgaga

SEQ ID NO: 878 - DNA, 170 bp, Artificial sequence
  Atm.997_Bcor.203
  crRNA array
cgatttcttggctttatatatcttgtggaaaggacgaaacaccgtaatttctactaagtgtagatgagaaagtctccgaatcgtttaatttctactaagtgtagatccccggagcggagtccaggcttttttaagcttggcgtggatccgatatcaactagatcttgaga

SEQ ID NO: 879 - DNA, 170 bp, Artificial sequence
  Atm.997_Bcor.475
  crRNA array
cgatttcttggctttatatatcttgtggaaaggacgaaacaccgtaatttctactaagtgtagatgagaaagtctccgaatcgtttaatttctactaagtgtagattgcaacccctctgtatgggattttttaagcttggcgtggatccgatatcaactagatcttgaga

SEQ ID NO: 880 - DNA, 170 bp, Artificial sequence
  Atm.997_Brca1.112
  crRNA array
cgatttcttggctttatatatcttgtggaaaggacgaaacaccgtaatttctactaagtgtagatgagaaagtctccgaatcgtttaatttctactaagtgtagatctagacgctctgtggagactttttttaagcttggcgtggatccgatatcaactagatcttgaga

SEQ ID NO: 881 - DNA, 170 bp, Artificial sequence
  Atm.997_Brca1.53
  crRNA array
cgatttcttggctttatatatcttgtggaaaggacgaaacaccgtaatttctactaagtgtagatgagaaagtctccgaatcgtttaatttctactaagtgtagataatgaggaggcgtcgatcatttttttaagcttggcgtggatccgatatcaactagatcttgaga

SEQ ID NO: 882 - DNA, 170 bp, Artificial sequence
  Atm.997_Casp8.45
  crRNA array
cgatttcttggctttatatatcttgtggaaaggacgaaacaccgtaatttctactaagtgtagatgagaaagtctccgaatcgtttaatttctactaagtgtagatctaccgagatcctgtgaatgttttttaagcttggcgtggatccgatatcaactagatcttgaga

SEQ ID NO: 883 - DNA, 170 bp, Artificial sequence
  Atm.997_Casp8.54
  crRNA array
cgatttcttggctttatatatcttgtggaaaggacgaaacaccgtaatttctactaagtgtagatgagaaagtctccgaatcgtttaatttctactaagtgtagatcagtgcagtcgtcgtaagatttttttaagcttggcgtggatccgatatcaactagatcttgaga

SEQ ID NO: 884 - DNA, 170 bp, Artificial sequence
  Atm.997_Cbwd1.84
  crRNA array
cgatttcttggctttatatatcttgtggaaaggacgaaacaccgtaatttctactaagtgtagatgagaaagtctccgaatcgtttaatttctactaagtgtagatcacagcaggtaacatgccgcttttttaagcttggcgtggatccgatatcaactagatcttgaga

SEQ ID NO: 885 - DNA, 170 bp, Artificial sequence
  Atm.997_Cbwd1.85
  crRNA array
cgatttcttggctttatatatcttgtggaaaggacgaaacaccgtaatttctactaagtgtagatgagaaagtctccgaatcgtttaatttctactaagtgtagatacagcaggtaacatgccgccttttttaagcttggcgtggatccgatatcaactagatcttgaga

SEQ ID NO: 886 - DNA, 170 bp, Artificial sequence
  Atm.997_Cdh1.387
  crRNA array
cgatttcttggctttatatatcttgtggaaaggacgaaacaccgtaatttctactaagtgtagatgagaaagtctccgaatcgtttaatttctactaagtgtagatctcggcgtctgccgggtccgttttttaagcttggcgtggatccgatatcaactagatcttgaga

SEQ ID NO: 887 - DNA, 170 bp, Artificial sequence
  Atm.997_Cdh1.58
  crRNA array
cgatttcttggctttatatatcttgtggaaaggacgaaacaccgtaatttctactaagtgtagatgagaaagtctccgaatcgtttaatttctactaagtgtagatctcgtccgcgcccgggactcttttttaagcttggcgtggatccgatatcaactagatcttgaga

SEQ ID NO: 888 - DNA, 170 bp, Artificial sequence
  Atm.997_Cdkn2a.647
  crRNA array
cgatttcttggctttatatatcttgtggaaaggacgaaacaccgtaatttctactaagtgtagatgagaaagtctccgaatcgtttaatttctactaagtgtagatgcaatcacgggagggagcagttttttaagcttggcgtggatccgatatcaactagatcttgaga

SEQ ID NO: 889 - DNA, 170 bp, Artificial sequence
  Atm.997_Cdkn2a.648
  crRNA array
cgatttcttggctttatatatcttgtggaaaggacgaaacaccgtaatttctactaagtgtagatgagaaagtctccgaatcgtttaatttctactaagtgtagatcaatcacgggagggagcagattttttaagcttggcgtggatccgatatcaactagatcttgaga

SEQ ID NO: 890 - DNA, 170 bp, Artificial sequence
  Atm.997_Cic.162
  crRNA array
cgatttcttggctttatatatcttgtggaaaggacgaaacaccgtaatttctactaagtgtagatgagaaagtctccgaatcgtttaatttctactaagtgtagatcgcaggcgcgcccggcggagttttttaagcttggcgtggatccgatatcaactagatcttgaga

SEQ ID NO: 891 - DNA, 170 bp, Artificial sequence
  Atm.997_Cic.164
  crRNA array
cgatttcttggctttatatatcttgtggaaaggacgaaacaccgtaatttctactaagtgtagatgagaaagtctccgaatcgtttaatttctactaagtgtagatcgggccctgggccggcggctttttttaagcttggcgtggatccgatatcaactagatcttgaga

SEQ ID NO: 892 - DNA, 170 bp, Artificial sequence
  Atm.997_Ctcf.229
  crRNA array
cgatttcttggctttatatatcttgtggaaaggacgaaacaccgtaatttctactaagtgtagatgagaaagtctccgaatcgtttaatttctactaagtgtagatggctggtggctgatagtctgttttttaagcttggcgtggatccgatatcaactagatcttgaga

SEQ ID NO: 893 - DNA, 170 bp, Artificial sequence
  Atm.997_Ctcf.809
  crRNA array
cgatttcttggctttatatatcttgtggaaaggacgaaacaccgtaatttctactaagtgtagatgagaaagtctccgaatcgtttaatttctactaagtgtagataagcgctatcatgatcccaattttttaagcttggcgtggatccgatatcaactagatcttgaga

SEQ ID NO: 894 - DNA, 170 bp, Artificial sequence
  Atm.997_Elf3.826
  crRNA array
cgatttcttggctttatatatcttgtggaaaggacgaaacaccgtaatttctactaagtgtagatgagaaagtctccgaatcgtttaatttctactaagtgtagattccgagacatcctaatccacttttttaagcttggcgtggatccgatatcaactagatcttgaga

SEQ ID NO: 895 - DNA, 170 bp, Artificial sequence
  Atm.997_Elf3.983
  crRNA array
cgatttcttggctttatatatcttgtggaaaggacgaaacaccgtaatttctactaagtgtagatgagaaagtctccgaatcgtttaatttctactaagtgtagattaggccccctaactggaccattttttaagcttggcgtggatccgatatcaactagatcttgaga

SEQ ID NO: 896 - DNA, 170 bp, Artificial sequence
  Atm.997_Ep300.310
  crRNA array
cgatttcttggctttatatatcttgtggaaaggacgaaacaccgtaatttctactaagtgtagatgagaaagtctccgaatcgtttaatttctactaagtgtagatatggtacgacagtgaggaagttttttaagcttggcgtggatccgatatcaactagatcttgaga

SEQ ID NO: 897 - DNA, 170 bp, Artificial sequence
  Atm.997_Ep300.587
  crRNA array
cgatttcttggctttatatatcttgtggaaaggacgaaacaccgtaatttctactaagtgtagatgagaaagtctccgaatcgtttaatttctactaagtgtagatcgccccggggcccccaaccattttttaagcttggcgtggatccgatatcaactagatcttgaga

SEQ ID NO: 898 - DNA, 170 bp, Artificial sequence
  Atm.997_Epha2.126
  crRNA array
cgatttcttggctttatatatcttgtggaaaggacgaaacaccgtaatttctactaagtgtagatgagaaagtctccgaatcgtttaatttctactaagtgtagatcctgtgccgccgcggccgccttttttaagcttggcgtggatccgatatcaactagatcttgaga

SEQ ID NO: 899 - DNA, 170 bp, Artificial sequence
  Atm.997_Epha2.5
  crRNA array
cgatttcttggctttatatatcttgtggaaaggacgaaacaccgtaatttctactaagtgtagatgagaaagtctccgaatcgtttaatttctactaagtgtagatcatgagctggcgccacccggttttttaagcttggcgtggatccgatatcaactagatcttgaga

SEQ ID NO: 900 - DNA, 170 bp, Artificial sequence
  Atm.997_Fat1.105
  crRNA array
cgatttcttggctttatatatcttgtggaaaggacgaaacaccgtaatttctactaagtgtagatgagaaagtctccgaatcgtttaatttctactaagtgtagataactcgaggtgacaacaagtttttttaagcttggcgtggatccgatatcaactagatcttgaga

SEQ ID NO: 901 - DNA, 170 bp, Artificial sequence
  Atm.997_Fat1.122
  crRNA array
cgatttcttggctttatatatcttgtggaaaggacgaaacaccgtaatttctactaagtgtagatgagaaagtctccgaatcgtttaatttctactaagtgtagatccatcgacatggaaacgggattttttaagcttggcgtggatccgatatcaactagatcttgaga

SEQ ID NO: 902 - DNA, 170 bp, Artificial sequence
  Atm.997_Fbxw7.21
  crRNA array
cgatttcttggctttatatatcttgtggaaaggacgaaacaccgtaatttctactaagtgtagatgagaaagtctccgaatcgtttaatttctactaagtgtagattaatgtgccgtagaaacccattttttaagcttggcgtggatccgatatcaactagatcttgaga

SEQ ID NO: 903 - DNA, 170 bp, Artificial sequence
  Atm.997_Fbxw7.23
  crRNA array
cgatttcttggctttatatatcttgtggaaaggacgaaacaccgtaatttctactaagtgtagatgagaaagtctccgaatcgtttaatttctactaagtgtagatatgtgccgtagaaacccatattttttaagcttggcgtggatccgatatcaactagatcttgaga

SEQ ID NO: 904 - DNA, 170 bp, Artificial sequence
  Atm.997_Gata3.34
  crRNA array
cgatttcttggctttatatatcttgtggaaaggacgaaacaccgtaatttctactaagtgtagatgagaaagtctccgaatcgtttaatttctactaagtgtagatctaaactatcccgcaaagatttttttaagcttggcgtggatccgatatcaactagatcttgaga

SEQ ID NO: 905 - DNA, 170 bp, Artificial sequence
  Atm.997_Gata3.47
  crRNA array
cgatttcttggctttatatatcttgtggaaaggacgaaacaccgtaatttctactaagtgtagatgagaaagtctccgaatcgtttaatttctactaagtgtagatcgtagtaggacgggacgtggttttttaagcttggcgtggatccgatatcaactagatcttgaga

SEQ ID NO: 906 - DNA, 170 bp, Artificial sequence
  Atm.997_H2-Q2.1
  crRNA array
cgatttcttggctttatatatcttgtggaaaggacgaaacaccgtaatttctactaagtgtagatgagaaagtctccgaatcgtttaatttctactaagtgtagatagggcggccaccaacagcagttttttaagcttggcgtggatccgatatcaactagatcttgaga

SEQ ID NO: 907 - DNA, 170 bp, Artificial sequence
  Atm.997_H2-Q2.2
  crRNA array
cgatttcttggctttatatatcttgtggaaaggacgaaacaccgtaatttctactaagtgtagatgagaaagtctccgaatcgtttaatttctactaagtgtagattaacctgcgcccgctgctgattttttaagcttggcgtggatccgatatcaactagatcttgaga

SEQ ID NO: 908 - DNA, 170 bp, Artificial sequence
  Atm.997_Kdm5c.1878
  crRNA array
cgatttcttggctttatatatcttgtggaaaggacgaaacaccgtaatttctactaagtgtagatgagaaagtctccgaatcgtttaatttctactaagtgtagatagagcacggcacccgcccccttttttaagcttggcgtggatccgatatcaactagatcttgaga

SEQ ID NO: 909 - DNA, 170 bp, Artificial sequence
  Atm.997_Kdm5c.1879
  crRNA array
cgatttcttggctttatatatcttgtggaaaggacgaaacaccgtaatttctactaagtgtagatgagaaagtctccgaatcgtttaatttctactaagtgtagatgagcacggcacccgccccccttttttaagcttggcgtggatccgatatcaactagatcttgaga

SEQ ID NO: 910 - DNA, 170 bp, Artificial sequence
  Atm.997_Kdm6a.56
  crRNA array
cgatttcttggctttatatatcttgtggaaaggacgaaacaccgtaatttctactaagtgtagatgagaaagtctccgaatcgtttaatttctactaagtgtagattcgctgccgcctctcgcggcttttttaagcttggcgtggatccgatatcaactagatcttgaga

SEQ ID NO: 911 - DNA, 170 bp, Artificial sequence
  Atm.997_Kdm6a.57
  crRNA array
cgatttcttggctttatatatcttgtggaaaggacgaaacaccgtaatttctactaagtgtagatgagaaagtctccgaatcgtttaatttctactaagtgtagatcgctgccgcctctcgcggcattttttaagcttggcgtggatccgatatcaactagatcttgaga

SEQ ID NO: 912 - DNA, 170 bp, Artificial sequence
  Atm.997_Kmt2b.265
  crRNA array
cgatttcttggctttatatatcttgtggaaaggacgaaacaccgtaatttctactaagtgtagatgagaaagtctccgaatcgtttaatttctactaagtgtagatccccaagtgaagcccacctgttttttaagcttggcgtggatccgatatcaactagatcttgaga

SEQ ID NO: 913 - DNA, 170 bp, Artificial sequence
  Atm.997_Kmt2b.298
  crRNA array
cgatttcttggctttatatatcttgtggaaaggacgaaacaccgtaatttctactaagtgtagatgagaaagtctccgaatcgtttaatttctactaagtgtagattccggcagggaccggctggcttttttaagcttggcgtggatccgatatcaactagatcttgaga

SEQ ID NO: 914 - DNA, 170 bp, Artificial sequence
  Atm.997_Kmt2c.1962
  crRNA array
cgatttcttggctttatatatcttgtggaaaggacgaaacaccgtaatttctactaagtgtagatgagaaagtctccgaatcgtttaatttctactaagtgtagatgtgacgatctgtgccacaagttttttaagcttggcgtggatccgatatcaactagatcttgaga

SEQ ID NO: 915 - DNA, 170 bp, Artificial sequence
  Atm.997_Kmt2c.2236
  crRNA array
cgatttcttggctttatatatcttgtggaaaggacgaaacaccgtaatttctactaagtgtagatgagaaagtctccgaatcgtttaatttctactaagtgtagatactcgacctccacctccctattttttaagcttggcgtggatccgatatcaactagatcttgaga

SEQ ID NO: 916 - DNA, 170 bp, Artificial sequence
  Atm.997_Kmt2d.316
  crRNA array
cgatttcttggctttatatatcttgtggaaaggacgaaacaccgtaatttctactaagtgtagatgagaaagtctccgaatcgtttaatttctactaagtgtagatactccaggccacccaggtggttttttaagcttggcgtggatccgatatcaactagatcttgaga

SEQ ID NO: 917 - DNA, 170 bp, Artificial sequence
  Atm.997_Kmt2d.416
  crRNA array
cgatttcttggctttatatatcttgtggaaaggacgaaacaccgtaatttctactaagtgtagatgagaaagtctccgaatcgtttaatttctactaagtgtagattaaacccccgggggaagggtttttttaagcttggcgtggatccgatatcaactagatcttgaga

SEQ ID NO: 918 - DNA, 170 bp, Artificial sequence
  Atm.997_Map2k4.119
  crRNA array
cgatttcttggctttatatatcttgtggaaaggacgaaacaccgtaatttctactaagtgtagatgagaaagtctccgaatcgtttaatttctactaagtgtagattgctgtgtgggcggccacatttttttaagcttggcgtggatccgatatcaactagatcttgaga

SEQ ID NO: 919 - DNA, 170 bp, Artificial sequence
  Atm.997_Map2k4.1261
  crRNA array
cgatttcttggctttatatatcttgtggaaaggacgaaacaccgtaatttctactaagtgtagatgagaaagtctccgaatcgtttaatttctactaagtgtagatgatgtagtaatgcggagtagttttttaagcttggcgtggatccgatatcaactagatcttgaga

SEQ ID NO: 920 - DNA, 170 bp, Artificial sequence
  Atm.997_Map3k1.235
  crRNA array
cgatttcttggctttatatatcttgtggaaaggacgaaacaccgtaatttctactaagtgtagatgagaaagtctccgaatcgtttaatttctactaagtgtagataaaacgctactgatcgatcgttttttaagcttggcgtggatccgatatcaactagatcttgaga

SEQ ID NO: 921 - DNA, 170 bp, Artificial sequence
  Atm.997_Map3k1.3838
  crRNA array
cgatttcttggctttatatatcttgtggaaaggacgaaacaccgtaatttctactaagtgtagatgagaaagtctccgaatcgtttaatttctactaagtgtagatccaacaacagggccccactattttttaagcttggcgtggatccgatatcaactagatcttgaga

SEQ ID NO: 922 - DNA, 170 bp, Artificial sequence
  Atm.997_Mga.1655
  crRNA array
cgatttcttggctttatatatcttgtggaaaggacgaaacaccgtaatttctactaagtgtagatgagaaagtctccgaatcgtttaatttctactaagtgtagatcgagaagtggagagcatattttttttaagcttggcgtggatccgatatcaactagatcttgaga

SEQ ID NO: 923 - DNA, 170 bp, Artificial sequence
  Atm.997_Mga.93
  crRNA array
cgatttcttggctttatatatcttgtggaaaggacgaaacaccgtaatttctactaagtgtagatgagaaagtctccgaatcgtttaatttctactaagtgtagatgagaaggctccccataatgtttttttaagcttggcgtggatccgatatcaactagatcttgaga

SEQ ID NO: 924 - DNA, 170 bp, Artificial sequence
  Atm.997_Nf1.746
  crRNA array
cgatttcttggctttatatatcttgtggaaaggacgaaacaccgtaatttctactaagtgtagatgagaaagtctccgaatcgtttaatttctactaagtgtagattaagcataatgatgatgccattttttaagcttggcgtggatccgatatcaactagatcttgaga

SEQ ID NO: 925 - DNA, 170 bp, Artificial sequence
  Atm.997_Nf1.97
  crRNA array
cgatttcttggctttatatatcttgtggaaaggacgaaacaccgtaatttctactaagtgtagatgagaaagtctccgaatcgtttaatttctactaagtgtagatagcccgctacatgctgatgcttttttaagcttggcgtggatccgatatcaactagatcttgaga

SEQ ID NO: 926 - DNA, 170 bp, Artificial sequence
  Atm.997_Nf2.356
  crRNA array
cgatttcttggctttatatatcttgtggaaaggacgaaacaccgtaatttctactaagtgtagatgagaaagtctccgaatcgtttaatttctactaagtgtagatcggagtcatctgatagagatttttttaagcttggcgtggatccgatatcaactagatcttgaga

SEQ ID NO: 927 - DNA, 170 bp, Artificial sequence
  Atm.997_Nf2.768
  crRNA array
cgatttcttggctttatatatcttgtggaaaggacgaaacaccgtaatttctactaagtgtagatgagaaagtctccgaatcgtttaatttctactaagtgtagatccgaagccccagtgtccggcttttttaagcttggcgtggatccgatatcaactagatcttgaga

SEQ ID NO: 928 - DNA, 170 bp, Artificial sequence
  Atm.997_Notch1.1849
  crRNA array
cgatttcttggctttatatatcttgtggaaaggacgaaacaccgtaatttctactaagtgtagatgagaaagtctccgaatcgtttaatttctactaagtgtagatctggcgggtgggcggcgctgttttttaagcttggcgtggatccgatatcaactagatcttgaga

SEQ ID NO: 929 - DNA, 170 bp, Artificial sequence
  Atm.997_Notch1.649
  crRNA array
cgatttcttggctttatatatcttgtggaaaggacgaaacaccgtaatttctactaagtgtagatgagaaagtctccgaatcgtttaatttctactaagtgtagattgggccaacgatgccaggacttttttaagcttggcgtggatccgatatcaactagatcttgaga

SEQ ID NO: 930 - DNA, 170 bp, Artificial sequence
  Atm.997_Nsd1.70
  crRNA array
cgatttcttggctttatatatcttgtggaaaggacgaaacaccgtaatttctactaagtgtagatgagaaagtctccgaatcgtttaatttctactaagtgtagatactggtgtggacgatgcagattttttaagcttggcgtggatccgatatcaactagatcttgaga

SEQ ID NO: 931 - DNA, 170 bp, Artificial sequence
  Atm.997_Nsd1.90
  crRNA array
cgatttcttggctttatatatcttgtggaaaggacgaaacaccgtaatttctactaagtgtagatgagaaagtctccgaatcgtttaatttctactaagtgtagataggagctaacggcaagaatgttttttaagcttggcgtggatccgatatcaactagatcttgaga

SEQ ID NO: 932 - DNA, 170 bp, Artificial sequence
  Atm.997_Pbrm1.1236
  crRNA array
cgatttcttggctttatatatcttgtggaaaggacgaaacaccgtaatttctactaagtgtagatgagaaagtctccgaatcgtttaatttctactaagtgtagatgccgataaaaccaacagccgttttttaagcttggcgtggatccgatatcaactagatcttgaga

SEQ ID NO: 933 - DNA, 170 bp, Artificial sequence
  Atm.997_Pbrm1.969
  crRNA array
cgatttcttggctttatatatcttgtggaaaggacgaaacaccgtaatttctactaagtgtagatgagaaagtctccgaatcgtttaatttctactaagtgtagatgagccctaatgaacagctcattttttaagcttggcgtggatccgatatcaactagatcttgaga

SEQ ID NO: 934 - DNA, 170 bp, Artificial sequence
  Atm.997_Pik3r1.76
  crRNA array
cgatttcttggctttatatatcttgtggaaaggacgaaacaccgtaatttctactaagtgtagatgagaaagtctccgaatcgtttaatttctactaagtgtagataaaacctatacggcccgcacttttttaagcttggcgtggatccgatatcaactagatcttgaga

SEQ ID NO: 935 - DNA, 170 bp, Artificial sequence
  Atm.997_Pik3r1.77
  crRNA array
cgatttcttggctttatatatcttgtggaaaggacgaaacaccgtaatttctactaagtgtagatgagaaagtctccgaatcgtttaatttctactaagtgtagataaacctatacggcccgcactttttttaagcttggcgtggatccgatatcaactagatcttgaga

SEQ ID NO: 936 - DNA, 170 bp, Artificial sequence
  Atm.997_Pten.240
  crRNA array
cgatttcttggctttatatatcttgtggaaaggacgaaacaccgtaatttctactaagtgtagatgagaaagtctccgaatcgtttaatttctactaagtgtagattgcatacgctatagctgcttttttttaagcttggcgtggatccgatatcaactagatcttgaga

SEQ ID NO: 937 - DNA, 170 bp, Artificial sequence
  Atm.997_Pten.265
  crRNA array
cgatttcttggctttatatatcttgtggaaaggacgaaacaccgtaatttctactaagtgtagatgagaaagtctccgaatcgtttaatttctactaagtgtagataagcgtggtgcgtgacgcacttttttaagcttggcgtggatccgatatcaactagatcttgaga

SEQ ID NO: 938 - DNA, 170 bp, Artificial sequence
  Atm.997_Rasa1.1478
  crRNA array
cgatttcttggctttatatatcttgtggaaaggacgaaacaccgtaatttctactaagtgtagatgagaaagtctccgaatcgtttaatttctactaagtgtagatcgataatggtctatgatgtcttttttaagcttggcgtggatccgatatcaactagatcttgaga

SEQ ID NO: 939 - DNA, 170 bp, Artificial sequence
  Atm.997_Rasa1.223
  crRNA array
cgatttcttggctttatatatcttgtggaaaggacgaaacaccgtaatttctactaagtgtagatgagaaagtctccgaatcgtttaatttctactaagtgtagattccatggagtatcgtgctcgttttttaagcttggcgtggatccgatatcaactagatcttgaga

SEQ ID NO: 940 - DNA, 170 bp, Artificial sequence
  Atm.997_Rb1.211
  crRNA array
cgatttcttggctttatatatcttgtggaaaggacgaaacaccgtaatttctactaagtgtagatgagaaagtctccgaatcgtttaatttctactaagtgtagattctgacatgatcgggtacctttttttaagcttggcgtggatccgatatcaactagatcttgaga

SEQ ID NO: 941 - DNA, 170 bp, Artificial sequence
  Atm.997_Rb1.394
  crRNA array
cgatttcttggctttatatatcttgtggaaaggacgaaacaccgtaatttctactaagtgtagatgagaaagtctccgaatcgtttaatttctactaagtgtagatagaaatctcgaagcaggatcttttttaagcttggcgtggatccgatatcaactagatcttgaga

SEQ ID NO: 942 - DNA, 170 bp, Artificial sequence
  Atm.997_Rbm10.5
  crRNA array
cgatttcttggctttatatatcttgtggaaaggacgaaacaccgtaatttctactaagtgtagatgagaaagtctccgaatcgtttaatttctactaagtgtagatacgaaacctgaacccacacattttttaagcttggcgtggatccgatatcaactagatcttgaga

SEQ ID NO: 943 - DNA, 170 bp, Artificial sequence
  Atm.997_Rbm10.6
  crRNA array
cgatttcttggctttatatatcttgtggaaaggacgaaacaccgtaatttctactaagtgtagatgagaaagtctccgaatcgtttaatttctactaagtgtagatcgaaacctgaacccacacagttttttaagcttggcgtggatccgatatcaactagatcttgaga

SEQ ID NO: 944 - DNA, 170 bp, Artificial sequence
  Atm.997_Rnf43.1920
  crRNA array
cgatttcttggctttatatatcttgtggaaaggacgaaacaccgtaatttctactaagtgtagatgagaaagtctccgaatcgtttaatttctactaagtgtagatatccccgtgccgtggactccttttttaagcttggcgtggatccgatatcaactagatcttgaga

SEQ ID NO: 945 - DNA, 170 bp, Artificial sequence
  Atm.997_Rnf43.39
  crRNA array
cgatttcttggctttatatatcttgtggaaaggacgaaacaccgtaatttctactaagtgtagatgagaaagtctccgaatcgtttaatttctactaagtgtagatcaaggggatcactctgataattttttaagcttggcgtggatccgatatcaactagatcttgaga

SEQ ID NO: 946 - DNA, 170 bp, Artificial sequence
  Atm.997_Runx1.204
  crRNA array
cgatttcttggctttatatatcttgtggaaaggacgaaacaccgtaatttctactaagtgtagatgagaaagtctccgaatcgtttaatttctactaagtgtagattaaataagtccagccgttttttttttaagcttggcgtggatccgatatcaactagatcttgaga

SEQ ID NO: 947 - DNA, 170 bp, Artificial sequence
  Atm.997_Runx1.81
  crRNA array
cgatttcttggctttatatatcttgtggaaaggacgaaacaccgtaatttctactaagtgtagatgagaaagtctccgaatcgtttaatttctactaagtgtagataggacgcgtatgggaattttttttttaagcttggcgtggatccgatatcaactagatcttgaga

SEQ ID NO: 948 - DNA, 170 bp, Artificial sequence
  Atm.997_Setd2.143
  crRNA array
cgatttcttggctttatatatcttgtggaaaggacgaaacaccgtaatttctactaagtgtagatgagaaagtctccgaatcgtttaatttctactaagtgtagatgcacaaccacaacagactggttttttaagcttggcgtggatccgatatcaactagatcttgaga

SEQ ID NO: 949 - DNA, 170 bp, Artificial sequence
  Atm.997_Setd2.508
  crRNA array
cgatttcttggctttatatatcttgtggaaaggacgaaacaccgtaatttctactaagtgtagatgagaaagtctccgaatcgtttaatttctactaagtgtagattacgatcccgagcacccgacttttttaagcttggcgtggatccgatatcaactagatcttgaga

SEQ ID NO: 950 - DNA, 170 bp, Artificial sequence
  Atm.997_Smad4.3038
  crRNA array
cgatttcttggctttatatatcttgtggaaaggacgaaacaccgtaatttctactaagtgtagatgagaaagtctccgaatcgtttaatttctactaagtgtagatatctgcggcagtgtcaccggttttttaagcttggcgtggatccgatatcaactagatcttgaga

SEQ ID NO: 951 - DNA, 170 bp, Artificial sequence
  Atm.997_Smad4.39
  crRNA array
cgatttcttggctttatatatcttgtggaaaggacgaaacaccgtaatttctactaagtgtagatgagaaagtctccgaatcgtttaatttctactaagtgtagatagtcaaacgcatactgacaattttttaagcttggcgtggatccgatatcaactagatcttgaga

SEQ ID NO: 952 - DNA, 170 bp, Artificial sequence
  Atm.997_Stag2.1409
  crRNA array
cgatttcttggctttatatatcttgtggaaaggacgaaacaccgtaatttctactaagtgtagatgagaaagtctccgaatcgtttaatttctactaagtgtagatgctaataactgcggaagggcttttttaagcttggcgtggatccgatatcaactagatcttgaga

SEQ ID NO: 953 - DNA, 170 bp, Artificial sequence
  Atm.997_Stag2.4401
  crRNA array
cgatttcttggctttatatatcttgtggaaaggacgaaacaccgtaatttctactaagtgtagatgagaaagtctccgaatcgtttaatttctactaagtgtagattaatcgtccagtggtgtatattttttaagcttggcgtggatccgatatcaactagatcttgaga

SEQ ID NO: 954 - DNA, 170 bp, Artificial sequence
  Atm.997_Tbl1xr1.1
  crRNA array
cgatttcttggctttatatatcttgtggaaaggacgaaacaccgtaatttctactaagtgtagatgagaaagtctccgaatcgtttaatttctactaagtgtagatggatgcgcatactggtgaagttttttaagcttggcgtggatccgatatcaactagatcttgaga

SEQ ID NO: 955 - DNA, 170 bp, Artificial sequence
  Atm.997_Tbl1xr1.83
  crRNA array
cgatttcttggctttatatatcttgtggaaaggacgaaacaccgtaatttctactaagtgtagatgagaaagtctccgaatcgtttaatttctactaagtgtagatatggtcgacccatcgagtctttttttaagcttggcgtggatccgatatcaactagatcttgaga

SEQ ID NO: 956 - DNA, 170 bp, Artificial sequence
  Atm.997_Tgfbr2.290
  crRNA array
cgatttcttggctttatatatcttgtggaaaggacgaaacaccgtaatttctactaagtgtagatgagaaagtctccgaatcgtttaatttctactaagtgtagatcctctcggcgcccgggtaaattttttaagcttggcgtggatccgatatcaactagatcttgaga

SEQ ID NO: 957 - DNA, 170 bp, Artificial sequence
  Atm.997_Tgfbr2.292
  crRNA array
cgatttcttggctttatatatcttgtggaaaggacgaaacaccgtaatttctactaagtgtagatgagaaagtctccgaatcgtttaatttctactaagtgtagatcccgggcgccgagagggaaattttttaagcttggcgtggatccgatatcaactagatcttgaga

SEQ ID NO: 958 - DNA, 170 bp, Artificial sequence
  Atm.997_Trp53.4
  crRNA array
cgatttcttggctttatatatcttgtggaaaggacgaaacaccgtaatttctactaagtgtagatgagaaagtctccgaatcgtttaatttctactaagtgtagatccctgaactgcccccagggattttttaagcttggcgtggatccgatatcaactagatcttgaga

SEQ ID NO: 959 - DNA, 170 bp, Artificial sequence
  Atm.997_Trp53.528
  crRNA array
cgatttcttggctttatatatcttgtggaaaggacgaaacaccgtaatttctactaagtgtagatgagaaagtctccgaatcgtttaatttctactaagtgtagatgctgggccagcagagacctgttttttaagcttggcgtggatccgatatcaactagatcttgaga

SEQ ID NO: 960 - DNA, 170 bp, Artificial sequence
  Atm.997_Vhl.1
  crRNA array
cgatttcttggctttatatatcttgtggaaaggacgaaacaccgtaatttctactaagtgtagatgagaaagtctccgaatcgtttaatttctactaagtgtagatagggctcccggcggccatttttttttaagcttggcgtggatccgatatcaactagatcttgaga

SEQ ID NO: 961 - DNA, 170 bp, Artificial sequence
  Atm.997_Vhl.151
  crRNA array
cgatttcttggctttatatatcttgtggaaaggacgaaacaccgtaatttctactaagtgtagatgagaaagtctccgaatcgtttaatttctactaagtgtagattagagcactcacccgagggattttttaagcttggcgtggatccgatatcaactagatcttgaga

SEQ ID NO: 962 - DNA, 170 bp, Artificial sequence
  Atm.997_Zc3h13.1387
  crRNA array
cgatttcttggctttatatatcttgtggaaaggacgaaacaccgtaatttctactaagtgtagatgagaaagtctccgaatcgtttaatttctactaagtgtagatgtgacgccggtcatgtgactttttttaagcttggcgtggatccgatatcaactagatcttgaga

SEQ ID NO: 963 - DNA, 170 bp, Artificial sequence
  Atm.997_Zc3h13.1777
  crRNA array
cgatttcttggctttatatatcttgtggaaaggacgaaacaccgtaatttctactaagtgtagatgagaaagtctccgaatcgtttaatttctactaagtgtagatgatgctgccagtgtagcggcttttttaagcttggcgtggatccgatatcaactagatcttgaga

SEQ ID NO: 964 - DNA, 170 bp, Artificial sequence
  Atrx.249_Acvr2a.155
  crRNA array
cgatttcttggctttatatatcttgtggaaaggacgaaacaccgtaatttctactaagtgtagattagccagtcgctcatatctctaatttctactaagtgtagatggacctggctaatcaagtatttttttaagcttggcgtggatccgatatcaactagatcttgaga

SEQ ID NO: 965 - DNA, 170 bp, Artificial sequence
  Atrx.249_Acvr2a.70
  crRNA array
cgatttcttggctttatatatcttgtggaaaggacgaaacaccgtaatttctactaagtgtagattagccagtcgctcatatctctaatttctactaagtgtagatcccgaggcgccggagaagccttttttaagcttggcgtggatccgatatcaactagatcttgaga

SEQ ID NO: 966 - DNA, 170 bp, Artificial sequence
  Atrx.249_Apc.21
  crRNA array
cgatttcttggctttatatatcttgtggaaaggacgaaacaccgtaatttctactaagtgtagattagccagtcgctcatatctctaatttctactaagtgtagatgtgatccacacgtgtagctgttttttaagcttggcgtggatccgatatcaactagatcttgaga

SEQ ID NO: 967 - DNA, 170 bp, Artificial sequence
  Atrx.249_Apc.867
  crRNA array
cgatttcttggctttatatatcttgtggaaaggacgaaacaccgtaatttctactaagtgtagattagccagtcgctcatatctctaatttctactaagtgtagatcagtcccaggcggcggaagcttttttaagcttggcgtggatccgatatcaactagatcttgaga

SEQ ID NO: 968 - DNA, 170 bp, Artificial sequence
  Atrx.249_Arid1a.2
  crRNA array
cgatttcttggctttatatatcttgtggaaaggacgaaacaccgtaatttctactaagtgtagattagccagtcgctcatatctctaatttctactaagtgtagatcccgcgcccccgtcctggggttttttaagcttggcgtggatccgatatcaactagatcttgaga

SEQ ID NO: 969 - DNA, 170 bp, Artificial sequence
  Atrx.249_Arid1a.5
  crRNA array
cgatttcttggctttatatatcttgtggaaaggacgaaacaccgtaatttctactaagtgtagattagccagtcgctcatatctctaatttctactaagtgtagatcccgcgctcggccgctgccgttttttaagcttggcgtggatccgatatcaactagatcttgaga

SEQ ID NO: 970 - DNA, 170 bp, Artificial sequence
  Atrx.249_Arid2.166
  crRNA array
cgatttcttggctttatatatcttgtggaaaggacgaaacaccgtaatttctactaagtgtagattagccagtcgctcatatctctaatttctactaagtgtagataaccgcgatctgggttttttttttttaagcttggcgtggatccgatatcaactagatcttgaga

SEQ ID NO: 971 - DNA, 170 bp, Artificial sequence
  Atrx.249_Arid2.172
  crRNA array
cgatttcttggctttatatatcttgtggaaaggacgaaacaccgtaatttctactaagtgtagattagccagtcgctcatatctctaatttctactaagtgtagatctggacgagctgcggcagttttttttaagcttggcgtggatccgatatcaactagatcttgaga

SEQ ID NO: 972 - DNA, 170 bp, Artificial sequence
  Atrx.249_Atm.120
  crRNA array
cgatttcttggctttatatatcttgtggaaaggacgaaacaccgtaatttctactaagtgtagattagccagtcgctcatatctctaatttctactaagtgtagatgacaggtagtcggcagctaattttttaagcttggcgtggatccgatatcaactagatcttgaga

SEQ ID NO: 973 - DNA, 170 bp, Artificial sequence
  Atrx.249_Atm.997
  crRNA array
cgatttcttggctttatatatcttgtggaaaggacgaaacaccgtaatttctactaagtgtagattagccagtcgctcatatctctaatttctactaagtgtagatgagaaagtctccgaatcgttttttttaagcttggcgtggatccgatatcaactagatcttgaga

SEQ ID NO: 974 - DNA, 170 bp, Artificial sequence
  Atrx.249_Bcor.203
  crRNA array
cgatttcttggctttatatatcttgtggaaaggacgaaacaccgtaatttctactaagtgtagattagccagtcgctcatatctctaatttctactaagtgtagatccccggagcggagtccaggcttttttaagcttggcgtggatccgatatcaactagatcttgaga

SEQ ID NO: 975 - DNA, 170 bp, Artificial sequence
  Atrx.249_Bcor.475
  crRNA array
cgatttcttggctttatatatcttgtggaaaggacgaaacaccgtaatttctactaagtgtagattagccagtcgctcatatctctaatttctactaagtgtagattgcaacccctctgtatgggattttttaagcttggcgtggatccgatatcaactagatcttgaga

SEQ ID NO: 976 - DNA, 170 bp, Artificial sequence
  Atrx.249_Brca1.112
  crRNA array
cgatttcttggctttatatatcttgtggaaaggacgaaacaccgtaatttctactaagtgtagattagccagtcgctcatatctctaatttctactaagtgtagatctagacgctctgtggagactttttttaagcttggcgtggatccgatatcaactagatcttgaga

SEQ ID NO: 977 - DNA, 170 bp, Artificial sequence
  Atrx.249_Brca1.53
  crRNA array
cgatttcttggctttatatatcttgtggaaaggacgaaacaccgtaatttctactaagtgtagattagccagtcgctcatatctctaatttctactaagtgtagataatgaggaggcgtcgatcatttttttaagcttggcgtggatccgatatcaactagatcttgaga

SEQ ID NO: 978 - DNA, 170 bp, Artificial sequence
  Atrx.249_Casp8.45
  crRNA array
cgatttcttggctttatatatcttgtggaaaggacgaaacaccgtaatttctactaagtgtagattagccagtcgctcatatctctaatttctactaagtgtagatctaccgagatcctgtgaatgttttttaagcttggcgtggatccgatatcaactagatcttgaga

SEQ ID NO: 979 - DNA, 170 bp, Artificial sequence
  Atrx.249_Casp8.54
  crRNA array
cgatttcttggctttatatatcttgtggaaaggacgaaacaccgtaatttctactaagtgtagattagccagtcgctcatatctctaatttctactaagtgtagatcagtgcagtcgtcgtaagatttttttaagcttggcgtggatccgatatcaactagatcttgaga

SEQ ID NO: 980 - DNA, 170 bp, Artificial sequence
  Atrx.249_Cbwd1.84
  crRNA array
cgatttcttggctttatatatcttgtggaaaggacgaaacaccgtaatttctactaagtgtagattagccagtcgctcatatctctaatttctactaagtgtagatcacagcaggtaacatgccgcttttttaagcttggcgtggatccgatatcaactagatcttgaga

SEQ ID NO: 981 - DNA, 170 bp, Artificial sequence
  Atrx.249_Cbwd1.85
  crRNA array
cgatttcttggctttatatatcttgtggaaaggacgaaacaccgtaatttctactaagtgtagattagccagtcgctcatatctctaatttctactaagtgtagatacagcaggtaacatgccgccttttttaagcttggcgtggatccgatatcaactagatcttgaga

SEQ ID NO: 982 - DNA, 170 bp, Artificial sequence
  Atrx.249_Cdh1.387
  crRNA array
cgatttcttggctttatatatcttgtggaaaggacgaaacaccgtaatttctactaagtgtagattagccagtcgctcatatctctaatttctactaagtgtagatctcggcgtctgccgggtccgttttttaagcttggcgtggatccgatatcaactagatcttgaga

SEQ ID NO: 983 - DNA, 170 bp, Artificial sequence
  Atrx.249_Cdh1.58
  crRNA array
cgatttcttggctttatatatcttgtggaaaggacgaaacaccgtaatttctactaagtgtagattagccagtcgctcatatctctaatttctactaagtgtagatctcgtccgcgcccgggactcttttttaagcttggcgtggatccgatatcaactagatcttgaga

SEQ ID NO: 984 - DNA, 170 bp, Artificial sequence
  Atrx.249_Cdkn2a.647
  crRNA array
cgatttcttggctttatatatcttgtggaaaggacgaaacaccgtaatttctactaagtgtagattagccagtcgctcatatctctaatttctactaagtgtagatgcaatcacgggagggagcagttttttaagcttggcgtggatccgatatcaactagatcttgaga

SEQ ID NO: 985 - DNA, 170 bp, Artificial sequence
  Atrx.249_Cdkn2a.648
  crRNA array
cgatttcttggctttatatatcttgtggaaaggacgaaacaccgtaatttctactaagtgtagattagccagtcgctcatatctctaatttctactaagtgtagatcaatcacgggagggagcagattttttaagcttggcgtggatccgatatcaactagatcttgaga

SEQ ID NO: 986 - DNA, 170 bp, Artificial sequence
  Atrx.249_Cic.162
  crRNA array
cgatttcttggctttatatatcttgtggaaaggacgaaacaccgtaatttctactaagtgtagattagccagtcgctcatatctctaatttctactaagtgtagatcgcaggcgcgcccggcggagttttttaagcttggcgtggatccgatatcaactagatcttgaga

SEQ ID NO: 987 - DNA, 170 bp, Artificial sequence
  Atrx.249_Cic.164
  crRNA array
cgatttcttggctttatatatcttgtggaaaggacgaaacaccgtaatttctactaagtgtagattagccagtcgctcatatctctaatttctactaagtgtagatcgggccctgggccggcggctttttttaagcttggcgtggatccgatatcaactagatcttgaga

SEQ ID NO: 988 - DNA, 170 bp, Artificial sequence
  Atrx.249_Ctcf.229
  crRNA array
cgatttcttggctttatatatcttgtggaaaggacgaaacaccgtaatttctactaagtgtagattagccagtcgctcatatctctaatttctactaagtgtagatggctggtggctgatagtctgttttttaagcttggcgtggatccgatatcaactagatcttgaga

SEQ ID NO: 989 - DNA, 170 bp, Artificial sequence
  Atrx.249_Ctcf.809
  crRNA array
cgatttcttggctttatatatcttgtggaaaggacgaaacaccgtaatttctactaagtgtagattagccagtcgctcatatctctaatttctactaagtgtagataagcgctatcatgatcccaattttttaagcttggcgtggatccgatatcaactagatcttgaga

SEQ ID NO: 990 - DNA, 170 bp, Artificial sequence
  Atrx.249_Elf3.826
  crRNA array
cgatttcttggctttatatatcttgtggaaaggacgaaacaccgtaatttctactaagtgtagattagccagtcgctcatatctctaatttctactaagtgtagattccgagacatcctaatccacttttttaagcttggcgtggatccgatatcaactagatcttgaga

SEQ ID NO: 991 - DNA, 170 bp, Artificial sequence
  Atrx.249_Elf3.983
  crRNA array
cgatttcttggctttatatatcttgtggaaaggacgaaacaccgtaatttctactaagtgtagattagccagtcgctcatatctctaatttctactaagtgtagattaggccccctaactggaccattttttaagcttggcgtggatccgatatcaactagatcttgaga

SEQ ID NO: 992 - DNA, 170 bp, Artificial sequence
  Atrx.249_Ep300.310
  crRNA array
cgatttcttggctttatatatcttgtggaaaggacgaaacaccgtaatttctactaagtgtagattagccagtcgctcatatctctaatttctactaagtgtagatatggtacgacagtgaggaagttttttaagcttggcgtggatccgatatcaactagatcttgaga

SEQ ID NO: 993 - DNA, 170 bp, Artificial sequence
  Atrx.249_Ep300.587
  crRNA array
cgatttcttggctttatatatcttgtggaaaggacgaaacaccgtaatttctactaagtgtagattagccagtcgctcatatctctaatttctactaagtgtagatcgccccggggcccccaaccattttttaagcttggcgtggatccgatatcaactagatcttgaga

SEQ ID NO: 994 - DNA, 170 bp, Artificial sequence
  Atrx.249_Epha2.126
  crRNA array
cgatttcttggctttatatatcttgtggaaaggacgaaacaccgtaatttctactaagtgtagattagccagtcgctcatatctctaatttctactaagtgtagatcctgtgccgccgcggccgccttttttaagcttggcgtggatccgatatcaactagatcttgaga

SEQ ID NO: 995 - DNA, 170 bp, Artificial sequence
  Atrx.249_Epha2.5
  crRNA array
cgatttcttggctttatatatcttgtggaaaggacgaaacaccgtaatttctactaagtgtagattagccagtcgctcatatctctaatttctactaagtgtagatcatgagctggcgccacccggttttttaagcttggcgtggatccgatatcaactagatcttgaga

SEQ ID NO: 996 - DNA, 170 bp, Artificial sequence
  Atrx.249_Fat1.105
  crRNA array
cgatttcttggctttatatatcttgtggaaaggacgaaacaccgtaatttctactaagtgtagattagccagtcgctcatatctctaatttctactaagtgtagataactcgaggtgacaacaagtttttttaagcttggcgtggatccgatatcaactagatcttgaga

SEQ ID NO: 997 - DNA, 170 bp, Artificial sequence
  Atrx.249_Fat1.122
  crRNA array
cgatttcttggctttatatatcttgtggaaaggacgaaacaccgtaatttctactaagtgtagattagccagtcgctcatatctctaatttctactaagtgtagatccatcgacatggaaacgggattttttaagcttggcgtggatccgatatcaactagatcttgaga

SEQ ID NO: 998 - DNA, 170 bp, Artificial sequence
  Atrx.249_Fbxw7.21
  crRNA array
cgatttcttggctttatatatcttgtggaaaggacgaaacaccgtaatttctactaagtgtagattagccagtcgctcatatctctaatttctactaagtgtagattaatgtgccgtagaaacccattttttaagcttggcgtggatccgatatcaactagatcttgaga

SEQ ID NO: 999 - DNA, 170 bp, Artificial sequence
  Atrx.249_Fbxw7.23
  crRNA array
cgatttcttggctttatatatcttgtggaaaggacgaaacaccgtaatttctactaagtgtagattagccagtcgctcatatctctaatttctactaagtgtagatatgtgccgtagaaacccatattttttaagcttggcgtggatccgatatcaactagatcttgaga

SEQ ID NO: 1000 - DNA, 170 bp, Artificial sequence
  Atrx.249_Gata3.34
  crRNA array
cgatttcttggctttatatatcttgtggaaaggacgaaacaccgtaatttctactaagtgtagattagccagtcgctcatatctctaatttctactaagtgtagatctaaactatcccgcaaagatttttttaagcttggcgtggatccgatatcaactagatcttgaga

SEQ ID NO: 1001 - DNA, 170 bp, Artificial sequence
  Atrx.249_Gata3.47
  crRNA array
cgatttcttggctttatatatcttgtggaaaggacgaaacaccgtaatttctactaagtgtagattagccagtcgctcatatctctaatttctactaagtgtagatcgtagtaggacgggacgtggttttttaagcttggcgtggatccgatatcaactagatcttgaga

SEQ ID NO: 1002 - DNA, 170 bp, Artificial sequence
  Atrx.249_H2-Q2.1
  crRNA array
cgatttcttggctttatatatcttgtggaaaggacgaaacaccgtaatttctactaagtgtagattagccagtcgctcatatctctaatttctactaagtgtagatagggcggccaccaacagcagttttttaagcttggcgtggatccgatatcaactagatcttgaga

SEQ ID NO: 1003 - DNA, 170 bp, Artificial sequence
  Atrx.249_H2-Q2.2
  crRNA array
cgatttcttggctttatatatcttgtggaaaggacgaaacaccgtaatttctactaagtgtagattagccagtcgctcatatctctaatttctactaagtgtagattaacctgcgcccgctgctgattttttaagcttggcgtggatccgatatcaactagatcttgaga

SEQ ID NO: 1004 - DNA, 170 bp, Artificial sequence
  Atrx.249_Kdm5c.1878
  crRNA array
cgatttcttggctttatatatcttgtggaaaggacgaaacaccgtaatttctactaagtgtagattagccagtcgctcatatctctaatttctactaagtgtagatagagcacggcacccgcccccttttttaagcttggcgtggatccgatatcaactagatcttgaga

SEQ ID NO: 1005 - DNA, 170 bp, Artificial sequence
  Atrx.249_Kdm5c.1879
  crRNA array
cgatttcttggctttatatatcttgtggaaaggacgaaacaccgtaatttctactaagtgtagattagccagtcgctcatatctctaatttctactaagtgtagatgagcacggcacccgccccccttttttaagcttggcgtggatccgatatcaactagatcttgaga

SEQ ID NO: 1006 - DNA, 170 bp, Artificial sequence
  Atrx.249_Kdm6a.56
  crRNA array
cgatttcttggctttatatatcttgtggaaaggacgaaacaccgtaatttctactaagtgtagattagccagtcgctcatatctctaatttctactaagtgtagattcgctgccgcctctcgcggcttttttaagcttggcgtggatccgatatcaactagatcttgaga

SEQ ID NO: 1007 - DNA, 170 bp, Artificial sequence
  Atrx.249_Kdm6a.57
  crRNA array
cgatttcttggctttatatatcttgtggaaaggacgaaacaccgtaatttctactaagtgtagattagccagtcgctcatatctctaatttctactaagtgtagatcgctgccgcctctcgcggcattttttaagcttggcgtggatccgatatcaactagatcttgaga

SEQ ID NO: 1008 - DNA, 170 bp, Artificial sequence
  Atrx.249_Kmt2b.265
  crRNA array
cgatttcttggctttatatatcttgtggaaaggacgaaacaccgtaatttctactaagtgtagattagccagtcgctcatatctctaatttctactaagtgtagatccccaagtgaagcccacctgttttttaagcttggcgtggatccgatatcaactagatcttgaga

SEQ ID NO: 1009 - DNA, 170 bp, Artificial sequence
  Atrx.249_Kmt2b.298
  crRNA array
cgatttcttggctttatatatcttgtggaaaggacgaaacaccgtaatttctactaagtgtagattagccagtcgctcatatctctaatttctactaagtgtagattccggcagggaccggctggcttttttaagcttggcgtggatccgatatcaactagatcttgaga

SEQ ID NO: 1010 - DNA, 170 bp, Artificial sequence
  Atrx.249_Kmt2c.1962
  crRNA array
cgatttcttggctttatatatcttgtggaaaggacgaaacaccgtaatttctactaagtgtagattagccagtcgctcatatctctaatttctactaagtgtagatgtgacgatctgtgccacaagttttttaagcttggcgtggatccgatatcaactagatcttgaga

SEQ ID NO: 1011 - DNA, 170 bp, Artificial sequence
  Atrx.249_Kmt2c.2236
  crRNA array
cgatttcttggctttatatatcttgtggaaaggacgaaacaccgtaatttctactaagtgtagattagccagtcgctcatatctctaatttctactaagtgtagatactcgacctccacctccctattttttaagcttggcgtggatccgatatcaactagatcttgaga

SEQ ID NO: 1012 - DNA, 170 bp, Artificial sequence
  Atrx.249_Kmt2d.316
  crRNA array
cgatttcttggctttatatatcttgtggaaaggacgaaacaccgtaatttctactaagtgtagattagccagtcgctcatatctctaatttctactaagtgtagatactccaggccacccaggtggttttttaagcttggcgtggatccgatatcaactagatcttgaga

SEQ ID NO: 1013 - DNA, 170 bp, Artificial sequence
  Atrx.249_Kmt2d.416
  crRNA array
cgatttcttggctttatatatcttgtggaaaggacgaaacaccgtaatttctactaagtgtagattagccagtcgctcatatctctaatttctactaagtgtagattaaacccccgggggaagggtttttttaagcttggcgtggatccgatatcaactagatcttgaga

SEQ ID NO: 1014 - DNA, 170 bp, Artificial sequence
  Atrx.249_Map2k4.119
  crRNA array
cgatttcttggctttatatatcttgtggaaaggacgaaacaccgtaatttctactaagtgtagattagccagtcgctcatatctctaatttctactaagtgtagattgctgtgtgggcggccacatttttttaagcttggcgtggatccgatatcaactagatcttgaga

SEQ ID NO: 1015 - DNA, 170 bp, Artificial sequence
  Atrx.249_Map2k4.1261
  crRNA array
cgatttcttggctttatatatcttgtggaaaggacgaaacaccgtaatttctactaagtgtagattagccagtcgctcatatctctaatttctactaagtgtagatgatgtagtaatgcggagtagttttttaagcttggcgtggatccgatatcaactagatcttgaga

SEQ ID NO: 1016 - DNA, 170 bp, Artificial sequence
  Atrx.249_Map3k1.235
  crRNA array
cgatttcttggctttatatatcttgtggaaaggacgaaacaccgtaatttctactaagtgtagattagccagtcgctcatatctctaatttctactaagtgtagataaaacgctactgatcgatcgttttttaagcttggcgtggatccgatatcaactagatcttgaga

SEQ ID NO: 1017 - DNA, 170 bp, Artificial sequence
  Atrx.249_Map3k1.3838
  crRNA array
cgatttcttggctttatatatcttgtggaaaggacgaaacaccgtaatttctactaagtgtagattagccagtcgctcatatctctaatttctactaagtgtagatccaacaacagggccccactattttttaagcttggcgtggatccgatatcaactagatcttgaga

SEQ ID NO: 1018 - DNA, 170 bp, Artificial sequence
  Atrx.249_Mga.1655
  crRNA array
cgatttcttggctttatatatcttgtggaaaggacgaaacaccgtaatttctactaagtgtagattagccagtcgctcatatctctaatttctactaagtgtagatcgagaagtggagagcatattttttttaagcttggcgtggatccgatatcaactagatcttgaga

SEQ ID NO: 1019 - DNA, 170 bp, Artificial sequence
  Atrx.249_Mga.93
  crRNA array
cgatttcttggctttatatatcttgtggaaaggacgaaacaccgtaatttctactaagtgtagattagccagtcgctcatatctctaatttctactaagtgtagatgagaaggctccccataatgtttttttaagcttggcgtggatccgatatcaactagatcttgaga

SEQ ID NO: 1020 - DNA, 170 bp, Artificial sequence
  Atrx.249_Nf1.746
  crRNA array
cgatttcttggctttatatatcttgtggaaaggacgaaacaccgtaatttctactaagtgtagattagccagtcgctcatatctctaatttctactaagtgtagattaagcataatgatgatgccattttttaagcttggcgtggatccgatatcaactagatcttgaga

SEQ ID NO: 1021 - DNA, 170 bp, Artificial sequence
  Atrx.249_Nf1.97
  crRNA array
cgatttcttggctttatatatcttgtggaaaggacgaaacaccgtaatttctactaagtgtagattagccagtcgctcatatctctaatttctactaagtgtagatagcccgctacatgctgatgcttttttaagcttggcgtggatccgatatcaactagatcttgaga

SEQ ID NO: 1022 - DNA, 170 bp, Artificial sequence
  Atrx.249_Nf2.356
  crRNA array
cgatttcttggctttatatatcttgtggaaaggacgaaacaccgtaatttctactaagtgtagattagccagtcgctcatatctctaatttctactaagtgtagatcggagtcatctgatagagatttttttaagcttggcgtggatccgatatcaactagatcttgaga

SEQ ID NO: 1023 - DNA, 170 bp, Artificial sequence
  Atrx.249_Nf2.768
  crRNA array
cgatttcttggctttatatatcttgtggaaaggacgaaacaccgtaatttctactaagtgtagattagccagtcgctcatatctctaatttctactaagtgtagatccgaagccccagtgtccggcttttttaagcttggcgtggatccgatatcaactagatcttgaga

SEQ ID NO: 1024 - DNA, 170 bp, Artificial sequence
  Atrx.249_Notch1.1849
  crRNA array
cgatttcttggctttatatatcttgtggaaaggacgaaacaccgtaatttctactaagtgtagattagccagtcgctcatatctctaatttctactaagtgtagatctggcgggtgggcggcgctgttttttaagcttggcgtggatccgatatcaactagatcttgaga

SEQ ID NO: 1025 - DNA, 170 bp, Artificial sequence
  Atrx.249_Notch1.649
  crRNA array
cgatttcttggctttatatatcttgtggaaaggacgaaacaccgtaatttctactaagtgtagattagccagtcgctcatatctctaatttctactaagtgtagattgggccaacgatgccaggacttttttaagcttggcgtggatccgatatcaactagatcttgaga

SEQ ID NO: 1026 - DNA, 170 bp, Artificial sequence
  Atrx.249_Nsd1.70
  crRNA array
cgatttcttggctttatatatcttgtggaaaggacgaaacaccgtaatttctactaagtgtagattagccagtcgctcatatctctaatttctactaagtgtagatactggtgtggacgatgcagattttttaagcttggcgtggatccgatatcaactagatcttgaga

SEQ ID NO: 1027 - DNA, 170 bp, Artificial sequence
  Atrx.249_Nsd1.90
  crRNA array
cgatttcttggctttatatatcttgtggaaaggacgaaacaccgtaatttctactaagtgtagattagccagtcgctcatatctctaatttctactaagtgtagataggagctaacggcaagaatgttttttaagcttggcgtggatccgatatcaactagatcttgaga

SEQ ID NO: 1028 - DNA, 170 bp, Artificial sequence
  Atrx.249_Pbrm1.1236
  crRNA array
cgatttcttggctttatatatcttgtggaaaggacgaaacaccgtaatttctactaagtgtagattagccagtcgctcatatctctaatttctactaagtgtagatgccgataaaaccaacagccgttttttaagcttggcgtggatccgatatcaactagatcttgaga

SEQ ID NO: 1029 - DNA, 170 bp, Artificial sequence
  Atrx.249_Pbrm1.969
  crRNA array
cgatttcttggctttatatatcttgtggaaaggacgaaacaccgtaatttctactaagtgtagattagccagtcgctcatatctctaatttctactaagtgtagatgagccctaatgaacagctcattttttaagcttggcgtggatccgatatcaactagatcttgaga

SEQ ID NO: 1030 - DNA, 170 bp, Artificial sequence
  Atrx.249_Pik3r1.76
  crRNA array
cgatttcttggctttatatatcttgtggaaaggacgaaacaccgtaatttctactaagtgtagattagccagtcgctcatatctctaatttctactaagtgtagataaaacctatacggcccgcacttttttaagcttggcgtggatccgatatcaactagatcttgaga

SEQ ID NO: 1031 - DNA, 170 bp, Artificial sequence
  Atrx.249_Pik3r1.77
  crRNA array
cgatttcttggctttatatatcttgtggaaaggacgaaacaccgtaatttctactaagtgtagattagccagtcgctcatatctctaatttctactaagtgtagataaacctatacggcccgcactttttttaagcttggcgtggatccgatatcaactagatcttgaga

SEQ ID NO: 1032 - DNA, 170 bp, Artificial sequence
  Atrx.249_Pten.240
  crRNA array
cgatttcttggctttatatatcttgtggaaaggacgaaacaccgtaatttctactaagtgtagattagccagtcgctcatatctctaatttctactaagtgtagattgcatacgctatagctgcttttttttaagcttggcgtggatccgatatcaactagatcttgaga

SEQ ID NO: 1033 - DNA, 170 bp, Artificial sequence
  Atrx.249_Pten.265
  crRNA array
cgatttcttggctttatatatcttgtggaaaggacgaaacaccgtaatttctactaagtgtagattagccagtcgctcatatctctaatttctactaagtgtagataagcgtggtgcgtgacgcacttttttaagcttggcgtggatccgatatcaactagatcttgaga

SEQ ID NO: 1034 - DNA, 170 bp, Artificial sequence
  Atrx.249_Rasa1.1478
  crRNA array
cgatttcttggctttatatatcttgtggaaaggacgaaacaccgtaatttctactaagtgtagattagccagtcgctcatatctctaatttctactaagtgtagatcgataatggtctatgatgtcttttttaagcttggcgtggatccgatatcaactagatcttgaga

SEQ ID NO: 1035 - DNA, 170 bp, Artificial sequence
  Atrx.249_Rasa1.223
  crRNA array
cgatttcttggctttatatatcttgtggaaaggacgaaacaccgtaatttctactaagtgtagattagccagtcgctcatatctctaatttctactaagtgtagattccatggagtatcgtgctcgttttttaagcttggcgtggatccgatatcaactagatcttgaga

SEQ ID NO: 1036 - DNA, 170 bp, Artificial sequence
  Atrx.249_Rb1.211
  crRNA array
cgatttcttggctttatatatcttgtggaaaggacgaaacaccgtaatttctactaagtgtagattagccagtcgctcatatctctaatttctactaagtgtagattctgacatgatcgggtacctttttttaagcttggcgtggatccgatatcaactagatcttgaga

SEQ ID NO: 1037 - DNA, 170 bp, Artificial sequence
  Atrx.249_Rb1.394
  crRNA array
cgatttcttggctttatatatcttgtggaaaggacgaaacaccgtaatttctactaagtgtagattagccagtcgctcatatctctaatttctactaagtgtagatagaaatctcgaagcaggatcttttttaagcttggcgtggatccgatatcaactagatcttgaga

SEQ ID NO: 1038 - DNA, 170 bp, Artificial sequence
  Atrx.249_Rbm10.5
  crRNA array
cgatttcttggctttatatatcttgtggaaaggacgaaacaccgtaatttctactaagtgtagattagccagtcgctcatatctctaatttctactaagtgtagatacgaaacctgaacccacacattttttaagcttggcgtggatccgatatcaactagatcttgaga

SEQ ID NO: 1039 - DNA, 170 bp, Artificial sequence
  Atrx.249_Rbm10.6
  crRNA array
cgatttcttggctttatatatcttgtggaaaggacgaaacaccgtaatttctactaagtgtagattagccagtcgctcatatctctaatttctactaagtgtagatcgaaacctgaacccacacagttttttaagcttggcgtggatccgatatcaactagatcttgaga

SEQ ID NO: 1040 - DNA, 170 bp, Artificial sequence
  Atrx.249_Rnf43.1920
  crRNA array
cgatttcttggctttatatatcttgtggaaaggacgaaacaccgtaatttctactaagtgtagattagccagtcgctcatatctctaatttctactaagtgtagatatccccgtgccgtggactccttttttaagcttggcgtggatccgatatcaactagatcttgaga

SEQ ID NO: 1041 - DNA, 170 bp, Artificial sequence
  Atrx.249_Rnf43.39
  crRNA array
cgatttcttggctttatatatcttgtggaaaggacgaaacaccgtaatttctactaagtgtagattagccagtcgctcatatctctaatttctactaagtgtagatcaaggggatcactctgataattttttaagcttggcgtggatccgatatcaactagatcttgaga

SEQ ID NO: 1042 - DNA, 170 bp, Artificial sequence
  Atrx.249_Runx1.204
  crRNA array
cgatttcttggctttatatatcttgtggaaaggacgaaacaccgtaatttctactaagtgtagattagccagtcgctcatatctctaatttctactaagtgtagattaaataagtccagccgttttttttttaagcttggcgtggatccgatatcaactagatcttgaga

SEQ ID NO: 1043 - DNA, 170 bp, Artificial sequence
  Atrx.249_Runx1.81
  crRNA array
cgatttcttggctttatatatcttgtggaaaggacgaaacaccgtaatttctactaagtgtagattagccagtcgctcatatctctaatttctactaagtgtagataggacgcgtatgggaattttttttttaagcttggcgtggatccgatatcaactagatcttgaga

SEQ ID NO: 1044 - DNA, 170 bp, Artificial sequence
  Atrx.249_Setd2.143
  crRNA array
cgatttcttggctttatatatcttgtggaaaggacgaaacaccgtaatttctactaagtgtagattagccagtcgctcatatctctaatttctactaagtgtagatgcacaaccacaacagactggttttttaagcttggcgtggatccgatatcaactagatcttgaga

SEQ ID NO: 1045 - DNA, 170 bp, Artificial sequence
  Atrx.249_Setd2.508
  crRNA array
cgatttcttggctttatatatcttgtggaaaggacgaaacaccgtaatttctactaagtgtagattagccagtcgctcatatctctaatttctactaagtgtagattacgatcccgagcacccgacttttttaagcttggcgtggatccgatatcaactagatcttgaga

SEQ ID NO: 1046 - DNA, 170 bp, Artificial sequence
  Atrx.249_Smad4.3038
  crRNA array
cgatttcttggctttatatatcttgtggaaaggacgaaacaccgtaatttctactaagtgtagattagccagtcgctcatatctctaatttctactaagtgtagatatctgcggcagtgtcaccggttttttaagcttggcgtggatccgatatcaactagatcttgaga

SEQ ID NO: 1047 - DNA, 170 bp, Artificial sequence
  Atrx.249_Smad4.39
  crRNA array
cgatttcttggctttatatatcttgtggaaaggacgaaacaccgtaatttctactaagtgtagattagccagtcgctcatatctctaatttctactaagtgtagatagtcaaacgcatactgacaattttttaagcttggcgtggatccgatatcaactagatcttgaga

SEQ ID NO: 1048 - DNA, 170 bp, Artificial sequence
  Atrx.249_Stag2.1409
  crRNA array
cgatttcttggctttatatatcttgtggaaaggacgaaacaccgtaatttctactaagtgtagattagccagtcgctcatatctctaatttctactaagtgtagatgctaataactgcggaagggcttttttaagcttggcgtggatccgatatcaactagatcttgaga

SEQ ID NO: 1049 - DNA, 170 bp, Artificial sequence
  Atrx.249_Stag2.4401
  crRNA array
cgatttcttggctttatatatcttgtggaaaggacgaaacaccgtaatttctactaagtgtagattagccagtcgctcatatctctaatttctactaagtgtagattaatcgtccagtggtgtatattttttaagcttggcgtggatccgatatcaactagatcttgaga

SEQ ID NO: 1050 - DNA, 170 bp, Artificial sequence
  Atrx.249_Tbl1xr1.1
  crRNA array
cgatttcttggctttatatatcttgtggaaaggacgaaacaccgtaatttctactaagtgtagattagccagtcgctcatatctctaatttctactaagtgtagatggatgcgcatactggtgaagttttttaagcttggcgtggatccgatatcaactagatcttgaga

SEQ ID NO: 1051 - DNA, 170 bp, Artificial sequence
  Atrx.249_Tbl1xr1.83
  crRNA array
cgatttcttggctttatatatcttgtggaaaggacgaaacaccgtaatttctactaagtgtagattagccagtcgctcatatctctaatttctactaagtgtagatatggtcgacccatcgagtctttttttaagcttggcgtggatccgatatcaactagatcttgaga

SEQ ID NO: 1052 - DNA, 170 bp, Artificial sequence
  Atrx.249_Tgfbr2.290
  crRNA array
cgatttcttggctttatatatcttgtggaaaggacgaaacaccgtaatttctactaagtgtagattagccagtcgctcatatctctaatttctactaagtgtagatcctctcggcgcccgggtaaattttttaagcttggcgtggatccgatatcaactagatcttgaga

SEQ ID NO: 1053 - DNA, 170 bp, Artificial sequence
  Atrx.249_Tgfbr2.292
  crRNA array
cgatttcttggctttatatatcttgtggaaaggacgaaacaccgtaatttctactaagtgtagattagccagtcgctcatatctctaatttctactaagtgtagatcccgggcgccgagagggaaattttttaagcttggcgtggatccgatatcaactagatcttgaga

SEQ ID NO: 1054 - DNA, 170 bp, Artificial sequence
  Atrx.249_Trp53.4
  crRNA array
cgatttcttggctttatatatcttgtggaaaggacgaaacaccgtaatttctactaagtgtagattagccagtcgctcatatctctaatttctactaagtgtagatccctgaactgcccccagggattttttaagcttggcgtggatccgatatcaactagatcttgaga

SEQ ID NO: 1055 - DNA, 170 bp, Artificial sequence
  Atrx.249_Trp53.528
  crRNA array
cgatttcttggctttatatatcttgtggaaaggacgaaacaccgtaatttctactaagtgtagattagccagtcgctcatatctctaatttctactaagtgtagatgctgggccagcagagacctgttttttaagcttggcgtggatccgatatcaactagatcttgaga

SEQ ID NO: 1056 - DNA, 170 bp, Artificial sequence
  Atrx.249_Vhl.1
  crRNA array
cgatttcttggctttatatatcttgtggaaaggacgaaacaccgtaatttctactaagtgtagattagccagtcgctcatatctctaatttctactaagtgtagatagggctcccggcggccatttttttttaagcttggcgtggatccgatatcaactagatcttgaga

SEQ ID NO: 1057 - DNA, 170 bp, Artificial sequence
  Atrx.249_Vhl.151
  crRNA array
cgatttcttggctttatatatcttgtggaaaggacgaaacaccgtaatttctactaagtgtagattagccagtcgctcatatctctaatttctactaagtgtagattagagcactcacccgagggattttttaagcttggcgtggatccgatatcaactagatcttgaga

SEQ ID NO: 1058 - DNA, 170 bp, Artificial sequence
  Atrx.249_Zc3h13.1387
  crRNA array
cgatttcttggctttatatatcttgtggaaaggacgaaacaccgtaatttctactaagtgtagattagccagtcgctcatatctctaatttctactaagtgtagatgtgacgccggtcatgtgactttttttaagcttggcgtggatccgatatcaactagatcttgaga

SEQ ID NO: 1059 - DNA, 170 bp, Artificial sequence
  Atrx.249_Zc3h13.1777
  crRNA array
cgatttcttggctttatatatcttgtggaaaggacgaaacaccgtaatttctactaagtgtagattagccagtcgctcatatctctaatttctactaagtgtagatgatgctgccagtgtagcggcttttttaagcttggcgtggatccgatatcaactagatcttgaga

SEQ ID NO: 1060 - DNA, 170 bp, Artificial sequence
  Atrx.251_Acvr2a.155
  crRNA array
cgatttcttggctttatatatcttgtggaaaggacgaaacaccgtaatttctactaagtgtagatgccagtcgctcatatctctgtaatttctactaagtgtagatggacctggctaatcaagtatttttttaagcttggcgtggatccgatatcaactagatcttgaga

SEQ ID NO: 1061 - DNA, 170 bp, Artificial sequence
  Atrx.251_Acvr2a.70
  crRNA array
cgatttcttggctttatatatcttgtggaaaggacgaaacaccgtaatttctactaagtgtagatgccagtcgctcatatctctgtaatttctactaagtgtagatcccgaggcgccggagaagccttttttaagcttggcgtggatccgatatcaactagatcttgaga

SEQ ID NO: 1062 - DNA, 170 bp, Artificial sequence
  Atrx.251_Apc.21
  crRNA array
cgatttcttggctttatatatcttgtggaaaggacgaaacaccgtaatttctactaagtgtagatgccagtcgctcatatctctgtaatttctactaagtgtagatgtgatccacacgtgtagctgttttttaagcttggcgtggatccgatatcaactagatcttgaga

SEQ ID NO: 1063 - DNA, 170 bp, Artificial sequence
  Atrx.251_Apc.867
  crRNA array
cgatttcttggctttatatatcttgtggaaaggacgaaacaccgtaatttctactaagtgtagatgccagtcgctcatatctctgtaatttctactaagtgtagatcagtcccaggcggcggaagcttttttaagcttggcgtggatccgatatcaactagatcttgaga

SEQ ID NO: 1064 - DNA, 170 bp, Artificial sequence
  Atrx.251_Arid1a.2
  crRNA array
cgatttcttggctttatatatcttgtggaaaggacgaaacaccgtaatttctactaagtgtagatgccagtcgctcatatctctgtaatttctactaagtgtagatcccgcgcccccgtcctggggttttttaagcttggcgtggatccgatatcaactagatcttgaga

SEQ ID NO: 1065 - DNA, 170 bp, Artificial sequence
  Atrx.251_Arid1a.5
  crRNA array
cgatttcttggctttatatatcttgtggaaaggacgaaacaccgtaatttctactaagtgtagatgccagtcgctcatatctctgtaatttctactaagtgtagatcccgcgctcggccgctgccgttttttaagcttggcgtggatccgatatcaactagatcttgaga

SEQ ID NO: 1066 - DNA, 170 bp, Artificial sequence
  Atrx.251_Arid2.166
  crRNA array
cgatttcttggctttatatatcttgtggaaaggacgaaacaccgtaatttctactaagtgtagatgccagtcgctcatatctctgtaatttctactaagtgtagataaccgcgatctgggttttttttttttaagcttggcgtggatccgatatcaactagatcttgaga

SEQ ID NO: 1067 - DNA, 170 bp, Artificial sequence
  Atrx.251_Arid2.172
  crRNA array
cgatttcttggctttatatatcttgtggaaaggacgaaacaccgtaatttctactaagtgtagatgccagtcgctcatatctctgtaatttctactaagtgtagatctggacgagctgcggcagttttttttaagcttggcgtggatccgatatcaactagatcttgaga

SEQ ID NO: 1068 - DNA, 170 bp, Artificial sequence
  Atrx.251_Atm.120
  crRNA array
cgatttcttggctttatatatcttgtggaaaggacgaaacaccgtaatttctactaagtgtagatgccagtcgctcatatctctgtaatttctactaagtgtagatgacaggtagtcggcagctaattttttaagcttggcgtggatccgatatcaactagatcttgaga

SEQ ID NO: 1069 - DNA, 170 bp, Artificial sequence
  Atrx.251_Atm.997
  crRNA array
cgatttcttggctttatatatcttgtggaaaggacgaaacaccgtaatttctactaagtgtagatgccagtcgctcatatctctgtaatttctactaagtgtagatgagaaagtctccgaatcgttttttttaagcttggcgtggatccgatatcaactagatcttgaga

SEQ ID NO: 1070 - DNA, 170 bp, Artificial sequence
  Atrx.251_Bcor.203
  crRNA array
cgatttcttggctttatatatcttgtggaaaggacgaaacaccgtaatttctactaagtgtagatgccagtcgctcatatctctgtaatttctactaagtgtagatccccggagcggagtccaggcttttttaagcttggcgtggatccgatatcaactagatcttgaga

SEQ ID NO: 1071 - DNA, 170 bp, Artificial sequence
  Atrx.251_Bcor.475
  crRNA array
cgatttcttggctttatatatcttgtggaaaggacgaaacaccgtaatttctactaagtgtagatgccagtcgctcatatctctgtaatttctactaagtgtagattgcaacccctctgtatgggattttttaagcttggcgtggatccgatatcaactagatcttgaga

SEQ ID NO: 1072 - DNA, 170 bp, Artificial sequence
  Atrx.251_Brca1.112
  crRNA array
cgatttcttggctttatatatcttgtggaaaggacgaaacaccgtaatttctactaagtgtagatgccagtcgctcatatctctgtaatttctactaagtgtagatctagacgctctgtggagactttttttaagcttggcgtggatccgatatcaactagatcttgaga

SEQ ID NO: 1073 - DNA, 170 bp, Artificial sequence
  Atrx.251_Brca1.53
  crRNA array
cgatttcttggctttatatatcttgtggaaaggacgaaacaccgtaatttctactaagtgtagatgccagtcgctcatatctctgtaatttctactaagtgtagataatgaggaggcgtcgatcatttttttaagcttggcgtggatccgatatcaactagatcttgaga

SEQ ID NO: 1074 - DNA, 170 bp, Artificial sequence
  Atrx.251_Casp8.45
  crRNA array
cgatttcttggctttatatatcttgtggaaaggacgaaacaccgtaatttctactaagtgtagatgccagtcgctcatatctctgtaatttctactaagtgtagatctaccgagatcctgtgaatgttttttaagcttggcgtggatccgatatcaactagatcttgaga

SEQ ID NO: 1075 - DNA, 170 bp, Artificial sequence
  Atrx.251_Casp8.54
  crRNA array
cgatttcttggctttatatatcttgtggaaaggacgaaacaccgtaatttctactaagtgtagatgccagtcgctcatatctctgtaatttctactaagtgtagatcagtgcagtcgtcgtaagatttttttaagcttggcgtggatccgatatcaactagatcttgaga

SEQ ID NO: 1076 - DNA, 170 bp, Artificial sequence
  Atrx.251_Cbwd1.84
  crRNA array
cgatttcttggctttatatatcttgtggaaaggacgaaacaccgtaatttctactaagtgtagatgccagtcgctcatatctctgtaatttctactaagtgtagatcacagcaggtaacatgccgcttttttaagcttggcgtggatccgatatcaactagatcttgaga

SEQ ID NO: 1077 - DNA, 170 bp, Artificial sequence
  Atrx.251_Cbwd1.85
  crRNA array
cgatttcttggctttatatatcttgtggaaaggacgaaacaccgtaatttctactaagtgtagatgccagtcgctcatatctctgtaatttctactaagtgtagatacagcaggtaacatgccgccttttttaagcttggcgtggatccgatatcaactagatcttgaga

SEQ ID NO: 1078 - DNA, 170 bp, Artificial sequence
  Atrx.251_Cdh1.387
  crRNA array
cgatttcttggctttatatatcttgtggaaaggacgaaacaccgtaatttctactaagtgtagatgccagtcgctcatatctctgtaatttctactaagtgtagatctcggcgtctgccgggtccgttttttaagcttggcgtggatccgatatcaactagatcttgaga

SEQ ID NO: 1079 - DNA, 170 bp, Artificial sequence
  Atrx.251_Cdh1.58
  crRNA array
cgatttcttggctttatatatcttgtggaaaggacgaaacaccgtaatttctactaagtgtagatgccagtcgctcatatctctgtaatttctactaagtgtagatctcgtccgcgcccgggactcttttttaagcttggcgtggatccgatatcaactagatcttgaga

SEQ ID NO: 1080 - DNA, 170 bp, Artificial sequence
  Atrx.251_Cdkn2a.647
  crRNA array
cgatttcttggctttatatatcttgtggaaaggacgaaacaccgtaatttctactaagtgtagatgccagtcgctcatatctctgtaatttctactaagtgtagatgcaatcacgggagggagcagttttttaagcttggcgtggatccgatatcaactagatcttgaga

SEQ ID NO: 1081 - DNA, 170 bp, Artificial sequence
  Atrx.251_Cdkn2a.648
  crRNA array
cgatttcttggctttatatatcttgtggaaaggacgaaacaccgtaatttctactaagtgtagatgccagtcgctcatatctctgtaatttctactaagtgtagatcaatcacgggagggagcagattttttaagcttggcgtggatccgatatcaactagatcttgaga

SEQ ID NO: 1082 - DNA, 170 bp, Artificial sequence
  Atrx.251_Cic.162
  crRNA array
cgatttcttggctttatatatcttgtggaaaggacgaaacaccgtaatttctactaagtgtagatgccagtcgctcatatctctgtaatttctactaagtgtagatcgcaggcgcgcccggcggagttttttaagcttggcgtggatccgatatcaactagatcttgaga

SEQ ID NO: 1083 - DNA, 170 bp, Artificial sequence
  Atrx.251_Cic.164
  crRNA array
cgatttcttggctttatatatcttgtggaaaggacgaaacaccgtaatttctactaagtgtagatgccagtcgctcatatctctgtaatttctactaagtgtagatcgggccctgggccggcggctttttttaagcttggcgtggatccgatatcaactagatcttgaga

SEQ ID NO: 1084 - DNA, 170 bp, Artificial sequence
  Atrx.251_Ctcf.229
  crRNA array
cgatttcttggctttatatatcttgtggaaaggacgaaacaccgtaatttctactaagtgtagatgccagtcgctcatatctctgtaatttctactaagtgtagatggctggtggctgatagtctgttttttaagcttggcgtggatccgatatcaactagatcttgaga

SEQ ID NO: 1085 - DNA, 170 bp, Artificial sequence
  Atrx.251_Ctcf.809
  crRNA array
cgatttcttggctttatatatcttgtggaaaggacgaaacaccgtaatttctactaagtgtagatgccagtcgctcatatctctgtaatttctactaagtgtagataagcgctatcatgatcccaattttttaagcttggcgtggatccgatatcaactagatcttgaga

SEQ ID NO: 1086 - DNA, 170 bp, Artificial sequence
  Atrx.251_Elf3.826
  crRNA array
cgatttcttggctttatatatcttgtggaaaggacgaaacaccgtaatttctactaagtgtagatgccagtcgctcatatctctgtaatttctactaagtgtagattccgagacatcctaatccacttttttaagcttggcgtggatccgatatcaactagatcttgaga

SEQ ID NO: 1087 - DNA, 170 bp, Artificial sequence
  Atrx.251_Elf3.983
  crRNA array
cgatttcttggctttatatatcttgtggaaaggacgaaacaccgtaatttctactaagtgtagatgccagtcgctcatatctctgtaatttctactaagtgtagattaggccccctaactggaccattttttaagcttggcgtggatccgatatcaactagatcttgaga

SEQ ID NO: 1088 - DNA, 170 bp, Artificial sequence
  Atrx.251_Ep300.310
  crRNA array
cgatttcttggctttatatatcttgtggaaaggacgaaacaccgtaatttctactaagtgtagatgccagtcgctcatatctctgtaatttctactaagtgtagatatggtacgacagtgaggaagttttttaagcttggcgtggatccgatatcaactagatcttgaga

SEQ ID NO: 1089 - DNA, 170 bp, Artificial sequence
  Atrx.251_Ep300.587
  crRNA array
cgatttcttggctttatatatcttgtggaaaggacgaaacaccgtaatttctactaagtgtagatgccagtcgctcatatctctgtaatttctactaagtgtagatcgccccggggcccccaaccattttttaagcttggcgtggatccgatatcaactagatcttgaga

SEQ ID NO: 1090 - DNA, 170 bp, Artificial sequence
  Atrx.251_Epha2.126
  crRNA array
cgatttcttggctttatatatcttgtggaaaggacgaaacaccgtaatttctactaagtgtagatgccagtcgctcatatctctgtaatttctactaagtgtagatcctgtgccgccgcggccgccttttttaagcttggcgtggatccgatatcaactagatcttgaga

SEQ ID NO: 1091 - DNA, 170 bp, Artificial sequence
  Atrx.251_Epha2.5
  crRNA array
cgatttcttggctttatatatcttgtggaaaggacgaaacaccgtaatttctactaagtgtagatgccagtcgctcatatctctgtaatttctactaagtgtagatcatgagctggcgccacccggttttttaagcttggcgtggatccgatatcaactagatcttgaga

SEQ ID NO: 1092 - DNA, 170 bp, Artificial sequence
  Atrx.251_Fat1.105
  crRNA array
cgatttcttggctttatatatcttgtggaaaggacgaaacaccgtaatttctactaagtgtagatgccagtcgctcatatctctgtaatttctactaagtgtagataactcgaggtgacaacaagtttttttaagcttggcgtggatccgatatcaactagatcttgaga

SEQ ID NO: 1093 - DNA, 170 bp, Artificial sequence
  Atrx.251_Fat1.122
  crRNA array
cgatttcttggctttatatatcttgtggaaaggacgaaacaccgtaatttctactaagtgtagatgccagtcgctcatatctctgtaatttctactaagtgtagatccatcgacatggaaacgggattttttaagcttggcgtggatccgatatcaactagatcttgaga

SEQ ID NO: 1094 - DNA, 170 bp, Artificial sequence
  Atrx.251_Fbxw7.21
  crRNA array
cgatttcttggctttatatatcttgtggaaaggacgaaacaccgtaatttctactaagtgtagatgccagtcgctcatatctctgtaatttctactaagtgtagattaatgtgccgtagaaacccattttttaagcttggcgtggatccgatatcaactagatcttgaga

SEQ ID NO: 1095 - DNA, 170 bp, Artificial sequence
  Atrx.251_Fbxw7.23
  crRNA array
cgatttcttggctttatatatcttgtggaaaggacgaaacaccgtaatttctactaagtgtagatgccagtcgctcatatctctgtaatttctactaagtgtagatatgtgccgtagaaacccatattttttaagcttggcgtggatccgatatcaactagatcttgaga

SEQ ID NO: 1096 - DNA, 170 bp, Artificial sequence
  Atrx.251_Gata3.34
  crRNA array
cgatttcttggctttatatatcttgtggaaaggacgaaacaccgtaatttctactaagtgtagatgccagtcgctcatatctctgtaatttctactaagtgtagatctaaactatcccgcaaagatttttttaagcttggcgtggatccgatatcaactagatcttgaga

SEQ ID NO: 1097 - DNA, 170 bp, Artificial sequence
  Atrx.251_Gata3.47
  crRNA array
cgatttcttggctttatatatcttgtggaaaggacgaaacaccgtaatttctactaagtgtagatgccagtcgctcatatctctgtaatttctactaagtgtagatcgtagtaggacgggacgtggttttttaagcttggcgtggatccgatatcaactagatcttgaga

SEQ ID NO: 1098 - DNA, 170 bp, Artificial sequence
  Atrx.251_H2-Q2.1
  crRNA array
cgatttcttggctttatatatcttgtggaaaggacgaaacaccgtaatttctactaagtgtagatgccagtcgctcatatctctgtaatttctactaagtgtagatagggcggccaccaacagcagttttttaagcttggcgtggatccgatatcaactagatcttgaga

SEQ ID NO: 1099 - DNA, 170 bp, Artificial sequence
  Atrx.251_H2-Q2.2
  crRNA array
cgatttcttggctttatatatcttgtggaaaggacgaaacaccgtaatttctactaagtgtagatgccagtcgctcatatctctgtaatttctactaagtgtagattaacctgcgcccgctgctgattttttaagcttggcgtggatccgatatcaactagatcttgaga

SEQ ID NO: 1100 - DNA, 170 bp, Artificial sequence
  Atrx.251_Kdm5c.1878
  crRNA array
cgatttcttggctttatatatcttgtggaaaggacgaaacaccgtaatttctactaagtgtagatgccagtcgctcatatctctgtaatttctactaagtgtagatagagcacggcacccgcccccttttttaagcttggcgtggatccgatatcaactagatcttgaga

SEQ ID NO: 1101 - DNA, 170 bp, Artificial sequence
  Atrx.251_Kdm5c.1879
  crRNA array
cgatttcttggctttatatatcttgtggaaaggacgaaacaccgtaatttctactaagtgtagatgccagtcgctcatatctctgtaatttctactaagtgtagatgagcacggcacccgccccccttttttaagcttggcgtggatccgatatcaactagatcttgaga

SEQ ID NO: 1102 - DNA, 170 bp, Artificial sequence
  Atrx.251_Kdm6a.56
  crRNA array
cgatttcttggctttatatatcttgtggaaaggacgaaacaccgtaatttctactaagtgtagatgccagtcgctcatatctctgtaatttctactaagtgtagattcgctgccgcctctcgcggcttttttaagcttggcgtggatccgatatcaactagatcttgaga

SEQ ID NO: 1103 - DNA, 170 bp, Artificial sequence
  Atrx.251_Kdm6a.57
  crRNA array
cgatttcttggctttatatatcttgtggaaaggacgaaacaccgtaatttctactaagtgtagatgccagtcgctcatatctctgtaatttctactaagtgtagatcgctgccgcctctcgcggcattttttaagcttggcgtggatccgatatcaactagatcttgaga

SEQ ID NO: 1104 - DNA, 170 bp, Artificial sequence
  Atrx.251_Kmt2b.265
  crRNA array
cgatttcttggctttatatatcttgtggaaaggacgaaacaccgtaatttctactaagtgtagatgccagtcgctcatatctctgtaatttctactaagtgtagatccccaagtgaagcccacctgttttttaagcttggcgtggatccgatatcaactagatcttgaga

SEQ ID NO: 1105 - DNA, 170 bp, Artificial sequence
  Atrx.251_Kmt2b.298
  crRNA array
cgatttcttggctttatatatcttgtggaaaggacgaaacaccgtaatttctactaagtgtagatgccagtcgctcatatctctgtaatttctactaagtgtagattccggcagggaccggctggcttttttaagcttggcgtggatccgatatcaactagatcttgaga

SEQ ID NO: 1106 - DNA, 170 bp, Artificial sequence
  Atrx.251_Kmt2c.1962
  crRNA array
cgatttcttggctttatatatcttgtggaaaggacgaaacaccgtaatttctactaagtgtagatgccagtcgctcatatctctgtaatttctactaagtgtagatgtgacgatctgtgccacaagttttttaagcttggcgtggatccgatatcaactagatcttgaga

SEQ ID NO: 1107 - DNA, 170 bp, Artificial sequence
  Atrx.251_Kmt2c.2236
  crRNA array
cgatttcttggctttatatatcttgtggaaaggacgaaacaccgtaatttctactaagtgtagatgccagtcgctcatatctctgtaatttctactaagtgtagatactcgacctccacctccctattttttaagcttggcgtggatccgatatcaactagatcttgaga

SEQ ID NO: 1108 - DNA, 170 bp, Artificial sequence
  Atrx.251_Kmt2d.316
  crRNA array
cgatttcttggctttatatatcttgtggaaaggacgaaacaccgtaatttctactaagtgtagatgccagtcgctcatatctctgtaatttctactaagtgtagatactccaggccacccaggtggttttttaagcttggcgtggatccgatatcaactagatcttgaga

SEQ ID NO: 1109 - DNA, 170 bp, Artificial sequence
  Atrx.251_Kmt2d.416
  crRNA array
cgatttcttggctttatatatcttgtggaaaggacgaaacaccgtaatttctactaagtgtagatgccagtcgctcatatctctgtaatttctactaagtgtagattaaacccccgggggaagggtttttttaagcttggcgtggatccgatatcaactagatcttgaga

SEQ ID NO: 1110 - DNA, 170 bp, Artificial sequence
  Atrx.251_Map2k4.119
  crRNA array
cgatttcttggctttatatatcttgtggaaaggacgaaacaccgtaatttctactaagtgtagatgccagtcgctcatatctctgtaatttctactaagtgtagattgctgtgtgggcggccacatttttttaagcttggcgtggatccgatatcaactagatcttgaga

SEQ ID NO: 1111 - DNA, 170 bp, Artificial sequence
  Atrx.251_Map2k4.1261
  crRNA array
cgatttcttggctttatatatcttgtggaaaggacgaaacaccgtaatttctactaagtgtagatgccagtcgctcatatctctgtaatttctactaagtgtagatgatgtagtaatgcggagtagttttttaagcttggcgtggatccgatatcaactagatcttgaga

SEQ ID NO: 1112 - DNA, 170 bp, Artificial sequence
  Atrx.251_Map3k1.235
  crRNA array
cgatttcttggctttatatatcttgtggaaaggacgaaacaccgtaatttctactaagtgtagatgccagtcgctcatatctctgtaatttctactaagtgtagataaaacgctactgatcgatcgttttttaagcttggcgtggatccgatatcaactagatcttgaga

SEQ ID NO: 1113 - DNA, 170 bp, Artificial sequence
  Atrx.251_Map3k1.3838
  crRNA array
cgatttcttggctttatatatcttgtggaaaggacgaaacaccgtaatttctactaagtgtagatgccagtcgctcatatctctgtaatttctactaagtgtagatccaacaacagggccccactattttttaagcttggcgtggatccgatatcaactagatcttgaga

SEQ ID NO: 1114 - DNA, 170 bp, Artificial sequence
  Atrx.251_Mga.1655
  crRNA array
cgatttcttggctttatatatcttgtggaaaggacgaaacaccgtaatttctactaagtgtagatgccagtcgctcatatctctgtaatttctactaagtgtagatcgagaagtggagagcatattttttttaagcttggcgtggatccgatatcaactagatcttgaga

SEQ ID NO: 1115 - DNA, 170 bp, Artificial sequence
  Atrx.251_Mga.93
  crRNA array
cgatttcttggctttatatatcttgtggaaaggacgaaacaccgtaatttctactaagtgtagatgccagtcgctcatatctctgtaatttctactaagtgtagatgagaaggctccccataatgtttttttaagcttggcgtggatccgatatcaactagatcttgaga

SEQ ID NO: 1116 - DNA, 170 bp, Artificial sequence
  Atrx.251_Nf1.746
  crRNA array
cgatttcttggctttatatatcttgtggaaaggacgaaacaccgtaatttctactaagtgtagatgccagtcgctcatatctctgtaatttctactaagtgtagattaagcataatgatgatgccattttttaagcttggcgtggatccgatatcaactagatcttgaga

SEQ ID NO: 1117 - DNA, 170 bp, Artificial sequence
  Atrx.251_Nf1.97
  crRNA array
cgatttcttggctttatatatcttgtggaaaggacgaaacaccgtaatttctactaagtgtagatgccagtcgctcatatctctgtaatttctactaagtgtagatagcccgctacatgctgatgcttttttaagcttggcgtggatccgatatcaactagatcttgaga

SEQ ID NO: 1118 - DNA, 170 bp, Artificial sequence
  Atrx.251_Nf2.356
  crRNA array
cgatttcttggctttatatatcttgtggaaaggacgaaacaccgtaatttctactaagtgtagatgccagtcgctcatatctctgtaatttctactaagtgtagatcggagtcatctgatagagatttttttaagcttggcgtggatccgatatcaactagatcttgaga

SEQ ID NO: 1119 - DNA, 170 bp, Artificial sequence
  Atrx.251_Nf2.768
  crRNA array
cgatttcttggctttatatatcttgtggaaaggacgaaacaccgtaatttctactaagtgtagatgccagtcgctcatatctctgtaatttctactaagtgtagatccgaagccccagtgtccggcttttttaagcttggcgtggatccgatatcaactagatcttgaga

SEQ ID NO: 1120 - DNA, 170 bp, Artificial sequence
  Atrx.251_Notch1.1849
  crRNA array
cgatttcttggctttatatatcttgtggaaaggacgaaacaccgtaatttctactaagtgtagatgccagtcgctcatatctctgtaatttctactaagtgtagatctggcgggtgggcggcgctgttttttaagcttggcgtggatccgatatcaactagatcttgaga

SEQ ID NO: 1121 - DNA, 170 bp, Artificial sequence
  Atrx.251_Notch1.649
  crRNA array
cgatttcttggctttatatatcttgtggaaaggacgaaacaccgtaatttctactaagtgtagatgccagtcgctcatatctctgtaatttctactaagtgtagattgggccaacgatgccaggacttttttaagcttggcgtggatccgatatcaactagatcttgaga

SEQ ID NO: 1122 - DNA, 170 bp, Artificial sequence
  Atrx.251_Nsd1.70
  crRNA array
cgatttcttggctttatatatcttgtggaaaggacgaaacaccgtaatttctactaagtgtagatgccagtcgctcatatctctgtaatttctactaagtgtagatactggtgtggacgatgcagattttttaagcttggcgtggatccgatatcaactagatcttgaga

SEQ ID NO: 1123 - DNA, 170 bp, Artificial sequence
  Atrx.251_Nsd1.90
  crRNA array
cgatttcttggctttatatatcttgtggaaaggacgaaacaccgtaatttctactaagtgtagatgccagtcgctcatatctctgtaatttctactaagtgtagataggagctaacggcaagaatgttttttaagcttggcgtggatccgatatcaactagatcttgaga

SEQ ID NO: 1124 - DNA, 170 bp, Artificial sequence
  Atrx.251_Pbrm1.1236
  crRNA array
cgatttcttggctttatatatcttgtggaaaggacgaaacaccgtaatttctactaagtgtagatgccagtcgctcatatctctgtaatttctactaagtgtagatgccgataaaaccaacagccgttttttaagcttggcgtggatccgatatcaactagatcttgaga

SEQ ID NO: 1125 - DNA, 170 bp, Artificial sequence
  Atrx.251_Pbrm1.969
  crRNA array
cgatttcttggctttatatatcttgtggaaaggacgaaacaccgtaatttctactaagtgtagatgccagtcgctcatatctctgtaatttctactaagtgtagatgagccctaatgaacagctcattttttaagcttggcgtggatccgatatcaactagatcttgaga

SEQ ID NO: 1126 - DNA, 170 bp, Artificial sequence
  Atrx.251_Pik3r1.76
  crRNA array
cgatttcttggctttatatatcttgtggaaaggacgaaacaccgtaatttctactaagtgtagatgccagtcgctcatatctctgtaatttctactaagtgtagataaaacctatacggcccgcacttttttaagcttggcgtggatccgatatcaactagatcttgaga

SEQ ID NO: 1127 - DNA, 170 bp, Artificial sequence
  Atrx.251_Pik3r1.77
  crRNA array
cgatttcttggctttatatatcttgtggaaaggacgaaacaccgtaatttctactaagtgtagatgccagtcgctcatatctctgtaatttctactaagtgtagataaacctatacggcccgcactttttttaagcttggcgtggatccgatatcaactagatcttgaga

SEQ ID NO: 1128 - DNA, 170 bp, Artificial sequence
  Atrx.251_Pten.240
  crRNA array
cgatttcttggctttatatatcttgtggaaaggacgaaacaccgtaatttctactaagtgtagatgccagtcgctcatatctctgtaatttctactaagtgtagattgcatacgctatagctgcttttttttaagcttggcgtggatccgatatcaactagatcttgaga

SEQ ID NO: 1129 - DNA, 170 bp, Artificial sequence
  Atrx.251_Pten.265
  crRNA array
cgatttcttggctttatatatcttgtggaaaggacgaaacaccgtaatttctactaagtgtagatgccagtcgctcatatctctgtaatttctactaagtgtagataagcgtggtgcgtgacgcacttttttaagcttggcgtggatccgatatcaactagatcttgaga

SEQ ID NO: 1130 - DNA, 170 bp, Artificial sequence
  Atrx.251_Rasa1.1478
  crRNA array
cgatttcttggctttatatatcttgtggaaaggacgaaacaccgtaatttctactaagtgtagatgccagtcgctcatatctctgtaatttctactaagtgtagatcgataatggtctatgatgtcttttttaagcttggcgtggatccgatatcaactagatcttgaga

SEQ ID NO: 1131 - DNA, 170 bp, Artificial sequence
  Atrx.251_Rasa1.223
  crRNA array
cgatttcttggctttatatatcttgtggaaaggacgaaacaccgtaatttctactaagtgtagatgccagtcgctcatatctctgtaatttctactaagtgtagattccatggagtatcgtgctcgttttttaagcttggcgtggatccgatatcaactagatcttgaga

SEQ ID NO: 1132 - DNA, 170 bp, Artificial sequence
  Atrx.251_Rb1.211
  crRNA array
cgatttcttggctttatatatcttgtggaaaggacgaaacaccgtaatttctactaagtgtagatgccagtcgctcatatctctgtaatttctactaagtgtagattctgacatgatcgggtacctttttttaagcttggcgtggatccgatatcaactagatcttgaga

SEQ ID NO: 1133 - DNA, 170 bp, Artificial sequence
  Atrx.251_Rb1.394
  crRNA array
cgatttcttggctttatatatcttgtggaaaggacgaaacaccgtaatttctactaagtgtagatgccagtcgctcatatctctgtaatttctactaagtgtagatagaaatctcgaagcaggatcttttttaagcttggcgtggatccgatatcaactagatcttgaga

SEQ ID NO: 1134 - DNA, 170 bp, Artificial sequence
  Atrx.251_Rbm10.5
  crRNA array
cgatttcttggctttatatatcttgtggaaaggacgaaacaccgtaatttctactaagtgtagatgccagtcgctcatatctctgtaatttctactaagtgtagatacgaaacctgaacccacacattttttaagcttggcgtggatccgatatcaactagatcttgaga

SEQ ID NO: 1135 - DNA, 170 bp, Artificial sequence
  Atrx.251_Rbm10.6
  crRNA array
cgatttcttggctttatatatcttgtggaaaggacgaaacaccgtaatttctactaagtgtagatgccagtcgctcatatctctgtaatttctactaagtgtagatcgaaacctgaacccacacagttttttaagcttggcgtggatccgatatcaactagatcttgaga

SEQ ID NO: 1136 - DNA, 170 bp, Artificial sequence
  Atrx.251_Rnf43.1920
  crRNA array
cgatttcttggctttatatatcttgtggaaaggacgaaacaccgtaatttctactaagtgtagatgccagtcgctcatatctctgtaatttctactaagtgtagatatccccgtgccgtggactccttttttaagcttggcgtggatccgatatcaactagatcttgaga

SEQ ID NO: 1137 - DNA, 170 bp, Artificial sequence
  Atrx.251_Rnf43.39
  crRNA array
cgatttcttggctttatatatcttgtggaaaggacgaaacaccgtaatttctactaagtgtagatgccagtcgctcatatctctgtaatttctactaagtgtagatcaaggggatcactctgataattttttaagcttggcgtggatccgatatcaactagatcttgaga

SEQ ID NO: 1138 - DNA, 170 bp, Artificial sequence
  Atrx.251_Runx1.204
  crRNA array
cgatttcttggctttatatatcttgtggaaaggacgaaacaccgtaatttctactaagtgtagatgccagtcgctcatatctctgtaatttctactaagtgtagattaaataagtccagccgttttttttttaagcttggcgtggatccgatatcaactagatcttgaga

SEQ ID NO: 1139 - DNA, 170 bp, Artificial sequence
  Atrx.251_Runx1.81
  crRNA array
cgatttcttggctttatatatcttgtggaaaggacgaaacaccgtaatttctactaagtgtagatgccagtcgctcatatctctgtaatttctactaagtgtagataggacgcgtatgggaattttttttttaagcttggcgtggatccgatatcaactagatcttgaga

SEQ ID NO: 1140 - DNA, 170 bp, Artificial sequence
  Atrx.251_Setd2.143
  crRNA array
cgatttcttggctttatatatcttgtggaaaggacgaaacaccgtaatttctactaagtgtagatgccagtcgctcatatctctgtaatttctactaagtgtagatgcacaaccacaacagactggttttttaagcttggcgtggatccgatatcaactagatcttgaga

SEQ ID NO: 1141 - DNA, 170 bp, Artificial sequence
  Atrx.251_Setd2.508
  crRNA array
cgatttcttggctttatatatcttgtggaaaggacgaaacaccgtaatttctactaagtgtagatgccagtcgctcatatctctgtaatttctactaagtgtagattacgatcccgagcacccgacttttttaagcttggcgtggatccgatatcaactagatcttgaga

SEQ ID NO: 1142 - DNA, 170 bp, Artificial sequence
  Atrx.251_Smad4.3038
  crRNA array
cgatttcttggctttatatatcttgtggaaaggacgaaacaccgtaatttctactaagtgtagatgccagtcgctcatatctctgtaatttctactaagtgtagatatctgcggcagtgtcaccggttttttaagcttggcgtggatccgatatcaactagatcttgaga

SEQ ID NO: 1143 - DNA, 170 bp, Artificial sequence
  Atrx.251_Smad4.39
  crRNA array
cgatttcttggctttatatatcttgtggaaaggacgaaacaccgtaatttctactaagtgtagatgccagtcgctcatatctctgtaatttctactaagtgtagatagtcaaacgcatactgacaattttttaagcttggcgtggatccgatatcaactagatcttgaga

SEQ ID NO: 1144 - DNA, 170 bp, Artificial sequence
  Atrx.251_Stag2.1409
  crRNA array
cgatttcttggctttatatatcttgtggaaaggacgaaacaccgtaatttctactaagtgtagatgccagtcgctcatatctctgtaatttctactaagtgtagatgctaataactgcggaagggcttttttaagcttggcgtggatccgatatcaactagatcttgaga

SEQ ID NO: 1145 - DNA, 170 bp, Artificial sequence
  Atrx.251_Stag2.4401
  crRNA array
cgatttcttggctttatatatcttgtggaaaggacgaaacaccgtaatttctactaagtgtagatgccagtcgctcatatctctgtaatttctactaagtgtagattaatcgtccagtggtgtatattttttaagcttggcgtggatccgatatcaactagatcttgaga

SEQ ID NO: 1146 - DNA, 170 bp, Artificial sequence
  Atrx.251_Tbl1xr1.1
  crRNA array
cgatttcttggctttatatatcttgtggaaaggacgaaacaccgtaatttctactaagtgtagatgccagtcgctcatatctctgtaatttctactaagtgtagatggatgcgcatactggtgaagttttttaagcttggcgtggatccgatatcaactagatcttgaga

SEQ ID NO: 1147 - DNA, 170 bp, Artificial sequence
  Atrx.251_Tbl1xr1.83
  crRNA array
cgatttcttggctttatatatcttgtggaaaggacgaaacaccgtaatttctactaagtgtagatgccagtcgctcatatctctgtaatttctactaagtgtagatatggtcgacccatcgagtctttttttaagcttggcgtggatccgatatcaactagatcttgaga

SEQ ID NO: 1148 - DNA, 170 bp, Artificial sequence
  Atrx.251_Tgfbr2.290
  crRNA array
cgatttcttggctttatatatcttgtggaaaggacgaaacaccgtaatttctactaagtgtagatgccagtcgctcatatctctgtaatttctactaagtgtagatcctctcggcgcccgggtaaattttttaagcttggcgtggatccgatatcaactagatcttgaga

SEQ ID NO: 1149 - DNA, 170 bp, Artificial sequence
  Atrx.251_Tgfbr2.292
  crRNA array
cgatttcttggctttatatatcttgtggaaaggacgaaacaccgtaatttctactaagtgtagatgccagtcgctcatatctctgtaatttctactaagtgtagatcccgggcgccgagagggaaattttttaagcttggcgtggatccgatatcaactagatcttgaga

SEQ ID NO: 1150 - DNA, 170 bp, Artificial sequence
  Atrx.251_Trp53.4
  crRNA array
cgatttcttggctttatatatcttgtggaaaggacgaaacaccgtaatttctactaagtgtagatgccagtcgctcatatctctgtaatttctactaagtgtagatccctgaactgcccccagggattttttaagcttggcgtggatccgatatcaactagatcttgaga

SEQ ID NO: 1151 - DNA, 170 bp, Artificial sequence
  Atrx.251_Trp53.528
  crRNA array
cgatttcttggctttatatatcttgtggaaaggacgaaacaccgtaatttctactaagtgtagatgccagtcgctcatatctctgtaatttctactaagtgtagatgctgggccagcagagacctgttttttaagcttggcgtggatccgatatcaactagatcttgaga

SEQ ID NO: 1152 - DNA, 170 bp, Artificial sequence
  Atrx.251_Vhl.1
  crRNA array
cgatttcttggctttatatatcttgtggaaaggacgaaacaccgtaatttctactaagtgtagatgccagtcgctcatatctctgtaatttctactaagtgtagatagggctcccggcggccatttttttttaagcttggcgtggatccgatatcaactagatcttgaga

SEQ ID NO: 1153 - DNA, 170 bp, Artificial sequence
  Atrx.251_Vhl.151
  crRNA array
cgatttcttggctttatatatcttgtggaaaggacgaaacaccgtaatttctactaagtgtagatgccagtcgctcatatctctgtaatttctactaagtgtagattagagcactcacccgagggattttttaagcttggcgtggatccgatatcaactagatcttgaga

SEQ ID NO: 1154 - DNA, 170 bp, Artificial sequence
  Atrx.251_Zc3h13.1387
  crRNA array
cgatttcttggctttatatatcttgtggaaaggacgaaacaccgtaatttctactaagtgtagatgccagtcgctcatatctctgtaatttctactaagtgtagatgtgacgccggtcatgtgactttttttaagcttggcgtggatccgatatcaactagatcttgaga

SEQ ID NO: 1155 - DNA, 170 bp, Artificial sequence
  Atrx.251_Zc3h13.1777
  crRNA array
cgatttcttggctttatatatcttgtggaaaggacgaaacaccgtaatttctactaagtgtagatgccagtcgctcatatctctgtaatttctactaagtgtagatgatgctgccagtgtagcggcttttttaagcttggcgtggatccgatatcaactagatcttgaga

SEQ ID NO: 1156 - DNA, 170 bp, Artificial sequence
  Bcor.203_Acvr2a.155
  crRNA array
cgatttcttggctttatatatcttgtggaaaggacgaaacaccgtaatttctactaagtgtagatccccggagcggagtccaggctaatttctactaagtgtagatggacctggctaatcaagtatttttttaagcttggcgtggatccgatatcaactagatcttgaga

SEQ ID NO: 1157 - DNA, 170 bp, Artificial sequence
  Bcor.203_Acvr2a.70
  crRNA array
cgatttcttggctttatatatcttgtggaaaggacgaaacaccgtaatttctactaagtgtagatccccggagcggagtccaggctaatttctactaagtgtagatcccgaggcgccggagaagccttttttaagcttggcgtggatccgatatcaactagatcttgaga

SEQ ID NO: 1158 - DNA, 170 bp, Artificial sequence
  Bcor.203_Apc.21
  crRNA array
cgatttcttggctttatatatcttgtggaaaggacgaaacaccgtaatttctactaagtgtagatccccggagcggagtccaggctaatttctactaagtgtagatgtgatccacacgtgtagctgttttttaagcttggcgtggatccgatatcaactagatcttgaga

SEQ ID NO: 1159 - DNA, 170 bp, Artificial sequence
  Bcor.203_Apc.867
  crRNA array
cgatttcttggctttatatatcttgtggaaaggacgaaacaccgtaatttctactaagtgtagatccccggagcggagtccaggctaatttctactaagtgtagatcagtcccaggcggcggaagcttttttaagcttggcgtggatccgatatcaactagatcttgaga

SEQ ID NO: 1160 - DNA, 170 bp, Artificial sequence
  Bcor.203_Arid1a.2
  crRNA array
cgatttcttggctttatatatcttgtggaaaggacgaaacaccgtaatttctactaagtgtagatccccggagcggagtccaggctaatttctactaagtgtagatcccgcgcccccgtcctggggttttttaagcttggcgtggatccgatatcaactagatcttgaga

SEQ ID NO: 1161 - DNA, 170 bp, Artificial sequence
  Bcor.203_Arid1a.5
  crRNA array
cgatttcttggctttatatatcttgtggaaaggacgaaacaccgtaatttctactaagtgtagatccccggagcggagtccaggctaatttctactaagtgtagatcccgcgctcggccgctgccgttttttaagcttggcgtggatccgatatcaactagatcttgaga

SEQ ID NO: 1162 - DNA, 170 bp, Artificial sequence
  Bcor.203_Arid2.166
  crRNA array
cgatttcttggctttatatatcttgtggaaaggacgaaacaccgtaatttctactaagtgtagatccccggagcggagtccaggctaatttctactaagtgtagataaccgcgatctgggttttttttttttaagcttggcgtggatccgatatcaactagatcttgaga

SEQ ID NO: 1163 - DNA, 170 bp, Artificial sequence
  Bcor.203_Arid2.172
  crRNA array
cgatttcttggctttatatatcttgtggaaaggacgaaacaccgtaatttctactaagtgtagatccccggagcggagtccaggctaatttctactaagtgtagatctggacgagctgcggcagttttttttaagcttggcgtggatccgatatcaactagatcttgaga

SEQ ID NO: 1164 - DNA, 170 bp, Artificial sequence
  Bcor.203_Atm.120
  crRNA array
cgatttcttggctttatatatcttgtggaaaggacgaaacaccgtaatttctactaagtgtagatccccggagcggagtccaggctaatttctactaagtgtagatgacaggtagtcggcagctaattttttaagcttggcgtggatccgatatcaactagatcttgaga

SEQ ID NO: 1165 - DNA, 170 bp, Artificial sequence
  Bcor.203_Atm.997
  crRNA array
cgatttcttggctttatatatcttgtggaaaggacgaaacaccgtaatttctactaagtgtagatccccggagcggagtccaggctaatttctactaagtgtagatgagaaagtctccgaatcgttttttttaagcttggcgtggatccgatatcaactagatcttgaga

SEQ ID NO: 1166 - DNA, 170 bp, Artificial sequence
  Bcor.203_Atrx.249
  crRNA array
cgatttcttggctttatatatcttgtggaaaggacgaaacaccgtaatttctactaagtgtagatccccggagcggagtccaggctaatttctactaagtgtagattagccagtcgctcatatctcttttttaagcttggcgtggatccgatatcaactagatcttgaga

SEQ ID NO: 1167 - DNA, 170 bp, Artificial sequence
  Bcor.203_Atrx.251
  crRNA array
cgatttcttggctttatatatcttgtggaaaggacgaaacaccgtaatttctactaagtgtagatccccggagcggagtccaggctaatttctactaagtgtagatgccagtcgctcatatctctgttttttaagcttggcgtggatccgatatcaactagatcttgaga

SEQ ID NO: 1168 - DNA, 170 bp, Artificial sequence
  Bcor.203_Brca1.112
  crRNA array
cgatttcttggctttatatatcttgtggaaaggacgaaacaccgtaatttctactaagtgtagatccccggagcggagtccaggctaatttctactaagtgtagatctagacgctctgtggagactttttttaagcttggcgtggatccgatatcaactagatcttgaga

SEQ ID NO: 1169 - DNA, 170 bp, Artificial sequence
  Bcor.203_Brca1.53
  crRNA array
cgatttcttggctttatatatcttgtggaaaggacgaaacaccgtaatttctactaagtgtagatccccggagcggagtccaggctaatttctactaagtgtagataatgaggaggcgtcgatcatttttttaagcttggcgtggatccgatatcaactagatcttgaga

SEQ ID NO: 1170 - DNA, 170 bp, Artificial sequence
  Bcor.203_Casp8.45
  crRNA array
cgatttcttggctttatatatcttgtggaaaggacgaaacaccgtaatttctactaagtgtagatccccggagcggagtccaggctaatttctactaagtgtagatctaccgagatcctgtgaatgttttttaagcttggcgtggatccgatatcaactagatcttgaga

SEQ ID NO: 1171 - DNA, 170 bp, Artificial sequence
  Bcor.203_Casp8.54
  crRNA array
cgatttcttggctttatatatcttgtggaaaggacgaaacaccgtaatttctactaagtgtagatccccggagcggagtccaggctaatttctactaagtgtagatcagtgcagtcgtcgtaagatttttttaagcttggcgtggatccgatatcaactagatcttgaga

SEQ ID NO: 1172 - DNA, 170 bp, Artificial sequence
  Bcor.203_Cbwd1.84
  crRNA array
cgatttcttggctttatatatcttgtggaaaggacgaaacaccgtaatttctactaagtgtagatccccggagcggagtccaggctaatttctactaagtgtagatcacagcaggtaacatgccgcttttttaagcttggcgtggatccgatatcaactagatcttgaga

SEQ ID NO: 1173 - DNA, 170 bp, Artificial sequence
  Bcor.203_Cbwd1.85
  crRNA array
cgatttcttggctttatatatcttgtggaaaggacgaaacaccgtaatttctactaagtgtagatccccggagcggagtccaggctaatttctactaagtgtagatacagcaggtaacatgccgccttttttaagcttggcgtggatccgatatcaactagatcttgaga

SEQ ID NO: 1174 - DNA, 170 bp, Artificial sequence
  Bcor.203_Cdh1.387
  crRNA array
cgatttcttggctttatatatcttgtggaaaggacgaaacaccgtaatttctactaagtgtagatccccggagcggagtccaggctaatttctactaagtgtagatctcggcgtctgccgggtccgttttttaagcttggcgtggatccgatatcaactagatcttgaga

SEQ ID NO: 1175 - DNA, 170 bp, Artificial sequence
  Bcor.203_Cdh1.58
  crRNA array
cgatttcttggctttatatatcttgtggaaaggacgaaacaccgtaatttctactaagtgtagatccccggagcggagtccaggctaatttctactaagtgtagatctcgtccgcgcccgggactcttttttaagcttggcgtggatccgatatcaactagatcttgaga

SEQ ID NO: 1176 - DNA, 170 bp, Artificial sequence
  Bcor.203_Cdkn2a.647
  crRNA array
cgatttcttggctttatatatcttgtggaaaggacgaaacaccgtaatttctactaagtgtagatccccggagcggagtccaggctaatttctactaagtgtagatgcaatcacgggagggagcagttttttaagcttggcgtggatccgatatcaactagatcttgaga

SEQ ID NO: 1177 - DNA, 170 bp, Artificial sequence
  Bcor.203_Cdkn2a.648
  crRNA array
cgatttcttggctttatatatcttgtggaaaggacgaaacaccgtaatttctactaagtgtagatccccggagcggagtccaggctaatttctactaagtgtagatcaatcacgggagggagcagattttttaagcttggcgtggatccgatatcaactagatcttgaga

SEQ ID NO: 1178 - DNA, 170 bp, Artificial sequence
  Bcor.203_Cic.162
  crRNA array
cgatttcttggctttatatatcttgtggaaaggacgaaacaccgtaatttctactaagtgtagatccccggagcggagtccaggctaatttctactaagtgtagatcgcaggcgcgcccggcggagttttttaagcttggcgtggatccgatatcaactagatcttgaga

SEQ ID NO: 1179 - DNA, 170 bp, Artificial sequence
  Bcor.203_Cic.164
  crRNA array
cgatttcttggctttatatatcttgtggaaaggacgaaacaccgtaatttctactaagtgtagatccccggagcggagtccaggctaatttctactaagtgtagatcgggccctgggccggcggctttttttaagcttggcgtggatccgatatcaactagatcttgaga

SEQ ID NO: 1180 - DNA, 170 bp, Artificial sequence
  Bcor.203_Ctcf.229
  crRNA array
cgatttcttggctttatatatcttgtggaaaggacgaaacaccgtaatttctactaagtgtagatccccggagcggagtccaggctaatttctactaagtgtagatggctggtggctgatagtctgttttttaagcttggcgtggatccgatatcaactagatcttgaga

SEQ ID NO: 1181 - DNA, 170 bp, Artificial sequence
  Bcor.203_Ctcf.809
  crRNA array
cgatttcttggctttatatatcttgtggaaaggacgaaacaccgtaatttctactaagtgtagatccccggagcggagtccaggctaatttctactaagtgtagataagcgctatcatgatcccaattttttaagcttggcgtggatccgatatcaactagatcttgaga

SEQ ID NO: 1182 - DNA, 170 bp, Artificial sequence
  Bcor.203_Elf3.826
  crRNA array
cgatttcttggctttatatatcttgtggaaaggacgaaacaccgtaatttctactaagtgtagatccccggagcggagtccaggctaatttctactaagtgtagattccgagacatcctaatccacttttttaagcttggcgtggatccgatatcaactagatcttgaga

SEQ ID NO: 1183 - DNA, 170 bp, Artificial sequence
  Bcor.203_Elf3.983
  crRNA array
cgatttcttggctttatatatcttgtggaaaggacgaaacaccgtaatttctactaagtgtagatccccggagcggagtccaggctaatttctactaagtgtagattaggccccctaactggaccattttttaagcttggcgtggatccgatatcaactagatcttgaga

SEQ ID NO: 1184 - DNA, 170 bp, Artificial sequence
  Bcor.203_Ep300.310
  crRNA array
cgatttcttggctttatatatcttgtggaaaggacgaaacaccgtaatttctactaagtgtagatccccggagcggagtccaggctaatttctactaagtgtagatatggtacgacagtgaggaagttttttaagcttggcgtggatccgatatcaactagatcttgaga

SEQ ID NO: 1185 - DNA, 170 bp, Artificial sequence
  Bcor.203_Ep300.587
  crRNA array
cgatttcttggctttatatatcttgtggaaaggacgaaacaccgtaatttctactaagtgtagatccccggagcggagtccaggctaatttctactaagtgtagatcgccccggggcccccaaccattttttaagcttggcgtggatccgatatcaactagatcttgaga

SEQ ID NO: 1186 - DNA, 170 bp, Artificial sequence
  Bcor.203_Epha2.126
  crRNA array
cgatttcttggctttatatatcttgtggaaaggacgaaacaccgtaatttctactaagtgtagatccccggagcggagtccaggctaatttctactaagtgtagatcctgtgccgccgcggccgccttttttaagcttggcgtggatccgatatcaactagatcttgaga

SEQ ID NO: 1187 - DNA, 170 bp, Artificial sequence
  Bcor.203_Epha2.5
  crRNA array
cgatttcttggctttatatatcttgtggaaaggacgaaacaccgtaatttctactaagtgtagatccccggagcggagtccaggctaatttctactaagtgtagatcatgagctggcgccacccggttttttaagcttggcgtggatccgatatcaactagatcttgaga

SEQ ID NO: 1188 - DNA, 170 bp, Artificial sequence
  Bcor.203_Fat1.105
  crRNA array
cgatttcttggctttatatatcttgtggaaaggacgaaacaccgtaatttctactaagtgtagatccccggagcggagtccaggctaatttctactaagtgtagataactcgaggtgacaacaagtttttttaagcttggcgtggatccgatatcaactagatcttgaga

SEQ ID NO: 1189 - DNA, 170 bp, Artificial sequence
  Bcor.203_Fat1.122
  crRNA array
cgatttcttggctttatatatcttgtggaaaggacgaaacaccgtaatttctactaagtgtagatccccggagcggagtccaggctaatttctactaagtgtagatccatcgacatggaaacgggattttttaagcttggcgtggatccgatatcaactagatcttgaga

SEQ ID NO: 1190 - DNA, 170 bp, Artificial sequence
  Bcor.203_Fbxw7.21
  crRNA array
cgatttcttggctttatatatcttgtggaaaggacgaaacaccgtaatttctactaagtgtagatccccggagcggagtccaggctaatttctactaagtgtagattaatgtgccgtagaaacccattttttaagcttggcgtggatccgatatcaactagatcttgaga

SEQ ID NO: 1191 - DNA, 170 bp, Artificial sequence
  Bcor.203_Fbxw7.23
  crRNA array
cgatttcttggctttatatatcttgtggaaaggacgaaacaccgtaatttctactaagtgtagatccccggagcggagtccaggctaatttctactaagtgtagatatgtgccgtagaaacccatattttttaagcttggcgtggatccgatatcaactagatcttgaga

SEQ ID NO: 1192 - DNA, 170 bp, Artificial sequence
  Bcor.203_Gata3.34
  crRNA array
cgatttcttggctttatatatcttgtggaaaggacgaaacaccgtaatttctactaagtgtagatccccggagcggagtccaggctaatttctactaagtgtagatctaaactatcccgcaaagatttttttaagcttggcgtggatccgatatcaactagatcttgaga

SEQ ID NO: 1193 - DNA, 170 bp, Artificial sequence
  Bcor.203_Gata3.47
  crRNA array
cgatttcttggctttatatatcttgtggaaaggacgaaacaccgtaatttctactaagtgtagatccccggagcggagtccaggctaatttctactaagtgtagatcgtagtaggacgggacgtggttttttaagcttggcgtggatccgatatcaactagatcttgaga

SEQ ID NO: 1194 - DNA, 170 bp, Artificial sequence
  Bcor.203_H2-Q2.1
  crRNA array
cgatttcttggctttatatatcttgtggaaaggacgaaacaccgtaatttctactaagtgtagatccccggagcggagtccaggctaatttctactaagtgtagatagggcggccaccaacagcagttttttaagcttggcgtggatccgatatcaactagatcttgaga

SEQ ID NO: 1195 - DNA, 170 bp, Artificial sequence
  Bcor.203_H2-Q2.2
  crRNA array
cgatttcttggctttatatatcttgtggaaaggacgaaacaccgtaatttctactaagtgtagatccccggagcggagtccaggctaatttctactaagtgtagattaacctgcgcccgctgctgattttttaagcttggcgtggatccgatatcaactagatcttgaga

SEQ ID NO: 1196 - DNA, 170 bp, Artificial sequence
  Bcor.203_Kdm5c.1878
  crRNA array
cgatttcttggctttatatatcttgtggaaaggacgaaacaccgtaatttctactaagtgtagatccccggagcggagtccaggctaatttctactaagtgtagatagagcacggcacccgcccccttttttaagcttggcgtggatccgatatcaactagatcttgaga

SEQ ID NO: 1197 - DNA, 170 bp, Artificial sequence
  Bcor.203_Kdm5c.1879
  crRNA array
cgatttcttggctttatatatcttgtggaaaggacgaaacaccgtaatttctactaagtgtagatccccggagcggagtccaggctaatttctactaagtgtagatgagcacggcacccgccccccttttttaagcttggcgtggatccgatatcaactagatcttgaga

SEQ ID NO: 1198 - DNA, 170 bp, Artificial sequence
  Bcor.203_Kdm6a.56
  crRNA array
cgatttcttggctttatatatcttgtggaaaggacgaaacaccgtaatttctactaagtgtagatccccggagcggagtccaggctaatttctactaagtgtagattcgctgccgcctctcgcggcttttttaagcttggcgtggatccgatatcaactagatcttgaga

SEQ ID NO: 1199 - DNA, 170 bp, Artificial sequence
  Bcor.203_Kdm6a.57
  crRNA array
cgatttcttggctttatatatcttgtggaaaggacgaaacaccgtaatttctactaagtgtagatccccggagcggagtccaggctaatttctactaagtgtagatcgctgccgcctctcgcggcattttttaagcttggcgtggatccgatatcaactagatcttgaga

SEQ ID NO: 1200 - DNA, 170 bp, Artificial sequence
  Bcor.203_Kmt2b.265
  crRNA array
cgatttcttggctttatatatcttgtggaaaggacgaaacaccgtaatttctactaagtgtagatccccggagcggagtccaggctaatttctactaagtgtagatccccaagtgaagcccacctgttttttaagcttggcgtggatccgatatcaactagatcttgaga

SEQ ID NO: 1201 - DNA, 170 bp, Artificial sequence
  Bcor.203_Kmt2b.298
  crRNA array
cgatttcttggctttatatatcttgtggaaaggacgaaacaccgtaatttctactaagtgtagatccccggagcggagtccaggctaatttctactaagtgtagattccggcagggaccggctggcttttttaagcttggcgtggatccgatatcaactagatcttgaga

SEQ ID NO: 1202 - DNA, 170 bp, Artificial sequence
  Bcor.203_Kmt2c.1962
  crRNA array
cgatttcttggctttatatatcttgtggaaaggacgaaacaccgtaatttctactaagtgtagatccccggagcggagtccaggctaatttctactaagtgtagatgtgacgatctgtgccacaagttttttaagcttggcgtggatccgatatcaactagatcttgaga

SEQ ID NO: 1203 - DNA, 170 bp, Artificial sequence
  Bcor.203_Kmt2c.2236
  crRNA array
cgatttcttggctttatatatcttgtggaaaggacgaaacaccgtaatttctactaagtgtagatccccggagcggagtccaggctaatttctactaagtgtagatactcgacctccacctccctattttttaagcttggcgtggatccgatatcaactagatcttgaga

SEQ ID NO: 1204 - DNA, 170 bp, Artificial sequence
  Bcor.203_Kmt2d.316
  crRNA array
cgatttcttggctttatatatcttgtggaaaggacgaaacaccgtaatttctactaagtgtagatccccggagcggagtccaggctaatttctactaagtgtagatactccaggccacccaggtggttttttaagcttggcgtggatccgatatcaactagatcttgaga

SEQ ID NO: 1205 - DNA, 170 bp, Artificial sequence
  Bcor.203_Kmt2d.416
  crRNA array
cgatttcttggctttatatatcttgtggaaaggacgaaacaccgtaatttctactaagtgtagatccccggagcggagtccaggctaatttctactaagtgtagattaaacccccgggggaagggtttttttaagcttggcgtggatccgatatcaactagatcttgaga

SEQ ID NO: 1206 - DNA, 170 bp, Artificial sequence
  Bcor.203_Map2k4.119
  crRNA array
cgatttcttggctttatatatcttgtggaaaggacgaaacaccgtaatttctactaagtgtagatccccggagcggagtccaggctaatttctactaagtgtagattgctgtgtgggcggccacatttttttaagcttggcgtggatccgatatcaactagatcttgaga

SEQ ID NO: 1207 - DNA, 170 bp, Artificial sequence
  Bcor.203_Map2k4.1261
  crRNA array
cgatttcttggctttatatatcttgtggaaaggacgaaacaccgtaatttctactaagtgtagatccccggagcggagtccaggctaatttctactaagtgtagatgatgtagtaatgcggagtagttttttaagcttggcgtggatccgatatcaactagatcttgaga

SEQ ID NO: 1208 - DNA, 170 bp, Artificial sequence
  Bcor.203_Map3k1.235
  crRNA array
cgatttcttggctttatatatcttgtggaaaggacgaaacaccgtaatttctactaagtgtagatccccggagcggagtccaggctaatttctactaagtgtagataaaacgctactgatcgatcgttttttaagcttggcgtggatccgatatcaactagatcttgaga

SEQ ID NO: 1209 - DNA, 170 bp, Artificial sequence
  Bcor.203_Map3k1.3838
  crRNA array
cgatttcttggctttatatatcttgtggaaaggacgaaacaccgtaatttctactaagtgtagatccccggagcggagtccaggctaatttctactaagtgtagatccaacaacagggccccactattttttaagcttggcgtggatccgatatcaactagatcttgaga

SEQ ID NO: 1210 - DNA, 170 bp, Artificial sequence
  Bcor.203_Mga.1655
  crRNA array
cgatttcttggctttatatatcttgtggaaaggacgaaacaccgtaatttctactaagtgtagatccccggagcggagtccaggctaatttctactaagtgtagatcgagaagtggagagcatattttttttaagcttggcgtggatccgatatcaactagatcttgaga

SEQ ID NO: 1211 - DNA, 170 bp, Artificial sequence
  Bcor.203_Mga.93
  crRNA array
cgatttcttggctttatatatcttgtggaaaggacgaaacaccgtaatttctactaagtgtagatccccggagcggagtccaggctaatttctactaagtgtagatgagaaggctccccataatgtttttttaagcttggcgtggatccgatatcaactagatcttgaga

SEQ ID NO: 1212 - DNA, 170 bp, Artificial sequence
  Bcor.203_Nf1.746
  crRNA array
cgatttcttggctttatatatcttgtggaaaggacgaaacaccgtaatttctactaagtgtagatccccggagcggagtccaggctaatttctactaagtgtagattaagcataatgatgatgccattttttaagcttggcgtggatccgatatcaactagatcttgaga

SEQ ID NO: 1213 - DNA, 170 bp, Artificial sequence
  Bcor.203_Nf1.97
  crRNA array
cgatttcttggctttatatatcttgtggaaaggacgaaacaccgtaatttctactaagtgtagatccccggagcggagtccaggctaatttctactaagtgtagatagcccgctacatgctgatgcttttttaagcttggcgtggatccgatatcaactagatcttgaga

SEQ ID NO: 1214 - DNA, 170 bp, Artificial sequence
  Bcor.203_Nf2.356
  crRNA array
cgatttcttggctttatatatcttgtggaaaggacgaaacaccgtaatttctactaagtgtagatccccggagcggagtccaggctaatttctactaagtgtagatcggagtcatctgatagagatttttttaagcttggcgtggatccgatatcaactagatcttgaga

SEQ ID NO: 1215 - DNA, 170 bp, Artificial sequence
  Bcor.203_Nf2.768
  crRNA array
cgatttcttggctttatatatcttgtggaaaggacgaaacaccgtaatttctactaagtgtagatccccggagcggagtccaggctaatttctactaagtgtagatccgaagccccagtgtccggcttttttaagcttggcgtggatccgatatcaactagatcttgaga

SEQ ID NO: 1216 - DNA, 170 bp, Artificial sequence
  Bcor.203_Notch1.1849
  crRNA array
cgatttcttggctttatatatcttgtggaaaggacgaaacaccgtaatttctactaagtgtagatccccggagcggagtccaggctaatttctactaagtgtagatctggcgggtgggcggcgctgttttttaagcttggcgtggatccgatatcaactagatcttgaga

SEQ ID NO: 1217 - DNA, 170 bp, Artificial sequence
  Bcor.203_Notch1.649
  crRNA array
cgatttcttggctttatatatcttgtggaaaggacgaaacaccgtaatttctactaagtgtagatccccggagcggagtccaggctaatttctactaagtgtagattgggccaacgatgccaggacttttttaagcttggcgtggatccgatatcaactagatcttgaga

SEQ ID NO: 1218 - DNA, 170 bp, Artificial sequence
  Bcor.203_Nsd1.70
  crRNA array
cgatttcttggctttatatatcttgtggaaaggacgaaacaccgtaatttctactaagtgtagatccccggagcggagtccaggctaatttctactaagtgtagatactggtgtggacgatgcagattttttaagcttggcgtggatccgatatcaactagatcttgaga

SEQ ID NO: 1219 - DNA, 170 bp, Artificial sequence
  Bcor.203_Nsd1.90
  crRNA array
cgatttcttggctttatatatcttgtggaaaggacgaaacaccgtaatttctactaagtgtagatccccggagcggagtccaggctaatttctactaagtgtagataggagctaacggcaagaatgttttttaagcttggcgtggatccgatatcaactagatcttgaga

SEQ ID NO: 1220 - DNA, 170 bp, Artificial sequence
  Bcor.203_Pbrm1.1236
  crRNA array
cgatttcttggctttatatatcttgtggaaaggacgaaacaccgtaatttctactaagtgtagatccccggagcggagtccaggctaatttctactaagtgtagatgccgataaaaccaacagccgttttttaagcttggcgtggatccgatatcaactagatcttgaga

SEQ ID NO: 1221 - DNA, 170 bp, Artificial sequence
  Bcor.203_Pbrm1.969
  crRNA array
cgatttcttggctttatatatcttgtggaaaggacgaaacaccgtaatttctactaagtgtagatccccggagcggagtccaggctaatttctactaagtgtagatgagccctaatgaacagctcattttttaagcttggcgtggatccgatatcaactagatcttgaga

SEQ ID NO: 1222 - DNA, 170 bp, Artificial sequence
  Bcor.203_Pik3r1.76
  crRNA array
cgatttcttggctttatatatcttgtggaaaggacgaaacaccgtaatttctactaagtgtagatccccggagcggagtccaggctaatttctactaagtgtagataaaacctatacggcccgcacttttttaagcttggcgtggatccgatatcaactagatcttgaga

SEQ ID NO: 1223 - DNA, 170 bp, Artificial sequence
  Bcor.203_Pik3r1.77
  crRNA array
cgatttcttggctttatatatcttgtggaaaggacgaaacaccgtaatttctactaagtgtagatccccggagcggagtccaggctaatttctactaagtgtagataaacctatacggcccgcactttttttaagcttggcgtggatccgatatcaactagatcttgaga

SEQ ID NO: 1224 - DNA, 170 bp, Artificial sequence
  Bcor.203_Pten.240
  crRNA array
cgatttcttggctttatatatcttgtggaaaggacgaaacaccgtaatttctactaagtgtagatccccggagcggagtccaggctaatttctactaagtgtagattgcatacgctatagctgcttttttttaagcttggcgtggatccgatatcaactagatcttgaga

SEQ ID NO: 1225 - DNA, 170 bp, Artificial sequence
  Bcor.203_Pten.265
  crRNA array
cgatttcttggctttatatatcttgtggaaaggacgaaacaccgtaatttctactaagtgtagatccccggagcggagtccaggctaatttctactaagtgtagataagcgtggtgcgtgacgcacttttttaagcttggcgtggatccgatatcaactagatcttgaga

SEQ ID NO: 1226 - DNA, 170 bp, Artificial sequence
  Bcor.203_Rasa1.1478
  crRNA array
cgatttcttggctttatatatcttgtggaaaggacgaaacaccgtaatttctactaagtgtagatccccggagcggagtccaggctaatttctactaagtgtagatcgataatggtctatgatgtcttttttaagcttggcgtggatccgatatcaactagatcttgaga

SEQ ID NO: 1227 - DNA, 170 bp, Artificial sequence
  Bcor.203_Rasa1.223
  crRNA array
cgatttcttggctttatatatcttgtggaaaggacgaaacaccgtaatttctactaagtgtagatccccggagcggagtccaggctaatttctactaagtgtagattccatggagtatcgtgctcgttttttaagcttggcgtggatccgatatcaactagatcttgaga

SEQ ID NO: 1228 - DNA, 170 bp, Artificial sequence
  Bcor.203_Rb1.211
  crRNA array
cgatttcttggctttatatatcttgtggaaaggacgaaacaccgtaatttctactaagtgtagatccccggagcggagtccaggctaatttctactaagtgtagattctgacatgatcgggtacctttttttaagcttggcgtggatccgatatcaactagatcttgaga

SEQ ID NO: 1229 - DNA, 170 bp, Artificial sequence
  Bcor.203_Rb1.394
  crRNA array
cgatttcttggctttatatatcttgtggaaaggacgaaacaccgtaatttctactaagtgtagatccccggagcggagtccaggctaatttctactaagtgtagatagaaatctcgaagcaggatcttttttaagcttggcgtggatccgatatcaactagatcttgaga

SEQ ID NO: 1230 - DNA, 170 bp, Artificial sequence
  Bcor.203_Rbm10.5
  crRNA array
cgatttcttggctttatatatcttgtggaaaggacgaaacaccgtaatttctactaagtgtagatccccggagcggagtccaggctaatttctactaagtgtagatacgaaacctgaacccacacattttttaagcttggcgtggatccgatatcaactagatcttgaga

SEQ ID NO: 1231 - DNA, 170 bp, Artificial sequence
  Bcor.203_Rbm10.6
  crRNA array
cgatttcttggctttatatatcttgtggaaaggacgaaacaccgtaatttctactaagtgtagatccccggagcggagtccaggctaatttctactaagtgtagatcgaaacctgaacccacacagttttttaagcttggcgtggatccgatatcaactagatcttgaga

SEQ ID NO: 1232 - DNA, 170 bp, Artificial sequence
  Bcor.203_Rnf43.1920
  crRNA array
cgatttcttggctttatatatcttgtggaaaggacgaaacaccgtaatttctactaagtgtagatccccggagcggagtccaggctaatttctactaagtgtagatatccccgtgccgtggactccttttttaagcttggcgtggatccgatatcaactagatcttgaga

SEQ ID NO: 1233 - DNA, 170 bp, Artificial sequence
  Bcor.203_Rnf43.39
  crRNA array
cgatttcttggctttatatatcttgtggaaaggacgaaacaccgtaatttctactaagtgtagatccccggagcggagtccaggctaatttctactaagtgtagatcaaggggatcactctgataattttttaagcttggcgtggatccgatatcaactagatcttgaga

SEQ ID NO: 1234 - DNA, 170 bp, Artificial sequence
  Bcor.203_Runx1.204
  crRNA array
cgatttcttggctttatatatcttgtggaaaggacgaaacaccgtaatttctactaagtgtagatccccggagcggagtccaggctaatttctactaagtgtagattaaataagtccagccgttttttttttaagcttggcgtggatccgatatcaactagatcttgaga

SEQ ID NO: 1235 - DNA, 170 bp, Artificial sequence
  Bcor.203_Runx1.81
  crRNA array
cgatttcttggctttatatatcttgtggaaaggacgaaacaccgtaatttctactaagtgtagatccccggagcggagtccaggctaatttctactaagtgtagataggacgcgtatgggaattttttttttaagcttggcgtggatccgatatcaactagatcttgaga

SEQ ID NO: 1236 - DNA, 170 bp, Artificial sequence
  Bcor.203_Setd2.143
  crRNA array
cgatttcttggctttatatatcttgtggaaaggacgaaacaccgtaatttctactaagtgtagatccccggagcggagtccaggctaatttctactaagtgtagatgcacaaccacaacagactggttttttaagcttggcgtggatccgatatcaactagatcttgaga

SEQ ID NO: 1237 - DNA, 170 bp, Artificial sequence
  Bcor.203_Setd2.508
  crRNA array
cgatttcttggctttatatatcttgtggaaaggacgaaacaccgtaatttctactaagtgtagatccccggagcggagtccaggctaatttctactaagtgtagattacgatcccgagcacccgacttttttaagcttggcgtggatccgatatcaactagatcttgaga

SEQ ID NO: 1238 - DNA, 170 bp, Artificial sequence
  Bcor.203_Smad4.3038
  crRNA array
cgatttcttggctttatatatcttgtggaaaggacgaaacaccgtaatttctactaagtgtagatccccggagcggagtccaggctaatttctactaagtgtagatatctgcggcagtgtcaccggttttttaagcttggcgtggatccgatatcaactagatcttgaga

SEQ ID NO: 1239 - DNA, 170 bp, Artificial sequence
  Bcor.203_Smad4.39
  crRNA array
cgatttcttggctttatatatcttgtggaaaggacgaaacaccgtaatttctactaagtgtagatccccggagcggagtccaggctaatttctactaagtgtagatagtcaaacgcatactgacaattttttaagcttggcgtggatccgatatcaactagatcttgaga

SEQ ID NO: 1240 - DNA, 170 bp, Artificial sequence
  Bcor.203_Stag2.1409
  crRNA array
cgatttcttggctttatatatcttgtggaaaggacgaaacaccgtaatttctactaagtgtagatccccggagcggagtccaggctaatttctactaagtgtagatgctaataactgcggaagggcttttttaagcttggcgtggatccgatatcaactagatcttgaga

SEQ ID NO: 1241 - DNA, 170 bp, Artificial sequence
  Bcor.203_Stag2.4401
  crRNA array
cgatttcttggctttatatatcttgtggaaaggacgaaacaccgtaatttctactaagtgtagatccccggagcggagtccaggctaatttctactaagtgtagattaatcgtccagtggtgtatattttttaagcttggcgtggatccgatatcaactagatcttgaga

SEQ ID NO: 1242 - DNA, 170 bp, Artificial sequence
  Bcor.203_Tbl1xr1.1
  crRNA array
cgatttcttggctttatatatcttgtggaaaggacgaaacaccgtaatttctactaagtgtagatccccggagcggagtccaggctaatttctactaagtgtagatggatgcgcatactggtgaagttttttaagcttggcgtggatccgatatcaactagatcttgaga

SEQ ID NO: 1243 - DNA, 170 bp, Artificial sequence
  Bcor.203_Tbl1xr1.83
  crRNA array
cgatttcttggctttatatatcttgtggaaaggacgaaacaccgtaatttctactaagtgtagatccccggagcggagtccaggctaatttctactaagtgtagatatggtcgacccatcgagtctttttttaagcttggcgtggatccgatatcaactagatcttgaga

SEQ ID NO: 1244 - DNA, 170 bp, Artificial sequence
  Bcor.203_Tgfbr2.290
  crRNA array
cgatttcttggctttatatatcttgtggaaaggacgaaacaccgtaatttctactaagtgtagatccccggagcggagtccaggctaatttctactaagtgtagatcctctcggcgcccgggtaaattttttaagcttggcgtggatccgatatcaactagatcttgaga

SEQ ID NO: 1245 - DNA, 170 bp, Artificial sequence
  Bcor.203_Tgfbr2.292
  crRNA array
cgatttcttggctttatatatcttgtggaaaggacgaaacaccgtaatttctactaagtgtagatccccggagcggagtccaggctaatttctactaagtgtagatcccgggcgccgagagggaaattttttaagcttggcgtggatccgatatcaactagatcttgaga

SEQ ID NO: 1246 - DNA, 170 bp, Artificial sequence
  Bcor.203_Trp53.4
  crRNA array
cgatttcttggctttatatatcttgtggaaaggacgaaacaccgtaatttctactaagtgtagatccccggagcggagtccaggctaatttctactaagtgtagatccctgaactgcccccagggattttttaagcttggcgtggatccgatatcaactagatcttgaga

SEQ ID NO: 1247 - DNA, 170 bp, Artificial sequence
  Bcor.203_Trp53.528
  crRNA array
cgatttcttggctttatatatcttgtggaaaggacgaaacaccgtaatttctactaagtgtagatccccggagcggagtccaggctaatttctactaagtgtagatgctgggccagcagagacctgttttttaagcttggcgtggatccgatatcaactagatcttgaga

SEQ ID NO: 1248 - DNA, 170 bp, Artificial sequence
  Bcor.203_Vhl.1
  crRNA array
cgatttcttggctttatatatcttgtggaaaggacgaaacaccgtaatttctactaagtgtagatccccggagcggagtccaggctaatttctactaagtgtagatagggctcccggcggccatttttttttaagcttggcgtggatccgatatcaactagatcttgaga

SEQ ID NO: 1249 - DNA, 170 bp, Artificial sequence
  Bcor.203_Vhl.151
  crRNA array
cgatttcttggctttatatatcttgtggaaaggacgaaacaccgtaatttctactaagtgtagatccccggagcggagtccaggctaatttctactaagtgtagattagagcactcacccgagggattttttaagcttggcgtggatccgatatcaactagatcttgaga

SEQ ID NO: 1250 - DNA, 170 bp, Artificial sequence
  Bcor.203_Zc3h13.1387
  crRNA array
cgatttcttggctttatatatcttgtggaaaggacgaaacaccgtaatttctactaagtgtagatccccggagcggagtccaggctaatttctactaagtgtagatgtgacgccggtcatgtgactttttttaagcttggcgtggatccgatatcaactagatcttgaga

SEQ ID NO: 1251 - DNA, 170 bp, Artificial sequence
  Bcor.203_Zc3h13.1777
  crRNA array
cgatttcttggctttatatatcttgtggaaaggacgaaacaccgtaatttctactaagtgtagatccccggagcggagtccaggctaatttctactaagtgtagatgatgctgccagtgtagcggcttttttaagcttggcgtggatccgatatcaactagatcttgaga

SEQ ID NO: 1252 - DNA, 170 bp, Artificial sequence
  Bcor.475_Acvr2a.155
  crRNA array
cgatttcttggctttatatatcttgtggaaaggacgaaacaccgtaatttctactaagtgtagattgcaacccctctgtatgggataatttctactaagtgtagatggacctggctaatcaagtatttttttaagcttggcgtggatccgatatcaactagatcttgaga

SEQ ID NO: 1253 - DNA, 170 bp, Artificial sequence
  Bcor.475_Acvr2a.70
  crRNA array
cgatttcttggctttatatatcttgtggaaaggacgaaacaccgtaatttctactaagtgtagattgcaacccctctgtatgggataatttctactaagtgtagatcccgaggcgccggagaagccttttttaagcttggcgtggatccgatatcaactagatcttgaga

SEQ ID NO: 1254 - DNA, 170 bp, Artificial sequence
  Bcor.475_Apc.21
  crRNA array
cgatttcttggctttatatatcttgtggaaaggacgaaacaccgtaatttctactaagtgtagattgcaacccctctgtatgggataatttctactaagtgtagatgtgatccacacgtgtagctgttttttaagcttggcgtggatccgatatcaactagatcttgaga

SEQ ID NO: 1255 - DNA, 170 bp, Artificial sequence
  Bcor.475_Apc.867
  crRNA array
cgatttcttggctttatatatcttgtggaaaggacgaaacaccgtaatttctactaagtgtagattgcaacccctctgtatgggataatttctactaagtgtagatcagtcccaggcggcggaagcttttttaagcttggcgtggatccgatatcaactagatcttgaga

SEQ ID NO: 1256 - DNA, 170 bp, Artificial sequence
  Bcor.475_Arid1a.2
  crRNA array
cgatttcttggctttatatatcttgtggaaaggacgaaacaccgtaatttctactaagtgtagattgcaacccctctgtatgggataatttctactaagtgtagatcccgcgcccccgtcctggggttttttaagcttggcgtggatccgatatcaactagatcttgaga

SEQ ID NO: 1257 - DNA, 170 bp, Artificial sequence
  Bcor.475_Arid1a.5
  crRNA array
cgatttcttggctttatatatcttgtggaaaggacgaaacaccgtaatttctactaagtgtagattgcaacccctctgtatgggataatttctactaagtgtagatcccgcgctcggccgctgccgttttttaagcttggcgtggatccgatatcaactagatcttgaga

SEQ ID NO: 1258 - DNA, 170 bp, Artificial sequence
  Bcor.475_Arid2.166
  crRNA array
cgatttcttggctttatatatcttgtggaaaggacgaaacaccgtaatttctactaagtgtagattgcaacccctctgtatgggataatttctactaagtgtagataaccgcgatctgggttttttttttttaagcttggcgtggatccgatatcaactagatcttgaga

SEQ ID NO: 1259 - DNA, 170 bp, Artificial sequence
  Bcor.475_Arid2.172
  crRNA array
cgatttcttggctttatatatcttgtggaaaggacgaaacaccgtaatttctactaagtgtagattgcaacccctctgtatgggataatttctactaagtgtagatctggacgagctgcggcagttttttttaagcttggcgtggatccgatatcaactagatcttgaga

SEQ ID NO: 1260 - DNA, 170 bp, Artificial sequence
  Bcor.475_Atm.120
  crRNA array
cgatttcttggctttatatatcttgtggaaaggacgaaacaccgtaatttctactaagtgtagattgcaacccctctgtatgggataatttctactaagtgtagatgacaggtagtcggcagctaattttttaagcttggcgtggatccgatatcaactagatcttgaga

SEQ ID NO: 1261 - DNA, 170 bp, Artificial sequence
  Bcor.475_Atm.997
  crRNA array
cgatttcttggctttatatatcttgtggaaaggacgaaacaccgtaatttctactaagtgtagattgcaacccctctgtatgggataatttctactaagtgtagatgagaaagtctccgaatcgttttttttaagcttggcgtggatccgatatcaactagatcttgaga

SEQ ID NO: 1262 - DNA, 170 bp, Artificial sequence
  Bcor.475_Atrx.249
  crRNA array
cgatttcttggctttatatatcttgtggaaaggacgaaacaccgtaatttctactaagtgtagattgcaacccctctgtatgggataatttctactaagtgtagattagccagtcgctcatatctcttttttaagcttggcgtggatccgatatcaactagatcttgaga

SEQ ID NO: 1263 - DNA, 170 bp, Artificial sequence
  Bcor.475_Atrx.251
  crRNA array
cgatttcttggctttatatatcttgtggaaaggacgaaacaccgtaatttctactaagtgtagattgcaacccctctgtatgggataatttctactaagtgtagatgccagtcgctcatatctctgttttttaagcttggcgtggatccgatatcaactagatcttgaga

SEQ ID NO: 1264 - DNA, 170 bp, Artificial sequence
  Bcor.475_Brca1.112
  crRNA array
cgatttcttggctttatatatcttgtggaaaggacgaaacaccgtaatttctactaagtgtagattgcaacccctctgtatgggataatttctactaagtgtagatctagacgctctgtggagactttttttaagcttggcgtggatccgatatcaactagatcttgaga

SEQ ID NO: 1265 - DNA, 170 bp, Artificial sequence
  Bcor.475_Brca1.53
  crRNA array
cgatttcttggctttatatatcttgtggaaaggacgaaacaccgtaatttctactaagtgtagattgcaacccctctgtatgggataatttctactaagtgtagataatgaggaggcgtcgatcatttttttaagcttggcgtggatccgatatcaactagatcttgaga

SEQ ID NO: 1266 - DNA, 170 bp, Artificial sequence
  Bcor.475_Casp8.45
  crRNA array
cgatttcttggctttatatatcttgtggaaaggacgaaacaccgtaatttctactaagtgtagattgcaacccctctgtatgggataatttctactaagtgtagatctaccgagatcctgtgaatgttttttaagcttggcgtggatccgatatcaactagatcttgaga

SEQ ID NO: 1267 - DNA, 170 bp, Artificial sequence
  Bcor.475_Casp8.54
  crRNA array
cgatttcttggctttatatatcttgtggaaaggacgaaacaccgtaatttctactaagtgtagattgcaacccctctgtatgggataatttctactaagtgtagatcagtgcagtcgtcgtaagatttttttaagcttggcgtggatccgatatcaactagatcttgaga

SEQ ID NO: 1268 - DNA, 170 bp, Artificial sequence
  Bcor.475_Cbwd1.84
  crRNA array
cgatttcttggctttatatatcttgtggaaaggacgaaacaccgtaatttctactaagtgtagattgcaacccctctgtatgggataatttctactaagtgtagatcacagcaggtaacatgccgcttttttaagcttggcgtggatccgatatcaactagatcttgaga

SEQ ID NO: 1269 - DNA, 170 bp, Artificial sequence
  Bcor.475_Cbwd1.85
  crRNA array
cgatttcttggctttatatatcttgtggaaaggacgaaacaccgtaatttctactaagtgtagattgcaacccctctgtatgggataatttctactaagtgtagatacagcaggtaacatgccgccttttttaagcttggcgtggatccgatatcaactagatcttgaga

SEQ ID NO: 1270 - DNA, 170 bp, Artificial sequence
  Bcor.475_Cdh1.387
  crRNA array
cgatttcttggctttatatatcttgtggaaaggacgaaacaccgtaatttctactaagtgtagattgcaacccctctgtatgggataatttctactaagtgtagatctcggcgtctgccgggtccgttttttaagcttggcgtggatccgatatcaactagatcttgaga

SEQ ID NO: 1271 - DNA, 170 bp, Artificial sequence
  Bcor.475_Cdh1.58
  crRNA array
cgatttcttggctttatatatcttgtggaaaggacgaaacaccgtaatttctactaagtgtagattgcaacccctctgtatgggataatttctactaagtgtagatctcgtccgcgcccgggactcttttttaagcttggcgtggatccgatatcaactagatcttgaga

SEQ ID NO: 1272 - DNA, 170 bp, Artificial sequence
  Bcor.475_Cdkn2a.647
  crRNA array
cgatttcttggctttatatatcttgtggaaaggacgaaacaccgtaatttctactaagtgtagattgcaacccctctgtatgggataatttctactaagtgtagatgcaatcacgggagggagcagttttttaagcttggcgtggatccgatatcaactagatcttgaga

SEQ ID NO: 1273 - DNA, 170 bp, Artificial sequence
  Bcor.475_Cdkn2a.648
  crRNA array
cgatttcttggctttatatatcttgtggaaaggacgaaacaccgtaatttctactaagtgtagattgcaacccctctgtatgggataatttctactaagtgtagatcaatcacgggagggagcagattttttaagcttggcgtggatccgatatcaactagatcttgaga

SEQ ID NO: 1274 - DNA, 170 bp, Artificial sequence
  Bcor.475_Cic.162
  crRNA array
cgatttcttggctttatatatcttgtggaaaggacgaaacaccgtaatttctactaagtgtagattgcaacccctctgtatgggataatttctactaagtgtagatcgcaggcgcgcccggcggagttttttaagcttggcgtggatccgatatcaactagatcttgaga

SEQ ID NO: 1275 - DNA, 170 bp, Artificial sequence
  Bcor.475_Cic.164
  crRNA array
cgatttcttggctttatatatcttgtggaaaggacgaaacaccgtaatttctactaagtgtagattgcaacccctctgtatgggataatttctactaagtgtagatcgggccctgggccggcggctttttttaagcttggcgtggatccgatatcaactagatcttgaga

SEQ ID NO: 1276 - DNA, 170 bp, Artificial sequence
  Bcor.475_Ctcf.229
  crRNA array
cgatttcttggctttatatatcttgtggaaaggacgaaacaccgtaatttctactaagtgtagattgcaacccctctgtatgggataatttctactaagtgtagatggctggtggctgatagtctgttttttaagcttggcgtggatccgatatcaactagatcttgaga

SEQ ID NO: 1277 - DNA, 170 bp, Artificial sequence
  Bcor.475_Ctcf.809
  crRNA array
cgatttcttggctttatatatcttgtggaaaggacgaaacaccgtaatttctactaagtgtagattgcaacccctctgtatgggataatttctactaagtgtagataagcgctatcatgatcccaattttttaagcttggcgtggatccgatatcaactagatcttgaga

SEQ ID NO: 1278 - DNA, 170 bp, Artificial sequence
  Bcor.475_Elf3.826
  crRNA array
cgatttcttggctttatatatcttgtggaaaggacgaaacaccgtaatttctactaagtgtagattgcaacccctctgtatgggataatttctactaagtgtagattccgagacatcctaatccacttttttaagcttggcgtggatccgatatcaactagatcttgaga

SEQ ID NO: 1279 - DNA, 170 bp, Artificial sequence
  Bcor.475_Elf3.983
  crRNA array
cgatttcttggctttatatatcttgtggaaaggacgaaacaccgtaatttctactaagtgtagattgcaacccctctgtatgggataatttctactaagtgtagattaggccccctaactggaccattttttaagcttggcgtggatccgatatcaactagatcttgaga

SEQ ID NO: 1280 - DNA, 170 bp, Artificial sequence
  Bcor.475_Ep300.310
  crRNA array
cgatttcttggctttatatatcttgtggaaaggacgaaacaccgtaatttctactaagtgtagattgcaacccctctgtatgggataatttctactaagtgtagatatggtacgacagtgaggaagttttttaagcttggcgtggatccgatatcaactagatcttgaga

SEQ ID NO: 1281 - DNA, 170 bp, Artificial sequence
  Bcor.475_Ep300.587
  crRNA array
cgatttcttggctttatatatcttgtggaaaggacgaaacaccgtaatttctactaagtgtagattgcaacccctctgtatgggataatttctactaagtgtagatcgccccggggcccccaaccattttttaagcttggcgtggatccgatatcaactagatcttgaga

SEQ ID NO: 1282 - DNA, 170 bp, Artificial sequence
  Bcor.475_Epha2.126
  crRNA array
cgatttcttggctttatatatcttgtggaaaggacgaaacaccgtaatttctactaagtgtagattgcaacccctctgtatgggataatttctactaagtgtagatcctgtgccgccgcggccgccttttttaagcttggcgtggatccgatatcaactagatcttgaga

SEQ ID NO: 1283 - DNA, 170 bp, Artificial sequence
  Bcor.475_Epha2.5
  crRNA array
cgatttcttggctttatatatcttgtggaaaggacgaaacaccgtaatttctactaagtgtagattgcaacccctctgtatgggataatttctactaagtgtagatcatgagctggcgccacccggttttttaagcttggcgtggatccgatatcaactagatcttgaga

SEQ ID NO: 1284 - DNA, 170 bp, Artificial sequence
  Bcor.475_Fat1.105
  crRNA array
cgatttcttggctttatatatcttgtggaaaggacgaaacaccgtaatttctactaagtgtagattgcaacccctctgtatgggataatttctactaagtgtagataactcgaggtgacaacaagtttttttaagcttggcgtggatccgatatcaactagatcttgaga

SEQ ID NO: 1285 - DNA, 170 bp, Artificial sequence
  Bcor.475_Fat1.122
  crRNA array
cgatttcttggctttatatatcttgtggaaaggacgaaacaccgtaatttctactaagtgtagattgcaacccctctgtatgggataatttctactaagtgtagatccatcgacatggaaacgggattttttaagcttggcgtggatccgatatcaactagatcttgaga

SEQ ID NO: 1286 - DNA, 170 bp, Artificial sequence
  Bcor.475_Fbxw7.21
  crRNA array
cgatttcttggctttatatatcttgtggaaaggacgaaacaccgtaatttctactaagtgtagattgcaacccctctgtatgggataatttctactaagtgtagattaatgtgccgtagaaacccattttttaagcttggcgtggatccgatatcaactagatcttgaga

SEQ ID NO: 1287 - DNA, 170 bp, Artificial sequence
  Bcor.475_Fbxw7.23
  crRNA array
cgatttcttggctttatatatcttgtggaaaggacgaaacaccgtaatttctactaagtgtagattgcaacccctctgtatgggataatttctactaagtgtagatatgtgccgtagaaacccatattttttaagcttggcgtggatccgatatcaactagatcttgaga

SEQ ID NO: 1288 - DNA, 170 bp, Artificial sequence
  Bcor.475_Gata3.34
  crRNA array
cgatttcttggctttatatatcttgtggaaaggacgaaacaccgtaatttctactaagtgtagattgcaacccctctgtatgggataatttctactaagtgtagatctaaactatcccgcaaagatttttttaagcttggcgtggatccgatatcaactagatcttgaga

SEQ ID NO: 1289 - DNA, 170 bp, Artificial sequence
  Bcor.475_Gata3.47
  crRNA array
cgatttcttggctttatatatcttgtggaaaggacgaaacaccgtaatttctactaagtgtagattgcaacccctctgtatgggataatttctactaagtgtagatcgtagtaggacgggacgtggttttttaagcttggcgtggatccgatatcaactagatcttgaga

SEQ ID NO: 1290 - DNA, 170 bp, Artificial sequence
  Bcor.475_H2-Q2.1
  crRNA array
cgatttcttggctttatatatcttgtggaaaggacgaaacaccgtaatttctactaagtgtagattgcaacccctctgtatgggataatttctactaagtgtagatagggcggccaccaacagcagttttttaagcttggcgtggatccgatatcaactagatcttgaga

SEQ ID NO: 1291 - DNA, 170 bp, Artificial sequence
  Bcor.475_H2-Q2.2
  crRNA array
cgatttcttggctttatatatcttgtggaaaggacgaaacaccgtaatttctactaagtgtagattgcaacccctctgtatgggataatttctactaagtgtagattaacctgcgcccgctgctgattttttaagcttggcgtggatccgatatcaactagatcttgaga

SEQ ID NO: 1292 - DNA, 170 bp, Artificial sequence
  Bcor.475_Kdm5c.1878
  crRNA array
cgatttcttggctttatatatcttgtggaaaggacgaaacaccgtaatttctactaagtgtagattgcaacccctctgtatgggataatttctactaagtgtagatagagcacggcacccgcccccttttttaagcttggcgtggatccgatatcaactagatcttgaga

SEQ ID NO: 1293 - DNA, 170 bp, Artificial sequence
  Bcor.475_Kdm5c.1879
  crRNA array
cgatttcttggctttatatatcttgtggaaaggacgaaacaccgtaatttctactaagtgtagattgcaacccctctgtatgggataatttctactaagtgtagatgagcacggcacccgccccccttttttaagcttggcgtggatccgatatcaactagatcttgaga

SEQ ID NO: 1294 - DNA, 170 bp, Artificial sequence
  Bcor.475_Kdm6a.56
  crRNA array
cgatttcttggctttatatatcttgtggaaaggacgaaacaccgtaatttctactaagtgtagattgcaacccctctgtatgggataatttctactaagtgtagattcgctgccgcctctcgcggcttttttaagcttggcgtggatccgatatcaactagatcttgaga

SEQ ID NO: 1295 - DNA, 170 bp, Artificial sequence
  Bcor.475_Kdm6a.57
  crRNA array
cgatttcttggctttatatatcttgtggaaaggacgaaacaccgtaatttctactaagtgtagattgcaacccctctgtatgggataatttctactaagtgtagatcgctgccgcctctcgcggcattttttaagcttggcgtggatccgatatcaactagatcttgaga

SEQ ID NO: 1296 - DNA, 170 bp, Artificial sequence
  Bcor.475_Kmt2b.265
  crRNA array
cgatttcttggctttatatatcttgtggaaaggacgaaacaccgtaatttctactaagtgtagattgcaacccctctgtatgggataatttctactaagtgtagatccccaagtgaagcccacctgttttttaagcttggcgtggatccgatatcaactagatcttgaga

SEQ ID NO: 1297 - DNA, 170 bp, Artificial sequence
  Bcor.475_Kmt2b.298
  crRNA array
cgatttcttggctttatatatcttgtggaaaggacgaaacaccgtaatttctactaagtgtagattgcaacccctctgtatgggataatttctactaagtgtagattccggcagggaccggctggcttttttaagcttggcgtggatccgatatcaactagatcttgaga

SEQ ID NO: 1298 - DNA, 170 bp, Artificial sequence
  Bcor.475_Kmt2c.1962
  crRNA array
cgatttcttggctttatatatcttgtggaaaggacgaaacaccgtaatttctactaagtgtagattgcaacccctctgtatgggataatttctactaagtgtagatgtgacgatctgtgccacaagttttttaagcttggcgtggatccgatatcaactagatcttgaga

SEQ ID NO: 1299 - DNA, 170 bp, Artificial sequence
  Bcor.475_Kmt2c.2236
  crRNA array
cgatttcttggctttatatatcttgtggaaaggacgaaacaccgtaatttctactaagtgtagattgcaacccctctgtatgggataatttctactaagtgtagatactcgacctccacctccctattttttaagcttggcgtggatccgatatcaactagatcttgaga

SEQ ID NO: 1300 - DNA, 170 bp, Artificial sequence
  Bcor.475_Kmt2d.316
  crRNA array
cgatttcttggctttatatatcttgtggaaaggacgaaacaccgtaatttctactaagtgtagattgcaacccctctgtatgggataatttctactaagtgtagatactccaggccacccaggtggttttttaagcttggcgtggatccgatatcaactagatcttgaga

SEQ ID NO: 1301 - DNA, 170 bp, Artificial sequence
  Bcor.475_Kmt2d.416
  crRNA array
cgatttcttggctttatatatcttgtggaaaggacgaaacaccgtaatttctactaagtgtagattgcaacccctctgtatgggataatttctactaagtgtagattaaacccccgggggaagggtttttttaagcttggcgtggatccgatatcaactagatcttgaga

SEQ ID NO: 1302 - DNA, 170 bp, Artificial sequence
  Bcor.475_Map2k4.119
  crRNA array
cgatttcttggctttatatatcttgtggaaaggacgaaacaccgtaatttctactaagtgtagattgcaacccctctgtatgggataatttctactaagtgtagattgctgtgtgggcggccacatttttttaagcttggcgtggatccgatatcaactagatcttgaga

SEQ ID NO: 1303 - DNA, 170 bp, Artificial sequence
  Bcor.475_Map2k4.1261
  crRNA array
cgatttcttggctttatatatcttgtggaaaggacgaaacaccgtaatttctactaagtgtagattgcaacccctctgtatgggataatttctactaagtgtagatgatgtagtaatgcggagtagttttttaagcttggcgtggatccgatatcaactagatcttgaga

SEQ ID NO: 1304 - DNA, 170 bp, Artificial sequence
  Bcor.475_Map3k1.235
  crRNA array
cgatttcttggctttatatatcttgtggaaaggacgaaacaccgtaatttctactaagtgtagattgcaacccctctgtatgggataatttctactaagtgtagataaaacgctactgatcgatcgttttttaagcttggcgtggatccgatatcaactagatcttgaga

SEQ ID NO: 1305 - DNA, 170 bp, Artificial sequence
  Bcor.475_Map3k1.3838
  crRNA array
cgatttcttggctttatatatcttgtggaaaggacgaaacaccgtaatttctactaagtgtagattgcaacccctctgtatgggataatttctactaagtgtagatccaacaacagggccccactattttttaagcttggcgtggatccgatatcaactagatcttgaga

SEQ ID NO: 1306 - DNA, 170 bp, Artificial sequence
  Bcor.475_Mga.1655
  crRNA array
cgatttcttggctttatatatcttgtggaaaggacgaaacaccgtaatttctactaagtgtagattgcaacccctctgtatgggataatttctactaagtgtagatcgagaagtggagagcatattttttttaagcttggcgtggatccgatatcaactagatcttgaga

SEQ ID NO: 1307 - DNA, 170 bp, Artificial sequence
  Bcor.475_Mga.93
  crRNA array
cgatttcttggctttatatatcttgtggaaaggacgaaacaccgtaatttctactaagtgtagattgcaacccctctgtatgggataatttctactaagtgtagatgagaaggctccccataatgtttttttaagcttggcgtggatccgatatcaactagatcttgaga

SEQ ID NO: 1308 - DNA, 170 bp, Artificial sequence
  Bcor.475_Nf1.746
  crRNA array
cgatttcttggctttatatatcttgtggaaaggacgaaacaccgtaatttctactaagtgtagattgcaacccctctgtatgggataatttctactaagtgtagattaagcataatgatgatgccattttttaagcttggcgtggatccgatatcaactagatcttgaga

SEQ ID NO: 1309 - DNA, 170 bp, Artificial sequence
  Bcor.475_Nf1.97
  crRNA array
cgatttcttggctttatatatcttgtggaaaggacgaaacaccgtaatttctactaagtgtagattgcaacccctctgtatgggataatttctactaagtgtagatagcccgctacatgctgatgcttttttaagcttggcgtggatccgatatcaactagatcttgaga

SEQ ID NO: 1310 - DNA, 170 bp, Artificial sequence
  Bcor.475_Nf2.356
  crRNA array
cgatttcttggctttatatatcttgtggaaaggacgaaacaccgtaatttctactaagtgtagattgcaacccctctgtatgggataatttctactaagtgtagatcggagtcatctgatagagatttttttaagcttggcgtggatccgatatcaactagatcttgaga

SEQ ID NO: 1311 - DNA, 170 bp, Artificial sequence
  Bcor.475_Nf2.768
  crRNA array
cgatttcttggctttatatatcttgtggaaaggacgaaacaccgtaatttctactaagtgtagattgcaacccctctgtatgggataatttctactaagtgtagatccgaagccccagtgtccggcttttttaagcttggcgtggatccgatatcaactagatcttgaga

SEQ ID NO: 1312 - DNA, 170 bp, Artificial sequence
  Bcor.475_Notch1.1849
  crRNA array
cgatttcttggctttatatatcttgtggaaaggacgaaacaccgtaatttctactaagtgtagattgcaacccctctgtatgggataatttctactaagtgtagatctggcgggtgggcggcgctgttttttaagcttggcgtggatccgatatcaactagatcttgaga

SEQ ID NO: 1313 - DNA, 170 bp, Artificial sequence
  Bcor.475_Notch1.649
  crRNA array
cgatttcttggctttatatatcttgtggaaaggacgaaacaccgtaatttctactaagtgtagattgcaacccctctgtatgggataatttctactaagtgtagattgggccaacgatgccaggacttttttaagcttggcgtggatccgatatcaactagatcttgaga

SEQ ID NO: 1314 - DNA, 170 bp, Artificial sequence
  Bcor.475_Nsd1.70
  crRNA array
cgatttcttggctttatatatcttgtggaaaggacgaaacaccgtaatttctactaagtgtagattgcaacccctctgtatgggataatttctactaagtgtagatactggtgtggacgatgcagattttttaagcttggcgtggatccgatatcaactagatcttgaga

SEQ ID NO: 1315 - DNA, 170 bp, Artificial sequence
  Bcor.475_Nsd1.90
  crRNA array
cgatttcttggctttatatatcttgtggaaaggacgaaacaccgtaatttctactaagtgtagattgcaacccctctgtatgggataatttctactaagtgtagataggagctaacggcaagaatgttttttaagcttggcgtggatccgatatcaactagatcttgaga

SEQ ID NO: 1316 - DNA, 170 bp, Artificial sequence
  Bcor.475_Pbrm1.1236
  crRNA array
cgatttcttggctttatatatcttgtggaaaggacgaaacaccgtaatttctactaagtgtagattgcaacccctctgtatgggataatttctactaagtgtagatgccgataaaaccaacagccgttttttaagcttggcgtggatccgatatcaactagatcttgaga

SEQ ID NO: 1317 - DNA, 170 bp, Artificial sequence
  Bcor.475_Pbrm1.969
  crRNA array
cgatttcttggctttatatatcttgtggaaaggacgaaacaccgtaatttctactaagtgtagattgcaacccctctgtatgggataatttctactaagtgtagatgagccctaatgaacagctcattttttaagcttggcgtggatccgatatcaactagatcttgaga

SEQ ID NO: 1318 - DNA, 170 bp, Artificial sequence
  Bcor.475_Pik3r1.76
  crRNA array
cgatttcttggctttatatatcttgtggaaaggacgaaacaccgtaatttctactaagtgtagattgcaacccctctgtatgggataatttctactaagtgtagataaaacctatacggcccgcacttttttaagcttggcgtggatccgatatcaactagatcttgaga

SEQ ID NO: 1319 - DNA, 170 bp, Artificial sequence
  Bcor.475_Pik3r1.77
  crRNA array
cgatttcttggctttatatatcttgtggaaaggacgaaacaccgtaatttctactaagtgtagattgcaacccctctgtatgggataatttctactaagtgtagataaacctatacggcccgcactttttttaagcttggcgtggatccgatatcaactagatcttgaga

SEQ ID NO: 1320 - DNA, 170 bp, Artificial sequence
  Bcor.475_Pten.240
  crRNA array
cgatttcttggctttatatatcttgtggaaaggacgaaacaccgtaatttctactaagtgtagattgcaacccctctgtatgggataatttctactaagtgtagattgcatacgctatagctgcttttttttaagcttggcgtggatccgatatcaactagatcttgaga

SEQ ID NO: 1321 - DNA, 170 bp, Artificial sequence
  Bcor.475_Pten.265
  crRNA array
cgatttcttggctttatatatcttgtggaaaggacgaaacaccgtaatttctactaagtgtagattgcaacccctctgtatgggataatttctactaagtgtagataagcgtggtgcgtgacgcacttttttaagcttggcgtggatccgatatcaactagatcttgaga

SEQ ID NO: 1322 - DNA, 170 bp, Artificial sequence
  Bcor.475_Rasa1.1478
  crRNA array
cgatttcttggctttatatatcttgtggaaaggacgaaacaccgtaatttctactaagtgtagattgcaacccctctgtatgggataatttctactaagtgtagatcgataatggtctatgatgtcttttttaagcttggcgtggatccgatatcaactagatcttgaga

SEQ ID NO: 1323 - DNA, 170 bp, Artificial sequence
  Bcor.475_Rasa1.223
  crRNA array
cgatttcttggctttatatatcttgtggaaaggacgaaacaccgtaatttctactaagtgtagattgcaacccctctgtatgggataatttctactaagtgtagattccatggagtatcgtgctcgttttttaagcttggcgtggatccgatatcaactagatcttgaga

SEQ ID NO: 1324 - DNA, 170 bp, Artificial sequence
  Bcor.475_Rb1.211
  crRNA array
cgatttcttggctttatatatcttgtggaaaggacgaaacaccgtaatttctactaagtgtagattgcaacccctctgtatgggataatttctactaagtgtagattctgacatgatcgggtacctttttttaagcttggcgtggatccgatatcaactagatcttgaga

SEQ ID NO: 1325 - DNA, 170 bp, Artificial sequence
  Bcor.475_Rb1.394
  crRNA array
cgatttcttggctttatatatcttgtggaaaggacgaaacaccgtaatttctactaagtgtagattgcaacccctctgtatgggataatttctactaagtgtagatagaaatctcgaagcaggatcttttttaagcttggcgtggatccgatatcaactagatcttgaga

SEQ ID NO: 1326 - DNA, 170 bp, Artificial sequence
  Bcor.475_Rbm10.5
  crRNA array
cgatttcttggctttatatatcttgtggaaaggacgaaacaccgtaatttctactaagtgtagattgcaacccctctgtatgggataatttctactaagtgtagatacgaaacctgaacccacacattttttaagcttggcgtggatccgatatcaactagatcttgaga

SEQ ID NO: 1327 - DNA, 170 bp, Artificial sequence
  Bcor.475_Rbm10.6
  crRNA array
cgatttcttggctttatatatcttgtggaaaggacgaaacaccgtaatttctactaagtgtagattgcaacccctctgtatgggataatttctactaagtgtagatcgaaacctgaacccacacagttttttaagcttggcgtggatccgatatcaactagatcttgaga

SEQ ID NO: 1328 - DNA, 170 bp, Artificial sequence
  Bcor.475_Rnf43.1920
  crRNA array
cgatttcttggctttatatatcttgtggaaaggacgaaacaccgtaatttctactaagtgtagattgcaacccctctgtatgggataatttctactaagtgtagatatccccgtgccgtggactccttttttaagcttggcgtggatccgatatcaactagatcttgaga

SEQ ID NO: 1329 - DNA, 170 bp, Artificial sequence
  Bcor.475_Rnf43.39
  crRNA array
cgatttcttggctttatatatcttgtggaaaggacgaaacaccgtaatttctactaagtgtagattgcaacccctctgtatgggataatttctactaagtgtagatcaaggggatcactctgataattttttaagcttggcgtggatccgatatcaactagatcttgaga

SEQ ID NO: 1330 - DNA, 170 bp, Artificial sequence
  Bcor.475_Runx1.204
  crRNA array
cgatttcttggctttatatatcttgtggaaaggacgaaacaccgtaatttctactaagtgtagattgcaacccctctgtatgggataatttctactaagtgtagattaaataagtccagccgttttttttttaagcttggcgtggatccgatatcaactagatcttgaga

SEQ ID NO: 1331 - DNA, 170 bp, Artificial sequence
  Bcor.475_Runx1.81
  crRNA array
cgatttcttggctttatatatcttgtggaaaggacgaaacaccgtaatttctactaagtgtagattgcaacccctctgtatgggataatttctactaagtgtagataggacgcgtatgggaattttttttttaagcttggcgtggatccgatatcaactagatcttgaga

SEQ ID NO: 1332 - DNA, 170 bp, Artificial sequence
  Bcor.475_Setd2.143
  crRNA array
cgatttcttggctttatatatcttgtggaaaggacgaaacaccgtaatttctactaagtgtagattgcaacccctctgtatgggataatttctactaagtgtagatgcacaaccacaacagactggttttttaagcttggcgtggatccgatatcaactagatcttgaga

SEQ ID NO: 1333 - DNA, 170 bp, Artificial sequence
  Bcor.475_Setd2.508
  crRNA array
cgatttcttggctttatatatcttgtggaaaggacgaaacaccgtaatttctactaagtgtagattgcaacccctctgtatgggataatttctactaagtgtagattacgatcccgagcacccgacttttttaagcttggcgtggatccgatatcaactagatcttgaga

SEQ ID NO: 1334 - DNA, 170 bp, Artificial sequence
  Bcor.475_Smad4.3038
  crRNA array
cgatttcttggctttatatatcttgtggaaaggacgaaacaccgtaatttctactaagtgtagattgcaacccctctgtatgggataatttctactaagtgtagatatctgcggcagtgtcaccggttttttaagcttggcgtggatccgatatcaactagatcttgaga

SEQ ID NO: 1335 - DNA, 170 bp, Artificial sequence
  Bcor.475_Smad4.39
  crRNA array
cgatttcttggctttatatatcttgtggaaaggacgaaacaccgtaatttctactaagtgtagattgcaacccctctgtatgggataatttctactaagtgtagatagtcaaacgcatactgacaattttttaagcttggcgtggatccgatatcaactagatcttgaga

SEQ ID NO: 1336 - DNA, 170 bp, Artificial sequence
  Bcor.475_Stag2.1409
  crRNA array
cgatttcttggctttatatatcttgtggaaaggacgaaacaccgtaatttctactaagtgtagattgcaacccctctgtatgggataatttctactaagtgtagatgctaataactgcggaagggcttttttaagcttggcgtggatccgatatcaactagatcttgaga

SEQ ID NO: 1337 - DNA, 170 bp, Artificial sequence
  Bcor.475_Stag2.4401
  crRNA array
cgatttcttggctttatatatcttgtggaaaggacgaaacaccgtaatttctactaagtgtagattgcaacccctctgtatgggataatttctactaagtgtagattaatcgtccagtggtgtatattttttaagcttggcgtggatccgatatcaactagatcttgaga

SEQ ID NO: 1338 - DNA, 170 bp, Artificial sequence
  Bcor.475_Tbl1xr1.1
  crRNA array
cgatttcttggctttatatatcttgtggaaaggacgaaacaccgtaatttctactaagtgtagattgcaacccctctgtatgggataatttctactaagtgtagatggatgcgcatactggtgaagttttttaagcttggcgtggatccgatatcaactagatcttgaga

SEQ ID NO: 1339 - DNA, 170 bp, Artificial sequence
  Bcor.475_Tbl1xr1.83
  crRNA array
cgatttcttggctttatatatcttgtggaaaggacgaaacaccgtaatttctactaagtgtagattgcaacccctctgtatgggataatttctactaagtgtagatatggtcgacccatcgagtctttttttaagcttggcgtggatccgatatcaactagatcttgaga

SEQ ID NO: 1340 - DNA, 170 bp, Artificial sequence
  Bcor.475_Tgfbr2.290
  crRNA array
cgatttcttggctttatatatcttgtggaaaggacgaaacaccgtaatttctactaagtgtagattgcaacccctctgtatgggataatttctactaagtgtagatcctctcggcgcccgggtaaattttttaagcttggcgtggatccgatatcaactagatcttgaga

SEQ ID NO: 1341 - DNA, 170 bp, Artificial sequence
  Bcor.475_Tgfbr2.292
  crRNA array
cgatttcttggctttatatatcttgtggaaaggacgaaacaccgtaatttctactaagtgtagattgcaacccctctgtatgggataatttctactaagtgtagatcccgggcgccgagagggaaattttttaagcttggcgtggatccgatatcaactagatcttgaga

SEQ ID NO: 1342 - DNA, 170 bp, Artificial sequence
  Bcor.475_Trp53.4
  crRNA array
cgatttcttggctttatatatcttgtggaaaggacgaaacaccgtaatttctactaagtgtagattgcaacccctctgtatgggataatttctactaagtgtagatccctgaactgcccccagggattttttaagcttggcgtggatccgatatcaactagatcttgaga

SEQ ID NO: 1343 - DNA, 170 bp, Artificial sequence
  Bcor.475_Trp53.528
  crRNA array
cgatttcttggctttatatatcttgtggaaaggacgaaacaccgtaatttctactaagtgtagattgcaacccctctgtatgggataatttctactaagtgtagatgctgggccagcagagacctgttttttaagcttggcgtggatccgatatcaactagatcttgaga

SEQ ID NO: 1344 - DNA, 170 bp, Artificial sequence
  Bcor.475_Vhl.1
  crRNA array
cgatttcttggctttatatatcttgtggaaaggacgaaacaccgtaatttctactaagtgtagattgcaacccctctgtatgggataatttctactaagtgtagatagggctcccggcggccatttttttttaagcttggcgtggatccgatatcaactagatcttgaga

SEQ ID NO: 1345 - DNA, 170 bp, Artificial sequence
  Bcor.475_Vhl.151
  crRNA array
cgatttcttggctttatatatcttgtggaaaggacgaaacaccgtaatttctactaagtgtagattgcaacccctctgtatgggataatttctactaagtgtagattagagcactcacccgagggattttttaagcttggcgtggatccgatatcaactagatcttgaga

SEQ ID NO: 1346 - DNA, 170 bp, Artificial sequence
  Bcor.475_Zc3h13.1387
  crRNA array
cgatttcttggctttatatatcttgtggaaaggacgaaacaccgtaatttctactaagtgtagattgcaacccctctgtatgggataatttctactaagtgtagatgtgacgccggtcatgtgactttttttaagcttggcgtggatccgatatcaactagatcttgaga

SEQ ID NO: 1347 - DNA, 170 bp, Artificial sequence
  Bcor.475_Zc3h13.1777
  crRNA array
cgatttcttggctttatatatcttgtggaaaggacgaaacaccgtaatttctactaagtgtagattgcaacccctctgtatgggataatttctactaagtgtagatgatgctgccagtgtagcggcttttttaagcttggcgtggatccgatatcaactagatcttgaga

SEQ ID NO: 1348 - DNA, 170 bp, Artificial sequence
  Brca1.112_Acvr2a.155
  crRNA array
cgatttcttggctttatatatcttgtggaaaggacgaaacaccgtaatttctactaagtgtagatctagacgctctgtggagacttaatttctactaagtgtagatggacctggctaatcaagtatttttttaagcttggcgtggatccgatatcaactagatcttgaga

SEQ ID NO: 1349 - DNA, 170 bp, Artificial sequence
  Brca1.112_Acvr2a.70
  crRNA array
cgatttcttggctttatatatcttgtggaaaggacgaaacaccgtaatttctactaagtgtagatctagacgctctgtggagacttaatttctactaagtgtagatcccgaggcgccggagaagccttttttaagcttggcgtggatccgatatcaactagatcttgaga

SEQ ID NO: 1350 - DNA, 170 bp, Artificial sequence
  Brca1.112_Apc.21
  crRNA array
cgatttcttggctttatatatcttgtggaaaggacgaaacaccgtaatttctactaagtgtagatctagacgctctgtggagacttaatttctactaagtgtagatgtgatccacacgtgtagctgttttttaagcttggcgtggatccgatatcaactagatcttgaga

SEQ ID NO: 1351 - DNA, 170 bp, Artificial sequence
  Brca1.112_Apc.867
  crRNA array
cgatttcttggctttatatatcttgtggaaaggacgaaacaccgtaatttctactaagtgtagatctagacgctctgtggagacttaatttctactaagtgtagatcagtcccaggcggcggaagcttttttaagcttggcgtggatccgatatcaactagatcttgaga

SEQ ID NO: 1352 - DNA, 170 bp, Artificial sequence
  Brca1.112_Arid1a.2
  crRNA array
cgatttcttggctttatatatcttgtggaaaggacgaaacaccgtaatttctactaagtgtagatctagacgctctgtggagacttaatttctactaagtgtagatcccgcgcccccgtcctggggttttttaagcttggcgtggatccgatatcaactagatcttgaga

SEQ ID NO: 1353 - DNA, 170 bp, Artificial sequence
  Brca1.112_Arid1a.5
  crRNA array
cgatttcttggctttatatatcttgtggaaaggacgaaacaccgtaatttctactaagtgtagatctagacgctctgtggagacttaatttctactaagtgtagatcccgcgctcggccgctgccgttttttaagcttggcgtggatccgatatcaactagatcttgaga

SEQ ID NO: 1354 - DNA, 170 bp, Artificial sequence
  Brca1.112_Arid2.166
  crRNA array
cgatttcttggctttatatatcttgtggaaaggacgaaacaccgtaatttctactaagtgtagatctagacgctctgtggagacttaatttctactaagtgtagataaccgcgatctgggttttttttttttaagcttggcgtggatccgatatcaactagatcttgaga

SEQ ID NO: 1355 - DNA, 170 bp, Artificial sequence
  Brca1.112_Arid2.172
  crRNA array
cgatttcttggctttatatatcttgtggaaaggacgaaacaccgtaatttctactaagtgtagatctagacgctctgtggagacttaatttctactaagtgtagatctggacgagctgcggcagttttttttaagcttggcgtggatccgatatcaactagatcttgaga

SEQ ID NO: 1356 - DNA, 170 bp, Artificial sequence
  Brca1.112_Atm.120
  crRNA array
cgatttcttggctttatatatcttgtggaaaggacgaaacaccgtaatttctactaagtgtagatctagacgctctgtggagacttaatttctactaagtgtagatgacaggtagtcggcagctaattttttaagcttggcgtggatccgatatcaactagatcttgaga

SEQ ID NO: 1357 - DNA, 170 bp, Artificial sequence
  Brca1.112_Atm.997
  crRNA array
cgatttcttggctttatatatcttgtggaaaggacgaaacaccgtaatttctactaagtgtagatctagacgctctgtggagacttaatttctactaagtgtagatgagaaagtctccgaatcgttttttttaagcttggcgtggatccgatatcaactagatcttgaga

SEQ ID NO: 1358 - DNA, 170 bp, Artificial sequence
  Brca1.112_Atrx.249
  crRNA array
cgatttcttggctttatatatcttgtggaaaggacgaaacaccgtaatttctactaagtgtagatctagacgctctgtggagacttaatttctactaagtgtagattagccagtcgctcatatctcttttttaagcttggcgtggatccgatatcaactagatcttgaga

SEQ ID NO: 1359 - DNA, 170 bp, Artificial sequence
  Brca1.112_Atrx.251
  crRNA array
cgatttcttggctttatatatcttgtggaaaggacgaaacaccgtaatttctactaagtgtagatctagacgctctgtggagacttaatttctactaagtgtagatgccagtcgctcatatctctgttttttaagcttggcgtggatccgatatcaactagatcttgaga

SEQ ID NO: 1360 - DNA, 170 bp, Artificial sequence
  Brca1.112_Bcor.203
  crRNA array
cgatttcttggctttatatatcttgtggaaaggacgaaacaccgtaatttctactaagtgtagatctagacgctctgtggagacttaatttctactaagtgtagatccccggagcggagtccaggcttttttaagcttggcgtggatccgatatcaactagatcttgaga

SEQ ID NO: 1361 - DNA, 170 bp, Artificial sequence
  Brca1.112_Bcor.475
  crRNA array
cgatttcttggctttatatatcttgtggaaaggacgaaacaccgtaatttctactaagtgtagatctagacgctctgtggagacttaatttctactaagtgtagattgcaacccctctgtatgggattttttaagcttggcgtggatccgatatcaactagatcttgaga

SEQ ID NO: 1362 - DNA, 170 bp, Artificial sequence
  Brca1.112_Casp8.45
  crRNA array
cgatttcttggctttatatatcttgtggaaaggacgaaacaccgtaatttctactaagtgtagatctagacgctctgtggagacttaatttctactaagtgtagatctaccgagatcctgtgaatgttttttaagcttggcgtggatccgatatcaactagatcttgaga

SEQ ID NO: 1363 - DNA, 170 bp, Artificial sequence
  Brca1.112_Casp8.54
  crRNA array
cgatttcttggctttatatatcttgtggaaaggacgaaacaccgtaatttctactaagtgtagatctagacgctctgtggagacttaatttctactaagtgtagatcagtgcagtcgtcgtaagatttttttaagcttggcgtggatccgatatcaactagatcttgaga

SEQ ID NO: 1364 - DNA, 170 bp, Artificial sequence
  Brca1.112_Cbwd1.84
  crRNA array
cgatttcttggctttatatatcttgtggaaaggacgaaacaccgtaatttctactaagtgtagatctagacgctctgtggagacttaatttctactaagtgtagatcacagcaggtaacatgccgcttttttaagcttggcgtggatccgatatcaactagatcttgaga

SEQ ID NO: 1365 - DNA, 170 bp, Artificial sequence
  Brca1.112_Cbwd1.85
  crRNA array
cgatttcttggctttatatatcttgtggaaaggacgaaacaccgtaatttctactaagtgtagatctagacgctctgtggagacttaatttctactaagtgtagatacagcaggtaacatgccgccttttttaagcttggcgtggatccgatatcaactagatcttgaga

SEQ ID NO: 1366 - DNA, 170 bp, Artificial sequence
  Brca1.112_Cdh1.387
  crRNA array
cgatttcttggctttatatatcttgtggaaaggacgaaacaccgtaatttctactaagtgtagatctagacgctctgtggagacttaatttctactaagtgtagatctcggcgtctgccgggtccgttttttaagcttggcgtggatccgatatcaactagatcttgaga

SEQ ID NO: 1367 - DNA, 170 bp, Artificial sequence
  Brca1.112_Cdh1.58
  crRNA array
cgatttcttggctttatatatcttgtggaaaggacgaaacaccgtaatttctactaagtgtagatctagacgctctgtggagacttaatttctactaagtgtagatctcgtccgcgcccgggactcttttttaagcttggcgtggatccgatatcaactagatcttgaga

SEQ ID NO: 1368 - DNA, 170 bp, Artificial sequence
  Brca1.112_Cdkn2a.647
  crRNA array
cgatttcttggctttatatatcttgtggaaaggacgaaacaccgtaatttctactaagtgtagatctagacgctctgtggagacttaatttctactaagtgtagatgcaatcacgggagggagcagttttttaagcttggcgtggatccgatatcaactagatcttgaga

SEQ ID NO: 1369 - DNA, 170 bp, Artificial sequence
  Brca1.112_Cdkn2a.648
  crRNA array
cgatttcttggctttatatatcttgtggaaaggacgaaacaccgtaatttctactaagtgtagatctagacgctctgtggagacttaatttctactaagtgtagatcaatcacgggagggagcagattttttaagcttggcgtggatccgatatcaactagatcttgaga

SEQ ID NO: 1370 - DNA, 170 bp, Artificial sequence
  Brca1.112_Cic.162
  crRNA array
cgatttcttggctttatatatcttgtggaaaggacgaaacaccgtaatttctactaagtgtagatctagacgctctgtggagacttaatttctactaagtgtagatcgcaggcgcgcccggcggagttttttaagcttggcgtggatccgatatcaactagatcttgaga

SEQ ID NO: 1371 - DNA, 170 bp, Artificial sequence
  Brca1.112_Cic.164
  crRNA array
cgatttcttggctttatatatcttgtggaaaggacgaaacaccgtaatttctactaagtgtagatctagacgctctgtggagacttaatttctactaagtgtagatcgggccctgggccggcggctttttttaagcttggcgtggatccgatatcaactagatcttgaga

SEQ ID NO: 1372 - DNA, 170 bp, Artificial sequence
  Brca1.112_Ctcf.229
  crRNA array
cgatttcttggctttatatatcttgtggaaaggacgaaacaccgtaatttctactaagtgtagatctagacgctctgtggagacttaatttctactaagtgtagatggctggtggctgatagtctgttttttaagcttggcgtggatccgatatcaactagatcttgaga

SEQ ID NO: 1373 - DNA, 170 bp, Artificial sequence
  Brca1.112_Ctcf.809
  crRNA array
cgatttcttggctttatatatcttgtggaaaggacgaaacaccgtaatttctactaagtgtagatctagacgctctgtggagacttaatttctactaagtgtagataagcgctatcatgatcccaattttttaagcttggcgtggatccgatatcaactagatcttgaga

SEQ ID NO: 1374 - DNA, 170 bp, Artificial sequence
  Brca1.112_Elf3.826
  crRNA array
cgatttcttggctttatatatcttgtggaaaggacgaaacaccgtaatttctactaagtgtagatctagacgctctgtggagacttaatttctactaagtgtagattccgagacatcctaatccacttttttaagcttggcgtggatccgatatcaactagatcttgaga

SEQ ID NO: 1375 - DNA, 170 bp, Artificial sequence
  Brca1.112_Elf3.983
  crRNA array
cgatttcttggctttatatatcttgtggaaaggacgaaacaccgtaatttctactaagtgtagatctagacgctctgtggagacttaatttctactaagtgtagattaggccccctaactggaccattttttaagcttggcgtggatccgatatcaactagatcttgaga

SEQ ID NO: 1376 - DNA, 170 bp, Artificial sequence
  Brca1.112_Ep300.310
  crRNA array
cgatttcttggctttatatatcttgtggaaaggacgaaacaccgtaatttctactaagtgtagatctagacgctctgtggagacttaatttctactaagtgtagatatggtacgacagtgaggaagttttttaagcttggcgtggatccgatatcaactagatcttgaga

SEQ ID NO: 1377 - DNA, 170 bp, Artificial sequence
  Brca1.112_Ep300.587
  crRNA array
cgatttcttggctttatatatcttgtggaaaggacgaaacaccgtaatttctactaagtgtagatctagacgctctgtggagacttaatttctactaagtgtagatcgccccggggcccccaaccattttttaagcttggcgtggatccgatatcaactagatcttgaga

SEQ ID NO: 1378 - DNA, 170 bp, Artificial sequence
  Brca1.112_Epha2.126
  crRNA array
cgatttcttggctttatatatcttgtggaaaggacgaaacaccgtaatttctactaagtgtagatctagacgctctgtggagacttaatttctactaagtgtagatcctgtgccgccgcggccgccttttttaagcttggcgtggatccgatatcaactagatcttgaga

SEQ ID NO: 1379 - DNA, 170 bp, Artificial sequence
  Brca1.112_Epha2.5
  crRNA array
cgatttcttggctttatatatcttgtggaaaggacgaaacaccgtaatttctactaagtgtagatctagacgctctgtggagacttaatttctactaagtgtagatcatgagctggcgccacccggttttttaagcttggcgtggatccgatatcaactagatcttgaga

SEQ ID NO: 1380 - DNA, 170 bp, Artificial sequence
  Brca1.112_Fat1.105
  crRNA array
cgatttcttggctttatatatcttgtggaaaggacgaaacaccgtaatttctactaagtgtagatctagacgctctgtggagacttaatttctactaagtgtagataactcgaggtgacaacaagtttttttaagcttggcgtggatccgatatcaactagatcttgaga

SEQ ID NO: 1381 - DNA, 170 bp, Artificial sequence
  Brca1.112_Fat1.122
  crRNA array
cgatttcttggctttatatatcttgtggaaaggacgaaacaccgtaatttctactaagtgtagatctagacgctctgtggagacttaatttctactaagtgtagatccatcgacatggaaacgggattttttaagcttggcgtggatccgatatcaactagatcttgaga

SEQ ID NO: 1382 - DNA, 170 bp, Artificial sequence
  Brca1.112_Fbxw7.21
  crRNA array
cgatttcttggctttatatatcttgtggaaaggacgaaacaccgtaatttctactaagtgtagatctagacgctctgtggagacttaatttctactaagtgtagattaatgtgccgtagaaacccattttttaagcttggcgtggatccgatatcaactagatcttgaga

SEQ ID NO: 1383 - DNA, 170 bp, Artificial sequence
  Brca1.112_Fbxw7.23
  crRNA array
cgatttcttggctttatatatcttgtggaaaggacgaaacaccgtaatttctactaagtgtagatctagacgctctgtggagacttaatttctactaagtgtagatatgtgccgtagaaacccatattttttaagcttggcgtggatccgatatcaactagatcttgaga

SEQ ID NO: 1384 - DNA, 170 bp, Artificial sequence
  Brca1.112_Gata3.34
  crRNA array
cgatttcttggctttatatatcttgtggaaaggacgaaacaccgtaatttctactaagtgtagatctagacgctctgtggagacttaatttctactaagtgtagatctaaactatcccgcaaagatttttttaagcttggcgtggatccgatatcaactagatcttgaga

SEQ ID NO: 1385 - DNA, 170 bp, Artificial sequence
  Brca1.112_Gata3.47
  crRNA array
cgatttcttggctttatatatcttgtggaaaggacgaaacaccgtaatttctactaagtgtagatctagacgctctgtggagacttaatttctactaagtgtagatcgtagtaggacgggacgtggttttttaagcttggcgtggatccgatatcaactagatcttgaga

SEQ ID NO: 1386 - DNA, 170 bp, Artificial sequence
  Brca1.112_H2-Q2.1
  crRNA array
cgatttcttggctttatatatcttgtggaaaggacgaaacaccgtaatttctactaagtgtagatctagacgctctgtggagacttaatttctactaagtgtagatagggcggccaccaacagcagttttttaagcttggcgtggatccgatatcaactagatcttgaga

SEQ ID NO: 1387 - DNA, 170 bp, Artificial sequence
  Brca1.112_H2-Q2.2
  crRNA array
cgatttcttggctttatatatcttgtggaaaggacgaaacaccgtaatttctactaagtgtagatctagacgctctgtggagacttaatttctactaagtgtagattaacctgcgcccgctgctgattttttaagcttggcgtggatccgatatcaactagatcttgaga

SEQ ID NO: 1388 - DNA, 170 bp, Artificial sequence
  Brca1.112_Kdm5c.1878
  crRNA array
cgatttcttggctttatatatcttgtggaaaggacgaaacaccgtaatttctactaagtgtagatctagacgctctgtggagacttaatttctactaagtgtagatagagcacggcacccgcccccttttttaagcttggcgtggatccgatatcaactagatcttgaga

SEQ ID NO: 1389 - DNA, 170 bp, Artificial sequence
  Brca1.112_Kdm5c.1879
  crRNA array
cgatttcttggctttatatatcttgtggaaaggacgaaacaccgtaatttctactaagtgtagatctagacgctctgtggagacttaatttctactaagtgtagatgagcacggcacccgccccccttttttaagcttggcgtggatccgatatcaactagatcttgaga

SEQ ID NO: 1390 - DNA, 170 bp, Artificial sequence
  Brca1.112_Kdm6a.56
  crRNA array
cgatttcttggctttatatatcttgtggaaaggacgaaacaccgtaatttctactaagtgtagatctagacgctctgtggagacttaatttctactaagtgtagattcgctgccgcctctcgcggcttttttaagcttggcgtggatccgatatcaactagatcttgaga

SEQ ID NO: 1391 - DNA, 170 bp, Artificial sequence
  Brca1.112_Kdm6a.57
  crRNA array
cgatttcttggctttatatatcttgtggaaaggacgaaacaccgtaatttctactaagtgtagatctagacgctctgtggagacttaatttctactaagtgtagatcgctgccgcctctcgcggcattttttaagcttggcgtggatccgatatcaactagatcttgaga

SEQ ID NO: 1392 - DNA, 170 bp, Artificial sequence
  Brca1.112_Kmt2b.265
  crRNA array
cgatttcttggctttatatatcttgtggaaaggacgaaacaccgtaatttctactaagtgtagatctagacgctctgtggagacttaatttctactaagtgtagatccccaagtgaagcccacctgttttttaagcttggcgtggatccgatatcaactagatcttgaga

SEQ ID NO: 1393 - DNA, 170 bp, Artificial sequence
  Brca1.112_Kmt2b.298
  crRNA array
cgatttcttggctttatatatcttgtggaaaggacgaaacaccgtaatttctactaagtgtagatctagacgctctgtggagacttaatttctactaagtgtagattccggcagggaccggctggcttttttaagcttggcgtggatccgatatcaactagatcttgaga

SEQ ID NO: 1394 - DNA, 170 bp, Artificial sequence
  Brca1.112_Kmt2c.1962
  crRNA array
cgatttcttggctttatatatcttgtggaaaggacgaaacaccgtaatttctactaagtgtagatctagacgctctgtggagacttaatttctactaagtgtagatgtgacgatctgtgccacaagttttttaagcttggcgtggatccgatatcaactagatcttgaga

SEQ ID NO: 1395 - DNA, 170 bp, Artificial sequence
  Brca1.112_Kmt2c.2236
  crRNA array
cgatttcttggctttatatatcttgtggaaaggacgaaacaccgtaatttctactaagtgtagatctagacgctctgtggagacttaatttctactaagtgtagatactcgacctccacctccctattttttaagcttggcgtggatccgatatcaactagatcttgaga

SEQ ID NO: 1396 - DNA, 170 bp, Artificial sequence
  Brca1.112_Kmt2d.316
  crRNA array
cgatttcttggctttatatatcttgtggaaaggacgaaacaccgtaatttctactaagtgtagatctagacgctctgtggagacttaatttctactaagtgtagatactccaggccacccaggtggttttttaagcttggcgtggatccgatatcaactagatcttgaga

SEQ ID NO: 1397 - DNA, 170 bp, Artificial sequence
  Brca1.112_Kmt2d.416
  crRNA array
cgatttcttggctttatatatcttgtggaaaggacgaaacaccgtaatttctactaagtgtagatctagacgctctgtggagacttaatttctactaagtgtagattaaacccccgggggaagggtttttttaagcttggcgtggatccgatatcaactagatcttgaga

SEQ ID NO: 1398 - DNA, 170 bp, Artificial sequence
  Brca1.112_Map2k4.119
  crRNA array
cgatttcttggctttatatatcttgtggaaaggacgaaacaccgtaatttctactaagtgtagatctagacgctctgtggagacttaatttctactaagtgtagattgctgtgtgggcggccacatttttttaagcttggcgtggatccgatatcaactagatcttgaga

SEQ ID NO: 1399 - DNA, 170 bp, Artificial sequence
  Brca1.112_Map2k4.1261
  crRNA array
cgatttcttggctttatatatcttgtggaaaggacgaaacaccgtaatttctactaagtgtagatctagacgctctgtggagacttaatttctactaagtgtagatgatgtagtaatgcggagtagttttttaagcttggcgtggatccgatatcaactagatcttgaga

SEQ ID NO: 1400 - DNA, 170 bp, Artificial sequence
  Brca1.112_Map3k1.235
  crRNA array
cgatttcttggctttatatatcttgtggaaaggacgaaacaccgtaatttctactaagtgtagatctagacgctctgtggagacttaatttctactaagtgtagataaaacgctactgatcgatcgttttttaagcttggcgtggatccgatatcaactagatcttgaga

SEQ ID NO: 1401 - DNA, 170 bp, Artificial sequence
  Brca1.112_Map3k1.3838
  crRNA array
cgatttcttggctttatatatcttgtggaaaggacgaaacaccgtaatttctactaagtgtagatctagacgctctgtggagacttaatttctactaagtgtagatccaacaacagggccccactattttttaagcttggcgtggatccgatatcaactagatcttgaga

SEQ ID NO: 1402 - DNA, 170 bp, Artificial sequence
  Brca1.112_Mga.1655
  crRNA array
cgatttcttggctttatatatcttgtggaaaggacgaaacaccgtaatttctactaagtgtagatctagacgctctgtggagacttaatttctactaagtgtagatcgagaagtggagagcatattttttttaagcttggcgtggatccgatatcaactagatcttgaga

SEQ ID NO: 1403 - DNA, 170 bp, Artificial sequence
  Brca1.112_Mga.93
  crRNA array
cgatttcttggctttatatatcttgtggaaaggacgaaacaccgtaatttctactaagtgtagatctagacgctctgtggagacttaatttctactaagtgtagatgagaaggctccccataatgtttttttaagcttggcgtggatccgatatcaactagatcttgaga

SEQ ID NO: 1404 - DNA, 170 bp, Artificial sequence
  Brca1.112_Nf1.746
  crRNA array
cgatttcttggctttatatatcttgtggaaaggacgaaacaccgtaatttctactaagtgtagatctagacgctctgtggagacttaatttctactaagtgtagattaagcataatgatgatgccattttttaagcttggcgtggatccgatatcaactagatcttgaga

SEQ ID NO: 1405 - DNA, 170 bp, Artificial sequence
  Brca1.112_Nf1.97
  crRNA array
cgatttcttggctttatatatcttgtggaaaggacgaaacaccgtaatttctactaagtgtagatctagacgctctgtggagacttaatttctactaagtgtagatagcccgctacatgctgatgcttttttaagcttggcgtggatccgatatcaactagatcttgaga

SEQ ID NO: 1406 - DNA, 170 bp, Artificial sequence
  Brca1.112_Nf2.356
  crRNA array
cgatttcttggctttatatatcttgtggaaaggacgaaacaccgtaatttctactaagtgtagatctagacgctctgtggagacttaatttctactaagtgtagatcggagtcatctgatagagatttttttaagcttggcgtggatccgatatcaactagatcttgaga

SEQ ID NO: 1407 - DNA, 170 bp, Artificial sequence
  Brca1.112_Nf2.768
  crRNA array
cgatttcttggctttatatatcttgtggaaaggacgaaacaccgtaatttctactaagtgtagatctagacgctctgtggagacttaatttctactaagtgtagatccgaagccccagtgtccggcttttttaagcttggcgtggatccgatatcaactagatcttgaga

SEQ ID NO: 1408 - DNA, 170 bp, Artificial sequence
  Brca1.112_Notch1.1849
  crRNA array
cgatttcttggctttatatatcttgtggaaaggacgaaacaccgtaatttctactaagtgtagatctagacgctctgtggagacttaatttctactaagtgtagatctggcgggtgggcggcgctgttttttaagcttggcgtggatccgatatcaactagatcttgaga

SEQ ID NO: 1409 - DNA, 170 bp, Artificial sequence
  Brca1.112_Notch1.649
  crRNA array
cgatttcttggctttatatatcttgtggaaaggacgaaacaccgtaatttctactaagtgtagatctagacgctctgtggagacttaatttctactaagtgtagattgggccaacgatgccaggacttttttaagcttggcgtggatccgatatcaactagatcttgaga

SEQ ID NO: 1410 - DNA, 170 bp, Artificial sequence
  Brca1.112_Nsd1.70
  crRNA array
cgatttcttggctttatatatcttgtggaaaggacgaaacaccgtaatttctactaagtgtagatctagacgctctgtggagacttaatttctactaagtgtagatactggtgtggacgatgcagattttttaagcttggcgtggatccgatatcaactagatcttgaga

SEQ ID NO: 1411 - DNA, 170 bp, Artificial sequence
  Brca1.112_Nsd1.90
  crRNA array
cgatttcttggctttatatatcttgtggaaaggacgaaacaccgtaatttctactaagtgtagatctagacgctctgtggagacttaatttctactaagtgtagataggagctaacggcaagaatgttttttaagcttggcgtggatccgatatcaactagatcttgaga

SEQ ID NO: 1412 - DNA, 170 bp, Artificial sequence
  Brca1.112_Pbrm1.1236
  crRNA array
cgatttcttggctttatatatcttgtggaaaggacgaaacaccgtaatttctactaagtgtagatctagacgctctgtggagacttaatttctactaagtgtagatgccgataaaaccaacagccgttttttaagcttggcgtggatccgatatcaactagatcttgaga

SEQ ID NO: 1413 - DNA, 170 bp, Artificial sequence
  Brca1.112_Pbrm1.969
  crRNA array
cgatttcttggctttatatatcttgtggaaaggacgaaacaccgtaatttctactaagtgtagatctagacgctctgtggagacttaatttctactaagtgtagatgagccctaatgaacagctcattttttaagcttggcgtggatccgatatcaactagatcttgaga

SEQ ID NO: 1414 - DNA, 170 bp, Artificial sequence
  Brca1.112_Pik3r1.76
  crRNA array
cgatttcttggctttatatatcttgtggaaaggacgaaacaccgtaatttctactaagtgtagatctagacgctctgtggagacttaatttctactaagtgtagataaaacctatacggcccgcacttttttaagcttggcgtggatccgatatcaactagatcttgaga

SEQ ID NO: 1415 - DNA, 170 bp, Artificial sequence
  Brca1.112_Pik3r1.77
  crRNA array
cgatttcttggctttatatatcttgtggaaaggacgaaacaccgtaatttctactaagtgtagatctagacgctctgtggagacttaatttctactaagtgtagataaacctatacggcccgcactttttttaagcttggcgtggatccgatatcaactagatcttgaga

SEQ ID NO: 1416 - DNA, 170 bp, Artificial sequence
  Brca1.112_Pten.240
  crRNA array
cgatttcttggctttatatatcttgtggaaaggacgaaacaccgtaatttctactaagtgtagatctagacgctctgtggagacttaatttctactaagtgtagattgcatacgctatagctgcttttttttaagcttggcgtggatccgatatcaactagatcttgaga

SEQ ID NO: 1417 - DNA, 170 bp, Artificial sequence
  Brca1.112_Pten.265
  crRNA array
cgatttcttggctttatatatcttgtggaaaggacgaaacaccgtaatttctactaagtgtagatctagacgctctgtggagacttaatttctactaagtgtagataagcgtggtgcgtgacgcacttttttaagcttggcgtggatccgatatcaactagatcttgaga

SEQ ID NO: 1418 - DNA, 170 bp, Artificial sequence
  Brca1.112_Rasa1.1478
  crRNA array
cgatttcttggctttatatatcttgtggaaaggacgaaacaccgtaatttctactaagtgtagatctagacgctctgtggagacttaatttctactaagtgtagatcgataatggtctatgatgtcttttttaagcttggcgtggatccgatatcaactagatcttgaga

SEQ ID NO: 1419 - DNA, 170 bp, Artificial sequence
  Brca1.112_Rasa1.223
  crRNA array
cgatttcttggctttatatatcttgtggaaaggacgaaacaccgtaatttctactaagtgtagatctagacgctctgtggagacttaatttctactaagtgtagattccatggagtatcgtgctcgttttttaagcttggcgtggatccgatatcaactagatcttgaga

SEQ ID NO: 1420 - DNA, 170 bp, Artificial sequence
  Brca1.112_Rb1.211
  crRNA array
cgatttcttggctttatatatcttgtggaaaggacgaaacaccgtaatttctactaagtgtagatctagacgctctgtggagacttaatttctactaagtgtagattctgacatgatcgggtacctttttttaagcttggcgtggatccgatatcaactagatcttgaga

SEQ ID NO: 1421 - DNA, 170 bp, Artificial sequence
  Brca1.112_Rb1.394
  crRNA array
cgatttcttggctttatatatcttgtggaaaggacgaaacaccgtaatttctactaagtgtagatctagacgctctgtggagacttaatttctactaagtgtagatagaaatctcgaagcaggatcttttttaagcttggcgtggatccgatatcaactagatcttgaga

SEQ ID NO: 1422 - DNA, 170 bp, Artificial sequence
  Brca1.112_Rbm10.5
  crRNA array
cgatttcttggctttatatatcttgtggaaaggacgaaacaccgtaatttctactaagtgtagatctagacgctctgtggagacttaatttctactaagtgtagatacgaaacctgaacccacacattttttaagcttggcgtggatccgatatcaactagatcttgaga

SEQ ID NO: 1423 - DNA, 170 bp, Artificial sequence
  Brca1.112_Rbm10.6
  crRNA array
cgatttcttggctttatatatcttgtggaaaggacgaaacaccgtaatttctactaagtgtagatctagacgctctgtggagacttaatttctactaagtgtagatcgaaacctgaacccacacagttttttaagcttggcgtggatccgatatcaactagatcttgaga

SEQ ID NO: 1424 - DNA, 170 bp, Artificial sequence
  Brca1.112_Rnf43.1920
  crRNA array
cgatttcttggctttatatatcttgtggaaaggacgaaacaccgtaatttctactaagtgtagatctagacgctctgtggagacttaatttctactaagtgtagatatccccgtgccgtggactccttttttaagcttggcgtggatccgatatcaactagatcttgaga

SEQ ID NO: 1425 - DNA, 170 bp, Artificial sequence
  Brca1.112_Rnf43.39
  crRNA array
cgatttcttggctttatatatcttgtggaaaggacgaaacaccgtaatttctactaagtgtagatctagacgctctgtggagacttaatttctactaagtgtagatcaaggggatcactctgataattttttaagcttggcgtggatccgatatcaactagatcttgaga

SEQ ID NO: 1426 - DNA, 170 bp, Artificial sequence
  Brca1.112_Runx1.204
  crRNA array
cgatttcttggctttatatatcttgtggaaaggacgaaacaccgtaatttctactaagtgtagatctagacgctctgtggagacttaatttctactaagtgtagattaaataagtccagccgttttttttttaagcttggcgtggatccgatatcaactagatcttgaga

SEQ ID NO: 1427 - DNA, 170 bp, Artificial sequence
  Brca1.112_Runx1.81
  crRNA array
cgatttcttggctttatatatcttgtggaaaggacgaaacaccgtaatttctactaagtgtagatctagacgctctgtggagacttaatttctactaagtgtagataggacgcgtatgggaattttttttttaagcttggcgtggatccgatatcaactagatcttgaga

SEQ ID NO: 1428 - DNA, 170 bp, Artificial sequence
  Brca1.112_Setd2.143
  crRNA array
cgatttcttggctttatatatcttgtggaaaggacgaaacaccgtaatttctactaagtgtagatctagacgctctgtggagacttaatttctactaagtgtagatgcacaaccacaacagactggttttttaagcttggcgtggatccgatatcaactagatcttgaga

SEQ ID NO: 1429 - DNA, 170 bp, Artificial sequence
  Brca1.112_Setd2.508
  crRNA array
cgatttcttggctttatatatcttgtggaaaggacgaaacaccgtaatttctactaagtgtagatctagacgctctgtggagacttaatttctactaagtgtagattacgatcccgagcacccgacttttttaagcttggcgtggatccgatatcaactagatcttgaga

SEQ ID NO: 1430 - DNA, 170 bp, Artificial sequence
  Brca1.112_Smad4.3038
  crRNA array
cgatttcttggctttatatatcttgtggaaaggacgaaacaccgtaatttctactaagtgtagatctagacgctctgtggagacttaatttctactaagtgtagatatctgcggcagtgtcaccggttttttaagcttggcgtggatccgatatcaactagatcttgaga

SEQ ID NO: 1431 - DNA, 170 bp, Artificial sequence
  Brca1.112_Smad4.39
  crRNA array
cgatttcttggctttatatatcttgtggaaaggacgaaacaccgtaatttctactaagtgtagatctagacgctctgtggagacttaatttctactaagtgtagatagtcaaacgcatactgacaattttttaagcttggcgtggatccgatatcaactagatcttgaga

SEQ ID NO: 1432 - DNA, 170 bp, Artificial sequence
  Brca1.112_Stag2.1409
  crRNA array
cgatttcttggctttatatatcttgtggaaaggacgaaacaccgtaatttctactaagtgtagatctagacgctctgtggagacttaatttctactaagtgtagatgctaataactgcggaagggcttttttaagcttggcgtggatccgatatcaactagatcttgaga

SEQ ID NO: 1433 - DNA, 170 bp, Artificial sequence
  Brca1.112_Stag2.4401
  crRNA array
cgatttcttggctttatatatcttgtggaaaggacgaaacaccgtaatttctactaagtgtagatctagacgctctgtggagacttaatttctactaagtgtagattaatcgtccagtggtgtatattttttaagcttggcgtggatccgatatcaactagatcttgaga

SEQ ID NO: 1434 - DNA, 170 bp, Artificial sequence
  Brca1.112_Tbl1xr1.1
  crRNA array
cgatttcttggctttatatatcttgtggaaaggacgaaacaccgtaatttctactaagtgtagatctagacgctctgtggagacttaatttctactaagtgtagatggatgcgcatactggtgaagttttttaagcttggcgtggatccgatatcaactagatcttgaga

SEQ ID NO: 1435 - DNA, 170 bp, Artificial sequence
  Brca1.112_Tbl1xr1.83
  crRNA array
cgatttcttggctttatatatcttgtggaaaggacgaaacaccgtaatttctactaagtgtagatctagacgctctgtggagacttaatttctactaagtgtagatatggtcgacccatcgagtctttttttaagcttggcgtggatccgatatcaactagatcttgaga

SEQ ID NO: 1436 - DNA, 170 bp, Artificial sequence
  Brca1.112_Tgfbr2.290
  crRNA array
cgatttcttggctttatatatcttgtggaaaggacgaaacaccgtaatttctactaagtgtagatctagacgctctgtggagacttaatttctactaagtgtagatcctctcggcgcccgggtaaattttttaagcttggcgtggatccgatatcaactagatcttgaga

SEQ ID NO: 1437 - DNA, 170 bp, Artificial sequence
  Brca1.112_Tgfbr2.292
  crRNA array
cgatttcttggctttatatatcttgtggaaaggacgaaacaccgtaatttctactaagtgtagatctagacgctctgtggagacttaatttctactaagtgtagatcccgggcgccgagagggaaattttttaagcttggcgtggatccgatatcaactagatcttgaga

SEQ ID NO: 1438 - DNA, 170 bp, Artificial sequence
  Brca1.112_Trp53.4
  crRNA array
cgatttcttggctttatatatcttgtggaaaggacgaaacaccgtaatttctactaagtgtagatctagacgctctgtggagacttaatttctactaagtgtagatccctgaactgcccccagggattttttaagcttggcgtggatccgatatcaactagatcttgaga

SEQ ID NO: 1439 - DNA, 170 bp, Artificial sequence
  Brca1.112_Trp53.528
  crRNA array
cgatttcttggctttatatatcttgtggaaaggacgaaacaccgtaatttctactaagtgtagatctagacgctctgtggagacttaatttctactaagtgtagatgctgggccagcagagacctgttttttaagcttggcgtggatccgatatcaactagatcttgaga

SEQ ID NO: 1440 - DNA, 170 bp, Artificial sequence
  Brca1.112_Vhl.1
  crRNA array
cgatttcttggctttatatatcttgtggaaaggacgaaacaccgtaatttctactaagtgtagatctagacgctctgtggagacttaatttctactaagtgtagatagggctcccggcggccatttttttttaagcttggcgtggatccgatatcaactagatcttgaga

SEQ ID NO: 1441 - DNA, 170 bp, Artificial sequence
  Brca1.112_Vhl.151
  crRNA array
cgatttcttggctttatatatcttgtggaaaggacgaaacaccgtaatttctactaagtgtagatctagacgctctgtggagacttaatttctactaagtgtagattagagcactcacccgagggattttttaagcttggcgtggatccgatatcaactagatcttgaga

SEQ ID NO: 1442 - DNA, 170 bp, Artificial sequence
  Brca1.112_Zc3h13.1387
  crRNA array
cgatttcttggctttatatatcttgtggaaaggacgaaacaccgtaatttctactaagtgtagatctagacgctctgtggagacttaatttctactaagtgtagatgtgacgccggtcatgtgactttttttaagcttggcgtggatccgatatcaactagatcttgaga

SEQ ID NO: 1443 - DNA, 170 bp, Artificial sequence
  Brca1.112_Zc3h13.1777
  crRNA array
cgatttcttggctttatatatcttgtggaaaggacgaaacaccgtaatttctactaagtgtagatctagacgctctgtggagacttaatttctactaagtgtagatgatgctgccagtgtagcggcttttttaagcttggcgtggatccgatatcaactagatcttgaga

SEQ ID NO: 1444 - DNA, 170 bp, Artificial sequence
  Brca1.53_Acvr2a.155
  crRNA array
cgatttcttggctttatatatcttgtggaaaggacgaaacaccgtaatttctactaagtgtagataatgaggaggcgtcgatcattaatttctactaagtgtagatggacctggctaatcaagtatttttttaagcttggcgtggatccgatatcaactagatcttgaga

SEQ ID NO: 1445 - DNA, 170 bp, Artificial sequence
  Brca1.53_Acvr2a.70
  crRNA array
cgatttcttggctttatatatcttgtggaaaggacgaaacaccgtaatttctactaagtgtagataatgaggaggcgtcgatcattaatttctactaagtgtagatcccgaggcgccggagaagccttttttaagcttggcgtggatccgatatcaactagatcttgaga

SEQ ID NO: 1446 - DNA, 170 bp, Artificial sequence
  Brca1.53_Apc.21
  crRNA array
cgatttcttggctttatatatcttgtggaaaggacgaaacaccgtaatttctactaagtgtagataatgaggaggcgtcgatcattaatttctactaagtgtagatgtgatccacacgtgtagctgttttttaagcttggcgtggatccgatatcaactagatcttgaga

SEQ ID NO: 1447 - DNA, 170 bp, Artificial sequence
  Brca1.53_Apc.867
  crRNA array
cgatttcttggctttatatatcttgtggaaaggacgaaacaccgtaatttctactaagtgtagataatgaggaggcgtcgatcattaatttctactaagtgtagatcagtcccaggcggcggaagcttttttaagcttggcgtggatccgatatcaactagatcttgaga

SEQ ID NO: 1448 - DNA, 170 bp, Artificial sequence
  Brca1.53_Arid1a.2
  crRNA array
cgatttcttggctttatatatcttgtggaaaggacgaaacaccgtaatttctactaagtgtagataatgaggaggcgtcgatcattaatttctactaagtgtagatcccgcgcccccgtcctggggttttttaagcttggcgtggatccgatatcaactagatcttgaga

SEQ ID NO: 1449 - DNA, 170 bp, Artificial sequence
  Brca1.53_Arid1a.5
  crRNA array
cgatttcttggctttatatatcttgtggaaaggacgaaacaccgtaatttctactaagtgtagataatgaggaggcgtcgatcattaatttctactaagtgtagatcccgcgctcggccgctgccgttttttaagcttggcgtggatccgatatcaactagatcttgaga

SEQ ID NO: 1450 - DNA, 170 bp, Artificial sequence
  Brca1.53_Arid2.166
  crRNA array
cgatttcttggctttatatatcttgtggaaaggacgaaacaccgtaatttctactaagtgtagataatgaggaggcgtcgatcattaatttctactaagtgtagataaccgcgatctgggttttttttttttaagcttggcgtggatccgatatcaactagatcttgaga

SEQ ID NO: 1451 - DNA, 170 bp, Artificial sequence
  Brca1.53_Arid2.172
  crRNA array
cgatttcttggctttatatatcttgtggaaaggacgaaacaccgtaatttctactaagtgtagataatgaggaggcgtcgatcattaatttctactaagtgtagatctggacgagctgcggcagttttttttaagcttggcgtggatccgatatcaactagatcttgaga

SEQ ID NO: 1452 - DNA, 170 bp, Artificial sequence
  Brca1.53_Atm.120
  crRNA array
cgatttcttggctttatatatcttgtggaaaggacgaaacaccgtaatttctactaagtgtagataatgaggaggcgtcgatcattaatttctactaagtgtagatgacaggtagtcggcagctaattttttaagcttggcgtggatccgatatcaactagatcttgaga

SEQ ID NO: 1453 - DNA, 170 bp, Artificial sequence
  Brca1.53_Atm.997
  crRNA array
cgatttcttggctttatatatcttgtggaaaggacgaaacaccgtaatttctactaagtgtagataatgaggaggcgtcgatcattaatttctactaagtgtagatgagaaagtctccgaatcgttttttttaagcttggcgtggatccgatatcaactagatcttgaga

SEQ ID NO: 1454 - DNA, 170 bp, Artificial sequence
  Brca1.53_Atrx.249
  crRNA array
cgatttcttggctttatatatcttgtggaaaggacgaaacaccgtaatttctactaagtgtagataatgaggaggcgtcgatcattaatttctactaagtgtagattagccagtcgctcatatctcttttttaagcttggcgtggatccgatatcaactagatcttgaga

SEQ ID NO: 1455 - DNA, 170 bp, Artificial sequence
  Brca1.53_Atrx.251
  crRNA array
cgatttcttggctttatatatcttgtggaaaggacgaaacaccgtaatttctactaagtgtagataatgaggaggcgtcgatcattaatttctactaagtgtagatgccagtcgctcatatctctgttttttaagcttggcgtggatccgatatcaactagatcttgaga

SEQ ID NO: 1456 - DNA, 170 bp, Artificial sequence
  Brca1.53_Bcor.203
  crRNA array
cgatttcttggctttatatatcttgtggaaaggacgaaacaccgtaatttctactaagtgtagataatgaggaggcgtcgatcattaatttctactaagtgtagatccccggagcggagtccaggcttttttaagcttggcgtggatccgatatcaactagatcttgaga

SEQ ID NO: 1457 - DNA, 170 bp, Artificial sequence
  Brca1.53_Bcor.475
  crRNA array
cgatttcttggctttatatatcttgtggaaaggacgaaacaccgtaatttctactaagtgtagataatgaggaggcgtcgatcattaatttctactaagtgtagattgcaacccctctgtatgggattttttaagcttggcgtggatccgatatcaactagatcttgaga

SEQ ID NO: 1458 - DNA, 170 bp, Artificial sequence
  Brca1.53_Casp8.45
  crRNA array
cgatttcttggctttatatatcttgtggaaaggacgaaacaccgtaatttctactaagtgtagataatgaggaggcgtcgatcattaatttctactaagtgtagatctaccgagatcctgtgaatgttttttaagcttggcgtggatccgatatcaactagatcttgaga

SEQ ID NO: 1459 - DNA, 170 bp, Artificial sequence
  Brca1.53_Casp8.54
  crRNA array
cgatttcttggctttatatatcttgtggaaaggacgaaacaccgtaatttctactaagtgtagataatgaggaggcgtcgatcattaatttctactaagtgtagatcagtgcagtcgtcgtaagatttttttaagcttggcgtggatccgatatcaactagatcttgaga

SEQ ID NO: 1460 - DNA, 170 bp, Artificial sequence
  Brca1.53_Cbwd1.84
  crRNA array
cgatttcttggctttatatatcttgtggaaaggacgaaacaccgtaatttctactaagtgtagataatgaggaggcgtcgatcattaatttctactaagtgtagatcacagcaggtaacatgccgcttttttaagcttggcgtggatccgatatcaactagatcttgaga

SEQ ID NO: 1461 - DNA, 170 bp, Artificial sequence
  Brca1.53_Cbwd1.85
  crRNA array
cgatttcttggctttatatatcttgtggaaaggacgaaacaccgtaatttctactaagtgtagataatgaggaggcgtcgatcattaatttctactaagtgtagatacagcaggtaacatgccgccttttttaagcttggcgtggatccgatatcaactagatcttgaga

SEQ ID NO: 1462 - DNA, 170 bp, Artificial sequence
  Brca1.53_Cdh1.387
  crRNA array
cgatttcttggctttatatatcttgtggaaaggacgaaacaccgtaatttctactaagtgtagataatgaggaggcgtcgatcattaatttctactaagtgtagatctcggcgtctgccgggtccgttttttaagcttggcgtggatccgatatcaactagatcttgaga

SEQ ID NO: 1463 - DNA, 170 bp, Artificial sequence
  Brca1.53_Cdh1.58
  crRNA array
cgatttcttggctttatatatcttgtggaaaggacgaaacaccgtaatttctactaagtgtagataatgaggaggcgtcgatcattaatttctactaagtgtagatctcgtccgcgcccgggactcttttttaagcttggcgtggatccgatatcaactagatcttgaga

SEQ ID NO: 1464 - DNA, 170 bp, Artificial sequence
  Brca1.53_Cdkn2a.647
  crRNA array
cgatttcttggctttatatatcttgtggaaaggacgaaacaccgtaatttctactaagtgtagataatgaggaggcgtcgatcattaatttctactaagtgtagatgcaatcacgggagggagcagttttttaagcttggcgtggatccgatatcaactagatcttgaga

SEQ ID NO: 1465 - DNA, 170 bp, Artificial sequence
  Brca1.53_Cdkn2a.648
  crRNA array
cgatttcttggctttatatatcttgtggaaaggacgaaacaccgtaatttctactaagtgtagataatgaggaggcgtcgatcattaatttctactaagtgtagatcaatcacgggagggagcagattttttaagcttggcgtggatccgatatcaactagatcttgaga

SEQ ID NO: 1466 - DNA, 170 bp, Artificial sequence
  Brca1.53_Cic.162
  crRNA array
cgatttcttggctttatatatcttgtggaaaggacgaaacaccgtaatttctactaagtgtagataatgaggaggcgtcgatcattaatttctactaagtgtagatcgcaggcgcgcccggcggagttttttaagcttggcgtggatccgatatcaactagatcttgaga

SEQ ID NO: 1467 - DNA, 170 bp, Artificial sequence
  Brca1.53_Cic.164
  crRNA array
cgatttcttggctttatatatcttgtggaaaggacgaaacaccgtaatttctactaagtgtagataatgaggaggcgtcgatcattaatttctactaagtgtagatcgggccctgggccggcggctttttttaagcttggcgtggatccgatatcaactagatcttgaga

SEQ ID NO: 1468 - DNA, 170 bp, Artificial sequence
  Brca1.53_Ctcf.229
  crRNA array
cgatttcttggctttatatatcttgtggaaaggacgaaacaccgtaatttctactaagtgtagataatgaggaggcgtcgatcattaatttctactaagtgtagatggctggtggctgatagtctgttttttaagcttggcgtggatccgatatcaactagatcttgaga

SEQ ID NO: 1469 - DNA, 170 bp, Artificial sequence
  Brca1.53_Ctcf.809
  crRNA array
cgatttcttggctttatatatcttgtggaaaggacgaaacaccgtaatttctactaagtgtagataatgaggaggcgtcgatcattaatttctactaagtgtagataagcgctatcatgatcccaattttttaagcttggcgtggatccgatatcaactagatcttgaga

SEQ ID NO: 1470 - DNA, 170 bp, Artificial sequence
  Brca1.53_Elf3.826
  crRNA array
cgatttcttggctttatatatcttgtggaaaggacgaaacaccgtaatttctactaagtgtagataatgaggaggcgtcgatcattaatttctactaagtgtagattccgagacatcctaatccacttttttaagcttggcgtggatccgatatcaactagatcttgaga

SEQ ID NO: 1471 - DNA, 170 bp, Artificial sequence
  Brca1.53_Elf3.983
  crRNA array
cgatttcttggctttatatatcttgtggaaaggacgaaacaccgtaatttctactaagtgtagataatgaggaggcgtcgatcattaatttctactaagtgtagattaggccccctaactggaccattttttaagcttggcgtggatccgatatcaactagatcttgaga

SEQ ID NO: 1472 - DNA, 170 bp, Artificial sequence
  Brca1.53_Ep300.310
  crRNA array
cgatttcttggctttatatatcttgtggaaaggacgaaacaccgtaatttctactaagtgtagataatgaggaggcgtcgatcattaatttctactaagtgtagatatggtacgacagtgaggaagttttttaagcttggcgtggatccgatatcaactagatcttgaga

SEQ ID NO: 1473 - DNA, 170 bp, Artificial sequence
  Brca1.53_Ep300.587
  crRNA array
cgatttcttggctttatatatcttgtggaaaggacgaaacaccgtaatttctactaagtgtagataatgaggaggcgtcgatcattaatttctactaagtgtagatcgccccggggcccccaaccattttttaagcttggcgtggatccgatatcaactagatcttgaga

SEQ ID NO: 1474 - DNA, 170 bp, Artificial sequence
  Brca1.53_Epha2.126
  crRNA array
cgatttcttggctttatatatcttgtggaaaggacgaaacaccgtaatttctactaagtgtagataatgaggaggcgtcgatcattaatttctactaagtgtagatcctgtgccgccgcggccgccttttttaagcttggcgtggatccgatatcaactagatcttgaga

SEQ ID NO: 1475 - DNA, 170 bp, Artificial sequence
  Brca1.53_Epha2.5
  crRNA array
cgatttcttggctttatatatcttgtggaaaggacgaaacaccgtaatttctactaagtgtagataatgaggaggcgtcgatcattaatttctactaagtgtagatcatgagctggcgccacccggttttttaagcttggcgtggatccgatatcaactagatcttgaga

SEQ ID NO: 1476 - DNA, 170 bp, Artificial sequence
  Brca1.53_Fat1.105
  crRNA array
cgatttcttggctttatatatcttgtggaaaggacgaaacaccgtaatttctactaagtgtagataatgaggaggcgtcgatcattaatttctactaagtgtagataactcgaggtgacaacaagtttttttaagcttggcgtggatccgatatcaactagatcttgaga

SEQ ID NO: 1477 - DNA, 170 bp, Artificial sequence
  Brca1.53_Fat1.122
  crRNA array
cgatttcttggctttatatatcttgtggaaaggacgaaacaccgtaatttctactaagtgtagataatgaggaggcgtcgatcattaatttctactaagtgtagatccatcgacatggaaacgggattttttaagcttggcgtggatccgatatcaactagatcttgaga

SEQ ID NO: 1478 - DNA, 170 bp, Artificial sequence
  Brca1.53_Fbxw7.21
  crRNA array
cgatttcttggctttatatatcttgtggaaaggacgaaacaccgtaatttctactaagtgtagataatgaggaggcgtcgatcattaatttctactaagtgtagattaatgtgccgtagaaacccattttttaagcttggcgtggatccgatatcaactagatcttgaga

SEQ ID NO: 1479 - DNA, 170 bp, Artificial sequence
  Brca1.53_Fbxw7.23
  crRNA array
cgatttcttggctttatatatcttgtggaaaggacgaaacaccgtaatttctactaagtgtagataatgaggaggcgtcgatcattaatttctactaagtgtagatatgtgccgtagaaacccatattttttaagcttggcgtggatccgatatcaactagatcttgaga

SEQ ID NO: 1480 - DNA, 170 bp, Artificial sequence
  Brca1.53_Gata3.34
  crRNA array
cgatttcttggctttatatatcttgtggaaaggacgaaacaccgtaatttctactaagtgtagataatgaggaggcgtcgatcattaatttctactaagtgtagatctaaactatcccgcaaagatttttttaagcttggcgtggatccgatatcaactagatcttgaga

SEQ ID NO: 1481 - DNA, 170 bp, Artificial sequence
  Brca1.53_Gata3.47
  crRNA array
cgatttcttggctttatatatcttgtggaaaggacgaaacaccgtaatttctactaagtgtagataatgaggaggcgtcgatcattaatttctactaagtgtagatcgtagtaggacgggacgtggttttttaagcttggcgtggatccgatatcaactagatcttgaga

SEQ ID NO: 1482 - DNA, 170 bp, Artificial sequence
  Brca1.53_H2-Q2.1
  crRNA array
cgatttcttggctttatatatcttgtggaaaggacgaaacaccgtaatttctactaagtgtagataatgaggaggcgtcgatcattaatttctactaagtgtagatagggcggccaccaacagcagttttttaagcttggcgtggatccgatatcaactagatcttgaga

SEQ ID NO: 1483 - DNA, 170 bp, Artificial sequence
  Brca1.53_H2-Q2.2
  crRNA array
cgatttcttggctttatatatcttgtggaaaggacgaaacaccgtaatttctactaagtgtagataatgaggaggcgtcgatcattaatttctactaagtgtagattaacctgcgcccgctgctgattttttaagcttggcgtggatccgatatcaactagatcttgaga

SEQ ID NO: 1484 - DNA, 170 bp, Artificial sequence
  Brca1.53_Kdm5c.1878
  crRNA array
cgatttcttggctttatatatcttgtggaaaggacgaaacaccgtaatttctactaagtgtagataatgaggaggcgtcgatcattaatttctactaagtgtagatagagcacggcacccgcccccttttttaagcttggcgtggatccgatatcaactagatcttgaga

SEQ ID NO: 1485 - DNA, 170 bp, Artificial sequence
  Brca1.53_Kdm5c.1879
  crRNA array
cgatttcttggctttatatatcttgtggaaaggacgaaacaccgtaatttctactaagtgtagataatgaggaggcgtcgatcattaatttctactaagtgtagatgagcacggcacccgccccccttttttaagcttggcgtggatccgatatcaactagatcttgaga

SEQ ID NO: 1486 - DNA, 170 bp, Artificial sequence
  Brca1.53_Kdm6a.56
  crRNA array
cgatttcttggctttatatatcttgtggaaaggacgaaacaccgtaatttctactaagtgtagataatgaggaggcgtcgatcattaatttctactaagtgtagattcgctgccgcctctcgcggcttttttaagcttggcgtggatccgatatcaactagatcttgaga

SEQ ID NO: 1487 - DNA, 170 bp, Artificial sequence
  Brca1.53_Kdm6a.57
  crRNA array
cgatttcttggctttatatatcttgtggaaaggacgaaacaccgtaatttctactaagtgtagataatgaggaggcgtcgatcattaatttctactaagtgtagatcgctgccgcctctcgcggcattttttaagcttggcgtggatccgatatcaactagatcttgaga

SEQ ID NO: 1488 - DNA, 170 bp, Artificial sequence
  Brca1.53_Kmt2b.265
  crRNA array
cgatttcttggctttatatatcttgtggaaaggacgaaacaccgtaatttctactaagtgtagataatgaggaggcgtcgatcattaatttctactaagtgtagatccccaagtgaagcccacctgttttttaagcttggcgtggatccgatatcaactagatcttgaga

SEQ ID NO: 1489 - DNA, 170 bp, Artificial sequence
  Brca1.53_Kmt2b.298
  crRNA array
cgatttcttggctttatatatcttgtggaaaggacgaaacaccgtaatttctactaagtgtagataatgaggaggcgtcgatcattaatttctactaagtgtagattccggcagggaccggctggcttttttaagcttggcgtggatccgatatcaactagatcttgaga

SEQ ID NO: 1490 - DNA, 170 bp, Artificial sequence
  Brca1.53_Kmt2c.1962
  crRNA array
cgatttcttggctttatatatcttgtggaaaggacgaaacaccgtaatttctactaagtgtagataatgaggaggcgtcgatcattaatttctactaagtgtagatgtgacgatctgtgccacaagttttttaagcttggcgtggatccgatatcaactagatcttgaga

SEQ ID NO: 1491 - DNA, 170 bp, Artificial sequence
  Brca1.53_Kmt2c.2236
  crRNA array
cgatttcttggctttatatatcttgtggaaaggacgaaacaccgtaatttctactaagtgtagataatgaggaggcgtcgatcattaatttctactaagtgtagatactcgacctccacctccctattttttaagcttggcgtggatccgatatcaactagatcttgaga

SEQ ID NO: 1492 - DNA, 170 bp, Artificial sequence
  Brca1.53_Kmt2d.316
  crRNA array
cgatttcttggctttatatatcttgtggaaaggacgaaacaccgtaatttctactaagtgtagataatgaggaggcgtcgatcattaatttctactaagtgtagatactccaggccacccaggtggttttttaagcttggcgtggatccgatatcaactagatcttgaga

SEQ ID NO: 1493 - DNA, 170 bp, Artificial sequence
  Brca1.53_Kmt2d.416
  crRNA array
cgatttcttggctttatatatcttgtggaaaggacgaaacaccgtaatttctactaagtgtagataatgaggaggcgtcgatcattaatttctactaagtgtagattaaacccccgggggaagggtttttttaagcttggcgtggatccgatatcaactagatcttgaga

SEQ ID NO: 1494 - DNA, 170 bp, Artificial sequence
  Brca1.53_Map2k4.119
  crRNA array
cgatttcttggctttatatatcttgtggaaaggacgaaacaccgtaatttctactaagtgtagataatgaggaggcgtcgatcattaatttctactaagtgtagattgctgtgtgggcggccacatttttttaagcttggcgtggatccgatatcaactagatcttgaga

SEQ ID NO: 1495 - DNA, 170 bp, Artificial sequence
  Brca1.53_Map2k4.1261
  crRNA array
cgatttcttggctttatatatcttgtggaaaggacgaaacaccgtaatttctactaagtgtagataatgaggaggcgtcgatcattaatttctactaagtgtagatgatgtagtaatgcggagtagttttttaagcttggcgtggatccgatatcaactagatcttgaga

SEQ ID NO: 1496 - DNA, 170 bp, Artificial sequence
  Brca1.53_Map3k1.235
  crRNA array
cgatttcttggctttatatatcttgtggaaaggacgaaacaccgtaatttctactaagtgtagataatgaggaggcgtcgatcattaatttctactaagtgtagataaaacgctactgatcgatcgttttttaagcttggcgtggatccgatatcaactagatcttgaga

SEQ ID NO: 1497 - DNA, 170 bp, Artificial sequence
  Brca1.53_Map3k1.3838
  crRNA array
cgatttcttggctttatatatcttgtggaaaggacgaaacaccgtaatttctactaagtgtagataatgaggaggcgtcgatcattaatttctactaagtgtagatccaacaacagggccccactattttttaagcttggcgtggatccgatatcaactagatcttgaga

SEQ ID NO: 1498 - DNA, 170 bp, Artificial sequence
  Brca1.53_Mga.1655
  crRNA array
cgatttcttggctttatatatcttgtggaaaggacgaaacaccgtaatttctactaagtgtagataatgaggaggcgtcgatcattaatttctactaagtgtagatcgagaagtggagagcatattttttttaagcttggcgtggatccgatatcaactagatcttgaga

SEQ ID NO: 1499 - DNA, 170 bp, Artificial sequence
  Brca1.53_Mga.93
  crRNA array
cgatttcttggctttatatatcttgtggaaaggacgaaacaccgtaatttctactaagtgtagataatgaggaggcgtcgatcattaatttctactaagtgtagatgagaaggctccccataatgtttttttaagcttggcgtggatccgatatcaactagatcttgaga

SEQ ID NO: 1500 - DNA, 170 bp, Artificial sequence
  Brca1.53_Nf1.746
  crRNA array
cgatttcttggctttatatatcttgtggaaaggacgaaacaccgtaatttctactaagtgtagataatgaggaggcgtcgatcattaatttctactaagtgtagattaagcataatgatgatgccattttttaagcttggcgtggatccgatatcaactagatcttgaga

SEQ ID NO: 1501 - DNA, 170 bp, Artificial sequence
  Brca1.53_Nf1.97
  crRNA array
cgatttcttggctttatatatcttgtggaaaggacgaaacaccgtaatttctactaagtgtagataatgaggaggcgtcgatcattaatttctactaagtgtagatagcccgctacatgctgatgcttttttaagcttggcgtggatccgatatcaactagatcttgaga

SEQ ID NO: 1502 - DNA, 170 bp, Artificial sequence
  Brca1.53_Nf2.356
  crRNA array
cgatttcttggctttatatatcttgtggaaaggacgaaacaccgtaatttctactaagtgtagataatgaggaggcgtcgatcattaatttctactaagtgtagatcggagtcatctgatagagatttttttaagcttggcgtggatccgatatcaactagatcttgaga

SEQ ID NO: 1503 - DNA, 170 bp, Artificial sequence
  Brca1.53_Nf2.768
  crRNA array
cgatttcttggctttatatatcttgtggaaaggacgaaacaccgtaatttctactaagtgtagataatgaggaggcgtcgatcattaatttctactaagtgtagatccgaagccccagtgtccggcttttttaagcttggcgtggatccgatatcaactagatcttgaga

SEQ ID NO: 1504 - DNA, 170 bp, Artificial sequence
  Brca1.53_Notch1.1849
  crRNA array
cgatttcttggctttatatatcttgtggaaaggacgaaacaccgtaatttctactaagtgtagataatgaggaggcgtcgatcattaatttctactaagtgtagatctggcgggtgggcggcgctgttttttaagcttggcgtggatccgatatcaactagatcttgaga

SEQ ID NO: 1505 - DNA, 170 bp, Artificial sequence
  Brca1.53_Notch1.649
  crRNA array
cgatttcttggctttatatatcttgtggaaaggacgaaacaccgtaatttctactaagtgtagataatgaggaggcgtcgatcattaatttctactaagtgtagattgggccaacgatgccaggacttttttaagcttggcgtggatccgatatcaactagatcttgaga

SEQ ID NO: 1506 - DNA, 170 bp, Artificial sequence
  Brca1.53_Nsd1.70
  crRNA array
cgatttcttggctttatatatcttgtggaaaggacgaaacaccgtaatttctactaagtgtagataatgaggaggcgtcgatcattaatttctactaagtgtagatactggtgtggacgatgcagattttttaagcttggcgtggatccgatatcaactagatcttgaga

SEQ ID NO: 1507 - DNA, 170 bp, Artificial sequence
  Brca1.53_Nsd1.90
  crRNA array
cgatttcttggctttatatatcttgtggaaaggacgaaacaccgtaatttctactaagtgtagataatgaggaggcgtcgatcattaatttctactaagtgtagataggagctaacggcaagaatgttttttaagcttggcgtggatccgatatcaactagatcttgaga

SEQ ID NO: 1508 - DNA, 170 bp, Artificial sequence
  Brca1.53_Pbrm1.1236
  crRNA array
cgatttcttggctttatatatcttgtggaaaggacgaaacaccgtaatttctactaagtgtagataatgaggaggcgtcgatcattaatttctactaagtgtagatgccgataaaaccaacagccgttttttaagcttggcgtggatccgatatcaactagatcttgaga

SEQ ID NO: 1509 - DNA, 170 bp, Artificial sequence
  Brca1.53_Pbrm1.969
  crRNA array
cgatttcttggctttatatatcttgtggaaaggacgaaacaccgtaatttctactaagtgtagataatgaggaggcgtcgatcattaatttctactaagtgtagatgagccctaatgaacagctcattttttaagcttggcgtggatccgatatcaactagatcttgaga

SEQ ID NO: 1510 - DNA, 170 bp, Artificial sequence
  Brca1.53_Pik3r1.76
  crRNA array
cgatttcttggctttatatatcttgtggaaaggacgaaacaccgtaatttctactaagtgtagataatgaggaggcgtcgatcattaatttctactaagtgtagataaaacctatacggcccgcacttttttaagcttggcgtggatccgatatcaactagatcttgaga

SEQ ID NO: 1511 - DNA, 170 bp, Artificial sequence
  Brca1.53_Pik3r1.77
  crRNA array
cgatttcttggctttatatatcttgtggaaaggacgaaacaccgtaatttctactaagtgtagataatgaggaggcgtcgatcattaatttctactaagtgtagataaacctatacggcccgcactttttttaagcttggcgtggatccgatatcaactagatcttgaga

SEQ ID NO: 1512 - DNA, 170 bp, Artificial sequence
  Brca1.53_Pten.240
  crRNA array
cgatttcttggctttatatatcttgtggaaaggacgaaacaccgtaatttctactaagtgtagataatgaggaggcgtcgatcattaatttctactaagtgtagattgcatacgctatagctgcttttttttaagcttggcgtggatccgatatcaactagatcttgaga

SEQ ID NO: 1513 - DNA, 170 bp, Artificial sequence
  Brca1.53_Pten.265
  crRNA array
cgatttcttggctttatatatcttgtggaaaggacgaaacaccgtaatttctactaagtgtagataatgaggaggcgtcgatcattaatttctactaagtgtagataagcgtggtgcgtgacgcacttttttaagcttggcgtggatccgatatcaactagatcttgaga

SEQ ID NO: 1514 - DNA, 170 bp, Artificial sequence
  Brca1.53_Rasa1.1478
  crRNA array
cgatttcttggctttatatatcttgtggaaaggacgaaacaccgtaatttctactaagtgtagataatgaggaggcgtcgatcattaatttctactaagtgtagatcgataatggtctatgatgtcttttttaagcttggcgtggatccgatatcaactagatcttgaga

SEQ ID NO: 1515 - DNA, 170 bp, Artificial sequence
  Brca1.53_Rasa1.223
  crRNA array
cgatttcttggctttatatatcttgtggaaaggacgaaacaccgtaatttctactaagtgtagataatgaggaggcgtcgatcattaatttctactaagtgtagattccatggagtatcgtgctcgttttttaagcttggcgtggatccgatatcaactagatcttgaga

SEQ ID NO: 1516 - DNA, 170 bp, Artificial sequence
  Brca1.53_Rb1.211
  crRNA array
cgatttcttggctttatatatcttgtggaaaggacgaaacaccgtaatttctactaagtgtagataatgaggaggcgtcgatcattaatttctactaagtgtagattctgacatgatcgggtacctttttttaagcttggcgtggatccgatatcaactagatcttgaga

SEQ ID NO: 1517 - DNA, 170 bp, Artificial sequence
  Brca1.53_Rb1.394
  crRNA array
cgatttcttggctttatatatcttgtggaaaggacgaaacaccgtaatttctactaagtgtagataatgaggaggcgtcgatcattaatttctactaagtgtagatagaaatctcgaagcaggatcttttttaagcttggcgtggatccgatatcaactagatcttgaga

SEQ ID NO: 1518 - DNA, 170 bp, Artificial sequence
  Brca1.53_Rbm10.5
  crRNA array
cgatttcttggctttatatatcttgtggaaaggacgaaacaccgtaatttctactaagtgtagataatgaggaggcgtcgatcattaatttctactaagtgtagatacgaaacctgaacccacacattttttaagcttggcgtggatccgatatcaactagatcttgaga

SEQ ID NO: 1519 - DNA, 170 bp, Artificial sequence
  Brca1.53_Rbm10.6
  crRNA array
cgatttcttggctttatatatcttgtggaaaggacgaaacaccgtaatttctactaagtgtagataatgaggaggcgtcgatcattaatttctactaagtgtagatcgaaacctgaacccacacagttttttaagcttggcgtggatccgatatcaactagatcttgaga

SEQ ID NO: 1520 - DNA, 170 bp, Artificial sequence
  Brca1.53_Rnf43.1920
  crRNA array
cgatttcttggctttatatatcttgtggaaaggacgaaacaccgtaatttctactaagtgtagataatgaggaggcgtcgatcattaatttctactaagtgtagatatccccgtgccgtggactccttttttaagcttggcgtggatccgatatcaactagatcttgaga

SEQ ID NO: 1521 - DNA, 170 bp, Artificial sequence
  Brca1.53_Rnf43.39
  crRNA array
cgatttcttggctttatatatcttgtggaaaggacgaaacaccgtaatttctactaagtgtagataatgaggaggcgtcgatcattaatttctactaagtgtagatcaaggggatcactctgataattttttaagcttggcgtggatccgatatcaactagatcttgaga

SEQ ID NO: 1522 - DNA, 170 bp, Artificial sequence
  Brca1.53_Runx1.204
  crRNA array
cgatttcttggctttatatatcttgtggaaaggacgaaacaccgtaatttctactaagtgtagataatgaggaggcgtcgatcattaatttctactaagtgtagattaaataagtccagccgttttttttttaagcttggcgtggatccgatatcaactagatcttgaga

SEQ ID NO: 1523 - DNA, 170 bp, Artificial sequence
  Brca1.53_Runx1.81
  crRNA array
cgatttcttggctttatatatcttgtggaaaggacgaaacaccgtaatttctactaagtgtagataatgaggaggcgtcgatcattaatttctactaagtgtagataggacgcgtatgggaattttttttttaagcttggcgtggatccgatatcaactagatcttgaga

SEQ ID NO: 1524 - DNA, 170 bp, Artificial sequence
  Brca1.53_Setd2.143
  crRNA array
cgatttcttggctttatatatcttgtggaaaggacgaaacaccgtaatttctactaagtgtagataatgaggaggcgtcgatcattaatttctactaagtgtagatgcacaaccacaacagactggttttttaagcttggcgtggatccgatatcaactagatcttgaga

SEQ ID NO: 1525 - DNA, 170 bp, Artificial sequence
  Brca1.53_Setd2.508
  crRNA array
cgatttcttggctttatatatcttgtggaaaggacgaaacaccgtaatttctactaagtgtagataatgaggaggcgtcgatcattaatttctactaagtgtagattacgatcccgagcacccgacttttttaagcttggcgtggatccgatatcaactagatcttgaga

SEQ ID NO: 1526 - DNA, 170 bp, Artificial sequence
  Brca1.53_Smad4.3038
  crRNA array
cgatttcttggctttatatatcttgtggaaaggacgaaacaccgtaatttctactaagtgtagataatgaggaggcgtcgatcattaatttctactaagtgtagatatctgcggcagtgtcaccggttttttaagcttggcgtggatccgatatcaactagatcttgaga

SEQ ID NO: 1527 - DNA, 170 bp, Artificial sequence
  Brca1.53_Smad4.39
  crRNA array
cgatttcttggctttatatatcttgtggaaaggacgaaacaccgtaatttctactaagtgtagataatgaggaggcgtcgatcattaatttctactaagtgtagatagtcaaacgcatactgacaattttttaagcttggcgtggatccgatatcaactagatcttgaga

SEQ ID NO: 1528 - DNA, 170 bp, Artificial sequence
  Brca1.53_Stag2.1409
  crRNA array
cgatttcttggctttatatatcttgtggaaaggacgaaacaccgtaatttctactaagtgtagataatgaggaggcgtcgatcattaatttctactaagtgtagatgctaataactgcggaagggcttttttaagcttggcgtggatccgatatcaactagatcttgaga

SEQ ID NO: 1529 - DNA, 170 bp, Artificial sequence
  Brca1.53_Stag2.4401
  crRNA array
cgatttcttggctttatatatcttgtggaaaggacgaaacaccgtaatttctactaagtgtagataatgaggaggcgtcgatcattaatttctactaagtgtagattaatcgtccagtggtgtatattttttaagcttggcgtggatccgatatcaactagatcttgaga

SEQ ID NO: 1530 - DNA, 170 bp, Artificial sequence
  Brca1.53_Tbl1xr1.1
  crRNA array
cgatttcttggctttatatatcttgtggaaaggacgaaacaccgtaatttctactaagtgtagataatgaggaggcgtcgatcattaatttctactaagtgtagatggatgcgcatactggtgaagttttttaagcttggcgtggatccgatatcaactagatcttgaga

SEQ ID NO: 1531 - DNA, 170 bp, Artificial sequence
  Brca1.53_Tbl1xr1.83
  crRNA array
cgatttcttggctttatatatcttgtggaaaggacgaaacaccgtaatttctactaagtgtagataatgaggaggcgtcgatcattaatttctactaagtgtagatatggtcgacccatcgagtctttttttaagcttggcgtggatccgatatcaactagatcttgaga

SEQ ID NO: 1532 - DNA, 170 bp, Artificial sequence
  Brca1.53_Tgfbr2.290
  crRNA array
cgatttcttggctttatatatcttgtggaaaggacgaaacaccgtaatttctactaagtgtagataatgaggaggcgtcgatcattaatttctactaagtgtagatcctctcggcgcccgggtaaattttttaagcttggcgtggatccgatatcaactagatcttgaga

SEQ ID NO: 1533 - DNA, 170 bp, Artificial sequence
  Brca1.53_Tgfbr2.292
  crRNA array
cgatttcttggctttatatatcttgtggaaaggacgaaacaccgtaatttctactaagtgtagataatgaggaggcgtcgatcattaatttctactaagtgtagatcccgggcgccgagagggaaattttttaagcttggcgtggatccgatatcaactagatcttgaga

SEQ ID NO: 1534 - DNA, 170 bp, Artificial sequence
  Brca1.53_Trp53.4
  crRNA array
cgatttcttggctttatatatcttgtggaaaggacgaaacaccgtaatttctactaagtgtagataatgaggaggcgtcgatcattaatttctactaagtgtagatccctgaactgcccccagggattttttaagcttggcgtggatccgatatcaactagatcttgaga

SEQ ID NO: 1535 - DNA, 170 bp, Artificial sequence
  Brca1.53_Trp53.528
  crRNA array
cgatttcttggctttatatatcttgtggaaaggacgaaacaccgtaatttctactaagtgtagataatgaggaggcgtcgatcattaatttctactaagtgtagatgctgggccagcagagacctgttttttaagcttggcgtggatccgatatcaactagatcttgaga

SEQ ID NO: 1536 - DNA, 170 bp, Artificial sequence
  Brca1.53_Vhl.1
  crRNA array
cgatttcttggctttatatatcttgtggaaaggacgaaacaccgtaatttctactaagtgtagataatgaggaggcgtcgatcattaatttctactaagtgtagatagggctcccggcggccatttttttttaagcttggcgtggatccgatatcaactagatcttgaga

SEQ ID NO: 1537 - DNA, 170 bp, Artificial sequence
  Brca1.53_Vhl.151
  crRNA array
cgatttcttggctttatatatcttgtggaaaggacgaaacaccgtaatttctactaagtgtagataatgaggaggcgtcgatcattaatttctactaagtgtagattagagcactcacccgagggattttttaagcttggcgtggatccgatatcaactagatcttgaga

SEQ ID NO: 1538 - DNA, 170 bp, Artificial sequence
  Brca1.53_Zc3h13.1387
  crRNA array
cgatttcttggctttatatatcttgtggaaaggacgaaacaccgtaatttctactaagtgtagataatgaggaggcgtcgatcattaatttctactaagtgtagatgtgacgccggtcatgtgactttttttaagcttggcgtggatccgatatcaactagatcttgaga

SEQ ID NO: 1539 - DNA, 170 bp, Artificial sequence
  Brca1.53_Zc3h13.1777
  crRNA array
cgatttcttggctttatatatcttgtggaaaggacgaaacaccgtaatttctactaagtgtagataatgaggaggcgtcgatcattaatttctactaagtgtagatgatgctgccagtgtagcggcttttttaagcttggcgtggatccgatatcaactagatcttgaga

SEQ ID NO: 1540 - DNA, 170 bp, Artificial sequence
  Casp8.45_Acvr2a.155
  crRNA array
cgatttcttggctttatatatcttgtggaaaggacgaaacaccgtaatttctactaagtgtagatctaccgagatcctgtgaatgtaatttctactaagtgtagatggacctggctaatcaagtatttttttaagcttggcgtggatccgatatcaactagatcttgaga

SEQ ID NO: 1541 - DNA, 170 bp, Artificial sequence
  Casp8.45_Acvr2a.70
  crRNA array
cgatttcttggctttatatatcttgtggaaaggacgaaacaccgtaatttctactaagtgtagatctaccgagatcctgtgaatgtaatttctactaagtgtagatcccgaggcgccggagaagccttttttaagcttggcgtggatccgatatcaactagatcttgaga

SEQ ID NO: 1542 - DNA, 170 bp, Artificial sequence
  Casp8.45_Apc.21
  crRNA array
cgatttcttggctttatatatcttgtggaaaggacgaaacaccgtaatttctactaagtgtagatctaccgagatcctgtgaatgtaatttctactaagtgtagatgtgatccacacgtgtagctgttttttaagcttggcgtggatccgatatcaactagatcttgaga

SEQ ID NO: 1543 - DNA, 170 bp, Artificial sequence
  Casp8.45_Apc.867
  crRNA array
cgatttcttggctttatatatcttgtggaaaggacgaaacaccgtaatttctactaagtgtagatctaccgagatcctgtgaatgtaatttctactaagtgtagatcagtcccaggcggcggaagcttttttaagcttggcgtggatccgatatcaactagatcttgaga

SEQ ID NO: 1544 - DNA, 170 bp, Artificial sequence
  Casp8.45_Arid1a.2
  crRNA array
cgatttcttggctttatatatcttgtggaaaggacgaaacaccgtaatttctactaagtgtagatctaccgagatcctgtgaatgtaatttctactaagtgtagatcccgcgcccccgtcctggggttttttaagcttggcgtggatccgatatcaactagatcttgaga

SEQ ID NO: 1545 - DNA, 170 bp, Artificial sequence
  Casp8.45_Arid1a.5
  crRNA array
cgatttcttggctttatatatcttgtggaaaggacgaaacaccgtaatttctactaagtgtagatctaccgagatcctgtgaatgtaatttctactaagtgtagatcccgcgctcggccgctgccgttttttaagcttggcgtggatccgatatcaactagatcttgaga

SEQ ID NO: 1546 - DNA, 170 bp, Artificial sequence
  Casp8.45_Arid2.166
  crRNA array
cgatttcttggctttatatatcttgtggaaaggacgaaacaccgtaatttctactaagtgtagatctaccgagatcctgtgaatgtaatttctactaagtgtagataaccgcgatctgggttttttttttttaagcttggcgtggatccgatatcaactagatcttgaga

SEQ ID NO: 1547 - DNA, 170 bp, Artificial sequence
  Casp8.45_Arid2.172
  crRNA array
cgatttcttggctttatatatcttgtggaaaggacgaaacaccgtaatttctactaagtgtagatctaccgagatcctgtgaatgtaatttctactaagtgtagatctggacgagctgcggcagttttttttaagcttggcgtggatccgatatcaactagatcttgaga

SEQ ID NO: 1548 - DNA, 170 bp, Artificial sequence
  Casp8.45_Atm.120
  crRNA array
cgatttcttggctttatatatcttgtggaaaggacgaaacaccgtaatttctactaagtgtagatctaccgagatcctgtgaatgtaatttctactaagtgtagatgacaggtagtcggcagctaattttttaagcttggcgtggatccgatatcaactagatcttgaga

SEQ ID NO: 1549 - DNA, 170 bp, Artificial sequence
  Casp8.45_Atm.997
  crRNA array
cgatttcttggctttatatatcttgtggaaaggacgaaacaccgtaatttctactaagtgtagatctaccgagatcctgtgaatgtaatttctactaagtgtagatgagaaagtctccgaatcgttttttttaagcttggcgtggatccgatatcaactagatcttgaga

SEQ ID NO: 1550 - DNA, 170 bp, Artificial sequence
  Casp8.45_Atrx.249
  crRNA array
cgatttcttggctttatatatcttgtggaaaggacgaaacaccgtaatttctactaagtgtagatctaccgagatcctgtgaatgtaatttctactaagtgtagattagccagtcgctcatatctcttttttaagcttggcgtggatccgatatcaactagatcttgaga

SEQ ID NO: 1551 - DNA, 170 bp, Artificial sequence
  Casp8.45_Atrx.251
  crRNA array
cgatttcttggctttatatatcttgtggaaaggacgaaacaccgtaatttctactaagtgtagatctaccgagatcctgtgaatgtaatttctactaagtgtagatgccagtcgctcatatctctgttttttaagcttggcgtggatccgatatcaactagatcttgaga

SEQ ID NO: 1552 - DNA, 170 bp, Artificial sequence
  Casp8.45_Bcor.203
  crRNA array
cgatttcttggctttatatatcttgtggaaaggacgaaacaccgtaatttctactaagtgtagatctaccgagatcctgtgaatgtaatttctactaagtgtagatccccggagcggagtccaggcttttttaagcttggcgtggatccgatatcaactagatcttgaga

SEQ ID NO: 1553 - DNA, 170 bp, Artificial sequence
  Casp8.45_Bcor.475
  crRNA array
cgatttcttggctttatatatcttgtggaaaggacgaaacaccgtaatttctactaagtgtagatctaccgagatcctgtgaatgtaatttctactaagtgtagattgcaacccctctgtatgggattttttaagcttggcgtggatccgatatcaactagatcttgaga

SEQ ID NO: 1554 - DNA, 170 bp, Artificial sequence
  Casp8.45_Brca1.112
  crRNA array
cgatttcttggctttatatatcttgtggaaaggacgaaacaccgtaatttctactaagtgtagatctaccgagatcctgtgaatgtaatttctactaagtgtagatctagacgctctgtggagactttttttaagcttggcgtggatccgatatcaactagatcttgaga

SEQ ID NO: 1555 - DNA, 170 bp, Artificial sequence
  Casp8.45_Brca1.53
  crRNA array
cgatttcttggctttatatatcttgtggaaaggacgaaacaccgtaatttctactaagtgtagatctaccgagatcctgtgaatgtaatttctactaagtgtagataatgaggaggcgtcgatcatttttttaagcttggcgtggatccgatatcaactagatcttgaga

SEQ ID NO: 1556 - DNA, 170 bp, Artificial sequence
  Casp8.45_Cbwd1.84
  crRNA array
cgatttcttggctttatatatcttgtggaaaggacgaaacaccgtaatttctactaagtgtagatctaccgagatcctgtgaatgtaatttctactaagtgtagatcacagcaggtaacatgccgcttttttaagcttggcgtggatccgatatcaactagatcttgaga

SEQ ID NO: 1557 - DNA, 170 bp, Artificial sequence
  Casp8.45_Cbwd1.85
  crRNA array
cgatttcttggctttatatatcttgtggaaaggacgaaacaccgtaatttctactaagtgtagatctaccgagatcctgtgaatgtaatttctactaagtgtagatacagcaggtaacatgccgccttttttaagcttggcgtggatccgatatcaactagatcttgaga

SEQ ID NO: 1558 - DNA, 170 bp, Artificial sequence
  Casp8.45_Cdh1.387
  crRNA array
cgatttcttggctttatatatcttgtggaaaggacgaaacaccgtaatttctactaagtgtagatctaccgagatcctgtgaatgtaatttctactaagtgtagatctcggcgtctgccgggtccgttttttaagcttggcgtggatccgatatcaactagatcttgaga

SEQ ID NO: 1559 - DNA, 170 bp, Artificial sequence
  Casp8.45_Cdh1.58
  crRNA array
cgatttcttggctttatatatcttgtggaaaggacgaaacaccgtaatttctactaagtgtagatctaccgagatcctgtgaatgtaatttctactaagtgtagatctcgtccgcgcccgggactcttttttaagcttggcgtggatccgatatcaactagatcttgaga

SEQ ID NO: 1560 - DNA, 170 bp, Artificial sequence
  Casp8.45_Cdkn2a.647
  crRNA array
cgatttcttggctttatatatcttgtggaaaggacgaaacaccgtaatttctactaagtgtagatctaccgagatcctgtgaatgtaatttctactaagtgtagatgcaatcacgggagggagcagttttttaagcttggcgtggatccgatatcaactagatcttgaga

SEQ ID NO: 1561 - DNA, 170 bp, Artificial sequence
  Casp8.45_Cdkn2a.648
  crRNA array
cgatttcttggctttatatatcttgtggaaaggacgaaacaccgtaatttctactaagtgtagatctaccgagatcctgtgaatgtaatttctactaagtgtagatcaatcacgggagggagcagattttttaagcttggcgtggatccgatatcaactagatcttgaga

SEQ ID NO: 1562 - DNA, 170 bp, Artificial sequence
  Casp8.45_Cic.162
  crRNA array
cgatttcttggctttatatatcttgtggaaaggacgaaacaccgtaatttctactaagtgtagatctaccgagatcctgtgaatgtaatttctactaagtgtagatcgcaggcgcgcccggcggagttttttaagcttggcgtggatccgatatcaactagatcttgaga

SEQ ID NO: 1563 - DNA, 170 bp, Artificial sequence
  Casp8.45_Cic.164
  crRNA array
cgatttcttggctttatatatcttgtggaaaggacgaaacaccgtaatttctactaagtgtagatctaccgagatcctgtgaatgtaatttctactaagtgtagatcgggccctgggccggcggctttttttaagcttggcgtggatccgatatcaactagatcttgaga

SEQ ID NO: 1564 - DNA, 170 bp, Artificial sequence
  Casp8.45_Ctcf.229
  crRNA array
cgatttcttggctttatatatcttgtggaaaggacgaaacaccgtaatttctactaagtgtagatctaccgagatcctgtgaatgtaatttctactaagtgtagatggctggtggctgatagtctgttttttaagcttggcgtggatccgatatcaactagatcttgaga

SEQ ID NO: 1565 - DNA, 170 bp, Artificial sequence
  Casp8.45_Ctcf.809
  crRNA array
cgatttcttggctttatatatcttgtggaaaggacgaaacaccgtaatttctactaagtgtagatctaccgagatcctgtgaatgtaatttctactaagtgtagataagcgctatcatgatcccaattttttaagcttggcgtggatccgatatcaactagatcttgaga

SEQ ID NO: 1566 - DNA, 170 bp, Artificial sequence
  Casp8.45_Elf3.826
  crRNA array
cgatttcttggctttatatatcttgtggaaaggacgaaacaccgtaatttctactaagtgtagatctaccgagatcctgtgaatgtaatttctactaagtgtagattccgagacatcctaatccacttttttaagcttggcgtggatccgatatcaactagatcttgaga

SEQ ID NO: 1567 - DNA, 170 bp, Artificial sequence
  Casp8.45_Elf3.983
  crRNA array
cgatttcttggctttatatatcttgtggaaaggacgaaacaccgtaatttctactaagtgtagatctaccgagatcctgtgaatgtaatttctactaagtgtagattaggccccctaactggaccattttttaagcttggcgtggatccgatatcaactagatcttgaga

SEQ ID NO: 1568 - DNA, 170 bp, Artificial sequence
  Casp8.45_Ep300.310
  crRNA array
cgatttcttggctttatatatcttgtggaaaggacgaaacaccgtaatttctactaagtgtagatctaccgagatcctgtgaatgtaatttctactaagtgtagatatggtacgacagtgaggaagttttttaagcttggcgtggatccgatatcaactagatcttgaga

SEQ ID NO: 1569 - DNA, 170 bp, Artificial sequence
  Casp8.45_Ep300.587
  crRNA array
cgatttcttggctttatatatcttgtggaaaggacgaaacaccgtaatttctactaagtgtagatctaccgagatcctgtgaatgtaatttctactaagtgtagatcgccccggggcccccaaccattttttaagcttggcgtggatccgatatcaactagatcttgaga

SEQ ID NO: 1570 - DNA, 170 bp, Artificial sequence
  Casp8.45_Epha2.126
  crRNA array
cgatttcttggctttatatatcttgtggaaaggacgaaacaccgtaatttctactaagtgtagatctaccgagatcctgtgaatgtaatttctactaagtgtagatcctgtgccgccgcggccgccttttttaagcttggcgtggatccgatatcaactagatcttgaga

SEQ ID NO: 1571 - DNA, 170 bp, Artificial sequence
  Casp8.45_Epha2.5
  crRNA array
cgatttcttggctttatatatcttgtggaaaggacgaaacaccgtaatttctactaagtgtagatctaccgagatcctgtgaatgtaatttctactaagtgtagatcatgagctggcgccacccggttttttaagcttggcgtggatccgatatcaactagatcttgaga

SEQ ID NO: 1572 - DNA, 170 bp, Artificial sequence
  Casp8.45_Fat1.105
  crRNA array
cgatttcttggctttatatatcttgtggaaaggacgaaacaccgtaatttctactaagtgtagatctaccgagatcctgtgaatgtaatttctactaagtgtagataactcgaggtgacaacaagtttttttaagcttggcgtggatccgatatcaactagatcttgaga

SEQ ID NO: 1573 - DNA, 170 bp, Artificial sequence
  Casp8.45_Fat1.122
  crRNA array
cgatttcttggctttatatatcttgtggaaaggacgaaacaccgtaatttctactaagtgtagatctaccgagatcctgtgaatgtaatttctactaagtgtagatccatcgacatggaaacgggattttttaagcttggcgtggatccgatatcaactagatcttgaga

SEQ ID NO: 1574 - DNA, 170 bp, Artificial sequence
  Casp8.45_Fbxw7.21
  crRNA array
cgatttcttggctttatatatcttgtggaaaggacgaaacaccgtaatttctactaagtgtagatctaccgagatcctgtgaatgtaatttctactaagtgtagattaatgtgccgtagaaacccattttttaagcttggcgtggatccgatatcaactagatcttgaga

SEQ ID NO: 1575 - DNA, 170 bp, Artificial sequence
  Casp8.45_Fbxw7.23
  crRNA array
cgatttcttggctttatatatcttgtggaaaggacgaaacaccgtaatttctactaagtgtagatctaccgagatcctgtgaatgtaatttctactaagtgtagatatgtgccgtagaaacccatattttttaagcttggcgtggatccgatatcaactagatcttgaga

SEQ ID NO: 1576 - DNA, 170 bp, Artificial sequence
  Casp8.45_Gata3.34
  crRNA array
cgatttcttggctttatatatcttgtggaaaggacgaaacaccgtaatttctactaagtgtagatctaccgagatcctgtgaatgtaatttctactaagtgtagatctaaactatcccgcaaagatttttttaagcttggcgtggatccgatatcaactagatcttgaga

SEQ ID NO: 1577 - DNA, 170 bp, Artificial sequence
  Casp8.45_Gata3.47
  crRNA array
cgatttcttggctttatatatcttgtggaaaggacgaaacaccgtaatttctactaagtgtagatctaccgagatcctgtgaatgtaatttctactaagtgtagatcgtagtaggacgggacgtggttttttaagcttggcgtggatccgatatcaactagatcttgaga

SEQ ID NO: 1578 - DNA, 170 bp, Artificial sequence
  Casp8.45_H2-Q2.1
  crRNA array
cgatttcttggctttatatatcttgtggaaaggacgaaacaccgtaatttctactaagtgtagatctaccgagatcctgtgaatgtaatttctactaagtgtagatagggcggccaccaacagcagttttttaagcttggcgtggatccgatatcaactagatcttgaga

SEQ ID NO: 1579 - DNA, 170 bp, Artificial sequence
  Casp8.45_H2-Q2.2
  crRNA array
cgatttcttggctttatatatcttgtggaaaggacgaaacaccgtaatttctactaagtgtagatctaccgagatcctgtgaatgtaatttctactaagtgtagattaacctgcgcccgctgctgattttttaagcttggcgtggatccgatatcaactagatcttgaga

SEQ ID NO: 1580 - DNA, 170 bp, Artificial sequence
  Casp8.45_Kdm5c.1878
  crRNA array
cgatttcttggctttatatatcttgtggaaaggacgaaacaccgtaatttctactaagtgtagatctaccgagatcctgtgaatgtaatttctactaagtgtagatagagcacggcacccgcccccttttttaagcttggcgtggatccgatatcaactagatcttgaga

SEQ ID NO: 1581 - DNA, 170 bp, Artificial sequence
  Casp8.45_Kdm5c.1879
  crRNA array
cgatttcttggctttatatatcttgtggaaaggacgaaacaccgtaatttctactaagtgtagatctaccgagatcctgtgaatgtaatttctactaagtgtagatgagcacggcacccgccccccttttttaagcttggcgtggatccgatatcaactagatcttgaga

SEQ ID NO: 1582 - DNA, 170 bp, Artificial sequence
  Casp8.45_Kdm6a.56
  crRNA array
cgatttcttggctttatatatcttgtggaaaggacgaaacaccgtaatttctactaagtgtagatctaccgagatcctgtgaatgtaatttctactaagtgtagattcgctgccgcctctcgcggcttttttaagcttggcgtggatccgatatcaactagatcttgaga

SEQ ID NO: 1583 - DNA, 170 bp, Artificial sequence
  Casp8.45_Kdm6a.57
  crRNA array
cgatttcttggctttatatatcttgtggaaaggacgaaacaccgtaatttctactaagtgtagatctaccgagatcctgtgaatgtaatttctactaagtgtagatcgctgccgcctctcgcggcattttttaagcttggcgtggatccgatatcaactagatcttgaga

SEQ ID NO: 1584 - DNA, 170 bp, Artificial sequence
  Casp8.45_Kmt2b.265
  crRNA array
cgatttcttggctttatatatcttgtggaaaggacgaaacaccgtaatttctactaagtgtagatctaccgagatcctgtgaatgtaatttctactaagtgtagatccccaagtgaagcccacctgttttttaagcttggcgtggatccgatatcaactagatcttgaga

SEQ ID NO: 1585 - DNA, 170 bp, Artificial sequence
  Casp8.45_Kmt2b.298
  crRNA array
cgatttcttggctttatatatcttgtggaaaggacgaaacaccgtaatttctactaagtgtagatctaccgagatcctgtgaatgtaatttctactaagtgtagattccggcagggaccggctggcttttttaagcttggcgtggatccgatatcaactagatcttgaga

SEQ ID NO: 1586 - DNA, 170 bp, Artificial sequence
  Casp8.45_Kmt2c.1962
  crRNA array
cgatttcttggctttatatatcttgtggaaaggacgaaacaccgtaatttctactaagtgtagatctaccgagatcctgtgaatgtaatttctactaagtgtagatgtgacgatctgtgccacaagttttttaagcttggcgtggatccgatatcaactagatcttgaga

SEQ ID NO: 1587 - DNA, 170 bp, Artificial sequence
  Casp8.45_Kmt2c.2236
  crRNA array
cgatttcttggctttatatatcttgtggaaaggacgaaacaccgtaatttctactaagtgtagatctaccgagatcctgtgaatgtaatttctactaagtgtagatactcgacctccacctccctattttttaagcttggcgtggatccgatatcaactagatcttgaga

SEQ ID NO: 1588 - DNA, 170 bp, Artificial sequence
  Casp8.45_Kmt2d.316
  crRNA array
cgatttcttggctttatatatcttgtggaaaggacgaaacaccgtaatttctactaagtgtagatctaccgagatcctgtgaatgtaatttctactaagtgtagatactccaggccacccaggtggttttttaagcttggcgtggatccgatatcaactagatcttgaga

SEQ ID NO: 1589 - DNA, 170 bp, Artificial sequence
  Casp8.45_Kmt2d.416
  crRNA array
cgatttcttggctttatatatcttgtggaaaggacgaaacaccgtaatttctactaagtgtagatctaccgagatcctgtgaatgtaatttctactaagtgtagattaaacccccgggggaagggtttttttaagcttggcgtggatccgatatcaactagatcttgaga

SEQ ID NO: 1590 - DNA, 170 bp, Artificial sequence
  Casp8.45_Map2k4.119
  crRNA array
cgatttcttggctttatatatcttgtggaaaggacgaaacaccgtaatttctactaagtgtagatctaccgagatcctgtgaatgtaatttctactaagtgtagattgctgtgtgggcggccacatttttttaagcttggcgtggatccgatatcaactagatcttgaga

SEQ ID NO: 1591 - DNA, 170 bp, Artificial sequence
  Casp8.45_Map2k4.1261
  crRNA array
cgatttcttggctttatatatcttgtggaaaggacgaaacaccgtaatttctactaagtgtagatctaccgagatcctgtgaatgtaatttctactaagtgtagatgatgtagtaatgcggagtagttttttaagcttggcgtggatccgatatcaactagatcttgaga

SEQ ID NO: 1592 - DNA, 170 bp, Artificial sequence
  Casp8.45_Map3k1.235
  crRNA array
cgatttcttggctttatatatcttgtggaaaggacgaaacaccgtaatttctactaagtgtagatctaccgagatcctgtgaatgtaatttctactaagtgtagataaaacgctactgatcgatcgttttttaagcttggcgtggatccgatatcaactagatcttgaga

SEQ ID NO: 1593 - DNA, 170 bp, Artificial sequence
  Casp8.45_Map3k1.3838
  crRNA array
cgatttcttggctttatatatcttgtggaaaggacgaaacaccgtaatttctactaagtgtagatctaccgagatcctgtgaatgtaatttctactaagtgtagatccaacaacagggccccactattttttaagcttggcgtggatccgatatcaactagatcttgaga

SEQ ID NO: 1594 - DNA, 170 bp, Artificial sequence
  Casp8.45_Mga.1655
  crRNA array
cgatttcttggctttatatatcttgtggaaaggacgaaacaccgtaatttctactaagtgtagatctaccgagatcctgtgaatgtaatttctactaagtgtagatcgagaagtggagagcatattttttttaagcttggcgtggatccgatatcaactagatcttgaga

SEQ ID NO: 1595 - DNA, 170 bp, Artificial sequence
  Casp8.45_Mga.93
  crRNA array
cgatttcttggctttatatatcttgtggaaaggacgaaacaccgtaatttctactaagtgtagatctaccgagatcctgtgaatgtaatttctactaagtgtagatgagaaggctccccataatgtttttttaagcttggcgtggatccgatatcaactagatcttgaga

SEQ ID NO: 1596 - DNA, 170 bp, Artificial sequence
  Casp8.45_Nf1.746
  crRNA array
cgatttcttggctttatatatcttgtggaaaggacgaaacaccgtaatttctactaagtgtagatctaccgagatcctgtgaatgtaatttctactaagtgtagattaagcataatgatgatgccattttttaagcttggcgtggatccgatatcaactagatcttgaga

SEQ ID NO: 1597 - DNA, 170 bp, Artificial sequence
  Casp8.45_Nf1.97
  crRNA array
cgatttcttggctttatatatcttgtggaaaggacgaaacaccgtaatttctactaagtgtagatctaccgagatcctgtgaatgtaatttctactaagtgtagatagcccgctacatgctgatgcttttttaagcttggcgtggatccgatatcaactagatcttgaga

SEQ ID NO: 1598 - DNA, 170 bp, Artificial sequence
  Casp8.45_Nf2.356
  crRNA array
cgatttcttggctttatatatcttgtggaaaggacgaaacaccgtaatttctactaagtgtagatctaccgagatcctgtgaatgtaatttctactaagtgtagatcggagtcatctgatagagatttttttaagcttggcgtggatccgatatcaactagatcttgaga

SEQ ID NO: 1599 - DNA, 170 bp, Artificial sequence
  Casp8.45_Nf2.768
  crRNA array
cgatttcttggctttatatatcttgtggaaaggacgaaacaccgtaatttctactaagtgtagatctaccgagatcctgtgaatgtaatttctactaagtgtagatccgaagccccagtgtccggcttttttaagcttggcgtggatccgatatcaactagatcttgaga

SEQ ID NO: 1600 - DNA, 170 bp, Artificial sequence
  Casp8.45_Notch1.1849
  crRNA array
cgatttcttggctttatatatcttgtggaaaggacgaaacaccgtaatttctactaagtgtagatctaccgagatcctgtgaatgtaatttctactaagtgtagatctggcgggtgggcggcgctgttttttaagcttggcgtggatccgatatcaactagatcttgaga

SEQ ID NO: 1601 - DNA, 170 bp, Artificial sequence
  Casp8.45_Notch1.649
  crRNA array
cgatttcttggctttatatatcttgtggaaaggacgaaacaccgtaatttctactaagtgtagatctaccgagatcctgtgaatgtaatttctactaagtgtagattgggccaacgatgccaggacttttttaagcttggcgtggatccgatatcaactagatcttgaga

SEQ ID NO: 1602 - DNA, 170 bp, Artificial sequence
  Casp8.45_Nsd1.70
  crRNA array
cgatttcttggctttatatatcttgtggaaaggacgaaacaccgtaatttctactaagtgtagatctaccgagatcctgtgaatgtaatttctactaagtgtagatactggtgtggacgatgcagattttttaagcttggcgtggatccgatatcaactagatcttgaga

SEQ ID NO: 1603 - DNA, 170 bp, Artificial sequence
  Casp8.45_Nsd1.90
  crRNA array
cgatttcttggctttatatatcttgtggaaaggacgaaacaccgtaatttctactaagtgtagatctaccgagatcctgtgaatgtaatttctactaagtgtagataggagctaacggcaagaatgttttttaagcttggcgtggatccgatatcaactagatcttgaga

SEQ ID NO: 1604 - DNA, 170 bp, Artificial sequence
  Casp8.45_Pbrm1.1236
  crRNA array
cgatttcttggctttatatatcttgtggaaaggacgaaacaccgtaatttctactaagtgtagatctaccgagatcctgtgaatgtaatttctactaagtgtagatgccgataaaaccaacagccgttttttaagcttggcgtggatccgatatcaactagatcttgaga

SEQ ID NO: 1605 - DNA, 170 bp, Artificial sequence
  Casp8.45_Pbrm1.969
  crRNA array
cgatttcttggctttatatatcttgtggaaaggacgaaacaccgtaatttctactaagtgtagatctaccgagatcctgtgaatgtaatttctactaagtgtagatgagccctaatgaacagctcattttttaagcttggcgtggatccgatatcaactagatcttgaga

SEQ ID NO: 1606 - DNA, 170 bp, Artificial sequence
  Casp8.45_Pik3r1.76
  crRNA array
cgatttcttggctttatatatcttgtggaaaggacgaaacaccgtaatttctactaagtgtagatctaccgagatcctgtgaatgtaatttctactaagtgtagataaaacctatacggcccgcacttttttaagcttggcgtggatccgatatcaactagatcttgaga

SEQ ID NO: 1607 - DNA, 170 bp, Artificial sequence
  Casp8.45_Pik3r1.77
  crRNA array
cgatttcttggctttatatatcttgtggaaaggacgaaacaccgtaatttctactaagtgtagatctaccgagatcctgtgaatgtaatttctactaagtgtagataaacctatacggcccgcactttttttaagcttggcgtggatccgatatcaactagatcttgaga

SEQ ID NO: 1608 - DNA, 170 bp, Artificial sequence
  Casp8.45_Pten.240
  crRNA array
cgatttcttggctttatatatcttgtggaaaggacgaaacaccgtaatttctactaagtgtagatctaccgagatcctgtgaatgtaatttctactaagtgtagattgcatacgctatagctgcttttttttaagcttggcgtggatccgatatcaactagatcttgaga

SEQ ID NO: 1609 - DNA, 170 bp, Artificial sequence
  Casp8.45_Pten.265
  crRNA array
cgatttcttggctttatatatcttgtggaaaggacgaaacaccgtaatttctactaagtgtagatctaccgagatcctgtgaatgtaatttctactaagtgtagataagcgtggtgcgtgacgcacttttttaagcttggcgtggatccgatatcaactagatcttgaga

SEQ ID NO: 1610 - DNA, 170 bp, Artificial sequence
  Casp8.45_Rasa1.1478
  crRNA array
cgatttcttggctttatatatcttgtggaaaggacgaaacaccgtaatttctactaagtgtagatctaccgagatcctgtgaatgtaatttctactaagtgtagatcgataatggtctatgatgtcttttttaagcttggcgtggatccgatatcaactagatcttgaga

SEQ ID NO: 1611 - DNA, 170 bp, Artificial sequence
  Casp8.45_Rasa1.223
  crRNA array
cgatttcttggctttatatatcttgtggaaaggacgaaacaccgtaatttctactaagtgtagatctaccgagatcctgtgaatgtaatttctactaagtgtagattccatggagtatcgtgctcgttttttaagcttggcgtggatccgatatcaactagatcttgaga

SEQ ID NO: 1612 - DNA, 170 bp, Artificial sequence
  Casp8.45_Rb1.211
  crRNA array
cgatttcttggctttatatatcttgtggaaaggacgaaacaccgtaatttctactaagtgtagatctaccgagatcctgtgaatgtaatttctactaagtgtagattctgacatgatcgggtacctttttttaagcttggcgtggatccgatatcaactagatcttgaga

SEQ ID NO: 1613 - DNA, 170 bp, Artificial sequence
  Casp8.45_Rb1.394
  crRNA array
cgatttcttggctttatatatcttgtggaaaggacgaaacaccgtaatttctactaagtgtagatctaccgagatcctgtgaatgtaatttctactaagtgtagatagaaatctcgaagcaggatcttttttaagcttggcgtggatccgatatcaactagatcttgaga

SEQ ID NO: 1614 - DNA, 170 bp, Artificial sequence
  Casp8.45_Rbm10.5
  crRNA array
cgatttcttggctttatatatcttgtggaaaggacgaaacaccgtaatttctactaagtgtagatctaccgagatcctgtgaatgtaatttctactaagtgtagatacgaaacctgaacccacacattttttaagcttggcgtggatccgatatcaactagatcttgaga

SEQ ID NO: 1615 - DNA, 170 bp, Artificial sequence
  Casp8.45_Rbm10.6
  crRNA array
cgatttcttggctttatatatcttgtggaaaggacgaaacaccgtaatttctactaagtgtagatctaccgagatcctgtgaatgtaatttctactaagtgtagatcgaaacctgaacccacacagttttttaagcttggcgtggatccgatatcaactagatcttgaga

SEQ ID NO: 1616 - DNA, 170 bp, Artificial sequence
  Casp8.45_Rnf43.1920
  crRNA array
cgatttcttggctttatatatcttgtggaaaggacgaaacaccgtaatttctactaagtgtagatctaccgagatcctgtgaatgtaatttctactaagtgtagatatccccgtgccgtggactccttttttaagcttggcgtggatccgatatcaactagatcttgaga

SEQ ID NO: 1617 - DNA, 170 bp, Artificial sequence
  Casp8.45_Rnf43.39
  crRNA array
cgatttcttggctttatatatcttgtggaaaggacgaaacaccgtaatttctactaagtgtagatctaccgagatcctgtgaatgtaatttctactaagtgtagatcaaggggatcactctgataattttttaagcttggcgtggatccgatatcaactagatcttgaga

SEQ ID NO: 1618 - DNA, 170 bp, Artificial sequence
  Casp8.45_Runx1.204
  crRNA array
cgatttcttggctttatatatcttgtggaaaggacgaaacaccgtaatttctactaagtgtagatctaccgagatcctgtgaatgtaatttctactaagtgtagattaaataagtccagccgttttttttttaagcttggcgtggatccgatatcaactagatcttgaga

SEQ ID NO: 1619 - DNA, 170 bp, Artificial sequence
  Casp8.45_Runx1.81
  crRNA array
cgatttcttggctttatatatcttgtggaaaggacgaaacaccgtaatttctactaagtgtagatctaccgagatcctgtgaatgtaatttctactaagtgtagataggacgcgtatgggaattttttttttaagcttggcgtggatccgatatcaactagatcttgaga

SEQ ID NO: 1620 - DNA, 170 bp, Artificial sequence
  Casp8.45_Setd2.143
  crRNA array
cgatttcttggctttatatatcttgtggaaaggacgaaacaccgtaatttctactaagtgtagatctaccgagatcctgtgaatgtaatttctactaagtgtagatgcacaaccacaacagactggttttttaagcttggcgtggatccgatatcaactagatcttgaga

SEQ ID NO: 1621 - DNA, 170 bp, Artificial sequence
  Casp8.45_Setd2.508
  crRNA array
cgatttcttggctttatatatcttgtggaaaggacgaaacaccgtaatttctactaagtgtagatctaccgagatcctgtgaatgtaatttctactaagtgtagattacgatcccgagcacccgacttttttaagcttggcgtggatccgatatcaactagatcttgaga

SEQ ID NO: 1622 - DNA, 170 bp, Artificial sequence
  Casp8.45_Smad4.3038
  crRNA array
cgatttcttggctttatatatcttgtggaaaggacgaaacaccgtaatttctactaagtgtagatctaccgagatcctgtgaatgtaatttctactaagtgtagatatctgcggcagtgtcaccggttttttaagcttggcgtggatccgatatcaactagatcttgaga

SEQ ID NO: 1623 - DNA, 170 bp, Artificial sequence
  Casp8.45_Smad4.39
  crRNA array
cgatttcttggctttatatatcttgtggaaaggacgaaacaccgtaatttctactaagtgtagatctaccgagatcctgtgaatgtaatttctactaagtgtagatagtcaaacgcatactgacaattttttaagcttggcgtggatccgatatcaactagatcttgaga

SEQ ID NO: 1624 - DNA, 170 bp, Artificial sequence
  Casp8.45_Stag2.1409
  crRNA array
cgatttcttggctttatatatcttgtggaaaggacgaaacaccgtaatttctactaagtgtagatctaccgagatcctgtgaatgtaatttctactaagtgtagatgctaataactgcggaagggcttttttaagcttggcgtggatccgatatcaactagatcttgaga

SEQ ID NO: 1625 - DNA, 170 bp, Artificial sequence
  Casp8.45_Stag2.4401
  crRNA array
cgatttcttggctttatatatcttgtggaaaggacgaaacaccgtaatttctactaagtgtagatctaccgagatcctgtgaatgtaatttctactaagtgtagattaatcgtccagtggtgtatattttttaagcttggcgtggatccgatatcaactagatcttgaga

SEQ ID NO: 1626 - DNA, 170 bp, Artificial sequence
  Casp8.45_Tbl1xr1.1
  crRNA array
cgatttcttggctttatatatcttgtggaaaggacgaaacaccgtaatttctactaagtgtagatctaccgagatcctgtgaatgtaatttctactaagtgtagatggatgcgcatactggtgaagttttttaagcttggcgtggatccgatatcaactagatcttgaga

SEQ ID NO: 1627 - DNA, 170 bp, Artificial sequence
  Casp8.45_Tbl1xr1.83
  crRNA array
cgatttcttggctttatatatcttgtggaaaggacgaaacaccgtaatttctactaagtgtagatctaccgagatcctgtgaatgtaatttctactaagtgtagatatggtcgacccatcgagtctttttttaagcttggcgtggatccgatatcaactagatcttgaga

SEQ ID NO: 1628 - DNA, 170 bp, Artificial sequence
  Casp8.45_Tgfbr2.290
  crRNA array
cgatttcttggctttatatatcttgtggaaaggacgaaacaccgtaatttctactaagtgtagatctaccgagatcctgtgaatgtaatttctactaagtgtagatcctctcggcgcccgggtaaattttttaagcttggcgtggatccgatatcaactagatcttgaga

SEQ ID NO: 1629 - DNA, 170 bp, Artificial sequence
  Casp8.45_Tgfbr2.292
  crRNA array
cgatttcttggctttatatatcttgtggaaaggacgaaacaccgtaatttctactaagtgtagatctaccgagatcctgtgaatgtaatttctactaagtgtagatcccgggcgccgagagggaaattttttaagcttggcgtggatccgatatcaactagatcttgaga

SEQ ID NO: 1630 - DNA, 170 bp, Artificial sequence
  Casp8.45_Trp53.4
  crRNA array
cgatttcttggctttatatatcttgtggaaaggacgaaacaccgtaatttctactaagtgtagatctaccgagatcctgtgaatgtaatttctactaagtgtagatccctgaactgcccccagggattttttaagcttggcgtggatccgatatcaactagatcttgaga

SEQ ID NO: 1631 - DNA, 170 bp, Artificial sequence
  Casp8.45_Trp53.528
  crRNA array
cgatttcttggctttatatatcttgtggaaaggacgaaacaccgtaatttctactaagtgtagatctaccgagatcctgtgaatgtaatttctactaagtgtagatgctgggccagcagagacctgttttttaagcttggcgtggatccgatatcaactagatcttgaga

SEQ ID NO: 1632 - DNA, 170 bp, Artificial sequence
  Casp8.45_Vhl.1
  crRNA array
cgatttcttggctttatatatcttgtggaaaggacgaaacaccgtaatttctactaagtgtagatctaccgagatcctgtgaatgtaatttctactaagtgtagatagggctcccggcggccatttttttttaagcttggcgtggatccgatatcaactagatcttgaga

SEQ ID NO: 1633 - DNA, 170 bp, Artificial sequence
  Casp8.45_Vhl.151
  crRNA array
cgatttcttggctttatatatcttgtggaaaggacgaaacaccgtaatttctactaagtgtagatctaccgagatcctgtgaatgtaatttctactaagtgtagattagagcactcacccgagggattttttaagcttggcgtggatccgatatcaactagatcttgaga

SEQ ID NO: 1634 - DNA, 170 bp, Artificial sequence
  Casp8.45_Zc3h13.1387
  crRNA array
cgatttcttggctttatatatcttgtggaaaggacgaaacaccgtaatttctactaagtgtagatctaccgagatcctgtgaatgtaatttctactaagtgtagatgtgacgccggtcatgtgactttttttaagcttggcgtggatccgatatcaactagatcttgaga

SEQ ID NO: 1635 - DNA, 170 bp, Artificial sequence
  Casp8.45_Zc3h13.1777
  crRNA array
cgatttcttggctttatatatcttgtggaaaggacgaaacaccgtaatttctactaagtgtagatctaccgagatcctgtgaatgtaatttctactaagtgtagatgatgctgccagtgtagcggcttttttaagcttggcgtggatccgatatcaactagatcttgaga

SEQ ID NO: 1636 - DNA, 170 bp, Artificial sequence
  Casp8.54_Acvr2a.155
  crRNA array
cgatttcttggctttatatatcttgtggaaaggacgaaacaccgtaatttctactaagtgtagatcagtgcagtcgtcgtaagattaatttctactaagtgtagatggacctggctaatcaagtatttttttaagcttggcgtggatccgatatcaactagatcttgaga

SEQ ID NO: 1637 - DNA, 170 bp, Artificial sequence
  Casp8.54_Acvr2a.70
  crRNA array
cgatttcttggctttatatatcttgtggaaaggacgaaacaccgtaatttctactaagtgtagatcagtgcagtcgtcgtaagattaatttctactaagtgtagatcccgaggcgccggagaagccttttttaagcttggcgtggatccgatatcaactagatcttgaga

SEQ ID NO: 1638 - DNA, 170 bp, Artificial sequence
  Casp8.54_Apc.21
  crRNA array
cgatttcttggctttatatatcttgtggaaaggacgaaacaccgtaatttctactaagtgtagatcagtgcagtcgtcgtaagattaatttctactaagtgtagatgtgatccacacgtgtagctgttttttaagcttggcgtggatccgatatcaactagatcttgaga

SEQ ID NO: 1639 - DNA, 170 bp, Artificial sequence
  Casp8.54_Apc.867
  crRNA array
cgatttcttggctttatatatcttgtggaaaggacgaaacaccgtaatttctactaagtgtagatcagtgcagtcgtcgtaagattaatttctactaagtgtagatcagtcccaggcggcggaagcttttttaagcttggcgtggatccgatatcaactagatcttgaga

SEQ ID NO: 1640 - DNA, 170 bp, Artificial sequence
  Casp8.54_Arid1a.2
  crRNA array
cgatttcttggctttatatatcttgtggaaaggacgaaacaccgtaatttctactaagtgtagatcagtgcagtcgtcgtaagattaatttctactaagtgtagatcccgcgcccccgtcctggggttttttaagcttggcgtggatccgatatcaactagatcttgaga

SEQ ID NO: 1641 - DNA, 170 bp, Artificial sequence
  Casp8.54_Arid1a.5
  crRNA array
cgatttcttggctttatatatcttgtggaaaggacgaaacaccgtaatttctactaagtgtagatcagtgcagtcgtcgtaagattaatttctactaagtgtagatcccgcgctcggccgctgccgttttttaagcttggcgtggatccgatatcaactagatcttgaga

SEQ ID NO: 1642 - DNA, 170 bp, Artificial sequence
  Casp8.54_Arid2.166
  crRNA array
cgatttcttggctttatatatcttgtggaaaggacgaaacaccgtaatttctactaagtgtagatcagtgcagtcgtcgtaagattaatttctactaagtgtagataaccgcgatctgggttttttttttttaagcttggcgtggatccgatatcaactagatcttgaga

SEQ ID NO: 1643 - DNA, 170 bp, Artificial sequence
  Casp8.54_Arid2.172
  crRNA array
cgatttcttggctttatatatcttgtggaaaggacgaaacaccgtaatttctactaagtgtagatcagtgcagtcgtcgtaagattaatttctactaagtgtagatctggacgagctgcggcagttttttttaagcttggcgtggatccgatatcaactagatcttgaga

SEQ ID NO: 1644 - DNA, 170 bp, Artificial sequence
  Casp8.54_Atm.120
  crRNA array
cgatttcttggctttatatatcttgtggaaaggacgaaacaccgtaatttctactaagtgtagatcagtgcagtcgtcgtaagattaatttctactaagtgtagatgacaggtagtcggcagctaattttttaagcttggcgtggatccgatatcaactagatcttgaga

SEQ ID NO: 1645 - DNA, 170 bp, Artificial sequence
  Casp8.54_Atm.997
  crRNA array
cgatttcttggctttatatatcttgtggaaaggacgaaacaccgtaatttctactaagtgtagatcagtgcagtcgtcgtaagattaatttctactaagtgtagatgagaaagtctccgaatcgttttttttaagcttggcgtggatccgatatcaactagatcttgaga

SEQ ID NO: 1646 - DNA, 170 bp, Artificial sequence
  Casp8.54_Atrx.249
  crRNA array
cgatttcttggctttatatatcttgtggaaaggacgaaacaccgtaatttctactaagtgtagatcagtgcagtcgtcgtaagattaatttctactaagtgtagattagccagtcgctcatatctcttttttaagcttggcgtggatccgatatcaactagatcttgaga

SEQ ID NO: 1647 - DNA, 170 bp, Artificial sequence
  Casp8.54_Atrx.251
  crRNA array
cgatttcttggctttatatatcttgtggaaaggacgaaacaccgtaatttctactaagtgtagatcagtgcagtcgtcgtaagattaatttctactaagtgtagatgccagtcgctcatatctctgttttttaagcttggcgtggatccgatatcaactagatcttgaga

SEQ ID NO: 1648 - DNA, 170 bp, Artificial sequence
  Casp8.54_Bcor.203
  crRNA array
cgatttcttggctttatatatcttgtggaaaggacgaaacaccgtaatttctactaagtgtagatcagtgcagtcgtcgtaagattaatttctactaagtgtagatccccggagcggagtccaggcttttttaagcttggcgtggatccgatatcaactagatcttgaga

SEQ ID NO: 1649 - DNA, 170 bp, Artificial sequence
  Casp8.54_Bcor.475
  crRNA array
cgatttcttggctttatatatcttgtggaaaggacgaaacaccgtaatttctactaagtgtagatcagtgcagtcgtcgtaagattaatttctactaagtgtagattgcaacccctctgtatgggattttttaagcttggcgtggatccgatatcaactagatcttgaga

SEQ ID NO: 1650 - DNA, 170 bp, Artificial sequence
  Casp8.54_Brca1.112
  crRNA array
cgatttcttggctttatatatcttgtggaaaggacgaaacaccgtaatttctactaagtgtagatcagtgcagtcgtcgtaagattaatttctactaagtgtagatctagacgctctgtggagactttttttaagcttggcgtggatccgatatcaactagatcttgaga

SEQ ID NO: 1651 - DNA, 170 bp, Artificial sequence
  Casp8.54_Brca1.53
  crRNA array
cgatttcttggctttatatatcttgtggaaaggacgaaacaccgtaatttctactaagtgtagatcagtgcagtcgtcgtaagattaatttctactaagtgtagataatgaggaggcgtcgatcatttttttaagcttggcgtggatccgatatcaactagatcttgaga

SEQ ID NO: 1652 - DNA, 170 bp, Artificial sequence
  Casp8.54_Cbwd1.84
  crRNA array
cgatttcttggctttatatatcttgtggaaaggacgaaacaccgtaatttctactaagtgtagatcagtgcagtcgtcgtaagattaatttctactaagtgtagatcacagcaggtaacatgccgcttttttaagcttggcgtggatccgatatcaactagatcttgaga

SEQ ID NO: 1653 - DNA, 170 bp, Artificial sequence
  Casp8.54_Cbwd1.85
  crRNA array
cgatttcttggctttatatatcttgtggaaaggacgaaacaccgtaatttctactaagtgtagatcagtgcagtcgtcgtaagattaatttctactaagtgtagatacagcaggtaacatgccgccttttttaagcttggcgtggatccgatatcaactagatcttgaga

SEQ ID NO: 1654 - DNA, 170 bp, Artificial sequence
  Casp8.54_Cdh1.387
  crRNA array
cgatttcttggctttatatatcttgtggaaaggacgaaacaccgtaatttctactaagtgtagatcagtgcagtcgtcgtaagattaatttctactaagtgtagatctcggcgtctgccgggtccgttttttaagcttggcgtggatccgatatcaactagatcttgaga

SEQ ID NO: 1655 - DNA, 170 bp, Artificial sequence
  Casp8.54_Cdh1.58
  crRNA array
cgatttcttggctttatatatcttgtggaaaggacgaaacaccgtaatttctactaagtgtagatcagtgcagtcgtcgtaagattaatttctactaagtgtagatctcgtccgcgcccgggactcttttttaagcttggcgtggatccgatatcaactagatcttgaga

SEQ ID NO: 1656 - DNA, 170 bp, Artificial sequence
  Casp8.54_Cdkn2a.647
  crRNA array
cgatttcttggctttatatatcttgtggaaaggacgaaacaccgtaatttctactaagtgtagatcagtgcagtcgtcgtaagattaatttctactaagtgtagatgcaatcacgggagggagcagttttttaagcttggcgtggatccgatatcaactagatcttgaga

SEQ ID NO: 1657 - DNA, 170 bp, Artificial sequence
  Casp8.54_Cdkn2a.648
  crRNA array
cgatttcttggctttatatatcttgtggaaaggacgaaacaccgtaatttctactaagtgtagatcagtgcagtcgtcgtaagattaatttctactaagtgtagatcaatcacgggagggagcagattttttaagcttggcgtggatccgatatcaactagatcttgaga

SEQ ID NO: 1658 - DNA, 170 bp, Artificial sequence
  Casp8.54_Cic.162
  crRNA array
cgatttcttggctttatatatcttgtggaaaggacgaaacaccgtaatttctactaagtgtagatcagtgcagtcgtcgtaagattaatttctactaagtgtagatcgcaggcgcgcccggcggagttttttaagcttggcgtggatccgatatcaactagatcttgaga

SEQ ID NO: 1659 - DNA, 170 bp, Artificial sequence
  Casp8.54_Cic.164
  crRNA array
cgatttcttggctttatatatcttgtggaaaggacgaaacaccgtaatttctactaagtgtagatcagtgcagtcgtcgtaagattaatttctactaagtgtagatcgggccctgggccggcggctttttttaagcttggcgtggatccgatatcaactagatcttgaga

SEQ ID NO: 1660 - DNA, 170 bp, Artificial sequence
  Casp8.54_Ctcf.229
  crRNA array
cgatttcttggctttatatatcttgtggaaaggacgaaacaccgtaatttctactaagtgtagatcagtgcagtcgtcgtaagattaatttctactaagtgtagatggctggtggctgatagtctgttttttaagcttggcgtggatccgatatcaactagatcttgaga

SEQ ID NO: 1661 - DNA, 170 bp, Artificial sequence
  Casp8.54_Ctcf.809
  crRNA array
cgatttcttggctttatatatcttgtggaaaggacgaaacaccgtaatttctactaagtgtagatcagtgcagtcgtcgtaagattaatttctactaagtgtagataagcgctatcatgatcccaattttttaagcttggcgtggatccgatatcaactagatcttgaga

SEQ ID NO: 1662 - DNA, 170 bp, Artificial sequence
  Casp8.54_Elf3.826
  crRNA array
cgatttcttggctttatatatcttgtggaaaggacgaaacaccgtaatttctactaagtgtagatcagtgcagtcgtcgtaagattaatttctactaagtgtagattccgagacatcctaatccacttttttaagcttggcgtggatccgatatcaactagatcttgaga

SEQ ID NO: 1663 - DNA, 170 bp, Artificial sequence
  Casp8.54_Elf3.983
  crRNA array
cgatttcttggctttatatatcttgtggaaaggacgaaacaccgtaatttctactaagtgtagatcagtgcagtcgtcgtaagattaatttctactaagtgtagattaggccccctaactggaccattttttaagcttggcgtggatccgatatcaactagatcttgaga

SEQ ID NO: 1664 - DNA, 170 bp, Artificial sequence
  Casp8.54_Ep300.310
  crRNA array
cgatttcttggctttatatatcttgtggaaaggacgaaacaccgtaatttctactaagtgtagatcagtgcagtcgtcgtaagattaatttctactaagtgtagatatggtacgacagtgaggaagttttttaagcttggcgtggatccgatatcaactagatcttgaga

SEQ ID NO: 1665 - DNA, 170 bp, Artificial sequence
  Casp8.54_Ep300.587
  crRNA array
cgatttcttggctttatatatcttgtggaaaggacgaaacaccgtaatttctactaagtgtagatcagtgcagtcgtcgtaagattaatttctactaagtgtagatcgccccggggcccccaaccattttttaagcttggcgtggatccgatatcaactagatcttgaga

SEQ ID NO: 1666 - DNA, 170 bp, Artificial sequence
  Casp8.54_Epha2.126
  crRNA array
cgatttcttggctttatatatcttgtggaaaggacgaaacaccgtaatttctactaagtgtagatcagtgcagtcgtcgtaagattaatttctactaagtgtagatcctgtgccgccgcggccgccttttttaagcttggcgtggatccgatatcaactagatcttgaga

SEQ ID NO: 1667 - DNA, 170 bp, Artificial sequence
  Casp8.54_Epha2.5
  crRNA array
cgatttcttggctttatatatcttgtggaaaggacgaaacaccgtaatttctactaagtgtagatcagtgcagtcgtcgtaagattaatttctactaagtgtagatcatgagctggcgccacccggttttttaagcttggcgtggatccgatatcaactagatcttgaga

SEQ ID NO: 1668 - DNA, 170 bp, Artificial sequence
  Casp8.54_Fat1.105
  crRNA array
cgatttcttggctttatatatcttgtggaaaggacgaaacaccgtaatttctactaagtgtagatcagtgcagtcgtcgtaagattaatttctactaagtgtagataactcgaggtgacaacaagtttttttaagcttggcgtggatccgatatcaactagatcttgaga

SEQ ID NO: 1669 - DNA, 170 bp, Artificial sequence
  Casp8.54_Fat1.122
  crRNA array
cgatttcttggctttatatatcttgtggaaaggacgaaacaccgtaatttctactaagtgtagatcagtgcagtcgtcgtaagattaatttctactaagtgtagatccatcgacatggaaacgggattttttaagcttggcgtggatccgatatcaactagatcttgaga

SEQ ID NO: 1670 - DNA, 170 bp, Artificial sequence
  Casp8.54_Fbxw7.21
  crRNA array
cgatttcttggctttatatatcttgtggaaaggacgaaacaccgtaatttctactaagtgtagatcagtgcagtcgtcgtaagattaatttctactaagtgtagattaatgtgccgtagaaacccattttttaagcttggcgtggatccgatatcaactagatcttgaga

SEQ ID NO: 1671 - DNA, 170 bp, Artificial sequence
  Casp8.54_Fbxw7.23
  crRNA array
cgatttcttggctttatatatcttgtggaaaggacgaaacaccgtaatttctactaagtgtagatcagtgcagtcgtcgtaagattaatttctactaagtgtagatatgtgccgtagaaacccatattttttaagcttggcgtggatccgatatcaactagatcttgaga

SEQ ID NO: 1672 - DNA, 170 bp, Artificial sequence
  Casp8.54_Gata3.34
  crRNA array
cgatttcttggctttatatatcttgtggaaaggacgaaacaccgtaatttctactaagtgtagatcagtgcagtcgtcgtaagattaatttctactaagtgtagatctaaactatcccgcaaagatttttttaagcttggcgtggatccgatatcaactagatcttgaga

SEQ ID NO: 1673 - DNA, 170 bp, Artificial sequence
  Casp8.54_Gata3.47
  crRNA array
cgatttcttggctttatatatcttgtggaaaggacgaaacaccgtaatttctactaagtgtagatcagtgcagtcgtcgtaagattaatttctactaagtgtagatcgtagtaggacgggacgtggttttttaagcttggcgtggatccgatatcaactagatcttgaga

SEQ ID NO: 1674 - DNA, 170 bp, Artificial sequence
  Casp8.54_H2-Q2.1
  crRNA array
cgatttcttggctttatatatcttgtggaaaggacgaaacaccgtaatttctactaagtgtagatcagtgcagtcgtcgtaagattaatttctactaagtgtagatagggcggccaccaacagcagttttttaagcttggcgtggatccgatatcaactagatcttgaga

SEQ ID NO: 1675 - DNA, 170 bp, Artificial sequence
  Casp8.54_H2-Q2.2
  crRNA array
cgatttcttggctttatatatcttgtggaaaggacgaaacaccgtaatttctactaagtgtagatcagtgcagtcgtcgtaagattaatttctactaagtgtagattaacctgcgcccgctgctgattttttaagcttggcgtggatccgatatcaactagatcttgaga

SEQ ID NO: 1676 - DNA, 170 bp, Artificial sequence
  Casp8.54_Kdm5c.1878
  crRNA array
cgatttcttggctttatatatcttgtggaaaggacgaaacaccgtaatttctactaagtgtagatcagtgcagtcgtcgtaagattaatttctactaagtgtagatagagcacggcacccgcccccttttttaagcttggcgtggatccgatatcaactagatcttgaga

SEQ ID NO: 1677 - DNA, 170 bp, Artificial sequence
  Casp8.54_Kdm5c.1879
  crRNA array
cgatttcttggctttatatatcttgtggaaaggacgaaacaccgtaatttctactaagtgtagatcagtgcagtcgtcgtaagattaatttctactaagtgtagatgagcacggcacccgccccccttttttaagcttggcgtggatccgatatcaactagatcttgaga

SEQ ID NO: 1678 - DNA, 170 bp, Artificial sequence
  Casp8.54_Kdm6a.56
  crRNA array
cgatttcttggctttatatatcttgtggaaaggacgaaacaccgtaatttctactaagtgtagatcagtgcagtcgtcgtaagattaatttctactaagtgtagattcgctgccgcctctcgcggcttttttaagcttggcgtggatccgatatcaactagatcttgaga

SEQ ID NO: 1679 - DNA, 170 bp, Artificial sequence
  Casp8.54_Kdm6a.57
  crRNA array
cgatttcttggctttatatatcttgtggaaaggacgaaacaccgtaatttctactaagtgtagatcagtgcagtcgtcgtaagattaatttctactaagtgtagatcgctgccgcctctcgcggcattttttaagcttggcgtggatccgatatcaactagatcttgaga

SEQ ID NO: 1680 - DNA, 170 bp, Artificial sequence
  Casp8.54_Kmt2b.265
  crRNA array
cgatttcttggctttatatatcttgtggaaaggacgaaacaccgtaatttctactaagtgtagatcagtgcagtcgtcgtaagattaatttctactaagtgtagatccccaagtgaagcccacctgttttttaagcttggcgtggatccgatatcaactagatcttgaga

SEQ ID NO: 1681 - DNA, 170 bp, Artificial sequence
  Casp8.54_Kmt2b.298
  crRNA array
cgatttcttggctttatatatcttgtggaaaggacgaaacaccgtaatttctactaagtgtagatcagtgcagtcgtcgtaagattaatttctactaagtgtagattccggcagggaccggctggcttttttaagcttggcgtggatccgatatcaactagatcttgaga

SEQ ID NO: 1682 - DNA, 170 bp, Artificial sequence
  Casp8.54_Kmt2c.1962
  crRNA array
cgatttcttggctttatatatcttgtggaaaggacgaaacaccgtaatttctactaagtgtagatcagtgcagtcgtcgtaagattaatttctactaagtgtagatgtgacgatctgtgccacaagttttttaagcttggcgtggatccgatatcaactagatcttgaga

SEQ ID NO: 1683 - DNA, 170 bp, Artificial sequence
  Casp8.54_Kmt2c.2236
  crRNA array
cgatttcttggctttatatatcttgtggaaaggacgaaacaccgtaatttctactaagtgtagatcagtgcagtcgtcgtaagattaatttctactaagtgtagatactcgacctccacctccctattttttaagcttggcgtggatccgatatcaactagatcttgaga

SEQ ID NO: 1684 - DNA, 170 bp, Artificial sequence
  Casp8.54_Kmt2d.316
  crRNA array
cgatttcttggctttatatatcttgtggaaaggacgaaacaccgtaatttctactaagtgtagatcagtgcagtcgtcgtaagattaatttctactaagtgtagatactccaggccacccaggtggttttttaagcttggcgtggatccgatatcaactagatcttgaga

SEQ ID NO: 1685 - DNA, 170 bp, Artificial sequence
  Casp8.54_Kmt2d.416
  crRNA array
cgatttcttggctttatatatcttgtggaaaggacgaaacaccgtaatttctactaagtgtagatcagtgcagtcgtcgtaagattaatttctactaagtgtagattaaacccccgggggaagggtttttttaagcttggcgtggatccgatatcaactagatcttgaga

SEQ ID NO: 1686 - DNA, 170 bp, Artificial sequence
  Casp8.54_Map2k4.119
  crRNA array
cgatttcttggctttatatatcttgtggaaaggacgaaacaccgtaatttctactaagtgtagatcagtgcagtcgtcgtaagattaatttctactaagtgtagattgctgtgtgggcggccacatttttttaagcttggcgtggatccgatatcaactagatcttgaga

SEQ ID NO: 1687 - DNA, 170 bp, Artificial sequence
  Casp8.54_Map2k4.1261
  crRNA array
cgatttcttggctttatatatcttgtggaaaggacgaaacaccgtaatttctactaagtgtagatcagtgcagtcgtcgtaagattaatttctactaagtgtagatgatgtagtaatgcggagtagttttttaagcttggcgtggatccgatatcaactagatcttgaga

SEQ ID NO: 1688 - DNA, 170 bp, Artificial sequence
  Casp8.54_Map3k1.235
  crRNA array
cgatttcttggctttatatatcttgtggaaaggacgaaacaccgtaatttctactaagtgtagatcagtgcagtcgtcgtaagattaatttctactaagtgtagataaaacgctactgatcgatcgttttttaagcttggcgtggatccgatatcaactagatcttgaga

SEQ ID NO: 1689 - DNA, 170 bp, Artificial sequence
  Casp8.54_Map3k1.3838
  crRNA array
cgatttcttggctttatatatcttgtggaaaggacgaaacaccgtaatttctactaagtgtagatcagtgcagtcgtcgtaagattaatttctactaagtgtagatccaacaacagggccccactattttttaagcttggcgtggatccgatatcaactagatcttgaga

SEQ ID NO: 1690 - DNA, 170 bp, Artificial sequence
  Casp8.54_Mga.1655
  crRNA array
cgatttcttggctttatatatcttgtggaaaggacgaaacaccgtaatttctactaagtgtagatcagtgcagtcgtcgtaagattaatttctactaagtgtagatcgagaagtggagagcatattttttttaagcttggcgtggatccgatatcaactagatcttgaga

SEQ ID NO: 1691 - DNA, 170 bp, Artificial sequence
  Casp8.54_Mga.93
  crRNA array
cgatttcttggctttatatatcttgtggaaaggacgaaacaccgtaatttctactaagtgtagatcagtgcagtcgtcgtaagattaatttctactaagtgtagatgagaaggctccccataatgtttttttaagcttggcgtggatccgatatcaactagatcttgaga

SEQ ID NO: 1692 - DNA, 170 bp, Artificial sequence
  Casp8.54_Nf1.746
  crRNA array
cgatttcttggctttatatatcttgtggaaaggacgaaacaccgtaatttctactaagtgtagatcagtgcagtcgtcgtaagattaatttctactaagtgtagattaagcataatgatgatgccattttttaagcttggcgtggatccgatatcaactagatcttgaga

SEQ ID NO: 1693 - DNA, 170 bp, Artificial sequence
  Casp8.54_Nf1.97
  crRNA array
cgatttcttggctttatatatcttgtggaaaggacgaaacaccgtaatttctactaagtgtagatcagtgcagtcgtcgtaagattaatttctactaagtgtagatagcccgctacatgctgatgcttttttaagcttggcgtggatccgatatcaactagatcttgaga

SEQ ID NO: 1694 - DNA, 170 bp, Artificial sequence
  Casp8.54_Nf2.356
  crRNA array
cgatttcttggctttatatatcttgtggaaaggacgaaacaccgtaatttctactaagtgtagatcagtgcagtcgtcgtaagattaatttctactaagtgtagatcggagtcatctgatagagatttttttaagcttggcgtggatccgatatcaactagatcttgaga

SEQ ID NO: 1695 - DNA, 170 bp, Artificial sequence
  Casp8.54_Nf2.768
  crRNA array
cgatttcttggctttatatatcttgtggaaaggacgaaacaccgtaatttctactaagtgtagatcagtgcagtcgtcgtaagattaatttctactaagtgtagatccgaagccccagtgtccggcttttttaagcttggcgtggatccgatatcaactagatcttgaga

SEQ ID NO: 1696 - DNA, 170 bp, Artificial sequence
  Casp8.54_Notch1.1849
  crRNA array
cgatttcttggctttatatatcttgtggaaaggacgaaacaccgtaatttctactaagtgtagatcagtgcagtcgtcgtaagattaatttctactaagtgtagatctggcgggtgggcggcgctgttttttaagcttggcgtggatccgatatcaactagatcttgaga

SEQ ID NO: 1697 - DNA, 170 bp, Artificial sequence
  Casp8.54_Notch1.649
  crRNA array
cgatttcttggctttatatatcttgtggaaaggacgaaacaccgtaatttctactaagtgtagatcagtgcagtcgtcgtaagattaatttctactaagtgtagattgggccaacgatgccaggacttttttaagcttggcgtggatccgatatcaactagatcttgaga

SEQ ID NO: 1698 - DNA, 170 bp, Artificial sequence
  Casp8.54_Nsd1.70
  crRNA array
cgatttcttggctttatatatcttgtggaaaggacgaaacaccgtaatttctactaagtgtagatcagtgcagtcgtcgtaagattaatttctactaagtgtagatactggtgtggacgatgcagattttttaagcttggcgtggatccgatatcaactagatcttgaga

SEQ ID NO: 1699 - DNA, 170 bp, Artificial sequence
  Casp8.54_Nsd1.90
  crRNA array
cgatttcttggctttatatatcttgtggaaaggacgaaacaccgtaatttctactaagtgtagatcagtgcagtcgtcgtaagattaatttctactaagtgtagataggagctaacggcaagaatgttttttaagcttggcgtggatccgatatcaactagatcttgaga

SEQ ID NO: 1700 - DNA, 170 bp, Artificial sequence
  Casp8.54_Pbrm1.1236
  crRNA array
cgatttcttggctttatatatcttgtggaaaggacgaaacaccgtaatttctactaagtgtagatcagtgcagtcgtcgtaagattaatttctactaagtgtagatgccgataaaaccaacagccgttttttaagcttggcgtggatccgatatcaactagatcttgaga

SEQ ID NO: 1701 - DNA, 170 bp, Artificial sequence
  Casp8.54_Pbrm1.969
  crRNA array
cgatttcttggctttatatatcttgtggaaaggacgaaacaccgtaatttctactaagtgtagatcagtgcagtcgtcgtaagattaatttctactaagtgtagatgagccctaatgaacagctcattttttaagcttggcgtggatccgatatcaactagatcttgaga

SEQ ID NO: 1702 - DNA, 170 bp, Artificial sequence
  Casp8.54_Pik3r1.76
  crRNA array
cgatttcttggctttatatatcttgtggaaaggacgaaacaccgtaatttctactaagtgtagatcagtgcagtcgtcgtaagattaatttctactaagtgtagataaaacctatacggcccgcacttttttaagcttggcgtggatccgatatcaactagatcttgaga

SEQ ID NO: 1703 - DNA, 170 bp, Artificial sequence
  Casp8.54_Pik3r1.77
  crRNA array
cgatttcttggctttatatatcttgtggaaaggacgaaacaccgtaatttctactaagtgtagatcagtgcagtcgtcgtaagattaatttctactaagtgtagataaacctatacggcccgcactttttttaagcttggcgtggatccgatatcaactagatcttgaga

SEQ ID NO: 1704 - DNA, 170 bp, Artificial sequence
  Casp8.54_Pten.240
  crRNA array
cgatttcttggctttatatatcttgtggaaaggacgaaacaccgtaatttctactaagtgtagatcagtgcagtcgtcgtaagattaatttctactaagtgtagattgcatacgctatagctgcttttttttaagcttggcgtggatccgatatcaactagatcttgaga

SEQ ID NO: 1705 - DNA, 170 bp, Artificial sequence
  Casp8.54_Pten.265
  crRNA array
cgatttcttggctttatatatcttgtggaaaggacgaaacaccgtaatttctactaagtgtagatcagtgcagtcgtcgtaagattaatttctactaagtgtagataagcgtggtgcgtgacgcacttttttaagcttggcgtggatccgatatcaactagatcttgaga

SEQ ID NO: 1706 - DNA, 170 bp, Artificial sequence
  Casp8.54_Rasa1.1478
  crRNA array
cgatttcttggctttatatatcttgtggaaaggacgaaacaccgtaatttctactaagtgtagatcagtgcagtcgtcgtaagattaatttctactaagtgtagatcgataatggtctatgatgtcttttttaagcttggcgtggatccgatatcaactagatcttgaga

SEQ ID NO: 1707 - DNA, 170 bp, Artificial sequence
  Casp8.54_Rasa1.223
  crRNA array
cgatttcttggctttatatatcttgtggaaaggacgaaacaccgtaatttctactaagtgtagatcagtgcagtcgtcgtaagattaatttctactaagtgtagattccatggagtatcgtgctcgttttttaagcttggcgtggatccgatatcaactagatcttgaga

SEQ ID NO: 1708 - DNA, 170 bp, Artificial sequence
  Casp8.54_Rb1.211
  crRNA array
cgatttcttggctttatatatcttgtggaaaggacgaaacaccgtaatttctactaagtgtagatcagtgcagtcgtcgtaagattaatttctactaagtgtagattctgacatgatcgggtacctttttttaagcttggcgtggatccgatatcaactagatcttgaga

SEQ ID NO: 1709 - DNA, 170 bp, Artificial sequence
  Casp8.54_Rb1.394
  crRNA array
cgatttcttggctttatatatcttgtggaaaggacgaaacaccgtaatttctactaagtgtagatcagtgcagtcgtcgtaagattaatttctactaagtgtagatagaaatctcgaagcaggatcttttttaagcttggcgtggatccgatatcaactagatcttgaga

SEQ ID NO: 1710 - DNA, 170 bp, Artificial sequence
  Casp8.54_Rbm10.5
  crRNA array
cgatttcttggctttatatatcttgtggaaaggacgaaacaccgtaatttctactaagtgtagatcagtgcagtcgtcgtaagattaatttctactaagtgtagatacgaaacctgaacccacacattttttaagcttggcgtggatccgatatcaactagatcttgaga

SEQ ID NO: 1711 - DNA, 170 bp, Artificial sequence
  Casp8.54_Rbm10.6
  crRNA array
cgatttcttggctttatatatcttgtggaaaggacgaaacaccgtaatttctactaagtgtagatcagtgcagtcgtcgtaagattaatttctactaagtgtagatcgaaacctgaacccacacagttttttaagcttggcgtggatccgatatcaactagatcttgaga

SEQ ID NO: 1712 - DNA, 170 bp, Artificial sequence
  Casp8.54_Rnf43.1920
  crRNA array
cgatttcttggctttatatatcttgtggaaaggacgaaacaccgtaatttctactaagtgtagatcagtgcagtcgtcgtaagattaatttctactaagtgtagatatccccgtgccgtggactccttttttaagcttggcgtggatccgatatcaactagatcttgaga

SEQ ID NO: 1713 - DNA, 170 bp, Artificial sequence
  Casp8.54_Rnf43.39
  crRNA array
cgatttcttggctttatatatcttgtggaaaggacgaaacaccgtaatttctactaagtgtagatcagtgcagtcgtcgtaagattaatttctactaagtgtagatcaaggggatcactctgataattttttaagcttggcgtggatccgatatcaactagatcttgaga

SEQ ID NO: 1714 - DNA, 170 bp, Artificial sequence
  Casp8.54_Runx1.204
  crRNA array
cgatttcttggctttatatatcttgtggaaaggacgaaacaccgtaatttctactaagtgtagatcagtgcagtcgtcgtaagattaatttctactaagtgtagattaaataagtccagccgttttttttttaagcttggcgtggatccgatatcaactagatcttgaga

SEQ ID NO: 1715 - DNA, 170 bp, Artificial sequence
  Casp8.54_Runx1.81
  crRNA array
cgatttcttggctttatatatcttgtggaaaggacgaaacaccgtaatttctactaagtgtagatcagtgcagtcgtcgtaagattaatttctactaagtgtagataggacgcgtatgggaattttttttttaagcttggcgtggatccgatatcaactagatcttgaga

SEQ ID NO: 1716 - DNA, 170 bp, Artificial sequence
  Casp8.54_Setd2.143
  crRNA array
cgatttcttggctttatatatcttgtggaaaggacgaaacaccgtaatttctactaagtgtagatcagtgcagtcgtcgtaagattaatttctactaagtgtagatgcacaaccacaacagactggttttttaagcttggcgtggatccgatatcaactagatcttgaga

SEQ ID NO: 1717 - DNA, 170 bp, Artificial sequence
  Casp8.54_Setd2.508
  crRNA array
cgatttcttggctttatatatcttgtggaaaggacgaaacaccgtaatttctactaagtgtagatcagtgcagtcgtcgtaagattaatttctactaagtgtagattacgatcccgagcacccgacttttttaagcttggcgtggatccgatatcaactagatcttgaga

SEQ ID NO: 1718 - DNA, 170 bp, Artificial sequence
  Casp8.54_Smad4.3038
  crRNA array
cgatttcttggctttatatatcttgtggaaaggacgaaacaccgtaatttctactaagtgtagatcagtgcagtcgtcgtaagattaatttctactaagtgtagatatctgcggcagtgtcaccggttttttaagcttggcgtggatccgatatcaactagatcttgaga

SEQ ID NO: 1719 - DNA, 170 bp, Artificial sequence
  Casp8.54_Smad4.39
  crRNA array
cgatttcttggctttatatatcttgtggaaaggacgaaacaccgtaatttctactaagtgtagatcagtgcagtcgtcgtaagattaatttctactaagtgtagatagtcaaacgcatactgacaattttttaagcttggcgtggatccgatatcaactagatcttgaga

SEQ ID NO: 1720 - DNA, 170 bp, Artificial sequence
  Casp8.54_Stag2.1409
  crRNA array
cgatttcttggctttatatatcttgtggaaaggacgaaacaccgtaatttctactaagtgtagatcagtgcagtcgtcgtaagattaatttctactaagtgtagatgctaataactgcggaagggcttttttaagcttggcgtggatccgatatcaactagatcttgaga

SEQ ID NO: 1721 - DNA, 170 bp, Artificial sequence
  Casp8.54_Stag2.4401
  crRNA array
cgatttcttggctttatatatcttgtggaaaggacgaaacaccgtaatttctactaagtgtagatcagtgcagtcgtcgtaagattaatttctactaagtgtagattaatcgtccagtggtgtatattttttaagcttggcgtggatccgatatcaactagatcttgaga

SEQ ID NO: 1722 - DNA, 170 bp, Artificial sequence
  Casp8.54_Tbl1xr1.1
  crRNA array
cgatttcttggctttatatatcttgtggaaaggacgaaacaccgtaatttctactaagtgtagatcagtgcagtcgtcgtaagattaatttctactaagtgtagatggatgcgcatactggtgaagttttttaagcttggcgtggatccgatatcaactagatcttgaga

SEQ ID NO: 1723 - DNA, 170 bp, Artificial sequence
  Casp8.54_Tbl1xr1.83
  crRNA array
cgatttcttggctttatatatcttgtggaaaggacgaaacaccgtaatttctactaagtgtagatcagtgcagtcgtcgtaagattaatttctactaagtgtagatatggtcgacccatcgagtctttttttaagcttggcgtggatccgatatcaactagatcttgaga

SEQ ID NO: 1724 - DNA, 170 bp, Artificial sequence
  Casp8.54_Tgfbr2.290
  crRNA array
cgatttcttggctttatatatcttgtggaaaggacgaaacaccgtaatttctactaagtgtagatcagtgcagtcgtcgtaagattaatttctactaagtgtagatcctctcggcgcccgggtaaattttttaagcttggcgtggatccgatatcaactagatcttgaga

SEQ ID NO: 1725 - DNA, 170 bp, Artificial sequence
  Casp8.54_Tgfbr2.292
  crRNA array
cgatttcttggctttatatatcttgtggaaaggacgaaacaccgtaatttctactaagtgtagatcagtgcagtcgtcgtaagattaatttctactaagtgtagatcccgggcgccgagagggaaattttttaagcttggcgtggatccgatatcaactagatcttgaga

SEQ ID NO: 1726 - DNA, 170 bp, Artificial sequence
  Casp8.54_Trp53.4
  crRNA array
cgatttcttggctttatatatcttgtggaaaggacgaaacaccgtaatttctactaagtgtagatcagtgcagtcgtcgtaagattaatttctactaagtgtagatccctgaactgcccccagggattttttaagcttggcgtggatccgatatcaactagatcttgaga

SEQ ID NO: 1727 - DNA, 170 bp, Artificial sequence
  Casp8.54_Trp53.528
  crRNA array
cgatttcttggctttatatatcttgtggaaaggacgaaacaccgtaatttctactaagtgtagatcagtgcagtcgtcgtaagattaatttctactaagtgtagatgctgggccagcagagacctgttttttaagcttggcgtggatccgatatcaactagatcttgaga

SEQ ID NO: 1728 - DNA, 170 bp, Artificial sequence
  Casp8.54_Vhl.1
  crRNA array
cgatttcttggctttatatatcttgtggaaaggacgaaacaccgtaatttctactaagtgtagatcagtgcagtcgtcgtaagattaatttctactaagtgtagatagggctcccggcggccatttttttttaagcttggcgtggatccgatatcaactagatcttgaga

SEQ ID NO: 1729 - DNA, 170 bp, Artificial sequence
  Casp8.54_Vhl.151
  crRNA array
cgatttcttggctttatatatcttgtggaaaggacgaaacaccgtaatttctactaagtgtagatcagtgcagtcgtcgtaagattaatttctactaagtgtagattagagcactcacccgagggattttttaagcttggcgtggatccgatatcaactagatcttgaga

SEQ ID NO: 1730 - DNA, 170 bp, Artificial sequence
  Casp8.54_Zc3h13.1387
  crRNA array
cgatttcttggctttatatatcttgtggaaaggacgaaacaccgtaatttctactaagtgtagatcagtgcagtcgtcgtaagattaatttctactaagtgtagatgtgacgccggtcatgtgactttttttaagcttggcgtggatccgatatcaactagatcttgaga

SEQ ID NO: 1731 - DNA, 170 bp, Artificial sequence
  Casp8.54_Zc3h13.1777
  crRNA array
cgatttcttggctttatatatcttgtggaaaggacgaaacaccgtaatttctactaagtgtagatcagtgcagtcgtcgtaagattaatttctactaagtgtagatgatgctgccagtgtagcggcttttttaagcttggcgtggatccgatatcaactagatcttgaga

SEQ ID NO: 1732 - DNA, 170 bp, Artificial sequence
  Cbwd1.84_Acvr2a.155
  crRNA array
cgatttcttggctttatatatcttgtggaaaggacgaaacaccgtaatttctactaagtgtagatcacagcaggtaacatgccgctaatttctactaagtgtagatggacctggctaatcaagtatttttttaagcttggcgtggatccgatatcaactagatcttgaga

SEQ ID NO: 1733 - DNA, 170 bp, Artificial sequence
  Cbwd1.84_Acvr2a.70
  crRNA array
cgatttcttggctttatatatcttgtggaaaggacgaaacaccgtaatttctactaagtgtagatcacagcaggtaacatgccgctaatttctactaagtgtagatcccgaggcgccggagaagccttttttaagcttggcgtggatccgatatcaactagatcttgaga

SEQ ID NO: 1734 - DNA, 170 bp, Artificial sequence
  Cbwd1.84_Apc.21
  crRNA array
cgatttcttggctttatatatcttgtggaaaggacgaaacaccgtaatttctactaagtgtagatcacagcaggtaacatgccgctaatttctactaagtgtagatgtgatccacacgtgtagctgttttttaagcttggcgtggatccgatatcaactagatcttgaga

SEQ ID NO: 1735 - DNA, 170 bp, Artificial sequence
  Cbwd1.84_Apc.867
  crRNA array
cgatttcttggctttatatatcttgtggaaaggacgaaacaccgtaatttctactaagtgtagatcacagcaggtaacatgccgctaatttctactaagtgtagatcagtcccaggcggcggaagcttttttaagcttggcgtggatccgatatcaactagatcttgaga

SEQ ID NO: 1736 - DNA, 170 bp, Artificial sequence
  Cbwd1.84_Arid1a.2
  crRNA array
cgatttcttggctttatatatcttgtggaaaggacgaaacaccgtaatttctactaagtgtagatcacagcaggtaacatgccgctaatttctactaagtgtagatcccgcgcccccgtcctggggttttttaagcttggcgtggatccgatatcaactagatcttgaga

SEQ ID NO: 1737 - DNA, 170 bp, Artificial sequence
  Cbwd1.84_Arid1a.5
  crRNA array
cgatttcttggctttatatatcttgtggaaaggacgaaacaccgtaatttctactaagtgtagatcacagcaggtaacatgccgctaatttctactaagtgtagatcccgcgctcggccgctgccgttttttaagcttggcgtggatccgatatcaactagatcttgaga

SEQ ID NO: 1738 - DNA, 170 bp, Artificial sequence
  Cbwd1.84_Arid2.166
  crRNA array
cgatttcttggctttatatatcttgtggaaaggacgaaacaccgtaatttctactaagtgtagatcacagcaggtaacatgccgctaatttctactaagtgtagataaccgcgatctgggttttttttttttaagcttggcgtggatccgatatcaactagatcttgaga

SEQ ID NO: 1739 - DNA, 170 bp, Artificial sequence
  Cbwd1.84_Arid2.172
  crRNA array
cgatttcttggctttatatatcttgtggaaaggacgaaacaccgtaatttctactaagtgtagatcacagcaggtaacatgccgctaatttctactaagtgtagatctggacgagctgcggcagttttttttaagcttggcgtggatccgatatcaactagatcttgaga

SEQ ID NO: 1740 - DNA, 170 bp, Artificial sequence
  Cbwd1.84_Atm.120
  crRNA array
cgatttcttggctttatatatcttgtggaaaggacgaaacaccgtaatttctactaagtgtagatcacagcaggtaacatgccgctaatttctactaagtgtagatgacaggtagtcggcagctaattttttaagcttggcgtggatccgatatcaactagatcttgaga

SEQ ID NO: 1741 - DNA, 170 bp, Artificial sequence
  Cbwd1.84_Atm.997
  crRNA array
cgatttcttggctttatatatcttgtggaaaggacgaaacaccgtaatttctactaagtgtagatcacagcaggtaacatgccgctaatttctactaagtgtagatgagaaagtctccgaatcgttttttttaagcttggcgtggatccgatatcaactagatcttgaga

SEQ ID NO: 1742 - DNA, 170 bp, Artificial sequence
  Cbwd1.84_Atrx.249
  crRNA array
cgatttcttggctttatatatcttgtggaaaggacgaaacaccgtaatttctactaagtgtagatcacagcaggtaacatgccgctaatttctactaagtgtagattagccagtcgctcatatctcttttttaagcttggcgtggatccgatatcaactagatcttgaga

SEQ ID NO: 1743 - DNA, 170 bp, Artificial sequence
  Cbwd1.84_Atrx.251
  crRNA array
cgatttcttggctttatatatcttgtggaaaggacgaaacaccgtaatttctactaagtgtagatcacagcaggtaacatgccgctaatttctactaagtgtagatgccagtcgctcatatctctgttttttaagcttggcgtggatccgatatcaactagatcttgaga

SEQ ID NO: 1744 - DNA, 170 bp, Artificial sequence
  Cbwd1.84_Bcor.203
  crRNA array
cgatttcttggctttatatatcttgtggaaaggacgaaacaccgtaatttctactaagtgtagatcacagcaggtaacatgccgctaatttctactaagtgtagatccccggagcggagtccaggcttttttaagcttggcgtggatccgatatcaactagatcttgaga

SEQ ID NO: 1745 - DNA, 170 bp, Artificial sequence
  Cbwd1.84_Bcor.475
  crRNA array
cgatttcttggctttatatatcttgtggaaaggacgaaacaccgtaatttctactaagtgtagatcacagcaggtaacatgccgctaatttctactaagtgtagattgcaacccctctgtatgggattttttaagcttggcgtggatccgatatcaactagatcttgaga

SEQ ID NO: 1746 - DNA, 170 bp, Artificial sequence
  Cbwd1.84_Brca1.112
  crRNA array
cgatttcttggctttatatatcttgtggaaaggacgaaacaccgtaatttctactaagtgtagatcacagcaggtaacatgccgctaatttctactaagtgtagatctagacgctctgtggagactttttttaagcttggcgtggatccgatatcaactagatcttgaga

SEQ ID NO: 1747 - DNA, 170 bp, Artificial sequence
  Cbwd1.84_Brca1.53
  crRNA array
cgatttcttggctttatatatcttgtggaaaggacgaaacaccgtaatttctactaagtgtagatcacagcaggtaacatgccgctaatttctactaagtgtagataatgaggaggcgtcgatcatttttttaagcttggcgtggatccgatatcaactagatcttgaga

SEQ ID NO: 1748 - DNA, 170 bp, Artificial sequence
  Cbwd1.84_Casp8.45
  crRNA array
cgatttcttggctttatatatcttgtggaaaggacgaaacaccgtaatttctactaagtgtagatcacagcaggtaacatgccgctaatttctactaagtgtagatctaccgagatcctgtgaatgttttttaagcttggcgtggatccgatatcaactagatcttgaga

SEQ ID NO: 1749 - DNA, 170 bp, Artificial sequence
  Cbwd1.84_Casp8.54
  crRNA array
cgatttcttggctttatatatcttgtggaaaggacgaaacaccgtaatttctactaagtgtagatcacagcaggtaacatgccgctaatttctactaagtgtagatcagtgcagtcgtcgtaagatttttttaagcttggcgtggatccgatatcaactagatcttgaga

SEQ ID NO: 1750 - DNA, 170 bp, Artificial sequence
  Cbwd1.84_Cdh1.387
  crRNA array
cgatttcttggctttatatatcttgtggaaaggacgaaacaccgtaatttctactaagtgtagatcacagcaggtaacatgccgctaatttctactaagtgtagatctcggcgtctgccgggtccgttttttaagcttggcgtggatccgatatcaactagatcttgaga

SEQ ID NO: 1751 - DNA, 170 bp, Artificial sequence
  Cbwd1.84_Cdh1.58
  crRNA array
cgatttcttggctttatatatcttgtggaaaggacgaaacaccgtaatttctactaagtgtagatcacagcaggtaacatgccgctaatttctactaagtgtagatctcgtccgcgcccgggactcttttttaagcttggcgtggatccgatatcaactagatcttgaga

SEQ ID NO: 1752 - DNA, 170 bp, Artificial sequence
  Cbwd1.84_Cdkn2a.647
  crRNA array
cgatttcttggctttatatatcttgtggaaaggacgaaacaccgtaatttctactaagtgtagatcacagcaggtaacatgccgctaatttctactaagtgtagatgcaatcacgggagggagcagttttttaagcttggcgtggatccgatatcaactagatcttgaga

SEQ ID NO: 1753 - DNA, 170 bp, Artificial sequence
  Cbwd1.84_Cdkn2a.648
  crRNA array
cgatttcttggctttatatatcttgtggaaaggacgaaacaccgtaatttctactaagtgtagatcacagcaggtaacatgccgctaatttctactaagtgtagatcaatcacgggagggagcagattttttaagcttggcgtggatccgatatcaactagatcttgaga

SEQ ID NO: 1754 - DNA, 170 bp, Artificial sequence
  Cbwd1.84_Cic.162
  crRNA array
cgatttcttggctttatatatcttgtggaaaggacgaaacaccgtaatttctactaagtgtagatcacagcaggtaacatgccgctaatttctactaagtgtagatcgcaggcgcgcccggcggagttttttaagcttggcgtggatccgatatcaactagatcttgaga

SEQ ID NO: 1755 - DNA, 170 bp, Artificial sequence
  Cbwd1.84_Cic.164
  crRNA array
cgatttcttggctttatatatcttgtggaaaggacgaaacaccgtaatttctactaagtgtagatcacagcaggtaacatgccgctaatttctactaagtgtagatcgggccctgggccggcggctttttttaagcttggcgtggatccgatatcaactagatcttgaga

SEQ ID NO: 1756 - DNA, 170 bp, Artificial sequence
  Cbwd1.84_Ctcf.229
  crRNA array
cgatttcttggctttatatatcttgtggaaaggacgaaacaccgtaatttctactaagtgtagatcacagcaggtaacatgccgctaatttctactaagtgtagatggctggtggctgatagtctgttttttaagcttggcgtggatccgatatcaactagatcttgaga

SEQ ID NO: 1757 - DNA, 170 bp, Artificial sequence
  Cbwd1.84_Ctcf.809
  crRNA array
cgatttcttggctttatatatcttgtggaaaggacgaaacaccgtaatttctactaagtgtagatcacagcaggtaacatgccgctaatttctactaagtgtagataagcgctatcatgatcccaattttttaagcttggcgtggatccgatatcaactagatcttgaga

SEQ ID NO: 1758 - DNA, 170 bp, Artificial sequence
  Cbwd1.84_Elf3.826
  crRNA array
cgatttcttggctttatatatcttgtggaaaggacgaaacaccgtaatttctactaagtgtagatcacagcaggtaacatgccgctaatttctactaagtgtagattccgagacatcctaatccacttttttaagcttggcgtggatccgatatcaactagatcttgaga

SEQ ID NO: 1759 - DNA, 170 bp, Artificial sequence
  Cbwd1.84_Elf3.983
  crRNA array
cgatttcttggctttatatatcttgtggaaaggacgaaacaccgtaatttctactaagtgtagatcacagcaggtaacatgccgctaatttctactaagtgtagattaggccccctaactggaccattttttaagcttggcgtggatccgatatcaactagatcttgaga

SEQ ID NO: 1760 - DNA, 170 bp, Artificial sequence
  Cbwd1.84_Ep300.310
  crRNA array
cgatttcttggctttatatatcttgtggaaaggacgaaacaccgtaatttctactaagtgtagatcacagcaggtaacatgccgctaatttctactaagtgtagatatggtacgacagtgaggaagttttttaagcttggcgtggatccgatatcaactagatcttgaga

SEQ ID NO: 1761 - DNA, 170 bp, Artificial sequence
  Cbwd1.84_Ep300.587
  crRNA array
cgatttcttggctttatatatcttgtggaaaggacgaaacaccgtaatttctactaagtgtagatcacagcaggtaacatgccgctaatttctactaagtgtagatcgccccggggcccccaaccattttttaagcttggcgtggatccgatatcaactagatcttgaga

SEQ ID NO: 1762 - DNA, 170 bp, Artificial sequence
  Cbwd1.84_Epha2.126
  crRNA array
cgatttcttggctttatatatcttgtggaaaggacgaaacaccgtaatttctactaagtgtagatcacagcaggtaacatgccgctaatttctactaagtgtagatcctgtgccgccgcggccgccttttttaagcttggcgtggatccgatatcaactagatcttgaga

SEQ ID NO: 1763 - DNA, 170 bp, Artificial sequence
  Cbwd1.84_Epha2.5
  crRNA array
cgatttcttggctttatatatcttgtggaaaggacgaaacaccgtaatttctactaagtgtagatcacagcaggtaacatgccgctaatttctactaagtgtagatcatgagctggcgccacccggttttttaagcttggcgtggatccgatatcaactagatcttgaga

SEQ ID NO: 1764 - DNA, 170 bp, Artificial sequence
  Cbwd1.84_Fat1.105
  crRNA array
cgatttcttggctttatatatcttgtggaaaggacgaaacaccgtaatttctactaagtgtagatcacagcaggtaacatgccgctaatttctactaagtgtagataactcgaggtgacaacaagtttttttaagcttggcgtggatccgatatcaactagatcttgaga

SEQ ID NO: 1765 - DNA, 170 bp, Artificial sequence
  Cbwd1.84_Fat1.122
  crRNA array
cgatttcttggctttatatatcttgtggaaaggacgaaacaccgtaatttctactaagtgtagatcacagcaggtaacatgccgctaatttctactaagtgtagatccatcgacatggaaacgggattttttaagcttggcgtggatccgatatcaactagatcttgaga

SEQ ID NO: 1766 - DNA, 170 bp, Artificial sequence
  Cbwd1.84_Fbxw7.21
  crRNA array
cgatttcttggctttatatatcttgtggaaaggacgaaacaccgtaatttctactaagtgtagatcacagcaggtaacatgccgctaatttctactaagtgtagattaatgtgccgtagaaacccattttttaagcttggcgtggatccgatatcaactagatcttgaga

SEQ ID NO: 1767 - DNA, 170 bp, Artificial sequence
  Cbwd1.84_Fbxw7.23
  crRNA array
cgatttcttggctttatatatcttgtggaaaggacgaaacaccgtaatttctactaagtgtagatcacagcaggtaacatgccgctaatttctactaagtgtagatatgtgccgtagaaacccatattttttaagcttggcgtggatccgatatcaactagatcttgaga

SEQ ID NO: 1768 - DNA, 170 bp, Artificial sequence
  Cbwd1.84_Gata3.34
  crRNA array
cgatttcttggctttatatatcttgtggaaaggacgaaacaccgtaatttctactaagtgtagatcacagcaggtaacatgccgctaatttctactaagtgtagatctaaactatcccgcaaagatttttttaagcttggcgtggatccgatatcaactagatcttgaga

SEQ ID NO: 1769 - DNA, 170 bp, Artificial sequence
  Cbwd1.84_Gata3.47
  crRNA array
cgatttcttggctttatatatcttgtggaaaggacgaaacaccgtaatttctactaagtgtagatcacagcaggtaacatgccgctaatttctactaagtgtagatcgtagtaggacgggacgtggttttttaagcttggcgtggatccgatatcaactagatcttgaga

SEQ ID NO: 1770 - DNA, 170 bp, Artificial sequence
  Cbwd1.84_H2-Q2.1
  crRNA array
cgatttcttggctttatatatcttgtggaaaggacgaaacaccgtaatttctactaagtgtagatcacagcaggtaacatgccgctaatttctactaagtgtagatagggcggccaccaacagcagttttttaagcttggcgtggatccgatatcaactagatcttgaga

SEQ ID NO: 1771 - DNA, 170 bp, Artificial sequence
  Cbwd1.84_H2-Q2.2
  crRNA array
cgatttcttggctttatatatcttgtggaaaggacgaaacaccgtaatttctactaagtgtagatcacagcaggtaacatgccgctaatttctactaagtgtagattaacctgcgcccgctgctgattttttaagcttggcgtggatccgatatcaactagatcttgaga

SEQ ID NO: 1772 - DNA, 170 bp, Artificial sequence
  Cbwd1.84_Kdm5c.1878
  crRNA array
cgatttcttggctttatatatcttgtggaaaggacgaaacaccgtaatttctactaagtgtagatcacagcaggtaacatgccgctaatttctactaagtgtagatagagcacggcacccgcccccttttttaagcttggcgtggatccgatatcaactagatcttgaga

SEQ ID NO: 1773 - DNA, 170 bp, Artificial sequence
  Cbwd1.84_Kdm5c.1879
  crRNA array
cgatttcttggctttatatatcttgtggaaaggacgaaacaccgtaatttctactaagtgtagatcacagcaggtaacatgccgctaatttctactaagtgtagatgagcacggcacccgccccccttttttaagcttggcgtggatccgatatcaactagatcttgaga

SEQ ID NO: 1774 - DNA, 170 bp, Artificial sequence
  Cbwd1.84_Kdm6a.56
  crRNA array
cgatttcttggctttatatatcttgtggaaaggacgaaacaccgtaatttctactaagtgtagatcacagcaggtaacatgccgctaatttctactaagtgtagattcgctgccgcctctcgcggcttttttaagcttggcgtggatccgatatcaactagatcttgaga

SEQ ID NO: 1775 - DNA, 170 bp, Artificial sequence
  Cbwd1.84_Kdm6a.57
  crRNA array
cgatttcttggctttatatatcttgtggaaaggacgaaacaccgtaatttctactaagtgtagatcacagcaggtaacatgccgctaatttctactaagtgtagatcgctgccgcctctcgcggcattttttaagcttggcgtggatccgatatcaactagatcttgaga

SEQ ID NO: 1776 - DNA, 170 bp, Artificial sequence
  Cbwd1.84_Kmt2b.265
  crRNA array
cgatttcttggctttatatatcttgtggaaaggacgaaacaccgtaatttctactaagtgtagatcacagcaggtaacatgccgctaatttctactaagtgtagatccccaagtgaagcccacctgttttttaagcttggcgtggatccgatatcaactagatcttgaga

SEQ ID NO: 1777 - DNA, 170 bp, Artificial sequence
  Cbwd1.84_Kmt2b.298
  crRNA array
cgatttcttggctttatatatcttgtggaaaggacgaaacaccgtaatttctactaagtgtagatcacagcaggtaacatgccgctaatttctactaagtgtagattccggcagggaccggctggcttttttaagcttggcgtggatccgatatcaactagatcttgaga

SEQ ID NO: 1778 - DNA, 170 bp, Artificial sequence
  Cbwd1.84_Kmt2c.1962
  crRNA array
cgatttcttggctttatatatcttgtggaaaggacgaaacaccgtaatttctactaagtgtagatcacagcaggtaacatgccgctaatttctactaagtgtagatgtgacgatctgtgccacaagttttttaagcttggcgtggatccgatatcaactagatcttgaga

SEQ ID NO: 1779 - DNA, 170 bp, Artificial sequence
  Cbwd1.84_Kmt2c.2236
  crRNA array
cgatttcttggctttatatatcttgtggaaaggacgaaacaccgtaatttctactaagtgtagatcacagcaggtaacatgccgctaatttctactaagtgtagatactcgacctccacctccctattttttaagcttggcgtggatccgatatcaactagatcttgaga

SEQ ID NO: 1780 - DNA, 170 bp, Artificial sequence
  Cbwd1.84_Kmt2d.316
  crRNA array
cgatttcttggctttatatatcttgtggaaaggacgaaacaccgtaatttctactaagtgtagatcacagcaggtaacatgccgctaatttctactaagtgtagatactccaggccacccaggtggttttttaagcttggcgtggatccgatatcaactagatcttgaga

SEQ ID NO: 1781 - DNA, 170 bp, Artificial sequence
  Cbwd1.84_Kmt2d.416
  crRNA array
cgatttcttggctttatatatcttgtggaaaggacgaaacaccgtaatttctactaagtgtagatcacagcaggtaacatgccgctaatttctactaagtgtagattaaacccccgggggaagggtttttttaagcttggcgtggatccgatatcaactagatcttgaga

SEQ ID NO: 1782 - DNA, 170 bp, Artificial sequence
  Cbwd1.84_Map2k4.119
  crRNA array
cgatttcttggctttatatatcttgtggaaaggacgaaacaccgtaatttctactaagtgtagatcacagcaggtaacatgccgctaatttctactaagtgtagattgctgtgtgggcggccacatttttttaagcttggcgtggatccgatatcaactagatcttgaga

SEQ ID NO: 1783 - DNA, 170 bp, Artificial sequence
  Cbwd1.84_Map2k4.1261
  crRNA array
cgatttcttggctttatatatcttgtggaaaggacgaaacaccgtaatttctactaagtgtagatcacagcaggtaacatgccgctaatttctactaagtgtagatgatgtagtaatgcggagtagttttttaagcttggcgtggatccgatatcaactagatcttgaga

SEQ ID NO: 1784 - DNA, 170 bp, Artificial sequence
  Cbwd1.84_Map3k1.235
  crRNA array
cgatttcttggctttatatatcttgtggaaaggacgaaacaccgtaatttctactaagtgtagatcacagcaggtaacatgccgctaatttctactaagtgtagataaaacgctactgatcgatcgttttttaagcttggcgtggatccgatatcaactagatcttgaga

SEQ ID NO: 1785 - DNA, 170 bp, Artificial sequence
  Cbwd1.84_Map3k1.3838
  crRNA array
cgatttcttggctttatatatcttgtggaaaggacgaaacaccgtaatttctactaagtgtagatcacagcaggtaacatgccgctaatttctactaagtgtagatccaacaacagggccccactattttttaagcttggcgtggatccgatatcaactagatcttgaga

SEQ ID NO: 1786 - DNA, 170 bp, Artificial sequence
  Cbwd1.84_Mga.1655
  crRNA array
cgatttcttggctttatatatcttgtggaaaggacgaaacaccgtaatttctactaagtgtagatcacagcaggtaacatgccgctaatttctactaagtgtagatcgagaagtggagagcatattttttttaagcttggcgtggatccgatatcaactagatcttgaga

SEQ ID NO: 1787 - DNA, 170 bp, Artificial sequence
  Cbwd1.84_Mga.93
  crRNA array
cgatttcttggctttatatatcttgtggaaaggacgaaacaccgtaatttctactaagtgtagatcacagcaggtaacatgccgctaatttctactaagtgtagatgagaaggctccccataatgtttttttaagcttggcgtggatccgatatcaactagatcttgaga

SEQ ID NO: 1788 - DNA, 170 bp, Artificial sequence
  Cbwd1.84_Nf1.746
  crRNA array
cgatttcttggctttatatatcttgtggaaaggacgaaacaccgtaatttctactaagtgtagatcacagcaggtaacatgccgctaatttctactaagtgtagattaagcataatgatgatgccattttttaagcttggcgtggatccgatatcaactagatcttgaga

SEQ ID NO: 1789 - DNA, 170 bp, Artificial sequence
  Cbwd1.84_Nf1.97
  crRNA array
cgatttcttggctttatatatcttgtggaaaggacgaaacaccgtaatttctactaagtgtagatcacagcaggtaacatgccgctaatttctactaagtgtagatagcccgctacatgctgatgcttttttaagcttggcgtggatccgatatcaactagatcttgaga

SEQ ID NO: 1790 - DNA, 170 bp, Artificial sequence
  Cbwd1.84_Nf2.356
  crRNA array
cgatttcttggctttatatatcttgtggaaaggacgaaacaccgtaatttctactaagtgtagatcacagcaggtaacatgccgctaatttctactaagtgtagatcggagtcatctgatagagatttttttaagcttggcgtggatccgatatcaactagatcttgaga

SEQ ID NO: 1791 - DNA, 170 bp, Artificial sequence
  Cbwd1.84_Nf2.768
  crRNA array
cgatttcttggctttatatatcttgtggaaaggacgaaacaccgtaatttctactaagtgtagatcacagcaggtaacatgccgctaatttctactaagtgtagatccgaagccccagtgtccggcttttttaagcttggcgtggatccgatatcaactagatcttgaga

SEQ ID NO: 1792 - DNA, 170 bp, Artificial sequence
  Cbwd1.84_Notch1.1849
  crRNA array
cgatttcttggctttatatatcttgtggaaaggacgaaacaccgtaatttctactaagtgtagatcacagcaggtaacatgccgctaatttctactaagtgtagatctggcgggtgggcggcgctgttttttaagcttggcgtggatccgatatcaactagatcttgaga

SEQ ID NO: 1793 - DNA, 170 bp, Artificial sequence
  Cbwd1.84_Notch1.649
  crRNA array
cgatttcttggctttatatatcttgtggaaaggacgaaacaccgtaatttctactaagtgtagatcacagcaggtaacatgccgctaatttctactaagtgtagattgggccaacgatgccaggacttttttaagcttggcgtggatccgatatcaactagatcttgaga

SEQ ID NO: 1794 - DNA, 170 bp, Artificial sequence
  Cbwd1.84_Nsd1.70
  crRNA array
cgatttcttggctttatatatcttgtggaaaggacgaaacaccgtaatttctactaagtgtagatcacagcaggtaacatgccgctaatttctactaagtgtagatactggtgtggacgatgcagattttttaagcttggcgtggatccgatatcaactagatcttgaga

SEQ ID NO: 1795 - DNA, 170 bp, Artificial sequence
  Cbwd1.84_Nsd1.90
  crRNA array
cgatttcttggctttatatatcttgtggaaaggacgaaacaccgtaatttctactaagtgtagatcacagcaggtaacatgccgctaatttctactaagtgtagataggagctaacggcaagaatgttttttaagcttggcgtggatccgatatcaactagatcttgaga

SEQ ID NO: 1796 - DNA, 170 bp, Artificial sequence
  Cbwd1.84_Pbrm1.1236
  crRNA array
cgatttcttggctttatatatcttgtggaaaggacgaaacaccgtaatttctactaagtgtagatcacagcaggtaacatgccgctaatttctactaagtgtagatgccgataaaaccaacagccgttttttaagcttggcgtggatccgatatcaactagatcttgaga

SEQ ID NO: 1797 - DNA, 170 bp, Artificial sequence
  Cbwd1.84_Pbrm1.969
  crRNA array
cgatttcttggctttatatatcttgtggaaaggacgaaacaccgtaatttctactaagtgtagatcacagcaggtaacatgccgctaatttctactaagtgtagatgagccctaatgaacagctcattttttaagcttggcgtggatccgatatcaactagatcttgaga

SEQ ID NO: 1798 - DNA, 170 bp, Artificial sequence
  Cbwd1.84_Pik3r1.76
  crRNA array
cgatttcttggctttatatatcttgtggaaaggacgaaacaccgtaatttctactaagtgtagatcacagcaggtaacatgccgctaatttctactaagtgtagataaaacctatacggcccgcacttttttaagcttggcgtggatccgatatcaactagatcttgaga

SEQ ID NO: 1799 - DNA, 170 bp, Artificial sequence
  Cbwd1.84_Pik3r1.77
  crRNA array
cgatttcttggctttatatatcttgtggaaaggacgaaacaccgtaatttctactaagtgtagatcacagcaggtaacatgccgctaatttctactaagtgtagataaacctatacggcccgcactttttttaagcttggcgtggatccgatatcaactagatcttgaga

SEQ ID NO: 1800 - DNA, 170 bp, Artificial sequence
  Cbwd1.84_Pten.240
  crRNA array
cgatttcttggctttatatatcttgtggaaaggacgaaacaccgtaatttctactaagtgtagatcacagcaggtaacatgccgctaatttctactaagtgtagattgcatacgctatagctgcttttttttaagcttggcgtggatccgatatcaactagatcttgaga

SEQ ID NO: 1801 - DNA, 170 bp, Artificial sequence
  Cbwd1.84_Pten.265
  crRNA array
cgatttcttggctttatatatcttgtggaaaggacgaaacaccgtaatttctactaagtgtagatcacagcaggtaacatgccgctaatttctactaagtgtagataagcgtggtgcgtgacgcacttttttaagcttggcgtggatccgatatcaactagatcttgaga

SEQ ID NO: 1802 - DNA, 170 bp, Artificial sequence
  Cbwd1.84_Rasa1.1478
  crRNA array
cgatttcttggctttatatatcttgtggaaaggacgaaacaccgtaatttctactaagtgtagatcacagcaggtaacatgccgctaatttctactaagtgtagatcgataatggtctatgatgtcttttttaagcttggcgtggatccgatatcaactagatcttgaga

SEQ ID NO: 1803 - DNA, 170 bp, Artificial sequence
  Cbwd1.84_Rasa1.223
  crRNA array
cgatttcttggctttatatatcttgtggaaaggacgaaacaccgtaatttctactaagtgtagatcacagcaggtaacatgccgctaatttctactaagtgtagattccatggagtatcgtgctcgttttttaagcttggcgtggatccgatatcaactagatcttgaga

SEQ ID NO: 1804 - DNA, 170 bp, Artificial sequence
  Cbwd1.84_Rb1.211
  crRNA array
cgatttcttggctttatatatcttgtggaaaggacgaaacaccgtaatttctactaagtgtagatcacagcaggtaacatgccgctaatttctactaagtgtagattctgacatgatcgggtacctttttttaagcttggcgtggatccgatatcaactagatcttgaga

SEQ ID NO: 1805 - DNA, 170 bp, Artificial sequence
  Cbwd1.84_Rb1.394
  crRNA array
cgatttcttggctttatatatcttgtggaaaggacgaaacaccgtaatttctactaagtgtagatcacagcaggtaacatgccgctaatttctactaagtgtagatagaaatctcgaagcaggatcttttttaagcttggcgtggatccgatatcaactagatcttgaga

SEQ ID NO: 1806 - DNA, 170 bp, Artificial sequence
  Cbwd1.84_Rbm10.5
  crRNA array
cgatttcttggctttatatatcttgtggaaaggacgaaacaccgtaatttctactaagtgtagatcacagcaggtaacatgccgctaatttctactaagtgtagatacgaaacctgaacccacacattttttaagcttggcgtggatccgatatcaactagatcttgaga

SEQ ID NO: 1807 - DNA, 170 bp, Artificial sequence
  Cbwd1.84_Rbm10.6
  crRNA array
cgatttcttggctttatatatcttgtggaaaggacgaaacaccgtaatttctactaagtgtagatcacagcaggtaacatgccgctaatttctactaagtgtagatcgaaacctgaacccacacagttttttaagcttggcgtggatccgatatcaactagatcttgaga

SEQ ID NO: 1808 - DNA, 170 bp, Artificial sequence
  Cbwd1.84_Rnf43.1920
  crRNA array
cgatttcttggctttatatatcttgtggaaaggacgaaacaccgtaatttctactaagtgtagatcacagcaggtaacatgccgctaatttctactaagtgtagatatccccgtgccgtggactccttttttaagcttggcgtggatccgatatcaactagatcttgaga

SEQ ID NO: 1809 - DNA, 170 bp, Artificial sequence
  Cbwd1.84_Rnf43.39
  crRNA array
cgatttcttggctttatatatcttgtggaaaggacgaaacaccgtaatttctactaagtgtagatcacagcaggtaacatgccgctaatttctactaagtgtagatcaaggggatcactctgataattttttaagcttggcgtggatccgatatcaactagatcttgaga

SEQ ID NO: 1810 - DNA, 170 bp, Artificial sequence
  Cbwd1.84_Runx1.204
  crRNA array
cgatttcttggctttatatatcttgtggaaaggacgaaacaccgtaatttctactaagtgtagatcacagcaggtaacatgccgctaatttctactaagtgtagattaaataagtccagccgttttttttttaagcttggcgtggatccgatatcaactagatcttgaga

SEQ ID NO: 1811 - DNA, 170 bp, Artificial sequence
  Cbwd1.84_Runx1.81
  crRNA array
cgatttcttggctttatatatcttgtggaaaggacgaaacaccgtaatttctactaagtgtagatcacagcaggtaacatgccgctaatttctactaagtgtagataggacgcgtatgggaattttttttttaagcttggcgtggatccgatatcaactagatcttgaga

SEQ ID NO: 1812 - DNA, 170 bp, Artificial sequence
  Cbwd1.84_Setd2.143
  crRNA array
cgatttcttggctttatatatcttgtggaaaggacgaaacaccgtaatttctactaagtgtagatcacagcaggtaacatgccgctaatttctactaagtgtagatgcacaaccacaacagactggttttttaagcttggcgtggatccgatatcaactagatcttgaga

SEQ ID NO: 1813 - DNA, 170 bp, Artificial sequence
  Cbwd1.84_Setd2.508
  crRNA array
cgatttcttggctttatatatcttgtggaaaggacgaaacaccgtaatttctactaagtgtagatcacagcaggtaacatgccgctaatttctactaagtgtagattacgatcccgagcacccgacttttttaagcttggcgtggatccgatatcaactagatcttgaga

SEQ ID NO: 1814 - DNA, 170 bp, Artificial sequence
  Cbwd1.84_Smad4.3038
  crRNA array
cgatttcttggctttatatatcttgtggaaaggacgaaacaccgtaatttctactaagtgtagatcacagcaggtaacatgccgctaatttctactaagtgtagatatctgcggcagtgtcaccggttttttaagcttggcgtggatccgatatcaactagatcttgaga

SEQ ID NO: 1815 - DNA, 170 bp, Artificial sequence
  Cbwd1.84_Smad4.39
  crRNA array
cgatttcttggctttatatatcttgtggaaaggacgaaacaccgtaatttctactaagtgtagatcacagcaggtaacatgccgctaatttctactaagtgtagatagtcaaacgcatactgacaattttttaagcttggcgtggatccgatatcaactagatcttgaga

SEQ ID NO: 1816 - DNA, 170 bp, Artificial sequence
  Cbwd1.84_Stag2.1409
  crRNA array
cgatttcttggctttatatatcttgtggaaaggacgaaacaccgtaatttctactaagtgtagatcacagcaggtaacatgccgctaatttctactaagtgtagatgctaataactgcggaagggcttttttaagcttggcgtggatccgatatcaactagatcttgaga

SEQ ID NO: 1817 - DNA, 170 bp, Artificial sequence
  Cbwd1.84_Stag2.4401
  crRNA array
cgatttcttggctttatatatcttgtggaaaggacgaaacaccgtaatttctactaagtgtagatcacagcaggtaacatgccgctaatttctactaagtgtagattaatcgtccagtggtgtatattttttaagcttggcgtggatccgatatcaactagatcttgaga

SEQ ID NO: 1818 - DNA, 170 bp, Artificial sequence
  Cbwd1.84_Tbl1xr1.1
  crRNA array
cgatttcttggctttatatatcttgtggaaaggacgaaacaccgtaatttctactaagtgtagatcacagcaggtaacatgccgctaatttctactaagtgtagatggatgcgcatactggtgaagttttttaagcttggcgtggatccgatatcaactagatcttgaga

SEQ ID NO: 1819 - DNA, 170 bp, Artificial sequence
  Cbwd1.84_Tbl1xr1.83
  crRNA array
cgatttcttggctttatatatcttgtggaaaggacgaaacaccgtaatttctactaagtgtagatcacagcaggtaacatgccgctaatttctactaagtgtagatatggtcgacccatcgagtctttttttaagcttggcgtggatccgatatcaactagatcttgaga

SEQ ID NO: 1820 - DNA, 170 bp, Artificial sequence
  Cbwd1.84_Tgfbr2.290
  crRNA array
cgatttcttggctttatatatcttgtggaaaggacgaaacaccgtaatttctactaagtgtagatcacagcaggtaacatgccgctaatttctactaagtgtagatcctctcggcgcccgggtaaattttttaagcttggcgtggatccgatatcaactagatcttgaga

SEQ ID NO: 1821 - DNA, 170 bp, Artificial sequence
  Cbwd1.84_Tgfbr2.292
  crRNA array
cgatttcttggctttatatatcttgtggaaaggacgaaacaccgtaatttctactaagtgtagatcacagcaggtaacatgccgctaatttctactaagtgtagatcccgggcgccgagagggaaattttttaagcttggcgtggatccgatatcaactagatcttgaga

SEQ ID NO: 1822 - DNA, 170 bp, Artificial sequence
  Cbwd1.84_Trp53.4
  crRNA array
cgatttcttggctttatatatcttgtggaaaggacgaaacaccgtaatttctactaagtgtagatcacagcaggtaacatgccgctaatttctactaagtgtagatccctgaactgcccccagggattttttaagcttggcgtggatccgatatcaactagatcttgaga

SEQ ID NO: 1823 - DNA, 170 bp, Artificial sequence
  Cbwd1.84_Trp53.528
  crRNA array
cgatttcttggctttatatatcttgtggaaaggacgaaacaccgtaatttctactaagtgtagatcacagcaggtaacatgccgctaatttctactaagtgtagatgctgggccagcagagacctgttttttaagcttggcgtggatccgatatcaactagatcttgaga

SEQ ID NO: 1824 - DNA, 170 bp, Artificial sequence
  Cbwd1.84_Vhl.1
  crRNA array
cgatttcttggctttatatatcttgtggaaaggacgaaacaccgtaatttctactaagtgtagatcacagcaggtaacatgccgctaatttctactaagtgtagatagggctcccggcggccatttttttttaagcttggcgtggatccgatatcaactagatcttgaga

SEQ ID NO: 1825 - DNA, 170 bp, Artificial sequence
  Cbwd1.84_Vhl.151
  crRNA array
cgatttcttggctttatatatcttgtggaaaggacgaaacaccgtaatttctactaagtgtagatcacagcaggtaacatgccgctaatttctactaagtgtagattagagcactcacccgagggattttttaagcttggcgtggatccgatatcaactagatcttgaga

SEQ ID NO: 1826 - DNA, 170 bp, Artificial sequence
  Cbwd1.84_Zc3h13.1387
  crRNA array
cgatttcttggctttatatatcttgtggaaaggacgaaacaccgtaatttctactaagtgtagatcacagcaggtaacatgccgctaatttctactaagtgtagatgtgacgccggtcatgtgactttttttaagcttggcgtggatccgatatcaactagatcttgaga

SEQ ID NO: 1827 - DNA, 170 bp, Artificial sequence
  Cbwd1.84_Zc3h13.1777
  crRNA array
cgatttcttggctttatatatcttgtggaaaggacgaaacaccgtaatttctactaagtgtagatcacagcaggtaacatgccgctaatttctactaagtgtagatgatgctgccagtgtagcggcttttttaagcttggcgtggatccgatatcaactagatcttgaga

SEQ ID NO: 1828 - DNA, 170 bp, Artificial sequence
  Cbwd1.85_Acvr2a.155
  crRNA array
cgatttcttggctttatatatcttgtggaaaggacgaaacaccgtaatttctactaagtgtagatacagcaggtaacatgccgcctaatttctactaagtgtagatggacctggctaatcaagtatttttttaagcttggcgtggatccgatatcaactagatcttgaga

SEQ ID NO: 1829 - DNA, 170 bp, Artificial sequence
  Cbwd1.85_Acvr2a.70
  crRNA array
cgatttcttggctttatatatcttgtggaaaggacgaaacaccgtaatttctactaagtgtagatacagcaggtaacatgccgcctaatttctactaagtgtagatcccgaggcgccggagaagccttttttaagcttggcgtggatccgatatcaactagatcttgaga

SEQ ID NO: 1830 - DNA, 170 bp, Artificial sequence
  Cbwd1.85_Apc.21
  crRNA array
cgatttcttggctttatatatcttgtggaaaggacgaaacaccgtaatttctactaagtgtagatacagcaggtaacatgccgcctaatttctactaagtgtagatgtgatccacacgtgtagctgttttttaagcttggcgtggatccgatatcaactagatcttgaga

SEQ ID NO: 1831 - DNA, 170 bp, Artificial sequence
  Cbwd1.85_Apc.867
  crRNA array
cgatttcttggctttatatatcttgtggaaaggacgaaacaccgtaatttctactaagtgtagatacagcaggtaacatgccgcctaatttctactaagtgtagatcagtcccaggcggcggaagcttttttaagcttggcgtggatccgatatcaactagatcttgaga

SEQ ID NO: 1832 - DNA, 170 bp, Artificial sequence
  Cbwd1.85_Arid1a.2
  crRNA array
cgatttcttggctttatatatcttgtggaaaggacgaaacaccgtaatttctactaagtgtagatacagcaggtaacatgccgcctaatttctactaagtgtagatcccgcgcccccgtcctggggttttttaagcttggcgtggatccgatatcaactagatcttgaga

SEQ ID NO: 1833 - DNA, 170 bp, Artificial sequence
  Cbwd1.85_Arid1a.5
  crRNA array
cgatttcttggctttatatatcttgtggaaaggacgaaacaccgtaatttctactaagtgtagatacagcaggtaacatgccgcctaatttctactaagtgtagatcccgcgctcggccgctgccgttttttaagcttggcgtggatccgatatcaactagatcttgaga

SEQ ID NO: 1834 - DNA, 170 bp, Artificial sequence
  Cbwd1.85_Arid2.166
  crRNA array
cgatttcttggctttatatatcttgtggaaaggacgaaacaccgtaatttctactaagtgtagatacagcaggtaacatgccgcctaatttctactaagtgtagataaccgcgatctgggttttttttttttaagcttggcgtggatccgatatcaactagatcttgaga

SEQ ID NO: 1835 - DNA, 170 bp, Artificial sequence
  Cbwd1.85_Arid2.172
  crRNA array
cgatttcttggctttatatatcttgtggaaaggacgaaacaccgtaatttctactaagtgtagatacagcaggtaacatgccgcctaatttctactaagtgtagatctggacgagctgcggcagttttttttaagcttggcgtggatccgatatcaactagatcttgaga

SEQ ID NO: 1836 - DNA, 170 bp, Artificial sequence
  Cbwd1.85_Atm.120
  crRNA array
cgatttcttggctttatatatcttgtggaaaggacgaaacaccgtaatttctactaagtgtagatacagcaggtaacatgccgcctaatttctactaagtgtagatgacaggtagtcggcagctaattttttaagcttggcgtggatccgatatcaactagatcttgaga

SEQ ID NO: 1837 - DNA, 170 bp, Artificial sequence
  Cbwd1.85_Atm.997
  crRNA array
cgatttcttggctttatatatcttgtggaaaggacgaaacaccgtaatttctactaagtgtagatacagcaggtaacatgccgcctaatttctactaagtgtagatgagaaagtctccgaatcgttttttttaagcttggcgtggatccgatatcaactagatcttgaga

SEQ ID NO: 1838 - DNA, 170 bp, Artificial sequence
  Cbwd1.85_Atrx.249
  crRNA array
cgatttcttggctttatatatcttgtggaaaggacgaaacaccgtaatttctactaagtgtagatacagcaggtaacatgccgcctaatttctactaagtgtagattagccagtcgctcatatctcttttttaagcttggcgtggatccgatatcaactagatcttgaga

SEQ ID NO: 1839 - DNA, 170 bp, Artificial sequence
  Cbwd1.85_Atrx.251
  crRNA array
cgatttcttggctttatatatcttgtggaaaggacgaaacaccgtaatttctactaagtgtagatacagcaggtaacatgccgcctaatttctactaagtgtagatgccagtcgctcatatctctgttttttaagcttggcgtggatccgatatcaactagatcttgaga

SEQ ID NO: 1840 - DNA, 170 bp, Artificial sequence
  Cbwd1.85_Bcor.203
  crRNA array
cgatttcttggctttatatatcttgtggaaaggacgaaacaccgtaatttctactaagtgtagatacagcaggtaacatgccgcctaatttctactaagtgtagatccccggagcggagtccaggcttttttaagcttggcgtggatccgatatcaactagatcttgaga

SEQ ID NO: 1841 - DNA, 170 bp, Artificial sequence
  Cbwd1.85_Bcor.475
  crRNA array
cgatttcttggctttatatatcttgtggaaaggacgaaacaccgtaatttctactaagtgtagatacagcaggtaacatgccgcctaatttctactaagtgtagattgcaacccctctgtatgggattttttaagcttggcgtggatccgatatcaactagatcttgaga

SEQ ID NO: 1842 - DNA, 170 bp, Artificial sequence
  Cbwd1.85_Brca1.112
  crRNA array
cgatttcttggctttatatatcttgtggaaaggacgaaacaccgtaatttctactaagtgtagatacagcaggtaacatgccgcctaatttctactaagtgtagatctagacgctctgtggagactttttttaagcttggcgtggatccgatatcaactagatcttgaga

SEQ ID NO: 1843 - DNA, 170 bp, Artificial sequence
  Cbwd1.85_Brca1.53
  crRNA array
cgatttcttggctttatatatcttgtggaaaggacgaaacaccgtaatttctactaagtgtagatacagcaggtaacatgccgcctaatttctactaagtgtagataatgaggaggcgtcgatcatttttttaagcttggcgtggatccgatatcaactagatcttgaga

SEQ ID NO: 1844 - DNA, 170 bp, Artificial sequence
  Cbwd1.85_Casp8.45
  crRNA array
cgatttcttggctttatatatcttgtggaaaggacgaaacaccgtaatttctactaagtgtagatacagcaggtaacatgccgcctaatttctactaagtgtagatctaccgagatcctgtgaatgttttttaagcttggcgtggatccgatatcaactagatcttgaga

SEQ ID NO: 1845 - DNA, 170 bp, Artificial sequence
  Cbwd1.85_Casp8.54
  crRNA array
cgatttcttggctttatatatcttgtggaaaggacgaaacaccgtaatttctactaagtgtagatacagcaggtaacatgccgcctaatttctactaagtgtagatcagtgcagtcgtcgtaagatttttttaagcttggcgtggatccgatatcaactagatcttgaga

SEQ ID NO: 1846 - DNA, 170 bp, Artificial sequence
  Cbwd1.85_Cdh1.387
  crRNA array
cgatttcttggctttatatatcttgtggaaaggacgaaacaccgtaatttctactaagtgtagatacagcaggtaacatgccgcctaatttctactaagtgtagatctcggcgtctgccgggtccgttttttaagcttggcgtggatccgatatcaactagatcttgaga

SEQ ID NO: 1847 - DNA, 170 bp, Artificial sequence
  Cbwd1.85_Cdh1.58
  crRNA array
cgatttcttggctttatatatcttgtggaaaggacgaaacaccgtaatttctactaagtgtagatacagcaggtaacatgccgcctaatttctactaagtgtagatctcgtccgcgcccgggactcttttttaagcttggcgtggatccgatatcaactagatcttgaga

SEQ ID NO: 1848 - DNA, 170 bp, Artificial sequence
  Cbwd1.85_Cdkn2a.647
  crRNA array
cgatttcttggctttatatatcttgtggaaaggacgaaacaccgtaatttctactaagtgtagatacagcaggtaacatgccgcctaatttctactaagtgtagatgcaatcacgggagggagcagttttttaagcttggcgtggatccgatatcaactagatcttgaga

SEQ ID NO: 1849 - DNA, 170 bp, Artificial sequence
  Cbwd1.85_Cdkn2a.648
  crRNA array
cgatttcttggctttatatatcttgtggaaaggacgaaacaccgtaatttctactaagtgtagatacagcaggtaacatgccgcctaatttctactaagtgtagatcaatcacgggagggagcagattttttaagcttggcgtggatccgatatcaactagatcttgaga

SEQ ID NO: 1850 - DNA, 170 bp, Artificial sequence
  Cbwd1.85_Cic.162
  crRNA array
cgatttcttggctttatatatcttgtggaaaggacgaaacaccgtaatttctactaagtgtagatacagcaggtaacatgccgcctaatttctactaagtgtagatcgcaggcgcgcccggcggagttttttaagcttggcgtggatccgatatcaactagatcttgaga

SEQ ID NO: 1851 - DNA, 170 bp, Artificial sequence
  Cbwd1.85_Cic.164
  crRNA array
cgatttcttggctttatatatcttgtggaaaggacgaaacaccgtaatttctactaagtgtagatacagcaggtaacatgccgcctaatttctactaagtgtagatcgggccctgggccggcggctttttttaagcttggcgtggatccgatatcaactagatcttgaga

SEQ ID NO: 1852 - DNA, 170 bp, Artificial sequence
  Cbwd1.85_Ctcf.229
  crRNA array
cgatttcttggctttatatatcttgtggaaaggacgaaacaccgtaatttctactaagtgtagatacagcaggtaacatgccgcctaatttctactaagtgtagatggctggtggctgatagtctgttttttaagcttggcgtggatccgatatcaactagatcttgaga

SEQ ID NO: 1853 - DNA, 170 bp, Artificial sequence
  Cbwd1.85_Ctcf.809
  crRNA array
cgatttcttggctttatatatcttgtggaaaggacgaaacaccgtaatttctactaagtgtagatacagcaggtaacatgccgcctaatttctactaagtgtagataagcgctatcatgatcccaattttttaagcttggcgtggatccgatatcaactagatcttgaga

SEQ ID NO: 1854 - DNA, 170 bp, Artificial sequence
  Cbwd1.85_Elf3.826
  crRNA array
cgatttcttggctttatatatcttgtggaaaggacgaaacaccgtaatttctactaagtgtagatacagcaggtaacatgccgcctaatttctactaagtgtagattccgagacatcctaatccacttttttaagcttggcgtggatccgatatcaactagatcttgaga

SEQ ID NO: 1855 - DNA, 170 bp, Artificial sequence
  Cbwd1.85_Elf3.983
  crRNA array
cgatttcttggctttatatatcttgtggaaaggacgaaacaccgtaatttctactaagtgtagatacagcaggtaacatgccgcctaatttctactaagtgtagattaggccccctaactggaccattttttaagcttggcgtggatccgatatcaactagatcttgaga

SEQ ID NO: 1856 - DNA, 170 bp, Artificial sequence
  Cbwd1.85_Ep300.310
  crRNA array
cgatttcttggctttatatatcttgtggaaaggacgaaacaccgtaatttctactaagtgtagatacagcaggtaacatgccgcctaatttctactaagtgtagatatggtacgacagtgaggaagttttttaagcttggcgtggatccgatatcaactagatcttgaga

SEQ ID NO: 1857 - DNA, 170 bp, Artificial sequence
  Cbwd1.85_Ep300.587
  crRNA array
cgatttcttggctttatatatcttgtggaaaggacgaaacaccgtaatttctactaagtgtagatacagcaggtaacatgccgcctaatttctactaagtgtagatcgccccggggcccccaaccattttttaagcttggcgtggatccgatatcaactagatcttgaga

SEQ ID NO: 1858 - DNA, 170 bp, Artificial sequence
  Cbwd1.85_Epha2.126
  crRNA array
cgatttcttggctttatatatcttgtggaaaggacgaaacaccgtaatttctactaagtgtagatacagcaggtaacatgccgcctaatttctactaagtgtagatcctgtgccgccgcggccgccttttttaagcttggcgtggatccgatatcaactagatcttgaga

SEQ ID NO: 1859 - DNA, 170 bp, Artificial sequence
  Cbwd1.85_Epha2.5
  crRNA array
cgatttcttggctttatatatcttgtggaaaggacgaaacaccgtaatttctactaagtgtagatacagcaggtaacatgccgcctaatttctactaagtgtagatcatgagctggcgccacccggttttttaagcttggcgtggatccgatatcaactagatcttgaga

SEQ ID NO: 1860 - DNA, 170 bp, Artificial sequence
  Cbwd1.85_Fat1.105
  crRNA array
cgatttcttggctttatatatcttgtggaaaggacgaaacaccgtaatttctactaagtgtagatacagcaggtaacatgccgcctaatttctactaagtgtagataactcgaggtgacaacaagtttttttaagcttggcgtggatccgatatcaactagatcttgaga

SEQ ID NO: 1861 - DNA, 170 bp, Artificial sequence
  Cbwd1.85_Fat1.122
  crRNA array
cgatttcttggctttatatatcttgtggaaaggacgaaacaccgtaatttctactaagtgtagatacagcaggtaacatgccgcctaatttctactaagtgtagatccatcgacatggaaacgggattttttaagcttggcgtggatccgatatcaactagatcttgaga

SEQ ID NO: 1862 - DNA, 170 bp, Artificial sequence
  Cbwd1.85_Fbxw7.21
  crRNA array
cgatttcttggctttatatatcttgtggaaaggacgaaacaccgtaatttctactaagtgtagatacagcaggtaacatgccgcctaatttctactaagtgtagattaatgtgccgtagaaacccattttttaagcttggcgtggatccgatatcaactagatcttgaga

SEQ ID NO: 1863 - DNA, 170 bp, Artificial sequence
  Cbwd1.85_Fbxw7.23
  crRNA array
cgatttcttggctttatatatcttgtggaaaggacgaaacaccgtaatttctactaagtgtagatacagcaggtaacatgccgcctaatttctactaagtgtagatatgtgccgtagaaacccatattttttaagcttggcgtggatccgatatcaactagatcttgaga

SEQ ID NO: 1864 - DNA, 170 bp, Artificial sequence
  Cbwd1.85_Gata3.34
  crRNA array
cgatttcttggctttatatatcttgtggaaaggacgaaacaccgtaatttctactaagtgtagatacagcaggtaacatgccgcctaatttctactaagtgtagatctaaactatcccgcaaagatttttttaagcttggcgtggatccgatatcaactagatcttgaga

SEQ ID NO: 1865 - DNA, 170 bp, Artificial sequence
  Cbwd1.85_Gata3.47
  crRNA array
cgatttcttggctttatatatcttgtggaaaggacgaaacaccgtaatttctactaagtgtagatacagcaggtaacatgccgcctaatttctactaagtgtagatcgtagtaggacgggacgtggttttttaagcttggcgtggatccgatatcaactagatcttgaga

SEQ ID NO: 1866 - DNA, 170 bp, Artificial sequence
  Cbwd1.85_H2-Q2.1
  crRNA array
cgatttcttggctttatatatcttgtggaaaggacgaaacaccgtaatttctactaagtgtagatacagcaggtaacatgccgcctaatttctactaagtgtagatagggcggccaccaacagcagttttttaagcttggcgtggatccgatatcaactagatcttgaga

SEQ ID NO: 1867 - DNA, 170 bp, Artificial sequence
  Cbwd1.85_H2-Q2.2
  crRNA array
cgatttcttggctttatatatcttgtggaaaggacgaaacaccgtaatttctactaagtgtagatacagcaggtaacatgccgcctaatttctactaagtgtagattaacctgcgcccgctgctgattttttaagcttggcgtggatccgatatcaactagatcttgaga

SEQ ID NO: 1868 - DNA, 170 bp, Artificial sequence
  Cbwd1.85_Kdm5c.1878
  crRNA array
cgatttcttggctttatatatcttgtggaaaggacgaaacaccgtaatttctactaagtgtagatacagcaggtaacatgccgcctaatttctactaagtgtagatagagcacggcacccgcccccttttttaagcttggcgtggatccgatatcaactagatcttgaga

SEQ ID NO: 1869 - DNA, 170 bp, Artificial sequence
  Cbwd1.85_Kdm5c.1879
  crRNA array
cgatttcttggctttatatatcttgtggaaaggacgaaacaccgtaatttctactaagtgtagatacagcaggtaacatgccgcctaatttctactaagtgtagatgagcacggcacccgccccccttttttaagcttggcgtggatccgatatcaactagatcttgaga

SEQ ID NO: 1870 - DNA, 170 bp, Artificial sequence
  Cbwd1.85_Kdm6a.56
  crRNA array
cgatttcttggctttatatatcttgtggaaaggacgaaacaccgtaatttctactaagtgtagatacagcaggtaacatgccgcctaatttctactaagtgtagattcgctgccgcctctcgcggcttttttaagcttggcgtggatccgatatcaactagatcttgaga

SEQ ID NO: 1871 - DNA, 170 bp, Artificial sequence
  Cbwd1.85_Kdm6a.57
  crRNA array
cgatttcttggctttatatatcttgtggaaaggacgaaacaccgtaatttctactaagtgtagatacagcaggtaacatgccgcctaatttctactaagtgtagatcgctgccgcctctcgcggcattttttaagcttggcgtggatccgatatcaactagatcttgaga

SEQ ID NO: 1872 - DNA, 170 bp, Artificial sequence
  Cbwd1.85_Kmt2b.265
  crRNA array
cgatttcttggctttatatatcttgtggaaaggacgaaacaccgtaatttctactaagtgtagatacagcaggtaacatgccgcctaatttctactaagtgtagatccccaagtgaagcccacctgttttttaagcttggcgtggatccgatatcaactagatcttgaga

SEQ ID NO: 1873 - DNA, 170 bp, Artificial sequence
  Cbwd1.85_Kmt2b.298
  crRNA array
cgatttcttggctttatatatcttgtggaaaggacgaaacaccgtaatttctactaagtgtagatacagcaggtaacatgccgcctaatttctactaagtgtagattccggcagggaccggctggcttttttaagcttggcgtggatccgatatcaactagatcttgaga

SEQ ID NO: 1874 - DNA, 170 bp, Artificial sequence
  Cbwd1.85_Kmt2c.1962
  crRNA array
cgatttcttggctttatatatcttgtggaaaggacgaaacaccgtaatttctactaagtgtagatacagcaggtaacatgccgcctaatttctactaagtgtagatgtgacgatctgtgccacaagttttttaagcttggcgtggatccgatatcaactagatcttgaga

SEQ ID NO: 1875 - DNA, 170 bp, Artificial sequence
  Cbwd1.85_Kmt2c.2236
  crRNA array
cgatttcttggctttatatatcttgtggaaaggacgaaacaccgtaatttctactaagtgtagatacagcaggtaacatgccgcctaatttctactaagtgtagatactcgacctccacctccctattttttaagcttggcgtggatccgatatcaactagatcttgaga

SEQ ID NO: 1876 - DNA, 170 bp, Artificial sequence
  Cbwd1.85_Kmt2d.316
  crRNA array
cgatttcttggctttatatatcttgtggaaaggacgaaacaccgtaatttctactaagtgtagatacagcaggtaacatgccgcctaatttctactaagtgtagatactccaggccacccaggtggttttttaagcttggcgtggatccgatatcaactagatcttgaga

SEQ ID NO: 1877 - DNA, 170 bp, Artificial sequence
  Cbwd1.85_Kmt2d.416
  crRNA array
cgatttcttggctttatatatcttgtggaaaggacgaaacaccgtaatttctactaagtgtagatacagcaggtaacatgccgcctaatttctactaagtgtagattaaacccccgggggaagggtttttttaagcttggcgtggatccgatatcaactagatcttgaga

SEQ ID NO: 1878 - DNA, 170 bp, Artificial sequence
  Cbwd1.85_Map2k4.119
  crRNA array
cgatttcttggctttatatatcttgtggaaaggacgaaacaccgtaatttctactaagtgtagatacagcaggtaacatgccgcctaatttctactaagtgtagattgctgtgtgggcggccacatttttttaagcttggcgtggatccgatatcaactagatcttgaga

SEQ ID NO: 1879 - DNA, 170 bp, Artificial sequence
  Cbwd1.85_Map2k4.1261
  crRNA array
cgatttcttggctttatatatcttgtggaaaggacgaaacaccgtaatttctactaagtgtagatacagcaggtaacatgccgcctaatttctactaagtgtagatgatgtagtaatgcggagtagttttttaagcttggcgtggatccgatatcaactagatcttgaga

SEQ ID NO: 1880 - DNA, 170 bp, Artificial sequence
  Cbwd1.85_Map3k1.235
  crRNA array
cgatttcttggctttatatatcttgtggaaaggacgaaacaccgtaatttctactaagtgtagatacagcaggtaacatgccgcctaatttctactaagtgtagataaaacgctactgatcgatcgttttttaagcttggcgtggatccgatatcaactagatcttgaga

SEQ ID NO: 1881 - DNA, 170 bp, Artificial sequence
  Cbwd1.85_Map3k1.3838
  crRNA array
cgatttcttggctttatatatcttgtggaaaggacgaaacaccgtaatttctactaagtgtagatacagcaggtaacatgccgcctaatttctactaagtgtagatccaacaacagggccccactattttttaagcttggcgtggatccgatatcaactagatcttgaga

SEQ ID NO: 1882 - DNA, 170 bp, Artificial sequence
  Cbwd1.85_Mga.1655
  crRNA array
cgatttcttggctttatatatcttgtggaaaggacgaaacaccgtaatttctactaagtgtagatacagcaggtaacatgccgcctaatttctactaagtgtagatcgagaagtggagagcatattttttttaagcttggcgtggatccgatatcaactagatcttgaga

SEQ ID NO: 1883 - DNA, 170 bp, Artificial sequence
  Cbwd1.85_Mga.93
  crRNA array
cgatttcttggctttatatatcttgtggaaaggacgaaacaccgtaatttctactaagtgtagatacagcaggtaacatgccgcctaatttctactaagtgtagatgagaaggctccccataatgtttttttaagcttggcgtggatccgatatcaactagatcttgaga

SEQ ID NO: 1884 - DNA, 170 bp, Artificial sequence
  Cbwd1.85_Nf1.746
  crRNA array
cgatttcttggctttatatatcttgtggaaaggacgaaacaccgtaatttctactaagtgtagatacagcaggtaacatgccgcctaatttctactaagtgtagattaagcataatgatgatgccattttttaagcttggcgtggatccgatatcaactagatcttgaga

SEQ ID NO: 1885 - DNA, 170 bp, Artificial sequence
  Cbwd1.85_Nf1.97
  crRNA array
cgatttcttggctttatatatcttgtggaaaggacgaaacaccgtaatttctactaagtgtagatacagcaggtaacatgccgcctaatttctactaagtgtagatagcccgctacatgctgatgcttttttaagcttggcgtggatccgatatcaactagatcttgaga

SEQ ID NO: 1886 - DNA, 170 bp, Artificial sequence
  Cbwd1.85_Nf2.356
  crRNA array
cgatttcttggctttatatatcttgtggaaaggacgaaacaccgtaatttctactaagtgtagatacagcaggtaacatgccgcctaatttctactaagtgtagatcggagtcatctgatagagatttttttaagcttggcgtggatccgatatcaactagatcttgaga

SEQ ID NO: 1887 - DNA, 170 bp, Artificial sequence
  Cbwd1.85_Nf2.768
  crRNA array
cgatttcttggctttatatatcttgtggaaaggacgaaacaccgtaatttctactaagtgtagatacagcaggtaacatgccgcctaatttctactaagtgtagatccgaagccccagtgtccggcttttttaagcttggcgtggatccgatatcaactagatcttgaga

SEQ ID NO: 1888 - DNA, 170 bp, Artificial sequence
  Cbwd1.85_Notch1.1849
  crRNA array
cgatttcttggctttatatatcttgtggaaaggacgaaacaccgtaatttctactaagtgtagatacagcaggtaacatgccgcctaatttctactaagtgtagatctggcgggtgggcggcgctgttttttaagcttggcgtggatccgatatcaactagatcttgaga

SEQ ID NO: 1889 - DNA, 170 bp, Artificial sequence
  Cbwd1.85_Notch1.649
  crRNA array
cgatttcttggctttatatatcttgtggaaaggacgaaacaccgtaatttctactaagtgtagatacagcaggtaacatgccgcctaatttctactaagtgtagattgggccaacgatgccaggacttttttaagcttggcgtggatccgatatcaactagatcttgaga

SEQ ID NO: 1890 - DNA, 170 bp, Artificial sequence
  Cbwd1.85_Nsd1.70
  crRNA array
cgatttcttggctttatatatcttgtggaaaggacgaaacaccgtaatttctactaagtgtagatacagcaggtaacatgccgcctaatttctactaagtgtagatactggtgtggacgatgcagattttttaagcttggcgtggatccgatatcaactagatcttgaga

SEQ ID NO: 1891 - DNA, 170 bp, Artificial sequence
  Cbwd1.85_Nsd1.90
  crRNA array
cgatttcttggctttatatatcttgtggaaaggacgaaacaccgtaatttctactaagtgtagatacagcaggtaacatgccgcctaatttctactaagtgtagataggagctaacggcaagaatgttttttaagcttggcgtggatccgatatcaactagatcttgaga

SEQ ID NO: 1892 - DNA, 170 bp, Artificial sequence
  Cbwd1.85_Pbrm1.1236
  crRNA array
cgatttcttggctttatatatcttgtggaaaggacgaaacaccgtaatttctactaagtgtagatacagcaggtaacatgccgcctaatttctactaagtgtagatgccgataaaaccaacagccgttttttaagcttggcgtggatccgatatcaactagatcttgaga

SEQ ID NO: 1893 - DNA, 170 bp, Artificial sequence
  Cbwd1.85_Pbrm1.969
  crRNA array
cgatttcttggctttatatatcttgtggaaaggacgaaacaccgtaatttctactaagtgtagatacagcaggtaacatgccgcctaatttctactaagtgtagatgagccctaatgaacagctcattttttaagcttggcgtggatccgatatcaactagatcttgaga

SEQ ID NO: 1894 - DNA, 170 bp, Artificial sequence
  Cbwd1.85_Pik3r1.76
  crRNA array
cgatttcttggctttatatatcttgtggaaaggacgaaacaccgtaatttctactaagtgtagatacagcaggtaacatgccgcctaatttctactaagtgtagataaaacctatacggcccgcacttttttaagcttggcgtggatccgatatcaactagatcttgaga

SEQ ID NO: 1895 - DNA, 170 bp, Artificial sequence
  Cbwd1.85_Pik3r1.77
  crRNA array
cgatttcttggctttatatatcttgtggaaaggacgaaacaccgtaatttctactaagtgtagatacagcaggtaacatgccgcctaatttctactaagtgtagataaacctatacggcccgcactttttttaagcttggcgtggatccgatatcaactagatcttgaga

SEQ ID NO: 1896 - DNA, 170 bp, Artificial sequence
  Cbwd1.85_Pten.240
  crRNA array
cgatttcttggctttatatatcttgtggaaaggacgaaacaccgtaatttctactaagtgtagatacagcaggtaacatgccgcctaatttctactaagtgtagattgcatacgctatagctgcttttttttaagcttggcgtggatccgatatcaactagatcttgaga

SEQ ID NO: 1897 - DNA, 170 bp, Artificial sequence
  Cbwd1.85_Pten.265
  crRNA array
cgatttcttggctttatatatcttgtggaaaggacgaaacaccgtaatttctactaagtgtagatacagcaggtaacatgccgcctaatttctactaagtgtagataagcgtggtgcgtgacgcacttttttaagcttggcgtggatccgatatcaactagatcttgaga

SEQ ID NO: 1898 - DNA, 170 bp, Artificial sequence
  Cbwd1.85_Rasa1.1478
  crRNA array
cgatttcttggctttatatatcttgtggaaaggacgaaacaccgtaatttctactaagtgtagatacagcaggtaacatgccgcctaatttctactaagtgtagatcgataatggtctatgatgtcttttttaagcttggcgtggatccgatatcaactagatcttgaga

SEQ ID NO: 1899 - DNA, 170 bp, Artificial sequence
  Cbwd1.85_Rasa1.223
  crRNA array
cgatttcttggctttatatatcttgtggaaaggacgaaacaccgtaatttctactaagtgtagatacagcaggtaacatgccgcctaatttctactaagtgtagattccatggagtatcgtgctcgttttttaagcttggcgtggatccgatatcaactagatcttgaga

SEQ ID NO: 1900 - DNA, 170 bp, Artificial sequence
  Cbwd1.85_Rb1.211
  crRNA array
cgatttcttggctttatatatcttgtggaaaggacgaaacaccgtaatttctactaagtgtagatacagcaggtaacatgccgcctaatttctactaagtgtagattctgacatgatcgggtacctttttttaagcttggcgtggatccgatatcaactagatcttgaga

SEQ ID NO: 1901 - DNA, 170 bp, Artificial sequence
  Cbwd1.85_Rb1.394
  crRNA array
cgatttcttggctttatatatcttgtggaaaggacgaaacaccgtaatttctactaagtgtagatacagcaggtaacatgccgcctaatttctactaagtgtagatagaaatctcgaagcaggatcttttttaagcttggcgtggatccgatatcaactagatcttgaga

SEQ ID NO: 1902 - DNA, 170 bp, Artificial sequence
  Cbwd1.85_Rbm10.5
  crRNA array
cgatttcttggctttatatatcttgtggaaaggacgaaacaccgtaatttctactaagtgtagatacagcaggtaacatgccgcctaatttctactaagtgtagatacgaaacctgaacccacacattttttaagcttggcgtggatccgatatcaactagatcttgaga

SEQ ID NO: 1903 - DNA, 170 bp, Artificial sequence
  Cbwd1.85_Rbm10.6
  crRNA array
cgatttcttggctttatatatcttgtggaaaggacgaaacaccgtaatttctactaagtgtagatacagcaggtaacatgccgcctaatttctactaagtgtagatcgaaacctgaacccacacagttttttaagcttggcgtggatccgatatcaactagatcttgaga

SEQ ID NO: 1904 - DNA, 170 bp, Artificial sequence
  Cbwd1.85_Rnf43.1920
  crRNA array
cgatttcttggctttatatatcttgtggaaaggacgaaacaccgtaatttctactaagtgtagatacagcaggtaacatgccgcctaatttctactaagtgtagatatccccgtgccgtggactccttttttaagcttggcgtggatccgatatcaactagatcttgaga

SEQ ID NO: 1905 - DNA, 170 bp, Artificial sequence
  Cbwd1.85_Rnf43.39
  crRNA array
cgatttcttggctttatatatcttgtggaaaggacgaaacaccgtaatttctactaagtgtagatacagcaggtaacatgccgcctaatttctactaagtgtagatcaaggggatcactctgataattttttaagcttggcgtggatccgatatcaactagatcttgaga

SEQ ID NO: 1906 - DNA, 170 bp, Artificial sequence
  Cbwd1.85_Runx1.204
  crRNA array
cgatttcttggctttatatatcttgtggaaaggacgaaacaccgtaatttctactaagtgtagatacagcaggtaacatgccgcctaatttctactaagtgtagattaaataagtccagccgttttttttttaagcttggcgtggatccgatatcaactagatcttgaga

SEQ ID NO: 1907 - DNA, 170 bp, Artificial sequence
  Cbwd1.85_Runx1.81
  crRNA array
cgatttcttggctttatatatcttgtggaaaggacgaaacaccgtaatttctactaagtgtagatacagcaggtaacatgccgcctaatttctactaagtgtagataggacgcgtatgggaattttttttttaagcttggcgtggatccgatatcaactagatcttgaga

SEQ ID NO: 1908 - DNA, 170 bp, Artificial sequence
  Cbwd1.85_Setd2.143
  crRNA array
cgatttcttggctttatatatcttgtggaaaggacgaaacaccgtaatttctactaagtgtagatacagcaggtaacatgccgcctaatttctactaagtgtagatgcacaaccacaacagactggttttttaagcttggcgtggatccgatatcaactagatcttgaga

SEQ ID NO: 1909 - DNA, 170 bp, Artificial sequence
  Cbwd1.85_Setd2.508
  crRNA array
cgatttcttggctttatatatcttgtggaaaggacgaaacaccgtaatttctactaagtgtagatacagcaggtaacatgccgcctaatttctactaagtgtagattacgatcccgagcacccgacttttttaagcttggcgtggatccgatatcaactagatcttgaga

SEQ ID NO: 1910 - DNA, 170 bp, Artificial sequence
  Cbwd1.85_Smad4.3038
  crRNA array
cgatttcttggctttatatatcttgtggaaaggacgaaacaccgtaatttctactaagtgtagatacagcaggtaacatgccgcctaatttctactaagtgtagatatctgcggcagtgtcaccggttttttaagcttggcgtggatccgatatcaactagatcttgaga

SEQ ID NO: 1911 - DNA, 170 bp, Artificial sequence
  Cbwd1.85_Smad4.39
  crRNA array
cgatttcttggctttatatatcttgtggaaaggacgaaacaccgtaatttctactaagtgtagatacagcaggtaacatgccgcctaatttctactaagtgtagatagtcaaacgcatactgacaattttttaagcttggcgtggatccgatatcaactagatcttgaga

SEQ ID NO: 1912 - DNA, 170 bp, Artificial sequence
  Cbwd1.85_Stag2.1409
  crRNA array
cgatttcttggctttatatatcttgtggaaaggacgaaacaccgtaatttctactaagtgtagatacagcaggtaacatgccgcctaatttctactaagtgtagatgctaataactgcggaagggcttttttaagcttggcgtggatccgatatcaactagatcttgaga

SEQ ID NO: 1913 - DNA, 170 bp, Artificial sequence
  Cbwd1.85_Stag2.4401
  crRNA array
cgatttcttggctttatatatcttgtggaaaggacgaaacaccgtaatttctactaagtgtagatacagcaggtaacatgccgcctaatttctactaagtgtagattaatcgtccagtggtgtatattttttaagcttggcgtggatccgatatcaactagatcttgaga

SEQ ID NO: 1914 - DNA, 170 bp, Artificial sequence
  Cbwd1.85_Tbl1xr1.1
  crRNA array
cgatttcttggctttatatatcttgtggaaaggacgaaacaccgtaatttctactaagtgtagatacagcaggtaacatgccgcctaatttctactaagtgtagatggatgcgcatactggtgaagttttttaagcttggcgtggatccgatatcaactagatcttgaga

SEQ ID NO: 1915 - DNA, 170 bp, Artificial sequence
  Cbwd1.85_Tbl1xr1.83
  crRNA array
cgatttcttggctttatatatcttgtggaaaggacgaaacaccgtaatttctactaagtgtagatacagcaggtaacatgccgcctaatttctactaagtgtagatatggtcgacccatcgagtctttttttaagcttggcgtggatccgatatcaactagatcttgaga

SEQ ID NO: 1916 - DNA, 170 bp, Artificial sequence
  Cbwd1.85_Tgfbr2.290
  crRNA array
cgatttcttggctttatatatcttgtggaaaggacgaaacaccgtaatttctactaagtgtagatacagcaggtaacatgccgcctaatttctactaagtgtagatcctctcggcgcccgggtaaattttttaagcttggcgtggatccgatatcaactagatcttgaga

SEQ ID NO: 1917 - DNA, 170 bp, Artificial sequence
  Cbwd1.85_Tgfbr2.292
  crRNA array
cgatttcttggctttatatatcttgtggaaaggacgaaacaccgtaatttctactaagtgtagatacagcaggtaacatgccgcctaatttctactaagtgtagatcccgggcgccgagagggaaattttttaagcttggcgtggatccgatatcaactagatcttgaga

SEQ ID NO: 1918 - DNA, 170 bp, Artificial sequence
  Cbwd1.85_Trp53.4
  crRNA array
cgatttcttggctttatatatcttgtggaaaggacgaaacaccgtaatttctactaagtgtagatacagcaggtaacatgccgcctaatttctactaagtgtagatccctgaactgcccccagggattttttaagcttggcgtggatccgatatcaactagatcttgaga

SEQ ID NO: 1919 - DNA, 170 bp, Artificial sequence
  Cbwd1.85_Trp53.528
  crRNA array
cgatttcttggctttatatatcttgtggaaaggacgaaacaccgtaatttctactaagtgtagatacagcaggtaacatgccgcctaatttctactaagtgtagatgctgggccagcagagacctgttttttaagcttggcgtggatccgatatcaactagatcttgaga

SEQ ID NO: 1920 - DNA, 170 bp, Artificial sequence
  Cbwd1.85_Vhl.1
  crRNA array
cgatttcttggctttatatatcttgtggaaaggacgaaacaccgtaatttctactaagtgtagatacagcaggtaacatgccgcctaatttctactaagtgtagatagggctcccggcggccatttttttttaagcttggcgtggatccgatatcaactagatcttgaga

SEQ ID NO: 1921 - DNA, 170 bp, Artificial sequence
  Cbwd1.85_Vhl.151
  crRNA array
cgatttcttggctttatatatcttgtggaaaggacgaaacaccgtaatttctactaagtgtagatacagcaggtaacatgccgcctaatttctactaagtgtagattagagcactcacccgagggattttttaagcttggcgtggatccgatatcaactagatcttgaga

SEQ ID NO: 1922 - DNA, 170 bp, Artificial sequence
  Cbwd1.85_Zc3h13.1387
  crRNA array
cgatttcttggctttatatatcttgtggaaaggacgaaacaccgtaatttctactaagtgtagatacagcaggtaacatgccgcctaatttctactaagtgtagatgtgacgccggtcatgtgactttttttaagcttggcgtggatccgatatcaactagatcttgaga

SEQ ID NO: 1923 - DNA, 170 bp, Artificial sequence
  Cbwd1.85_Zc3h13.1777
  crRNA array
cgatttcttggctttatatatcttgtggaaaggacgaaacaccgtaatttctactaagtgtagatacagcaggtaacatgccgcctaatttctactaagtgtagatgatgctgccagtgtagcggcttttttaagcttggcgtggatccgatatcaactagatcttgaga

SEQ ID NO: 1924 - DNA, 170 bp, Artificial sequence
  Cdh1.387_Acvr2a.155
  crRNA array
cgatttcttggctttatatatcttgtggaaaggacgaaacaccgtaatttctactaagtgtagatctcggcgtctgccgggtccgtaatttctactaagtgtagatggacctggctaatcaagtatttttttaagcttggcgtggatccgatatcaactagatcttgaga

SEQ ID NO: 1925 - DNA, 170 bp, Artificial sequence
  Cdh1.387_Acvr2a.70
  crRNA array
cgatttcttggctttatatatcttgtggaaaggacgaaacaccgtaatttctactaagtgtagatctcggcgtctgccgggtccgtaatttctactaagtgtagatcccgaggcgccggagaagccttttttaagcttggcgtggatccgatatcaactagatcttgaga

SEQ ID NO: 1926 - DNA, 170 bp, Artificial sequence
  Cdh1.387_Apc.21
  crRNA array
cgatttcttggctttatatatcttgtggaaaggacgaaacaccgtaatttctactaagtgtagatctcggcgtctgccgggtccgtaatttctactaagtgtagatgtgatccacacgtgtagctgttttttaagcttggcgtggatccgatatcaactagatcttgaga

SEQ ID NO: 1927 - DNA, 170 bp, Artificial sequence
  Cdh1.387_Apc.867
  crRNA array
cgatttcttggctttatatatcttgtggaaaggacgaaacaccgtaatttctactaagtgtagatctcggcgtctgccgggtccgtaatttctactaagtgtagatcagtcccaggcggcggaagcttttttaagcttggcgtggatccgatatcaactagatcttgaga

SEQ ID NO: 1928 - DNA, 170 bp, Artificial sequence
  Cdh1.387_Arid1a.2
  crRNA array
cgatttcttggctttatatatcttgtggaaaggacgaaacaccgtaatttctactaagtgtagatctcggcgtctgccgggtccgtaatttctactaagtgtagatcccgcgcccccgtcctggggttttttaagcttggcgtggatccgatatcaactagatcttgaga

SEQ ID NO: 1929 - DNA, 170 bp, Artificial sequence
  Cdh1.387_Arid1a.5
  crRNA array
cgatttcttggctttatatatcttgtggaaaggacgaaacaccgtaatttctactaagtgtagatctcggcgtctgccgggtccgtaatttctactaagtgtagatcccgcgctcggccgctgccgttttttaagcttggcgtggatccgatatcaactagatcttgaga

SEQ ID NO: 1930 - DNA, 170 bp, Artificial sequence
  Cdh1.387_Arid2.166
  crRNA array
cgatttcttggctttatatatcttgtggaaaggacgaaacaccgtaatttctactaagtgtagatctcggcgtctgccgggtccgtaatttctactaagtgtagataaccgcgatctgggttttttttttttaagcttggcgtggatccgatatcaactagatcttgaga

SEQ ID NO: 1931 - DNA, 170 bp, Artificial sequence
  Cdh1.387_Arid2.172
  crRNA array
cgatttcttggctttatatatcttgtggaaaggacgaaacaccgtaatttctactaagtgtagatctcggcgtctgccgggtccgtaatttctactaagtgtagatctggacgagctgcggcagttttttttaagcttggcgtggatccgatatcaactagatcttgaga

SEQ ID NO: 1932 - DNA, 170 bp, Artificial sequence
  Cdh1.387_Atm.120
  crRNA array
cgatttcttggctttatatatcttgtggaaaggacgaaacaccgtaatttctactaagtgtagatctcggcgtctgccgggtccgtaatttctactaagtgtagatgacaggtagtcggcagctaattttttaagcttggcgtggatccgatatcaactagatcttgaga

SEQ ID NO: 1933 - DNA, 170 bp, Artificial sequence
  Cdh1.387_Atm.997
  crRNA array
cgatttcttggctttatatatcttgtggaaaggacgaaacaccgtaatttctactaagtgtagatctcggcgtctgccgggtccgtaatttctactaagtgtagatgagaaagtctccgaatcgttttttttaagcttggcgtggatccgatatcaactagatcttgaga

SEQ ID NO: 1934 - DNA, 170 bp, Artificial sequence
  Cdh1.387_Atrx.249
  crRNA array
cgatttcttggctttatatatcttgtggaaaggacgaaacaccgtaatttctactaagtgtagatctcggcgtctgccgggtccgtaatttctactaagtgtagattagccagtcgctcatatctcttttttaagcttggcgtggatccgatatcaactagatcttgaga

SEQ ID NO: 1935 - DNA, 170 bp, Artificial sequence
  Cdh1.387_Atrx.251
  crRNA array
cgatttcttggctttatatatcttgtggaaaggacgaaacaccgtaatttctactaagtgtagatctcggcgtctgccgggtccgtaatttctactaagtgtagatgccagtcgctcatatctctgttttttaagcttggcgtggatccgatatcaactagatcttgaga

SEQ ID NO: 1936 - DNA, 170 bp, Artificial sequence
  Cdh1.387_Bcor.203
  crRNA array
cgatttcttggctttatatatcttgtggaaaggacgaaacaccgtaatttctactaagtgtagatctcggcgtctgccgggtccgtaatttctactaagtgtagatccccggagcggagtccaggcttttttaagcttggcgtggatccgatatcaactagatcttgaga

SEQ ID NO: 1937 - DNA, 170 bp, Artificial sequence
  Cdh1.387_Bcor.475
  crRNA array
cgatttcttggctttatatatcttgtggaaaggacgaaacaccgtaatttctactaagtgtagatctcggcgtctgccgggtccgtaatttctactaagtgtagattgcaacccctctgtatgggattttttaagcttggcgtggatccgatatcaactagatcttgaga

SEQ ID NO: 1938 - DNA, 170 bp, Artificial sequence
  Cdh1.387_Brca1.112
  crRNA array
cgatttcttggctttatatatcttgtggaaaggacgaaacaccgtaatttctactaagtgtagatctcggcgtctgccgggtccgtaatttctactaagtgtagatctagacgctctgtggagactttttttaagcttggcgtggatccgatatcaactagatcttgaga

SEQ ID NO: 1939 - DNA, 170 bp, Artificial sequence
  Cdh1.387_Brca1.53
  crRNA array
cgatttcttggctttatatatcttgtggaaaggacgaaacaccgtaatttctactaagtgtagatctcggcgtctgccgggtccgtaatttctactaagtgtagataatgaggaggcgtcgatcatttttttaagcttggcgtggatccgatatcaactagatcttgaga

SEQ ID NO: 1940 - DNA, 170 bp, Artificial sequence
  Cdh1.387_Casp8.45
  crRNA array
cgatttcttggctttatatatcttgtggaaaggacgaaacaccgtaatttctactaagtgtagatctcggcgtctgccgggtccgtaatttctactaagtgtagatctaccgagatcctgtgaatgttttttaagcttggcgtggatccgatatcaactagatcttgaga

SEQ ID NO: 1941 - DNA, 170 bp, Artificial sequence
  Cdh1.387_Casp8.54
  crRNA array
cgatttcttggctttatatatcttgtggaaaggacgaaacaccgtaatttctactaagtgtagatctcggcgtctgccgggtccgtaatttctactaagtgtagatcagtgcagtcgtcgtaagatttttttaagcttggcgtggatccgatatcaactagatcttgaga

SEQ ID NO: 1942 - DNA, 170 bp, Artificial sequence
  Cdh1.387_Cbwd1.84
  crRNA array
cgatttcttggctttatatatcttgtggaaaggacgaaacaccgtaatttctactaagtgtagatctcggcgtctgccgggtccgtaatttctactaagtgtagatcacagcaggtaacatgccgcttttttaagcttggcgtggatccgatatcaactagatcttgaga

SEQ ID NO: 1943 - DNA, 170 bp, Artificial sequence
  Cdh1.387_Cbwd1.85
  crRNA array
cgatttcttggctttatatatcttgtggaaaggacgaaacaccgtaatttctactaagtgtagatctcggcgtctgccgggtccgtaatttctactaagtgtagatacagcaggtaacatgccgccttttttaagcttggcgtggatccgatatcaactagatcttgaga

SEQ ID NO: 1944 - DNA, 170 bp, Artificial sequence
  Cdh1.387_Cdkn2a.647
  crRNA array
cgatttcttggctttatatatcttgtggaaaggacgaaacaccgtaatttctactaagtgtagatctcggcgtctgccgggtccgtaatttctactaagtgtagatgcaatcacgggagggagcagttttttaagcttggcgtggatccgatatcaactagatcttgaga

SEQ ID NO: 1945 - DNA, 170 bp, Artificial sequence
  Cdh1.387_Cdkn2a.648
  crRNA array
cgatttcttggctttatatatcttgtggaaaggacgaaacaccgtaatttctactaagtgtagatctcggcgtctgccgggtccgtaatttctactaagtgtagatcaatcacgggagggagcagattttttaagcttggcgtggatccgatatcaactagatcttgaga

SEQ ID NO: 1946 - DNA, 170 bp, Artificial sequence
  Cdh1.387_Cic.162
  crRNA array
cgatttcttggctttatatatcttgtggaaaggacgaaacaccgtaatttctactaagtgtagatctcggcgtctgccgggtccgtaatttctactaagtgtagatcgcaggcgcgcccggcggagttttttaagcttggcgtggatccgatatcaactagatcttgaga

SEQ ID NO: 1947 - DNA, 170 bp, Artificial sequence
  Cdh1.387_Cic.164
  crRNA array
cgatttcttggctttatatatcttgtggaaaggacgaaacaccgtaatttctactaagtgtagatctcggcgtctgccgggtccgtaatttctactaagtgtagatcgggccctgggccggcggctttttttaagcttggcgtggatccgatatcaactagatcttgaga

SEQ ID NO: 1948 - DNA, 170 bp, Artificial sequence
  Cdh1.387_Ctcf.229
  crRNA array
cgatttcttggctttatatatcttgtggaaaggacgaaacaccgtaatttctactaagtgtagatctcggcgtctgccgggtccgtaatttctactaagtgtagatggctggtggctgatagtctgttttttaagcttggcgtggatccgatatcaactagatcttgaga

SEQ ID NO: 1949 - DNA, 170 bp, Artificial sequence
  Cdh1.387_Ctcf.809
  crRNA array
cgatttcttggctttatatatcttgtggaaaggacgaaacaccgtaatttctactaagtgtagatctcggcgtctgccgggtccgtaatttctactaagtgtagataagcgctatcatgatcccaattttttaagcttggcgtggatccgatatcaactagatcttgaga

SEQ ID NO: 1950 - DNA, 170 bp, Artificial sequence
  Cdh1.387_Elf3.826
  crRNA array
cgatttcttggctttatatatcttgtggaaaggacgaaacaccgtaatttctactaagtgtagatctcggcgtctgccgggtccgtaatttctactaagtgtagattccgagacatcctaatccacttttttaagcttggcgtggatccgatatcaactagatcttgaga

SEQ ID NO: 1951 - DNA, 170 bp, Artificial sequence
  Cdh1.387_Elf3.983
  crRNA array
cgatttcttggctttatatatcttgtggaaaggacgaaacaccgtaatttctactaagtgtagatctcggcgtctgccgggtccgtaatttctactaagtgtagattaggccccctaactggaccattttttaagcttggcgtggatccgatatcaactagatcttgaga

SEQ ID NO: 1952 - DNA, 170 bp, Artificial sequence
  Cdh1.387_Ep300.310
  crRNA array
cgatttcttggctttatatatcttgtggaaaggacgaaacaccgtaatttctactaagtgtagatctcggcgtctgccgggtccgtaatttctactaagtgtagatatggtacgacagtgaggaagttttttaagcttggcgtggatccgatatcaactagatcttgaga

SEQ ID NO: 1953 - DNA, 170 bp, Artificial sequence
  Cdh1.387_Ep300.587
  crRNA array
cgatttcttggctttatatatcttgtggaaaggacgaaacaccgtaatttctactaagtgtagatctcggcgtctgccgggtccgtaatttctactaagtgtagatcgccccggggcccccaaccattttttaagcttggcgtggatccgatatcaactagatcttgaga

SEQ ID NO: 1954 - DNA, 170 bp, Artificial sequence
  Cdh1.387_Epha2.126
  crRNA array
cgatttcttggctttatatatcttgtggaaaggacgaaacaccgtaatttctactaagtgtagatctcggcgtctgccgggtccgtaatttctactaagtgtagatcctgtgccgccgcggccgccttttttaagcttggcgtggatccgatatcaactagatcttgaga

SEQ ID NO: 1955 - DNA, 170 bp, Artificial sequence
  Cdh1.387_Epha2.5
  crRNA array
cgatttcttggctttatatatcttgtggaaaggacgaaacaccgtaatttctactaagtgtagatctcggcgtctgccgggtccgtaatttctactaagtgtagatcatgagctggcgccacccggttttttaagcttggcgtggatccgatatcaactagatcttgaga

SEQ ID NO: 1956 - DNA, 170 bp, Artificial sequence
  Cdh1.387_Fat1.105
  crRNA array
cgatttcttggctttatatatcttgtggaaaggacgaaacaccgtaatttctactaagtgtagatctcggcgtctgccgggtccgtaatttctactaagtgtagataactcgaggtgacaacaagtttttttaagcttggcgtggatccgatatcaactagatcttgaga

SEQ ID NO: 1957 - DNA, 170 bp, Artificial sequence
  Cdh1.387_Fat1.122
  crRNA array
cgatttcttggctttatatatcttgtggaaaggacgaaacaccgtaatttctactaagtgtagatctcggcgtctgccgggtccgtaatttctactaagtgtagatccatcgacatggaaacgggattttttaagcttggcgtggatccgatatcaactagatcttgaga

SEQ ID NO: 1958 - DNA, 170 bp, Artificial sequence
  Cdh1.387_Fbxw7.21
  crRNA array
cgatttcttggctttatatatcttgtggaaaggacgaaacaccgtaatttctactaagtgtagatctcggcgtctgccgggtccgtaatttctactaagtgtagattaatgtgccgtagaaacccattttttaagcttggcgtggatccgatatcaactagatcttgaga

SEQ ID NO: 1959 - DNA, 170 bp, Artificial sequence
  Cdh1.387_Fbxw7.23
  crRNA array
cgatttcttggctttatatatcttgtggaaaggacgaaacaccgtaatttctactaagtgtagatctcggcgtctgccgggtccgtaatttctactaagtgtagatatgtgccgtagaaacccatattttttaagcttggcgtggatccgatatcaactagatcttgaga

SEQ ID NO: 1960 - DNA, 170 bp, Artificial sequence
  Cdh1.387_Gata3.34
  crRNA array
cgatttcttggctttatatatcttgtggaaaggacgaaacaccgtaatttctactaagtgtagatctcggcgtctgccgggtccgtaatttctactaagtgtagatctaaactatcccgcaaagatttttttaagcttggcgtggatccgatatcaactagatcttgaga

SEQ ID NO: 1961 - DNA, 170 bp, Artificial sequence
  Cdh1.387_Gata3.47
  crRNA array
cgatttcttggctttatatatcttgtggaaaggacgaaacaccgtaatttctactaagtgtagatctcggcgtctgccgggtccgtaatttctactaagtgtagatcgtagtaggacgggacgtggttttttaagcttggcgtggatccgatatcaactagatcttgaga

SEQ ID NO: 1962 - DNA, 170 bp, Artificial sequence
  Cdh1.387_H2-Q2.1
  crRNA array
cgatttcttggctttatatatcttgtggaaaggacgaaacaccgtaatttctactaagtgtagatctcggcgtctgccgggtccgtaatttctactaagtgtagatagggcggccaccaacagcagttttttaagcttggcgtggatccgatatcaactagatcttgaga

SEQ ID NO: 1963 - DNA, 170 bp, Artificial sequence
  Cdh1.387_H2-Q2.2
  crRNA array
cgatttcttggctttatatatcttgtggaaaggacgaaacaccgtaatttctactaagtgtagatctcggcgtctgccgggtccgtaatttctactaagtgtagattaacctgcgcccgctgctgattttttaagcttggcgtggatccgatatcaactagatcttgaga

SEQ ID NO: 1964 - DNA, 170 bp, Artificial sequence
  Cdh1.387_Kdm5c.1878
  crRNA array
cgatttcttggctttatatatcttgtggaaaggacgaaacaccgtaatttctactaagtgtagatctcggcgtctgccgggtccgtaatttctactaagtgtagatagagcacggcacccgcccccttttttaagcttggcgtggatccgatatcaactagatcttgaga

SEQ ID NO: 1965 - DNA, 170 bp, Artificial sequence
  Cdh1.387_Kdm5c.1879
  crRNA array
cgatttcttggctttatatatcttgtggaaaggacgaaacaccgtaatttctactaagtgtagatctcggcgtctgccgggtccgtaatttctactaagtgtagatgagcacggcacccgccccccttttttaagcttggcgtggatccgatatcaactagatcttgaga

SEQ ID NO: 1966 - DNA, 170 bp, Artificial sequence
  Cdh1.387_Kdm6a.56
  crRNA array
cgatttcttggctttatatatcttgtggaaaggacgaaacaccgtaatttctactaagtgtagatctcggcgtctgccgggtccgtaatttctactaagtgtagattcgctgccgcctctcgcggcttttttaagcttggcgtggatccgatatcaactagatcttgaga

SEQ ID NO: 1967 - DNA, 170 bp, Artificial sequence
  Cdh1.387_Kdm6a.57
  crRNA array
cgatttcttggctttatatatcttgtggaaaggacgaaacaccgtaatttctactaagtgtagatctcggcgtctgccgggtccgtaatttctactaagtgtagatcgctgccgcctctcgcggcattttttaagcttggcgtggatccgatatcaactagatcttgaga

SEQ ID NO: 1968 - DNA, 170 bp, Artificial sequence
  Cdh1.387_Kmt2b.265
  crRNA array
cgatttcttggctttatatatcttgtggaaaggacgaaacaccgtaatttctactaagtgtagatctcggcgtctgccgggtccgtaatttctactaagtgtagatccccaagtgaagcccacctgttttttaagcttggcgtggatccgatatcaactagatcttgaga

SEQ ID NO: 1969 - DNA, 170 bp, Artificial sequence
  Cdh1.387_Kmt2b.298
  crRNA array
cgatttcttggctttatatatcttgtggaaaggacgaaacaccgtaatttctactaagtgtagatctcggcgtctgccgggtccgtaatttctactaagtgtagattccggcagggaccggctggcttttttaagcttggcgtggatccgatatcaactagatcttgaga

SEQ ID NO: 1970 - DNA, 170 bp, Artificial sequence
  Cdh1.387_Kmt2c.1962
  crRNA array
cgatttcttggctttatatatcttgtggaaaggacgaaacaccgtaatttctactaagtgtagatctcggcgtctgccgggtccgtaatttctactaagtgtagatgtgacgatctgtgccacaagttttttaagcttggcgtggatccgatatcaactagatcttgaga

SEQ ID NO: 1971 - DNA, 170 bp, Artificial sequence
  Cdh1.387_Kmt2c.2236
  crRNA array
cgatttcttggctttatatatcttgtggaaaggacgaaacaccgtaatttctactaagtgtagatctcggcgtctgccgggtccgtaatttctactaagtgtagatactcgacctccacctccctattttttaagcttggcgtggatccgatatcaactagatcttgaga

SEQ ID NO: 1972 - DNA, 170 bp, Artificial sequence
  Cdh1.387_Kmt2d.316
  crRNA array
cgatttcttggctttatatatcttgtggaaaggacgaaacaccgtaatttctactaagtgtagatctcggcgtctgccgggtccgtaatttctactaagtgtagatactccaggccacccaggtggttttttaagcttggcgtggatccgatatcaactagatcttgaga

SEQ ID NO: 1973 - DNA, 170 bp, Artificial sequence
  Cdh1.387_Kmt2d.416
  crRNA array
cgatttcttggctttatatatcttgtggaaaggacgaaacaccgtaatttctactaagtgtagatctcggcgtctgccgggtccgtaatttctactaagtgtagattaaacccccgggggaagggtttttttaagcttggcgtggatccgatatcaactagatcttgaga

SEQ ID NO: 1974 - DNA, 170 bp, Artificial sequence
  Cdh1.387_Map2k4.119
  crRNA array
cgatttcttggctttatatatcttgtggaaaggacgaaacaccgtaatttctactaagtgtagatctcggcgtctgccgggtccgtaatttctactaagtgtagattgctgtgtgggcggccacatttttttaagcttggcgtggatccgatatcaactagatcttgaga

SEQ ID NO: 1975 - DNA, 170 bp, Artificial sequence
  Cdh1.387_Map2k4.1261
  crRNA array
cgatttcttggctttatatatcttgtggaaaggacgaaacaccgtaatttctactaagtgtagatctcggcgtctgccgggtccgtaatttctactaagtgtagatgatgtagtaatgcggagtagttttttaagcttggcgtggatccgatatcaactagatcttgaga

SEQ ID NO: 1976 - DNA, 170 bp, Artificial sequence
  Cdh1.387_Map3k1.235
  crRNA array
cgatttcttggctttatatatcttgtggaaaggacgaaacaccgtaatttctactaagtgtagatctcggcgtctgccgggtccgtaatttctactaagtgtagataaaacgctactgatcgatcgttttttaagcttggcgtggatccgatatcaactagatcttgaga

SEQ ID NO: 1977 - DNA, 170 bp, Artificial sequence
  Cdh1.387_Map3k1.3838
  crRNA array
cgatttcttggctttatatatcttgtggaaaggacgaaacaccgtaatttctactaagtgtagatctcggcgtctgccgggtccgtaatttctactaagtgtagatccaacaacagggccccactattttttaagcttggcgtggatccgatatcaactagatcttgaga

SEQ ID NO: 1978 - DNA, 170 bp, Artificial sequence
  Cdh1.387_Mga.1655
  crRNA array
cgatttcttggctttatatatcttgtggaaaggacgaaacaccgtaatttctactaagtgtagatctcggcgtctgccgggtccgtaatttctactaagtgtagatcgagaagtggagagcatattttttttaagcttggcgtggatccgatatcaactagatcttgaga

SEQ ID NO: 1979 - DNA, 170 bp, Artificial sequence
  Cdh1.387_Mga.93
  crRNA array
cgatttcttggctttatatatcttgtggaaaggacgaaacaccgtaatttctactaagtgtagatctcggcgtctgccgggtccgtaatttctactaagtgtagatgagaaggctccccataatgtttttttaagcttggcgtggatccgatatcaactagatcttgaga

SEQ ID NO: 1980 - DNA, 170 bp, Artificial sequence
  Cdh1.387_Nf1.746
  crRNA array
cgatttcttggctttatatatcttgtggaaaggacgaaacaccgtaatttctactaagtgtagatctcggcgtctgccgggtccgtaatttctactaagtgtagattaagcataatgatgatgccattttttaagcttggcgtggatccgatatcaactagatcttgaga

SEQ ID NO: 1981 - DNA, 170 bp, Artificial sequence
  Cdh1.387_Nf1.97
  crRNA array
cgatttcttggctttatatatcttgtggaaaggacgaaacaccgtaatttctactaagtgtagatctcggcgtctgccgggtccgtaatttctactaagtgtagatagcccgctacatgctgatgcttttttaagcttggcgtggatccgatatcaactagatcttgaga

SEQ ID NO: 1982 - DNA, 170 bp, Artificial sequence
  Cdh1.387_Nf2.356
  crRNA array
cgatttcttggctttatatatcttgtggaaaggacgaaacaccgtaatttctactaagtgtagatctcggcgtctgccgggtccgtaatttctactaagtgtagatcggagtcatctgatagagatttttttaagcttggcgtggatccgatatcaactagatcttgaga

SEQ ID NO: 1983 - DNA, 170 bp, Artificial sequence
  Cdh1.387_Nf2.768
  crRNA array
cgatttcttggctttatatatcttgtggaaaggacgaaacaccgtaatttctactaagtgtagatctcggcgtctgccgggtccgtaatttctactaagtgtagatccgaagccccagtgtccggcttttttaagcttggcgtggatccgatatcaactagatcttgaga

SEQ ID NO: 1984 - DNA, 170 bp, Artificial sequence
  Cdh1.387_Notch1.1849
  crRNA array
cgatttcttggctttatatatcttgtggaaaggacgaaacaccgtaatttctactaagtgtagatctcggcgtctgccgggtccgtaatttctactaagtgtagatctggcgggtgggcggcgctgttttttaagcttggcgtggatccgatatcaactagatcttgaga

SEQ ID NO: 1985 - DNA, 170 bp, Artificial sequence
  Cdh1.387_Notch1.649
  crRNA array
cgatttcttggctttatatatcttgtggaaaggacgaaacaccgtaatttctactaagtgtagatctcggcgtctgccgggtccgtaatttctactaagtgtagattgggccaacgatgccaggacttttttaagcttggcgtggatccgatatcaactagatcttgaga

SEQ ID NO: 1986 - DNA, 170 bp, Artificial sequence
  Cdh1.387_Nsd1.70
  crRNA array
cgatttcttggctttatatatcttgtggaaaggacgaaacaccgtaatttctactaagtgtagatctcggcgtctgccgggtccgtaatttctactaagtgtagatactggtgtggacgatgcagattttttaagcttggcgtggatccgatatcaactagatcttgaga

SEQ ID NO: 1987 - DNA, 170 bp, Artificial sequence
  Cdh1.387_Nsd1.90
  crRNA array
cgatttcttggctttatatatcttgtggaaaggacgaaacaccgtaatttctactaagtgtagatctcggcgtctgccgggtccgtaatttctactaagtgtagataggagctaacggcaagaatgttttttaagcttggcgtggatccgatatcaactagatcttgaga

SEQ ID NO: 1988 - DNA, 170 bp, Artificial sequence
  Cdh1.387_Pbrm1.1236
  crRNA array
cgatttcttggctttatatatcttgtggaaaggacgaaacaccgtaatttctactaagtgtagatctcggcgtctgccgggtccgtaatttctactaagtgtagatgccgataaaaccaacagccgttttttaagcttggcgtggatccgatatcaactagatcttgaga

SEQ ID NO: 1989 - DNA, 170 bp, Artificial sequence
  Cdh1.387_Pbrm1.969
  crRNA array
cgatttcttggctttatatatcttgtggaaaggacgaaacaccgtaatttctactaagtgtagatctcggcgtctgccgggtccgtaatttctactaagtgtagatgagccctaatgaacagctcattttttaagcttggcgtggatccgatatcaactagatcttgaga

SEQ ID NO: 1990 - DNA, 170 bp, Artificial sequence
  Cdh1.387_Pik3r1.76
  crRNA array
cgatttcttggctttatatatcttgtggaaaggacgaaacaccgtaatttctactaagtgtagatctcggcgtctgccgggtccgtaatttctactaagtgtagataaaacctatacggcccgcacttttttaagcttggcgtggatccgatatcaactagatcttgaga

SEQ ID NO: 1991 - DNA, 170 bp, Artificial sequence
  Cdh1.387_Pik3r1.77
  crRNA array
cgatttcttggctttatatatcttgtggaaaggacgaaacaccgtaatttctactaagtgtagatctcggcgtctgccgggtccgtaatttctactaagtgtagataaacctatacggcccgcactttttttaagcttggcgtggatccgatatcaactagatcttgaga

SEQ ID NO: 1992 - DNA, 170 bp, Artificial sequence
  Cdh1.387_Pten.240
  crRNA array
cgatttcttggctttatatatcttgtggaaaggacgaaacaccgtaatttctactaagtgtagatctcggcgtctgccgggtccgtaatttctactaagtgtagattgcatacgctatagctgcttttttttaagcttggcgtggatccgatatcaactagatcttgaga

SEQ ID NO: 1993 - DNA, 170 bp, Artificial sequence
  Cdh1.387_Pten.265
  crRNA array
cgatttcttggctttatatatcttgtggaaaggacgaaacaccgtaatttctactaagtgtagatctcggcgtctgccgggtccgtaatttctactaagtgtagataagcgtggtgcgtgacgcacttttttaagcttggcgtggatccgatatcaactagatcttgaga

SEQ ID NO: 1994 - DNA, 170 bp, Artificial sequence
  Cdh1.387_Rasa1.1478
  crRNA array
cgatttcttggctttatatatcttgtggaaaggacgaaacaccgtaatttctactaagtgtagatctcggcgtctgccgggtccgtaatttctactaagtgtagatcgataatggtctatgatgtcttttttaagcttggcgtggatccgatatcaactagatcttgaga

SEQ ID NO: 1995 - DNA, 170 bp, Artificial sequence
  Cdh1.387_Rasa1.223
  crRNA array
cgatttcttggctttatatatcttgtggaaaggacgaaacaccgtaatttctactaagtgtagatctcggcgtctgccgggtccgtaatttctactaagtgtagattccatggagtatcgtgctcgttttttaagcttggcgtggatccgatatcaactagatcttgaga

SEQ ID NO: 1996 - DNA, 170 bp, Artificial sequence
  Cdh1.387_Rb1.211
  crRNA array
cgatttcttggctttatatatcttgtggaaaggacgaaacaccgtaatttctactaagtgtagatctcggcgtctgccgggtccgtaatttctactaagtgtagattctgacatgatcgggtacctttttttaagcttggcgtggatccgatatcaactagatcttgaga

SEQ ID NO: 1997 - DNA, 170 bp, Artificial sequence
  Cdh1.387_Rb1.394
  crRNA array
cgatttcttggctttatatatcttgtggaaaggacgaaacaccgtaatttctactaagtgtagatctcggcgtctgccgggtccgtaatttctactaagtgtagatagaaatctcgaagcaggatcttttttaagcttggcgtggatccgatatcaactagatcttgaga

SEQ ID NO: 1998 - DNA, 170 bp, Artificial sequence
  Cdh1.387_Rbm10.5
  crRNA array
cgatttcttggctttatatatcttgtggaaaggacgaaacaccgtaatttctactaagtgtagatctcggcgtctgccgggtccgtaatttctactaagtgtagatacgaaacctgaacccacacattttttaagcttggcgtggatccgatatcaactagatcttgaga

SEQ ID NO: 1999 - DNA, 170 bp, Artificial sequence
  Cdh1.387_Rbm10.6
  crRNA array
cgatttcttggctttatatatcttgtggaaaggacgaaacaccgtaatttctactaagtgtagatctcggcgtctgccgggtccgtaatttctactaagtgtagatcgaaacctgaacccacacagttttttaagcttggcgtggatccgatatcaactagatcttgaga

SEQ ID NO: 2000 - DNA, 170 bp, Artificial sequence
  Cdh1.387_Rnf43.1920
  crRNA array
cgatttcttggctttatatatcttgtggaaaggacgaaacaccgtaatttctactaagtgtagatctcggcgtctgccgggtccgtaatttctactaagtgtagatatccccgtgccgtggactccttttttaagcttggcgtggatccgatatcaactagatcttgaga

SEQ ID NO: 2001 - DNA, 170 bp, Artificial sequence
  Cdh1.387_Rnf43.39
  crRNA array
cgatttcttggctttatatatcttgtggaaaggacgaaacaccgtaatttctactaagtgtagatctcggcgtctgccgggtccgtaatttctactaagtgtagatcaaggggatcactctgataattttttaagcttggcgtggatccgatatcaactagatcttgaga

SEQ ID NO: 2002 - DNA, 170 bp, Artificial sequence
  Cdh1.387_Runx1.204
  crRNA array
cgatttcttggctttatatatcttgtggaaaggacgaaacaccgtaatttctactaagtgtagatctcggcgtctgccgggtccgtaatttctactaagtgtagattaaataagtccagccgttttttttttaagcttggcgtggatccgatatcaactagatcttgaga

SEQ ID NO: 2003 - DNA, 170 bp, Artificial sequence
  Cdh1.387_Runx1.81
  crRNA array
cgatttcttggctttatatatcttgtggaaaggacgaaacaccgtaatttctactaagtgtagatctcggcgtctgccgggtccgtaatttctactaagtgtagataggacgcgtatgggaattttttttttaagcttggcgtggatccgatatcaactagatcttgaga

SEQ ID NO: 2004 - DNA, 170 bp, Artificial sequence
  Cdh1.387_Setd2.143
  crRNA array
cgatttcttggctttatatatcttgtggaaaggacgaaacaccgtaatttctactaagtgtagatctcggcgtctgccgggtccgtaatttctactaagtgtagatgcacaaccacaacagactggttttttaagcttggcgtggatccgatatcaactagatcttgaga

SEQ ID NO: 2005 - DNA, 170 bp, Artificial sequence
  Cdh1.387_Setd2.508
  crRNA array
cgatttcttggctttatatatcttgtggaaaggacgaaacaccgtaatttctactaagtgtagatctcggcgtctgccgggtccgtaatttctactaagtgtagattacgatcccgagcacccgacttttttaagcttggcgtggatccgatatcaactagatcttgaga

SEQ ID NO: 2006 - DNA, 170 bp, Artificial sequence
  Cdh1.387_Smad4.3038
  crRNA array
cgatttcttggctttatatatcttgtggaaaggacgaaacaccgtaatttctactaagtgtagatctcggcgtctgccgggtccgtaatttctactaagtgtagatatctgcggcagtgtcaccggttttttaagcttggcgtggatccgatatcaactagatcttgaga

SEQ ID NO: 2007 - DNA, 170 bp, Artificial sequence
  Cdh1.387_Smad4.39
  crRNA array
cgatttcttggctttatatatcttgtggaaaggacgaaacaccgtaatttctactaagtgtagatctcggcgtctgccgggtccgtaatttctactaagtgtagatagtcaaacgcatactgacaattttttaagcttggcgtggatccgatatcaactagatcttgaga

SEQ ID NO: 2008 - DNA, 170 bp, Artificial sequence
  Cdh1.387_Stag2.1409
  crRNA array
cgatttcttggctttatatatcttgtggaaaggacgaaacaccgtaatttctactaagtgtagatctcggcgtctgccgggtccgtaatttctactaagtgtagatgctaataactgcggaagggcttttttaagcttggcgtggatccgatatcaactagatcttgaga

SEQ ID NO: 2009 - DNA, 170 bp, Artificial sequence
  Cdh1.387_Stag2.4401
  crRNA array
cgatttcttggctttatatatcttgtggaaaggacgaaacaccgtaatttctactaagtgtagatctcggcgtctgccgggtccgtaatttctactaagtgtagattaatcgtccagtggtgtatattttttaagcttggcgtggatccgatatcaactagatcttgaga

SEQ ID NO: 2010 - DNA, 170 bp, Artificial sequence
  Cdh1.387_Tbl1xr1.1
  crRNA array
cgatttcttggctttatatatcttgtggaaaggacgaaacaccgtaatttctactaagtgtagatctcggcgtctgccgggtccgtaatttctactaagtgtagatggatgcgcatactggtgaagttttttaagcttggcgtggatccgatatcaactagatcttgaga

SEQ ID NO: 2011 - DNA, 170 bp, Artificial sequence
  Cdh1.387_Tbl1xr1.83
  crRNA array
cgatttcttggctttatatatcttgtggaaaggacgaaacaccgtaatttctactaagtgtagatctcggcgtctgccgggtccgtaatttctactaagtgtagatatggtcgacccatcgagtctttttttaagcttggcgtggatccgatatcaactagatcttgaga

SEQ ID NO: 2012 - DNA, 170 bp, Artificial sequence
  Cdh1.387_Tgfbr2.290
  crRNA array
cgatttcttggctttatatatcttgtggaaaggacgaaacaccgtaatttctactaagtgtagatctcggcgtctgccgggtccgtaatttctactaagtgtagatcctctcggcgcccgggtaaattttttaagcttggcgtggatccgatatcaactagatcttgaga

SEQ ID NO: 2013 - DNA, 170 bp, Artificial sequence
  Cdh1.387_Tgfbr2.292
  crRNA array
cgatttcttggctttatatatcttgtggaaaggacgaaacaccgtaatttctactaagtgtagatctcggcgtctgccgggtccgtaatttctactaagtgtagatcccgggcgccgagagggaaattttttaagcttggcgtggatccgatatcaactagatcttgaga

SEQ ID NO: 2014 - DNA, 170 bp, Artificial sequence
  Cdh1.387_Trp53.4
  crRNA array
cgatttcttggctttatatatcttgtggaaaggacgaaacaccgtaatttctactaagtgtagatctcggcgtctgccgggtccgtaatttctactaagtgtagatccctgaactgcccccagggattttttaagcttggcgtggatccgatatcaactagatcttgaga

SEQ ID NO: 2015 - DNA, 170 bp, Artificial sequence
  Cdh1.387_Trp53.528
  crRNA array
cgatttcttggctttatatatcttgtggaaaggacgaaacaccgtaatttctactaagtgtagatctcggcgtctgccgggtccgtaatttctactaagtgtagatgctgggccagcagagacctgttttttaagcttggcgtggatccgatatcaactagatcttgaga

SEQ ID NO: 2016 - DNA, 170 bp, Artificial sequence
  Cdh1.387_Vhl.1
  crRNA array
cgatttcttggctttatatatcttgtggaaaggacgaaacaccgtaatttctactaagtgtagatctcggcgtctgccgggtccgtaatttctactaagtgtagatagggctcccggcggccatttttttttaagcttggcgtggatccgatatcaactagatcttgaga

SEQ ID NO: 2017 - DNA, 170 bp, Artificial sequence
  Cdh1.387_Vhl.151
  crRNA array
cgatttcttggctttatatatcttgtggaaaggacgaaacaccgtaatttctactaagtgtagatctcggcgtctgccgggtccgtaatttctactaagtgtagattagagcactcacccgagggattttttaagcttggcgtggatccgatatcaactagatcttgaga

SEQ ID NO: 2018 - DNA, 170 bp, Artificial sequence
  Cdh1.387_Zc3h13.1387
  crRNA array
cgatttcttggctttatatatcttgtggaaaggacgaaacaccgtaatttctactaagtgtagatctcggcgtctgccgggtccgtaatttctactaagtgtagatgtgacgccggtcatgtgactttttttaagcttggcgtggatccgatatcaactagatcttgaga

SEQ ID NO: 2019 - DNA, 170 bp, Artificial sequence
  Cdh1.387_Zc3h13.1777
  crRNA array
cgatttcttggctttatatatcttgtggaaaggacgaaacaccgtaatttctactaagtgtagatctcggcgtctgccgggtccgtaatttctactaagtgtagatgatgctgccagtgtagcggcttttttaagcttggcgtggatccgatatcaactagatcttgaga

SEQ ID NO: 2020 - DNA, 170 bp, Artificial sequence
  Cdh1.58_Acvr2a.155
  crRNA array
cgatttcttggctttatatatcttgtggaaaggacgaaacaccgtaatttctactaagtgtagatctcgtccgcgcccgggactctaatttctactaagtgtagatggacctggctaatcaagtatttttttaagcttggcgtggatccgatatcaactagatcttgaga

SEQ ID NO: 2021 - DNA, 170 bp, Artificial sequence
  Cdh1.58_Acvr2a.70
  crRNA array
cgatttcttggctttatatatcttgtggaaaggacgaaacaccgtaatttctactaagtgtagatctcgtccgcgcccgggactctaatttctactaagtgtagatcccgaggcgccggagaagccttttttaagcttggcgtggatccgatatcaactagatcttgaga

SEQ ID NO: 2022 - DNA, 170 bp, Artificial sequence
  Cdh1.58_Apc.21
  crRNA array
cgatttcttggctttatatatcttgtggaaaggacgaaacaccgtaatttctactaagtgtagatctcgtccgcgcccgggactctaatttctactaagtgtagatgtgatccacacgtgtagctgttttttaagcttggcgtggatccgatatcaactagatcttgaga

SEQ ID NO: 2023 - DNA, 170 bp, Artificial sequence
  Cdh1.58_Apc.867
  crRNA array
cgatttcttggctttatatatcttgtggaaaggacgaaacaccgtaatttctactaagtgtagatctcgtccgcgcccgggactctaatttctactaagtgtagatcagtcccaggcggcggaagcttttttaagcttggcgtggatccgatatcaactagatcttgaga

SEQ ID NO: 2024 - DNA, 170 bp, Artificial sequence
  Cdh1.58_Arid1a.2
  crRNA array
cgatttcttggctttatatatcttgtggaaaggacgaaacaccgtaatttctactaagtgtagatctcgtccgcgcccgggactctaatttctactaagtgtagatcccgcgcccccgtcctggggttttttaagcttggcgtggatccgatatcaactagatcttgaga

SEQ ID NO: 2025 - DNA, 170 bp, Artificial sequence
  Cdh1.58_Arid1a.5
  crRNA array
cgatttcttggctttatatatcttgtggaaaggacgaaacaccgtaatttctactaagtgtagatctcgtccgcgcccgggactctaatttctactaagtgtagatcccgcgctcggccgctgccgttttttaagcttggcgtggatccgatatcaactagatcttgaga

SEQ ID NO: 2026 - DNA, 170 bp, Artificial sequence
  Cdh1.58_Arid2.166
  crRNA array
cgatttcttggctttatatatcttgtggaaaggacgaaacaccgtaatttctactaagtgtagatctcgtccgcgcccgggactctaatttctactaagtgtagataaccgcgatctgggttttttttttttaagcttggcgtggatccgatatcaactagatcttgaga

SEQ ID NO: 2027 - DNA, 170 bp, Artificial sequence
  Cdh1.58_Arid2.172
  crRNA array
cgatttcttggctttatatatcttgtggaaaggacgaaacaccgtaatttctactaagtgtagatctcgtccgcgcccgggactctaatttctactaagtgtagatctggacgagctgcggcagttttttttaagcttggcgtggatccgatatcaactagatcttgaga

SEQ ID NO: 2028 - DNA, 170 bp, Artificial sequence
  Cdh1.58_Atm.120
  crRNA array
cgatttcttggctttatatatcttgtggaaaggacgaaacaccgtaatttctactaagtgtagatctcgtccgcgcccgggactctaatttctactaagtgtagatgacaggtagtcggcagctaattttttaagcttggcgtggatccgatatcaactagatcttgaga

SEQ ID NO: 2029 - DNA, 170 bp, Artificial sequence
  Cdh1.58_Atm.997
  crRNA array
cgatttcttggctttatatatcttgtggaaaggacgaaacaccgtaatttctactaagtgtagatctcgtccgcgcccgggactctaatttctactaagtgtagatgagaaagtctccgaatcgttttttttaagcttggcgtggatccgatatcaactagatcttgaga

SEQ ID NO: 2030 - DNA, 170 bp, Artificial sequence
  Cdh1.58_Atrx.249
  crRNA array
cgatttcttggctttatatatcttgtggaaaggacgaaacaccgtaatttctactaagtgtagatctcgtccgcgcccgggactctaatttctactaagtgtagattagccagtcgctcatatctcttttttaagcttggcgtggatccgatatcaactagatcttgaga

SEQ ID NO: 2031 - DNA, 170 bp, Artificial sequence
  Cdh1.58_Atrx.251
  crRNA array
cgatttcttggctttatatatcttgtggaaaggacgaaacaccgtaatttctactaagtgtagatctcgtccgcgcccgggactctaatttctactaagtgtagatgccagtcgctcatatctctgttttttaagcttggcgtggatccgatatcaactagatcttgaga

SEQ ID NO: 2032 - DNA, 170 bp, Artificial sequence
  Cdh1.58_Bcor.203
  crRNA array
cgatttcttggctttatatatcttgtggaaaggacgaaacaccgtaatttctactaagtgtagatctcgtccgcgcccgggactctaatttctactaagtgtagatccccggagcggagtccaggcttttttaagcttggcgtggatccgatatcaactagatcttgaga

SEQ ID NO: 2033 - DNA, 170 bp, Artificial sequence
  Cdh1.58_Bcor.475
  crRNA array
cgatttcttggctttatatatcttgtggaaaggacgaaacaccgtaatttctactaagtgtagatctcgtccgcgcccgggactctaatttctactaagtgtagattgcaacccctctgtatgggattttttaagcttggcgtggatccgatatcaactagatcttgaga

SEQ ID NO: 2034 - DNA, 170 bp, Artificial sequence
  Cdh1.58_Brca1.112
  crRNA array
cgatttcttggctttatatatcttgtggaaaggacgaaacaccgtaatttctactaagtgtagatctcgtccgcgcccgggactctaatttctactaagtgtagatctagacgctctgtggagactttttttaagcttggcgtggatccgatatcaactagatcttgaga

SEQ ID NO: 2035 - DNA, 170 bp, Artificial sequence
  Cdh1.58_Brca1.53
  crRNA array
cgatttcttggctttatatatcttgtggaaaggacgaaacaccgtaatttctactaagtgtagatctcgtccgcgcccgggactctaatttctactaagtgtagataatgaggaggcgtcgatcatttttttaagcttggcgtggatccgatatcaactagatcttgaga

SEQ ID NO: 2036 - DNA, 170 bp, Artificial sequence
  Cdh1.58_Casp8.45
  crRNA array
cgatttcttggctttatatatcttgtggaaaggacgaaacaccgtaatttctactaagtgtagatctcgtccgcgcccgggactctaatttctactaagtgtagatctaccgagatcctgtgaatgttttttaagcttggcgtggatccgatatcaactagatcttgaga

SEQ ID NO: 2037 - DNA, 170 bp, Artificial sequence
  Cdh1.58_Casp8.54
  crRNA array
cgatttcttggctttatatatcttgtggaaaggacgaaacaccgtaatttctactaagtgtagatctcgtccgcgcccgggactctaatttctactaagtgtagatcagtgcagtcgtcgtaagatttttttaagcttggcgtggatccgatatcaactagatcttgaga

SEQ ID NO: 2038 - DNA, 170 bp, Artificial sequence
  Cdh1.58_Cbwd1.84
  crRNA array
cgatttcttggctttatatatcttgtggaaaggacgaaacaccgtaatttctactaagtgtagatctcgtccgcgcccgggactctaatttctactaagtgtagatcacagcaggtaacatgccgcttttttaagcttggcgtggatccgatatcaactagatcttgaga

SEQ ID NO: 2039 - DNA, 170 bp, Artificial sequence
  Cdh1.58_Cbwd1.85
  crRNA array
cgatttcttggctttatatatcttgtggaaaggacgaaacaccgtaatttctactaagtgtagatctcgtccgcgcccgggactctaatttctactaagtgtagatacagcaggtaacatgccgccttttttaagcttggcgtggatccgatatcaactagatcttgaga

SEQ ID NO: 2040 - DNA, 170 bp, Artificial sequence
  Cdh1.58_Cdkn2a.647
  crRNA array
cgatttcttggctttatatatcttgtggaaaggacgaaacaccgtaatttctactaagtgtagatctcgtccgcgcccgggactctaatttctactaagtgtagatgcaatcacgggagggagcagttttttaagcttggcgtggatccgatatcaactagatcttgaga

SEQ ID NO: 2041 - DNA, 170 bp, Artificial sequence
  Cdh1.58_Cdkn2a.648
  crRNA array
cgatttcttggctttatatatcttgtggaaaggacgaaacaccgtaatttctactaagtgtagatctcgtccgcgcccgggactctaatttctactaagtgtagatcaatcacgggagggagcagattttttaagcttggcgtggatccgatatcaactagatcttgaga

SEQ ID NO: 2042 - DNA, 170 bp, Artificial sequence
  Cdh1.58_Cic.162
  crRNA array
cgatttcttggctttatatatcttgtggaaaggacgaaacaccgtaatttctactaagtgtagatctcgtccgcgcccgggactctaatttctactaagtgtagatcgcaggcgcgcccggcggagttttttaagcttggcgtggatccgatatcaactagatcttgaga

SEQ ID NO: 2043 - DNA, 170 bp, Artificial sequence
  Cdh1.58_Cic.164
  crRNA array
cgatttcttggctttatatatcttgtggaaaggacgaaacaccgtaatttctactaagtgtagatctcgtccgcgcccgggactctaatttctactaagtgtagatcgggccctgggccggcggctttttttaagcttggcgtggatccgatatcaactagatcttgaga

SEQ ID NO: 2044 - DNA, 170 bp, Artificial sequence
  Cdh1.58_Ctcf.229
  crRNA array
cgatttcttggctttatatatcttgtggaaaggacgaaacaccgtaatttctactaagtgtagatctcgtccgcgcccgggactctaatttctactaagtgtagatggctggtggctgatagtctgttttttaagcttggcgtggatccgatatcaactagatcttgaga

SEQ ID NO: 2045 - DNA, 170 bp, Artificial sequence
  Cdh1.58_Ctcf.809
  crRNA array
cgatttcttggctttatatatcttgtggaaaggacgaaacaccgtaatttctactaagtgtagatctcgtccgcgcccgggactctaatttctactaagtgtagataagcgctatcatgatcccaattttttaagcttggcgtggatccgatatcaactagatcttgaga

SEQ ID NO: 2046 - DNA, 170 bp, Artificial sequence
  Cdh1.58_Elf3.826
  crRNA array
cgatttcttggctttatatatcttgtggaaaggacgaaacaccgtaatttctactaagtgtagatctcgtccgcgcccgggactctaatttctactaagtgtagattccgagacatcctaatccacttttttaagcttggcgtggatccgatatcaactagatcttgaga

SEQ ID NO: 2047 - DNA, 170 bp, Artificial sequence
  Cdh1.58_Elf3.983
  crRNA array
cgatttcttggctttatatatcttgtggaaaggacgaaacaccgtaatttctactaagtgtagatctcgtccgcgcccgggactctaatttctactaagtgtagattaggccccctaactggaccattttttaagcttggcgtggatccgatatcaactagatcttgaga

SEQ ID NO: 2048 - DNA, 170 bp, Artificial sequence
  Cdh1.58_Ep300.310
  crRNA array
cgatttcttggctttatatatcttgtggaaaggacgaaacaccgtaatttctactaagtgtagatctcgtccgcgcccgggactctaatttctactaagtgtagatatggtacgacagtgaggaagttttttaagcttggcgtggatccgatatcaactagatcttgaga

SEQ ID NO: 2049 - DNA, 170 bp, Artificial sequence
  Cdh1.58_Ep300.587
  crRNA array
cgatttcttggctttatatatcttgtggaaaggacgaaacaccgtaatttctactaagtgtagatctcgtccgcgcccgggactctaatttctactaagtgtagatcgccccggggcccccaaccattttttaagcttggcgtggatccgatatcaactagatcttgaga

SEQ ID NO: 2050 - DNA, 170 bp, Artificial sequence
  Cdh1.58_Epha2.126
  crRNA array
cgatttcttggctttatatatcttgtggaaaggacgaaacaccgtaatttctactaagtgtagatctcgtccgcgcccgggactctaatttctactaagtgtagatcctgtgccgccgcggccgccttttttaagcttggcgtggatccgatatcaactagatcttgaga

SEQ ID NO: 2051 - DNA, 170 bp, Artificial sequence
  Cdh1.58_Epha2.5
  crRNA array
cgatttcttggctttatatatcttgtggaaaggacgaaacaccgtaatttctactaagtgtagatctcgtccgcgcccgggactctaatttctactaagtgtagatcatgagctggcgccacccggttttttaagcttggcgtggatccgatatcaactagatcttgaga

SEQ ID NO: 2052 - DNA, 170 bp, Artificial sequence
  Cdh1.58_Fat1.105
  crRNA array
cgatttcttggctttatatatcttgtggaaaggacgaaacaccgtaatttctactaagtgtagatctcgtccgcgcccgggactctaatttctactaagtgtagataactcgaggtgacaacaagtttttttaagcttggcgtggatccgatatcaactagatcttgaga

SEQ ID NO: 2053 - DNA, 170 bp, Artificial sequence
  Cdh1.58_Fat1.122
  crRNA array
cgatttcttggctttatatatcttgtggaaaggacgaaacaccgtaatttctactaagtgtagatctcgtccgcgcccgggactctaatttctactaagtgtagatccatcgacatggaaacgggattttttaagcttggcgtggatccgatatcaactagatcttgaga

SEQ ID NO: 2054 - DNA, 170 bp, Artificial sequence
  Cdh1.58_Fbxw7.21
  crRNA array
cgatttcttggctttatatatcttgtggaaaggacgaaacaccgtaatttctactaagtgtagatctcgtccgcgcccgggactctaatttctactaagtgtagattaatgtgccgtagaaacccattttttaagcttggcgtggatccgatatcaactagatcttgaga

SEQ ID NO: 2055 - DNA, 170 bp, Artificial sequence
  Cdh1.58_Fbxw7.23
  crRNA array
cgatttcttggctttatatatcttgtggaaaggacgaaacaccgtaatttctactaagtgtagatctcgtccgcgcccgggactctaatttctactaagtgtagatatgtgccgtagaaacccatattttttaagcttggcgtggatccgatatcaactagatcttgaga

SEQ ID NO: 2056 - DNA, 170 bp, Artificial sequence
  Cdh1.58_Gata3.34
  crRNA array
cgatttcttggctttatatatcttgtggaaaggacgaaacaccgtaatttctactaagtgtagatctcgtccgcgcccgggactctaatttctactaagtgtagatctaaactatcccgcaaagatttttttaagcttggcgtggatccgatatcaactagatcttgaga

SEQ ID NO: 2057 - DNA, 170 bp, Artificial sequence
  Cdh1.58_Gata3.47
  crRNA array
cgatttcttggctttatatatcttgtggaaaggacgaaacaccgtaatttctactaagtgtagatctcgtccgcgcccgggactctaatttctactaagtgtagatcgtagtaggacgggacgtggttttttaagcttggcgtggatccgatatcaactagatcttgaga

SEQ ID NO: 2058 - DNA, 170 bp, Artificial sequence
  Cdh1.58_H2-Q2.1
  crRNA array
cgatttcttggctttatatatcttgtggaaaggacgaaacaccgtaatttctactaagtgtagatctcgtccgcgcccgggactctaatttctactaagtgtagatagggcggccaccaacagcagttttttaagcttggcgtggatccgatatcaactagatcttgaga

SEQ ID NO: 2059 - DNA, 170 bp, Artificial sequence
  Cdh1.58_H2-Q2.2
  crRNA array
cgatttcttggctttatatatcttgtggaaaggacgaaacaccgtaatttctactaagtgtagatctcgtccgcgcccgggactctaatttctactaagtgtagattaacctgcgcccgctgctgattttttaagcttggcgtggatccgatatcaactagatcttgaga

SEQ ID NO: 2060 - DNA, 170 bp, Artificial sequence
  Cdh1.58_Kdm5c.1878
  crRNA array
cgatttcttggctttatatatcttgtggaaaggacgaaacaccgtaatttctactaagtgtagatctcgtccgcgcccgggactctaatttctactaagtgtagatagagcacggcacccgcccccttttttaagcttggcgtggatccgatatcaactagatcttgaga

SEQ ID NO: 2061 - DNA, 170 bp, Artificial sequence
  Cdh1.58_Kdm5c.1879
  crRNA array
cgatttcttggctttatatatcttgtggaaaggacgaaacaccgtaatttctactaagtgtagatctcgtccgcgcccgggactctaatttctactaagtgtagatgagcacggcacccgccccccttttttaagcttggcgtggatccgatatcaactagatcttgaga

SEQ ID NO: 2062 - DNA, 170 bp, Artificial sequence
  Cdh1.58_Kdm6a.56
  crRNA array
cgatttcttggctttatatatcttgtggaaaggacgaaacaccgtaatttctactaagtgtagatctcgtccgcgcccgggactctaatttctactaagtgtagattcgctgccgcctctcgcggcttttttaagcttggcgtggatccgatatcaactagatcttgaga

SEQ ID NO: 2063 - DNA, 170 bp, Artificial sequence
  Cdh1.58_Kdm6a.57
  crRNA array
cgatttcttggctttatatatcttgtggaaaggacgaaacaccgtaatttctactaagtgtagatctcgtccgcgcccgggactctaatttctactaagtgtagatcgctgccgcctctcgcggcattttttaagcttggcgtggatccgatatcaactagatcttgaga

SEQ ID NO: 2064 - DNA, 170 bp, Artificial sequence
  Cdh1.58_Kmt2b.265
  crRNA array
cgatttcttggctttatatatcttgtggaaaggacgaaacaccgtaatttctactaagtgtagatctcgtccgcgcccgggactctaatttctactaagtgtagatccccaagtgaagcccacctgttttttaagcttggcgtggatccgatatcaactagatcttgaga

SEQ ID NO: 2065 - DNA, 170 bp, Artificial sequence
  Cdh1.58_Kmt2b.298
  crRNA array
cgatttcttggctttatatatcttgtggaaaggacgaaacaccgtaatttctactaagtgtagatctcgtccgcgcccgggactctaatttctactaagtgtagattccggcagggaccggctggcttttttaagcttggcgtggatccgatatcaactagatcttgaga

SEQ ID NO: 2066 - DNA, 170 bp, Artificial sequence
  Cdh1.58_Kmt2c.1962
  crRNA array
cgatttcttggctttatatatcttgtggaaaggacgaaacaccgtaatttctactaagtgtagatctcgtccgcgcccgggactctaatttctactaagtgtagatgtgacgatctgtgccacaagttttttaagcttggcgtggatccgatatcaactagatcttgaga

SEQ ID NO: 2067 - DNA, 170 bp, Artificial sequence
  Cdh1.58_Kmt2c.2236
  crRNA array
cgatttcttggctttatatatcttgtggaaaggacgaaacaccgtaatttctactaagtgtagatctcgtccgcgcccgggactctaatttctactaagtgtagatactcgacctccacctccctattttttaagcttggcgtggatccgatatcaactagatcttgaga

SEQ ID NO: 2068 - DNA, 170 bp, Artificial sequence
  Cdh1.58_Kmt2d.316
  crRNA array
cgatttcttggctttatatatcttgtggaaaggacgaaacaccgtaatttctactaagtgtagatctcgtccgcgcccgggactctaatttctactaagtgtagatactccaggccacccaggtggttttttaagcttggcgtggatccgatatcaactagatcttgaga

SEQ ID NO: 2069 - DNA, 170 bp, Artificial sequence
  Cdh1.58_Kmt2d.416
  crRNA array
cgatttcttggctttatatatcttgtggaaaggacgaaacaccgtaatttctactaagtgtagatctcgtccgcgcccgggactctaatttctactaagtgtagattaaacccccgggggaagggtttttttaagcttggcgtggatccgatatcaactagatcttgaga

SEQ ID NO: 2070 - DNA, 170 bp, Artificial sequence
  Cdh1.58_Map2k4.119
  crRNA array
cgatttcttggctttatatatcttgtggaaaggacgaaacaccgtaatttctactaagtgtagatctcgtccgcgcccgggactctaatttctactaagtgtagattgctgtgtgggcggccacatttttttaagcttggcgtggatccgatatcaactagatcttgaga

SEQ ID NO: 2071 - DNA, 170 bp, Artificial sequence
  Cdh1.58_Map2k4.1261
  crRNA array
cgatttcttggctttatatatcttgtggaaaggacgaaacaccgtaatttctactaagtgtagatctcgtccgcgcccgggactctaatttctactaagtgtagatgatgtagtaatgcggagtagttttttaagcttggcgtggatccgatatcaactagatcttgaga

SEQ ID NO: 2072 - DNA, 170 bp, Artificial sequence
  Cdh1.58_Map3k1.235
  crRNA array
cgatttcttggctttatatatcttgtggaaaggacgaaacaccgtaatttctactaagtgtagatctcgtccgcgcccgggactctaatttctactaagtgtagataaaacgctactgatcgatcgttttttaagcttggcgtggatccgatatcaactagatcttgaga

SEQ ID NO: 2073 - DNA, 170 bp, Artificial sequence
  Cdh1.58_Map3k1.3838
  crRNA array
cgatttcttggctttatatatcttgtggaaaggacgaaacaccgtaatttctactaagtgtagatctcgtccgcgcccgggactctaatttctactaagtgtagatccaacaacagggccccactattttttaagcttggcgtggatccgatatcaactagatcttgaga

SEQ ID NO: 2074 - DNA, 170 bp, Artificial sequence
  Cdh1.58_Mga.1655
  crRNA array
cgatttcttggctttatatatcttgtggaaaggacgaaacaccgtaatttctactaagtgtagatctcgtccgcgcccgggactctaatttctactaagtgtagatcgagaagtggagagcatattttttttaagcttggcgtggatccgatatcaactagatcttgaga

SEQ ID NO: 2075 - DNA, 170 bp, Artificial sequence
  Cdh1.58_Mga.93
  crRNA array
cgatttcttggctttatatatcttgtggaaaggacgaaacaccgtaatttctactaagtgtagatctcgtccgcgcccgggactctaatttctactaagtgtagatgagaaggctccccataatgtttttttaagcttggcgtggatccgatatcaactagatcttgaga

SEQ ID NO: 2076 - DNA, 170 bp, Artificial sequence
  Cdh1.58_Nf1.746
  crRNA array
cgatttcttggctttatatatcttgtggaaaggacgaaacaccgtaatttctactaagtgtagatctcgtccgcgcccgggactctaatttctactaagtgtagattaagcataatgatgatgccattttttaagcttggcgtggatccgatatcaactagatcttgaga

SEQ ID NO: 2077 - DNA, 170 bp, Artificial sequence
  Cdh1.58_Nf1.97
  crRNA array
cgatttcttggctttatatatcttgtggaaaggacgaaacaccgtaatttctactaagtgtagatctcgtccgcgcccgggactctaatttctactaagtgtagatagcccgctacatgctgatgcttttttaagcttggcgtggatccgatatcaactagatcttgaga

SEQ ID NO: 2078 - DNA, 170 bp, Artificial sequence
  Cdh1.58_Nf2.356
  crRNA array
cgatttcttggctttatatatcttgtggaaaggacgaaacaccgtaatttctactaagtgtagatctcgtccgcgcccgggactctaatttctactaagtgtagatcggagtcatctgatagagatttttttaagcttggcgtggatccgatatcaactagatcttgaga

SEQ ID NO: 2079 - DNA, 170 bp, Artificial sequence
  Cdh1.58_Nf2.768
  crRNA array
cgatttcttggctttatatatcttgtggaaaggacgaaacaccgtaatttctactaagtgtagatctcgtccgcgcccgggactctaatttctactaagtgtagatccgaagccccagtgtccggcttttttaagcttggcgtggatccgatatcaactagatcttgaga

SEQ ID NO: 2080 - DNA, 170 bp, Artificial sequence
  Cdh1.58_Notch1.1849
  crRNA array
cgatttcttggctttatatatcttgtggaaaggacgaaacaccgtaatttctactaagtgtagatctcgtccgcgcccgggactctaatttctactaagtgtagatctggcgggtgggcggcgctgttttttaagcttggcgtggatccgatatcaactagatcttgaga

SEQ ID NO: 2081 - DNA, 170 bp, Artificial sequence
  Cdh1.58_Notch1.649
  crRNA array
cgatttcttggctttatatatcttgtggaaaggacgaaacaccgtaatttctactaagtgtagatctcgtccgcgcccgggactctaatttctactaagtgtagattgggccaacgatgccaggacttttttaagcttggcgtggatccgatatcaactagatcttgaga

SEQ ID NO: 2082 - DNA, 170 bp, Artificial sequence
  Cdh1.58_Nsd1.70
  crRNA array
cgatttcttggctttatatatcttgtggaaaggacgaaacaccgtaatttctactaagtgtagatctcgtccgcgcccgggactctaatttctactaagtgtagatactggtgtggacgatgcagattttttaagcttggcgtggatccgatatcaactagatcttgaga

SEQ ID NO: 2083 - DNA, 170 bp, Artificial sequence
  Cdh1.58_Nsd1.90
  crRNA array
cgatttcttggctttatatatcttgtggaaaggacgaaacaccgtaatttctactaagtgtagatctcgtccgcgcccgggactctaatttctactaagtgtagataggagctaacggcaagaatgttttttaagcttggcgtggatccgatatcaactagatcttgaga

SEQ ID NO: 2084 - DNA, 170 bp, Artificial sequence
  Cdh1.58_Pbrm1.1236
  crRNA array
cgatttcttggctttatatatcttgtggaaaggacgaaacaccgtaatttctactaagtgtagatctcgtccgcgcccgggactctaatttctactaagtgtagatgccgataaaaccaacagccgttttttaagcttggcgtggatccgatatcaactagatcttgaga

SEQ ID NO: 2085 - DNA, 170 bp, Artificial sequence
  Cdh1.58_Pbrm1.969
  crRNA array
cgatttcttggctttatatatcttgtggaaaggacgaaacaccgtaatttctactaagtgtagatctcgtccgcgcccgggactctaatttctactaagtgtagatgagccctaatgaacagctcattttttaagcttggcgtggatccgatatcaactagatcttgaga

SEQ ID NO: 2086 - DNA, 170 bp, Artificial sequence
  Cdh1.58_Pik3r1.76
  crRNA array
cgatttcttggctttatatatcttgtggaaaggacgaaacaccgtaatttctactaagtgtagatctcgtccgcgcccgggactctaatttctactaagtgtagataaaacctatacggcccgcacttttttaagcttggcgtggatccgatatcaactagatcttgaga

SEQ ID NO: 2087 - DNA, 170 bp, Artificial sequence
  Cdh1.58_Pik3r1.77
  crRNA array
cgatttcttggctttatatatcttgtggaaaggacgaaacaccgtaatttctactaagtgtagatctcgtccgcgcccgggactctaatttctactaagtgtagataaacctatacggcccgcactttttttaagcttggcgtggatccgatatcaactagatcttgaga

SEQ ID NO: 2088 - DNA, 170 bp, Artificial sequence
  Cdh1.58_Pten.240
  crRNA array
cgatttcttggctttatatatcttgtggaaaggacgaaacaccgtaatttctactaagtgtagatctcgtccgcgcccgggactctaatttctactaagtgtagattgcatacgctatagctgcttttttttaagcttggcgtggatccgatatcaactagatcttgaga

SEQ ID NO: 2089 - DNA, 170 bp, Artificial sequence
  Cdh1.58_Pten.265
  crRNA array
cgatttcttggctttatatatcttgtggaaaggacgaaacaccgtaatttctactaagtgtagatctcgtccgcgcccgggactctaatttctactaagtgtagataagcgtggtgcgtgacgcacttttttaagcttggcgtggatccgatatcaactagatcttgaga

SEQ ID NO: 2090 - DNA, 170 bp, Artificial sequence
  Cdh1.58_Rasa1.1478
  crRNA array
cgatttcttggctttatatatcttgtggaaaggacgaaacaccgtaatttctactaagtgtagatctcgtccgcgcccgggactctaatttctactaagtgtagatcgataatggtctatgatgtcttttttaagcttggcgtggatccgatatcaactagatcttgaga

SEQ ID NO: 2091 - DNA, 170 bp, Artificial sequence
  Cdh1.58_Rasa1.223
  crRNA array
cgatttcttggctttatatatcttgtggaaaggacgaaacaccgtaatttctactaagtgtagatctcgtccgcgcccgggactctaatttctactaagtgtagattccatggagtatcgtgctcgttttttaagcttggcgtggatccgatatcaactagatcttgaga

SEQ ID NO: 2092 - DNA, 170 bp, Artificial sequence
  Cdh1.58_Rb1.211
  crRNA array
cgatttcttggctttatatatcttgtggaaaggacgaaacaccgtaatttctactaagtgtagatctcgtccgcgcccgggactctaatttctactaagtgtagattctgacatgatcgggtacctttttttaagcttggcgtggatccgatatcaactagatcttgaga

SEQ ID NO: 2093 - DNA, 170 bp, Artificial sequence
  Cdh1.58_Rb1.394
  crRNA array
cgatttcttggctttatatatcttgtggaaaggacgaaacaccgtaatttctactaagtgtagatctcgtccgcgcccgggactctaatttctactaagtgtagatagaaatctcgaagcaggatcttttttaagcttggcgtggatccgatatcaactagatcttgaga

SEQ ID NO: 2094 - DNA, 170 bp, Artificial sequence
  Cdh1.58_Rbm10.5
  crRNA array
cgatttcttggctttatatatcttgtggaaaggacgaaacaccgtaatttctactaagtgtagatctcgtccgcgcccgggactctaatttctactaagtgtagatacgaaacctgaacccacacattttttaagcttggcgtggatccgatatcaactagatcttgaga

SEQ ID NO: 2095 - DNA, 170 bp, Artificial sequence
  Cdh1.58_Rbm10.6
  crRNA array
cgatttcttggctttatatatcttgtggaaaggacgaaacaccgtaatttctactaagtgtagatctcgtccgcgcccgggactctaatttctactaagtgtagatcgaaacctgaacccacacagttttttaagcttggcgtggatccgatatcaactagatcttgaga

SEQ ID NO: 2096 - DNA, 170 bp, Artificial sequence
  Cdh1.58_Rnf43.1920
  crRNA array
cgatttcttggctttatatatcttgtggaaaggacgaaacaccgtaatttctactaagtgtagatctcgtccgcgcccgggactctaatttctactaagtgtagatatccccgtgccgtggactccttttttaagcttggcgtggatccgatatcaactagatcttgaga

SEQ ID NO: 2097 - DNA, 170 bp, Artificial sequence
  Cdh1.58_Rnf43.39
  crRNA array
cgatttcttggctttatatatcttgtggaaaggacgaaacaccgtaatttctactaagtgtagatctcgtccgcgcccgggactctaatttctactaagtgtagatcaaggggatcactctgataattttttaagcttggcgtggatccgatatcaactagatcttgaga

SEQ ID NO: 2098 - DNA, 170 bp, Artificial sequence
  Cdh1.58_Runx1.204
  crRNA array
cgatttcttggctttatatatcttgtggaaaggacgaaacaccgtaatttctactaagtgtagatctcgtccgcgcccgggactctaatttctactaagtgtagattaaataagtccagccgttttttttttaagcttggcgtggatccgatatcaactagatcttgaga

SEQ ID NO: 2099 - DNA, 170 bp, Artificial sequence
  Cdh1.58_Runx1.81
  crRNA array
cgatttcttggctttatatatcttgtggaaaggacgaaacaccgtaatttctactaagtgtagatctcgtccgcgcccgggactctaatttctactaagtgtagataggacgcgtatgggaattttttttttaagcttggcgtggatccgatatcaactagatcttgaga

SEQ ID NO: 2100 - DNA, 170 bp, Artificial sequence
  Cdh1.58_Setd2.143
  crRNA array
cgatttcttggctttatatatcttgtggaaaggacgaaacaccgtaatttctactaagtgtagatctcgtccgcgcccgggactctaatttctactaagtgtagatgcacaaccacaacagactggttttttaagcttggcgtggatccgatatcaactagatcttgaga

SEQ ID NO: 2101 - DNA, 170 bp, Artificial sequence
  Cdh1.58_Setd2.508
  crRNA array
cgatttcttggctttatatatcttgtggaaaggacgaaacaccgtaatttctactaagtgtagatctcgtccgcgcccgggactctaatttctactaagtgtagattacgatcccgagcacccgacttttttaagcttggcgtggatccgatatcaactagatcttgaga

SEQ ID NO: 2102 - DNA, 170 bp, Artificial sequence
  Cdh1.58_Smad4.3038
  crRNA array
cgatttcttggctttatatatcttgtggaaaggacgaaacaccgtaatttctactaagtgtagatctcgtccgcgcccgggactctaatttctactaagtgtagatatctgcggcagtgtcaccggttttttaagcttggcgtggatccgatatcaactagatcttgaga

SEQ ID NO: 2103 - DNA, 170 bp, Artificial sequence
  Cdh1.58_Smad4.39
  crRNA array
cgatttcttggctttatatatcttgtggaaaggacgaaacaccgtaatttctactaagtgtagatctcgtccgcgcccgggactctaatttctactaagtgtagatagtcaaacgcatactgacaattttttaagcttggcgtggatccgatatcaactagatcttgaga

SEQ ID NO: 2104 - DNA, 170 bp, Artificial sequence
  Cdh1.58_Stag2.1409
  crRNA array
cgatttcttggctttatatatcttgtggaaaggacgaaacaccgtaatttctactaagtgtagatctcgtccgcgcccgggactctaatttctactaagtgtagatgctaataactgcggaagggcttttttaagcttggcgtggatccgatatcaactagatcttgaga

SEQ ID NO: 2105 - DNA, 170 bp, Artificial sequence
  Cdh1.58_Stag2.4401
  crRNA array
cgatttcttggctttatatatcttgtggaaaggacgaaacaccgtaatttctactaagtgtagatctcgtccgcgcccgggactctaatttctactaagtgtagattaatcgtccagtggtgtatattttttaagcttggcgtggatccgatatcaactagatcttgaga

SEQ ID NO: 2106 - DNA, 170 bp, Artificial sequence
  Cdh1.58_Tbl1xr1.1
  crRNA array
cgatttcttggctttatatatcttgtggaaaggacgaaacaccgtaatttctactaagtgtagatctcgtccgcgcccgggactctaatttctactaagtgtagatggatgcgcatactggtgaagttttttaagcttggcgtggatccgatatcaactagatcttgaga

SEQ ID NO: 2107 - DNA, 170 bp, Artificial sequence
  Cdh1.58_Tbl1xr1.83
  crRNA array
cgatttcttggctttatatatcttgtggaaaggacgaaacaccgtaatttctactaagtgtagatctcgtccgcgcccgggactctaatttctactaagtgtagatatggtcgacccatcgagtctttttttaagcttggcgtggatccgatatcaactagatcttgaga

SEQ ID NO: 2108 - DNA, 170 bp, Artificial sequence
  Cdh1.58_Tgfbr2.290
  crRNA array
cgatttcttggctttatatatcttgtggaaaggacgaaacaccgtaatttctactaagtgtagatctcgtccgcgcccgggactctaatttctactaagtgtagatcctctcggcgcccgggtaaattttttaagcttggcgtggatccgatatcaactagatcttgaga

SEQ ID NO: 2109 - DNA, 170 bp, Artificial sequence
  Cdh1.58_Tgfbr2.292
  crRNA array
cgatttcttggctttatatatcttgtggaaaggacgaaacaccgtaatttctactaagtgtagatctcgtccgcgcccgggactctaatttctactaagtgtagatcccgggcgccgagagggaaattttttaagcttggcgtggatccgatatcaactagatcttgaga

SEQ ID NO: 2110 - DNA, 170 bp, Artificial sequence
  Cdh1.58_Trp53.4
  crRNA array
cgatttcttggctttatatatcttgtggaaaggacgaaacaccgtaatttctactaagtgtagatctcgtccgcgcccgggactctaatttctactaagtgtagatccctgaactgcccccagggattttttaagcttggcgtggatccgatatcaactagatcttgaga

SEQ ID NO: 2111 - DNA, 170 bp, Artificial sequence
  Cdh1.58_Trp53.528
  crRNA array
cgatttcttggctttatatatcttgtggaaaggacgaaacaccgtaatttctactaagtgtagatctcgtccgcgcccgggactctaatttctactaagtgtagatgctgggccagcagagacctgttttttaagcttggcgtggatccgatatcaactagatcttgaga

SEQ ID NO: 2112 - DNA, 170 bp, Artificial sequence
  Cdh1.58_Vhl.1
  crRNA array
cgatttcttggctttatatatcttgtggaaaggacgaaacaccgtaatttctactaagtgtagatctcgtccgcgcccgggactctaatttctactaagtgtagatagggctcccggcggccatttttttttaagcttggcgtggatccgatatcaactagatcttgaga

SEQ ID NO: 2113 - DNA, 170 bp, Artificial sequence
  Cdh1.58_Vhl.151
  crRNA array
cgatttcttggctttatatatcttgtggaaaggacgaaacaccgtaatttctactaagtgtagatctcgtccgcgcccgggactctaatttctactaagtgtagattagagcactcacccgagggattttttaagcttggcgtggatccgatatcaactagatcttgaga

SEQ ID NO: 2114 - DNA, 170 bp, Artificial sequence
  Cdh1.58_Zc3h13.1387
  crRNA array
cgatttcttggctttatatatcttgtggaaaggacgaaacaccgtaatttctactaagtgtagatctcgtccgcgcccgggactctaatttctactaagtgtagatgtgacgccggtcatgtgactttttttaagcttggcgtggatccgatatcaactagatcttgaga

SEQ ID NO: 2115 - DNA, 170 bp, Artificial sequence
  Cdh1.58_Zc3h13.1777
  crRNA array
cgatttcttggctttatatatcttgtggaaaggacgaaacaccgtaatttctactaagtgtagatctcgtccgcgcccgggactctaatttctactaagtgtagatgatgctgccagtgtagcggcttttttaagcttggcgtggatccgatatcaactagatcttgaga

SEQ ID NO: 2116 - DNA, 170 bp, Artificial sequence
  Cdkn2a.647_Acvr2a.155
  crRNA array
cgatttcttggctttatatatcttgtggaaaggacgaaacaccgtaatttctactaagtgtagatgcaatcacgggagggagcagtaatttctactaagtgtagatggacctggctaatcaagtatttttttaagcttggcgtggatccgatatcaactagatcttgaga

SEQ ID NO: 2117 - DNA, 170 bp, Artificial sequence
  Cdkn2a.647_Acvr2a.70
  crRNA array
cgatttcttggctttatatatcttgtggaaaggacgaaacaccgtaatttctactaagtgtagatgcaatcacgggagggagcagtaatttctactaagtgtagatcccgaggcgccggagaagccttttttaagcttggcgtggatccgatatcaactagatcttgaga

SEQ ID NO: 2118 - DNA, 170 bp, Artificial sequence
  Cdkn2a.647_Apc.21
  crRNA array
cgatttcttggctttatatatcttgtggaaaggacgaaacaccgtaatttctactaagtgtagatgcaatcacgggagggagcagtaatttctactaagtgtagatgtgatccacacgtgtagctgttttttaagcttggcgtggatccgatatcaactagatcttgaga

SEQ ID NO: 2119 - DNA, 170 bp, Artificial sequence
  Cdkn2a.647_Apc.867
  crRNA array
cgatttcttggctttatatatcttgtggaaaggacgaaacaccgtaatttctactaagtgtagatgcaatcacgggagggagcagtaatttctactaagtgtagatcagtcccaggcggcggaagcttttttaagcttggcgtggatccgatatcaactagatcttgaga

SEQ ID NO: 2120 - DNA, 170 bp, Artificial sequence
  Cdkn2a.647_Arid1a.2
  crRNA array
cgatttcttggctttatatatcttgtggaaaggacgaaacaccgtaatttctactaagtgtagatgcaatcacgggagggagcagtaatttctactaagtgtagatcccgcgcccccgtcctggggttttttaagcttggcgtggatccgatatcaactagatcttgaga

SEQ ID NO: 2121 - DNA, 170 bp, Artificial sequence
  Cdkn2a.647_Arid1a.5
  crRNA array
cgatttcttggctttatatatcttgtggaaaggacgaaacaccgtaatttctactaagtgtagatgcaatcacgggagggagcagtaatttctactaagtgtagatcccgcgctcggccgctgccgttttttaagcttggcgtggatccgatatcaactagatcttgaga

SEQ ID NO: 2122 - DNA, 170 bp, Artificial sequence
  Cdkn2a.647_Arid2.166
  crRNA array
cgatttcttggctttatatatcttgtggaaaggacgaaacaccgtaatttctactaagtgtagatgcaatcacgggagggagcagtaatttctactaagtgtagataaccgcgatctgggttttttttttttaagcttggcgtggatccgatatcaactagatcttgaga

SEQ ID NO: 2123 - DNA, 170 bp, Artificial sequence
  Cdkn2a.647_Arid2.172
  crRNA array
cgatttcttggctttatatatcttgtggaaaggacgaaacaccgtaatttctactaagtgtagatgcaatcacgggagggagcagtaatttctactaagtgtagatctggacgagctgcggcagttttttttaagcttggcgtggatccgatatcaactagatcttgaga

SEQ ID NO: 2124 - DNA, 170 bp, Artificial sequence
  Cdkn2a.647_Atm.120
  crRNA array
cgatttcttggctttatatatcttgtggaaaggacgaaacaccgtaatttctactaagtgtagatgcaatcacgggagggagcagtaatttctactaagtgtagatgacaggtagtcggcagctaattttttaagcttggcgtggatccgatatcaactagatcttgaga

SEQ ID NO: 2125 - DNA, 170 bp, Artificial sequence
  Cdkn2a.647_Atm.997
  crRNA array
cgatttcttggctttatatatcttgtggaaaggacgaaacaccgtaatttctactaagtgtagatgcaatcacgggagggagcagtaatttctactaagtgtagatgagaaagtctccgaatcgttttttttaagcttggcgtggatccgatatcaactagatcttgaga

SEQ ID NO: 2126 - DNA, 170 bp, Artificial sequence
  Cdkn2a.647_Atrx.249
  crRNA array
cgatttcttggctttatatatcttgtggaaaggacgaaacaccgtaatttctactaagtgtagatgcaatcacgggagggagcagtaatttctactaagtgtagattagccagtcgctcatatctcttttttaagcttggcgtggatccgatatcaactagatcttgaga

SEQ ID NO: 2127 - DNA, 170 bp, Artificial sequence
  Cdkn2a.647_Atrx.251
  crRNA array
cgatttcttggctttatatatcttgtggaaaggacgaaacaccgtaatttctactaagtgtagatgcaatcacgggagggagcagtaatttctactaagtgtagatgccagtcgctcatatctctgttttttaagcttggcgtggatccgatatcaactagatcttgaga

SEQ ID NO: 2128 - DNA, 170 bp, Artificial sequence
  Cdkn2a.647_Bcor.203
  crRNA array
cgatttcttggctttatatatcttgtggaaaggacgaaacaccgtaatttctactaagtgtagatgcaatcacgggagggagcagtaatttctactaagtgtagatccccggagcggagtccaggcttttttaagcttggcgtggatccgatatcaactagatcttgaga

SEQ ID NO: 2129 - DNA, 170 bp, Artificial sequence
  Cdkn2a.647_Bcor.475
  crRNA array
cgatttcttggctttatatatcttgtggaaaggacgaaacaccgtaatttctactaagtgtagatgcaatcacgggagggagcagtaatttctactaagtgtagattgcaacccctctgtatgggattttttaagcttggcgtggatccgatatcaactagatcttgaga

SEQ ID NO: 2130 - DNA, 170 bp, Artificial sequence
  Cdkn2a.647_Brca1.112
  crRNA array
cgatttcttggctttatatatcttgtggaaaggacgaaacaccgtaatttctactaagtgtagatgcaatcacgggagggagcagtaatttctactaagtgtagatctagacgctctgtggagactttttttaagcttggcgtggatccgatatcaactagatcttgaga

SEQ ID NO: 2131 - DNA, 170 bp, Artificial sequence
  Cdkn2a.647_Brca1.53
  crRNA array
cgatttcttggctttatatatcttgtggaaaggacgaaacaccgtaatttctactaagtgtagatgcaatcacgggagggagcagtaatttctactaagtgtagataatgaggaggcgtcgatcatttttttaagcttggcgtggatccgatatcaactagatcttgaga

SEQ ID NO: 2132 - DNA, 170 bp, Artificial sequence
  Cdkn2a.647_Casp8.45
  crRNA array
cgatttcttggctttatatatcttgtggaaaggacgaaacaccgtaatttctactaagtgtagatgcaatcacgggagggagcagtaatttctactaagtgtagatctaccgagatcctgtgaatgttttttaagcttggcgtggatccgatatcaactagatcttgaga

SEQ ID NO: 2133 - DNA, 170 bp, Artificial sequence
  Cdkn2a.647_Casp8.54
  crRNA array
cgatttcttggctttatatatcttgtggaaaggacgaaacaccgtaatttctactaagtgtagatgcaatcacgggagggagcagtaatttctactaagtgtagatcagtgcagtcgtcgtaagatttttttaagcttggcgtggatccgatatcaactagatcttgaga

SEQ ID NO: 2134 - DNA, 170 bp, Artificial sequence
  Cdkn2a.647_Cbwd1.84
  crRNA array
cgatttcttggctttatatatcttgtggaaaggacgaaacaccgtaatttctactaagtgtagatgcaatcacgggagggagcagtaatttctactaagtgtagatcacagcaggtaacatgccgcttttttaagcttggcgtggatccgatatcaactagatcttgaga

SEQ ID NO: 2135 - DNA, 170 bp, Artificial sequence
  Cdkn2a.647_Cbwd1.85
  crRNA array
cgatttcttggctttatatatcttgtggaaaggacgaaacaccgtaatttctactaagtgtagatgcaatcacgggagggagcagtaatttctactaagtgtagatacagcaggtaacatgccgccttttttaagcttggcgtggatccgatatcaactagatcttgaga

SEQ ID NO: 2136 - DNA, 170 bp, Artificial sequence
  Cdkn2a.647_Cdh1.387
  crRNA array
cgatttcttggctttatatatcttgtggaaaggacgaaacaccgtaatttctactaagtgtagatgcaatcacgggagggagcagtaatttctactaagtgtagatctcggcgtctgccgggtccgttttttaagcttggcgtggatccgatatcaactagatcttgaga

SEQ ID NO: 2137 - DNA, 170 bp, Artificial sequence
  Cdkn2a.647_Cdh1.58
  crRNA array
cgatttcttggctttatatatcttgtggaaaggacgaaacaccgtaatttctactaagtgtagatgcaatcacgggagggagcagtaatttctactaagtgtagatctcgtccgcgcccgggactcttttttaagcttggcgtggatccgatatcaactagatcttgaga

SEQ ID NO: 2138 - DNA, 170 bp, Artificial sequence
  Cdkn2a.647_Cic.162
  crRNA array
cgatttcttggctttatatatcttgtggaaaggacgaaacaccgtaatttctactaagtgtagatgcaatcacgggagggagcagtaatttctactaagtgtagatcgcaggcgcgcccggcggagttttttaagcttggcgtggatccgatatcaactagatcttgaga

SEQ ID NO: 2139 - DNA, 170 bp, Artificial sequence
  Cdkn2a.647_Cic.164
  crRNA array
cgatttcttggctttatatatcttgtggaaaggacgaaacaccgtaatttctactaagtgtagatgcaatcacgggagggagcagtaatttctactaagtgtagatcgggccctgggccggcggctttttttaagcttggcgtggatccgatatcaactagatcttgaga

SEQ ID NO: 2140 - DNA, 170 bp, Artificial sequence
  Cdkn2a.647_Ctcf.229
  crRNA array
cgatttcttggctttatatatcttgtggaaaggacgaaacaccgtaatttctactaagtgtagatgcaatcacgggagggagcagtaatttctactaagtgtagatggctggtggctgatagtctgttttttaagcttggcgtggatccgatatcaactagatcttgaga

SEQ ID NO: 2141 - DNA, 170 bp, Artificial sequence
  Cdkn2a.647_Ctcf.809
  crRNA array
cgatttcttggctttatatatcttgtggaaaggacgaaacaccgtaatttctactaagtgtagatgcaatcacgggagggagcagtaatttctactaagtgtagataagcgctatcatgatcccaattttttaagcttggcgtggatccgatatcaactagatcttgaga

SEQ ID NO: 2142 - DNA, 170 bp, Artificial sequence
  Cdkn2a.647_Elf3.826
  crRNA array
cgatttcttggctttatatatcttgtggaaaggacgaaacaccgtaatttctactaagtgtagatgcaatcacgggagggagcagtaatttctactaagtgtagattccgagacatcctaatccacttttttaagcttggcgtggatccgatatcaactagatcttgaga

SEQ ID NO: 2143 - DNA, 170 bp, Artificial sequence
  Cdkn2a.647_Elf3.983
  crRNA array
cgatttcttggctttatatatcttgtggaaaggacgaaacaccgtaatttctactaagtgtagatgcaatcacgggagggagcagtaatttctactaagtgtagattaggccccctaactggaccattttttaagcttggcgtggatccgatatcaactagatcttgaga

SEQ ID NO: 2144 - DNA, 170 bp, Artificial sequence
  Cdkn2a.647_Ep300.310
  crRNA array
cgatttcttggctttatatatcttgtggaaaggacgaaacaccgtaatttctactaagtgtagatgcaatcacgggagggagcagtaatttctactaagtgtagatatggtacgacagtgaggaagttttttaagcttggcgtggatccgatatcaactagatcttgaga

SEQ ID NO: 2145 - DNA, 170 bp, Artificial sequence
  Cdkn2a.647_Ep300.587
  crRNA array
cgatttcttggctttatatatcttgtggaaaggacgaaacaccgtaatttctactaagtgtagatgcaatcacgggagggagcagtaatttctactaagtgtagatcgccccggggcccccaaccattttttaagcttggcgtggatccgatatcaactagatcttgaga

SEQ ID NO: 2146 - DNA, 170 bp, Artificial sequence
  Cdkn2a.647_Epha2.126
  crRNA array
cgatttcttggctttatatatcttgtggaaaggacgaaacaccgtaatttctactaagtgtagatgcaatcacgggagggagcagtaatttctactaagtgtagatcctgtgccgccgcggccgccttttttaagcttggcgtggatccgatatcaactagatcttgaga

SEQ ID NO: 2147 - DNA, 170 bp, Artificial sequence
  Cdkn2a.647_Epha2.5
  crRNA array
cgatttcttggctttatatatcttgtggaaaggacgaaacaccgtaatttctactaagtgtagatgcaatcacgggagggagcagtaatttctactaagtgtagatcatgagctggcgccacccggttttttaagcttggcgtggatccgatatcaactagatcttgaga

SEQ ID NO: 2148 - DNA, 170 bp, Artificial sequence
  Cdkn2a.647_Fat1.105
  crRNA array
cgatttcttggctttatatatcttgtggaaaggacgaaacaccgtaatttctactaagtgtagatgcaatcacgggagggagcagtaatttctactaagtgtagataactcgaggtgacaacaagtttttttaagcttggcgtggatccgatatcaactagatcttgaga

SEQ ID NO: 2149 - DNA, 170 bp, Artificial sequence
  Cdkn2a.647_Fat1.122
  crRNA array
cgatttcttggctttatatatcttgtggaaaggacgaaacaccgtaatttctactaagtgtagatgcaatcacgggagggagcagtaatttctactaagtgtagatccatcgacatggaaacgggattttttaagcttggcgtggatccgatatcaactagatcttgaga

SEQ ID NO: 2150 - DNA, 170 bp, Artificial sequence
  Cdkn2a.647_Fbxw7.21
  crRNA array
cgatttcttggctttatatatcttgtggaaaggacgaaacaccgtaatttctactaagtgtagatgcaatcacgggagggagcagtaatttctactaagtgtagattaatgtgccgtagaaacccattttttaagcttggcgtggatccgatatcaactagatcttgaga

SEQ ID NO: 2151 - DNA, 170 bp, Artificial sequence
  Cdkn2a.647_Fbxw7.23
  crRNA array
cgatttcttggctttatatatcttgtggaaaggacgaaacaccgtaatttctactaagtgtagatgcaatcacgggagggagcagtaatttctactaagtgtagatatgtgccgtagaaacccatattttttaagcttggcgtggatccgatatcaactagatcttgaga

SEQ ID NO: 2152 - DNA, 170 bp, Artificial sequence
  Cdkn2a.647_Gata3.34
  crRNA array
cgatttcttggctttatatatcttgtggaaaggacgaaacaccgtaatttctactaagtgtagatgcaatcacgggagggagcagtaatttctactaagtgtagatctaaactatcccgcaaagatttttttaagcttggcgtggatccgatatcaactagatcttgaga

SEQ ID NO: 2153 - DNA, 170 bp, Artificial sequence
  Cdkn2a.647_Gata3.47
  crRNA array
cgatttcttggctttatatatcttgtggaaaggacgaaacaccgtaatttctactaagtgtagatgcaatcacgggagggagcagtaatttctactaagtgtagatcgtagtaggacgggacgtggttttttaagcttggcgtggatccgatatcaactagatcttgaga

SEQ ID NO: 2154 - DNA, 170 bp, Artificial sequence
  Cdkn2a.647_H2-Q2.1
  crRNA array
cgatttcttggctttatatatcttgtggaaaggacgaaacaccgtaatttctactaagtgtagatgcaatcacgggagggagcagtaatttctactaagtgtagatagggcggccaccaacagcagttttttaagcttggcgtggatccgatatcaactagatcttgaga

SEQ ID NO: 2155 - DNA, 170 bp, Artificial sequence
  Cdkn2a.647_H2-Q2.2
  crRNA array
cgatttcttggctttatatatcttgtggaaaggacgaaacaccgtaatttctactaagtgtagatgcaatcacgggagggagcagtaatttctactaagtgtagattaacctgcgcccgctgctgattttttaagcttggcgtggatccgatatcaactagatcttgaga

SEQ ID NO: 2156 - DNA, 170 bp, Artificial sequence
  Cdkn2a.647_Kdm5c.1878
  crRNA array
cgatttcttggctttatatatcttgtggaaaggacgaaacaccgtaatttctactaagtgtagatgcaatcacgggagggagcagtaatttctactaagtgtagatagagcacggcacccgcccccttttttaagcttggcgtggatccgatatcaactagatcttgaga

SEQ ID NO: 2157 - DNA, 170 bp, Artificial sequence
  Cdkn2a.647_Kdm5c.1879
  crRNA array
cgatttcttggctttatatatcttgtggaaaggacgaaacaccgtaatttctactaagtgtagatgcaatcacgggagggagcagtaatttctactaagtgtagatgagcacggcacccgccccccttttttaagcttggcgtggatccgatatcaactagatcttgaga

SEQ ID NO: 2158 - DNA, 170 bp, Artificial sequence
  Cdkn2a.647_Kdm6a.56
  crRNA array
cgatttcttggctttatatatcttgtggaaaggacgaaacaccgtaatttctactaagtgtagatgcaatcacgggagggagcagtaatttctactaagtgtagattcgctgccgcctctcgcggcttttttaagcttggcgtggatccgatatcaactagatcttgaga

SEQ ID NO: 2159 - DNA, 170 bp, Artificial sequence
  Cdkn2a.647_Kdm6a.57
  crRNA array
cgatttcttggctttatatatcttgtggaaaggacgaaacaccgtaatttctactaagtgtagatgcaatcacgggagggagcagtaatttctactaagtgtagatcgctgccgcctctcgcggcattttttaagcttggcgtggatccgatatcaactagatcttgaga

SEQ ID NO: 2160 - DNA, 170 bp, Artificial sequence
  Cdkn2a.647_Kmt2b.265
  crRNA array
cgatttcttggctttatatatcttgtggaaaggacgaaacaccgtaatttctactaagtgtagatgcaatcacgggagggagcagtaatttctactaagtgtagatccccaagtgaagcccacctgttttttaagcttggcgtggatccgatatcaactagatcttgaga

SEQ ID NO: 2161 - DNA, 170 bp, Artificial sequence
  Cdkn2a.647_Kmt2b.298
  crRNA array
cgatttcttggctttatatatcttgtggaaaggacgaaacaccgtaatttctactaagtgtagatgcaatcacgggagggagcagtaatttctactaagtgtagattccggcagggaccggctggcttttttaagcttggcgtggatccgatatcaactagatcttgaga

SEQ ID NO: 2162 - DNA, 170 bp, Artificial sequence
  Cdkn2a.647_Kmt2c.1962
  crRNA array
cgatttcttggctttatatatcttgtggaaaggacgaaacaccgtaatttctactaagtgtagatgcaatcacgggagggagcagtaatttctactaagtgtagatgtgacgatctgtgccacaagttttttaagcttggcgtggatccgatatcaactagatcttgaga

SEQ ID NO: 2163 - DNA, 170 bp, Artificial sequence
  Cdkn2a.647_Kmt2c.2236
  crRNA array
cgatttcttggctttatatatcttgtggaaaggacgaaacaccgtaatttctactaagtgtagatgcaatcacgggagggagcagtaatttctactaagtgtagatactcgacctccacctccctattttttaagcttggcgtggatccgatatcaactagatcttgaga

SEQ ID NO: 2164 - DNA, 170 bp, Artificial sequence
  Cdkn2a.647_Kmt2d.316
  crRNA array
cgatttcttggctttatatatcttgtggaaaggacgaaacaccgtaatttctactaagtgtagatgcaatcacgggagggagcagtaatttctactaagtgtagatactccaggccacccaggtggttttttaagcttggcgtggatccgatatcaactagatcttgaga

SEQ ID NO: 2165 - DNA, 170 bp, Artificial sequence
  Cdkn2a.647_Kmt2d.416
  crRNA array
cgatttcttggctttatatatcttgtggaaaggacgaaacaccgtaatttctactaagtgtagatgcaatcacgggagggagcagtaatttctactaagtgtagattaaacccccgggggaagggtttttttaagcttggcgtggatccgatatcaactagatcttgaga

SEQ ID NO: 2166 - DNA, 170 bp, Artificial sequence
  Cdkn2a.647_Map2k4.119
  crRNA array
cgatttcttggctttatatatcttgtggaaaggacgaaacaccgtaatttctactaagtgtagatgcaatcacgggagggagcagtaatttctactaagtgtagattgctgtgtgggcggccacatttttttaagcttggcgtggatccgatatcaactagatcttgaga

SEQ ID NO: 2167 - DNA, 170 bp, Artificial sequence
  Cdkn2a.647_Map2k4.1261
  crRNA array
cgatttcttggctttatatatcttgtggaaaggacgaaacaccgtaatttctactaagtgtagatgcaatcacgggagggagcagtaatttctactaagtgtagatgatgtagtaatgcggagtagttttttaagcttggcgtggatccgatatcaactagatcttgaga

SEQ ID NO: 2168 - DNA, 170 bp, Artificial sequence
  Cdkn2a.647_Map3k1.235
  crRNA array
cgatttcttggctttatatatcttgtggaaaggacgaaacaccgtaatttctactaagtgtagatgcaatcacgggagggagcagtaatttctactaagtgtagataaaacgctactgatcgatcgttttttaagcttggcgtggatccgatatcaactagatcttgaga

SEQ ID NO: 2169 - DNA, 170 bp, Artificial sequence
  Cdkn2a.647_Map3k1.3838
  crRNA array
cgatttcttggctttatatatcttgtggaaaggacgaaacaccgtaatttctactaagtgtagatgcaatcacgggagggagcagtaatttctactaagtgtagatccaacaacagggccccactattttttaagcttggcgtggatccgatatcaactagatcttgaga

SEQ ID NO: 2170 - DNA, 170 bp, Artificial sequence
  Cdkn2a.647_Mga.1655
  crRNA array
cgatttcttggctttatatatcttgtggaaaggacgaaacaccgtaatttctactaagtgtagatgcaatcacgggagggagcagtaatttctactaagtgtagatcgagaagtggagagcatattttttttaagcttggcgtggatccgatatcaactagatcttgaga

SEQ ID NO: 2171 - DNA, 170 bp, Artificial sequence
  Cdkn2a.647_Mga.93
  crRNA array
cgatttcttggctttatatatcttgtggaaaggacgaaacaccgtaatttctactaagtgtagatgcaatcacgggagggagcagtaatttctactaagtgtagatgagaaggctccccataatgtttttttaagcttggcgtggatccgatatcaactagatcttgaga

SEQ ID NO: 2172 - DNA, 170 bp, Artificial sequence
  Cdkn2a.647_Nf1.746
  crRNA array
cgatttcttggctttatatatcttgtggaaaggacgaaacaccgtaatttctactaagtgtagatgcaatcacgggagggagcagtaatttctactaagtgtagattaagcataatgatgatgccattttttaagcttggcgtggatccgatatcaactagatcttgaga

SEQ ID NO: 2173 - DNA, 170 bp, Artificial sequence
  Cdkn2a.647_Nf1.97
  crRNA array
cgatttcttggctttatatatcttgtggaaaggacgaaacaccgtaatttctactaagtgtagatgcaatcacgggagggagcagtaatttctactaagtgtagatagcccgctacatgctgatgcttttttaagcttggcgtggatccgatatcaactagatcttgaga

SEQ ID NO: 2174 - DNA, 170 bp, Artificial sequence
  Cdkn2a.647_Nf2.356
  crRNA array
cgatttcttggctttatatatcttgtggaaaggacgaaacaccgtaatttctactaagtgtagatgcaatcacgggagggagcagtaatttctactaagtgtagatcggagtcatctgatagagatttttttaagcttggcgtggatccgatatcaactagatcttgaga

SEQ ID NO: 2175 - DNA, 170 bp, Artificial sequence
  Cdkn2a.647_Nf2.768
  crRNA array
cgatttcttggctttatatatcttgtggaaaggacgaaacaccgtaatttctactaagtgtagatgcaatcacgggagggagcagtaatttctactaagtgtagatccgaagccccagtgtccggcttttttaagcttggcgtggatccgatatcaactagatcttgaga

SEQ ID NO: 2176 - DNA, 170 bp, Artificial sequence
  Cdkn2a.647_Notch1.1849
  crRNA array
cgatttcttggctttatatatcttgtggaaaggacgaaacaccgtaatttctactaagtgtagatgcaatcacgggagggagcagtaatttctactaagtgtagatctggcgggtgggcggcgctgttttttaagcttggcgtggatccgatatcaactagatcttgaga

SEQ ID NO: 2177 - DNA, 170 bp, Artificial sequence
  Cdkn2a.647_Notch1.649
  crRNA array
cgatttcttggctttatatatcttgtggaaaggacgaaacaccgtaatttctactaagtgtagatgcaatcacgggagggagcagtaatttctactaagtgtagattgggccaacgatgccaggacttttttaagcttggcgtggatccgatatcaactagatcttgaga

SEQ ID NO: 2178 - DNA, 170 bp, Artificial sequence
  Cdkn2a.647_Nsd1.70
  crRNA array
cgatttcttggctttatatatcttgtggaaaggacgaaacaccgtaatttctactaagtgtagatgcaatcacgggagggagcagtaatttctactaagtgtagatactggtgtggacgatgcagattttttaagcttggcgtggatccgatatcaactagatcttgaga

SEQ ID NO: 2179 - DNA, 170 bp, Artificial sequence
  Cdkn2a.647_Nsd1.90
  crRNA array
cgatttcttggctttatatatcttgtggaaaggacgaaacaccgtaatttctactaagtgtagatgcaatcacgggagggagcagtaatttctactaagtgtagataggagctaacggcaagaatgttttttaagcttggcgtggatccgatatcaactagatcttgaga

SEQ ID NO: 2180 - DNA, 170 bp, Artificial sequence
  Cdkn2a.647_Pbrm1.1236
  crRNA array
cgatttcttggctttatatatcttgtggaaaggacgaaacaccgtaatttctactaagtgtagatgcaatcacgggagggagcagtaatttctactaagtgtagatgccgataaaaccaacagccgttttttaagcttggcgtggatccgatatcaactagatcttgaga

SEQ ID NO: 2181 - DNA, 170 bp, Artificial sequence
  Cdkn2a.647_Pbrm1.969
  crRNA array
cgatttcttggctttatatatcttgtggaaaggacgaaacaccgtaatttctactaagtgtagatgcaatcacgggagggagcagtaatttctactaagtgtagatgagccctaatgaacagctcattttttaagcttggcgtggatccgatatcaactagatcttgaga

SEQ ID NO: 2182 - DNA, 170 bp, Artificial sequence
  Cdkn2a.647_Pik3r1.76
  crRNA array
cgatttcttggctttatatatcttgtggaaaggacgaaacaccgtaatttctactaagtgtagatgcaatcacgggagggagcagtaatttctactaagtgtagataaaacctatacggcccgcacttttttaagcttggcgtggatccgatatcaactagatcttgaga

SEQ ID NO: 2183 - DNA, 170 bp, Artificial sequence
  Cdkn2a.647_Pik3r1.77
  crRNA array
cgatttcttggctttatatatcttgtggaaaggacgaaacaccgtaatttctactaagtgtagatgcaatcacgggagggagcagtaatttctactaagtgtagataaacctatacggcccgcactttttttaagcttggcgtggatccgatatcaactagatcttgaga

SEQ ID NO: 2184 - DNA, 170 bp, Artificial sequence
  Cdkn2a.647_Pten.240
  crRNA array
cgatttcttggctttatatatcttgtggaaaggacgaaacaccgtaatttctactaagtgtagatgcaatcacgggagggagcagtaatttctactaagtgtagattgcatacgctatagctgcttttttttaagcttggcgtggatccgatatcaactagatcttgaga

SEQ ID NO: 2185 - DNA, 170 bp, Artificial sequence
  Cdkn2a.647_Pten.265
  crRNA array
cgatttcttggctttatatatcttgtggaaaggacgaaacaccgtaatttctactaagtgtagatgcaatcacgggagggagcagtaatttctactaagtgtagataagcgtggtgcgtgacgcacttttttaagcttggcgtggatccgatatcaactagatcttgaga

SEQ ID NO: 2186 - DNA, 170 bp, Artificial sequence
  Cdkn2a.647_Rasa1.1478
  crRNA array
cgatttcttggctttatatatcttgtggaaaggacgaaacaccgtaatttctactaagtgtagatgcaatcacgggagggagcagtaatttctactaagtgtagatcgataatggtctatgatgtcttttttaagcttggcgtggatccgatatcaactagatcttgaga

SEQ ID NO: 2187 - DNA, 170 bp, Artificial sequence
  Cdkn2a.647_Rasa1.223
  crRNA array
cgatttcttggctttatatatcttgtggaaaggacgaaacaccgtaatttctactaagtgtagatgcaatcacgggagggagcagtaatttctactaagtgtagattccatggagtatcgtgctcgttttttaagcttggcgtggatccgatatcaactagatcttgaga

SEQ ID NO: 2188 - DNA, 170 bp, Artificial sequence
  Cdkn2a.647_Rb1.211
  crRNA array
cgatttcttggctttatatatcttgtggaaaggacgaaacaccgtaatttctactaagtgtagatgcaatcacgggagggagcagtaatttctactaagtgtagattctgacatgatcgggtacctttttttaagcttggcgtggatccgatatcaactagatcttgaga

SEQ ID NO: 2189 - DNA, 170 bp, Artificial sequence
  Cdkn2a.647_Rb1.394
  crRNA array
cgatttcttggctttatatatcttgtggaaaggacgaaacaccgtaatttctactaagtgtagatgcaatcacgggagggagcagtaatttctactaagtgtagatagaaatctcgaagcaggatcttttttaagcttggcgtggatccgatatcaactagatcttgaga

SEQ ID NO: 2190 - DNA, 170 bp, Artificial sequence
  Cdkn2a.647_Rbm10.5
  crRNA array
cgatttcttggctttatatatcttgtggaaaggacgaaacaccgtaatttctactaagtgtagatgcaatcacgggagggagcagtaatttctactaagtgtagatacgaaacctgaacccacacattttttaagcttggcgtggatccgatatcaactagatcttgaga

SEQ ID NO: 2191 - DNA, 170 bp, Artificial sequence
  Cdkn2a.647_Rbm10.6
  crRNA array
cgatttcttggctttatatatcttgtggaaaggacgaaacaccgtaatttctactaagtgtagatgcaatcacgggagggagcagtaatttctactaagtgtagatcgaaacctgaacccacacagttttttaagcttggcgtggatccgatatcaactagatcttgaga

SEQ ID NO: 2192 - DNA, 170 bp, Artificial sequence
  Cdkn2a.647_Rnf43.1920
  crRNA array
cgatttcttggctttatatatcttgtggaaaggacgaaacaccgtaatttctactaagtgtagatgcaatcacgggagggagcagtaatttctactaagtgtagatatccccgtgccgtggactccttttttaagcttggcgtggatccgatatcaactagatcttgaga

SEQ ID NO: 2193 - DNA, 170 bp, Artificial sequence
  Cdkn2a.647_Rnf43.39
  crRNA array
cgatttcttggctttatatatcttgtggaaaggacgaaacaccgtaatttctactaagtgtagatgcaatcacgggagggagcagtaatttctactaagtgtagatcaaggggatcactctgataattttttaagcttggcgtggatccgatatcaactagatcttgaga

SEQ ID NO: 2194 - DNA, 170 bp, Artificial sequence
  Cdkn2a.647_Runx1.204
  crRNA array
cgatttcttggctttatatatcttgtggaaaggacgaaacaccgtaatttctactaagtgtagatgcaatcacgggagggagcagtaatttctactaagtgtagattaaataagtccagccgttttttttttaagcttggcgtggatccgatatcaactagatcttgaga

SEQ ID NO: 2195 - DNA, 170 bp, Artificial sequence
  Cdkn2a.647_Runx1.81
  crRNA array
cgatttcttggctttatatatcttgtggaaaggacgaaacaccgtaatttctactaagtgtagatgcaatcacgggagggagcagtaatttctactaagtgtagataggacgcgtatgggaattttttttttaagcttggcgtggatccgatatcaactagatcttgaga

SEQ ID NO: 2196 - DNA, 170 bp, Artificial sequence
  Cdkn2a.647_Setd2.143
  crRNA array
cgatttcttggctttatatatcttgtggaaaggacgaaacaccgtaatttctactaagtgtagatgcaatcacgggagggagcagtaatttctactaagtgtagatgcacaaccacaacagactggttttttaagcttggcgtggatccgatatcaactagatcttgaga

SEQ ID NO: 2197 - DNA, 170 bp, Artificial sequence
  Cdkn2a.647_Setd2.508
  crRNA array
cgatttcttggctttatatatcttgtggaaaggacgaaacaccgtaatttctactaagtgtagatgcaatcacgggagggagcagtaatttctactaagtgtagattacgatcccgagcacccgacttttttaagcttggcgtggatccgatatcaactagatcttgaga

SEQ ID NO: 2198 - DNA, 170 bp, Artificial sequence
  Cdkn2a.647_Smad4.3038
  crRNA array
cgatttcttggctttatatatcttgtggaaaggacgaaacaccgtaatttctactaagtgtagatgcaatcacgggagggagcagtaatttctactaagtgtagatatctgcggcagtgtcaccggttttttaagcttggcgtggatccgatatcaactagatcttgaga

SEQ ID NO: 2199 - DNA, 170 bp, Artificial sequence
  Cdkn2a.647_Smad4.39
  crRNA array
cgatttcttggctttatatatcttgtggaaaggacgaaacaccgtaatttctactaagtgtagatgcaatcacgggagggagcagtaatttctactaagtgtagatagtcaaacgcatactgacaattttttaagcttggcgtggatccgatatcaactagatcttgaga

SEQ ID NO: 2200 - DNA, 170 bp, Artificial sequence
  Cdkn2a.647_Stag2.1409
  crRNA array
cgatttcttggctttatatatcttgtggaaaggacgaaacaccgtaatttctactaagtgtagatgcaatcacgggagggagcagtaatttctactaagtgtagatgctaataactgcggaagggcttttttaagcttggcgtggatccgatatcaactagatcttgaga

SEQ ID NO: 2201 - DNA, 170 bp, Artificial sequence
  Cdkn2a.647_Stag2.4401
  crRNA array
cgatttcttggctttatatatcttgtggaaaggacgaaacaccgtaatttctactaagtgtagatgcaatcacgggagggagcagtaatttctactaagtgtagattaatcgtccagtggtgtatattttttaagcttggcgtggatccgatatcaactagatcttgaga

SEQ ID NO: 2202 - DNA, 170 bp, Artificial sequence
  Cdkn2a.647_Tbl1xr1.1
  crRNA array
cgatttcttggctttatatatcttgtggaaaggacgaaacaccgtaatttctactaagtgtagatgcaatcacgggagggagcagtaatttctactaagtgtagatggatgcgcatactggtgaagttttttaagcttggcgtggatccgatatcaactagatcttgaga

SEQ ID NO: 2203 - DNA, 170 bp, Artificial sequence
  Cdkn2a.647_Tbl1xr1.83
  crRNA array
cgatttcttggctttatatatcttgtggaaaggacgaaacaccgtaatttctactaagtgtagatgcaatcacgggagggagcagtaatttctactaagtgtagatatggtcgacccatcgagtctttttttaagcttggcgtggatccgatatcaactagatcttgaga

SEQ ID NO: 2204 - DNA, 170 bp, Artificial sequence
  Cdkn2a.647_Tgfbr2.290
  crRNA array
cgatttcttggctttatatatcttgtggaaaggacgaaacaccgtaatttctactaagtgtagatgcaatcacgggagggagcagtaatttctactaagtgtagatcctctcggcgcccgggtaaattttttaagcttggcgtggatccgatatcaactagatcttgaga

SEQ ID NO: 2205 - DNA, 170 bp, Artificial sequence
  Cdkn2a.647_Tgfbr2.292
  crRNA array
cgatttcttggctttatatatcttgtggaaaggacgaaacaccgtaatttctactaagtgtagatgcaatcacgggagggagcagtaatttctactaagtgtagatcccgggcgccgagagggaaattttttaagcttggcgtggatccgatatcaactagatcttgaga

SEQ ID NO: 2206 - DNA, 170 bp, Artificial sequence
  Cdkn2a.647_Trp53.4
  crRNA array
cgatttcttggctttatatatcttgtggaaaggacgaaacaccgtaatttctactaagtgtagatgcaatcacgggagggagcagtaatttctactaagtgtagatccctgaactgcccccagggattttttaagcttggcgtggatccgatatcaactagatcttgaga

SEQ ID NO: 2207 - DNA, 170 bp, Artificial sequence
  Cdkn2a.647_Trp53.528
  crRNA array
cgatttcttggctttatatatcttgtggaaaggacgaaacaccgtaatttctactaagtgtagatgcaatcacgggagggagcagtaatttctactaagtgtagatgctgggccagcagagacctgttttttaagcttggcgtggatccgatatcaactagatcttgaga

SEQ ID NO: 2208 - DNA, 170 bp, Artificial sequence
  Cdkn2a.647_Vhl.1
  crRNA array
cgatttcttggctttatatatcttgtggaaaggacgaaacaccgtaatttctactaagtgtagatgcaatcacgggagggagcagtaatttctactaagtgtagatagggctcccggcggccatttttttttaagcttggcgtggatccgatatcaactagatcttgaga

SEQ ID NO: 2209 - DNA, 170 bp, Artificial sequence
  Cdkn2a.647_Vhl.151
  crRNA array
cgatttcttggctttatatatcttgtggaaaggacgaaacaccgtaatttctactaagtgtagatgcaatcacgggagggagcagtaatttctactaagtgtagattagagcactcacccgagggattttttaagcttggcgtggatccgatatcaactagatcttgaga

SEQ ID NO: 2210 - DNA, 170 bp, Artificial sequence
  Cdkn2a.647_Zc3h13.1387
  crRNA array
cgatttcttggctttatatatcttgtggaaaggacgaaacaccgtaatttctactaagtgtagatgcaatcacgggagggagcagtaatttctactaagtgtagatgtgacgccggtcatgtgactttttttaagcttggcgtggatccgatatcaactagatcttgaga

SEQ ID NO: 2211 - DNA, 170 bp, Artificial sequence
  Cdkn2a.647_Zc3h13.1777
  crRNA array
cgatttcttggctttatatatcttgtggaaaggacgaaacaccgtaatttctactaagtgtagatgcaatcacgggagggagcagtaatttctactaagtgtagatgatgctgccagtgtagcggcttttttaagcttggcgtggatccgatatcaactagatcttgaga

SEQ ID NO: 2212 - DNA, 170 bp, Artificial sequence
  Cdkn2a.648_Acvr2a.155
  crRNA array
cgatttcttggctttatatatcttgtggaaaggacgaaacaccgtaatttctactaagtgtagatcaatcacgggagggagcagataatttctactaagtgtagatggacctggctaatcaagtatttttttaagcttggcgtggatccgatatcaactagatcttgaga

SEQ ID NO: 2213 - DNA, 170 bp, Artificial sequence
  Cdkn2a.648_Acvr2a.70
  crRNA array
cgatttcttggctttatatatcttgtggaaaggacgaaacaccgtaatttctactaagtgtagatcaatcacgggagggagcagataatttctactaagtgtagatcccgaggcgccggagaagccttttttaagcttggcgtggatccgatatcaactagatcttgaga

SEQ ID NO: 2214 - DNA, 170 bp, Artificial sequence
  Cdkn2a.648_Apc.21
  crRNA array
cgatttcttggctttatatatcttgtggaaaggacgaaacaccgtaatttctactaagtgtagatcaatcacgggagggagcagataatttctactaagtgtagatgtgatccacacgtgtagctgttttttaagcttggcgtggatccgatatcaactagatcttgaga

SEQ ID NO: 2215 - DNA, 170 bp, Artificial sequence
  Cdkn2a.648_Apc.867
  crRNA array
cgatttcttggctttatatatcttgtggaaaggacgaaacaccgtaatttctactaagtgtagatcaatcacgggagggagcagataatttctactaagtgtagatcagtcccaggcggcggaagcttttttaagcttggcgtggatccgatatcaactagatcttgaga

SEQ ID NO: 2216 - DNA, 170 bp, Artificial sequence
  Cdkn2a.648_Arid1a.2
  crRNA array
cgatttcttggctttatatatcttgtggaaaggacgaaacaccgtaatttctactaagtgtagatcaatcacgggagggagcagataatttctactaagtgtagatcccgcgcccccgtcctggggttttttaagcttggcgtggatccgatatcaactagatcttgaga

SEQ ID NO: 2217 - DNA, 170 bp, Artificial sequence
  Cdkn2a.648_Arid1a.5
  crRNA array
cgatttcttggctttatatatcttgtggaaaggacgaaacaccgtaatttctactaagtgtagatcaatcacgggagggagcagataatttctactaagtgtagatcccgcgctcggccgctgccgttttttaagcttggcgtggatccgatatcaactagatcttgaga

SEQ ID NO: 2218 - DNA, 170 bp, Artificial sequence
  Cdkn2a.648_Arid2.166
  crRNA array
cgatttcttggctttatatatcttgtggaaaggacgaaacaccgtaatttctactaagtgtagatcaatcacgggagggagcagataatttctactaagtgtagataaccgcgatctgggttttttttttttaagcttggcgtggatccgatatcaactagatcttgaga

SEQ ID NO: 2219 - DNA, 170 bp, Artificial sequence
  Cdkn2a.648_Arid2.172
  crRNA array
cgatttcttggctttatatatcttgtggaaaggacgaaacaccgtaatttctactaagtgtagatcaatcacgggagggagcagataatttctactaagtgtagatctggacgagctgcggcagttttttttaagcttggcgtggatccgatatcaactagatcttgaga

SEQ ID NO: 2220 - DNA, 170 bp, Artificial sequence
  Cdkn2a.648_Atm.120
  crRNA array
cgatttcttggctttatatatcttgtggaaaggacgaaacaccgtaatttctactaagtgtagatcaatcacgggagggagcagataatttctactaagtgtagatgacaggtagtcggcagctaattttttaagcttggcgtggatccgatatcaactagatcttgaga

SEQ ID NO: 2221 - DNA, 170 bp, Artificial sequence
  Cdkn2a.648_Atm.997
  crRNA array
cgatttcttggctttatatatcttgtggaaaggacgaaacaccgtaatttctactaagtgtagatcaatcacgggagggagcagataatttctactaagtgtagatgagaaagtctccgaatcgttttttttaagcttggcgtggatccgatatcaactagatcttgaga

SEQ ID NO: 2222 - DNA, 170 bp, Artificial sequence
  Cdkn2a.648_Atrx.249
  crRNA array
cgatttcttggctttatatatcttgtggaaaggacgaaacaccgtaatttctactaagtgtagatcaatcacgggagggagcagataatttctactaagtgtagattagccagtcgctcatatctcttttttaagcttggcgtggatccgatatcaactagatcttgaga

SEQ ID NO: 2223 - DNA, 170 bp, Artificial sequence
  Cdkn2a.648_Atrx.251
  crRNA array
cgatttcttggctttatatatcttgtggaaaggacgaaacaccgtaatttctactaagtgtagatcaatcacgggagggagcagataatttctactaagtgtagatgccagtcgctcatatctctgttttttaagcttggcgtggatccgatatcaactagatcttgaga

SEQ ID NO: 2224 - DNA, 170 bp, Artificial sequence
  Cdkn2a.648_Bcor.203
  crRNA array
cgatttcttggctttatatatcttgtggaaaggacgaaacaccgtaatttctactaagtgtagatcaatcacgggagggagcagataatttctactaagtgtagatccccggagcggagtccaggcttttttaagcttggcgtggatccgatatcaactagatcttgaga

SEQ ID NO: 2225 - DNA, 170 bp, Artificial sequence
  Cdkn2a.648_Bcor.475
  crRNA array
cgatttcttggctttatatatcttgtggaaaggacgaaacaccgtaatttctactaagtgtagatcaatcacgggagggagcagataatttctactaagtgtagattgcaacccctctgtatgggattttttaagcttggcgtggatccgatatcaactagatcttgaga

SEQ ID NO: 2226 - DNA, 170 bp, Artificial sequence
  Cdkn2a.648_Brca1.112
  crRNA array
cgatttcttggctttatatatcttgtggaaaggacgaaacaccgtaatttctactaagtgtagatcaatcacgggagggagcagataatttctactaagtgtagatctagacgctctgtggagactttttttaagcttggcgtggatccgatatcaactagatcttgaga

SEQ ID NO: 2227 - DNA, 170 bp, Artificial sequence
  Cdkn2a.648_Brca1.53
  crRNA array
cgatttcttggctttatatatcttgtggaaaggacgaaacaccgtaatttctactaagtgtagatcaatcacgggagggagcagataatttctactaagtgtagataatgaggaggcgtcgatcatttttttaagcttggcgtggatccgatatcaactagatcttgaga

SEQ ID NO: 2228 - DNA, 170 bp, Artificial sequence
  Cdkn2a.648_Casp8.45
  crRNA array
cgatttcttggctttatatatcttgtggaaaggacgaaacaccgtaatttctactaagtgtagatcaatcacgggagggagcagataatttctactaagtgtagatctaccgagatcctgtgaatgttttttaagcttggcgtggatccgatatcaactagatcttgaga

SEQ ID NO: 2229 - DNA, 170 bp, Artificial sequence
  Cdkn2a.648_Casp8.54
  crRNA array
cgatttcttggctttatatatcttgtggaaaggacgaaacaccgtaatttctactaagtgtagatcaatcacgggagggagcagataatttctactaagtgtagatcagtgcagtcgtcgtaagatttttttaagcttggcgtggatccgatatcaactagatcttgaga

SEQ ID NO: 2230 - DNA, 170 bp, Artificial sequence
  Cdkn2a.648_Cbwd1.84
  crRNA array
cgatttcttggctttatatatcttgtggaaaggacgaaacaccgtaatttctactaagtgtagatcaatcacgggagggagcagataatttctactaagtgtagatcacagcaggtaacatgccgcttttttaagcttggcgtggatccgatatcaactagatcttgaga

SEQ ID NO: 2231 - DNA, 170 bp, Artificial sequence
  Cdkn2a.648_Cbwd1.85
  crRNA array
cgatttcttggctttatatatcttgtggaaaggacgaaacaccgtaatttctactaagtgtagatcaatcacgggagggagcagataatttctactaagtgtagatacagcaggtaacatgccgccttttttaagcttggcgtggatccgatatcaactagatcttgaga

SEQ ID NO: 2232 - DNA, 170 bp, Artificial sequence
  Cdkn2a.648_Cdh1.387
  crRNA array
cgatttcttggctttatatatcttgtggaaaggacgaaacaccgtaatttctactaagtgtagatcaatcacgggagggagcagataatttctactaagtgtagatctcggcgtctgccgggtccgttttttaagcttggcgtggatccgatatcaactagatcttgaga

SEQ ID NO: 2233 - DNA, 170 bp, Artificial sequence
  Cdkn2a.648_Cdh1.58
  crRNA array
cgatttcttggctttatatatcttgtggaaaggacgaaacaccgtaatttctactaagtgtagatcaatcacgggagggagcagataatttctactaagtgtagatctcgtccgcgcccgggactcttttttaagcttggcgtggatccgatatcaactagatcttgaga

SEQ ID NO: 2234 - DNA, 170 bp, Artificial sequence
  Cdkn2a.648_Cic.162
  crRNA array
cgatttcttggctttatatatcttgtggaaaggacgaaacaccgtaatttctactaagtgtagatcaatcacgggagggagcagataatttctactaagtgtagatcgcaggcgcgcccggcggagttttttaagcttggcgtggatccgatatcaactagatcttgaga

SEQ ID NO: 2235 - DNA, 170 bp, Artificial sequence
  Cdkn2a.648_Cic.164
  crRNA array
cgatttcttggctttatatatcttgtggaaaggacgaaacaccgtaatttctactaagtgtagatcaatcacgggagggagcagataatttctactaagtgtagatcgggccctgggccggcggctttttttaagcttggcgtggatccgatatcaactagatcttgaga

SEQ ID NO: 2236 - DNA, 170 bp, Artificial sequence
  Cdkn2a.648_Ctcf.229
  crRNA array
cgatttcttggctttatatatcttgtggaaaggacgaaacaccgtaatttctactaagtgtagatcaatcacgggagggagcagataatttctactaagtgtagatggctggtggctgatagtctgttttttaagcttggcgtggatccgatatcaactagatcttgaga

SEQ ID NO: 2237 - DNA, 170 bp, Artificial sequence
  Cdkn2a.648_Ctcf.809
  crRNA array
cgatttcttggctttatatatcttgtggaaaggacgaaacaccgtaatttctactaagtgtagatcaatcacgggagggagcagataatttctactaagtgtagataagcgctatcatgatcccaattttttaagcttggcgtggatccgatatcaactagatcttgaga

SEQ ID NO: 2238 - DNA, 170 bp, Artificial sequence
  Cdkn2a.648_Elf3.826
  crRNA array
cgatttcttggctttatatatcttgtggaaaggacgaaacaccgtaatttctactaagtgtagatcaatcacgggagggagcagataatttctactaagtgtagattccgagacatcctaatccacttttttaagcttggcgtggatccgatatcaactagatcttgaga

SEQ ID NO: 2239 - DNA, 170 bp, Artificial sequence
  Cdkn2a.648_Elf3.983
  crRNA array
cgatttcttggctttatatatcttgtggaaaggacgaaacaccgtaatttctactaagtgtagatcaatcacgggagggagcagataatttctactaagtgtagattaggccccctaactggaccattttttaagcttggcgtggatccgatatcaactagatcttgaga

SEQ ID NO: 2240 - DNA, 170 bp, Artificial sequence
  Cdkn2a.648_Ep300.310
  crRNA array
cgatttcttggctttatatatcttgtggaaaggacgaaacaccgtaatttctactaagtgtagatcaatcacgggagggagcagataatttctactaagtgtagatatggtacgacagtgaggaagttttttaagcttggcgtggatccgatatcaactagatcttgaga

SEQ ID NO: 2241 - DNA, 170 bp, Artificial sequence
  Cdkn2a.648_Ep300.587
  crRNA array
cgatttcttggctttatatatcttgtggaaaggacgaaacaccgtaatttctactaagtgtagatcaatcacgggagggagcagataatttctactaagtgtagatcgccccggggcccccaaccattttttaagcttggcgtggatccgatatcaactagatcttgaga

SEQ ID NO: 2242 - DNA, 170 bp, Artificial sequence
  Cdkn2a.648_Epha2.126
  crRNA array
cgatttcttggctttatatatcttgtggaaaggacgaaacaccgtaatttctactaagtgtagatcaatcacgggagggagcagataatttctactaagtgtagatcctgtgccgccgcggccgccttttttaagcttggcgtggatccgatatcaactagatcttgaga

SEQ ID NO: 2243 - DNA, 170 bp, Artificial sequence
  Cdkn2a.648_Epha2.5
  crRNA array
cgatttcttggctttatatatcttgtggaaaggacgaaacaccgtaatttctactaagtgtagatcaatcacgggagggagcagataatttctactaagtgtagatcatgagctggcgccacccggttttttaagcttggcgtggatccgatatcaactagatcttgaga

SEQ ID NO: 2244 - DNA, 170 bp, Artificial sequence
  Cdkn2a.648_Fat1.105
  crRNA array
cgatttcttggctttatatatcttgtggaaaggacgaaacaccgtaatttctactaagtgtagatcaatcacgggagggagcagataatttctactaagtgtagataactcgaggtgacaacaagtttttttaagcttggcgtggatccgatatcaactagatcttgaga

SEQ ID NO: 2245 - DNA, 170 bp, Artificial sequence
  Cdkn2a.648_Fat1.122
  crRNA array
cgatttcttggctttatatatcttgtggaaaggacgaaacaccgtaatttctactaagtgtagatcaatcacgggagggagcagataatttctactaagtgtagatccatcgacatggaaacgggattttttaagcttggcgtggatccgatatcaactagatcttgaga

SEQ ID NO: 2246 - DNA, 170 bp, Artificial sequence
  Cdkn2a.648_Fbxw7.21
  crRNA array
cgatttcttggctttatatatcttgtggaaaggacgaaacaccgtaatttctactaagtgtagatcaatcacgggagggagcagataatttctactaagtgtagattaatgtgccgtagaaacccattttttaagcttggcgtggatccgatatcaactagatcttgaga

SEQ ID NO: 2247 - DNA, 170 bp, Artificial sequence
  Cdkn2a.648_Fbxw7.23
  crRNA array
cgatttcttggctttatatatcttgtggaaaggacgaaacaccgtaatttctactaagtgtagatcaatcacgggagggagcagataatttctactaagtgtagatatgtgccgtagaaacccatattttttaagcttggcgtggatccgatatcaactagatcttgaga

SEQ ID NO: 2248 - DNA, 170 bp, Artificial sequence
  Cdkn2a.648_Gata3.34
  crRNA array
cgatttcttggctttatatatcttgtggaaaggacgaaacaccgtaatttctactaagtgtagatcaatcacgggagggagcagataatttctactaagtgtagatctaaactatcccgcaaagatttttttaagcttggcgtggatccgatatcaactagatcttgaga

SEQ ID NO: 2249 - DNA, 170 bp, Artificial sequence
  Cdkn2a.648_Gata3.47
  crRNA array
cgatttcttggctttatatatcttgtggaaaggacgaaacaccgtaatttctactaagtgtagatcaatcacgggagggagcagataatttctactaagtgtagatcgtagtaggacgggacgtggttttttaagcttggcgtggatccgatatcaactagatcttgaga

SEQ ID NO: 2250 - DNA, 170 bp, Artificial sequence
  Cdkn2a.648_H2-Q2.1
  crRNA array
cgatttcttggctttatatatcttgtggaaaggacgaaacaccgtaatttctactaagtgtagatcaatcacgggagggagcagataatttctactaagtgtagatagggcggccaccaacagcagttttttaagcttggcgtggatccgatatcaactagatcttgaga

SEQ ID NO: 2251 - DNA, 170 bp, Artificial sequence
  Cdkn2a.648_H2-Q2.2
  crRNA array
cgatttcttggctttatatatcttgtggaaaggacgaaacaccgtaatttctactaagtgtagatcaatcacgggagggagcagataatttctactaagtgtagattaacctgcgcccgctgctgattttttaagcttggcgtggatccgatatcaactagatcttgaga

SEQ ID NO: 2252 - DNA, 170 bp, Artificial sequence
  Cdkn2a.648_Kdm5c.1878
  crRNA array
cgatttcttggctttatatatcttgtggaaaggacgaaacaccgtaatttctactaagtgtagatcaatcacgggagggagcagataatttctactaagtgtagatagagcacggcacccgcccccttttttaagcttggcgtggatccgatatcaactagatcttgaga

SEQ ID NO: 2253 - DNA, 170 bp, Artificial sequence
  Cdkn2a.648_Kdm5c.1879
  crRNA array
cgatttcttggctttatatatcttgtggaaaggacgaaacaccgtaatttctactaagtgtagatcaatcacgggagggagcagataatttctactaagtgtagatgagcacggcacccgccccccttttttaagcttggcgtggatccgatatcaactagatcttgaga

SEQ ID NO: 2254 - DNA, 170 bp, Artificial sequence
  Cdkn2a.648_Kdm6a.56
  crRNA array
cgatttcttggctttatatatcttgtggaaaggacgaaacaccgtaatttctactaagtgtagatcaatcacgggagggagcagataatttctactaagtgtagattcgctgccgcctctcgcggcttttttaagcttggcgtggatccgatatcaactagatcttgaga

SEQ ID NO: 2255 - DNA, 170 bp, Artificial sequence
  Cdkn2a.648_Kdm6a.57
  crRNA array
cgatttcttggctttatatatcttgtggaaaggacgaaacaccgtaatttctactaagtgtagatcaatcacgggagggagcagataatttctactaagtgtagatcgctgccgcctctcgcggcattttttaagcttggcgtggatccgatatcaactagatcttgaga

SEQ ID NO: 2256 - DNA, 170 bp, Artificial sequence
  Cdkn2a.648_Kmt2b.265
  crRNA array
cgatttcttggctttatatatcttgtggaaaggacgaaacaccgtaatttctactaagtgtagatcaatcacgggagggagcagataatttctactaagtgtagatccccaagtgaagcccacctgttttttaagcttggcgtggatccgatatcaactagatcttgaga

SEQ ID NO: 2257 - DNA, 170 bp, Artificial sequence
  Cdkn2a.648_Kmt2b.298
  crRNA array
cgatttcttggctttatatatcttgtggaaaggacgaaacaccgtaatttctactaagtgtagatcaatcacgggagggagcagataatttctactaagtgtagattccggcagggaccggctggcttttttaagcttggcgtggatccgatatcaactagatcttgaga

SEQ ID NO: 2258 - DNA, 170 bp, Artificial sequence
  Cdkn2a.648_Kmt2c.1962
  crRNA array
cgatttcttggctttatatatcttgtggaaaggacgaaacaccgtaatttctactaagtgtagatcaatcacgggagggagcagataatttctactaagtgtagatgtgacgatctgtgccacaagttttttaagcttggcgtggatccgatatcaactagatcttgaga

SEQ ID NO: 2259 - DNA, 170 bp, Artificial sequence
  Cdkn2a.648_Kmt2c.2236
  crRNA array
cgatttcttggctttatatatcttgtggaaaggacgaaacaccgtaatttctactaagtgtagatcaatcacgggagggagcagataatttctactaagtgtagatactcgacctccacctccctattttttaagcttggcgtggatccgatatcaactagatcttgaga

SEQ ID NO: 2260 - DNA, 170 bp, Artificial sequence
  Cdkn2a.648_Kmt2d.316
  crRNA array
cgatttcttggctttatatatcttgtggaaaggacgaaacaccgtaatttctactaagtgtagatcaatcacgggagggagcagataatttctactaagtgtagatactccaggccacccaggtggttttttaagcttggcgtggatccgatatcaactagatcttgaga

SEQ ID NO: 2261 - DNA, 170 bp, Artificial sequence
  Cdkn2a.648_Kmt2d.416
  crRNA array
cgatttcttggctttatatatcttgtggaaaggacgaaacaccgtaatttctactaagtgtagatcaatcacgggagggagcagataatttctactaagtgtagattaaacccccgggggaagggtttttttaagcttggcgtggatccgatatcaactagatcttgaga

SEQ ID NO: 2262 - DNA, 170 bp, Artificial sequence
  Cdkn2a.648_Map2k4.119
  crRNA array
cgatttcttggctttatatatcttgtggaaaggacgaaacaccgtaatttctactaagtgtagatcaatcacgggagggagcagataatttctactaagtgtagattgctgtgtgggcggccacatttttttaagcttggcgtggatccgatatcaactagatcttgaga

SEQ ID NO: 2263 - DNA, 170 bp, Artificial sequence
  Cdkn2a.648_Map2k4.1261
  crRNA array
cgatttcttggctttatatatcttgtggaaaggacgaaacaccgtaatttctactaagtgtagatcaatcacgggagggagcagataatttctactaagtgtagatgatgtagtaatgcggagtagttttttaagcttggcgtggatccgatatcaactagatcttgaga

SEQ ID NO: 2264 - DNA, 170 bp, Artificial sequence
  Cdkn2a.648_Map3k1.235
  crRNA array
cgatttcttggctttatatatcttgtggaaaggacgaaacaccgtaatttctactaagtgtagatcaatcacgggagggagcagataatttctactaagtgtagataaaacgctactgatcgatcgttttttaagcttggcgtggatccgatatcaactagatcttgaga

SEQ ID NO: 2265 - DNA, 170 bp, Artificial sequence
  Cdkn2a.648_Map3k1.3838
  crRNA array
cgatttcttggctttatatatcttgtggaaaggacgaaacaccgtaatttctactaagtgtagatcaatcacgggagggagcagataatttctactaagtgtagatccaacaacagggccccactattttttaagcttggcgtggatccgatatcaactagatcttgaga

SEQ ID NO: 2266 - DNA, 170 bp, Artificial sequence
  Cdkn2a.648_Mga.1655
  crRNA array
cgatttcttggctttatatatcttgtggaaaggacgaaacaccgtaatttctactaagtgtagatcaatcacgggagggagcagataatttctactaagtgtagatcgagaagtggagagcatattttttttaagcttggcgtggatccgatatcaactagatcttgaga

SEQ ID NO: 2267 - DNA, 170 bp, Artificial sequence
  Cdkn2a.648_Mga.93
  crRNA array
cgatttcttggctttatatatcttgtggaaaggacgaaacaccgtaatttctactaagtgtagatcaatcacgggagggagcagataatttctactaagtgtagatgagaaggctccccataatgtttttttaagcttggcgtggatccgatatcaactagatcttgaga

SEQ ID NO: 2268 - DNA, 170 bp, Artificial sequence
  Cdkn2a.648_Nf1.746
  crRNA array
cgatttcttggctttatatatcttgtggaaaggacgaaacaccgtaatttctactaagtgtagatcaatcacgggagggagcagataatttctactaagtgtagattaagcataatgatgatgccattttttaagcttggcgtggatccgatatcaactagatcttgaga

SEQ ID NO: 2269 - DNA, 170 bp, Artificial sequence
  Cdkn2a.648_Nf1.97
  crRNA array
cgatttcttggctttatatatcttgtggaaaggacgaaacaccgtaatttctactaagtgtagatcaatcacgggagggagcagataatttctactaagtgtagatagcccgctacatgctgatgcttttttaagcttggcgtggatccgatatcaactagatcttgaga

SEQ ID NO: 2270 - DNA, 170 bp, Artificial sequence
  Cdkn2a.648_Nf2.356
  crRNA array
cgatttcttggctttatatatcttgtggaaaggacgaaacaccgtaatttctactaagtgtagatcaatcacgggagggagcagataatttctactaagtgtagatcggagtcatctgatagagatttttttaagcttggcgtggatccgatatcaactagatcttgaga

SEQ ID NO: 2271 - DNA, 170 bp, Artificial sequence
  Cdkn2a.648_Nf2.768
  crRNA array
cgatttcttggctttatatatcttgtggaaaggacgaaacaccgtaatttctactaagtgtagatcaatcacgggagggagcagataatttctactaagtgtagatccgaagccccagtgtccggcttttttaagcttggcgtggatccgatatcaactagatcttgaga

SEQ ID NO: 2272 - DNA, 170 bp, Artificial sequence
  Cdkn2a.648_Notch1.1849
  crRNA array
cgatttcttggctttatatatcttgtggaaaggacgaaacaccgtaatttctactaagtgtagatcaatcacgggagggagcagataatttctactaagtgtagatctggcgggtgggcggcgctgttttttaagcttggcgtggatccgatatcaactagatcttgaga

SEQ ID NO: 2273 - DNA, 170 bp, Artificial sequence
  Cdkn2a.648_Notch1.649
  crRNA array
cgatttcttggctttatatatcttgtggaaaggacgaaacaccgtaatttctactaagtgtagatcaatcacgggagggagcagataatttctactaagtgtagattgggccaacgatgccaggacttttttaagcttggcgtggatccgatatcaactagatcttgaga

SEQ ID NO: 2274 - DNA, 170 bp, Artificial sequence
  Cdkn2a.648_Nsd1.70
  crRNA array
cgatttcttggctttatatatcttgtggaaaggacgaaacaccgtaatttctactaagtgtagatcaatcacgggagggagcagataatttctactaagtgtagatactggtgtggacgatgcagattttttaagcttggcgtggatccgatatcaactagatcttgaga

SEQ ID NO: 2275 - DNA, 170 bp, Artificial sequence
  Cdkn2a.648_Nsd1.90
  crRNA array
cgatttcttggctttatatatcttgtggaaaggacgaaacaccgtaatttctactaagtgtagatcaatcacgggagggagcagataatttctactaagtgtagataggagctaacggcaagaatgttttttaagcttggcgtggatccgatatcaactagatcttgaga

SEQ ID NO: 2276 - DNA, 170 bp, Artificial sequence
  Cdkn2a.648_Pbrm1.1236
  crRNA array
cgatttcttggctttatatatcttgtggaaaggacgaaacaccgtaatttctactaagtgtagatcaatcacgggagggagcagataatttctactaagtgtagatgccgataaaaccaacagccgttttttaagcttggcgtggatccgatatcaactagatcttgaga

SEQ ID NO: 2277 - DNA, 170 bp, Artificial sequence
  Cdkn2a.648_Pbrm1.969
  crRNA array
cgatttcttggctttatatatcttgtggaaaggacgaaacaccgtaatttctactaagtgtagatcaatcacgggagggagcagataatttctactaagtgtagatgagccctaatgaacagctcattttttaagcttggcgtggatccgatatcaactagatcttgaga

SEQ ID NO: 2278 - DNA, 170 bp, Artificial sequence
  Cdkn2a.648_Pik3r1.76
  crRNA array
cgatttcttggctttatatatcttgtggaaaggacgaaacaccgtaatttctactaagtgtagatcaatcacgggagggagcagataatttctactaagtgtagataaaacctatacggcccgcacttttttaagcttggcgtggatccgatatcaactagatcttgaga

SEQ ID NO: 2279 - DNA, 170 bp, Artificial sequence
  Cdkn2a.648_Pik3r1.77
  crRNA array
cgatttcttggctttatatatcttgtggaaaggacgaaacaccgtaatttctactaagtgtagatcaatcacgggagggagcagataatttctactaagtgtagataaacctatacggcccgcactttttttaagcttggcgtggatccgatatcaactagatcttgaga

SEQ ID NO: 2280 - DNA, 170 bp, Artificial sequence
  Cdkn2a.648_Pten.240
  crRNA array
cgatttcttggctttatatatcttgtggaaaggacgaaacaccgtaatttctactaagtgtagatcaatcacgggagggagcagataatttctactaagtgtagattgcatacgctatagctgcttttttttaagcttggcgtggatccgatatcaactagatcttgaga

SEQ ID NO: 2281 - DNA, 170 bp, Artificial sequence
  Cdkn2a.648_Pten.265
  crRNA array
cgatttcttggctttatatatcttgtggaaaggacgaaacaccgtaatttctactaagtgtagatcaatcacgggagggagcagataatttctactaagtgtagataagcgtggtgcgtgacgcacttttttaagcttggcgtggatccgatatcaactagatcttgaga

SEQ ID NO: 2282 - DNA, 170 bp, Artificial sequence
  Cdkn2a.648_Rasa1.1478
  crRNA array
cgatttcttggctttatatatcttgtggaaaggacgaaacaccgtaatttctactaagtgtagatcaatcacgggagggagcagataatttctactaagtgtagatcgataatggtctatgatgtcttttttaagcttggcgtggatccgatatcaactagatcttgaga

SEQ ID NO: 2283 - DNA, 170 bp, Artificial sequence
  Cdkn2a.648_Rasa1.223
  crRNA array
cgatttcttggctttatatatcttgtggaaaggacgaaacaccgtaatttctactaagtgtagatcaatcacgggagggagcagataatttctactaagtgtagattccatggagtatcgtgctcgttttttaagcttggcgtggatccgatatcaactagatcttgaga

SEQ ID NO: 2284 - DNA, 170 bp, Artificial sequence
  Cdkn2a.648_Rb1.211
  crRNA array
cgatttcttggctttatatatcttgtggaaaggacgaaacaccgtaatttctactaagtgtagatcaatcacgggagggagcagataatttctactaagtgtagattctgacatgatcgggtacctttttttaagcttggcgtggatccgatatcaactagatcttgaga

SEQ ID NO: 2285 - DNA, 170 bp, Artificial sequence
  Cdkn2a.648_Rb1.394
  crRNA array
cgatttcttggctttatatatcttgtggaaaggacgaaacaccgtaatttctactaagtgtagatcaatcacgggagggagcagataatttctactaagtgtagatagaaatctcgaagcaggatcttttttaagcttggcgtggatccgatatcaactagatcttgaga

SEQ ID NO: 2286 - DNA, 170 bp, Artificial sequence
  Cdkn2a.648_Rbm10.5
  crRNA array
cgatttcttggctttatatatcttgtggaaaggacgaaacaccgtaatttctactaagtgtagatcaatcacgggagggagcagataatttctactaagtgtagatacgaaacctgaacccacacattttttaagcttggcgtggatccgatatcaactagatcttgaga

SEQ ID NO: 2287 - DNA, 170 bp, Artificial sequence
  Cdkn2a.648_Rbm10.6
  crRNA array
cgatttcttggctttatatatcttgtggaaaggacgaaacaccgtaatttctactaagtgtagatcaatcacgggagggagcagataatttctactaagtgtagatcgaaacctgaacccacacagttttttaagcttggcgtggatccgatatcaactagatcttgaga

SEQ ID NO: 2288 - DNA, 170 bp, Artificial sequence
  Cdkn2a.648_Rnf43.1920
  crRNA array
cgatttcttggctttatatatcttgtggaaaggacgaaacaccgtaatttctactaagtgtagatcaatcacgggagggagcagataatttctactaagtgtagatatccccgtgccgtggactccttttttaagcttggcgtggatccgatatcaactagatcttgaga

SEQ ID NO: 2289 - DNA, 170 bp, Artificial sequence
  Cdkn2a.648_Rnf43.39
  crRNA array
cgatttcttggctttatatatcttgtggaaaggacgaaacaccgtaatttctactaagtgtagatcaatcacgggagggagcagataatttctactaagtgtagatcaaggggatcactctgataattttttaagcttggcgtggatccgatatcaactagatcttgaga

SEQ ID NO: 2290 - DNA, 170 bp, Artificial sequence
  Cdkn2a.648_Runx1.204
  crRNA array
cgatttcttggctttatatatcttgtggaaaggacgaaacaccgtaatttctactaagtgtagatcaatcacgggagggagcagataatttctactaagtgtagattaaataagtccagccgttttttttttaagcttggcgtggatccgatatcaactagatcttgaga

SEQ ID NO: 2291 - DNA, 170 bp, Artificial sequence
  Cdkn2a.648_Runx1.81
  crRNA array
cgatttcttggctttatatatcttgtggaaaggacgaaacaccgtaatttctactaagtgtagatcaatcacgggagggagcagataatttctactaagtgtagataggacgcgtatgggaattttttttttaagcttggcgtggatccgatatcaactagatcttgaga

SEQ ID NO: 2292 - DNA, 170 bp, Artificial sequence
  Cdkn2a.648_Setd2.143
  crRNA array
cgatttcttggctttatatatcttgtggaaaggacgaaacaccgtaatttctactaagtgtagatcaatcacgggagggagcagataatttctactaagtgtagatgcacaaccacaacagactggttttttaagcttggcgtggatccgatatcaactagatcttgaga

SEQ ID NO: 2293 - DNA, 170 bp, Artificial sequence
  Cdkn2a.648_Setd2.508
  crRNA array
cgatttcttggctttatatatcttgtggaaaggacgaaacaccgtaatttctactaagtgtagatcaatcacgggagggagcagataatttctactaagtgtagattacgatcccgagcacccgacttttttaagcttggcgtggatccgatatcaactagatcttgaga

SEQ ID NO: 2294 - DNA, 170 bp, Artificial sequence
  Cdkn2a.648_Smad4.3038
  crRNA array
cgatttcttggctttatatatcttgtggaaaggacgaaacaccgtaatttctactaagtgtagatcaatcacgggagggagcagataatttctactaagtgtagatatctgcggcagtgtcaccggttttttaagcttggcgtggatccgatatcaactagatcttgaga

SEQ ID NO: 2295 - DNA, 170 bp, Artificial sequence
  Cdkn2a.648_Smad4.39
  crRNA array
cgatttcttggctttatatatcttgtggaaaggacgaaacaccgtaatttctactaagtgtagatcaatcacgggagggagcagataatttctactaagtgtagatagtcaaacgcatactgacaattttttaagcttggcgtggatccgatatcaactagatcttgaga

SEQ ID NO: 2296 - DNA, 170 bp, Artificial sequence
  Cdkn2a.648_Stag2.1409
  crRNA array
cgatttcttggctttatatatcttgtggaaaggacgaaacaccgtaatttctactaagtgtagatcaatcacgggagggagcagataatttctactaagtgtagatgctaataactgcggaagggcttttttaagcttggcgtggatccgatatcaactagatcttgaga

SEQ ID NO: 2297 - DNA, 170 bp, Artificial sequence
  Cdkn2a.648_Stag2.4401
  crRNA array
cgatttcttggctttatatatcttgtggaaaggacgaaacaccgtaatttctactaagtgtagatcaatcacgggagggagcagataatttctactaagtgtagattaatcgtccagtggtgtatattttttaagcttggcgtggatccgatatcaactagatcttgaga

SEQ ID NO: 2298 - DNA, 170 bp, Artificial sequence
  Cdkn2a.648_Tbl1xr1.1
  crRNA array
cgatttcttggctttatatatcttgtggaaaggacgaaacaccgtaatttctactaagtgtagatcaatcacgggagggagcagataatttctactaagtgtagatggatgcgcatactggtgaagttttttaagcttggcgtggatccgatatcaactagatcttgaga

SEQ ID NO: 2299 - DNA, 170 bp, Artificial sequence
  Cdkn2a.648_Tbl1xr1.83
  crRNA array
cgatttcttggctttatatatcttgtggaaaggacgaaacaccgtaatttctactaagtgtagatcaatcacgggagggagcagataatttctactaagtgtagatatggtcgacccatcgagtctttttttaagcttggcgtggatccgatatcaactagatcttgaga

SEQ ID NO: 2300 - DNA, 170 bp, Artificial sequence
  Cdkn2a.648_Tgfbr2.290
  crRNA array
cgatttcttggctttatatatcttgtggaaaggacgaaacaccgtaatttctactaagtgtagatcaatcacgggagggagcagataatttctactaagtgtagatcctctcggcgcccgggtaaattttttaagcttggcgtggatccgatatcaactagatcttgaga

SEQ ID NO: 2301 - DNA, 170 bp, Artificial sequence
  Cdkn2a.648_Tgfbr2.292
  crRNA array
cgatttcttggctttatatatcttgtggaaaggacgaaacaccgtaatttctactaagtgtagatcaatcacgggagggagcagataatttctactaagtgtagatcccgggcgccgagagggaaattttttaagcttggcgtggatccgatatcaactagatcttgaga

SEQ ID NO: 2302 - DNA, 170 bp, Artificial sequence
  Cdkn2a.648_Trp53.4
  crRNA array
cgatttcttggctttatatatcttgtggaaaggacgaaacaccgtaatttctactaagtgtagatcaatcacgggagggagcagataatttctactaagtgtagatccctgaactgcccccagggattttttaagcttggcgtggatccgatatcaactagatcttgaga

SEQ ID NO: 2303 - DNA, 170 bp, Artificial sequence
  Cdkn2a.648_Trp53.528
  crRNA array
cgatttcttggctttatatatcttgtggaaaggacgaaacaccgtaatttctactaagtgtagatcaatcacgggagggagcagataatttctactaagtgtagatgctgggccagcagagacctgttttttaagcttggcgtggatccgatatcaactagatcttgaga

SEQ ID NO: 2304 - DNA, 170 bp, Artificial sequence
  Cdkn2a.648_Vhl.1
  crRNA array
cgatttcttggctttatatatcttgtggaaaggacgaaacaccgtaatttctactaagtgtagatcaatcacgggagggagcagataatttctactaagtgtagatagggctcccggcggccatttttttttaagcttggcgtggatccgatatcaactagatcttgaga

SEQ ID NO: 2305 - DNA, 170 bp, Artificial sequence
  Cdkn2a.648_Vhl.151
  crRNA array
cgatttcttggctttatatatcttgtggaaaggacgaaacaccgtaatttctactaagtgtagatcaatcacgggagggagcagataatttctactaagtgtagattagagcactcacccgagggattttttaagcttggcgtggatccgatatcaactagatcttgaga

SEQ ID NO: 2306 - DNA, 170 bp, Artificial sequence
  Cdkn2a.648_Zc3h13.1387
  crRNA array
cgatttcttggctttatatatcttgtggaaaggacgaaacaccgtaatttctactaagtgtagatcaatcacgggagggagcagataatttctactaagtgtagatgtgacgccggtcatgtgactttttttaagcttggcgtggatccgatatcaactagatcttgaga

SEQ ID NO: 2307 - DNA, 170 bp, Artificial sequence
  Cdkn2a.648_Zc3h13.1777
  crRNA array
cgatttcttggctttatatatcttgtggaaaggacgaaacaccgtaatttctactaagtgtagatcaatcacgggagggagcagataatttctactaagtgtagatgatgctgccagtgtagcggcttttttaagcttggcgtggatccgatatcaactagatcttgaga

SEQ ID NO: 2308 - DNA, 170 bp, Artificial sequence
  Cic.162_Acvr2a.155
  crRNA array
cgatttcttggctttatatatcttgtggaaaggacgaaacaccgtaatttctactaagtgtagatcgcaggcgcgcccggcggagtaatttctactaagtgtagatggacctggctaatcaagtatttttttaagcttggcgtggatccgatatcaactagatcttgaga

SEQ ID NO: 2309 - DNA, 170 bp, Artificial sequence
  Cic.162_Acvr2a.70
  crRNA array
cgatttcttggctttatatatcttgtggaaaggacgaaacaccgtaatttctactaagtgtagatcgcaggcgcgcccggcggagtaatttctactaagtgtagatcccgaggcgccggagaagccttttttaagcttggcgtggatccgatatcaactagatcttgaga

SEQ ID NO: 2310 - DNA, 170 bp, Artificial sequence
  Cic.162_Apc.21
  crRNA array
cgatttcttggctttatatatcttgtggaaaggacgaaacaccgtaatttctactaagtgtagatcgcaggcgcgcccggcggagtaatttctactaagtgtagatgtgatccacacgtgtagctgttttttaagcttggcgtggatccgatatcaactagatcttgaga

SEQ ID NO: 2311 - DNA, 170 bp, Artificial sequence
  Cic.162_Apc.867
  crRNA array
cgatttcttggctttatatatcttgtggaaaggacgaaacaccgtaatttctactaagtgtagatcgcaggcgcgcccggcggagtaatttctactaagtgtagatcagtcccaggcggcggaagcttttttaagcttggcgtggatccgatatcaactagatcttgaga

SEQ ID NO: 2312 - DNA, 170 bp, Artificial sequence
  Cic.162_Arid1a.2
  crRNA array
cgatttcttggctttatatatcttgtggaaaggacgaaacaccgtaatttctactaagtgtagatcgcaggcgcgcccggcggagtaatttctactaagtgtagatcccgcgcccccgtcctggggttttttaagcttggcgtggatccgatatcaactagatcttgaga

SEQ ID NO: 2313 - DNA, 170 bp, Artificial sequence
  Cic.162_Arid1a.5
  crRNA array
cgatttcttggctttatatatcttgtggaaaggacgaaacaccgtaatttctactaagtgtagatcgcaggcgcgcccggcggagtaatttctactaagtgtagatcccgcgctcggccgctgccgttttttaagcttggcgtggatccgatatcaactagatcttgaga

SEQ ID NO: 2314 - DNA, 170 bp, Artificial sequence
  Cic.162_Arid2.166
  crRNA array
cgatttcttggctttatatatcttgtggaaaggacgaaacaccgtaatttctactaagtgtagatcgcaggcgcgcccggcggagtaatttctactaagtgtagataaccgcgatctgggttttttttttttaagcttggcgtggatccgatatcaactagatcttgaga

SEQ ID NO: 2315 - DNA, 170 bp, Artificial sequence
  Cic.162_Arid2.172
  crRNA array
cgatttcttggctttatatatcttgtggaaaggacgaaacaccgtaatttctactaagtgtagatcgcaggcgcgcccggcggagtaatttctactaagtgtagatctggacgagctgcggcagttttttttaagcttggcgtggatccgatatcaactagatcttgaga

SEQ ID NO: 2316 - DNA, 170 bp, Artificial sequence
  Cic.162_Atm.120
  crRNA array
cgatttcttggctttatatatcttgtggaaaggacgaaacaccgtaatttctactaagtgtagatcgcaggcgcgcccggcggagtaatttctactaagtgtagatgacaggtagtcggcagctaattttttaagcttggcgtggatccgatatcaactagatcttgaga

SEQ ID NO: 2317 - DNA, 170 bp, Artificial sequence
  Cic.162_Atm.997
  crRNA array
cgatttcttggctttatatatcttgtggaaaggacgaaacaccgtaatttctactaagtgtagatcgcaggcgcgcccggcggagtaatttctactaagtgtagatgagaaagtctccgaatcgttttttttaagcttggcgtggatccgatatcaactagatcttgaga

SEQ ID NO: 2318 - DNA, 170 bp, Artificial sequence
  Cic.162_Atrx.249
  crRNA array
cgatttcttggctttatatatcttgtggaaaggacgaaacaccgtaatttctactaagtgtagatcgcaggcgcgcccggcggagtaatttctactaagtgtagattagccagtcgctcatatctcttttttaagcttggcgtggatccgatatcaactagatcttgaga

SEQ ID NO: 2319 - DNA, 170 bp, Artificial sequence
  Cic.162_Atrx.251
  crRNA array
cgatttcttggctttatatatcttgtggaaaggacgaaacaccgtaatttctactaagtgtagatcgcaggcgcgcccggcggagtaatttctactaagtgtagatgccagtcgctcatatctctgttttttaagcttggcgtggatccgatatcaactagatcttgaga

SEQ ID NO: 2320 - DNA, 170 bp, Artificial sequence
  Cic.162_Bcor.203
  crRNA array
cgatttcttggctttatatatcttgtggaaaggacgaaacaccgtaatttctactaagtgtagatcgcaggcgcgcccggcggagtaatttctactaagtgtagatccccggagcggagtccaggcttttttaagcttggcgtggatccgatatcaactagatcttgaga

SEQ ID NO: 2321 - DNA, 170 bp, Artificial sequence
  Cic.162_Bcor.475
  crRNA array
cgatttcttggctttatatatcttgtggaaaggacgaaacaccgtaatttctactaagtgtagatcgcaggcgcgcccggcggagtaatttctactaagtgtagattgcaacccctctgtatgggattttttaagcttggcgtggatccgatatcaactagatcttgaga

SEQ ID NO: 2322 - DNA, 170 bp, Artificial sequence
  Cic.162_Brca1.112
  crRNA array
cgatttcttggctttatatatcttgtggaaaggacgaaacaccgtaatttctactaagtgtagatcgcaggcgcgcccggcggagtaatttctactaagtgtagatctagacgctctgtggagactttttttaagcttggcgtggatccgatatcaactagatcttgaga

SEQ ID NO: 2323 - DNA, 170 bp, Artificial sequence
  Cic.162_Brca1.53
  crRNA array
cgatttcttggctttatatatcttgtggaaaggacgaaacaccgtaatttctactaagtgtagatcgcaggcgcgcccggcggagtaatttctactaagtgtagataatgaggaggcgtcgatcatttttttaagcttggcgtggatccgatatcaactagatcttgaga

SEQ ID NO: 2324 - DNA, 170 bp, Artificial sequence
  Cic.162_Casp8.45
  crRNA array
cgatttcttggctttatatatcttgtggaaaggacgaaacaccgtaatttctactaagtgtagatcgcaggcgcgcccggcggagtaatttctactaagtgtagatctaccgagatcctgtgaatgttttttaagcttggcgtggatccgatatcaactagatcttgaga

SEQ ID NO: 2325 - DNA, 170 bp, Artificial sequence
  Cic.162_Casp8.54
  crRNA array
cgatttcttggctttatatatcttgtggaaaggacgaaacaccgtaatttctactaagtgtagatcgcaggcgcgcccggcggagtaatttctactaagtgtagatcagtgcagtcgtcgtaagatttttttaagcttggcgtggatccgatatcaactagatcttgaga

SEQ ID NO: 2326 - DNA, 170 bp, Artificial sequence
  Cic.162_Cbwd1.84
  crRNA array
cgatttcttggctttatatatcttgtggaaaggacgaaacaccgtaatttctactaagtgtagatcgcaggcgcgcccggcggagtaatttctactaagtgtagatcacagcaggtaacatgccgcttttttaagcttggcgtggatccgatatcaactagatcttgaga

SEQ ID NO: 2327 - DNA, 170 bp, Artificial sequence
  Cic.162_Cbwd1.85
  crRNA array
cgatttcttggctttatatatcttgtggaaaggacgaaacaccgtaatttctactaagtgtagatcgcaggcgcgcccggcggagtaatttctactaagtgtagatacagcaggtaacatgccgccttttttaagcttggcgtggatccgatatcaactagatcttgaga

SEQ ID NO: 2328 - DNA, 170 bp, Artificial sequence
  Cic.162_Cdh1.387
  crRNA array
cgatttcttggctttatatatcttgtggaaaggacgaaacaccgtaatttctactaagtgtagatcgcaggcgcgcccggcggagtaatttctactaagtgtagatctcggcgtctgccgggtccgttttttaagcttggcgtggatccgatatcaactagatcttgaga

SEQ ID NO: 2329 - DNA, 170 bp, Artificial sequence
  Cic.162_Cdh1.58
  crRNA array
cgatttcttggctttatatatcttgtggaaaggacgaaacaccgtaatttctactaagtgtagatcgcaggcgcgcccggcggagtaatttctactaagtgtagatctcgtccgcgcccgggactcttttttaagcttggcgtggatccgatatcaactagatcttgaga

SEQ ID NO: 2330 - DNA, 170 bp, Artificial sequence
  Cic.162_Cdkn2a.647
  crRNA array
cgatttcttggctttatatatcttgtggaaaggacgaaacaccgtaatttctactaagtgtagatcgcaggcgcgcccggcggagtaatttctactaagtgtagatgcaatcacgggagggagcagttttttaagcttggcgtggatccgatatcaactagatcttgaga

SEQ ID NO: 2331 - DNA, 170 bp, Artificial sequence
  Cic.162_Cdkn2a.648
  crRNA array
cgatttcttggctttatatatcttgtggaaaggacgaaacaccgtaatttctactaagtgtagatcgcaggcgcgcccggcggagtaatttctactaagtgtagatcaatcacgggagggagcagattttttaagcttggcgtggatccgatatcaactagatcttgaga

SEQ ID NO: 2332 - DNA, 170 bp, Artificial sequence
  Cic.162_Ctcf.229
  crRNA array
cgatttcttggctttatatatcttgtggaaaggacgaaacaccgtaatttctactaagtgtagatcgcaggcgcgcccggcggagtaatttctactaagtgtagatggctggtggctgatagtctgttttttaagcttggcgtggatccgatatcaactagatcttgaga

SEQ ID NO: 2333 - DNA, 170 bp, Artificial sequence
  Cic.162_Ctcf.809
  crRNA array
cgatttcttggctttatatatcttgtggaaaggacgaaacaccgtaatttctactaagtgtagatcgcaggcgcgcccggcggagtaatttctactaagtgtagataagcgctatcatgatcccaattttttaagcttggcgtggatccgatatcaactagatcttgaga

SEQ ID NO: 2334 - DNA, 170 bp, Artificial sequence
  Cic.162_Elf3.826
  crRNA array
cgatttcttggctttatatatcttgtggaaaggacgaaacaccgtaatttctactaagtgtagatcgcaggcgcgcccggcggagtaatttctactaagtgtagattccgagacatcctaatccacttttttaagcttggcgtggatccgatatcaactagatcttgaga

SEQ ID NO: 2335 - DNA, 170 bp, Artificial sequence
  Cic.162_Elf3.983
  crRNA array
cgatttcttggctttatatatcttgtggaaaggacgaaacaccgtaatttctactaagtgtagatcgcaggcgcgcccggcggagtaatttctactaagtgtagattaggccccctaactggaccattttttaagcttggcgtggatccgatatcaactagatcttgaga

SEQ ID NO: 2336 - DNA, 170 bp, Artificial sequence
  Cic.162_Ep300.310
  crRNA array
cgatttcttggctttatatatcttgtggaaaggacgaaacaccgtaatttctactaagtgtagatcgcaggcgcgcccggcggagtaatttctactaagtgtagatatggtacgacagtgaggaagttttttaagcttggcgtggatccgatatcaactagatcttgaga

SEQ ID NO: 2337 - DNA, 170 bp, Artificial sequence
  Cic.162_Ep300.587
  crRNA array
cgatttcttggctttatatatcttgtggaaaggacgaaacaccgtaatttctactaagtgtagatcgcaggcgcgcccggcggagtaatttctactaagtgtagatcgccccggggcccccaaccattttttaagcttggcgtggatccgatatcaactagatcttgaga

SEQ ID NO: 2338 - DNA, 170 bp, Artificial sequence
  Cic.162_Epha2.126
  crRNA array
cgatttcttggctttatatatcttgtggaaaggacgaaacaccgtaatttctactaagtgtagatcgcaggcgcgcccggcggagtaatttctactaagtgtagatcctgtgccgccgcggccgccttttttaagcttggcgtggatccgatatcaactagatcttgaga

SEQ ID NO: 2339 - DNA, 170 bp, Artificial sequence
  Cic.162_Epha2.5
  crRNA array
cgatttcttggctttatatatcttgtggaaaggacgaaacaccgtaatttctactaagtgtagatcgcaggcgcgcccggcggagtaatttctactaagtgtagatcatgagctggcgccacccggttttttaagcttggcgtggatccgatatcaactagatcttgaga

SEQ ID NO: 2340 - DNA, 170 bp, Artificial sequence
  Cic.162_Fat1.105
  crRNA array
cgatttcttggctttatatatcttgtggaaaggacgaaacaccgtaatttctactaagtgtagatcgcaggcgcgcccggcggagtaatttctactaagtgtagataactcgaggtgacaacaagtttttttaagcttggcgtggatccgatatcaactagatcttgaga

SEQ ID NO: 2341 - DNA, 170 bp, Artificial sequence
  Cic.162_Fat1.122
  crRNA array
cgatttcttggctttatatatcttgtggaaaggacgaaacaccgtaatttctactaagtgtagatcgcaggcgcgcccggcggagtaatttctactaagtgtagatccatcgacatggaaacgggattttttaagcttggcgtggatccgatatcaactagatcttgaga

SEQ ID NO: 2342 - DNA, 170 bp, Artificial sequence
  Cic.162_Fbxw7.21
  crRNA array
cgatttcttggctttatatatcttgtggaaaggacgaaacaccgtaatttctactaagtgtagatcgcaggcgcgcccggcggagtaatttctactaagtgtagattaatgtgccgtagaaacccattttttaagcttggcgtggatccgatatcaactagatcttgaga

SEQ ID NO: 2343 - DNA, 170 bp, Artificial sequence
  Cic.162_Fbxw7.23
  crRNA array
cgatttcttggctttatatatcttgtggaaaggacgaaacaccgtaatttctactaagtgtagatcgcaggcgcgcccggcggagtaatttctactaagtgtagatatgtgccgtagaaacccatattttttaagcttggcgtggatccgatatcaactagatcttgaga

SEQ ID NO: 2344 - DNA, 170 bp, Artificial sequence
  Cic.162_Gata3.34
  crRNA array
cgatttcttggctttatatatcttgtggaaaggacgaaacaccgtaatttctactaagtgtagatcgcaggcgcgcccggcggagtaatttctactaagtgtagatctaaactatcccgcaaagatttttttaagcttggcgtggatccgatatcaactagatcttgaga

SEQ ID NO: 2345 - DNA, 170 bp, Artificial sequence
  Cic.162_Gata3.47
  crRNA array
cgatttcttggctttatatatcttgtggaaaggacgaaacaccgtaatttctactaagtgtagatcgcaggcgcgcccggcggagtaatttctactaagtgtagatcgtagtaggacgggacgtggttttttaagcttggcgtggatccgatatcaactagatcttgaga

SEQ ID NO: 2346 - DNA, 170 bp, Artificial sequence
  Cic.162_H2-Q2.1
  crRNA array
cgatttcttggctttatatatcttgtggaaaggacgaaacaccgtaatttctactaagtgtagatcgcaggcgcgcccggcggagtaatttctactaagtgtagatagggcggccaccaacagcagttttttaagcttggcgtggatccgatatcaactagatcttgaga

SEQ ID NO: 2347 - DNA, 170 bp, Artificial sequence
  Cic.162_H2-Q2.2
  crRNA array
cgatttcttggctttatatatcttgtggaaaggacgaaacaccgtaatttctactaagtgtagatcgcaggcgcgcccggcggagtaatttctactaagtgtagattaacctgcgcccgctgctgattttttaagcttggcgtggatccgatatcaactagatcttgaga

SEQ ID NO: 2348 - DNA, 170 bp, Artificial sequence
  Cic.162_Kdm5c.1878
  crRNA array
cgatttcttggctttatatatcttgtggaaaggacgaaacaccgtaatttctactaagtgtagatcgcaggcgcgcccggcggagtaatttctactaagtgtagatagagcacggcacccgcccccttttttaagcttggcgtggatccgatatcaactagatcttgaga

SEQ ID NO: 2349 - DNA, 170 bp, Artificial sequence
  Cic.162_Kdm5c.1879
  crRNA array
cgatttcttggctttatatatcttgtggaaaggacgaaacaccgtaatttctactaagtgtagatcgcaggcgcgcccggcggagtaatttctactaagtgtagatgagcacggcacccgccccccttttttaagcttggcgtggatccgatatcaactagatcttgaga

SEQ ID NO: 2350 - DNA, 170 bp, Artificial sequence
  Cic.162_Kdm6a.56
  crRNA array
cgatttcttggctttatatatcttgtggaaaggacgaaacaccgtaatttctactaagtgtagatcgcaggcgcgcccggcggagtaatttctactaagtgtagattcgctgccgcctctcgcggcttttttaagcttggcgtggatccgatatcaactagatcttgaga

SEQ ID NO: 2351 - DNA, 170 bp, Artificial sequence
  Cic.162_Kdm6a.57
  crRNA array
cgatttcttggctttatatatcttgtggaaaggacgaaacaccgtaatttctactaagtgtagatcgcaggcgcgcccggcggagtaatttctactaagtgtagatcgctgccgcctctcgcggcattttttaagcttggcgtggatccgatatcaactagatcttgaga

SEQ ID NO: 2352 - DNA, 170 bp, Artificial sequence
  Cic.162_Kmt2b.265
  crRNA array
cgatttcttggctttatatatcttgtggaaaggacgaaacaccgtaatttctactaagtgtagatcgcaggcgcgcccggcggagtaatttctactaagtgtagatccccaagtgaagcccacctgttttttaagcttggcgtggatccgatatcaactagatcttgaga

SEQ ID NO: 2353 - DNA, 170 bp, Artificial sequence
  Cic.162_Kmt2b.298
  crRNA array
cgatttcttggctttatatatcttgtggaaaggacgaaacaccgtaatttctactaagtgtagatcgcaggcgcgcccggcggagtaatttctactaagtgtagattccggcagggaccggctggcttttttaagcttggcgtggatccgatatcaactagatcttgaga

SEQ ID NO: 2354 - DNA, 170 bp, Artificial sequence
  Cic.162_Kmt2c.1962
  crRNA array
cgatttcttggctttatatatcttgtggaaaggacgaaacaccgtaatttctactaagtgtagatcgcaggcgcgcccggcggagtaatttctactaagtgtagatgtgacgatctgtgccacaagttttttaagcttggcgtggatccgatatcaactagatcttgaga

SEQ ID NO: 2355 - DNA, 170 bp, Artificial sequence
  Cic.162_Kmt2c.2236
  crRNA array
cgatttcttggctttatatatcttgtggaaaggacgaaacaccgtaatttctactaagtgtagatcgcaggcgcgcccggcggagtaatttctactaagtgtagatactcgacctccacctccctattttttaagcttggcgtggatccgatatcaactagatcttgaga

SEQ ID NO: 2356 - DNA, 170 bp, Artificial sequence
  Cic.162_Kmt2d.316
  crRNA array
cgatttcttggctttatatatcttgtggaaaggacgaaacaccgtaatttctactaagtgtagatcgcaggcgcgcccggcggagtaatttctactaagtgtagatactccaggccacccaggtggttttttaagcttggcgtggatccgatatcaactagatcttgaga

SEQ ID NO: 2357 - DNA, 170 bp, Artificial sequence
  Cic.162_Kmt2d.416
  crRNA array
cgatttcttggctttatatatcttgtggaaaggacgaaacaccgtaatttctactaagtgtagatcgcaggcgcgcccggcggagtaatttctactaagtgtagattaaacccccgggggaagggtttttttaagcttggcgtggatccgatatcaactagatcttgaga

SEQ ID NO: 2358 - DNA, 170 bp, Artificial sequence
  Cic.162_Map2k4.119
  crRNA array
cgatttcttggctttatatatcttgtggaaaggacgaaacaccgtaatttctactaagtgtagatcgcaggcgcgcccggcggagtaatttctactaagtgtagattgctgtgtgggcggccacatttttttaagcttggcgtggatccgatatcaactagatcttgaga

SEQ ID NO: 2359 - DNA, 170 bp, Artificial sequence
  Cic.162_Map2k4.1261
  crRNA array
cgatttcttggctttatatatcttgtggaaaggacgaaacaccgtaatttctactaagtgtagatcgcaggcgcgcccggcggagtaatttctactaagtgtagatgatgtagtaatgcggagtagttttttaagcttggcgtggatccgatatcaactagatcttgaga

SEQ ID NO: 2360 - DNA, 170 bp, Artificial sequence
  Cic.162_Map3k1.235
  crRNA array
cgatttcttggctttatatatcttgtggaaaggacgaaacaccgtaatttctactaagtgtagatcgcaggcgcgcccggcggagtaatttctactaagtgtagataaaacgctactgatcgatcgttttttaagcttggcgtggatccgatatcaactagatcttgaga

SEQ ID NO: 2361 - DNA, 170 bp, Artificial sequence
  Cic.162_Map3k1.3838
  crRNA array
cgatttcttggctttatatatcttgtggaaaggacgaaacaccgtaatttctactaagtgtagatcgcaggcgcgcccggcggagtaatttctactaagtgtagatccaacaacagggccccactattttttaagcttggcgtggatccgatatcaactagatcttgaga

SEQ ID NO: 2362 - DNA, 170 bp, Artificial sequence
  Cic.162_Mga.1655
  crRNA array
cgatttcttggctttatatatcttgtggaaaggacgaaacaccgtaatttctactaagtgtagatcgcaggcgcgcccggcggagtaatttctactaagtgtagatcgagaagtggagagcatattttttttaagcttggcgtggatccgatatcaactagatcttgaga

SEQ ID NO: 2363 - DNA, 170 bp, Artificial sequence
  Cic.162_Mga.93
  crRNA array
cgatttcttggctttatatatcttgtggaaaggacgaaacaccgtaatttctactaagtgtagatcgcaggcgcgcccggcggagtaatttctactaagtgtagatgagaaggctccccataatgtttttttaagcttggcgtggatccgatatcaactagatcttgaga

SEQ ID NO: 2364 - DNA, 170 bp, Artificial sequence
  Cic.162_Nf1.746
  crRNA array
cgatttcttggctttatatatcttgtggaaaggacgaaacaccgtaatttctactaagtgtagatcgcaggcgcgcccggcggagtaatttctactaagtgtagattaagcataatgatgatgccattttttaagcttggcgtggatccgatatcaactagatcttgaga

SEQ ID NO: 2365 - DNA, 170 bp, Artificial sequence
  Cic.162_Nf1.97
  crRNA array
cgatttcttggctttatatatcttgtggaaaggacgaaacaccgtaatttctactaagtgtagatcgcaggcgcgcccggcggagtaatttctactaagtgtagatagcccgctacatgctgatgcttttttaagcttggcgtggatccgatatcaactagatcttgaga

SEQ ID NO: 2366 - DNA, 170 bp, Artificial sequence
  Cic.162_Nf2.356
  crRNA array
cgatttcttggctttatatatcttgtggaaaggacgaaacaccgtaatttctactaagtgtagatcgcaggcgcgcccggcggagtaatttctactaagtgtagatcggagtcatctgatagagatttttttaagcttggcgtggatccgatatcaactagatcttgaga

SEQ ID NO: 2367 - DNA, 170 bp, Artificial sequence
  Cic.162_Nf2.768
  crRNA array
cgatttcttggctttatatatcttgtggaaaggacgaaacaccgtaatttctactaagtgtagatcgcaggcgcgcccggcggagtaatttctactaagtgtagatccgaagccccagtgtccggcttttttaagcttggcgtggatccgatatcaactagatcttgaga

SEQ ID NO: 2368 - DNA, 170 bp, Artificial sequence
  Cic.162_Notch1.1849
  crRNA array
cgatttcttggctttatatatcttgtggaaaggacgaaacaccgtaatttctactaagtgtagatcgcaggcgcgcccggcggagtaatttctactaagtgtagatctggcgggtgggcggcgctgttttttaagcttggcgtggatccgatatcaactagatcttgaga

SEQ ID NO: 2369 - DNA, 170 bp, Artificial sequence
  Cic.162_Notch1.649
  crRNA array
cgatttcttggctttatatatcttgtggaaaggacgaaacaccgtaatttctactaagtgtagatcgcaggcgcgcccggcggagtaatttctactaagtgtagattgggccaacgatgccaggacttttttaagcttggcgtggatccgatatcaactagatcttgaga

SEQ ID NO: 2370 - DNA, 170 bp, Artificial sequence
  Cic.162_Nsd1.70
  crRNA array
cgatttcttggctttatatatcttgtggaaaggacgaaacaccgtaatttctactaagtgtagatcgcaggcgcgcccggcggagtaatttctactaagtgtagatactggtgtggacgatgcagattttttaagcttggcgtggatccgatatcaactagatcttgaga

SEQ ID NO: 2371 - DNA, 170 bp, Artificial sequence
  Cic.162_Nsd1.90
  crRNA array
cgatttcttggctttatatatcttgtggaaaggacgaaacaccgtaatttctactaagtgtagatcgcaggcgcgcccggcggagtaatttctactaagtgtagataggagctaacggcaagaatgttttttaagcttggcgtggatccgatatcaactagatcttgaga

SEQ ID NO: 2372 - DNA, 170 bp, Artificial sequence
  Cic.162_Pbrm1.1236
  crRNA array
cgatttcttggctttatatatcttgtggaaaggacgaaacaccgtaatttctactaagtgtagatcgcaggcgcgcccggcggagtaatttctactaagtgtagatgccgataaaaccaacagccgttttttaagcttggcgtggatccgatatcaactagatcttgaga

SEQ ID NO: 2373 - DNA, 170 bp, Artificial sequence
  Cic.162_Pbrm1.969
  crRNA array
cgatttcttggctttatatatcttgtggaaaggacgaaacaccgtaatttctactaagtgtagatcgcaggcgcgcccggcggagtaatttctactaagtgtagatgagccctaatgaacagctcattttttaagcttggcgtggatccgatatcaactagatcttgaga

SEQ ID NO: 2374 - DNA, 170 bp, Artificial sequence
  Cic.162_Pik3r1.76
  crRNA array
cgatttcttggctttatatatcttgtggaaaggacgaaacaccgtaatttctactaagtgtagatcgcaggcgcgcccggcggagtaatttctactaagtgtagataaaacctatacggcccgcacttttttaagcttggcgtggatccgatatcaactagatcttgaga

SEQ ID NO: 2375 - DNA, 170 bp, Artificial sequence
  Cic.162_Pik3r1.77
  crRNA array
cgatttcttggctttatatatcttgtggaaaggacgaaacaccgtaatttctactaagtgtagatcgcaggcgcgcccggcggagtaatttctactaagtgtagataaacctatacggcccgcactttttttaagcttggcgtggatccgatatcaactagatcttgaga

SEQ ID NO: 2376 - DNA, 170 bp, Artificial sequence
  Cic.162_Pten.240
  crRNA array
cgatttcttggctttatatatcttgtggaaaggacgaaacaccgtaatttctactaagtgtagatcgcaggcgcgcccggcggagtaatttctactaagtgtagattgcatacgctatagctgcttttttttaagcttggcgtggatccgatatcaactagatcttgaga

SEQ ID NO: 2377 - DNA, 170 bp, Artificial sequence
  Cic.162_Pten.265
  crRNA array
cgatttcttggctttatatatcttgtggaaaggacgaaacaccgtaatttctactaagtgtagatcgcaggcgcgcccggcggagtaatttctactaagtgtagataagcgtggtgcgtgacgcacttttttaagcttggcgtggatccgatatcaactagatcttgaga

SEQ ID NO: 2378 - DNA, 170 bp, Artificial sequence
  Cic.162_Rasa1.1478
  crRNA array
cgatttcttggctttatatatcttgtggaaaggacgaaacaccgtaatttctactaagtgtagatcgcaggcgcgcccggcggagtaatttctactaagtgtagatcgataatggtctatgatgtcttttttaagcttggcgtggatccgatatcaactagatcttgaga

SEQ ID NO: 2379 - DNA, 170 bp, Artificial sequence
  Cic.162_Rasa1.223
  crRNA array
cgatttcttggctttatatatcttgtggaaaggacgaaacaccgtaatttctactaagtgtagatcgcaggcgcgcccggcggagtaatttctactaagtgtagattccatggagtatcgtgctcgttttttaagcttggcgtggatccgatatcaactagatcttgaga

SEQ ID NO: 2380 - DNA, 170 bp, Artificial sequence
  Cic.162_Rb1.211
  crRNA array
cgatttcttggctttatatatcttgtggaaaggacgaaacaccgtaatttctactaagtgtagatcgcaggcgcgcccggcggagtaatttctactaagtgtagattctgacatgatcgggtacctttttttaagcttggcgtggatccgatatcaactagatcttgaga

SEQ ID NO: 2381 - DNA, 170 bp, Artificial sequence
  Cic.162_Rb1.394
  crRNA array
cgatttcttggctttatatatcttgtggaaaggacgaaacaccgtaatttctactaagtgtagatcgcaggcgcgcccggcggagtaatttctactaagtgtagatagaaatctcgaagcaggatcttttttaagcttggcgtggatccgatatcaactagatcttgaga

SEQ ID NO: 2382 - DNA, 170 bp, Artificial sequence
  Cic.162_Rbm10.5
  crRNA array
cgatttcttggctttatatatcttgtggaaaggacgaaacaccgtaatttctactaagtgtagatcgcaggcgcgcccggcggagtaatttctactaagtgtagatacgaaacctgaacccacacattttttaagcttggcgtggatccgatatcaactagatcttgaga

SEQ ID NO: 2383 - DNA, 170 bp, Artificial sequence
  Cic.162_Rbm10.6
  crRNA array
cgatttcttggctttatatatcttgtggaaaggacgaaacaccgtaatttctactaagtgtagatcgcaggcgcgcccggcggagtaatttctactaagtgtagatcgaaacctgaacccacacagttttttaagcttggcgtggatccgatatcaactagatcttgaga

SEQ ID NO: 2384 - DNA, 170 bp, Artificial sequence
  Cic.162_Rnf43.1920
  crRNA array
cgatttcttggctttatatatcttgtggaaaggacgaaacaccgtaatttctactaagtgtagatcgcaggcgcgcccggcggagtaatttctactaagtgtagatatccccgtgccgtggactccttttttaagcttggcgtggatccgatatcaactagatcttgaga

SEQ ID NO: 2385 - DNA, 170 bp, Artificial sequence
  Cic.162_Rnf43.39
  crRNA array
cgatttcttggctttatatatcttgtggaaaggacgaaacaccgtaatttctactaagtgtagatcgcaggcgcgcccggcggagtaatttctactaagtgtagatcaaggggatcactctgataattttttaagcttggcgtggatccgatatcaactagatcttgaga

SEQ ID NO: 2386 - DNA, 170 bp, Artificial sequence
  Cic.162_Runx1.204
  crRNA array
cgatttcttggctttatatatcttgtggaaaggacgaaacaccgtaatttctactaagtgtagatcgcaggcgcgcccggcggagtaatttctactaagtgtagattaaataagtccagccgttttttttttaagcttggcgtggatccgatatcaactagatcttgaga

SEQ ID NO: 2387 - DNA, 170 bp, Artificial sequence
  Cic.162_Runx1.81
  crRNA array
cgatttcttggctttatatatcttgtggaaaggacgaaacaccgtaatttctactaagtgtagatcgcaggcgcgcccggcggagtaatttctactaagtgtagataggacgcgtatgggaattttttttttaagcttggcgtggatccgatatcaactagatcttgaga

SEQ ID NO: 2388 - DNA, 170 bp, Artificial sequence
  Cic.162_Setd2.143
  crRNA array
cgatttcttggctttatatatcttgtggaaaggacgaaacaccgtaatttctactaagtgtagatcgcaggcgcgcccggcggagtaatttctactaagtgtagatgcacaaccacaacagactggttttttaagcttggcgtggatccgatatcaactagatcttgaga

SEQ ID NO: 2389 - DNA, 170 bp, Artificial sequence
  Cic.162_Setd2.508
  crRNA array
cgatttcttggctttatatatcttgtggaaaggacgaaacaccgtaatttctactaagtgtagatcgcaggcgcgcccggcggagtaatttctactaagtgtagattacgatcccgagcacccgacttttttaagcttggcgtggatccgatatcaactagatcttgaga

SEQ ID NO: 2390 - DNA, 170 bp, Artificial sequence
  Cic.162_Smad4.3038
  crRNA array
cgatttcttggctttatatatcttgtggaaaggacgaaacaccgtaatttctactaagtgtagatcgcaggcgcgcccggcggagtaatttctactaagtgtagatatctgcggcagtgtcaccggttttttaagcttggcgtggatccgatatcaactagatcttgaga

SEQ ID NO: 2391 - DNA, 170 bp, Artificial sequence
  Cic.162_Smad4.39
  crRNA array
cgatttcttggctttatatatcttgtggaaaggacgaaacaccgtaatttctactaagtgtagatcgcaggcgcgcccggcggagtaatttctactaagtgtagatagtcaaacgcatactgacaattttttaagcttggcgtggatccgatatcaactagatcttgaga

SEQ ID NO: 2392 - DNA, 170 bp, Artificial sequence
  Cic.162_Stag2.1409
  crRNA array
cgatttcttggctttatatatcttgtggaaaggacgaaacaccgtaatttctactaagtgtagatcgcaggcgcgcccggcggagtaatttctactaagtgtagatgctaataactgcggaagggcttttttaagcttggcgtggatccgatatcaactagatcttgaga

SEQ ID NO: 2393 - DNA, 170 bp, Artificial sequence
  Cic.162_Stag2.4401
  crRNA array
cgatttcttggctttatatatcttgtggaaaggacgaaacaccgtaatttctactaagtgtagatcgcaggcgcgcccggcggagtaatttctactaagtgtagattaatcgtccagtggtgtatattttttaagcttggcgtggatccgatatcaactagatcttgaga

SEQ ID NO: 2394 - DNA, 170 bp, Artificial sequence
  Cic.162_Tbl1xr1.1
  crRNA array
cgatttcttggctttatatatcttgtggaaaggacgaaacaccgtaatttctactaagtgtagatcgcaggcgcgcccggcggagtaatttctactaagtgtagatggatgcgcatactggtgaagttttttaagcttggcgtggatccgatatcaactagatcttgaga

SEQ ID NO: 2395 - DNA, 170 bp, Artificial sequence
  Cic.162_Tbl1xr1.83
  crRNA array
cgatttcttggctttatatatcttgtggaaaggacgaaacaccgtaatttctactaagtgtagatcgcaggcgcgcccggcggagtaatttctactaagtgtagatatggtcgacccatcgagtctttttttaagcttggcgtggatccgatatcaactagatcttgaga

SEQ ID NO: 2396 - DNA, 170 bp, Artificial sequence
  Cic.162_Tgfbr2.290
  crRNA array
cgatttcttggctttatatatcttgtggaaaggacgaaacaccgtaatttctactaagtgtagatcgcaggcgcgcccggcggagtaatttctactaagtgtagatcctctcggcgcccgggtaaattttttaagcttggcgtggatccgatatcaactagatcttgaga

SEQ ID NO: 2397 - DNA, 170 bp, Artificial sequence
  Cic.162_Tgfbr2.292
  crRNA array
cgatttcttggctttatatatcttgtggaaaggacgaaacaccgtaatttctactaagtgtagatcgcaggcgcgcccggcggagtaatttctactaagtgtagatcccgggcgccgagagggaaattttttaagcttggcgtggatccgatatcaactagatcttgaga

SEQ ID NO: 2398 - DNA, 170 bp, Artificial sequence
  Cic.162_Trp53.4
  crRNA array
cgatttcttggctttatatatcttgtggaaaggacgaaacaccgtaatttctactaagtgtagatcgcaggcgcgcccggcggagtaatttctactaagtgtagatccctgaactgcccccagggattttttaagcttggcgtggatccgatatcaactagatcttgaga

SEQ ID NO: 2399 - DNA, 170 bp, Artificial sequence
  Cic.162_Trp53.528
  crRNA array
cgatttcttggctttatatatcttgtggaaaggacgaaacaccgtaatttctactaagtgtagatcgcaggcgcgcccggcggagtaatttctactaagtgtagatgctgggccagcagagacctgttttttaagcttggcgtggatccgatatcaactagatcttgaga

SEQ ID NO: 2400 - DNA, 170 bp, Artificial sequence
  Cic.162_Vhl.1
  crRNA array
cgatttcttggctttatatatcttgtggaaaggacgaaacaccgtaatttctactaagtgtagatcgcaggcgcgcccggcggagtaatttctactaagtgtagatagggctcccggcggccatttttttttaagcttggcgtggatccgatatcaactagatcttgaga

SEQ ID NO: 2401 - DNA, 170 bp, Artificial sequence
  Cic.162_Vhl.151
  crRNA array
cgatttcttggctttatatatcttgtggaaaggacgaaacaccgtaatttctactaagtgtagatcgcaggcgcgcccggcggagtaatttctactaagtgtagattagagcactcacccgagggattttttaagcttggcgtggatccgatatcaactagatcttgaga

SEQ ID NO: 2402 - DNA, 170 bp, Artificial sequence
  Cic.162_Zc3h13.1387
  crRNA array
cgatttcttggctttatatatcttgtggaaaggacgaaacaccgtaatttctactaagtgtagatcgcaggcgcgcccggcggagtaatttctactaagtgtagatgtgacgccggtcatgtgactttttttaagcttggcgtggatccgatatcaactagatcttgaga

SEQ ID NO: 2403 - DNA, 170 bp, Artificial sequence
  Cic.162_Zc3h13.1777
  crRNA array
cgatttcttggctttatatatcttgtggaaaggacgaaacaccgtaatttctactaagtgtagatcgcaggcgcgcccggcggagtaatttctactaagtgtagatgatgctgccagtgtagcggcttttttaagcttggcgtggatccgatatcaactagatcttgaga

SEQ ID NO: 2404 - DNA, 170 bp, Artificial sequence
  Cic.164_Acvr2a.155
  crRNA array
cgatttcttggctttatatatcttgtggaaaggacgaaacaccgtaatttctactaagtgtagatcgggccctgggccggcggcttaatttctactaagtgtagatggacctggctaatcaagtatttttttaagcttggcgtggatccgatatcaactagatcttgaga

SEQ ID NO: 2405 - DNA, 170 bp, Artificial sequence
  Cic.164_Acvr2a.70
  crRNA array
cgatttcttggctttatatatcttgtggaaaggacgaaacaccgtaatttctactaagtgtagatcgggccctgggccggcggcttaatttctactaagtgtagatcccgaggcgccggagaagccttttttaagcttggcgtggatccgatatcaactagatcttgaga

SEQ ID NO: 2406 - DNA, 170 bp, Artificial sequence
  Cic.164_Apc.21
  crRNA array
cgatttcttggctttatatatcttgtggaaaggacgaaacaccgtaatttctactaagtgtagatcgggccctgggccggcggcttaatttctactaagtgtagatgtgatccacacgtgtagctgttttttaagcttggcgtggatccgatatcaactagatcttgaga

SEQ ID NO: 2407 - DNA, 170 bp, Artificial sequence
  Cic.164_Apc.867
  crRNA array
cgatttcttggctttatatatcttgtggaaaggacgaaacaccgtaatttctactaagtgtagatcgggccctgggccggcggcttaatttctactaagtgtagatcagtcccaggcggcggaagcttttttaagcttggcgtggatccgatatcaactagatcttgaga

SEQ ID NO: 2408 - DNA, 170 bp, Artificial sequence
  Cic.164_Arid1a.2
  crRNA array
cgatttcttggctttatatatcttgtggaaaggacgaaacaccgtaatttctactaagtgtagatcgggccctgggccggcggcttaatttctactaagtgtagatcccgcgcccccgtcctggggttttttaagcttggcgtggatccgatatcaactagatcttgaga

SEQ ID NO: 2409 - DNA, 170 bp, Artificial sequence
  Cic.164_Arid1a.5
  crRNA array
cgatttcttggctttatatatcttgtggaaaggacgaaacaccgtaatttctactaagtgtagatcgggccctgggccggcggcttaatttctactaagtgtagatcccgcgctcggccgctgccgttttttaagcttggcgtggatccgatatcaactagatcttgaga

SEQ ID NO: 2410 - DNA, 170 bp, Artificial sequence
  Cic.164_Arid2.166
  crRNA array
cgatttcttggctttatatatcttgtggaaaggacgaaacaccgtaatttctactaagtgtagatcgggccctgggccggcggcttaatttctactaagtgtagataaccgcgatctgggttttttttttttaagcttggcgtggatccgatatcaactagatcttgaga

SEQ ID NO: 2411 - DNA, 170 bp, Artificial sequence
  Cic.164_Arid2.172
  crRNA array
cgatttcttggctttatatatcttgtggaaaggacgaaacaccgtaatttctactaagtgtagatcgggccctgggccggcggcttaatttctactaagtgtagatctggacgagctgcggcagttttttttaagcttggcgtggatccgatatcaactagatcttgaga

SEQ ID NO: 2412 - DNA, 170 bp, Artificial sequence
  Cic.164_Atm.120
  crRNA array
cgatttcttggctttatatatcttgtggaaaggacgaaacaccgtaatttctactaagtgtagatcgggccctgggccggcggcttaatttctactaagtgtagatgacaggtagtcggcagctaattttttaagcttggcgtggatccgatatcaactagatcttgaga

SEQ ID NO: 2413 - DNA, 170 bp, Artificial sequence
  Cic.164_Atm.997
  crRNA array
cgatttcttggctttatatatcttgtggaaaggacgaaacaccgtaatttctactaagtgtagatcgggccctgggccggcggcttaatttctactaagtgtagatgagaaagtctccgaatcgttttttttaagcttggcgtggatccgatatcaactagatcttgaga

SEQ ID NO: 2414 - DNA, 170 bp, Artificial sequence
  Cic.164_Atrx.249
  crRNA array
cgatttcttggctttatatatcttgtggaaaggacgaaacaccgtaatttctactaagtgtagatcgggccctgggccggcggcttaatttctactaagtgtagattagccagtcgctcatatctcttttttaagcttggcgtggatccgatatcaactagatcttgaga

SEQ ID NO: 2415 - DNA, 170 bp, Artificial sequence
  Cic.164_Atrx.251
  crRNA array
cgatttcttggctttatatatcttgtggaaaggacgaaacaccgtaatttctactaagtgtagatcgggccctgggccggcggcttaatttctactaagtgtagatgccagtcgctcatatctctgttttttaagcttggcgtggatccgatatcaactagatcttgaga

SEQ ID NO: 2416 - DNA, 170 bp, Artificial sequence
  Cic.164_Bcor.203
  crRNA array
cgatttcttggctttatatatcttgtggaaaggacgaaacaccgtaatttctactaagtgtagatcgggccctgggccggcggcttaatttctactaagtgtagatccccggagcggagtccaggcttttttaagcttggcgtggatccgatatcaactagatcttgaga

SEQ ID NO: 2417 - DNA, 170 bp, Artificial sequence
  Cic.164_Bcor.475
  crRNA array
cgatttcttggctttatatatcttgtggaaaggacgaaacaccgtaatttctactaagtgtagatcgggccctgggccggcggcttaatttctactaagtgtagattgcaacccctctgtatgggattttttaagcttggcgtggatccgatatcaactagatcttgaga

SEQ ID NO: 2418 - DNA, 170 bp, Artificial sequence
  Cic.164_Brca1.112
  crRNA array
cgatttcttggctttatatatcttgtggaaaggacgaaacaccgtaatttctactaagtgtagatcgggccctgggccggcggcttaatttctactaagtgtagatctagacgctctgtggagactttttttaagcttggcgtggatccgatatcaactagatcttgaga

SEQ ID NO: 2419 - DNA, 170 bp, Artificial sequence
  Cic.164_Brca1.53
  crRNA array
cgatttcttggctttatatatcttgtggaaaggacgaaacaccgtaatttctactaagtgtagatcgggccctgggccggcggcttaatttctactaagtgtagataatgaggaggcgtcgatcatttttttaagcttggcgtggatccgatatcaactagatcttgaga

SEQ ID NO: 2420 - DNA, 170 bp, Artificial sequence
  Cic.164_Casp8.45
  crRNA array
cgatttcttggctttatatatcttgtggaaaggacgaaacaccgtaatttctactaagtgtagatcgggccctgggccggcggcttaatttctactaagtgtagatctaccgagatcctgtgaatgttttttaagcttggcgtggatccgatatcaactagatcttgaga

SEQ ID NO: 2421 - DNA, 170 bp, Artificial sequence
  Cic.164_Casp8.54
  crRNA array
cgatttcttggctttatatatcttgtggaaaggacgaaacaccgtaatttctactaagtgtagatcgggccctgggccggcggcttaatttctactaagtgtagatcagtgcagtcgtcgtaagatttttttaagcttggcgtggatccgatatcaactagatcttgaga

SEQ ID NO: 2422 - DNA, 170 bp, Artificial sequence
  Cic.164_Cbwd1.84
  crRNA array
cgatttcttggctttatatatcttgtggaaaggacgaaacaccgtaatttctactaagtgtagatcgggccctgggccggcggcttaatttctactaagtgtagatcacagcaggtaacatgccgcttttttaagcttggcgtggatccgatatcaactagatcttgaga

SEQ ID NO: 2423 - DNA, 170 bp, Artificial sequence
  Cic.164_Cbwd1.85
  crRNA array
cgatttcttggctttatatatcttgtggaaaggacgaaacaccgtaatttctactaagtgtagatcgggccctgggccggcggcttaatttctactaagtgtagatacagcaggtaacatgccgccttttttaagcttggcgtggatccgatatcaactagatcttgaga

SEQ ID NO: 2424 - DNA, 170 bp, Artificial sequence
  Cic.164_Cdh1.387
  crRNA array
cgatttcttggctttatatatcttgtggaaaggacgaaacaccgtaatttctactaagtgtagatcgggccctgggccggcggcttaatttctactaagtgtagatctcggcgtctgccgggtccgttttttaagcttggcgtggatccgatatcaactagatcttgaga

SEQ ID NO: 2425 - DNA, 170 bp, Artificial sequence
  Cic.164_Cdh1.58
  crRNA array
cgatttcttggctttatatatcttgtggaaaggacgaaacaccgtaatttctactaagtgtagatcgggccctgggccggcggcttaatttctactaagtgtagatctcgtccgcgcccgggactcttttttaagcttggcgtggatccgatatcaactagatcttgaga

SEQ ID NO: 2426 - DNA, 170 bp, Artificial sequence
  Cic.164_Cdkn2a.647
  crRNA array
cgatttcttggctttatatatcttgtggaaaggacgaaacaccgtaatttctactaagtgtagatcgggccctgggccggcggcttaatttctactaagtgtagatgcaatcacgggagggagcagttttttaagcttggcgtggatccgatatcaactagatcttgaga

SEQ ID NO: 2427 - DNA, 170 bp, Artificial sequence
  Cic.164_Cdkn2a.648
  crRNA array
cgatttcttggctttatatatcttgtggaaaggacgaaacaccgtaatttctactaagtgtagatcgggccctgggccggcggcttaatttctactaagtgtagatcaatcacgggagggagcagattttttaagcttggcgtggatccgatatcaactagatcttgaga

SEQ ID NO: 2428 - DNA, 170 bp, Artificial sequence
  Cic.164_Ctcf.229
  crRNA array
cgatttcttggctttatatatcttgtggaaaggacgaaacaccgtaatttctactaagtgtagatcgggccctgggccggcggcttaatttctactaagtgtagatggctggtggctgatagtctgttttttaagcttggcgtggatccgatatcaactagatcttgaga

SEQ ID NO: 2429 - DNA, 170 bp, Artificial sequence
  Cic.164_Ctcf.809
  crRNA array
cgatttcttggctttatatatcttgtggaaaggacgaaacaccgtaatttctactaagtgtagatcgggccctgggccggcggcttaatttctactaagtgtagataagcgctatcatgatcccaattttttaagcttggcgtggatccgatatcaactagatcttgaga

SEQ ID NO: 2430 - DNA, 170 bp, Artificial sequence
  Cic.164_Elf3.826
  crRNA array
cgatttcttggctttatatatcttgtggaaaggacgaaacaccgtaatttctactaagtgtagatcgggccctgggccggcggcttaatttctactaagtgtagattccgagacatcctaatccacttttttaagcttggcgtggatccgatatcaactagatcttgaga

SEQ ID NO: 2431 - DNA, 170 bp, Artificial sequence
  Cic.164_Elf3.983
  crRNA array
cgatttcttggctttatatatcttgtggaaaggacgaaacaccgtaatttctactaagtgtagatcgggccctgggccggcggcttaatttctactaagtgtagattaggccccctaactggaccattttttaagcttggcgtggatccgatatcaactagatcttgaga

SEQ ID NO: 2432 - DNA, 170 bp, Artificial sequence
  Cic.164_Ep300.310
  crRNA array
cgatttcttggctttatatatcttgtggaaaggacgaaacaccgtaatttctactaagtgtagatcgggccctgggccggcggcttaatttctactaagtgtagatatggtacgacagtgaggaagttttttaagcttggcgtggatccgatatcaactagatcttgaga

SEQ ID NO: 2433 - DNA, 170 bp, Artificial sequence
  Cic.164_Ep300.587
  crRNA array
cgatttcttggctttatatatcttgtggaaaggacgaaacaccgtaatttctactaagtgtagatcgggccctgggccggcggcttaatttctactaagtgtagatcgccccggggcccccaaccattttttaagcttggcgtggatccgatatcaactagatcttgaga

SEQ ID NO: 2434 - DNA, 170 bp, Artificial sequence
  Cic.164_Epha2.126
  crRNA array
cgatttcttggctttatatatcttgtggaaaggacgaaacaccgtaatttctactaagtgtagatcgggccctgggccggcggcttaatttctactaagtgtagatcctgtgccgccgcggccgccttttttaagcttggcgtggatccgatatcaactagatcttgaga

SEQ ID NO: 2435 - DNA, 170 bp, Artificial sequence
  Cic.164_Epha2.5
  crRNA array
cgatttcttggctttatatatcttgtggaaaggacgaaacaccgtaatttctactaagtgtagatcgggccctgggccggcggcttaatttctactaagtgtagatcatgagctggcgccacccggttttttaagcttggcgtggatccgatatcaactagatcttgaga

SEQ ID NO: 2436 - DNA, 170 bp, Artificial sequence
  Cic.164_Fat1.105
  crRNA array
cgatttcttggctttatatatcttgtggaaaggacgaaacaccgtaatttctactaagtgtagatcgggccctgggccggcggcttaatttctactaagtgtagataactcgaggtgacaacaagtttttttaagcttggcgtggatccgatatcaactagatcttgaga

SEQ ID NO: 2437 - DNA, 170 bp, Artificial sequence
  Cic.164_Fat1.122
  crRNA array
cgatttcttggctttatatatcttgtggaaaggacgaaacaccgtaatttctactaagtgtagatcgggccctgggccggcggcttaatttctactaagtgtagatccatcgacatggaaacgggattttttaagcttggcgtggatccgatatcaactagatcttgaga

SEQ ID NO: 2438 - DNA, 170 bp, Artificial sequence
  Cic.164_Fbxw7.21
  crRNA array
cgatttcttggctttatatatcttgtggaaaggacgaaacaccgtaatttctactaagtgtagatcgggccctgggccggcggcttaatttctactaagtgtagattaatgtgccgtagaaacccattttttaagcttggcgtggatccgatatcaactagatcttgaga

SEQ ID NO: 2439 - DNA, 170 bp, Artificial sequence
  Cic.164_Fbxw7.23
  crRNA array
cgatttcttggctttatatatcttgtggaaaggacgaaacaccgtaatttctactaagtgtagatcgggccctgggccggcggcttaatttctactaagtgtagatatgtgccgtagaaacccatattttttaagcttggcgtggatccgatatcaactagatcttgaga

SEQ ID NO: 2440 - DNA, 170 bp, Artificial sequence
  Cic.164_Gata3.34
  crRNA array
cgatttcttggctttatatatcttgtggaaaggacgaaacaccgtaatttctactaagtgtagatcgggccctgggccggcggcttaatttctactaagtgtagatctaaactatcccgcaaagatttttttaagcttggcgtggatccgatatcaactagatcttgaga

SEQ ID NO: 2441 - DNA, 170 bp, Artificial sequence
  Cic.164_Gata3.47
  crRNA array
cgatttcttggctttatatatcttgtggaaaggacgaaacaccgtaatttctactaagtgtagatcgggccctgggccggcggcttaatttctactaagtgtagatcgtagtaggacgggacgtggttttttaagcttggcgtggatccgatatcaactagatcttgaga

SEQ ID NO: 2442 - DNA, 170 bp, Artificial sequence
  Cic.164_H2-Q2.1
  crRNA array
cgatttcttggctttatatatcttgtggaaaggacgaaacaccgtaatttctactaagtgtagatcgggccctgggccggcggcttaatttctactaagtgtagatagggcggccaccaacagcagttttttaagcttggcgtggatccgatatcaactagatcttgaga

SEQ ID NO: 2443 - DNA, 170 bp, Artificial sequence
  Cic.164_H2-Q2.2
  crRNA array
cgatttcttggctttatatatcttgtggaaaggacgaaacaccgtaatttctactaagtgtagatcgggccctgggccggcggcttaatttctactaagtgtagattaacctgcgcccgctgctgattttttaagcttggcgtggatccgatatcaactagatcttgaga

SEQ ID NO: 2444 - DNA, 170 bp, Artificial sequence
  Cic.164_Kdm5c.1878
  crRNA array
cgatttcttggctttatatatcttgtggaaaggacgaaacaccgtaatttctactaagtgtagatcgggccctgggccggcggcttaatttctactaagtgtagatagagcacggcacccgcccccttttttaagcttggcgtggatccgatatcaactagatcttgaga

SEQ ID NO: 2445 - DNA, 170 bp, Artificial sequence
  Cic.164_Kdm5c.1879
  crRNA array
cgatttcttggctttatatatcttgtggaaaggacgaaacaccgtaatttctactaagtgtagatcgggccctgggccggcggcttaatttctactaagtgtagatgagcacggcacccgccccccttttttaagcttggcgtggatccgatatcaactagatcttgaga

SEQ ID NO: 2446 - DNA, 170 bp, Artificial sequence
  Cic.164_Kdm6a.56
  crRNA array
cgatttcttggctttatatatcttgtggaaaggacgaaacaccgtaatttctactaagtgtagatcgggccctgggccggcggcttaatttctactaagtgtagattcgctgccgcctctcgcggcttttttaagcttggcgtggatccgatatcaactagatcttgaga

SEQ ID NO: 2447 - DNA, 170 bp, Artificial sequence
  Cic.164_Kdm6a.57
  crRNA array
cgatttcttggctttatatatcttgtggaaaggacgaaacaccgtaatttctactaagtgtagatcgggccctgggccggcggcttaatttctactaagtgtagatcgctgccgcctctcgcggcattttttaagcttggcgtggatccgatatcaactagatcttgaga

SEQ ID NO: 2448 - DNA, 170 bp, Artificial sequence
  Cic.164_Kmt2b.265
  crRNA array
cgatttcttggctttatatatcttgtggaaaggacgaaacaccgtaatttctactaagtgtagatcgggccctgggccggcggcttaatttctactaagtgtagatccccaagtgaagcccacctgttttttaagcttggcgtggatccgatatcaactagatcttgaga

SEQ ID NO: 2449 - DNA, 170 bp, Artificial sequence
  Cic.164_Kmt2b.298
  crRNA array
cgatttcttggctttatatatcttgtggaaaggacgaaacaccgtaatttctactaagtgtagatcgggccctgggccggcggcttaatttctactaagtgtagattccggcagggaccggctggcttttttaagcttggcgtggatccgatatcaactagatcttgaga

SEQ ID NO: 2450 - DNA, 170 bp, Artificial sequence
  Cic.164_Kmt2c.1962
  crRNA array
cgatttcttggctttatatatcttgtggaaaggacgaaacaccgtaatttctactaagtgtagatcgggccctgggccggcggcttaatttctactaagtgtagatgtgacgatctgtgccacaagttttttaagcttggcgtggatccgatatcaactagatcttgaga

SEQ ID NO: 2451 - DNA, 170 bp, Artificial sequence
  Cic.164_Kmt2c.2236
  crRNA array
cgatttcttggctttatatatcttgtggaaaggacgaaacaccgtaatttctactaagtgtagatcgggccctgggccggcggcttaatttctactaagtgtagatactcgacctccacctccctattttttaagcttggcgtggatccgatatcaactagatcttgaga

SEQ ID NO: 2452 - DNA, 170 bp, Artificial sequence
  Cic.164_Kmt2d.316
  crRNA array
cgatttcttggctttatatatcttgtggaaaggacgaaacaccgtaatttctactaagtgtagatcgggccctgggccggcggcttaatttctactaagtgtagatactccaggccacccaggtggttttttaagcttggcgtggatccgatatcaactagatcttgaga

SEQ ID NO: 2453 - DNA, 170 bp, Artificial sequence
  Cic.164_Kmt2d.416
  crRNA array
cgatttcttggctttatatatcttgtggaaaggacgaaacaccgtaatttctactaagtgtagatcgggccctgggccggcggcttaatttctactaagtgtagattaaacccccgggggaagggtttttttaagcttggcgtggatccgatatcaactagatcttgaga

SEQ ID NO: 2454 - DNA, 170 bp, Artificial sequence
  Cic.164_Map2k4.119
  crRNA array
cgatttcttggctttatatatcttgtggaaaggacgaaacaccgtaatttctactaagtgtagatcgggccctgggccggcggcttaatttctactaagtgtagattgctgtgtgggcggccacatttttttaagcttggcgtggatccgatatcaactagatcttgaga

SEQ ID NO: 2455 - DNA, 170 bp, Artificial sequence
  Cic.164_Map2k4.1261
  crRNA array
cgatttcttggctttatatatcttgtggaaaggacgaaacaccgtaatttctactaagtgtagatcgggccctgggccggcggcttaatttctactaagtgtagatgatgtagtaatgcggagtagttttttaagcttggcgtggatccgatatcaactagatcttgaga

SEQ ID NO: 2456 - DNA, 170 bp, Artificial sequence
  Cic.164_Map3k1.235
  crRNA array
cgatttcttggctttatatatcttgtggaaaggacgaaacaccgtaatttctactaagtgtagatcgggccctgggccggcggcttaatttctactaagtgtagataaaacgctactgatcgatcgttttttaagcttggcgtggatccgatatcaactagatcttgaga

SEQ ID NO: 2457 - DNA, 170 bp, Artificial sequence
  Cic.164_Map3k1.3838
  crRNA array
cgatttcttggctttatatatcttgtggaaaggacgaaacaccgtaatttctactaagtgtagatcgggccctgggccggcggcttaatttctactaagtgtagatccaacaacagggccccactattttttaagcttggcgtggatccgatatcaactagatcttgaga

SEQ ID NO: 2458 - DNA, 170 bp, Artificial sequence
  Cic.164_Mga.1655
  crRNA array
cgatttcttggctttatatatcttgtggaaaggacgaaacaccgtaatttctactaagtgtagatcgggccctgggccggcggcttaatttctactaagtgtagatcgagaagtggagagcatattttttttaagcttggcgtggatccgatatcaactagatcttgaga

SEQ ID NO: 2459 - DNA, 170 bp, Artificial sequence
  Cic.164_Mga.93
  crRNA array
cgatttcttggctttatatatcttgtggaaaggacgaaacaccgtaatttctactaagtgtagatcgggccctgggccggcggcttaatttctactaagtgtagatgagaaggctccccataatgtttttttaagcttggcgtggatccgatatcaactagatcttgaga

SEQ ID NO: 2460 - DNA, 170 bp, Artificial sequence
  Cic.164_Nf1.746
  crRNA array
cgatttcttggctttatatatcttgtggaaaggacgaaacaccgtaatttctactaagtgtagatcgggccctgggccggcggcttaatttctactaagtgtagattaagcataatgatgatgccattttttaagcttggcgtggatccgatatcaactagatcttgaga

SEQ ID NO: 2461 - DNA, 170 bp, Artificial sequence
  Cic.164_Nf1.97
  crRNA array
cgatttcttggctttatatatcttgtggaaaggacgaaacaccgtaatttctactaagtgtagatcgggccctgggccggcggcttaatttctactaagtgtagatagcccgctacatgctgatgcttttttaagcttggcgtggatccgatatcaactagatcttgaga

SEQ ID NO: 2462 - DNA, 170 bp, Artificial sequence
  Cic.164_Nf2.356
  crRNA array
cgatttcttggctttatatatcttgtggaaaggacgaaacaccgtaatttctactaagtgtagatcgggccctgggccggcggcttaatttctactaagtgtagatcggagtcatctgatagagatttttttaagcttggcgtggatccgatatcaactagatcttgaga

SEQ ID NO: 2463 - DNA, 170 bp, Artificial sequence
  Cic.164_Nf2.768
  crRNA array
cgatttcttggctttatatatcttgtggaaaggacgaaacaccgtaatttctactaagtgtagatcgggccctgggccggcggcttaatttctactaagtgtagatccgaagccccagtgtccggcttttttaagcttggcgtggatccgatatcaactagatcttgaga

SEQ ID NO: 2464 - DNA, 170 bp, Artificial sequence
  Cic.164_Notch1.1849
  crRNA array
cgatttcttggctttatatatcttgtggaaaggacgaaacaccgtaatttctactaagtgtagatcgggccctgggccggcggcttaatttctactaagtgtagatctggcgggtgggcggcgctgttttttaagcttggcgtggatccgatatcaactagatcttgaga

SEQ ID NO: 2465 - DNA, 170 bp, Artificial sequence
  Cic.164_Notch1.649
  crRNA array
cgatttcttggctttatatatcttgtggaaaggacgaaacaccgtaatttctactaagtgtagatcgggccctgggccggcggcttaatttctactaagtgtagattgggccaacgatgccaggacttttttaagcttggcgtggatccgatatcaactagatcttgaga

SEQ ID NO: 2466 - DNA, 170 bp, Artificial sequence
  Cic.164_Nsd1.70
  crRNA array
cgatttcttggctttatatatcttgtggaaaggacgaaacaccgtaatttctactaagtgtagatcgggccctgggccggcggcttaatttctactaagtgtagatactggtgtggacgatgcagattttttaagcttggcgtggatccgatatcaactagatcttgaga

SEQ ID NO: 2467 - DNA, 170 bp, Artificial sequence
  Cic.164_Nsd1.90
  crRNA array
cgatttcttggctttatatatcttgtggaaaggacgaaacaccgtaatttctactaagtgtagatcgggccctgggccggcggcttaatttctactaagtgtagataggagctaacggcaagaatgttttttaagcttggcgtggatccgatatcaactagatcttgaga

SEQ ID NO: 2468 - DNA, 170 bp, Artificial sequence
  Cic.164_Pbrm1.1236
  crRNA array
cgatttcttggctttatatatcttgtggaaaggacgaaacaccgtaatttctactaagtgtagatcgggccctgggccggcggcttaatttctactaagtgtagatgccgataaaaccaacagccgttttttaagcttggcgtggatccgatatcaactagatcttgaga

SEQ ID NO: 2469 - DNA, 170 bp, Artificial sequence
  Cic.164_Pbrm1.969
  crRNA array
cgatttcttggctttatatatcttgtggaaaggacgaaacaccgtaatttctactaagtgtagatcgggccctgggccggcggcttaatttctactaagtgtagatgagccctaatgaacagctcattttttaagcttggcgtggatccgatatcaactagatcttgaga

SEQ ID NO: 2470 - DNA, 170 bp, Artificial sequence
  Cic.164_Pik3r1.76
  crRNA array
cgatttcttggctttatatatcttgtggaaaggacgaaacaccgtaatttctactaagtgtagatcgggccctgggccggcggcttaatttctactaagtgtagataaaacctatacggcccgcacttttttaagcttggcgtggatccgatatcaactagatcttgaga

SEQ ID NO: 2471 - DNA, 170 bp, Artificial sequence
  Cic.164_Pik3r1.77
  crRNA array
cgatttcttggctttatatatcttgtggaaaggacgaaacaccgtaatttctactaagtgtagatcgggccctgggccggcggcttaatttctactaagtgtagataaacctatacggcccgcactttttttaagcttggcgtggatccgatatcaactagatcttgaga

SEQ ID NO: 2472 - DNA, 170 bp, Artificial sequence
  Cic.164_Pten.240
  crRNA array
cgatttcttggctttatatatcttgtggaaaggacgaaacaccgtaatttctactaagtgtagatcgggccctgggccggcggcttaatttctactaagtgtagattgcatacgctatagctgcttttttttaagcttggcgtggatccgatatcaactagatcttgaga

SEQ ID NO: 2473 - DNA, 170 bp, Artificial sequence
  Cic.164_Pten.265
  crRNA array
cgatttcttggctttatatatcttgtggaaaggacgaaacaccgtaatttctactaagtgtagatcgggccctgggccggcggcttaatttctactaagtgtagataagcgtggtgcgtgacgcacttttttaagcttggcgtggatccgatatcaactagatcttgaga

SEQ ID NO: 2474 - DNA, 170 bp, Artificial sequence
  Cic.164_Rasa1.1478
  crRNA array
cgatttcttggctttatatatcttgtggaaaggacgaaacaccgtaatttctactaagtgtagatcgggccctgggccggcggcttaatttctactaagtgtagatcgataatggtctatgatgtcttttttaagcttggcgtggatccgatatcaactagatcttgaga

SEQ ID NO: 2475 - DNA, 170 bp, Artificial sequence
  Cic.164_Rasa1.223
  crRNA array
cgatttcttggctttatatatcttgtggaaaggacgaaacaccgtaatttctactaagtgtagatcgggccctgggccggcggcttaatttctactaagtgtagattccatggagtatcgtgctcgttttttaagcttggcgtggatccgatatcaactagatcttgaga

SEQ ID NO: 2476 - DNA, 170 bp, Artificial sequence
  Cic.164_Rb1.211
  crRNA array
cgatttcttggctttatatatcttgtggaaaggacgaaacaccgtaatttctactaagtgtagatcgggccctgggccggcggcttaatttctactaagtgtagattctgacatgatcgggtacctttttttaagcttggcgtggatccgatatcaactagatcttgaga

SEQ ID NO: 2477 - DNA, 170 bp, Artificial sequence
  Cic.164_Rb1.394
  crRNA array
cgatttcttggctttatatatcttgtggaaaggacgaaacaccgtaatttctactaagtgtagatcgggccctgggccggcggcttaatttctactaagtgtagatagaaatctcgaagcaggatcttttttaagcttggcgtggatccgatatcaactagatcttgaga

SEQ ID NO: 2478 - DNA, 170 bp, Artificial sequence
  Cic.164_Rbm10.5
  crRNA array
cgatttcttggctttatatatcttgtggaaaggacgaaacaccgtaatttctactaagtgtagatcgggccctgggccggcggcttaatttctactaagtgtagatacgaaacctgaacccacacattttttaagcttggcgtggatccgatatcaactagatcttgaga

SEQ ID NO: 2479 - DNA, 170 bp, Artificial sequence
  Cic.164_Rbm10.6
  crRNA array
cgatttcttggctttatatatcttgtggaaaggacgaaacaccgtaatttctactaagtgtagatcgggccctgggccggcggcttaatttctactaagtgtagatcgaaacctgaacccacacagttttttaagcttggcgtggatccgatatcaactagatcttgaga

SEQ ID NO: 2480 - DNA, 170 bp, Artificial sequence
  Cic.164_Rnf43.1920
  crRNA array
cgatttcttggctttatatatcttgtggaaaggacgaaacaccgtaatttctactaagtgtagatcgggccctgggccggcggcttaatttctactaagtgtagatatccccgtgccgtggactccttttttaagcttggcgtggatccgatatcaactagatcttgaga

SEQ ID NO: 2481 - DNA, 170 bp, Artificial sequence
  Cic.164_Rnf43.39
  crRNA array
cgatttcttggctttatatatcttgtggaaaggacgaaacaccgtaatttctactaagtgtagatcgggccctgggccggcggcttaatttctactaagtgtagatcaaggggatcactctgataattttttaagcttggcgtggatccgatatcaactagatcttgaga

SEQ ID NO: 2482 - DNA, 170 bp, Artificial sequence
  Cic.164_Runx1.204
  crRNA array
cgatttcttggctttatatatcttgtggaaaggacgaaacaccgtaatttctactaagtgtagatcgggccctgggccggcggcttaatttctactaagtgtagattaaataagtccagccgttttttttttaagcttggcgtggatccgatatcaactagatcttgaga

SEQ ID NO: 2483 - DNA, 170 bp, Artificial sequence
  Cic.164_Runx1.81
  crRNA array
cgatttcttggctttatatatcttgtggaaaggacgaaacaccgtaatttctactaagtgtagatcgggccctgggccggcggcttaatttctactaagtgtagataggacgcgtatgggaattttttttttaagcttggcgtggatccgatatcaactagatcttgaga

SEQ ID NO: 2484 - DNA, 170 bp, Artificial sequence
  Cic.164_Setd2.143
  crRNA array
cgatttcttggctttatatatcttgtggaaaggacgaaacaccgtaatttctactaagtgtagatcgggccctgggccggcggcttaatttctactaagtgtagatgcacaaccacaacagactggttttttaagcttggcgtggatccgatatcaactagatcttgaga

SEQ ID NO: 2485 - DNA, 170 bp, Artificial sequence
  Cic.164_Setd2.508
  crRNA array
cgatttcttggctttatatatcttgtggaaaggacgaaacaccgtaatttctactaagtgtagatcgggccctgggccggcggcttaatttctactaagtgtagattacgatcccgagcacccgacttttttaagcttggcgtggatccgatatcaactagatcttgaga

SEQ ID NO: 2486 - DNA, 170 bp, Artificial sequence
  Cic.164_Smad4.3038
  crRNA array
cgatttcttggctttatatatcttgtggaaaggacgaaacaccgtaatttctactaagtgtagatcgggccctgggccggcggcttaatttctactaagtgtagatatctgcggcagtgtcaccggttttttaagcttggcgtggatccgatatcaactagatcttgaga

SEQ ID NO: 2487 - DNA, 170 bp, Artificial sequence
  Cic.164_Smad4.39
  crRNA array
cgatttcttggctttatatatcttgtggaaaggacgaaacaccgtaatttctactaagtgtagatcgggccctgggccggcggcttaatttctactaagtgtagatagtcaaacgcatactgacaattttttaagcttggcgtggatccgatatcaactagatcttgaga

SEQ ID NO: 2488 - DNA, 170 bp, Artificial sequence
  Cic.164_Stag2.1409
  crRNA array
cgatttcttggctttatatatcttgtggaaaggacgaaacaccgtaatttctactaagtgtagatcgggccctgggccggcggcttaatttctactaagtgtagatgctaataactgcggaagggcttttttaagcttggcgtggatccgatatcaactagatcttgaga

SEQ ID NO: 2489 - DNA, 170 bp, Artificial sequence
  Cic.164_Stag2.4401
  crRNA array
cgatttcttggctttatatatcttgtggaaaggacgaaacaccgtaatttctactaagtgtagatcgggccctgggccggcggcttaatttctactaagtgtagattaatcgtccagtggtgtatattttttaagcttggcgtggatccgatatcaactagatcttgaga

SEQ ID NO: 2490 - DNA, 170 bp, Artificial sequence
  Cic.164_Tbl1xr1.1
  crRNA array
cgatttcttggctttatatatcttgtggaaaggacgaaacaccgtaatttctactaagtgtagatcgggccctgggccggcggcttaatttctactaagtgtagatggatgcgcatactggtgaagttttttaagcttggcgtggatccgatatcaactagatcttgaga

SEQ ID NO: 2491 - DNA, 170 bp, Artificial sequence
  Cic.164_Tbl1xr1.83
  crRNA array
cgatttcttggctttatatatcttgtggaaaggacgaaacaccgtaatttctactaagtgtagatcgggccctgggccggcggcttaatttctactaagtgtagatatggtcgacccatcgagtctttttttaagcttggcgtggatccgatatcaactagatcttgaga

SEQ ID NO: 2492 - DNA, 170 bp, Artificial sequence
  Cic.164_Tgfbr2.290
  crRNA array
cgatttcttggctttatatatcttgtggaaaggacgaaacaccgtaatttctactaagtgtagatcgggccctgggccggcggcttaatttctactaagtgtagatcctctcggcgcccgggtaaattttttaagcttggcgtggatccgatatcaactagatcttgaga

SEQ ID NO: 2493 - DNA, 170 bp, Artificial sequence
  Cic.164_Tgfbr2.292
  crRNA array
cgatttcttggctttatatatcttgtggaaaggacgaaacaccgtaatttctactaagtgtagatcgggccctgggccggcggcttaatttctactaagtgtagatcccgggcgccgagagggaaattttttaagcttggcgtggatccgatatcaactagatcttgaga

SEQ ID NO: 2494 - DNA, 170 bp, Artificial sequence
  Cic.164_Trp53.4
  crRNA array
cgatttcttggctttatatatcttgtggaaaggacgaaacaccgtaatttctactaagtgtagatcgggccctgggccggcggcttaatttctactaagtgtagatccctgaactgcccccagggattttttaagcttggcgtggatccgatatcaactagatcttgaga

SEQ ID NO: 2495 - DNA, 170 bp, Artificial sequence
  Cic.164_Trp53.528
  crRNA array
cgatttcttggctttatatatcttgtggaaaggacgaaacaccgtaatttctactaagtgtagatcgggccctgggccggcggcttaatttctactaagtgtagatgctgggccagcagagacctgttttttaagcttggcgtggatccgatatcaactagatcttgaga

SEQ ID NO: 2496 - DNA, 170 bp, Artificial sequence
  Cic.164_Vhl.1
  crRNA array
cgatttcttggctttatatatcttgtggaaaggacgaaacaccgtaatttctactaagtgtagatcgggccctgggccggcggcttaatttctactaagtgtagatagggctcccggcggccatttttttttaagcttggcgtggatccgatatcaactagatcttgaga

SEQ ID NO: 2497 - DNA, 170 bp, Artificial sequence
  Cic.164_Vhl.151
  crRNA array
cgatttcttggctttatatatcttgtggaaaggacgaaacaccgtaatttctactaagtgtagatcgggccctgggccggcggcttaatttctactaagtgtagattagagcactcacccgagggattttttaagcttggcgtggatccgatatcaactagatcttgaga

SEQ ID NO: 2498 - DNA, 170 bp, Artificial sequence
  Cic.164_Zc3h13.1387
  crRNA array
cgatttcttggctttatatatcttgtggaaaggacgaaacaccgtaatttctactaagtgtagatcgggccctgggccggcggcttaatttctactaagtgtagatgtgacgccggtcatgtgactttttttaagcttggcgtggatccgatatcaactagatcttgaga

SEQ ID NO: 2499 - DNA, 170 bp, Artificial sequence
  Cic.164_Zc3h13.1777
  crRNA array
cgatttcttggctttatatatcttgtggaaaggacgaaacaccgtaatttctactaagtgtagatcgggccctgggccggcggcttaatttctactaagtgtagatgatgctgccagtgtagcggcttttttaagcttggcgtggatccgatatcaactagatcttgaga

SEQ ID NO: 2500 - DNA, 170 bp, Artificial sequence
  Ctcf.229_Acvr2a.155
  crRNA array
cgatttcttggctttatatatcttgtggaaaggacgaaacaccgtaatttctactaagtgtagatggctggtggctgatagtctgtaatttctactaagtgtagatggacctggctaatcaagtatttttttaagcttggcgtggatccgatatcaactagatcttgaga

SEQ ID NO: 2501 - DNA, 170 bp, Artificial sequence
  Ctcf.229_Acvr2a.70
  crRNA array
cgatttcttggctttatatatcttgtggaaaggacgaaacaccgtaatttctactaagtgtagatggctggtggctgatagtctgtaatttctactaagtgtagatcccgaggcgccggagaagccttttttaagcttggcgtggatccgatatcaactagatcttgaga

SEQ ID NO: 2502 - DNA, 170 bp, Artificial sequence
  Ctcf.229_Apc.21
  crRNA array
cgatttcttggctttatatatcttgtggaaaggacgaaacaccgtaatttctactaagtgtagatggctggtggctgatagtctgtaatttctactaagtgtagatgtgatccacacgtgtagctgttttttaagcttggcgtggatccgatatcaactagatcttgaga

SEQ ID NO: 2503 - DNA, 170 bp, Artificial sequence
  Ctcf.229_Apc.867
  crRNA array
cgatttcttggctttatatatcttgtggaaaggacgaaacaccgtaatttctactaagtgtagatggctggtggctgatagtctgtaatttctactaagtgtagatcagtcccaggcggcggaagcttttttaagcttggcgtggatccgatatcaactagatcttgaga

SEQ ID NO: 2504 - DNA, 170 bp, Artificial sequence
  Ctcf.229_Arid1a.2
  crRNA array
cgatttcttggctttatatatcttgtggaaaggacgaaacaccgtaatttctactaagtgtagatggctggtggctgatagtctgtaatttctactaagtgtagatcccgcgcccccgtcctggggttttttaagcttggcgtggatccgatatcaactagatcttgaga

SEQ ID NO: 2505 - DNA, 170 bp, Artificial sequence
  Ctcf.229_Arid1a.5
  crRNA array
cgatttcttggctttatatatcttgtggaaaggacgaaacaccgtaatttctactaagtgtagatggctggtggctgatagtctgtaatttctactaagtgtagatcccgcgctcggccgctgccgttttttaagcttggcgtggatccgatatcaactagatcttgaga

SEQ ID NO: 2506 - DNA, 170 bp, Artificial sequence
  Ctcf.229_Arid2.166
  crRNA array
cgatttcttggctttatatatcttgtggaaaggacgaaacaccgtaatttctactaagtgtagatggctggtggctgatagtctgtaatttctactaagtgtagataaccgcgatctgggttttttttttttaagcttggcgtggatccgatatcaactagatcttgaga

SEQ ID NO: 2507 - DNA, 170 bp, Artificial sequence
  Ctcf.229_Arid2.172
  crRNA array
cgatttcttggctttatatatcttgtggaaaggacgaaacaccgtaatttctactaagtgtagatggctggtggctgatagtctgtaatttctactaagtgtagatctggacgagctgcggcagttttttttaagcttggcgtggatccgatatcaactagatcttgaga

SEQ ID NO: 2508 - DNA, 170 bp, Artificial sequence
  Ctcf.229_Atm.120
  crRNA array
cgatttcttggctttatatatcttgtggaaaggacgaaacaccgtaatttctactaagtgtagatggctggtggctgatagtctgtaatttctactaagtgtagatgacaggtagtcggcagctaattttttaagcttggcgtggatccgatatcaactagatcttgaga

SEQ ID NO: 2509 - DNA, 170 bp, Artificial sequence
  Ctcf.229_Atm.997
  crRNA array
cgatttcttggctttatatatcttgtggaaaggacgaaacaccgtaatttctactaagtgtagatggctggtggctgatagtctgtaatttctactaagtgtagatgagaaagtctccgaatcgttttttttaagcttggcgtggatccgatatcaactagatcttgaga

SEQ ID NO: 2510 - DNA, 170 bp, Artificial sequence
  Ctcf.229_Atrx.249
  crRNA array
cgatttcttggctttatatatcttgtggaaaggacgaaacaccgtaatttctactaagtgtagatggctggtggctgatagtctgtaatttctactaagtgtagattagccagtcgctcatatctcttttttaagcttggcgtggatccgatatcaactagatcttgaga

SEQ ID NO: 2511 - DNA, 170 bp, Artificial sequence
  Ctcf.229_Atrx.251
  crRNA array
cgatttcttggctttatatatcttgtggaaaggacgaaacaccgtaatttctactaagtgtagatggctggtggctgatagtctgtaatttctactaagtgtagatgccagtcgctcatatctctgttttttaagcttggcgtggatccgatatcaactagatcttgaga

SEQ ID NO: 2512 - DNA, 170 bp, Artificial sequence
  Ctcf.229_Bcor.203
  crRNA array
cgatttcttggctttatatatcttgtggaaaggacgaaacaccgtaatttctactaagtgtagatggctggtggctgatagtctgtaatttctactaagtgtagatccccggagcggagtccaggcttttttaagcttggcgtggatccgatatcaactagatcttgaga

SEQ ID NO: 2513 - DNA, 170 bp, Artificial sequence
  Ctcf.229_Bcor.475
  crRNA array
cgatttcttggctttatatatcttgtggaaaggacgaaacaccgtaatttctactaagtgtagatggctggtggctgatagtctgtaatttctactaagtgtagattgcaacccctctgtatgggattttttaagcttggcgtggatccgatatcaactagatcttgaga

SEQ ID NO: 2514 - DNA, 170 bp, Artificial sequence
  Ctcf.229_Brca1.112
  crRNA array
cgatttcttggctttatatatcttgtggaaaggacgaaacaccgtaatttctactaagtgtagatggctggtggctgatagtctgtaatttctactaagtgtagatctagacgctctgtggagactttttttaagcttggcgtggatccgatatcaactagatcttgaga

SEQ ID NO: 2515 - DNA, 170 bp, Artificial sequence
  Ctcf.229_Brca1.53
  crRNA array
cgatttcttggctttatatatcttgtggaaaggacgaaacaccgtaatttctactaagtgtagatggctggtggctgatagtctgtaatttctactaagtgtagataatgaggaggcgtcgatcatttttttaagcttggcgtggatccgatatcaactagatcttgaga

SEQ ID NO: 2516 - DNA, 170 bp, Artificial sequence
  Ctcf.229_Casp8.45
  crRNA array
cgatttcttggctttatatatcttgtggaaaggacgaaacaccgtaatttctactaagtgtagatggctggtggctgatagtctgtaatttctactaagtgtagatctaccgagatcctgtgaatgttttttaagcttggcgtggatccgatatcaactagatcttgaga

SEQ ID NO: 2517 - DNA, 170 bp, Artificial sequence
  Ctcf.229_Casp8.54
  crRNA array
cgatttcttggctttatatatcttgtggaaaggacgaaacaccgtaatttctactaagtgtagatggctggtggctgatagtctgtaatttctactaagtgtagatcagtgcagtcgtcgtaagatttttttaagcttggcgtggatccgatatcaactagatcttgaga

SEQ ID NO: 2518 - DNA, 170 bp, Artificial sequence
  Ctcf.229_Cbwd1.84
  crRNA array
cgatttcttggctttatatatcttgtggaaaggacgaaacaccgtaatttctactaagtgtagatggctggtggctgatagtctgtaatttctactaagtgtagatcacagcaggtaacatgccgcttttttaagcttggcgtggatccgatatcaactagatcttgaga

SEQ ID NO: 2519 - DNA, 170 bp, Artificial sequence
  Ctcf.229_Cbwd1.85
  crRNA array
cgatttcttggctttatatatcttgtggaaaggacgaaacaccgtaatttctactaagtgtagatggctggtggctgatagtctgtaatttctactaagtgtagatacagcaggtaacatgccgccttttttaagcttggcgtggatccgatatcaactagatcttgaga

SEQ ID NO: 2520 - DNA, 170 bp, Artificial sequence
  Ctcf.229_Cdh1.387
  crRNA array
cgatttcttggctttatatatcttgtggaaaggacgaaacaccgtaatttctactaagtgtagatggctggtggctgatagtctgtaatttctactaagtgtagatctcggcgtctgccgggtccgttttttaagcttggcgtggatccgatatcaactagatcttgaga

SEQ ID NO: 2521 - DNA, 170 bp, Artificial sequence
  Ctcf.229_Cdh1.58
  crRNA array
cgatttcttggctttatatatcttgtggaaaggacgaaacaccgtaatttctactaagtgtagatggctggtggctgatagtctgtaatttctactaagtgtagatctcgtccgcgcccgggactcttttttaagcttggcgtggatccgatatcaactagatcttgaga

SEQ ID NO: 2522 - DNA, 170 bp, Artificial sequence
  Ctcf.229_Cdkn2a.647
  crRNA array
cgatttcttggctttatatatcttgtggaaaggacgaaacaccgtaatttctactaagtgtagatggctggtggctgatagtctgtaatttctactaagtgtagatgcaatcacgggagggagcagttttttaagcttggcgtggatccgatatcaactagatcttgaga

SEQ ID NO: 2523 - DNA, 170 bp, Artificial sequence
  Ctcf.229_Cdkn2a.648
  crRNA array
cgatttcttggctttatatatcttgtggaaaggacgaaacaccgtaatttctactaagtgtagatggctggtggctgatagtctgtaatttctactaagtgtagatcaatcacgggagggagcagattttttaagcttggcgtggatccgatatcaactagatcttgaga

SEQ ID NO: 2524 - DNA, 170 bp, Artificial sequence
  Ctcf.229_Cic.162
  crRNA array
cgatttcttggctttatatatcttgtggaaaggacgaaacaccgtaatttctactaagtgtagatggctggtggctgatagtctgtaatttctactaagtgtagatcgcaggcgcgcccggcggagttttttaagcttggcgtggatccgatatcaactagatcttgaga

SEQ ID NO: 2525 - DNA, 170 bp, Artificial sequence
  Ctcf.229_Cic.164
  crRNA array
cgatttcttggctttatatatcttgtggaaaggacgaaacaccgtaatttctactaagtgtagatggctggtggctgatagtctgtaatttctactaagtgtagatcgggccctgggccggcggctttttttaagcttggcgtggatccgatatcaactagatcttgaga

SEQ ID NO: 2526 - DNA, 170 bp, Artificial sequence
  Ctcf.229_Elf3.826
  crRNA array
cgatttcttggctttatatatcttgtggaaaggacgaaacaccgtaatttctactaagtgtagatggctggtggctgatagtctgtaatttctactaagtgtagattccgagacatcctaatccacttttttaagcttggcgtggatccgatatcaactagatcttgaga

SEQ ID NO: 2527 - DNA, 170 bp, Artificial sequence
  Ctcf.229_Elf3.983
  crRNA array
cgatttcttggctttatatatcttgtggaaaggacgaaacaccgtaatttctactaagtgtagatggctggtggctgatagtctgtaatttctactaagtgtagattaggccccctaactggaccattttttaagcttggcgtggatccgatatcaactagatcttgaga

SEQ ID NO: 2528 - DNA, 170 bp, Artificial sequence
  Ctcf.229_Ep300.310
  crRNA array
cgatttcttggctttatatatcttgtggaaaggacgaaacaccgtaatttctactaagtgtagatggctggtggctgatagtctgtaatttctactaagtgtagatatggtacgacagtgaggaagttttttaagcttggcgtggatccgatatcaactagatcttgaga

SEQ ID NO: 2529 - DNA, 170 bp, Artificial sequence
  Ctcf.229_Ep300.587
  crRNA array
cgatttcttggctttatatatcttgtggaaaggacgaaacaccgtaatttctactaagtgtagatggctggtggctgatagtctgtaatttctactaagtgtagatcgccccggggcccccaaccattttttaagcttggcgtggatccgatatcaactagatcttgaga

SEQ ID NO: 2530 - DNA, 170 bp, Artificial sequence
  Ctcf.229_Epha2.126
  crRNA array
cgatttcttggctttatatatcttgtggaaaggacgaaacaccgtaatttctactaagtgtagatggctggtggctgatagtctgtaatttctactaagtgtagatcctgtgccgccgcggccgccttttttaagcttggcgtggatccgatatcaactagatcttgaga

SEQ ID NO: 2531 - DNA, 170 bp, Artificial sequence
  Ctcf.229_Epha2.5
  crRNA array
cgatttcttggctttatatatcttgtggaaaggacgaaacaccgtaatttctactaagtgtagatggctggtggctgatagtctgtaatttctactaagtgtagatcatgagctggcgccacccggttttttaagcttggcgtggatccgatatcaactagatcttgaga

SEQ ID NO: 2532 - DNA, 170 bp, Artificial sequence
  Ctcf.229_Fat1.105
  crRNA array
cgatttcttggctttatatatcttgtggaaaggacgaaacaccgtaatttctactaagtgtagatggctggtggctgatagtctgtaatttctactaagtgtagataactcgaggtgacaacaagtttttttaagcttggcgtggatccgatatcaactagatcttgaga

SEQ ID NO: 2533 - DNA, 170 bp, Artificial sequence
  Ctcf.229_Fat1.122
  crRNA array
cgatttcttggctttatatatcttgtggaaaggacgaaacaccgtaatttctactaagtgtagatggctggtggctgatagtctgtaatttctactaagtgtagatccatcgacatggaaacgggattttttaagcttggcgtggatccgatatcaactagatcttgaga

SEQ ID NO: 2534 - DNA, 170 bp, Artificial sequence
  Ctcf.229_Fbxw7.21
  crRNA array
cgatttcttggctttatatatcttgtggaaaggacgaaacaccgtaatttctactaagtgtagatggctggtggctgatagtctgtaatttctactaagtgtagattaatgtgccgtagaaacccattttttaagcttggcgtggatccgatatcaactagatcttgaga

SEQ ID NO: 2535 - DNA, 170 bp, Artificial sequence
  Ctcf.229_Fbxw7.23
  crRNA array
cgatttcttggctttatatatcttgtggaaaggacgaaacaccgtaatttctactaagtgtagatggctggtggctgatagtctgtaatttctactaagtgtagatatgtgccgtagaaacccatattttttaagcttggcgtggatccgatatcaactagatcttgaga

SEQ ID NO: 2536 - DNA, 170 bp, Artificial sequence
  Ctcf.229_Gata3.34
  crRNA array
cgatttcttggctttatatatcttgtggaaaggacgaaacaccgtaatttctactaagtgtagatggctggtggctgatagtctgtaatttctactaagtgtagatctaaactatcccgcaaagatttttttaagcttggcgtggatccgatatcaactagatcttgaga

SEQ ID NO: 2537 - DNA, 170 bp, Artificial sequence
  Ctcf.229_Gata3.47
  crRNA array
cgatttcttggctttatatatcttgtggaaaggacgaaacaccgtaatttctactaagtgtagatggctggtggctgatagtctgtaatttctactaagtgtagatcgtagtaggacgggacgtggttttttaagcttggcgtggatccgatatcaactagatcttgaga

SEQ ID NO: 2538 - DNA, 170 bp, Artificial sequence
  Ctcf.229_H2-Q2.1
  crRNA array
cgatttcttggctttatatatcttgtggaaaggacgaaacaccgtaatttctactaagtgtagatggctggtggctgatagtctgtaatttctactaagtgtagatagggcggccaccaacagcagttttttaagcttggcgtggatccgatatcaactagatcttgaga

SEQ ID NO: 2539 - DNA, 170 bp, Artificial sequence
  Ctcf.229_H2-Q2.2
  crRNA array
cgatttcttggctttatatatcttgtggaaaggacgaaacaccgtaatttctactaagtgtagatggctggtggctgatagtctgtaatttctactaagtgtagattaacctgcgcccgctgctgattttttaagcttggcgtggatccgatatcaactagatcttgaga

SEQ ID NO: 2540 - DNA, 170 bp, Artificial sequence
  Ctcf.229_Kdm5c.1878
  crRNA array
cgatttcttggctttatatatcttgtggaaaggacgaaacaccgtaatttctactaagtgtagatggctggtggctgatagtctgtaatttctactaagtgtagatagagcacggcacccgcccccttttttaagcttggcgtggatccgatatcaactagatcttgaga

SEQ ID NO: 2541 - DNA, 170 bp, Artificial sequence
  Ctcf.229_Kdm5c.1879
  crRNA array
cgatttcttggctttatatatcttgtggaaaggacgaaacaccgtaatttctactaagtgtagatggctggtggctgatagtctgtaatttctactaagtgtagatgagcacggcacccgccccccttttttaagcttggcgtggatccgatatcaactagatcttgaga

SEQ ID NO: 2542 - DNA, 170 bp, Artificial sequence
  Ctcf.229_Kdm6a.56
  crRNA array
cgatttcttggctttatatatcttgtggaaaggacgaaacaccgtaatttctactaagtgtagatggctggtggctgatagtctgtaatttctactaagtgtagattcgctgccgcctctcgcggcttttttaagcttggcgtggatccgatatcaactagatcttgaga

SEQ ID NO: 2543 - DNA, 170 bp, Artificial sequence
  Ctcf.229_Kdm6a.57
  crRNA array
cgatttcttggctttatatatcttgtggaaaggacgaaacaccgtaatttctactaagtgtagatggctggtggctgatagtctgtaatttctactaagtgtagatcgctgccgcctctcgcggcattttttaagcttggcgtggatccgatatcaactagatcttgaga

SEQ ID NO: 2544 - DNA, 170 bp, Artificial sequence
  Ctcf.229_Kmt2b.265
  crRNA array
cgatttcttggctttatatatcttgtggaaaggacgaaacaccgtaatttctactaagtgtagatggctggtggctgatagtctgtaatttctactaagtgtagatccccaagtgaagcccacctgttttttaagcttggcgtggatccgatatcaactagatcttgaga

SEQ ID NO: 2545 - DNA, 170 bp, Artificial sequence
  Ctcf.229_Kmt2b.298
  crRNA array
cgatttcttggctttatatatcttgtggaaaggacgaaacaccgtaatttctactaagtgtagatggctggtggctgatagtctgtaatttctactaagtgtagattccggcagggaccggctggcttttttaagcttggcgtggatccgatatcaactagatcttgaga

SEQ ID NO: 2546 - DNA, 170 bp, Artificial sequence
  Ctcf.229_Kmt2c.1962
  crRNA array
cgatttcttggctttatatatcttgtggaaaggacgaaacaccgtaatttctactaagtgtagatggctggtggctgatagtctgtaatttctactaagtgtagatgtgacgatctgtgccacaagttttttaagcttggcgtggatccgatatcaactagatcttgaga

SEQ ID NO: 2547 - DNA, 170 bp, Artificial sequence
  Ctcf.229_Kmt2c.2236
  crRNA array
cgatttcttggctttatatatcttgtggaaaggacgaaacaccgtaatttctactaagtgtagatggctggtggctgatagtctgtaatttctactaagtgtagatactcgacctccacctccctattttttaagcttggcgtggatccgatatcaactagatcttgaga

SEQ ID NO: 2548 - DNA, 170 bp, Artificial sequence
  Ctcf.229_Kmt2d.316
  crRNA array
cgatttcttggctttatatatcttgtggaaaggacgaaacaccgtaatttctactaagtgtagatggctggtggctgatagtctgtaatttctactaagtgtagatactccaggccacccaggtggttttttaagcttggcgtggatccgatatcaactagatcttgaga

SEQ ID NO: 2549 - DNA, 170 bp, Artificial sequence
  Ctcf.229_Kmt2d.416
  crRNA array
cgatttcttggctttatatatcttgtggaaaggacgaaacaccgtaatttctactaagtgtagatggctggtggctgatagtctgtaatttctactaagtgtagattaaacccccgggggaagggtttttttaagcttggcgtggatccgatatcaactagatcttgaga

SEQ ID NO: 2550 - DNA, 170 bp, Artificial sequence
  Ctcf.229_Map2k4.119
  crRNA array
cgatttcttggctttatatatcttgtggaaaggacgaaacaccgtaatttctactaagtgtagatggctggtggctgatagtctgtaatttctactaagtgtagattgctgtgtgggcggccacatttttttaagcttggcgtggatccgatatcaactagatcttgaga

SEQ ID NO: 2551 - DNA, 170 bp, Artificial sequence
  Ctcf.229_Map2k4.1261
  crRNA array
cgatttcttggctttatatatcttgtggaaaggacgaaacaccgtaatttctactaagtgtagatggctggtggctgatagtctgtaatttctactaagtgtagatgatgtagtaatgcggagtagttttttaagcttggcgtggatccgatatcaactagatcttgaga

SEQ ID NO: 2552 - DNA, 170 bp, Artificial sequence
  Ctcf.229_Map3k1.235
  crRNA array
cgatttcttggctttatatatcttgtggaaaggacgaaacaccgtaatttctactaagtgtagatggctggtggctgatagtctgtaatttctactaagtgtagataaaacgctactgatcgatcgttttttaagcttggcgtggatccgatatcaactagatcttgaga

SEQ ID NO: 2553 - DNA, 170 bp, Artificial sequence
  Ctcf.229_Map3k1.3838
  crRNA array
cgatttcttggctttatatatcttgtggaaaggacgaaacaccgtaatttctactaagtgtagatggctggtggctgatagtctgtaatttctactaagtgtagatccaacaacagggccccactattttttaagcttggcgtggatccgatatcaactagatcttgaga

SEQ ID NO: 2554 - DNA, 170 bp, Artificial sequence
  Ctcf.229_Mga.1655
  crRNA array
cgatttcttggctttatatatcttgtggaaaggacgaaacaccgtaatttctactaagtgtagatggctggtggctgatagtctgtaatttctactaagtgtagatcgagaagtggagagcatattttttttaagcttggcgtggatccgatatcaactagatcttgaga

SEQ ID NO: 2555 - DNA, 170 bp, Artificial sequence
  Ctcf.229_Mga.93
  crRNA array
cgatttcttggctttatatatcttgtggaaaggacgaaacaccgtaatttctactaagtgtagatggctggtggctgatagtctgtaatttctactaagtgtagatgagaaggctccccataatgtttttttaagcttggcgtggatccgatatcaactagatcttgaga

SEQ ID NO: 2556 - DNA, 170 bp, Artificial sequence
  Ctcf.229_Nf1.746
  crRNA array
cgatttcttggctttatatatcttgtggaaaggacgaaacaccgtaatttctactaagtgtagatggctggtggctgatagtctgtaatttctactaagtgtagattaagcataatgatgatgccattttttaagcttggcgtggatccgatatcaactagatcttgaga

SEQ ID NO: 2557 - DNA, 170 bp, Artificial sequence
  Ctcf.229_Nf1.97
  crRNA array
cgatttcttggctttatatatcttgtggaaaggacgaaacaccgtaatttctactaagtgtagatggctggtggctgatagtctgtaatttctactaagtgtagatagcccgctacatgctgatgcttttttaagcttggcgtggatccgatatcaactagatcttgaga

SEQ ID NO: 2558 - DNA, 170 bp, Artificial sequence
  Ctcf.229_Nf2.356
  crRNA array
cgatttcttggctttatatatcttgtggaaaggacgaaacaccgtaatttctactaagtgtagatggctggtggctgatagtctgtaatttctactaagtgtagatcggagtcatctgatagagatttttttaagcttggcgtggatccgatatcaactagatcttgaga

SEQ ID NO: 2559 - DNA, 170 bp, Artificial sequence
  Ctcf.229_Nf2.768
  crRNA array
cgatttcttggctttatatatcttgtggaaaggacgaaacaccgtaatttctactaagtgtagatggctggtggctgatagtctgtaatttctactaagtgtagatccgaagccccagtgtccggcttttttaagcttggcgtggatccgatatcaactagatcttgaga

SEQ ID NO: 2560 - DNA, 170 bp, Artificial sequence
  Ctcf.229_Notch1.1849
  crRNA array
cgatttcttggctttatatatcttgtggaaaggacgaaacaccgtaatttctactaagtgtagatggctggtggctgatagtctgtaatttctactaagtgtagatctggcgggtgggcggcgctgttttttaagcttggcgtggatccgatatcaactagatcttgaga

SEQ ID NO: 2561 - DNA, 170 bp, Artificial sequence
  Ctcf.229_Notch1.649
  crRNA array
cgatttcttggctttatatatcttgtggaaaggacgaaacaccgtaatttctactaagtgtagatggctggtggctgatagtctgtaatttctactaagtgtagattgggccaacgatgccaggacttttttaagcttggcgtggatccgatatcaactagatcttgaga

SEQ ID NO: 2562 - DNA, 170 bp, Artificial sequence
  Ctcf.229_Nsd1.70
  crRNA array
cgatttcttggctttatatatcttgtggaaaggacgaaacaccgtaatttctactaagtgtagatggctggtggctgatagtctgtaatttctactaagtgtagatactggtgtggacgatgcagattttttaagcttggcgtggatccgatatcaactagatcttgaga

SEQ ID NO: 2563 - DNA, 170 bp, Artificial sequence
  Ctcf.229_Nsd1.90
  crRNA array
cgatttcttggctttatatatcttgtggaaaggacgaaacaccgtaatttctactaagtgtagatggctggtggctgatagtctgtaatttctactaagtgtagataggagctaacggcaagaatgttttttaagcttggcgtggatccgatatcaactagatcttgaga

SEQ ID NO: 2564 - DNA, 170 bp, Artificial sequence
  Ctcf.229_Pbrm1.1236
  crRNA array
cgatttcttggctttatatatcttgtggaaaggacgaaacaccgtaatttctactaagtgtagatggctggtggctgatagtctgtaatttctactaagtgtagatgccgataaaaccaacagccgttttttaagcttggcgtggatccgatatcaactagatcttgaga

SEQ ID NO: 2565 - DNA, 170 bp, Artificial sequence
  Ctcf.229_Pbrm1.969
  crRNA array
cgatttcttggctttatatatcttgtggaaaggacgaaacaccgtaatttctactaagtgtagatggctggtggctgatagtctgtaatttctactaagtgtagatgagccctaatgaacagctcattttttaagcttggcgtggatccgatatcaactagatcttgaga

SEQ ID NO: 2566 - DNA, 170 bp, Artificial sequence
  Ctcf.229_Pik3r1.76
  crRNA array
cgatttcttggctttatatatcttgtggaaaggacgaaacaccgtaatttctactaagtgtagatggctggtggctgatagtctgtaatttctactaagtgtagataaaacctatacggcccgcacttttttaagcttggcgtggatccgatatcaactagatcttgaga

SEQ ID NO: 2567 - DNA, 170 bp, Artificial sequence
  Ctcf.229_Pik3r1.77
  crRNA array
cgatttcttggctttatatatcttgtggaaaggacgaaacaccgtaatttctactaagtgtagatggctggtggctgatagtctgtaatttctactaagtgtagataaacctatacggcccgcactttttttaagcttggcgtggatccgatatcaactagatcttgaga

SEQ ID NO: 2568 - DNA, 170 bp, Artificial sequence
  Ctcf.229_Pten.240
  crRNA array
cgatttcttggctttatatatcttgtggaaaggacgaaacaccgtaatttctactaagtgtagatggctggtggctgatagtctgtaatttctactaagtgtagattgcatacgctatagctgcttttttttaagcttggcgtggatccgatatcaactagatcttgaga

SEQ ID NO: 2569 - DNA, 170 bp, Artificial sequence
  Ctcf.229_Pten.265
  crRNA array
cgatttcttggctttatatatcttgtggaaaggacgaaacaccgtaatttctactaagtgtagatggctggtggctgatagtctgtaatttctactaagtgtagataagcgtggtgcgtgacgcacttttttaagcttggcgtggatccgatatcaactagatcttgaga

SEQ ID NO: 2570 - DNA, 170 bp, Artificial sequence
  Ctcf.229_Rasa1.1478
  crRNA array
cgatttcttggctttatatatcttgtggaaaggacgaaacaccgtaatttctactaagtgtagatggctggtggctgatagtctgtaatttctactaagtgtagatcgataatggtctatgatgtcttttttaagcttggcgtggatccgatatcaactagatcttgaga

SEQ ID NO: 2571 - DNA, 170 bp, Artificial sequence
  Ctcf.229_Rasa1.223
  crRNA array
cgatttcttggctttatatatcttgtggaaaggacgaaacaccgtaatttctactaagtgtagatggctggtggctgatagtctgtaatttctactaagtgtagattccatggagtatcgtgctcgttttttaagcttggcgtggatccgatatcaactagatcttgaga

SEQ ID NO: 2572 - DNA, 170 bp, Artificial sequence
  Ctcf.229_Rb1.211
  crRNA array
cgatttcttggctttatatatcttgtggaaaggacgaaacaccgtaatttctactaagtgtagatggctggtggctgatagtctgtaatttctactaagtgtagattctgacatgatcgggtacctttttttaagcttggcgtggatccgatatcaactagatcttgaga

SEQ ID NO: 2573 - DNA, 170 bp, Artificial sequence
  Ctcf.229_Rb1.394
  crRNA array
cgatttcttggctttatatatcttgtggaaaggacgaaacaccgtaatttctactaagtgtagatggctggtggctgatagtctgtaatttctactaagtgtagatagaaatctcgaagcaggatcttttttaagcttggcgtggatccgatatcaactagatcttgaga

SEQ ID NO: 2574 - DNA, 170 bp, Artificial sequence
  Ctcf.229_Rbm10.5
  crRNA array
cgatttcttggctttatatatcttgtggaaaggacgaaacaccgtaatttctactaagtgtagatggctggtggctgatagtctgtaatttctactaagtgtagatacgaaacctgaacccacacattttttaagcttggcgtggatccgatatcaactagatcttgaga

SEQ ID NO: 2575 - DNA, 170 bp, Artificial sequence
  Ctcf.229_Rbm10.6
  crRNA array
cgatttcttggctttatatatcttgtggaaaggacgaaacaccgtaatttctactaagtgtagatggctggtggctgatagtctgtaatttctactaagtgtagatcgaaacctgaacccacacagttttttaagcttggcgtggatccgatatcaactagatcttgaga

SEQ ID NO: 2576 - DNA, 170 bp, Artificial sequence
  Ctcf.229_Rnf43.1920
  crRNA array
cgatttcttggctttatatatcttgtggaaaggacgaaacaccgtaatttctactaagtgtagatggctggtggctgatagtctgtaatttctactaagtgtagatatccccgtgccgtggactccttttttaagcttggcgtggatccgatatcaactagatcttgaga

SEQ ID NO: 2577 - DNA, 170 bp, Artificial sequence
  Ctcf.229_Rnf43.39
  crRNA array
cgatttcttggctttatatatcttgtggaaaggacgaaacaccgtaatttctactaagtgtagatggctggtggctgatagtctgtaatttctactaagtgtagatcaaggggatcactctgataattttttaagcttggcgtggatccgatatcaactagatcttgaga

SEQ ID NO: 2578 - DNA, 170 bp, Artificial sequence
  Ctcf.229_Runx1.204
  crRNA array
cgatttcttggctttatatatcttgtggaaaggacgaaacaccgtaatttctactaagtgtagatggctggtggctgatagtctgtaatttctactaagtgtagattaaataagtccagccgttttttttttaagcttggcgtggatccgatatcaactagatcttgaga

SEQ ID NO: 2579 - DNA, 170 bp, Artificial sequence
  Ctcf.229_Runx1.81
  crRNA array
cgatttcttggctttatatatcttgtggaaaggacgaaacaccgtaatttctactaagtgtagatggctggtggctgatagtctgtaatttctactaagtgtagataggacgcgtatgggaattttttttttaagcttggcgtggatccgatatcaactagatcttgaga

SEQ ID NO: 2580 - DNA, 170 bp, Artificial sequence
  Ctcf.229_Setd2.143
  crRNA array
cgatttcttggctttatatatcttgtggaaaggacgaaacaccgtaatttctactaagtgtagatggctggtggctgatagtctgtaatttctactaagtgtagatgcacaaccacaacagactggttttttaagcttggcgtggatccgatatcaactagatcttgaga

SEQ ID NO: 2581 - DNA, 170 bp, Artificial sequence
  Ctcf.229_Setd2.508
  crRNA array
cgatttcttggctttatatatcttgtggaaaggacgaaacaccgtaatttctactaagtgtagatggctggtggctgatagtctgtaatttctactaagtgtagattacgatcccgagcacccgacttttttaagcttggcgtggatccgatatcaactagatcttgaga

SEQ ID NO: 2582 - DNA, 170 bp, Artificial sequence
  Ctcf.229_Smad4.3038
  crRNA array
cgatttcttggctttatatatcttgtggaaaggacgaaacaccgtaatttctactaagtgtagatggctggtggctgatagtctgtaatttctactaagtgtagatatctgcggcagtgtcaccggttttttaagcttggcgtggatccgatatcaactagatcttgaga

SEQ ID NO: 2583 - DNA, 170 bp, Artificial sequence
  Ctcf.229_Smad4.39
  crRNA array
cgatttcttggctttatatatcttgtggaaaggacgaaacaccgtaatttctactaagtgtagatggctggtggctgatagtctgtaatttctactaagtgtagatagtcaaacgcatactgacaattttttaagcttggcgtggatccgatatcaactagatcttgaga

SEQ ID NO: 2584 - DNA, 170 bp, Artificial sequence
  Ctcf.229_Stag2.1409
  crRNA array
cgatttcttggctttatatatcttgtggaaaggacgaaacaccgtaatttctactaagtgtagatggctggtggctgatagtctgtaatttctactaagtgtagatgctaataactgcggaagggcttttttaagcttggcgtggatccgatatcaactagatcttgaga

SEQ ID NO: 2585 - DNA, 170 bp, Artificial sequence
  Ctcf.229_Stag2.4401
  crRNA array
cgatttcttggctttatatatcttgtggaaaggacgaaacaccgtaatttctactaagtgtagatggctggtggctgatagtctgtaatttctactaagtgtagattaatcgtccagtggtgtatattttttaagcttggcgtggatccgatatcaactagatcttgaga

SEQ ID NO: 2586 - DNA, 170 bp, Artificial sequence
  Ctcf.229_Tbl1xr1.1
  crRNA array
cgatttcttggctttatatatcttgtggaaaggacgaaacaccgtaatttctactaagtgtagatggctggtggctgatagtctgtaatttctactaagtgtagatggatgcgcatactggtgaagttttttaagcttggcgtggatccgatatcaactagatcttgaga

SEQ ID NO: 2587 - DNA, 170 bp, Artificial sequence
  Ctcf.229_Tbl1xr1.83
  crRNA array
cgatttcttggctttatatatcttgtggaaaggacgaaacaccgtaatttctactaagtgtagatggctggtggctgatagtctgtaatttctactaagtgtagatatggtcgacccatcgagtctttttttaagcttggcgtggatccgatatcaactagatcttgaga

SEQ ID NO: 2588 - DNA, 170 bp, Artificial sequence
  Ctcf.229_Tgfbr2.290
  crRNA array
cgatttcttggctttatatatcttgtggaaaggacgaaacaccgtaatttctactaagtgtagatggctggtggctgatagtctgtaatttctactaagtgtagatcctctcggcgcccgggtaaattttttaagcttggcgtggatccgatatcaactagatcttgaga

SEQ ID NO: 2589 - DNA, 170 bp, Artificial sequence
  Ctcf.229_Tgfbr2.292
  crRNA array
cgatttcttggctttatatatcttgtggaaaggacgaaacaccgtaatttctactaagtgtagatggctggtggctgatagtctgtaatttctactaagtgtagatcccgggcgccgagagggaaattttttaagcttggcgtggatccgatatcaactagatcttgaga

SEQ ID NO: 2590 - DNA, 170 bp, Artificial sequence
  Ctcf.229_Trp53.4
  crRNA array
cgatttcttggctttatatatcttgtggaaaggacgaaacaccgtaatttctactaagtgtagatggctggtggctgatagtctgtaatttctactaagtgtagatccctgaactgcccccagggattttttaagcttggcgtggatccgatatcaactagatcttgaga

SEQ ID NO: 2591 - DNA, 170 bp, Artificial sequence
  Ctcf.229_Trp53.528
  crRNA array
cgatttcttggctttatatatcttgtggaaaggacgaaacaccgtaatttctactaagtgtagatggctggtggctgatagtctgtaatttctactaagtgtagatgctgggccagcagagacctgttttttaagcttggcgtggatccgatatcaactagatcttgaga

SEQ ID NO: 2592 - DNA, 170 bp, Artificial sequence
  Ctcf.229_Vhl.1
  crRNA array
cgatttcttggctttatatatcttgtggaaaggacgaaacaccgtaatttctactaagtgtagatggctggtggctgatagtctgtaatttctactaagtgtagatagggctcccggcggccatttttttttaagcttggcgtggatccgatatcaactagatcttgaga

SEQ ID NO: 2593 - DNA, 170 bp, Artificial sequence
  Ctcf.229_Vhl.151
  crRNA array
cgatttcttggctttatatatcttgtggaaaggacgaaacaccgtaatttctactaagtgtagatggctggtggctgatagtctgtaatttctactaagtgtagattagagcactcacccgagggattttttaagcttggcgtggatccgatatcaactagatcttgaga

SEQ ID NO: 2594 - DNA, 170 bp, Artificial sequence
  Ctcf.229_Zc3h13.1387
  crRNA array
cgatttcttggctttatatatcttgtggaaaggacgaaacaccgtaatttctactaagtgtagatggctggtggctgatagtctgtaatttctactaagtgtagatgtgacgccggtcatgtgactttttttaagcttggcgtggatccgatatcaactagatcttgaga

SEQ ID NO: 2595 - DNA, 170 bp, Artificial sequence
  Ctcf.229_Zc3h13.1777
  crRNA array
cgatttcttggctttatatatcttgtggaaaggacgaaacaccgtaatttctactaagtgtagatggctggtggctgatagtctgtaatttctactaagtgtagatgatgctgccagtgtagcggcttttttaagcttggcgtggatccgatatcaactagatcttgaga

SEQ ID NO: 2596 - DNA, 170 bp, Artificial sequence
  Ctcf.809_Acvr2a.155
  crRNA array
cgatttcttggctttatatatcttgtggaaaggacgaaacaccgtaatttctactaagtgtagataagcgctatcatgatcccaataatttctactaagtgtagatggacctggctaatcaagtatttttttaagcttggcgtggatccgatatcaactagatcttgaga

SEQ ID NO: 2597 - DNA, 170 bp, Artificial sequence
  Ctcf.809_Acvr2a.70
  crRNA array
cgatttcttggctttatatatcttgtggaaaggacgaaacaccgtaatttctactaagtgtagataagcgctatcatgatcccaataatttctactaagtgtagatcccgaggcgccggagaagccttttttaagcttggcgtggatccgatatcaactagatcttgaga

SEQ ID NO: 2598 - DNA, 170 bp, Artificial sequence
  Ctcf.809_Apc.21
  crRNA array
cgatttcttggctttatatatcttgtggaaaggacgaaacaccgtaatttctactaagtgtagataagcgctatcatgatcccaataatttctactaagtgtagatgtgatccacacgtgtagctgttttttaagcttggcgtggatccgatatcaactagatcttgaga

SEQ ID NO: 2599 - DNA, 170 bp, Artificial sequence
  Ctcf.809_Apc.867
  crRNA array
cgatttcttggctttatatatcttgtggaaaggacgaaacaccgtaatttctactaagtgtagataagcgctatcatgatcccaataatttctactaagtgtagatcagtcccaggcggcggaagcttttttaagcttggcgtggatccgatatcaactagatcttgaga

SEQ ID NO: 2600 - DNA, 170 bp, Artificial sequence
  Ctcf.809_Arid1a.2
  crRNA array
cgatttcttggctttatatatcttgtggaaaggacgaaacaccgtaatttctactaagtgtagataagcgctatcatgatcccaataatttctactaagtgtagatcccgcgcccccgtcctggggttttttaagcttggcgtggatccgatatcaactagatcttgaga

SEQ ID NO: 2601 - DNA, 170 bp, Artificial sequence
  Ctcf.809_Arid1a.5
  crRNA array
cgatttcttggctttatatatcttgtggaaaggacgaaacaccgtaatttctactaagtgtagataagcgctatcatgatcccaataatttctactaagtgtagatcccgcgctcggccgctgccgttttttaagcttggcgtggatccgatatcaactagatcttgaga

SEQ ID NO: 2602 - DNA, 170 bp, Artificial sequence
  Ctcf.809_Arid2.166
  crRNA array
cgatttcttggctttatatatcttgtggaaaggacgaaacaccgtaatttctactaagtgtagataagcgctatcatgatcccaataatttctactaagtgtagataaccgcgatctgggttttttttttttaagcttggcgtggatccgatatcaactagatcttgaga

SEQ ID NO: 2603 - DNA, 170 bp, Artificial sequence
  Ctcf.809_Arid2.172
  crRNA array
cgatttcttggctttatatatcttgtggaaaggacgaaacaccgtaatttctactaagtgtagataagcgctatcatgatcccaataatttctactaagtgtagatctggacgagctgcggcagttttttttaagcttggcgtggatccgatatcaactagatcttgaga

SEQ ID NO: 2604 - DNA, 170 bp, Artificial sequence
  Ctcf.809_Atm.120
  crRNA array
cgatttcttggctttatatatcttgtggaaaggacgaaacaccgtaatttctactaagtgtagataagcgctatcatgatcccaataatttctactaagtgtagatgacaggtagtcggcagctaattttttaagcttggcgtggatccgatatcaactagatcttgaga

SEQ ID NO: 2605 - DNA, 170 bp, Artificial sequence
  Ctcf.809_Atm.997
  crRNA array
cgatttcttggctttatatatcttgtggaaaggacgaaacaccgtaatttctactaagtgtagataagcgctatcatgatcccaataatttctactaagtgtagatgagaaagtctccgaatcgttttttttaagcttggcgtggatccgatatcaactagatcttgaga

SEQ ID NO: 2606 - DNA, 170 bp, Artificial sequence
  Ctcf.809_Atrx.249
  crRNA array
cgatttcttggctttatatatcttgtggaaaggacgaaacaccgtaatttctactaagtgtagataagcgctatcatgatcccaataatttctactaagtgtagattagccagtcgctcatatctcttttttaagcttggcgtggatccgatatcaactagatcttgaga

SEQ ID NO: 2607 - DNA, 170 bp, Artificial sequence
  Ctcf.809_Atrx.251
  crRNA array
cgatttcttggctttatatatcttgtggaaaggacgaaacaccgtaatttctactaagtgtagataagcgctatcatgatcccaataatttctactaagtgtagatgccagtcgctcatatctctgttttttaagcttggcgtggatccgatatcaactagatcttgaga

SEQ ID NO: 2608 - DNA, 170 bp, Artificial sequence
  Ctcf.809_Bcor.203
  crRNA array
cgatttcttggctttatatatcttgtggaaaggacgaaacaccgtaatttctactaagtgtagataagcgctatcatgatcccaataatttctactaagtgtagatccccggagcggagtccaggcttttttaagcttggcgtggatccgatatcaactagatcttgaga

SEQ ID NO: 2609 - DNA, 170 bp, Artificial sequence
  Ctcf.809_Bcor.475
  crRNA array
cgatttcttggctttatatatcttgtggaaaggacgaaacaccgtaatttctactaagtgtagataagcgctatcatgatcccaataatttctactaagtgtagattgcaacccctctgtatgggattttttaagcttggcgtggatccgatatcaactagatcttgaga

SEQ ID NO: 2610 - DNA, 170 bp, Artificial sequence
  Ctcf.809_Brca1.112
  crRNA array
cgatttcttggctttatatatcttgtggaaaggacgaaacaccgtaatttctactaagtgtagataagcgctatcatgatcccaataatttctactaagtgtagatctagacgctctgtggagactttttttaagcttggcgtggatccgatatcaactagatcttgaga

SEQ ID NO: 2611 - DNA, 170 bp, Artificial sequence
  Ctcf.809_Brca1.53
  crRNA array
cgatttcttggctttatatatcttgtggaaaggacgaaacaccgtaatttctactaagtgtagataagcgctatcatgatcccaataatttctactaagtgtagataatgaggaggcgtcgatcatttttttaagcttggcgtggatccgatatcaactagatcttgaga

SEQ ID NO: 2612 - DNA, 170 bp, Artificial sequence
  Ctcf.809_Casp8.45
  crRNA array
cgatttcttggctttatatatcttgtggaaaggacgaaacaccgtaatttctactaagtgtagataagcgctatcatgatcccaataatttctactaagtgtagatctaccgagatcctgtgaatgttttttaagcttggcgtggatccgatatcaactagatcttgaga

SEQ ID NO: 2613 - DNA, 170 bp, Artificial sequence
  Ctcf.809_Casp8.54
  crRNA array
cgatttcttggctttatatatcttgtggaaaggacgaaacaccgtaatttctactaagtgtagataagcgctatcatgatcccaataatttctactaagtgtagatcagtgcagtcgtcgtaagatttttttaagcttggcgtggatccgatatcaactagatcttgaga

SEQ ID NO: 2614 - DNA, 170 bp, Artificial sequence
  Ctcf.809_Cbwd1.84
  crRNA array
cgatttcttggctttatatatcttgtggaaaggacgaaacaccgtaatttctactaagtgtagataagcgctatcatgatcccaataatttctactaagtgtagatcacagcaggtaacatgccgcttttttaagcttggcgtggatccgatatcaactagatcttgaga

SEQ ID NO: 2615 - DNA, 170 bp, Artificial sequence
  Ctcf.809_Cbwd1.85
  crRNA array
cgatttcttggctttatatatcttgtggaaaggacgaaacaccgtaatttctactaagtgtagataagcgctatcatgatcccaataatttctactaagtgtagatacagcaggtaacatgccgccttttttaagcttggcgtggatccgatatcaactagatcttgaga

SEQ ID NO: 2616 - DNA, 170 bp, Artificial sequence
  Ctcf.809_Cdh1.387
  crRNA array
cgatttcttggctttatatatcttgtggaaaggacgaaacaccgtaatttctactaagtgtagataagcgctatcatgatcccaataatttctactaagtgtagatctcggcgtctgccgggtccgttttttaagcttggcgtggatccgatatcaactagatcttgaga

SEQ ID NO: 2617 - DNA, 170 bp, Artificial sequence
  Ctcf.809_Cdh1.58
  crRNA array
cgatttcttggctttatatatcttgtggaaaggacgaaacaccgtaatttctactaagtgtagataagcgctatcatgatcccaataatttctactaagtgtagatctcgtccgcgcccgggactcttttttaagcttggcgtggatccgatatcaactagatcttgaga

SEQ ID NO: 2618 - DNA, 170 bp, Artificial sequence
  Ctcf.809_Cdkn2a.647
  crRNA array
cgatttcttggctttatatatcttgtggaaaggacgaaacaccgtaatttctactaagtgtagataagcgctatcatgatcccaataatttctactaagtgtagatgcaatcacgggagggagcagttttttaagcttggcgtggatccgatatcaactagatcttgaga

SEQ ID NO: 2619 - DNA, 170 bp, Artificial sequence
  Ctcf.809_Cdkn2a.648
  crRNA array
cgatttcttggctttatatatcttgtggaaaggacgaaacaccgtaatttctactaagtgtagataagcgctatcatgatcccaataatttctactaagtgtagatcaatcacgggagggagcagattttttaagcttggcgtggatccgatatcaactagatcttgaga

SEQ ID NO: 2620 - DNA, 170 bp, Artificial sequence
  Ctcf.809_Cic.162
  crRNA array
cgatttcttggctttatatatcttgtggaaaggacgaaacaccgtaatttctactaagtgtagataagcgctatcatgatcccaataatttctactaagtgtagatcgcaggcgcgcccggcggagttttttaagcttggcgtggatccgatatcaactagatcttgaga

SEQ ID NO: 2621 - DNA, 170 bp, Artificial sequence
  Ctcf.809_Cic.164
  crRNA array
cgatttcttggctttatatatcttgtggaaaggacgaaacaccgtaatttctactaagtgtagataagcgctatcatgatcccaataatttctactaagtgtagatcgggccctgggccggcggctttttttaagcttggcgtggatccgatatcaactagatcttgaga

SEQ ID NO: 2622 - DNA, 170 bp, Artificial sequence
  Ctcf.809_Elf3.826
  crRNA array
cgatttcttggctttatatatcttgtggaaaggacgaaacaccgtaatttctactaagtgtagataagcgctatcatgatcccaataatttctactaagtgtagattccgagacatcctaatccacttttttaagcttggcgtggatccgatatcaactagatcttgaga

SEQ ID NO: 2623 - DNA, 170 bp, Artificial sequence
  Ctcf.809_Elf3.983
  crRNA array
cgatttcttggctttatatatcttgtggaaaggacgaaacaccgtaatttctactaagtgtagataagcgctatcatgatcccaataatttctactaagtgtagattaggccccctaactggaccattttttaagcttggcgtggatccgatatcaactagatcttgaga

SEQ ID NO: 2624 - DNA, 170 bp, Artificial sequence
  Ctcf.809_Ep300.310
  crRNA array
cgatttcttggctttatatatcttgtggaaaggacgaaacaccgtaatttctactaagtgtagataagcgctatcatgatcccaataatttctactaagtgtagatatggtacgacagtgaggaagttttttaagcttggcgtggatccgatatcaactagatcttgaga

SEQ ID NO: 2625 - DNA, 170 bp, Artificial sequence
  Ctcf.809_Ep300.587
  crRNA array
cgatttcttggctttatatatcttgtggaaaggacgaaacaccgtaatttctactaagtgtagataagcgctatcatgatcccaataatttctactaagtgtagatcgccccggggcccccaaccattttttaagcttggcgtggatccgatatcaactagatcttgaga

SEQ ID NO: 2626 - DNA, 170 bp, Artificial sequence
  Ctcf.809_Epha2.126
  crRNA array
cgatttcttggctttatatatcttgtggaaaggacgaaacaccgtaatttctactaagtgtagataagcgctatcatgatcccaataatttctactaagtgtagatcctgtgccgccgcggccgccttttttaagcttggcgtggatccgatatcaactagatcttgaga

SEQ ID NO: 2627 - DNA, 170 bp, Artificial sequence
  Ctcf.809_Epha2.5
  crRNA array
cgatttcttggctttatatatcttgtggaaaggacgaaacaccgtaatttctactaagtgtagataagcgctatcatgatcccaataatttctactaagtgtagatcatgagctggcgccacccggttttttaagcttggcgtggatccgatatcaactagatcttgaga

SEQ ID NO: 2628 - DNA, 170 bp, Artificial sequence
  Ctcf.809_Fat1.105
  crRNA array
cgatttcttggctttatatatcttgtggaaaggacgaaacaccgtaatttctactaagtgtagataagcgctatcatgatcccaataatttctactaagtgtagataactcgaggtgacaacaagtttttttaagcttggcgtggatccgatatcaactagatcttgaga

SEQ ID NO: 2629 - DNA, 170 bp, Artificial sequence
  Ctcf.809_Fat1.122
  crRNA array
cgatttcttggctttatatatcttgtggaaaggacgaaacaccgtaatttctactaagtgtagataagcgctatcatgatcccaataatttctactaagtgtagatccatcgacatggaaacgggattttttaagcttggcgtggatccgatatcaactagatcttgaga

SEQ ID NO: 2630 - DNA, 170 bp, Artificial sequence
  Ctcf.809_Fbxw7.21
  crRNA array
cgatttcttggctttatatatcttgtggaaaggacgaaacaccgtaatttctactaagtgtagataagcgctatcatgatcccaataatttctactaagtgtagattaatgtgccgtagaaacccattttttaagcttggcgtggatccgatatcaactagatcttgaga

SEQ ID NO: 2631 - DNA, 170 bp, Artificial sequence
  Ctcf.809_Fbxw7.23
  crRNA array
cgatttcttggctttatatatcttgtggaaaggacgaaacaccgtaatttctactaagtgtagataagcgctatcatgatcccaataatttctactaagtgtagatatgtgccgtagaaacccatattttttaagcttggcgtggatccgatatcaactagatcttgaga

SEQ ID NO: 2632 - DNA, 170 bp, Artificial sequence
  Ctcf.809_Gata3.34
  crRNA array
cgatttcttggctttatatatcttgtggaaaggacgaaacaccgtaatttctactaagtgtagataagcgctatcatgatcccaataatttctactaagtgtagatctaaactatcccgcaaagatttttttaagcttggcgtggatccgatatcaactagatcttgaga

SEQ ID NO: 2633 - DNA, 170 bp, Artificial sequence
  Ctcf.809_Gata3.47
  crRNA array
cgatttcttggctttatatatcttgtggaaaggacgaaacaccgtaatttctactaagtgtagataagcgctatcatgatcccaataatttctactaagtgtagatcgtagtaggacgggacgtggttttttaagcttggcgtggatccgatatcaactagatcttgaga

SEQ ID NO: 2634 - DNA, 170 bp, Artificial sequence
  Ctcf.809_H2-Q2.1
  crRNA array
cgatttcttggctttatatatcttgtggaaaggacgaaacaccgtaatttctactaagtgtagataagcgctatcatgatcccaataatttctactaagtgtagatagggcggccaccaacagcagttttttaagcttggcgtggatccgatatcaactagatcttgaga

SEQ ID NO: 2635 - DNA, 170 bp, Artificial sequence
  Ctcf.809_H2-Q2.2
  crRNA array
cgatttcttggctttatatatcttgtggaaaggacgaaacaccgtaatttctactaagtgtagataagcgctatcatgatcccaataatttctactaagtgtagattaacctgcgcccgctgctgattttttaagcttggcgtggatccgatatcaactagatcttgaga

SEQ ID NO: 2636 - DNA, 170 bp, Artificial sequence
  Ctcf.809_Kdm5c.1878
  crRNA array
cgatttcttggctttatatatcttgtggaaaggacgaaacaccgtaatttctactaagtgtagataagcgctatcatgatcccaataatttctactaagtgtagatagagcacggcacccgcccccttttttaagcttggcgtggatccgatatcaactagatcttgaga

SEQ ID NO: 2637 - DNA, 170 bp, Artificial sequence
  Ctcf.809_Kdm5c.1879
  crRNA array
cgatttcttggctttatatatcttgtggaaaggacgaaacaccgtaatttctactaagtgtagataagcgctatcatgatcccaataatttctactaagtgtagatgagcacggcacccgccccccttttttaagcttggcgtggatccgatatcaactagatcttgaga

SEQ ID NO: 2638 - DNA, 170 bp, Artificial sequence
  Ctcf.809_Kdm6a.56
  crRNA array
cgatttcttggctttatatatcttgtggaaaggacgaaacaccgtaatttctactaagtgtagataagcgctatcatgatcccaataatttctactaagtgtagattcgctgccgcctctcgcggcttttttaagcttggcgtggatccgatatcaactagatcttgaga

SEQ ID NO: 2639 - DNA, 170 bp, Artificial sequence
  Ctcf.809_Kdm6a.57
  crRNA array
cgatttcttggctttatatatcttgtggaaaggacgaaacaccgtaatttctactaagtgtagataagcgctatcatgatcccaataatttctactaagtgtagatcgctgccgcctctcgcggcattttttaagcttggcgtggatccgatatcaactagatcttgaga

SEQ ID NO: 2640 - DNA, 170 bp, Artificial sequence
  Ctcf.809_Kmt2b.265
  crRNA array
cgatttcttggctttatatatcttgtggaaaggacgaaacaccgtaatttctactaagtgtagataagcgctatcatgatcccaataatttctactaagtgtagatccccaagtgaagcccacctgttttttaagcttggcgtggatccgatatcaactagatcttgaga

SEQ ID NO: 2641 - DNA, 170 bp, Artificial sequence
  Ctcf.809_Kmt2b.298
  crRNA array
cgatttcttggctttatatatcttgtggaaaggacgaaacaccgtaatttctactaagtgtagataagcgctatcatgatcccaataatttctactaagtgtagattccggcagggaccggctggcttttttaagcttggcgtggatccgatatcaactagatcttgaga

SEQ ID NO: 2642 - DNA, 170 bp, Artificial sequence
  Ctcf.809_Kmt2c.1962
  crRNA array
cgatttcttggctttatatatcttgtggaaaggacgaaacaccgtaatttctactaagtgtagataagcgctatcatgatcccaataatttctactaagtgtagatgtgacgatctgtgccacaagttttttaagcttggcgtggatccgatatcaactagatcttgaga

SEQ ID NO: 2643 - DNA, 170 bp, Artificial sequence
  Ctcf.809_Kmt2c.2236
  crRNA array
cgatttcttggctttatatatcttgtggaaaggacgaaacaccgtaatttctactaagtgtagataagcgctatcatgatcccaataatttctactaagtgtagatactcgacctccacctccctattttttaagcttggcgtggatccgatatcaactagatcttgaga

SEQ ID NO: 2644 - DNA, 170 bp, Artificial sequence
  Ctcf.809_Kmt2d.316
  crRNA array
cgatttcttggctttatatatcttgtggaaaggacgaaacaccgtaatttctactaagtgtagataagcgctatcatgatcccaataatttctactaagtgtagatactccaggccacccaggtggttttttaagcttggcgtggatccgatatcaactagatcttgaga

SEQ ID NO: 2645 - DNA, 170 bp, Artificial sequence
  Ctcf.809_Kmt2d.416
  crRNA array
cgatttcttggctttatatatcttgtggaaaggacgaaacaccgtaatttctactaagtgtagataagcgctatcatgatcccaataatttctactaagtgtagattaaacccccgggggaagggtttttttaagcttggcgtggatccgatatcaactagatcttgaga

SEQ ID NO: 2646 - DNA, 170 bp, Artificial sequence
  Ctcf.809_Map2k4.119
  crRNA array
cgatttcttggctttatatatcttgtggaaaggacgaaacaccgtaatttctactaagtgtagataagcgctatcatgatcccaataatttctactaagtgtagattgctgtgtgggcggccacatttttttaagcttggcgtggatccgatatcaactagatcttgaga

SEQ ID NO: 2647 - DNA, 170 bp, Artificial sequence
  Ctcf.809_Map2k4.1261
  crRNA array
cgatttcttggctttatatatcttgtggaaaggacgaaacaccgtaatttctactaagtgtagataagcgctatcatgatcccaataatttctactaagtgtagatgatgtagtaatgcggagtagttttttaagcttggcgtggatccgatatcaactagatcttgaga

SEQ ID NO: 2648 - DNA, 170 bp, Artificial sequence
  Ctcf.809_Map3k1.235
  crRNA array
cgatttcttggctttatatatcttgtggaaaggacgaaacaccgtaatttctactaagtgtagataagcgctatcatgatcccaataatttctactaagtgtagataaaacgctactgatcgatcgttttttaagcttggcgtggatccgatatcaactagatcttgaga

SEQ ID NO: 2649 - DNA, 170 bp, Artificial sequence
  Ctcf.809_Map3k1.3838
  crRNA array
cgatttcttggctttatatatcttgtggaaaggacgaaacaccgtaatttctactaagtgtagataagcgctatcatgatcccaataatttctactaagtgtagatccaacaacagggccccactattttttaagcttggcgtggatccgatatcaactagatcttgaga

SEQ ID NO: 2650 - DNA, 170 bp, Artificial sequence
  Ctcf.809_Mga.1655
  crRNA array
cgatttcttggctttatatatcttgtggaaaggacgaaacaccgtaatttctactaagtgtagataagcgctatcatgatcccaataatttctactaagtgtagatcgagaagtggagagcatattttttttaagcttggcgtggatccgatatcaactagatcttgaga

SEQ ID NO: 2651 - DNA, 170 bp, Artificial sequence
  Ctcf.809_Mga.93
  crRNA array
cgatttcttggctttatatatcttgtggaaaggacgaaacaccgtaatttctactaagtgtagataagcgctatcatgatcccaataatttctactaagtgtagatgagaaggctccccataatgtttttttaagcttggcgtggatccgatatcaactagatcttgaga

SEQ ID NO: 2652 - DNA, 170 bp, Artificial sequence
  Ctcf.809_Nf1.746
  crRNA array
cgatttcttggctttatatatcttgtggaaaggacgaaacaccgtaatttctactaagtgtagataagcgctatcatgatcccaataatttctactaagtgtagattaagcataatgatgatgccattttttaagcttggcgtggatccgatatcaactagatcttgaga

SEQ ID NO: 2653 - DNA, 170 bp, Artificial sequence
  Ctcf.809_Nf1.97
  crRNA array
cgatttcttggctttatatatcttgtggaaaggacgaaacaccgtaatttctactaagtgtagataagcgctatcatgatcccaataatttctactaagtgtagatagcccgctacatgctgatgcttttttaagcttggcgtggatccgatatcaactagatcttgaga

SEQ ID NO: 2654 - DNA, 170 bp, Artificial sequence
  Ctcf.809_Nf2.356
  crRNA array
cgatttcttggctttatatatcttgtggaaaggacgaaacaccgtaatttctactaagtgtagataagcgctatcatgatcccaataatttctactaagtgtagatcggagtcatctgatagagatttttttaagcttggcgtggatccgatatcaactagatcttgaga

SEQ ID NO: 2655 - DNA, 170 bp, Artificial sequence
  Ctcf.809_Nf2.768
  crRNA array
cgatttcttggctttatatatcttgtggaaaggacgaaacaccgtaatttctactaagtgtagataagcgctatcatgatcccaataatttctactaagtgtagatccgaagccccagtgtccggcttttttaagcttggcgtggatccgatatcaactagatcttgaga

SEQ ID NO: 2656 - DNA, 170 bp, Artificial sequence
  Ctcf.809_Notch1.1849
  crRNA array
cgatttcttggctttatatatcttgtggaaaggacgaaacaccgtaatttctactaagtgtagataagcgctatcatgatcccaataatttctactaagtgtagatctggcgggtgggcggcgctgttttttaagcttggcgtggatccgatatcaactagatcttgaga

SEQ ID NO: 2657 - DNA, 170 bp, Artificial sequence
  Ctcf.809_Notch1.649
  crRNA array
cgatttcttggctttatatatcttgtggaaaggacgaaacaccgtaatttctactaagtgtagataagcgctatcatgatcccaataatttctactaagtgtagattgggccaacgatgccaggacttttttaagcttggcgtggatccgatatcaactagatcttgaga

SEQ ID NO: 2658 - DNA, 170 bp, Artificial sequence
  Ctcf.809_Nsd1.70
  crRNA array
cgatttcttggctttatatatcttgtggaaaggacgaaacaccgtaatttctactaagtgtagataagcgctatcatgatcccaataatttctactaagtgtagatactggtgtggacgatgcagattttttaagcttggcgtggatccgatatcaactagatcttgaga

SEQ ID NO: 2659 - DNA, 170 bp, Artificial sequence
  Ctcf.809_Nsd1.90
  crRNA array
cgatttcttggctttatatatcttgtggaaaggacgaaacaccgtaatttctactaagtgtagataagcgctatcatgatcccaataatttctactaagtgtagataggagctaacggcaagaatgttttttaagcttggcgtggatccgatatcaactagatcttgaga

SEQ ID NO: 2660 - DNA, 170 bp, Artificial sequence
  Ctcf.809_Pbrm1.1236
  crRNA array
cgatttcttggctttatatatcttgtggaaaggacgaaacaccgtaatttctactaagtgtagataagcgctatcatgatcccaataatttctactaagtgtagatgccgataaaaccaacagccgttttttaagcttggcgtggatccgatatcaactagatcttgaga

SEQ ID NO: 2661 - DNA, 170 bp, Artificial sequence
  Ctcf.809_Pbrm1.969
  crRNA array
cgatttcttggctttatatatcttgtggaaaggacgaaacaccgtaatttctactaagtgtagataagcgctatcatgatcccaataatttctactaagtgtagatgagccctaatgaacagctcattttttaagcttggcgtggatccgatatcaactagatcttgaga

SEQ ID NO: 2662 - DNA, 170 bp, Artificial sequence
  Ctcf.809_Pik3r1.76
  crRNA array
cgatttcttggctttatatatcttgtggaaaggacgaaacaccgtaatttctactaagtgtagataagcgctatcatgatcccaataatttctactaagtgtagataaaacctatacggcccgcacttttttaagcttggcgtggatccgatatcaactagatcttgaga

SEQ ID NO: 2663 - DNA, 170 bp, Artificial sequence
  Ctcf.809_Pik3r1.77
  crRNA array
cgatttcttggctttatatatcttgtggaaaggacgaaacaccgtaatttctactaagtgtagataagcgctatcatgatcccaataatttctactaagtgtagataaacctatacggcccgcactttttttaagcttggcgtggatccgatatcaactagatcttgaga

SEQ ID NO: 2664 - DNA, 170 bp, Artificial sequence
  Ctcf.809_Pten.240
  crRNA array
cgatttcttggctttatatatcttgtggaaaggacgaaacaccgtaatttctactaagtgtagataagcgctatcatgatcccaataatttctactaagtgtagattgcatacgctatagctgcttttttttaagcttggcgtggatccgatatcaactagatcttgaga

SEQ ID NO: 2665 - DNA, 170 bp, Artificial sequence
  Ctcf.809_Pten.265
  crRNA array
cgatttcttggctttatatatcttgtggaaaggacgaaacaccgtaatttctactaagtgtagataagcgctatcatgatcccaataatttctactaagtgtagataagcgtggtgcgtgacgcacttttttaagcttggcgtggatccgatatcaactagatcttgaga

SEQ ID NO: 2666 - DNA, 170 bp, Artificial sequence
  Ctcf.809_Rasa1.1478
  crRNA array
cgatttcttggctttatatatcttgtggaaaggacgaaacaccgtaatttctactaagtgtagataagcgctatcatgatcccaataatttctactaagtgtagatcgataatggtctatgatgtcttttttaagcttggcgtggatccgatatcaactagatcttgaga

SEQ ID NO: 2667 - DNA, 170 bp, Artificial sequence
  Ctcf.809_Rasa1.223
  crRNA array
cgatttcttggctttatatatcttgtggaaaggacgaaacaccgtaatttctactaagtgtagataagcgctatcatgatcccaataatttctactaagtgtagattccatggagtatcgtgctcgttttttaagcttggcgtggatccgatatcaactagatcttgaga

SEQ ID NO: 2668 - DNA, 170 bp, Artificial sequence
  Ctcf.809_Rb1.211
  crRNA array
cgatttcttggctttatatatcttgtggaaaggacgaaacaccgtaatttctactaagtgtagataagcgctatcatgatcccaataatttctactaagtgtagattctgacatgatcgggtacctttttttaagcttggcgtggatccgatatcaactagatcttgaga

SEQ ID NO: 2669 - DNA, 170 bp, Artificial sequence
  Ctcf.809_Rb1.394
  crRNA array
cgatttcttggctttatatatcttgtggaaaggacgaaacaccgtaatttctactaagtgtagataagcgctatcatgatcccaataatttctactaagtgtagatagaaatctcgaagcaggatcttttttaagcttggcgtggatccgatatcaactagatcttgaga

SEQ ID NO: 2670 - DNA, 170 bp, Artificial sequence
  Ctcf.809_Rbm10.5
  crRNA array
cgatttcttggctttatatatcttgtggaaaggacgaaacaccgtaatttctactaagtgtagataagcgctatcatgatcccaataatttctactaagtgtagatacgaaacctgaacccacacattttttaagcttggcgtggatccgatatcaactagatcttgaga

SEQ ID NO: 2671 - DNA, 170 bp, Artificial sequence
  Ctcf.809_Rbm10.6
  crRNA array
cgatttcttggctttatatatcttgtggaaaggacgaaacaccgtaatttctactaagtgtagataagcgctatcatgatcccaataatttctactaagtgtagatcgaaacctgaacccacacagttttttaagcttggcgtggatccgatatcaactagatcttgaga

SEQ ID NO: 2672 - DNA, 170 bp, Artificial sequence
  Ctcf.809_Rnf43.1920
  crRNA array
cgatttcttggctttatatatcttgtggaaaggacgaaacaccgtaatttctactaagtgtagataagcgctatcatgatcccaataatttctactaagtgtagatatccccgtgccgtggactccttttttaagcttggcgtggatccgatatcaactagatcttgaga

SEQ ID NO: 2673 - DNA, 170 bp, Artificial sequence
  Ctcf.809_Rnf43.39
  crRNA array
cgatttcttggctttatatatcttgtggaaaggacgaaacaccgtaatttctactaagtgtagataagcgctatcatgatcccaataatttctactaagtgtagatcaaggggatcactctgataattttttaagcttggcgtggatccgatatcaactagatcttgaga

SEQ ID NO: 2674 - DNA, 170 bp, Artificial sequence
  Ctcf.809_Runx1.204
  crRNA array
cgatttcttggctttatatatcttgtggaaaggacgaaacaccgtaatttctactaagtgtagataagcgctatcatgatcccaataatttctactaagtgtagattaaataagtccagccgttttttttttaagcttggcgtggatccgatatcaactagatcttgaga

SEQ ID NO: 2675 - DNA, 170 bp, Artificial sequence
  Ctcf.809_Runx1.81
  crRNA array
cgatttcttggctttatatatcttgtggaaaggacgaaacaccgtaatttctactaagtgtagataagcgctatcatgatcccaataatttctactaagtgtagataggacgcgtatgggaattttttttttaagcttggcgtggatccgatatcaactagatcttgaga

SEQ ID NO: 2676 - DNA, 170 bp, Artificial sequence
  Ctcf.809_Setd2.143
  crRNA array
cgatttcttggctttatatatcttgtggaaaggacgaaacaccgtaatttctactaagtgtagataagcgctatcatgatcccaataatttctactaagtgtagatgcacaaccacaacagactggttttttaagcttggcgtggatccgatatcaactagatcttgaga

SEQ ID NO: 2677 - DNA, 170 bp, Artificial sequence
  Ctcf.809_Setd2.508
  crRNA array
cgatttcttggctttatatatcttgtggaaaggacgaaacaccgtaatttctactaagtgtagataagcgctatcatgatcccaataatttctactaagtgtagattacgatcccgagcacccgacttttttaagcttggcgtggatccgatatcaactagatcttgaga

SEQ ID NO: 2678 - DNA, 170 bp, Artificial sequence
  Ctcf.809_Smad4.3038
  crRNA array
cgatttcttggctttatatatcttgtggaaaggacgaaacaccgtaatttctactaagtgtagataagcgctatcatgatcccaataatttctactaagtgtagatatctgcggcagtgtcaccggttttttaagcttggcgtggatccgatatcaactagatcttgaga

SEQ ID NO: 2679 - DNA, 170 bp, Artificial sequence
  Ctcf.809_Smad4.39
  crRNA array
cgatttcttggctttatatatcttgtggaaaggacgaaacaccgtaatttctactaagtgtagataagcgctatcatgatcccaataatttctactaagtgtagatagtcaaacgcatactgacaattttttaagcttggcgtggatccgatatcaactagatcttgaga

SEQ ID NO: 2680 - DNA, 170 bp, Artificial sequence
  Ctcf.809_Stag2.1409
  crRNA array
cgatttcttggctttatatatcttgtggaaaggacgaaacaccgtaatttctactaagtgtagataagcgctatcatgatcccaataatttctactaagtgtagatgctaataactgcggaagggcttttttaagcttggcgtggatccgatatcaactagatcttgaga

SEQ ID NO: 2681 - DNA, 170 bp, Artificial sequence
  Ctcf.809_Stag2.4401
  crRNA array
cgatttcttggctttatatatcttgtggaaaggacgaaacaccgtaatttctactaagtgtagataagcgctatcatgatcccaataatttctactaagtgtagattaatcgtccagtggtgtatattttttaagcttggcgtggatccgatatcaactagatcttgaga

SEQ ID NO: 2682 - DNA, 170 bp, Artificial sequence
  Ctcf.809_Tbl1xr1.1
  crRNA array
cgatttcttggctttatatatcttgtggaaaggacgaaacaccgtaatttctactaagtgtagataagcgctatcatgatcccaataatttctactaagtgtagatggatgcgcatactggtgaagttttttaagcttggcgtggatccgatatcaactagatcttgaga

SEQ ID NO: 2683 - DNA, 170 bp, Artificial sequence
  Ctcf.809_Tbl1xr1.83
  crRNA array
cgatttcttggctttatatatcttgtggaaaggacgaaacaccgtaatttctactaagtgtagataagcgctatcatgatcccaataatttctactaagtgtagatatggtcgacccatcgagtctttttttaagcttggcgtggatccgatatcaactagatcttgaga

SEQ ID NO: 2684 - DNA, 170 bp, Artificial sequence
  Ctcf.809_Tgfbr2.290
  crRNA array
cgatttcttggctttatatatcttgtggaaaggacgaaacaccgtaatttctactaagtgtagataagcgctatcatgatcccaataatttctactaagtgtagatcctctcggcgcccgggtaaattttttaagcttggcgtggatccgatatcaactagatcttgaga

SEQ ID NO: 2685 - DNA, 170 bp, Artificial sequence
  Ctcf.809_Tgfbr2.292
  crRNA array
cgatttcttggctttatatatcttgtggaaaggacgaaacaccgtaatttctactaagtgtagataagcgctatcatgatcccaataatttctactaagtgtagatcccgggcgccgagagggaaattttttaagcttggcgtggatccgatatcaactagatcttgaga

SEQ ID NO: 2686 - DNA, 170 bp, Artificial sequence
  Ctcf.809_Trp53.4
  crRNA array
cgatttcttggctttatatatcttgtggaaaggacgaaacaccgtaatttctactaagtgtagataagcgctatcatgatcccaataatttctactaagtgtagatccctgaactgcccccagggattttttaagcttggcgtggatccgatatcaactagatcttgaga

SEQ ID NO: 2687 - DNA, 170 bp, Artificial sequence
  Ctcf.809_Trp53.528
  crRNA array
cgatttcttggctttatatatcttgtggaaaggacgaaacaccgtaatttctactaagtgtagataagcgctatcatgatcccaataatttctactaagtgtagatgctgggccagcagagacctgttttttaagcttggcgtggatccgatatcaactagatcttgaga

SEQ ID NO: 2688 - DNA, 170 bp, Artificial sequence
  Ctcf.809_Vhl.1
  crRNA array
cgatttcttggctttatatatcttgtggaaaggacgaaacaccgtaatttctactaagtgtagataagcgctatcatgatcccaataatttctactaagtgtagatagggctcccggcggccatttttttttaagcttggcgtggatccgatatcaactagatcttgaga

SEQ ID NO: 2689 - DNA, 170 bp, Artificial sequence
  Ctcf.809_Vhl.151
  crRNA array
cgatttcttggctttatatatcttgtggaaaggacgaaacaccgtaatttctactaagtgtagataagcgctatcatgatcccaataatttctactaagtgtagattagagcactcacccgagggattttttaagcttggcgtggatccgatatcaactagatcttgaga

SEQ ID NO: 2690 - DNA, 170 bp, Artificial sequence
  Ctcf.809_Zc3h13.1387
  crRNA array
cgatttcttggctttatatatcttgtggaaaggacgaaacaccgtaatttctactaagtgtagataagcgctatcatgatcccaataatttctactaagtgtagatgtgacgccggtcatgtgactttttttaagcttggcgtggatccgatatcaactagatcttgaga

SEQ ID NO: 2691 - DNA, 170 bp, Artificial sequence
  Ctcf.809_Zc3h13.1777
  crRNA array
cgatttcttggctttatatatcttgtggaaaggacgaaacaccgtaatttctactaagtgtagataagcgctatcatgatcccaataatttctactaagtgtagatgatgctgccagtgtagcggcttttttaagcttggcgtggatccgatatcaactagatcttgaga

SEQ ID NO: 2692 - DNA, 170 bp, Artificial sequence
  Elf3.826_Acvr2a.155
  crRNA array
cgatttcttggctttatatatcttgtggaaaggacgaaacaccgtaatttctactaagtgtagattccgagacatcctaatccactaatttctactaagtgtagatggacctggctaatcaagtatttttttaagcttggcgtggatccgatatcaactagatcttgaga

SEQ ID NO: 2693 - DNA, 170 bp, Artificial sequence
  Elf3.826_Acvr2a.70
  crRNA array
cgatttcttggctttatatatcttgtggaaaggacgaaacaccgtaatttctactaagtgtagattccgagacatcctaatccactaatttctactaagtgtagatcccgaggcgccggagaagccttttttaagcttggcgtggatccgatatcaactagatcttgaga

SEQ ID NO: 2694 - DNA, 170 bp, Artificial sequence
  Elf3.826_Apc.21
  crRNA array
cgatttcttggctttatatatcttgtggaaaggacgaaacaccgtaatttctactaagtgtagattccgagacatcctaatccactaatttctactaagtgtagatgtgatccacacgtgtagctgttttttaagcttggcgtggatccgatatcaactagatcttgaga

SEQ ID NO: 2695 - DNA, 170 bp, Artificial sequence
  Elf3.826_Apc.867
  crRNA array
cgatttcttggctttatatatcttgtggaaaggacgaaacaccgtaatttctactaagtgtagattccgagacatcctaatccactaatttctactaagtgtagatcagtcccaggcggcggaagcttttttaagcttggcgtggatccgatatcaactagatcttgaga

SEQ ID NO: 2696 - DNA, 170 bp, Artificial sequence
  Elf3.826_Arid1a.2
  crRNA array
cgatttcttggctttatatatcttgtggaaaggacgaaacaccgtaatttctactaagtgtagattccgagacatcctaatccactaatttctactaagtgtagatcccgcgcccccgtcctggggttttttaagcttggcgtggatccgatatcaactagatcttgaga

SEQ ID NO: 2697 - DNA, 170 bp, Artificial sequence
  Elf3.826_Arid1a.5
  crRNA array
cgatttcttggctttatatatcttgtggaaaggacgaaacaccgtaatttctactaagtgtagattccgagacatcctaatccactaatttctactaagtgtagatcccgcgctcggccgctgccgttttttaagcttggcgtggatccgatatcaactagatcttgaga

SEQ ID NO: 2698 - DNA, 170 bp, Artificial sequence
  Elf3.826_Arid2.166
  crRNA array
cgatttcttggctttatatatcttgtggaaaggacgaaacaccgtaatttctactaagtgtagattccgagacatcctaatccactaatttctactaagtgtagataaccgcgatctgggttttttttttttaagcttggcgtggatccgatatcaactagatcttgaga

SEQ ID NO: 2699 - DNA, 170 bp, Artificial sequence
  Elf3.826_Arid2.172
  crRNA array
cgatttcttggctttatatatcttgtggaaaggacgaaacaccgtaatttctactaagtgtagattccgagacatcctaatccactaatttctactaagtgtagatctggacgagctgcggcagttttttttaagcttggcgtggatccgatatcaactagatcttgaga

SEQ ID NO: 2700 - DNA, 170 bp, Artificial sequence
  Elf3.826_Atm.120
  crRNA array
cgatttcttggctttatatatcttgtggaaaggacgaaacaccgtaatttctactaagtgtagattccgagacatcctaatccactaatttctactaagtgtagatgacaggtagtcggcagctaattttttaagcttggcgtggatccgatatcaactagatcttgaga

SEQ ID NO: 2701 - DNA, 170 bp, Artificial sequence
  Elf3.826_Atm.997
  crRNA array
cgatttcttggctttatatatcttgtggaaaggacgaaacaccgtaatttctactaagtgtagattccgagacatcctaatccactaatttctactaagtgtagatgagaaagtctccgaatcgttttttttaagcttggcgtggatccgatatcaactagatcttgaga

SEQ ID NO: 2702 - DNA, 170 bp, Artificial sequence
  Elf3.826_Atrx.249
  crRNA array
cgatttcttggctttatatatcttgtggaaaggacgaaacaccgtaatttctactaagtgtagattccgagacatcctaatccactaatttctactaagtgtagattagccagtcgctcatatctcttttttaagcttggcgtggatccgatatcaactagatcttgaga

SEQ ID NO: 2703 - DNA, 170 bp, Artificial sequence
  Elf3.826_Atrx.251
  crRNA array
cgatttcttggctttatatatcttgtggaaaggacgaaacaccgtaatttctactaagtgtagattccgagacatcctaatccactaatttctactaagtgtagatgccagtcgctcatatctctgttttttaagcttggcgtggatccgatatcaactagatcttgaga

SEQ ID NO: 2704 - DNA, 170 bp, Artificial sequence
  Elf3.826_Bcor.203
  crRNA array
cgatttcttggctttatatatcttgtggaaaggacgaaacaccgtaatttctactaagtgtagattccgagacatcctaatccactaatttctactaagtgtagatccccggagcggagtccaggcttttttaagcttggcgtggatccgatatcaactagatcttgaga

SEQ ID NO: 2705 - DNA, 170 bp, Artificial sequence
  Elf3.826_Bcor.475
  crRNA array
cgatttcttggctttatatatcttgtggaaaggacgaaacaccgtaatttctactaagtgtagattccgagacatcctaatccactaatttctactaagtgtagattgcaacccctctgtatgggattttttaagcttggcgtggatccgatatcaactagatcttgaga

SEQ ID NO: 2706 - DNA, 170 bp, Artificial sequence
  Elf3.826_Brca1.112
  crRNA array
cgatttcttggctttatatatcttgtggaaaggacgaaacaccgtaatttctactaagtgtagattccgagacatcctaatccactaatttctactaagtgtagatctagacgctctgtggagactttttttaagcttggcgtggatccgatatcaactagatcttgaga

SEQ ID NO: 2707 - DNA, 170 bp, Artificial sequence
  Elf3.826_Brca1.53
  crRNA array
cgatttcttggctttatatatcttgtggaaaggacgaaacaccgtaatttctactaagtgtagattccgagacatcctaatccactaatttctactaagtgtagataatgaggaggcgtcgatcatttttttaagcttggcgtggatccgatatcaactagatcttgaga

SEQ ID NO: 2708 - DNA, 170 bp, Artificial sequence
  Elf3.826_Casp8.45
  crRNA array
cgatttcttggctttatatatcttgtggaaaggacgaaacaccgtaatttctactaagtgtagattccgagacatcctaatccactaatttctactaagtgtagatctaccgagatcctgtgaatgttttttaagcttggcgtggatccgatatcaactagatcttgaga

SEQ ID NO: 2709 - DNA, 170 bp, Artificial sequence
  Elf3.826_Casp8.54
  crRNA array
cgatttcttggctttatatatcttgtggaaaggacgaaacaccgtaatttctactaagtgtagattccgagacatcctaatccactaatttctactaagtgtagatcagtgcagtcgtcgtaagatttttttaagcttggcgtggatccgatatcaactagatcttgaga

SEQ ID NO: 2710 - DNA, 170 bp, Artificial sequence
  Elf3.826_Cbwd1.84
  crRNA array
cgatttcttggctttatatatcttgtggaaaggacgaaacaccgtaatttctactaagtgtagattccgagacatcctaatccactaatttctactaagtgtagatcacagcaggtaacatgccgcttttttaagcttggcgtggatccgatatcaactagatcttgaga

SEQ ID NO: 2711 - DNA, 170 bp, Artificial sequence
  Elf3.826_Cbwd1.85
  crRNA array
cgatttcttggctttatatatcttgtggaaaggacgaaacaccgtaatttctactaagtgtagattccgagacatcctaatccactaatttctactaagtgtagatacagcaggtaacatgccgccttttttaagcttggcgtggatccgatatcaactagatcttgaga

SEQ ID NO: 2712 - DNA, 170 bp, Artificial sequence
  Elf3.826_Cdh1.387
  crRNA array
cgatttcttggctttatatatcttgtggaaaggacgaaacaccgtaatttctactaagtgtagattccgagacatcctaatccactaatttctactaagtgtagatctcggcgtctgccgggtccgttttttaagcttggcgtggatccgatatcaactagatcttgaga

SEQ ID NO: 2713 - DNA, 170 bp, Artificial sequence
  Elf3.826_Cdh1.58
  crRNA array
cgatttcttggctttatatatcttgtggaaaggacgaaacaccgtaatttctactaagtgtagattccgagacatcctaatccactaatttctactaagtgtagatctcgtccgcgcccgggactcttttttaagcttggcgtggatccgatatcaactagatcttgaga

SEQ ID NO: 2714 - DNA, 170 bp, Artificial sequence
  Elf3.826_Cdkn2a.647
  crRNA array
cgatttcttggctttatatatcttgtggaaaggacgaaacaccgtaatttctactaagtgtagattccgagacatcctaatccactaatttctactaagtgtagatgcaatcacgggagggagcagttttttaagcttggcgtggatccgatatcaactagatcttgaga

SEQ ID NO: 2715 - DNA, 170 bp, Artificial sequence
  Elf3.826_Cdkn2a.648
  crRNA array
cgatttcttggctttatatatcttgtggaaaggacgaaacaccgtaatttctactaagtgtagattccgagacatcctaatccactaatttctactaagtgtagatcaatcacgggagggagcagattttttaagcttggcgtggatccgatatcaactagatcttgaga

SEQ ID NO: 2716 - DNA, 170 bp, Artificial sequence
  Elf3.826_Cic.162
  crRNA array
cgatttcttggctttatatatcttgtggaaaggacgaaacaccgtaatttctactaagtgtagattccgagacatcctaatccactaatttctactaagtgtagatcgcaggcgcgcccggcggagttttttaagcttggcgtggatccgatatcaactagatcttgaga

SEQ ID NO: 2717 - DNA, 170 bp, Artificial sequence
  Elf3.826_Cic.164
  crRNA array
cgatttcttggctttatatatcttgtggaaaggacgaaacaccgtaatttctactaagtgtagattccgagacatcctaatccactaatttctactaagtgtagatcgggccctgggccggcggctttttttaagcttggcgtggatccgatatcaactagatcttgaga

SEQ ID NO: 2718 - DNA, 170 bp, Artificial sequence
  Elf3.826_Ctcf.229
  crRNA array
cgatttcttggctttatatatcttgtggaaaggacgaaacaccgtaatttctactaagtgtagattccgagacatcctaatccactaatttctactaagtgtagatggctggtggctgatagtctgttttttaagcttggcgtggatccgatatcaactagatcttgaga

SEQ ID NO: 2719 - DNA, 170 bp, Artificial sequence
  Elf3.826_Ctcf.809
  crRNA array
cgatttcttggctttatatatcttgtggaaaggacgaaacaccgtaatttctactaagtgtagattccgagacatcctaatccactaatttctactaagtgtagataagcgctatcatgatcccaattttttaagcttggcgtggatccgatatcaactagatcttgaga

SEQ ID NO: 2720 - DNA, 170 bp, Artificial sequence
  Elf3.826_Ep300.310
  crRNA array
cgatttcttggctttatatatcttgtggaaaggacgaaacaccgtaatttctactaagtgtagattccgagacatcctaatccactaatttctactaagtgtagatatggtacgacagtgaggaagttttttaagcttggcgtggatccgatatcaactagatcttgaga

SEQ ID NO: 2721 - DNA, 170 bp, Artificial sequence
  Elf3.826_Ep300.587
  crRNA array
cgatttcttggctttatatatcttgtggaaaggacgaaacaccgtaatttctactaagtgtagattccgagacatcctaatccactaatttctactaagtgtagatcgccccggggcccccaaccattttttaagcttggcgtggatccgatatcaactagatcttgaga

SEQ ID NO: 2722 - DNA, 170 bp, Artificial sequence
  Elf3.826_Epha2.126
  crRNA array
cgatttcttggctttatatatcttgtggaaaggacgaaacaccgtaatttctactaagtgtagattccgagacatcctaatccactaatttctactaagtgtagatcctgtgccgccgcggccgccttttttaagcttggcgtggatccgatatcaactagatcttgaga

SEQ ID NO: 2723 - DNA, 170 bp, Artificial sequence
  Elf3.826_Epha2.5
  crRNA array
cgatttcttggctttatatatcttgtggaaaggacgaaacaccgtaatttctactaagtgtagattccgagacatcctaatccactaatttctactaagtgtagatcatgagctggcgccacccggttttttaagcttggcgtggatccgatatcaactagatcttgaga

SEQ ID NO: 2724 - DNA, 170 bp, Artificial sequence
  Elf3.826_Fat1.105
  crRNA array
cgatttcttggctttatatatcttgtggaaaggacgaaacaccgtaatttctactaagtgtagattccgagacatcctaatccactaatttctactaagtgtagataactcgaggtgacaacaagtttttttaagcttggcgtggatccgatatcaactagatcttgaga

SEQ ID NO: 2725 - DNA, 170 bp, Artificial sequence
  Elf3.826_Fat1.122
  crRNA array
cgatttcttggctttatatatcttgtggaaaggacgaaacaccgtaatttctactaagtgtagattccgagacatcctaatccactaatttctactaagtgtagatccatcgacatggaaacgggattttttaagcttggcgtggatccgatatcaactagatcttgaga

SEQ ID NO: 2726 - DNA, 170 bp, Artificial sequence
  Elf3.826_Fbxw7.21
  crRNA array
cgatttcttggctttatatatcttgtggaaaggacgaaacaccgtaatttctactaagtgtagattccgagacatcctaatccactaatttctactaagtgtagattaatgtgccgtagaaacccattttttaagcttggcgtggatccgatatcaactagatcttgaga

SEQ ID NO: 2727 - DNA, 170 bp, Artificial sequence
  Elf3.826_Fbxw7.23
  crRNA array
cgatttcttggctttatatatcttgtggaaaggacgaaacaccgtaatttctactaagtgtagattccgagacatcctaatccactaatttctactaagtgtagatatgtgccgtagaaacccatattttttaagcttggcgtggatccgatatcaactagatcttgaga

SEQ ID NO: 2728 - DNA, 170 bp, Artificial sequence
  Elf3.826_Gata3.34
  crRNA array
cgatttcttggctttatatatcttgtggaaaggacgaaacaccgtaatttctactaagtgtagattccgagacatcctaatccactaatttctactaagtgtagatctaaactatcccgcaaagatttttttaagcttggcgtggatccgatatcaactagatcttgaga

SEQ ID NO: 2729 - DNA, 170 bp, Artificial sequence
  Elf3.826_Gata3.47
  crRNA array
cgatttcttggctttatatatcttgtggaaaggacgaaacaccgtaatttctactaagtgtagattccgagacatcctaatccactaatttctactaagtgtagatcgtagtaggacgggacgtggttttttaagcttggcgtggatccgatatcaactagatcttgaga

SEQ ID NO: 2730 - DNA, 170 bp, Artificial sequence
  Elf3.826_H2-Q2.1
  crRNA array
cgatttcttggctttatatatcttgtggaaaggacgaaacaccgtaatttctactaagtgtagattccgagacatcctaatccactaatttctactaagtgtagatagggcggccaccaacagcagttttttaagcttggcgtggatccgatatcaactagatcttgaga

SEQ ID NO: 2731 - DNA, 170 bp, Artificial sequence
  Elf3.826_H2-Q2.2
  crRNA array
cgatttcttggctttatatatcttgtggaaaggacgaaacaccgtaatttctactaagtgtagattccgagacatcctaatccactaatttctactaagtgtagattaacctgcgcccgctgctgattttttaagcttggcgtggatccgatatcaactagatcttgaga

SEQ ID NO: 2732 - DNA, 170 bp, Artificial sequence
  Elf3.826_Kdm5c.1878
  crRNA array
cgatttcttggctttatatatcttgtggaaaggacgaaacaccgtaatttctactaagtgtagattccgagacatcctaatccactaatttctactaagtgtagatagagcacggcacccgcccccttttttaagcttggcgtggatccgatatcaactagatcttgaga

SEQ ID NO: 2733 - DNA, 170 bp, Artificial sequence
  Elf3.826_Kdm5c.1879
  crRNA array
cgatttcttggctttatatatcttgtggaaaggacgaaacaccgtaatttctactaagtgtagattccgagacatcctaatccactaatttctactaagtgtagatgagcacggcacccgccccccttttttaagcttggcgtggatccgatatcaactagatcttgaga

SEQ ID NO: 2734 - DNA, 170 bp, Artificial sequence
  Elf3.826_Kdm6a.56
  crRNA array
cgatttcttggctttatatatcttgtggaaaggacgaaacaccgtaatttctactaagtgtagattccgagacatcctaatccactaatttctactaagtgtagattcgctgccgcctctcgcggcttttttaagcttggcgtggatccgatatcaactagatcttgaga

SEQ ID NO: 2735 - DNA, 170 bp, Artificial sequence
  Elf3.826_Kdm6a.57
  crRNA array
cgatttcttggctttatatatcttgtggaaaggacgaaacaccgtaatttctactaagtgtagattccgagacatcctaatccactaatttctactaagtgtagatcgctgccgcctctcgcggcattttttaagcttggcgtggatccgatatcaactagatcttgaga

SEQ ID NO: 2736 - DNA, 170 bp, Artificial sequence
  Elf3.826_Kmt2b.265
  crRNA array
cgatttcttggctttatatatcttgtggaaaggacgaaacaccgtaatttctactaagtgtagattccgagacatcctaatccactaatttctactaagtgtagatccccaagtgaagcccacctgttttttaagcttggcgtggatccgatatcaactagatcttgaga

SEQ ID NO: 2737 - DNA, 170 bp, Artificial sequence
  Elf3.826_Kmt2b.298
  crRNA array
cgatttcttggctttatatatcttgtggaaaggacgaaacaccgtaatttctactaagtgtagattccgagacatcctaatccactaatttctactaagtgtagattccggcagggaccggctggcttttttaagcttggcgtggatccgatatcaactagatcttgaga

SEQ ID NO: 2738 - DNA, 170 bp, Artificial sequence
  Elf3.826_Kmt2c.1962
  crRNA array
cgatttcttggctttatatatcttgtggaaaggacgaaacaccgtaatttctactaagtgtagattccgagacatcctaatccactaatttctactaagtgtagatgtgacgatctgtgccacaagttttttaagcttggcgtggatccgatatcaactagatcttgaga

SEQ ID NO: 2739 - DNA, 170 bp, Artificial sequence
  Elf3.826_Kmt2c.2236
  crRNA array
cgatttcttggctttatatatcttgtggaaaggacgaaacaccgtaatttctactaagtgtagattccgagacatcctaatccactaatttctactaagtgtagatactcgacctccacctccctattttttaagcttggcgtggatccgatatcaactagatcttgaga

SEQ ID NO: 2740 - DNA, 170 bp, Artificial sequence
  Elf3.826_Kmt2d.316
  crRNA array
cgatttcttggctttatatatcttgtggaaaggacgaaacaccgtaatttctactaagtgtagattccgagacatcctaatccactaatttctactaagtgtagatactccaggccacccaggtggttttttaagcttggcgtggatccgatatcaactagatcttgaga

SEQ ID NO: 2741 - DNA, 170 bp, Artificial sequence
  Elf3.826_Kmt2d.416
  crRNA array
cgatttcttggctttatatatcttgtggaaaggacgaaacaccgtaatttctactaagtgtagattccgagacatcctaatccactaatttctactaagtgtagattaaacccccgggggaagggtttttttaagcttggcgtggatccgatatcaactagatcttgaga

SEQ ID NO: 2742 - DNA, 170 bp, Artificial sequence
  Elf3.826_Map2k4.119
  crRNA array
cgatttcttggctttatatatcttgtggaaaggacgaaacaccgtaatttctactaagtgtagattccgagacatcctaatccactaatttctactaagtgtagattgctgtgtgggcggccacatttttttaagcttggcgtggatccgatatcaactagatcttgaga

SEQ ID NO: 2743 - DNA, 170 bp, Artificial sequence
  Elf3.826_Map2k4.1261
  crRNA array
cgatttcttggctttatatatcttgtggaaaggacgaaacaccgtaatttctactaagtgtagattccgagacatcctaatccactaatttctactaagtgtagatgatgtagtaatgcggagtagttttttaagcttggcgtggatccgatatcaactagatcttgaga

SEQ ID NO: 2744 - DNA, 170 bp, Artificial sequence
  Elf3.826_Map3k1.235
  crRNA array
cgatttcttggctttatatatcttgtggaaaggacgaaacaccgtaatttctactaagtgtagattccgagacatcctaatccactaatttctactaagtgtagataaaacgctactgatcgatcgttttttaagcttggcgtggatccgatatcaactagatcttgaga

SEQ ID NO: 2745 - DNA, 170 bp, Artificial sequence
  Elf3.826_Map3k1.3838
  crRNA array
cgatttcttggctttatatatcttgtggaaaggacgaaacaccgtaatttctactaagtgtagattccgagacatcctaatccactaatttctactaagtgtagatccaacaacagggccccactattttttaagcttggcgtggatccgatatcaactagatcttgaga

SEQ ID NO: 2746 - DNA, 170 bp, Artificial sequence
  Elf3.826_Mga.1655
  crRNA array
cgatttcttggctttatatatcttgtggaaaggacgaaacaccgtaatttctactaagtgtagattccgagacatcctaatccactaatttctactaagtgtagatcgagaagtggagagcatattttttttaagcttggcgtggatccgatatcaactagatcttgaga

SEQ ID NO: 2747 - DNA, 170 bp, Artificial sequence
  Elf3.826_Mga.93
  crRNA array
cgatttcttggctttatatatcttgtggaaaggacgaaacaccgtaatttctactaagtgtagattccgagacatcctaatccactaatttctactaagtgtagatgagaaggctccccataatgtttttttaagcttggcgtggatccgatatcaactagatcttgaga

SEQ ID NO: 2748 - DNA, 170 bp, Artificial sequence
  Elf3.826_Nf1.746
  crRNA array
cgatttcttggctttatatatcttgtggaaaggacgaaacaccgtaatttctactaagtgtagattccgagacatcctaatccactaatttctactaagtgtagattaagcataatgatgatgccattttttaagcttggcgtggatccgatatcaactagatcttgaga

SEQ ID NO: 2749 - DNA, 170 bp, Artificial sequence
  Elf3.826_Nf1.97
  crRNA array
cgatttcttggctttatatatcttgtggaaaggacgaaacaccgtaatttctactaagtgtagattccgagacatcctaatccactaatttctactaagtgtagatagcccgctacatgctgatgcttttttaagcttggcgtggatccgatatcaactagatcttgaga

SEQ ID NO: 2750 - DNA, 170 bp, Artificial sequence
  Elf3.826_Nf2.356
  crRNA array
cgatttcttggctttatatatcttgtggaaaggacgaaacaccgtaatttctactaagtgtagattccgagacatcctaatccactaatttctactaagtgtagatcggagtcatctgatagagatttttttaagcttggcgtggatccgatatcaactagatcttgaga

SEQ ID NO: 2751 - DNA, 170 bp, Artificial sequence
  Elf3.826_Nf2.768
  crRNA array
cgatttcttggctttatatatcttgtggaaaggacgaaacaccgtaatttctactaagtgtagattccgagacatcctaatccactaatttctactaagtgtagatccgaagccccagtgtccggcttttttaagcttggcgtggatccgatatcaactagatcttgaga

SEQ ID NO: 2752 - DNA, 170 bp, Artificial sequence
  Elf3.826_Notch1.1849
  crRNA array
cgatttcttggctttatatatcttgtggaaaggacgaaacaccgtaatttctactaagtgtagattccgagacatcctaatccactaatttctactaagtgtagatctggcgggtgggcggcgctgttttttaagcttggcgtggatccgatatcaactagatcttgaga

SEQ ID NO: 2753 - DNA, 170 bp, Artificial sequence
  Elf3.826_Notch1.649
  crRNA array
cgatttcttggctttatatatcttgtggaaaggacgaaacaccgtaatttctactaagtgtagattccgagacatcctaatccactaatttctactaagtgtagattgggccaacgatgccaggacttttttaagcttggcgtggatccgatatcaactagatcttgaga

SEQ ID NO: 2754 - DNA, 170 bp, Artificial sequence
  Elf3.826_Nsd1.70
  crRNA array
cgatttcttggctttatatatcttgtggaaaggacgaaacaccgtaatttctactaagtgtagattccgagacatcctaatccactaatttctactaagtgtagatactggtgtggacgatgcagattttttaagcttggcgtggatccgatatcaactagatcttgaga

SEQ ID NO: 2755 - DNA, 170 bp, Artificial sequence
  Elf3.826_Nsd1.90
  crRNA array
cgatttcttggctttatatatcttgtggaaaggacgaaacaccgtaatttctactaagtgtagattccgagacatcctaatccactaatttctactaagtgtagataggagctaacggcaagaatgttttttaagcttggcgtggatccgatatcaactagatcttgaga

SEQ ID NO: 2756 - DNA, 170 bp, Artificial sequence
  Elf3.826_Pbrm1.1236
  crRNA array
cgatttcttggctttatatatcttgtggaaaggacgaaacaccgtaatttctactaagtgtagattccgagacatcctaatccactaatttctactaagtgtagatgccgataaaaccaacagccgttttttaagcttggcgtggatccgatatcaactagatcttgaga

SEQ ID NO: 2757 - DNA, 170 bp, Artificial sequence
  Elf3.826_Pbrm1.969
  crRNA array
cgatttcttggctttatatatcttgtggaaaggacgaaacaccgtaatttctactaagtgtagattccgagacatcctaatccactaatttctactaagtgtagatgagccctaatgaacagctcattttttaagcttggcgtggatccgatatcaactagatcttgaga

SEQ ID NO: 2758 - DNA, 170 bp, Artificial sequence
  Elf3.826_Pik3r1.76
  crRNA array
cgatttcttggctttatatatcttgtggaaaggacgaaacaccgtaatttctactaagtgtagattccgagacatcctaatccactaatttctactaagtgtagataaaacctatacggcccgcacttttttaagcttggcgtggatccgatatcaactagatcttgaga

SEQ ID NO: 2759 - DNA, 170 bp, Artificial sequence
  Elf3.826_Pik3r1.77
  crRNA array
cgatttcttggctttatatatcttgtggaaaggacgaaacaccgtaatttctactaagtgtagattccgagacatcctaatccactaatttctactaagtgtagataaacctatacggcccgcactttttttaagcttggcgtggatccgatatcaactagatcttgaga

SEQ ID NO: 2760 - DNA, 170 bp, Artificial sequence
  Elf3.826_Pten.240
  crRNA array
cgatttcttggctttatatatcttgtggaaaggacgaaacaccgtaatttctactaagtgtagattccgagacatcctaatccactaatttctactaagtgtagattgcatacgctatagctgcttttttttaagcttggcgtggatccgatatcaactagatcttgaga

SEQ ID NO: 2761 - DNA, 170 bp, Artificial sequence
  Elf3.826_Pten.265
  crRNA array
cgatttcttggctttatatatcttgtggaaaggacgaaacaccgtaatttctactaagtgtagattccgagacatcctaatccactaatttctactaagtgtagataagcgtggtgcgtgacgcacttttttaagcttggcgtggatccgatatcaactagatcttgaga

SEQ ID NO: 2762 - DNA, 170 bp, Artificial sequence
  Elf3.826_Rasa1.1478
  crRNA array
cgatttcttggctttatatatcttgtggaaaggacgaaacaccgtaatttctactaagtgtagattccgagacatcctaatccactaatttctactaagtgtagatcgataatggtctatgatgtcttttttaagcttggcgtggatccgatatcaactagatcttgaga

SEQ ID NO: 2763 - DNA, 170 bp, Artificial sequence
  Elf3.826_Rasa1.223
  crRNA array
cgatttcttggctttatatatcttgtggaaaggacgaaacaccgtaatttctactaagtgtagattccgagacatcctaatccactaatttctactaagtgtagattccatggagtatcgtgctcgttttttaagcttggcgtggatccgatatcaactagatcttgaga

SEQ ID NO: 2764 - DNA, 170 bp, Artificial sequence
  Elf3.826_Rb1.211
  crRNA array
cgatttcttggctttatatatcttgtggaaaggacgaaacaccgtaatttctactaagtgtagattccgagacatcctaatccactaatttctactaagtgtagattctgacatgatcgggtacctttttttaagcttggcgtggatccgatatcaactagatcttgaga

SEQ ID NO: 2765 - DNA, 170 bp, Artificial sequence
  Elf3.826_Rb1.394
  crRNA array
cgatttcttggctttatatatcttgtggaaaggacgaaacaccgtaatttctactaagtgtagattccgagacatcctaatccactaatttctactaagtgtagatagaaatctcgaagcaggatcttttttaagcttggcgtggatccgatatcaactagatcttgaga

SEQ ID NO: 2766 - DNA, 170 bp, Artificial sequence
  Elf3.826_Rbm10.5
  crRNA array
cgatttcttggctttatatatcttgtggaaaggacgaaacaccgtaatttctactaagtgtagattccgagacatcctaatccactaatttctactaagtgtagatacgaaacctgaacccacacattttttaagcttggcgtggatccgatatcaactagatcttgaga

SEQ ID NO: 2767 - DNA, 170 bp, Artificial sequence
  Elf3.826_Rbm10.6
  crRNA array
cgatttcttggctttatatatcttgtggaaaggacgaaacaccgtaatttctactaagtgtagattccgagacatcctaatccactaatttctactaagtgtagatcgaaacctgaacccacacagttttttaagcttggcgtggatccgatatcaactagatcttgaga

SEQ ID NO: 2768 - DNA, 170 bp, Artificial sequence
  Elf3.826_Rnf43.1920
  crRNA array
cgatttcttggctttatatatcttgtggaaaggacgaaacaccgtaatttctactaagtgtagattccgagacatcctaatccactaatttctactaagtgtagatatccccgtgccgtggactccttttttaagcttggcgtggatccgatatcaactagatcttgaga

SEQ ID NO: 2769 - DNA, 170 bp, Artificial sequence
  Elf3.826_Rnf43.39
  crRNA array
cgatttcttggctttatatatcttgtggaaaggacgaaacaccgtaatttctactaagtgtagattccgagacatcctaatccactaatttctactaagtgtagatcaaggggatcactctgataattttttaagcttggcgtggatccgatatcaactagatcttgaga

SEQ ID NO: 2770 - DNA, 170 bp, Artificial sequence
  Elf3.826_Runx1.204
  crRNA array
cgatttcttggctttatatatcttgtggaaaggacgaaacaccgtaatttctactaagtgtagattccgagacatcctaatccactaatttctactaagtgtagattaaataagtccagccgttttttttttaagcttggcgtggatccgatatcaactagatcttgaga

SEQ ID NO: 2771 - DNA, 170 bp, Artificial sequence
  Elf3.826_Runx1.81
  crRNA array
cgatttcttggctttatatatcttgtggaaaggacgaaacaccgtaatttctactaagtgtagattccgagacatcctaatccactaatttctactaagtgtagataggacgcgtatgggaattttttttttaagcttggcgtggatccgatatcaactagatcttgaga

SEQ ID NO: 2772 - DNA, 170 bp, Artificial sequence
  Elf3.826_Setd2.143
  crRNA array
cgatttcttggctttatatatcttgtggaaaggacgaaacaccgtaatttctactaagtgtagattccgagacatcctaatccactaatttctactaagtgtagatgcacaaccacaacagactggttttttaagcttggcgtggatccgatatcaactagatcttgaga

SEQ ID NO: 2773 - DNA, 170 bp, Artificial sequence
  Elf3.826_Setd2.508
  crRNA array
cgatttcttggctttatatatcttgtggaaaggacgaaacaccgtaatttctactaagtgtagattccgagacatcctaatccactaatttctactaagtgtagattacgatcccgagcacccgacttttttaagcttggcgtggatccgatatcaactagatcttgaga

SEQ ID NO: 2774 - DNA, 170 bp, Artificial sequence
  Elf3.826_Smad4.3038
  crRNA array
cgatttcttggctttatatatcttgtggaaaggacgaaacaccgtaatttctactaagtgtagattccgagacatcctaatccactaatttctactaagtgtagatatctgcggcagtgtcaccggttttttaagcttggcgtggatccgatatcaactagatcttgaga

SEQ ID NO: 2775 - DNA, 170 bp, Artificial sequence
  Elf3.826_Smad4.39
  crRNA array
cgatttcttggctttatatatcttgtggaaaggacgaaacaccgtaatttctactaagtgtagattccgagacatcctaatccactaatttctactaagtgtagatagtcaaacgcatactgacaattttttaagcttggcgtggatccgatatcaactagatcttgaga

SEQ ID NO: 2776 - DNA, 170 bp, Artificial sequence
  Elf3.826_Stag2.1409
  crRNA array
cgatttcttggctttatatatcttgtggaaaggacgaaacaccgtaatttctactaagtgtagattccgagacatcctaatccactaatttctactaagtgtagatgctaataactgcggaagggcttttttaagcttggcgtggatccgatatcaactagatcttgaga

SEQ ID NO: 2777 - DNA, 170 bp, Artificial sequence
  Elf3.826_Stag2.4401
  crRNA array
cgatttcttggctttatatatcttgtggaaaggacgaaacaccgtaatttctactaagtgtagattccgagacatcctaatccactaatttctactaagtgtagattaatcgtccagtggtgtatattttttaagcttggcgtggatccgatatcaactagatcttgaga

SEQ ID NO: 2778 - DNA, 170 bp, Artificial sequence
  Elf3.826_Tbl1xr1.1
  crRNA array
cgatttcttggctttatatatcttgtggaaaggacgaaacaccgtaatttctactaagtgtagattccgagacatcctaatccactaatttctactaagtgtagatggatgcgcatactggtgaagttttttaagcttggcgtggatccgatatcaactagatcttgaga

SEQ ID NO: 2779 - DNA, 170 bp, Artificial sequence
  Elf3.826_Tbl1xr1.83
  crRNA array
cgatttcttggctttatatatcttgtggaaaggacgaaacaccgtaatttctactaagtgtagattccgagacatcctaatccactaatttctactaagtgtagatatggtcgacccatcgagtctttttttaagcttggcgtggatccgatatcaactagatcttgaga

SEQ ID NO: 2780 - DNA, 170 bp, Artificial sequence
  Elf3.826_Tgfbr2.290
  crRNA array
cgatttcttggctttatatatcttgtggaaaggacgaaacaccgtaatttctactaagtgtagattccgagacatcctaatccactaatttctactaagtgtagatcctctcggcgcccgggtaaattttttaagcttggcgtggatccgatatcaactagatcttgaga

SEQ ID NO: 2781 - DNA, 170 bp, Artificial sequence
  Elf3.826_Tgfbr2.292
  crRNA array
cgatttcttggctttatatatcttgtggaaaggacgaaacaccgtaatttctactaagtgtagattccgagacatcctaatccactaatttctactaagtgtagatcccgggcgccgagagggaaattttttaagcttggcgtggatccgatatcaactagatcttgaga

SEQ ID NO: 2782 - DNA, 170 bp, Artificial sequence
  Elf3.826_Trp53.4
  crRNA array
cgatttcttggctttatatatcttgtggaaaggacgaaacaccgtaatttctactaagtgtagattccgagacatcctaatccactaatttctactaagtgtagatccctgaactgcccccagggattttttaagcttggcgtggatccgatatcaactagatcttgaga

SEQ ID NO: 2783 - DNA, 170 bp, Artificial sequence
  Elf3.826_Trp53.528
  crRNA array
cgatttcttggctttatatatcttgtggaaaggacgaaacaccgtaatttctactaagtgtagattccgagacatcctaatccactaatttctactaagtgtagatgctgggccagcagagacctgttttttaagcttggcgtggatccgatatcaactagatcttgaga

SEQ ID NO: 2784 - DNA, 170 bp, Artificial sequence
  Elf3.826_Vhl.1
  crRNA array
cgatttcttggctttatatatcttgtggaaaggacgaaacaccgtaatttctactaagtgtagattccgagacatcctaatccactaatttctactaagtgtagatagggctcccggcggccatttttttttaagcttggcgtggatccgatatcaactagatcttgaga

SEQ ID NO: 2785 - DNA, 170 bp, Artificial sequence
  Elf3.826_Vhl.151
  crRNA array
cgatttcttggctttatatatcttgtggaaaggacgaaacaccgtaatttctactaagtgtagattccgagacatcctaatccactaatttctactaagtgtagattagagcactcacccgagggattttttaagcttggcgtggatccgatatcaactagatcttgaga

SEQ ID NO: 2786 - DNA, 170 bp, Artificial sequence
  Elf3.826_Zc3h13.1387
  crRNA array
cgatttcttggctttatatatcttgtggaaaggacgaaacaccgtaatttctactaagtgtagattccgagacatcctaatccactaatttctactaagtgtagatgtgacgccggtcatgtgactttttttaagcttggcgtggatccgatatcaactagatcttgaga

SEQ ID NO: 2787 - DNA, 170 bp, Artificial sequence
  Elf3.826_Zc3h13.1777
  crRNA array
cgatttcttggctttatatatcttgtggaaaggacgaaacaccgtaatttctactaagtgtagattccgagacatcctaatccactaatttctactaagtgtagatgatgctgccagtgtagcggcttttttaagcttggcgtggatccgatatcaactagatcttgaga

SEQ ID NO: 2788 - DNA, 170 bp, Artificial sequence
  Elf3.983_Acvr2a.155
  crRNA array
cgatttcttggctttatatatcttgtggaaaggacgaaacaccgtaatttctactaagtgtagattaggccccctaactggaccataatttctactaagtgtagatggacctggctaatcaagtatttttttaagcttggcgtggatccgatatcaactagatcttgaga

SEQ ID NO: 2789 - DNA, 170 bp, Artificial sequence
  Elf3.983_Acvr2a.70
  crRNA array
cgatttcttggctttatatatcttgtggaaaggacgaaacaccgtaatttctactaagtgtagattaggccccctaactggaccataatttctactaagtgtagatcccgaggcgccggagaagccttttttaagcttggcgtggatccgatatcaactagatcttgaga

SEQ ID NO: 2790 - DNA, 170 bp, Artificial sequence
  Elf3.983_Apc.21
  crRNA array
cgatttcttggctttatatatcttgtggaaaggacgaaacaccgtaatttctactaagtgtagattaggccccctaactggaccataatttctactaagtgtagatgtgatccacacgtgtagctgttttttaagcttggcgtggatccgatatcaactagatcttgaga

SEQ ID NO: 2791 - DNA, 170 bp, Artificial sequence
  Elf3.983_Apc.867
  crRNA array
cgatttcttggctttatatatcttgtggaaaggacgaaacaccgtaatttctactaagtgtagattaggccccctaactggaccataatttctactaagtgtagatcagtcccaggcggcggaagcttttttaagcttggcgtggatccgatatcaactagatcttgaga

SEQ ID NO: 2792 - DNA, 170 bp, Artificial sequence
  Elf3.983_Arid1a.2
  crRNA array
cgatttcttggctttatatatcttgtggaaaggacgaaacaccgtaatttctactaagtgtagattaggccccctaactggaccataatttctactaagtgtagatcccgcgcccccgtcctggggttttttaagcttggcgtggatccgatatcaactagatcttgaga

SEQ ID NO: 2793 - DNA, 170 bp, Artificial sequence
  Elf3.983_Arid1a.5
  crRNA array
cgatttcttggctttatatatcttgtggaaaggacgaaacaccgtaatttctactaagtgtagattaggccccctaactggaccataatttctactaagtgtagatcccgcgctcggccgctgccgttttttaagcttggcgtggatccgatatcaactagatcttgaga

SEQ ID NO: 2794 - DNA, 170 bp, Artificial sequence
  Elf3.983_Arid2.166
  crRNA array
cgatttcttggctttatatatcttgtggaaaggacgaaacaccgtaatttctactaagtgtagattaggccccctaactggaccataatttctactaagtgtagataaccgcgatctgggttttttttttttaagcttggcgtggatccgatatcaactagatcttgaga

SEQ ID NO: 2795 - DNA, 170 bp, Artificial sequence
  Elf3.983_Arid2.172
  crRNA array
cgatttcttggctttatatatcttgtggaaaggacgaaacaccgtaatttctactaagtgtagattaggccccctaactggaccataatttctactaagtgtagatctggacgagctgcggcagttttttttaagcttggcgtggatccgatatcaactagatcttgaga

SEQ ID NO: 2796 - DNA, 170 bp, Artificial sequence
  Elf3.983_Atm.120
  crRNA array
cgatttcttggctttatatatcttgtggaaaggacgaaacaccgtaatttctactaagtgtagattaggccccctaactggaccataatttctactaagtgtagatgacaggtagtcggcagctaattttttaagcttggcgtggatccgatatcaactagatcttgaga

SEQ ID NO: 2797 - DNA, 170 bp, Artificial sequence
  Elf3.983_Atm.997
  crRNA array
cgatttcttggctttatatatcttgtggaaaggacgaaacaccgtaatttctactaagtgtagattaggccccctaactggaccataatttctactaagtgtagatgagaaagtctccgaatcgttttttttaagcttggcgtggatccgatatcaactagatcttgaga

SEQ ID NO: 2798 - DNA, 170 bp, Artificial sequence
  Elf3.983_Atrx.249
  crRNA array
cgatttcttggctttatatatcttgtggaaaggacgaaacaccgtaatttctactaagtgtagattaggccccctaactggaccataatttctactaagtgtagattagccagtcgctcatatctcttttttaagcttggcgtggatccgatatcaactagatcttgaga

SEQ ID NO: 2799 - DNA, 170 bp, Artificial sequence
  Elf3.983_Atrx.251
  crRNA array
cgatttcttggctttatatatcttgtggaaaggacgaaacaccgtaatttctactaagtgtagattaggccccctaactggaccataatttctactaagtgtagatgccagtcgctcatatctctgttttttaagcttggcgtggatccgatatcaactagatcttgaga

SEQ ID NO: 2800 - DNA, 170 bp, Artificial sequence
  Elf3.983_Bcor.203
  crRNA array
cgatttcttggctttatatatcttgtggaaaggacgaaacaccgtaatttctactaagtgtagattaggccccctaactggaccataatttctactaagtgtagatccccggagcggagtccaggcttttttaagcttggcgtggatccgatatcaactagatcttgaga

SEQ ID NO: 2801 - DNA, 170 bp, Artificial sequence
  Elf3.983_Bcor.475
  crRNA array
cgatttcttggctttatatatcttgtggaaaggacgaaacaccgtaatttctactaagtgtagattaggccccctaactggaccataatttctactaagtgtagattgcaacccctctgtatgggattttttaagcttggcgtggatccgatatcaactagatcttgaga

SEQ ID NO: 2802 - DNA, 170 bp, Artificial sequence
  Elf3.983_Brca1.112
  crRNA array
cgatttcttggctttatatatcttgtggaaaggacgaaacaccgtaatttctactaagtgtagattaggccccctaactggaccataatttctactaagtgtagatctagacgctctgtggagactttttttaagcttggcgtggatccgatatcaactagatcttgaga

SEQ ID NO: 2803 - DNA, 170 bp, Artificial sequence
  Elf3.983_Brca1.53
  crRNA array
cgatttcttggctttatatatcttgtggaaaggacgaaacaccgtaatttctactaagtgtagattaggccccctaactggaccataatttctactaagtgtagataatgaggaggcgtcgatcatttttttaagcttggcgtggatccgatatcaactagatcttgaga

SEQ ID NO: 2804 - DNA, 170 bp, Artificial sequence
  Elf3.983_Casp8.45
  crRNA array
cgatttcttggctttatatatcttgtggaaaggacgaaacaccgtaatttctactaagtgtagattaggccccctaactggaccataatttctactaagtgtagatctaccgagatcctgtgaatgttttttaagcttggcgtggatccgatatcaactagatcttgaga

SEQ ID NO: 2805 - DNA, 170 bp, Artificial sequence
  Elf3.983_Casp8.54
  crRNA array
cgatttcttggctttatatatcttgtggaaaggacgaaacaccgtaatttctactaagtgtagattaggccccctaactggaccataatttctactaagtgtagatcagtgcagtcgtcgtaagatttttttaagcttggcgtggatccgatatcaactagatcttgaga

SEQ ID NO: 2806 - DNA, 170 bp, Artificial sequence
  Elf3.983_Cbwd1.84
  crRNA array
cgatttcttggctttatatatcttgtggaaaggacgaaacaccgtaatttctactaagtgtagattaggccccctaactggaccataatttctactaagtgtagatcacagcaggtaacatgccgcttttttaagcttggcgtggatccgatatcaactagatcttgaga

SEQ ID NO: 2807 - DNA, 170 bp, Artificial sequence
  Elf3.983_Cbwd1.85
  crRNA array
cgatttcttggctttatatatcttgtggaaaggacgaaacaccgtaatttctactaagtgtagattaggccccctaactggaccataatttctactaagtgtagatacagcaggtaacatgccgccttttttaagcttggcgtggatccgatatcaactagatcttgaga

SEQ ID NO: 2808 - DNA, 170 bp, Artificial sequence
  Elf3.983_Cdh1.387
  crRNA array
cgatttcttggctttatatatcttgtggaaaggacgaaacaccgtaatttctactaagtgtagattaggccccctaactggaccataatttctactaagtgtagatctcggcgtctgccgggtccgttttttaagcttggcgtggatccgatatcaactagatcttgaga

SEQ ID NO: 2809 - DNA, 170 bp, Artificial sequence
  Elf3.983_Cdh1.58
  crRNA array
cgatttcttggctttatatatcttgtggaaaggacgaaacaccgtaatttctactaagtgtagattaggccccctaactggaccataatttctactaagtgtagatctcgtccgcgcccgggactcttttttaagcttggcgtggatccgatatcaactagatcttgaga

SEQ ID NO: 2810 - DNA, 170 bp, Artificial sequence
  Elf3.983_Cdkn2a.647
  crRNA array
cgatttcttggctttatatatcttgtggaaaggacgaaacaccgtaatttctactaagtgtagattaggccccctaactggaccataatttctactaagtgtagatgcaatcacgggagggagcagttttttaagcttggcgtggatccgatatcaactagatcttgaga

SEQ ID NO: 2811 - DNA, 170 bp, Artificial sequence
  Elf3.983_Cdkn2a.648
  crRNA array
cgatttcttggctttatatatcttgtggaaaggacgaaacaccgtaatttctactaagtgtagattaggccccctaactggaccataatttctactaagtgtagatcaatcacgggagggagcagattttttaagcttggcgtggatccgatatcaactagatcttgaga

SEQ ID NO: 2812 - DNA, 170 bp, Artificial sequence
  Elf3.983_Cic.162
  crRNA array
cgatttcttggctttatatatcttgtggaaaggacgaaacaccgtaatttctactaagtgtagattaggccccctaactggaccataatttctactaagtgtagatcgcaggcgcgcccggcggagttttttaagcttggcgtggatccgatatcaactagatcttgaga

SEQ ID NO: 2813 - DNA, 170 bp, Artificial sequence
  Elf3.983_Cic.164
  crRNA array
cgatttcttggctttatatatcttgtggaaaggacgaaacaccgtaatttctactaagtgtagattaggccccctaactggaccataatttctactaagtgtagatcgggccctgggccggcggctttttttaagcttggcgtggatccgatatcaactagatcttgaga

SEQ ID NO: 2814 - DNA, 170 bp, Artificial sequence
  Elf3.983_Ctcf.229
  crRNA array
cgatttcttggctttatatatcttgtggaaaggacgaaacaccgtaatttctactaagtgtagattaggccccctaactggaccataatttctactaagtgtagatggctggtggctgatagtctgttttttaagcttggcgtggatccgatatcaactagatcttgaga

SEQ ID NO: 2815 - DNA, 170 bp, Artificial sequence
  Elf3.983_Ctcf.809
  crRNA array
cgatttcttggctttatatatcttgtggaaaggacgaaacaccgtaatttctactaagtgtagattaggccccctaactggaccataatttctactaagtgtagataagcgctatcatgatcccaattttttaagcttggcgtggatccgatatcaactagatcttgaga

SEQ ID NO: 2816 - DNA, 170 bp, Artificial sequence
  Elf3.983_Ep300.310
  crRNA array
cgatttcttggctttatatatcttgtggaaaggacgaaacaccgtaatttctactaagtgtagattaggccccctaactggaccataatttctactaagtgtagatatggtacgacagtgaggaagttttttaagcttggcgtggatccgatatcaactagatcttgaga

SEQ ID NO: 2817 - DNA, 170 bp, Artificial sequence
  Elf3.983_Ep300.587
  crRNA array
cgatttcttggctttatatatcttgtggaaaggacgaaacaccgtaatttctactaagtgtagattaggccccctaactggaccataatttctactaagtgtagatcgccccggggcccccaaccattttttaagcttggcgtggatccgatatcaactagatcttgaga

SEQ ID NO: 2818 - DNA, 170 bp, Artificial sequence
  Elf3.983_Epha2.126
  crRNA array
cgatttcttggctttatatatcttgtggaaaggacgaaacaccgtaatttctactaagtgtagattaggccccctaactggaccataatttctactaagtgtagatcctgtgccgccgcggccgccttttttaagcttggcgtggatccgatatcaactagatcttgaga

SEQ ID NO: 2819 - DNA, 170 bp, Artificial sequence
  Elf3.983_Epha2.5
  crRNA array
cgatttcttggctttatatatcttgtggaaaggacgaaacaccgtaatttctactaagtgtagattaggccccctaactggaccataatttctactaagtgtagatcatgagctggcgccacccggttttttaagcttggcgtggatccgatatcaactagatcttgaga

SEQ ID NO: 2820 - DNA, 170 bp, Artificial sequence
  Elf3.983_Fat1.105
  crRNA array
cgatttcttggctttatatatcttgtggaaaggacgaaacaccgtaatttctactaagtgtagattaggccccctaactggaccataatttctactaagtgtagataactcgaggtgacaacaagtttttttaagcttggcgtggatccgatatcaactagatcttgaga

SEQ ID NO: 2821 - DNA, 170 bp, Artificial sequence
  Elf3.983_Fat1.122
  crRNA array
cgatttcttggctttatatatcttgtggaaaggacgaaacaccgtaatttctactaagtgtagattaggccccctaactggaccataatttctactaagtgtagatccatcgacatggaaacgggattttttaagcttggcgtggatccgatatcaactagatcttgaga

SEQ ID NO: 2822 - DNA, 170 bp, Artificial sequence
  Elf3.983_Fbxw7.21
  crRNA array
cgatttcttggctttatatatcttgtggaaaggacgaaacaccgtaatttctactaagtgtagattaggccccctaactggaccataatttctactaagtgtagattaatgtgccgtagaaacccattttttaagcttggcgtggatccgatatcaactagatcttgaga

SEQ ID NO: 2823 - DNA, 170 bp, Artificial sequence
  Elf3.983_Fbxw7.23
  crRNA array
cgatttcttggctttatatatcttgtggaaaggacgaaacaccgtaatttctactaagtgtagattaggccccctaactggaccataatttctactaagtgtagatatgtgccgtagaaacccatattttttaagcttggcgtggatccgatatcaactagatcttgaga

SEQ ID NO: 2824 - DNA, 170 bp, Artificial sequence
  Elf3.983_Gata3.34
  crRNA array
cgatttcttggctttatatatcttgtggaaaggacgaaacaccgtaatttctactaagtgtagattaggccccctaactggaccataatttctactaagtgtagatctaaactatcccgcaaagatttttttaagcttggcgtggatccgatatcaactagatcttgaga

SEQ ID NO: 2825 - DNA, 170 bp, Artificial sequence
  Elf3.983_Gata3.47
  crRNA array
cgatttcttggctttatatatcttgtggaaaggacgaaacaccgtaatttctactaagtgtagattaggccccctaactggaccataatttctactaagtgtagatcgtagtaggacgggacgtggttttttaagcttggcgtggatccgatatcaactagatcttgaga

SEQ ID NO: 2826 - DNA, 170 bp, Artificial sequence
  Elf3.983_H2-Q2.1
  crRNA array
cgatttcttggctttatatatcttgtggaaaggacgaaacaccgtaatttctactaagtgtagattaggccccctaactggaccataatttctactaagtgtagatagggcggccaccaacagcagttttttaagcttggcgtggatccgatatcaactagatcttgaga

SEQ ID NO: 2827 - DNA, 170 bp, Artificial sequence
  Elf3.983_H2-Q2.2
  crRNA array
cgatttcttggctttatatatcttgtggaaaggacgaaacaccgtaatttctactaagtgtagattaggccccctaactggaccataatttctactaagtgtagattaacctgcgcccgctgctgattttttaagcttggcgtggatccgatatcaactagatcttgaga

SEQ ID NO: 2828 - DNA, 170 bp, Artificial sequence
  Elf3.983_Kdm5c.1878
  crRNA array
cgatttcttggctttatatatcttgtggaaaggacgaaacaccgtaatttctactaagtgtagattaggccccctaactggaccataatttctactaagtgtagatagagcacggcacccgcccccttttttaagcttggcgtggatccgatatcaactagatcttgaga

SEQ ID NO: 2829 - DNA, 170 bp, Artificial sequence
  Elf3.983_Kdm5c.1879
  crRNA array
cgatttcttggctttatatatcttgtggaaaggacgaaacaccgtaatttctactaagtgtagattaggccccctaactggaccataatttctactaagtgtagatgagcacggcacccgccccccttttttaagcttggcgtggatccgatatcaactagatcttgaga

SEQ ID NO: 2830 - DNA, 170 bp, Artificial sequence
  Elf3.983_Kdm6a.56
  crRNA array
cgatttcttggctttatatatcttgtggaaaggacgaaacaccgtaatttctactaagtgtagattaggccccctaactggaccataatttctactaagtgtagattcgctgccgcctctcgcggcttttttaagcttggcgtggatccgatatcaactagatcttgaga

SEQ ID NO: 2831 - DNA, 170 bp, Artificial sequence
  Elf3.983_Kdm6a.57
  crRNA array
cgatttcttggctttatatatcttgtggaaaggacgaaacaccgtaatttctactaagtgtagattaggccccctaactggaccataatttctactaagtgtagatcgctgccgcctctcgcggcattttttaagcttggcgtggatccgatatcaactagatcttgaga

SEQ ID NO: 2832 - DNA, 170 bp, Artificial sequence
  Elf3.983_Kmt2b.265
  crRNA array
cgatttcttggctttatatatcttgtggaaaggacgaaacaccgtaatttctactaagtgtagattaggccccctaactggaccataatttctactaagtgtagatccccaagtgaagcccacctgttttttaagcttggcgtggatccgatatcaactagatcttgaga

SEQ ID NO: 2833 - DNA, 170 bp, Artificial sequence
  Elf3.983_Kmt2b.298
  crRNA array
cgatttcttggctttatatatcttgtggaaaggacgaaacaccgtaatttctactaagtgtagattaggccccctaactggaccataatttctactaagtgtagattccggcagggaccggctggcttttttaagcttggcgtggatccgatatcaactagatcttgaga

SEQ ID NO: 2834 - DNA, 170 bp, Artificial sequence
  Elf3.983_Kmt2c.1962
  crRNA array
cgatttcttggctttatatatcttgtggaaaggacgaaacaccgtaatttctactaagtgtagattaggccccctaactggaccataatttctactaagtgtagatgtgacgatctgtgccacaagttttttaagcttggcgtggatccgatatcaactagatcttgaga

SEQ ID NO: 2835 - DNA, 170 bp, Artificial sequence
  Elf3.983_Kmt2c.2236
  crRNA array
cgatttcttggctttatatatcttgtggaaaggacgaaacaccgtaatttctactaagtgtagattaggccccctaactggaccataatttctactaagtgtagatactcgacctccacctccctattttttaagcttggcgtggatccgatatcaactagatcttgaga

SEQ ID NO: 2836 - DNA, 170 bp, Artificial sequence
  Elf3.983_Kmt2d.316
  crRNA array
cgatttcttggctttatatatcttgtggaaaggacgaaacaccgtaatttctactaagtgtagattaggccccctaactggaccataatttctactaagtgtagatactccaggccacccaggtggttttttaagcttggcgtggatccgatatcaactagatcttgaga

SEQ ID NO: 2837 - DNA, 170 bp, Artificial sequence
  Elf3.983_Kmt2d.416
  crRNA array
cgatttcttggctttatatatcttgtggaaaggacgaaacaccgtaatttctactaagtgtagattaggccccctaactggaccataatttctactaagtgtagattaaacccccgggggaagggtttttttaagcttggcgtggatccgatatcaactagatcttgaga

SEQ ID NO: 2838 - DNA, 170 bp, Artificial sequence
  Elf3.983_Map2k4.119
  crRNA array
cgatttcttggctttatatatcttgtggaaaggacgaaacaccgtaatttctactaagtgtagattaggccccctaactggaccataatttctactaagtgtagattgctgtgtgggcggccacatttttttaagcttggcgtggatccgatatcaactagatcttgaga

SEQ ID NO: 2839 - DNA, 170 bp, Artificial sequence
  Elf3.983_Map2k4.1261
  crRNA array
cgatttcttggctttatatatcttgtggaaaggacgaaacaccgtaatttctactaagtgtagattaggccccctaactggaccataatttctactaagtgtagatgatgtagtaatgcggagtagttttttaagcttggcgtggatccgatatcaactagatcttgaga

SEQ ID NO: 2840 - DNA, 170 bp, Artificial sequence
  Elf3.983_Map3k1.235
  crRNA array
cgatttcttggctttatatatcttgtggaaaggacgaaacaccgtaatttctactaagtgtagattaggccccctaactggaccataatttctactaagtgtagataaaacgctactgatcgatcgttttttaagcttggcgtggatccgatatcaactagatcttgaga

SEQ ID NO: 2841 - DNA, 170 bp, Artificial sequence
  Elf3.983_Map3k1.3838
  crRNA array
cgatttcttggctttatatatcttgtggaaaggacgaaacaccgtaatttctactaagtgtagattaggccccctaactggaccataatttctactaagtgtagatccaacaacagggccccactattttttaagcttggcgtggatccgatatcaactagatcttgaga

SEQ ID NO: 2842 - DNA, 170 bp, Artificial sequence
  Elf3.983_Mga.1655
  crRNA array
cgatttcttggctttatatatcttgtggaaaggacgaaacaccgtaatttctactaagtgtagattaggccccctaactggaccataatttctactaagtgtagatcgagaagtggagagcatattttttttaagcttggcgtggatccgatatcaactagatcttgaga

SEQ ID NO: 2843 - DNA, 170 bp, Artificial sequence
  Elf3.983_Mga.93
  crRNA array
cgatttcttggctttatatatcttgtggaaaggacgaaacaccgtaatttctactaagtgtagattaggccccctaactggaccataatttctactaagtgtagatgagaaggctccccataatgtttttttaagcttggcgtggatccgatatcaactagatcttgaga

SEQ ID NO: 2844 - DNA, 170 bp, Artificial sequence
  Elf3.983_Nf1.746
  crRNA array
cgatttcttggctttatatatcttgtggaaaggacgaaacaccgtaatttctactaagtgtagattaggccccctaactggaccataatttctactaagtgtagattaagcataatgatgatgccattttttaagcttggcgtggatccgatatcaactagatcttgaga

SEQ ID NO: 2845 - DNA, 170 bp, Artificial sequence
  Elf3.983_Nf1.97
  crRNA array
cgatttcttggctttatatatcttgtggaaaggacgaaacaccgtaatttctactaagtgtagattaggccccctaactggaccataatttctactaagtgtagatagcccgctacatgctgatgcttttttaagcttggcgtggatccgatatcaactagatcttgaga

SEQ ID NO: 2846 - DNA, 170 bp, Artificial sequence
  Elf3.983_Nf2.356
  crRNA array
cgatttcttggctttatatatcttgtggaaaggacgaaacaccgtaatttctactaagtgtagattaggccccctaactggaccataatttctactaagtgtagatcggagtcatctgatagagatttttttaagcttggcgtggatccgatatcaactagatcttgaga

SEQ ID NO: 2847 - DNA, 170 bp, Artificial sequence
  Elf3.983_Nf2.768
  crRNA array
cgatttcttggctttatatatcttgtggaaaggacgaaacaccgtaatttctactaagtgtagattaggccccctaactggaccataatttctactaagtgtagatccgaagccccagtgtccggcttttttaagcttggcgtggatccgatatcaactagatcttgaga

SEQ ID NO: 2848 - DNA, 170 bp, Artificial sequence
  Elf3.983_Notch1.1849
  crRNA array
cgatttcttggctttatatatcttgtggaaaggacgaaacaccgtaatttctactaagtgtagattaggccccctaactggaccataatttctactaagtgtagatctggcgggtgggcggcgctgttttttaagcttggcgtggatccgatatcaactagatcttgaga

SEQ ID NO: 2849 - DNA, 170 bp, Artificial sequence
  Elf3.983_Notch1.649
  crRNA array
cgatttcttggctttatatatcttgtggaaaggacgaaacaccgtaatttctactaagtgtagattaggccccctaactggaccataatttctactaagtgtagattgggccaacgatgccaggacttttttaagcttggcgtggatccgatatcaactagatcttgaga

SEQ ID NO: 2850 - DNA, 170 bp, Artificial sequence
  Elf3.983_Nsd1.70
  crRNA array
cgatttcttggctttatatatcttgtggaaaggacgaaacaccgtaatttctactaagtgtagattaggccccctaactggaccataatttctactaagtgtagatactggtgtggacgatgcagattttttaagcttggcgtggatccgatatcaactagatcttgaga

SEQ ID NO: 2851 - DNA, 170 bp, Artificial sequence
  Elf3.983_Nsd1.90
  crRNA array
cgatttcttggctttatatatcttgtggaaaggacgaaacaccgtaatttctactaagtgtagattaggccccctaactggaccataatttctactaagtgtagataggagctaacggcaagaatgttttttaagcttggcgtggatccgatatcaactagatcttgaga

SEQ ID NO: 2852 - DNA, 170 bp, Artificial sequence
  Elf3.983_Pbrm1.1236
  crRNA array
cgatttcttggctttatatatcttgtggaaaggacgaaacaccgtaatttctactaagtgtagattaggccccctaactggaccataatttctactaagtgtagatgccgataaaaccaacagccgttttttaagcttggcgtggatccgatatcaactagatcttgaga

SEQ ID NO: 2853 - DNA, 170 bp, Artificial sequence
  Elf3.983_Pbrm1.969
  crRNA array
cgatttcttggctttatatatcttgtggaaaggacgaaacaccgtaatttctactaagtgtagattaggccccctaactggaccataatttctactaagtgtagatgagccctaatgaacagctcattttttaagcttggcgtggatccgatatcaactagatcttgaga

SEQ ID NO: 2854 - DNA, 170 bp, Artificial sequence
  Elf3.983_Pik3r1.76
  crRNA array
cgatttcttggctttatatatcttgtggaaaggacgaaacaccgtaatttctactaagtgtagattaggccccctaactggaccataatttctactaagtgtagataaaacctatacggcccgcacttttttaagcttggcgtggatccgatatcaactagatcttgaga

SEQ ID NO: 2855 - DNA, 170 bp, Artificial sequence
  Elf3.983_Pik3r1.77
  crRNA array
cgatttcttggctttatatatcttgtggaaaggacgaaacaccgtaatttctactaagtgtagattaggccccctaactggaccataatttctactaagtgtagataaacctatacggcccgcactttttttaagcttggcgtggatccgatatcaactagatcttgaga

SEQ ID NO: 2856 - DNA, 170 bp, Artificial sequence
  Elf3.983_Pten.240
  crRNA array
cgatttcttggctttatatatcttgtggaaaggacgaaacaccgtaatttctactaagtgtagattaggccccctaactggaccataatttctactaagtgtagattgcatacgctatagctgcttttttttaagcttggcgtggatccgatatcaactagatcttgaga

SEQ ID NO: 2857 - DNA, 170 bp, Artificial sequence
  Elf3.983_Pten.265
  crRNA array
cgatttcttggctttatatatcttgtggaaaggacgaaacaccgtaatttctactaagtgtagattaggccccctaactggaccataatttctactaagtgtagataagcgtggtgcgtgacgcacttttttaagcttggcgtggatccgatatcaactagatcttgaga

SEQ ID NO: 2858 - DNA, 170 bp, Artificial sequence
  Elf3.983_Rasa1.1478
  crRNA array
cgatttcttggctttatatatcttgtggaaaggacgaaacaccgtaatttctactaagtgtagattaggccccctaactggaccataatttctactaagtgtagatcgataatggtctatgatgtcttttttaagcttggcgtggatccgatatcaactagatcttgaga

SEQ ID NO: 2859 - DNA, 170 bp, Artificial sequence
  Elf3.983_Rasa1.223
  crRNA array
cgatttcttggctttatatatcttgtggaaaggacgaaacaccgtaatttctactaagtgtagattaggccccctaactggaccataatttctactaagtgtagattccatggagtatcgtgctcgttttttaagcttggcgtggatccgatatcaactagatcttgaga

SEQ ID NO: 2860 - DNA, 170 bp, Artificial sequence
  Elf3.983_Rb1.211
  crRNA array
cgatttcttggctttatatatcttgtggaaaggacgaaacaccgtaatttctactaagtgtagattaggccccctaactggaccataatttctactaagtgtagattctgacatgatcgggtacctttttttaagcttggcgtggatccgatatcaactagatcttgaga

SEQ ID NO: 2861 - DNA, 170 bp, Artificial sequence
  Elf3.983_Rb1.394
  crRNA array
cgatttcttggctttatatatcttgtggaaaggacgaaacaccgtaatttctactaagtgtagattaggccccctaactggaccataatttctactaagtgtagatagaaatctcgaagcaggatcttttttaagcttggcgtggatccgatatcaactagatcttgaga

SEQ ID NO: 2862 - DNA, 170 bp, Artificial sequence
  Elf3.983_Rbm10.5
  crRNA array
cgatttcttggctttatatatcttgtggaaaggacgaaacaccgtaatttctactaagtgtagattaggccccctaactggaccataatttctactaagtgtagatacgaaacctgaacccacacattttttaagcttggcgtggatccgatatcaactagatcttgaga

SEQ ID NO: 2863 - DNA, 170 bp, Artificial sequence
  Elf3.983_Rbm10.6
  crRNA array
cgatttcttggctttatatatcttgtggaaaggacgaaacaccgtaatttctactaagtgtagattaggccccctaactggaccataatttctactaagtgtagatcgaaacctgaacccacacagttttttaagcttggcgtggatccgatatcaactagatcttgaga

SEQ ID NO: 2864 - DNA, 170 bp, Artificial sequence
  Elf3.983_Rnf43.1920
  crRNA array
cgatttcttggctttatatatcttgtggaaaggacgaaacaccgtaatttctactaagtgtagattaggccccctaactggaccataatttctactaagtgtagatatccccgtgccgtggactccttttttaagcttggcgtggatccgatatcaactagatcttgaga

SEQ ID NO: 2865 - DNA, 170 bp, Artificial sequence
  Elf3.983_Rnf43.39
  crRNA array
cgatttcttggctttatatatcttgtggaaaggacgaaacaccgtaatttctactaagtgtagattaggccccctaactggaccataatttctactaagtgtagatcaaggggatcactctgataattttttaagcttggcgtggatccgatatcaactagatcttgaga

SEQ ID NO: 2866 - DNA, 170 bp, Artificial sequence
  Elf3.983_Runx1.204
  crRNA array
cgatttcttggctttatatatcttgtggaaaggacgaaacaccgtaatttctactaagtgtagattaggccccctaactggaccataatttctactaagtgtagattaaataagtccagccgttttttttttaagcttggcgtggatccgatatcaactagatcttgaga

SEQ ID NO: 2867 - DNA, 170 bp, Artificial sequence
  Elf3.983_Runx1.81
  crRNA array
cgatttcttggctttatatatcttgtggaaaggacgaaacaccgtaatttctactaagtgtagattaggccccctaactggaccataatttctactaagtgtagataggacgcgtatgggaattttttttttaagcttggcgtggatccgatatcaactagatcttgaga

SEQ ID NO: 2868 - DNA, 170 bp, Artificial sequence
  Elf3.983_Setd2.143
  crRNA array
cgatttcttggctttatatatcttgtggaaaggacgaaacaccgtaatttctactaagtgtagattaggccccctaactggaccataatttctactaagtgtagatgcacaaccacaacagactggttttttaagcttggcgtggatccgatatcaactagatcttgaga

SEQ ID NO: 2869 - DNA, 170 bp, Artificial sequence
  Elf3.983_Setd2.508
  crRNA array
cgatttcttggctttatatatcttgtggaaaggacgaaacaccgtaatttctactaagtgtagattaggccccctaactggaccataatttctactaagtgtagattacgatcccgagcacccgacttttttaagcttggcgtggatccgatatcaactagatcttgaga

SEQ ID NO: 2870 - DNA, 170 bp, Artificial sequence
  Elf3.983_Smad4.3038
  crRNA array
cgatttcttggctttatatatcttgtggaaaggacgaaacaccgtaatttctactaagtgtagattaggccccctaactggaccataatttctactaagtgtagatatctgcggcagtgtcaccggttttttaagcttggcgtggatccgatatcaactagatcttgaga

SEQ ID NO: 2871 - DNA, 170 bp, Artificial sequence
  Elf3.983_Smad4.39
  crRNA array
cgatttcttggctttatatatcttgtggaaaggacgaaacaccgtaatttctactaagtgtagattaggccccctaactggaccataatttctactaagtgtagatagtcaaacgcatactgacaattttttaagcttggcgtggatccgatatcaactagatcttgaga

SEQ ID NO: 2872 - DNA, 170 bp, Artificial sequence
  Elf3.983_Stag2.1409
  crRNA array
cgatttcttggctttatatatcttgtggaaaggacgaaacaccgtaatttctactaagtgtagattaggccccctaactggaccataatttctactaagtgtagatgctaataactgcggaagggcttttttaagcttggcgtggatccgatatcaactagatcttgaga

SEQ ID NO: 2873 - DNA, 170 bp, Artificial sequence
  Elf3.983_Stag2.4401
  crRNA array
cgatttcttggctttatatatcttgtggaaaggacgaaacaccgtaatttctactaagtgtagattaggccccctaactggaccataatttctactaagtgtagattaatcgtccagtggtgtatattttttaagcttggcgtggatccgatatcaactagatcttgaga

SEQ ID NO: 2874 - DNA, 170 bp, Artificial sequence
  Elf3.983_Tbl1xr1.1
  crRNA array
cgatttcttggctttatatatcttgtggaaaggacgaaacaccgtaatttctactaagtgtagattaggccccctaactggaccataatttctactaagtgtagatggatgcgcatactggtgaagttttttaagcttggcgtggatccgatatcaactagatcttgaga

SEQ ID NO: 2875 - DNA, 170 bp, Artificial sequence
  Elf3.983_Tbl1xr1.83
  crRNA array
cgatttcttggctttatatatcttgtggaaaggacgaaacaccgtaatttctactaagtgtagattaggccccctaactggaccataatttctactaagtgtagatatggtcgacccatcgagtctttttttaagcttggcgtggatccgatatcaactagatcttgaga

SEQ ID NO: 2876 - DNA, 170 bp, Artificial sequence
  Elf3.983_Tgfbr2.290
  crRNA array
cgatttcttggctttatatatcttgtggaaaggacgaaacaccgtaatttctactaagtgtagattaggccccctaactggaccataatttctactaagtgtagatcctctcggcgcccgggtaaattttttaagcttggcgtggatccgatatcaactagatcttgaga

SEQ ID NO: 2877 - DNA, 170 bp, Artificial sequence
  Elf3.983_Tgfbr2.292
  crRNA array
cgatttcttggctttatatatcttgtggaaaggacgaaacaccgtaatttctactaagtgtagattaggccccctaactggaccataatttctactaagtgtagatcccgggcgccgagagggaaattttttaagcttggcgtggatccgatatcaactagatcttgaga

SEQ ID NO: 2878 - DNA, 170 bp, Artificial sequence
  Elf3.983_Trp53.4
  crRNA array
cgatttcttggctttatatatcttgtggaaaggacgaaacaccgtaatttctactaagtgtagattaggccccctaactggaccataatttctactaagtgtagatccctgaactgcccccagggattttttaagcttggcgtggatccgatatcaactagatcttgaga

SEQ ID NO: 2879 - DNA, 170 bp, Artificial sequence
  Elf3.983_Trp53.528
  crRNA array
cgatttcttggctttatatatcttgtggaaaggacgaaacaccgtaatttctactaagtgtagattaggccccctaactggaccataatttctactaagtgtagatgctgggccagcagagacctgttttttaagcttggcgtggatccgatatcaactagatcttgaga

SEQ ID NO: 2880 - DNA, 170 bp, Artificial sequence
  Elf3.983_Vhl.1
  crRNA array
cgatttcttggctttatatatcttgtggaaaggacgaaacaccgtaatttctactaagtgtagattaggccccctaactggaccataatttctactaagtgtagatagggctcccggcggccatttttttttaagcttggcgtggatccgatatcaactagatcttgaga

SEQ ID NO: 2881 - DNA, 170 bp, Artificial sequence
  Elf3.983_Vhl.151
  crRNA array
cgatttcttggctttatatatcttgtggaaaggacgaaacaccgtaatttctactaagtgtagattaggccccctaactggaccataatttctactaagtgtagattagagcactcacccgagggattttttaagcttggcgtggatccgatatcaactagatcttgaga

SEQ ID NO: 2882 - DNA, 170 bp, Artificial sequence
  Elf3.983_Zc3h13.1387
  crRNA array
cgatttcttggctttatatatcttgtggaaaggacgaaacaccgtaatttctactaagtgtagattaggccccctaactggaccataatttctactaagtgtagatgtgacgccggtcatgtgactttttttaagcttggcgtggatccgatatcaactagatcttgaga

SEQ ID NO: 2883 - DNA, 170 bp, Artificial sequence
  Elf3.983_Zc3h13.1777
  crRNA array
cgatttcttggctttatatatcttgtggaaaggacgaaacaccgtaatttctactaagtgtagattaggccccctaactggaccataatttctactaagtgtagatgatgctgccagtgtagcggcttttttaagcttggcgtggatccgatatcaactagatcttgaga

SEQ ID NO: 2884 - DNA, 170 bp, Artificial sequence
  Ep300.310_Acvr2a.155
  crRNA array
cgatttcttggctttatatatcttgtggaaaggacgaaacaccgtaatttctactaagtgtagatatggtacgacagtgaggaagtaatttctactaagtgtagatggacctggctaatcaagtatttttttaagcttggcgtggatccgatatcaactagatcttgaga

SEQ ID NO: 2885 - DNA, 170 bp, Artificial sequence
  Ep300.310_Acvr2a.70
  crRNA array
cgatttcttggctttatatatcttgtggaaaggacgaaacaccgtaatttctactaagtgtagatatggtacgacagtgaggaagtaatttctactaagtgtagatcccgaggcgccggagaagccttttttaagcttggcgtggatccgatatcaactagatcttgaga

SEQ ID NO: 2886 - DNA, 170 bp, Artificial sequence
  Ep300.310_Apc.21
  crRNA array
cgatttcttggctttatatatcttgtggaaaggacgaaacaccgtaatttctactaagtgtagatatggtacgacagtgaggaagtaatttctactaagtgtagatgtgatccacacgtgtagctgttttttaagcttggcgtggatccgatatcaactagatcttgaga

SEQ ID NO: 2887 - DNA, 170 bp, Artificial sequence
  Ep300.310_Apc.867
  crRNA array
cgatttcttggctttatatatcttgtggaaaggacgaaacaccgtaatttctactaagtgtagatatggtacgacagtgaggaagtaatttctactaagtgtagatcagtcccaggcggcggaagcttttttaagcttggcgtggatccgatatcaactagatcttgaga

SEQ ID NO: 2888 - DNA, 170 bp, Artificial sequence
  Ep300.310_Arid1a.2
  crRNA array
cgatttcttggctttatatatcttgtggaaaggacgaaacaccgtaatttctactaagtgtagatatggtacgacagtgaggaagtaatttctactaagtgtagatcccgcgcccccgtcctggggttttttaagcttggcgtggatccgatatcaactagatcttgaga

SEQ ID NO: 2889 - DNA, 170 bp, Artificial sequence
  Ep300.310_Arid1a.5
  crRNA array
cgatttcttggctttatatatcttgtggaaaggacgaaacaccgtaatttctactaagtgtagatatggtacgacagtgaggaagtaatttctactaagtgtagatcccgcgctcggccgctgccgttttttaagcttggcgtggatccgatatcaactagatcttgaga

SEQ ID NO: 2890 - DNA, 170 bp, Artificial sequence
  Ep300.310_Arid2.166
  crRNA array
cgatttcttggctttatatatcttgtggaaaggacgaaacaccgtaatttctactaagtgtagatatggtacgacagtgaggaagtaatttctactaagtgtagataaccgcgatctgggttttttttttttaagcttggcgtggatccgatatcaactagatcttgaga

SEQ ID NO: 2891 - DNA, 170 bp, Artificial sequence
  Ep300.310_Arid2.172
  crRNA array
cgatttcttggctttatatatcttgtggaaaggacgaaacaccgtaatttctactaagtgtagatatggtacgacagtgaggaagtaatttctactaagtgtagatctggacgagctgcggcagttttttttaagcttggcgtggatccgatatcaactagatcttgaga

SEQ ID NO: 2892 - DNA, 170 bp, Artificial sequence
  Ep300.310_Atm.120
  crRNA array
cgatttcttggctttatatatcttgtggaaaggacgaaacaccgtaatttctactaagtgtagatatggtacgacagtgaggaagtaatttctactaagtgtagatgacaggtagtcggcagctaattttttaagcttggcgtggatccgatatcaactagatcttgaga

SEQ ID NO: 2893 - DNA, 170 bp, Artificial sequence
  Ep300.310_Atm.997
  crRNA array
cgatttcttggctttatatatcttgtggaaaggacgaaacaccgtaatttctactaagtgtagatatggtacgacagtgaggaagtaatttctactaagtgtagatgagaaagtctccgaatcgttttttttaagcttggcgtggatccgatatcaactagatcttgaga

SEQ ID NO: 2894 - DNA, 170 bp, Artificial sequence
  Ep300.310_Atrx.249
  crRNA array
cgatttcttggctttatatatcttgtggaaaggacgaaacaccgtaatttctactaagtgtagatatggtacgacagtgaggaagtaatttctactaagtgtagattagccagtcgctcatatctcttttttaagcttggcgtggatccgatatcaactagatcttgaga

SEQ ID NO: 2895 - DNA, 170 bp, Artificial sequence
  Ep300.310_Atrx.251
  crRNA array
cgatttcttggctttatatatcttgtggaaaggacgaaacaccgtaatttctactaagtgtagatatggtacgacagtgaggaagtaatttctactaagtgtagatgccagtcgctcatatctctgttttttaagcttggcgtggatccgatatcaactagatcttgaga

SEQ ID NO: 2896 - DNA, 170 bp, Artificial sequence
  Ep300.310_Bcor.203
  crRNA array
cgatttcttggctttatatatcttgtggaaaggacgaaacaccgtaatttctactaagtgtagatatggtacgacagtgaggaagtaatttctactaagtgtagatccccggagcggagtccaggcttttttaagcttggcgtggatccgatatcaactagatcttgaga

SEQ ID NO: 2897 - DNA, 170 bp, Artificial sequence
  Ep300.310_Bcor.475
  crRNA array
cgatttcttggctttatatatcttgtggaaaggacgaaacaccgtaatttctactaagtgtagatatggtacgacagtgaggaagtaatttctactaagtgtagattgcaacccctctgtatgggattttttaagcttggcgtggatccgatatcaactagatcttgaga

SEQ ID NO: 2898 - DNA, 170 bp, Artificial sequence
  Ep300.310_Brca1.112
  crRNA array
cgatttcttggctttatatatcttgtggaaaggacgaaacaccgtaatttctactaagtgtagatatggtacgacagtgaggaagtaatttctactaagtgtagatctagacgctctgtggagactttttttaagcttggcgtggatccgatatcaactagatcttgaga

SEQ ID NO: 2899 - DNA, 170 bp, Artificial sequence
  Ep300.310_Brca1.53
  crRNA array
cgatttcttggctttatatatcttgtggaaaggacgaaacaccgtaatttctactaagtgtagatatggtacgacagtgaggaagtaatttctactaagtgtagataatgaggaggcgtcgatcatttttttaagcttggcgtggatccgatatcaactagatcttgaga

SEQ ID NO: 2900 - DNA, 170 bp, Artificial sequence
  Ep300.310_Casp8.45
  crRNA array
cgatttcttggctttatatatcttgtggaaaggacgaaacaccgtaatttctactaagtgtagatatggtacgacagtgaggaagtaatttctactaagtgtagatctaccgagatcctgtgaatgttttttaagcttggcgtggatccgatatcaactagatcttgaga

SEQ ID NO: 2901 - DNA, 170 bp, Artificial sequence
  Ep300.310_Casp8.54
  crRNA array
cgatttcttggctttatatatcttgtggaaaggacgaaacaccgtaatttctactaagtgtagatatggtacgacagtgaggaagtaatttctactaagtgtagatcagtgcagtcgtcgtaagatttttttaagcttggcgtggatccgatatcaactagatcttgaga

SEQ ID NO: 2902 - DNA, 170 bp, Artificial sequence
  Ep300.310_Cbwd1.84
  crRNA array
cgatttcttggctttatatatcttgtggaaaggacgaaacaccgtaatttctactaagtgtagatatggtacgacagtgaggaagtaatttctactaagtgtagatcacagcaggtaacatgccgcttttttaagcttggcgtggatccgatatcaactagatcttgaga

SEQ ID NO: 2903 - DNA, 170 bp, Artificial sequence
  Ep300.310_Cbwd1.85
  crRNA array
cgatttcttggctttatatatcttgtggaaaggacgaaacaccgtaatttctactaagtgtagatatggtacgacagtgaggaagtaatttctactaagtgtagatacagcaggtaacatgccgccttttttaagcttggcgtggatccgatatcaactagatcttgaga

SEQ ID NO: 2904 - DNA, 170 bp, Artificial sequence
  Ep300.310_Cdh1.387
  crRNA array
cgatttcttggctttatatatcttgtggaaaggacgaaacaccgtaatttctactaagtgtagatatggtacgacagtgaggaagtaatttctactaagtgtagatctcggcgtctgccgggtccgttttttaagcttggcgtggatccgatatcaactagatcttgaga

SEQ ID NO: 2905 - DNA, 170 bp, Artificial sequence
  Ep300.310_Cdh1.58
  crRNA array
cgatttcttggctttatatatcttgtggaaaggacgaaacaccgtaatttctactaagtgtagatatggtacgacagtgaggaagtaatttctactaagtgtagatctcgtccgcgcccgggactcttttttaagcttggcgtggatccgatatcaactagatcttgaga

SEQ ID NO: 2906 - DNA, 170 bp, Artificial sequence
  Ep300.310_Cdkn2a.647
  crRNA array
cgatttcttggctttatatatcttgtggaaaggacgaaacaccgtaatttctactaagtgtagatatggtacgacagtgaggaagtaatttctactaagtgtagatgcaatcacgggagggagcagttttttaagcttggcgtggatccgatatcaactagatcttgaga

SEQ ID NO: 2907 - DNA, 170 bp, Artificial sequence
  Ep300.310_Cdkn2a.648
  crRNA array
cgatttcttggctttatatatcttgtggaaaggacgaaacaccgtaatttctactaagtgtagatatggtacgacagtgaggaagtaatttctactaagtgtagatcaatcacgggagggagcagattttttaagcttggcgtggatccgatatcaactagatcttgaga

SEQ ID NO: 2908 - DNA, 170 bp, Artificial sequence
  Ep300.310_Cic.162
  crRNA array
cgatttcttggctttatatatcttgtggaaaggacgaaacaccgtaatttctactaagtgtagatatggtacgacagtgaggaagtaatttctactaagtgtagatcgcaggcgcgcccggcggagttttttaagcttggcgtggatccgatatcaactagatcttgaga

SEQ ID NO: 2909 - DNA, 170 bp, Artificial sequence
  Ep300.310_Cic.164
  crRNA array
cgatttcttggctttatatatcttgtggaaaggacgaaacaccgtaatttctactaagtgtagatatggtacgacagtgaggaagtaatttctactaagtgtagatcgggccctgggccggcggctttttttaagcttggcgtggatccgatatcaactagatcttgaga

SEQ ID NO: 2910 - DNA, 170 bp, Artificial sequence
  Ep300.310_Ctcf.229
  crRNA array
cgatttcttggctttatatatcttgtggaaaggacgaaacaccgtaatttctactaagtgtagatatggtacgacagtgaggaagtaatttctactaagtgtagatggctggtggctgatagtctgttttttaagcttggcgtggatccgatatcaactagatcttgaga

SEQ ID NO: 2911 - DNA, 170 bp, Artificial sequence
  Ep300.310_Ctcf.809
  crRNA array
cgatttcttggctttatatatcttgtggaaaggacgaaacaccgtaatttctactaagtgtagatatggtacgacagtgaggaagtaatttctactaagtgtagataagcgctatcatgatcccaattttttaagcttggcgtggatccgatatcaactagatcttgaga

SEQ ID NO: 2912 - DNA, 170 bp, Artificial sequence
  Ep300.310_Elf3.826
  crRNA array
cgatttcttggctttatatatcttgtggaaaggacgaaacaccgtaatttctactaagtgtagatatggtacgacagtgaggaagtaatttctactaagtgtagattccgagacatcctaatccacttttttaagcttggcgtggatccgatatcaactagatcttgaga

SEQ ID NO: 2913 - DNA, 170 bp, Artificial sequence
  Ep300.310_Elf3.983
  crRNA array
cgatttcttggctttatatatcttgtggaaaggacgaaacaccgtaatttctactaagtgtagatatggtacgacagtgaggaagtaatttctactaagtgtagattaggccccctaactggaccattttttaagcttggcgtggatccgatatcaactagatcttgaga

SEQ ID NO: 2914 - DNA, 170 bp, Artificial sequence
  Ep300.310_Epha2.126
  crRNA array
cgatttcttggctttatatatcttgtggaaaggacgaaacaccgtaatttctactaagtgtagatatggtacgacagtgaggaagtaatttctactaagtgtagatcctgtgccgccgcggccgccttttttaagcttggcgtggatccgatatcaactagatcttgaga

SEQ ID NO: 2915 - DNA, 170 bp, Artificial sequence
  Ep300.310_Epha2.5
  crRNA array
cgatttcttggctttatatatcttgtggaaaggacgaaacaccgtaatttctactaagtgtagatatggtacgacagtgaggaagtaatttctactaagtgtagatcatgagctggcgccacccggttttttaagcttggcgtggatccgatatcaactagatcttgaga

SEQ ID NO: 2916 - DNA, 170 bp, Artificial sequence
  Ep300.310_Fat1.105
  crRNA array
cgatttcttggctttatatatcttgtggaaaggacgaaacaccgtaatttctactaagtgtagatatggtacgacagtgaggaagtaatttctactaagtgtagataactcgaggtgacaacaagtttttttaagcttggcgtggatccgatatcaactagatcttgaga

SEQ ID NO: 2917 - DNA, 170 bp, Artificial sequence
  Ep300.310_Fat1.122
  crRNA array
cgatttcttggctttatatatcttgtggaaaggacgaaacaccgtaatttctactaagtgtagatatggtacgacagtgaggaagtaatttctactaagtgtagatccatcgacatggaaacgggattttttaagcttggcgtggatccgatatcaactagatcttgaga

SEQ ID NO: 2918 - DNA, 170 bp, Artificial sequence
  Ep300.310_Fbxw7.21
  crRNA array
cgatttcttggctttatatatcttgtggaaaggacgaaacaccgtaatttctactaagtgtagatatggtacgacagtgaggaagtaatttctactaagtgtagattaatgtgccgtagaaacccattttttaagcttggcgtggatccgatatcaactagatcttgaga

SEQ ID NO: 2919 - DNA, 170 bp, Artificial sequence
  Ep300.310_Fbxw7.23
  crRNA array
cgatttcttggctttatatatcttgtggaaaggacgaaacaccgtaatttctactaagtgtagatatggtacgacagtgaggaagtaatttctactaagtgtagatatgtgccgtagaaacccatattttttaagcttggcgtggatccgatatcaactagatcttgaga

SEQ ID NO: 2920 - DNA, 170 bp, Artificial sequence
  Ep300.310_Gata3.34
  crRNA array
cgatttcttggctttatatatcttgtggaaaggacgaaacaccgtaatttctactaagtgtagatatggtacgacagtgaggaagtaatttctactaagtgtagatctaaactatcccgcaaagatttttttaagcttggcgtggatccgatatcaactagatcttgaga

SEQ ID NO: 2921 - DNA, 170 bp, Artificial sequence
  Ep300.310_Gata3.47
  crRNA array
cgatttcttggctttatatatcttgtggaaaggacgaaacaccgtaatttctactaagtgtagatatggtacgacagtgaggaagtaatttctactaagtgtagatcgtagtaggacgggacgtggttttttaagcttggcgtggatccgatatcaactagatcttgaga

SEQ ID NO: 2922 - DNA, 170 bp, Artificial sequence
  Ep300.310_H2-Q2.1
  crRNA array
cgatttcttggctttatatatcttgtggaaaggacgaaacaccgtaatttctactaagtgtagatatggtacgacagtgaggaagtaatttctactaagtgtagatagggcggccaccaacagcagttttttaagcttggcgtggatccgatatcaactagatcttgaga

SEQ ID NO: 2923 - DNA, 170 bp, Artificial sequence
  Ep300.310_H2-Q2.2
  crRNA array
cgatttcttggctttatatatcttgtggaaaggacgaaacaccgtaatttctactaagtgtagatatggtacgacagtgaggaagtaatttctactaagtgtagattaacctgcgcccgctgctgattttttaagcttggcgtggatccgatatcaactagatcttgaga

SEQ ID NO: 2924 - DNA, 170 bp, Artificial sequence
  Ep300.310_Kdm5c.1878
  crRNA array
cgatttcttggctttatatatcttgtggaaaggacgaaacaccgtaatttctactaagtgtagatatggtacgacagtgaggaagtaatttctactaagtgtagatagagcacggcacccgcccccttttttaagcttggcgtggatccgatatcaactagatcttgaga

SEQ ID NO: 2925 - DNA, 170 bp, Artificial sequence
  Ep300.310_Kdm5c.1879
  crRNA array
cgatttcttggctttatatatcttgtggaaaggacgaaacaccgtaatttctactaagtgtagatatggtacgacagtgaggaagtaatttctactaagtgtagatgagcacggcacccgccccccttttttaagcttggcgtggatccgatatcaactagatcttgaga

SEQ ID NO: 2926 - DNA, 170 bp, Artificial sequence
  Ep300.310_Kdm6a.56
  crRNA array
cgatttcttggctttatatatcttgtggaaaggacgaaacaccgtaatttctactaagtgtagatatggtacgacagtgaggaagtaatttctactaagtgtagattcgctgccgcctctcgcggcttttttaagcttggcgtggatccgatatcaactagatcttgaga

SEQ ID NO: 2927 - DNA, 170 bp, Artificial sequence
  Ep300.310_Kdm6a.57
  crRNA array
cgatttcttggctttatatatcttgtggaaaggacgaaacaccgtaatttctactaagtgtagatatggtacgacagtgaggaagtaatttctactaagtgtagatcgctgccgcctctcgcggcattttttaagcttggcgtggatccgatatcaactagatcttgaga

SEQ ID NO: 2928 - DNA, 170 bp, Artificial sequence
  Ep300.310_Kmt2b.265
  crRNA array
cgatttcttggctttatatatcttgtggaaaggacgaaacaccgtaatttctactaagtgtagatatggtacgacagtgaggaagtaatttctactaagtgtagatccccaagtgaagcccacctgttttttaagcttggcgtggatccgatatcaactagatcttgaga

SEQ ID NO: 2929 - DNA, 170 bp, Artificial sequence
  Ep300.310_Kmt2b.298
  crRNA array
cgatttcttggctttatatatcttgtggaaaggacgaaacaccgtaatttctactaagtgtagatatggtacgacagtgaggaagtaatttctactaagtgtagattccggcagggaccggctggcttttttaagcttggcgtggatccgatatcaactagatcttgaga

SEQ ID NO: 2930 - DNA, 170 bp, Artificial sequence
  Ep300.310_Kmt2c.1962
  crRNA array
cgatttcttggctttatatatcttgtggaaaggacgaaacaccgtaatttctactaagtgtagatatggtacgacagtgaggaagtaatttctactaagtgtagatgtgacgatctgtgccacaagttttttaagcttggcgtggatccgatatcaactagatcttgaga

SEQ ID NO: 2931 - DNA, 170 bp, Artificial sequence
  Ep300.310_Kmt2c.2236
  crRNA array
cgatttcttggctttatatatcttgtggaaaggacgaaacaccgtaatttctactaagtgtagatatggtacgacagtgaggaagtaatttctactaagtgtagatactcgacctccacctccctattttttaagcttggcgtggatccgatatcaactagatcttgaga

SEQ ID NO: 2932 - DNA, 170 bp, Artificial sequence
  Ep300.310_Kmt2d.316
  crRNA array
cgatttcttggctttatatatcttgtggaaaggacgaaacaccgtaatttctactaagtgtagatatggtacgacagtgaggaagtaatttctactaagtgtagatactccaggccacccaggtggttttttaagcttggcgtggatccgatatcaactagatcttgaga

SEQ ID NO: 2933 - DNA, 170 bp, Artificial sequence
  Ep300.310_Kmt2d.416
  crRNA array
cgatttcttggctttatatatcttgtggaaaggacgaaacaccgtaatttctactaagtgtagatatggtacgacagtgaggaagtaatttctactaagtgtagattaaacccccgggggaagggtttttttaagcttggcgtggatccgatatcaactagatcttgaga

SEQ ID NO: 2934 - DNA, 170 bp, Artificial sequence
  Ep300.310_Map2k4.119
  crRNA array
cgatttcttggctttatatatcttgtggaaaggacgaaacaccgtaatttctactaagtgtagatatggtacgacagtgaggaagtaatttctactaagtgtagattgctgtgtgggcggccacatttttttaagcttggcgtggatccgatatcaactagatcttgaga

SEQ ID NO: 2935 - DNA, 170 bp, Artificial sequence
  Ep300.310_Map2k4.1261
  crRNA array
cgatttcttggctttatatatcttgtggaaaggacgaaacaccgtaatttctactaagtgtagatatggtacgacagtgaggaagtaatttctactaagtgtagatgatgtagtaatgcggagtagttttttaagcttggcgtggatccgatatcaactagatcttgaga

SEQ ID NO: 2936 - DNA, 170 bp, Artificial sequence
  Ep300.310_Map3k1.235
  crRNA array
cgatttcttggctttatatatcttgtggaaaggacgaaacaccgtaatttctactaagtgtagatatggtacgacagtgaggaagtaatttctactaagtgtagataaaacgctactgatcgatcgttttttaagcttggcgtggatccgatatcaactagatcttgaga

SEQ ID NO: 2937 - DNA, 170 bp, Artificial sequence
  Ep300.310_Map3k1.3838
  crRNA array
cgatttcttggctttatatatcttgtggaaaggacgaaacaccgtaatttctactaagtgtagatatggtacgacagtgaggaagtaatttctactaagtgtagatccaacaacagggccccactattttttaagcttggcgtggatccgatatcaactagatcttgaga

SEQ ID NO: 2938 - DNA, 170 bp, Artificial sequence
  Ep300.310_Mga.1655
  crRNA array
cgatttcttggctttatatatcttgtggaaaggacgaaacaccgtaatttctactaagtgtagatatggtacgacagtgaggaagtaatttctactaagtgtagatcgagaagtggagagcatattttttttaagcttggcgtggatccgatatcaactagatcttgaga

SEQ ID NO: 2939 - DNA, 170 bp, Artificial sequence
  Ep300.310_Mga.93
  crRNA array
cgatttcttggctttatatatcttgtggaaaggacgaaacaccgtaatttctactaagtgtagatatggtacgacagtgaggaagtaatttctactaagtgtagatgagaaggctccccataatgtttttttaagcttggcgtggatccgatatcaactagatcttgaga

SEQ ID NO: 2940 - DNA, 170 bp, Artificial sequence
  Ep300.310_Nf1.746
  crRNA array
cgatttcttggctttatatatcttgtggaaaggacgaaacaccgtaatttctactaagtgtagatatggtacgacagtgaggaagtaatttctactaagtgtagattaagcataatgatgatgccattttttaagcttggcgtggatccgatatcaactagatcttgaga

SEQ ID NO: 2941 - DNA, 170 bp, Artificial sequence
  Ep300.310_Nf1.97
  crRNA array
cgatttcttggctttatatatcttgtggaaaggacgaaacaccgtaatttctactaagtgtagatatggtacgacagtgaggaagtaatttctactaagtgtagatagcccgctacatgctgatgcttttttaagcttggcgtggatccgatatcaactagatcttgaga

SEQ ID NO: 2942 - DNA, 170 bp, Artificial sequence
  Ep300.310_Nf2.356
  crRNA array
cgatttcttggctttatatatcttgtggaaaggacgaaacaccgtaatttctactaagtgtagatatggtacgacagtgaggaagtaatttctactaagtgtagatcggagtcatctgatagagatttttttaagcttggcgtggatccgatatcaactagatcttgaga

SEQ ID NO: 2943 - DNA, 170 bp, Artificial sequence
  Ep300.310_Nf2.768
  crRNA array
cgatttcttggctttatatatcttgtggaaaggacgaaacaccgtaatttctactaagtgtagatatggtacgacagtgaggaagtaatttctactaagtgtagatccgaagccccagtgtccggcttttttaagcttggcgtggatccgatatcaactagatcttgaga

SEQ ID NO: 2944 - DNA, 170 bp, Artificial sequence
  Ep300.310_Notch1.1849
  crRNA array
cgatttcttggctttatatatcttgtggaaaggacgaaacaccgtaatttctactaagtgtagatatggtacgacagtgaggaagtaatttctactaagtgtagatctggcgggtgggcggcgctgttttttaagcttggcgtggatccgatatcaactagatcttgaga

SEQ ID NO: 2945 - DNA, 170 bp, Artificial sequence
  Ep300.310_Notch1.649
  crRNA array
cgatttcttggctttatatatcttgtggaaaggacgaaacaccgtaatttctactaagtgtagatatggtacgacagtgaggaagtaatttctactaagtgtagattgggccaacgatgccaggacttttttaagcttggcgtggatccgatatcaactagatcttgaga

SEQ ID NO: 2946 - DNA, 170 bp, Artificial sequence
  Ep300.310_Nsd1.70
  crRNA array
cgatttcttggctttatatatcttgtggaaaggacgaaacaccgtaatttctactaagtgtagatatggtacgacagtgaggaagtaatttctactaagtgtagatactggtgtggacgatgcagattttttaagcttggcgtggatccgatatcaactagatcttgaga

SEQ ID NO: 2947 - DNA, 170 bp, Artificial sequence
  Ep300.310_Nsd1.90
  crRNA array
cgatttcttggctttatatatcttgtggaaaggacgaaacaccgtaatttctactaagtgtagatatggtacgacagtgaggaagtaatttctactaagtgtagataggagctaacggcaagaatgttttttaagcttggcgtggatccgatatcaactagatcttgaga

SEQ ID NO: 2948 - DNA, 170 bp, Artificial sequence
  Ep300.310_Pbrm1.1236
  crRNA array
cgatttcttggctttatatatcttgtggaaaggacgaaacaccgtaatttctactaagtgtagatatggtacgacagtgaggaagtaatttctactaagtgtagatgccgataaaaccaacagccgttttttaagcttggcgtggatccgatatcaactagatcttgaga

SEQ ID NO: 2949 - DNA, 170 bp, Artificial sequence
  Ep300.310_Pbrm1.969
  crRNA array
cgatttcttggctttatatatcttgtggaaaggacgaaacaccgtaatttctactaagtgtagatatggtacgacagtgaggaagtaatttctactaagtgtagatgagccctaatgaacagctcattttttaagcttggcgtggatccgatatcaactagatcttgaga

SEQ ID NO: 2950 - DNA, 170 bp, Artificial sequence
  Ep300.310_Pik3r1.76
  crRNA array
cgatttcttggctttatatatcttgtggaaaggacgaaacaccgtaatttctactaagtgtagatatggtacgacagtgaggaagtaatttctactaagtgtagataaaacctatacggcccgcacttttttaagcttggcgtggatccgatatcaactagatcttgaga

SEQ ID NO: 2951 - DNA, 170 bp, Artificial sequence
  Ep300.310_Pik3r1.77
  crRNA array
cgatttcttggctttatatatcttgtggaaaggacgaaacaccgtaatttctactaagtgtagatatggtacgacagtgaggaagtaatttctactaagtgtagataaacctatacggcccgcactttttttaagcttggcgtggatccgatatcaactagatcttgaga

SEQ ID NO: 2952 - DNA, 170 bp, Artificial sequence
  Ep300.310_Pten.240
  crRNA array
cgatttcttggctttatatatcttgtggaaaggacgaaacaccgtaatttctactaagtgtagatatggtacgacagtgaggaagtaatttctactaagtgtagattgcatacgctatagctgcttttttttaagcttggcgtggatccgatatcaactagatcttgaga

SEQ ID NO: 2953 - DNA, 170 bp, Artificial sequence
  Ep300.310_Pten.265
  crRNA array
cgatttcttggctttatatatcttgtggaaaggacgaaacaccgtaatttctactaagtgtagatatggtacgacagtgaggaagtaatttctactaagtgtagataagcgtggtgcgtgacgcacttttttaagcttggcgtggatccgatatcaactagatcttgaga

SEQ ID NO: 2954 - DNA, 170 bp, Artificial sequence
  Ep300.310_Rasa1.1478
  crRNA array
cgatttcttggctttatatatcttgtggaaaggacgaaacaccgtaatttctactaagtgtagatatggtacgacagtgaggaagtaatttctactaagtgtagatcgataatggtctatgatgtcttttttaagcttggcgtggatccgatatcaactagatcttgaga

SEQ ID NO: 2955 - DNA, 170 bp, Artificial sequence
  Ep300.310_Rasa1.223
  crRNA array
cgatttcttggctttatatatcttgtggaaaggacgaaacaccgtaatttctactaagtgtagatatggtacgacagtgaggaagtaatttctactaagtgtagattccatggagtatcgtgctcgttttttaagcttggcgtggatccgatatcaactagatcttgaga

SEQ ID NO: 2956 - DNA, 170 bp, Artificial sequence
  Ep300.310_Rb1.211
  crRNA array
cgatttcttggctttatatatcttgtggaaaggacgaaacaccgtaatttctactaagtgtagatatggtacgacagtgaggaagtaatttctactaagtgtagattctgacatgatcgggtacctttttttaagcttggcgtggatccgatatcaactagatcttgaga

SEQ ID NO: 2957 - DNA, 170 bp, Artificial sequence
  Ep300.310_Rb1.394
  crRNA array
cgatttcttggctttatatatcttgtggaaaggacgaaacaccgtaatttctactaagtgtagatatggtacgacagtgaggaagtaatttctactaagtgtagatagaaatctcgaagcaggatcttttttaagcttggcgtggatccgatatcaactagatcttgaga

SEQ ID NO: 2958 - DNA, 170 bp, Artificial sequence
  Ep300.310_Rbm10.5
  crRNA array
cgatttcttggctttatatatcttgtggaaaggacgaaacaccgtaatttctactaagtgtagatatggtacgacagtgaggaagtaatttctactaagtgtagatacgaaacctgaacccacacattttttaagcttggcgtggatccgatatcaactagatcttgaga

SEQ ID NO: 2959 - DNA, 170 bp, Artificial sequence
  Ep300.310_Rbm10.6
  crRNA array
cgatttcttggctttatatatcttgtggaaaggacgaaacaccgtaatttctactaagtgtagatatggtacgacagtgaggaagtaatttctactaagtgtagatcgaaacctgaacccacacagttttttaagcttggcgtggatccgatatcaactagatcttgaga

SEQ ID NO: 2960 - DNA, 170 bp, Artificial sequence
  Ep300.310_Rnf43.1920
  crRNA array
cgatttcttggctttatatatcttgtggaaaggacgaaacaccgtaatttctactaagtgtagatatggtacgacagtgaggaagtaatttctactaagtgtagatatccccgtgccgtggactccttttttaagcttggcgtggatccgatatcaactagatcttgaga

SEQ ID NO: 2961 - DNA, 170 bp, Artificial sequence
  Ep300.310_Rnf43.39
  crRNA array
cgatttcttggctttatatatcttgtggaaaggacgaaacaccgtaatttctactaagtgtagatatggtacgacagtgaggaagtaatttctactaagtgtagatcaaggggatcactctgataattttttaagcttggcgtggatccgatatcaactagatcttgaga

SEQ ID NO: 2962 - DNA, 170 bp, Artificial sequence
  Ep300.310_Runx1.204
  crRNA array
cgatttcttggctttatatatcttgtggaaaggacgaaacaccgtaatttctactaagtgtagatatggtacgacagtgaggaagtaatttctactaagtgtagattaaataagtccagccgttttttttttaagcttggcgtggatccgatatcaactagatcttgaga

SEQ ID NO: 2963 - DNA, 170 bp, Artificial sequence
  Ep300.310_Runx1.81
  crRNA array
cgatttcttggctttatatatcttgtggaaaggacgaaacaccgtaatttctactaagtgtagatatggtacgacagtgaggaagtaatttctactaagtgtagataggacgcgtatgggaattttttttttaagcttggcgtggatccgatatcaactagatcttgaga

SEQ ID NO: 2964 - DNA, 170 bp, Artificial sequence
  Ep300.310_Setd2.143
  crRNA array
cgatttcttggctttatatatcttgtggaaaggacgaaacaccgtaatttctactaagtgtagatatggtacgacagtgaggaagtaatttctactaagtgtagatgcacaaccacaacagactggttttttaagcttggcgtggatccgatatcaactagatcttgaga

SEQ ID NO: 2965 - DNA, 170 bp, Artificial sequence
  Ep300.310_Setd2.508
  crRNA array
cgatttcttggctttatatatcttgtggaaaggacgaaacaccgtaatttctactaagtgtagatatggtacgacagtgaggaagtaatttctactaagtgtagattacgatcccgagcacccgacttttttaagcttggcgtggatccgatatcaactagatcttgaga

SEQ ID NO: 2966 - DNA, 170 bp, Artificial sequence
  Ep300.310_Smad4.3038
  crRNA array
cgatttcttggctttatatatcttgtggaaaggacgaaacaccgtaatttctactaagtgtagatatggtacgacagtgaggaagtaatttctactaagtgtagatatctgcggcagtgtcaccggttttttaagcttggcgtggatccgatatcaactagatcttgaga

SEQ ID NO: 2967 - DNA, 170 bp, Artificial sequence
  Ep300.310_Smad4.39
  crRNA array
cgatttcttggctttatatatcttgtggaaaggacgaaacaccgtaatttctactaagtgtagatatggtacgacagtgaggaagtaatttctactaagtgtagatagtcaaacgcatactgacaattttttaagcttggcgtggatccgatatcaactagatcttgaga

SEQ ID NO: 2968 - DNA, 170 bp, Artificial sequence
  Ep300.310_Stag2.1409
  crRNA array
cgatttcttggctttatatatcttgtggaaaggacgaaacaccgtaatttctactaagtgtagatatggtacgacagtgaggaagtaatttctactaagtgtagatgctaataactgcggaagggcttttttaagcttggcgtggatccgatatcaactagatcttgaga

SEQ ID NO: 2969 - DNA, 170 bp, Artificial sequence
  Ep300.310_Stag2.4401
  crRNA array
cgatttcttggctttatatatcttgtggaaaggacgaaacaccgtaatttctactaagtgtagatatggtacgacagtgaggaagtaatttctactaagtgtagattaatcgtccagtggtgtatattttttaagcttggcgtggatccgatatcaactagatcttgaga

SEQ ID NO: 2970 - DNA, 170 bp, Artificial sequence
  Ep300.310_Tbl1xr1.1
  crRNA array
cgatttcttggctttatatatcttgtggaaaggacgaaacaccgtaatttctactaagtgtagatatggtacgacagtgaggaagtaatttctactaagtgtagatggatgcgcatactggtgaagttttttaagcttggcgtggatccgatatcaactagatcttgaga

SEQ ID NO: 2971 - DNA, 170 bp, Artificial sequence
  Ep300.310_Tbl1xr1.83
  crRNA array
cgatttcttggctttatatatcttgtggaaaggacgaaacaccgtaatttctactaagtgtagatatggtacgacagtgaggaagtaatttctactaagtgtagatatggtcgacccatcgagtctttttttaagcttggcgtggatccgatatcaactagatcttgaga

SEQ ID NO: 2972 - DNA, 170 bp, Artificial sequence
  Ep300.310_Tgfbr2.290
  crRNA array
cgatttcttggctttatatatcttgtggaaaggacgaaacaccgtaatttctactaagtgtagatatggtacgacagtgaggaagtaatttctactaagtgtagatcctctcggcgcccgggtaaattttttaagcttggcgtggatccgatatcaactagatcttgaga

SEQ ID NO: 2973 - DNA, 170 bp, Artificial sequence
  Ep300.310_Tgfbr2.292
  crRNA array
cgatttcttggctttatatatcttgtggaaaggacgaaacaccgtaatttctactaagtgtagatatggtacgacagtgaggaagtaatttctactaagtgtagatcccgggcgccgagagggaaattttttaagcttggcgtggatccgatatcaactagatcttgaga

SEQ ID NO: 2974 - DNA, 170 bp, Artificial sequence
  Ep300.310_Trp53.4
  crRNA array
cgatttcttggctttatatatcttgtggaaaggacgaaacaccgtaatttctactaagtgtagatatggtacgacagtgaggaagtaatttctactaagtgtagatccctgaactgcccccagggattttttaagcttggcgtggatccgatatcaactagatcttgaga

SEQ ID NO: 2975 - DNA, 170 bp, Artificial sequence
  Ep300.310_Trp53.528
  crRNA array
cgatttcttggctttatatatcttgtggaaaggacgaaacaccgtaatttctactaagtgtagatatggtacgacagtgaggaagtaatttctactaagtgtagatgctgggccagcagagacctgttttttaagcttggcgtggatccgatatcaactagatcttgaga

SEQ ID NO: 2976 - DNA, 170 bp, Artificial sequence
  Ep300.310_Vhl.1
  crRNA array
cgatttcttggctttatatatcttgtggaaaggacgaaacaccgtaatttctactaagtgtagatatggtacgacagtgaggaagtaatttctactaagtgtagatagggctcccggcggccatttttttttaagcttggcgtggatccgatatcaactagatcttgaga

SEQ ID NO: 2977 - DNA, 170 bp, Artificial sequence
  Ep300.310_Vhl.151
  crRNA array
cgatttcttggctttatatatcttgtggaaaggacgaaacaccgtaatttctactaagtgtagatatggtacgacagtgaggaagtaatttctactaagtgtagattagagcactcacccgagggattttttaagcttggcgtggatccgatatcaactagatcttgaga

SEQ ID NO: 2978 - DNA, 170 bp, Artificial sequence
  Ep300.310_Zc3h13.1387
  crRNA array
cgatttcttggctttatatatcttgtggaaaggacgaaacaccgtaatttctactaagtgtagatatggtacgacagtgaggaagtaatttctactaagtgtagatgtgacgccggtcatgtgactttttttaagcttggcgtggatccgatatcaactagatcttgaga

SEQ ID NO: 2979 - DNA, 170 bp, Artificial sequence
  Ep300.310_Zc3h13.1777
  crRNA array
cgatttcttggctttatatatcttgtggaaaggacgaaacaccgtaatttctactaagtgtagatatggtacgacagtgaggaagtaatttctactaagtgtagatgatgctgccagtgtagcggcttttttaagcttggcgtggatccgatatcaactagatcttgaga

SEQ ID NO: 2980 - DNA, 170 bp, Artificial sequence
  Ep300.587_Acvr2a.155
  crRNA array
cgatttcttggctttatatatcttgtggaaaggacgaaacaccgtaatttctactaagtgtagatcgccccggggcccccaaccataatttctactaagtgtagatggacctggctaatcaagtatttttttaagcttggcgtggatccgatatcaactagatcttgaga

SEQ ID NO: 2981 - DNA, 170 bp, Artificial sequence
  Ep300.587_Acvr2a.70
  crRNA array
cgatttcttggctttatatatcttgtggaaaggacgaaacaccgtaatttctactaagtgtagatcgccccggggcccccaaccataatttctactaagtgtagatcccgaggcgccggagaagccttttttaagcttggcgtggatccgatatcaactagatcttgaga

SEQ ID NO: 2982 - DNA, 170 bp, Artificial sequence
  Ep300.587_Apc.21
  crRNA array
cgatttcttggctttatatatcttgtggaaaggacgaaacaccgtaatttctactaagtgtagatcgccccggggcccccaaccataatttctactaagtgtagatgtgatccacacgtgtagctgttttttaagcttggcgtggatccgatatcaactagatcttgaga

SEQ ID NO: 2983 - DNA, 170 bp, Artificial sequence
  Ep300.587_Apc.867
  crRNA array
cgatttcttggctttatatatcttgtggaaaggacgaaacaccgtaatttctactaagtgtagatcgccccggggcccccaaccataatttctactaagtgtagatcagtcccaggcggcggaagcttttttaagcttggcgtggatccgatatcaactagatcttgaga

SEQ ID NO: 2984 - DNA, 170 bp, Artificial sequence
  Ep300.587_Arid1a.2
  crRNA array
cgatttcttggctttatatatcttgtggaaaggacgaaacaccgtaatttctactaagtgtagatcgccccggggcccccaaccataatttctactaagtgtagatcccgcgcccccgtcctggggttttttaagcttggcgtggatccgatatcaactagatcttgaga

SEQ ID NO: 2985 - DNA, 170 bp, Artificial sequence
  Ep300.587_Arid1a.5
  crRNA array
cgatttcttggctttatatatcttgtggaaaggacgaaacaccgtaatttctactaagtgtagatcgccccggggcccccaaccataatttctactaagtgtagatcccgcgctcggccgctgccgttttttaagcttggcgtggatccgatatcaactagatcttgaga

SEQ ID NO: 2986 - DNA, 170 bp, Artificial sequence
  Ep300.587_Arid2.166
  crRNA array
cgatttcttggctttatatatcttgtggaaaggacgaaacaccgtaatttctactaagtgtagatcgccccggggcccccaaccataatttctactaagtgtagataaccgcgatctgggttttttttttttaagcttggcgtggatccgatatcaactagatcttgaga

SEQ ID NO: 2987 - DNA, 170 bp, Artificial sequence
  Ep300.587_Arid2.172
  crRNA array
cgatttcttggctttatatatcttgtggaaaggacgaaacaccgtaatttctactaagtgtagatcgccccggggcccccaaccataatttctactaagtgtagatctggacgagctgcggcagttttttttaagcttggcgtggatccgatatcaactagatcttgaga

SEQ ID NO: 2988 - DNA, 170 bp, Artificial sequence
  Ep300.587_Atm.120
  crRNA array
cgatttcttggctttatatatcttgtggaaaggacgaaacaccgtaatttctactaagtgtagatcgccccggggcccccaaccataatttctactaagtgtagatgacaggtagtcggcagctaattttttaagcttggcgtggatccgatatcaactagatcttgaga

SEQ ID NO: 2989 - DNA, 170 bp, Artificial sequence
  Ep300.587_Atm.997
  crRNA array
cgatttcttggctttatatatcttgtggaaaggacgaaacaccgtaatttctactaagtgtagatcgccccggggcccccaaccataatttctactaagtgtagatgagaaagtctccgaatcgttttttttaagcttggcgtggatccgatatcaactagatcttgaga

SEQ ID NO: 2990 - DNA, 170 bp, Artificial sequence
  Ep300.587_Atrx.249
  crRNA array
cgatttcttggctttatatatcttgtggaaaggacgaaacaccgtaatttctactaagtgtagatcgccccggggcccccaaccataatttctactaagtgtagattagccagtcgctcatatctcttttttaagcttggcgtggatccgatatcaactagatcttgaga

SEQ ID NO: 2991 - DNA, 170 bp, Artificial sequence
  Ep300.587_Atrx.251
  crRNA array
cgatttcttggctttatatatcttgtggaaaggacgaaacaccgtaatttctactaagtgtagatcgccccggggcccccaaccataatttctactaagtgtagatgccagtcgctcatatctctgttttttaagcttggcgtggatccgatatcaactagatcttgaga

SEQ ID NO: 2992 - DNA, 170 bp, Artificial sequence
  Ep300.587_Bcor.203
  crRNA array
cgatttcttggctttatatatcttgtggaaaggacgaaacaccgtaatttctactaagtgtagatcgccccggggcccccaaccataatttctactaagtgtagatccccggagcggagtccaggcttttttaagcttggcgtggatccgatatcaactagatcttgaga

SEQ ID NO: 2993 - DNA, 170 bp, Artificial sequence
  Ep300.587_Bcor.475
  crRNA array
cgatttcttggctttatatatcttgtggaaaggacgaaacaccgtaatttctactaagtgtagatcgccccggggcccccaaccataatttctactaagtgtagattgcaacccctctgtatgggattttttaagcttggcgtggatccgatatcaactagatcttgaga

SEQ ID NO: 2994 - DNA, 170 bp, Artificial sequence
  Ep300.587_Brca1.112
  crRNA array
cgatttcttggctttatatatcttgtggaaaggacgaaacaccgtaatttctactaagtgtagatcgccccggggcccccaaccataatttctactaagtgtagatctagacgctctgtggagactttttttaagcttggcgtggatccgatatcaactagatcttgaga

SEQ ID NO: 2995 - DNA, 170 bp, Artificial sequence
  Ep300.587_Brca1.53
  crRNA array
cgatttcttggctttatatatcttgtggaaaggacgaaacaccgtaatttctactaagtgtagatcgccccggggcccccaaccataatttctactaagtgtagataatgaggaggcgtcgatcatttttttaagcttggcgtggatccgatatcaactagatcttgaga

SEQ ID NO: 2996 - DNA, 170 bp, Artificial sequence
  Ep300.587_Casp8.45
  crRNA array
cgatttcttggctttatatatcttgtggaaaggacgaaacaccgtaatttctactaagtgtagatcgccccggggcccccaaccataatttctactaagtgtagatctaccgagatcctgtgaatgttttttaagcttggcgtggatccgatatcaactagatcttgaga

SEQ ID NO: 2997 - DNA, 170 bp, Artificial sequence
  Ep300.587_Casp8.54
  crRNA array
cgatttcttggctttatatatcttgtggaaaggacgaaacaccgtaatttctactaagtgtagatcgccccggggcccccaaccataatttctactaagtgtagatcagtgcagtcgtcgtaagatttttttaagcttggcgtggatccgatatcaactagatcttgaga

SEQ ID NO: 2998 - DNA, 170 bp, Artificial sequence
  Ep300.587_Cbwd1.84
  crRNA array
cgatttcttggctttatatatcttgtggaaaggacgaaacaccgtaatttctactaagtgtagatcgccccggggcccccaaccataatttctactaagtgtagatcacagcaggtaacatgccgcttttttaagcttggcgtggatccgatatcaactagatcttgaga

SEQ ID NO: 2999 - DNA, 170 bp, Artificial sequence
  Ep300.587_Cbwd1.85
  crRNA array
cgatttcttggctttatatatcttgtggaaaggacgaaacaccgtaatttctactaagtgtagatcgccccggggcccccaaccataatttctactaagtgtagatacagcaggtaacatgccgccttttttaagcttggcgtggatccgatatcaactagatcttgaga

SEQ ID NO: 3000 - DNA, 170 bp, Artificial sequence
  Ep300.587_Cdh1.387
  crRNA array
cgatttcttggctttatatatcttgtggaaaggacgaaacaccgtaatttctactaagtgtagatcgccccggggcccccaaccataatttctactaagtgtagatctcggcgtctgccgggtccgttttttaagcttggcgtggatccgatatcaactagatcttgaga

SEQ ID NO: 3001 - DNA, 170 bp, Artificial sequence
  Ep300.587_Cdh1.58
  crRNA array
cgatttcttggctttatatatcttgtggaaaggacgaaacaccgtaatttctactaagtgtagatcgccccggggcccccaaccataatttctactaagtgtagatctcgtccgcgcccgggactcttttttaagcttggcgtggatccgatatcaactagatcttgaga

SEQ ID NO: 3002 - DNA, 170 bp, Artificial sequence
  Ep300.587_Cdkn2a.647
  crRNA array
cgatttcttggctttatatatcttgtggaaaggacgaaacaccgtaatttctactaagtgtagatcgccccggggcccccaaccataatttctactaagtgtagatgcaatcacgggagggagcagttttttaagcttggcgtggatccgatatcaactagatcttgaga

SEQ ID NO: 3003 - DNA, 170 bp, Artificial sequence
  Ep300.587_Cdkn2a.648
  crRNA array
cgatttcttggctttatatatcttgtggaaaggacgaaacaccgtaatttctactaagtgtagatcgccccggggcccccaaccataatttctactaagtgtagatcaatcacgggagggagcagattttttaagcttggcgtggatccgatatcaactagatcttgaga

SEQ ID NO: 3004 - DNA, 170 bp, Artificial sequence
  Ep300.587_Cic.162
  crRNA array
cgatttcttggctttatatatcttgtggaaaggacgaaacaccgtaatttctactaagtgtagatcgccccggggcccccaaccataatttctactaagtgtagatcgcaggcgcgcccggcggagttttttaagcttggcgtggatccgatatcaactagatcttgaga

SEQ ID NO: 3005 - DNA, 170 bp, Artificial sequence
  Ep300.587_Cic.164
  crRNA array
cgatttcttggctttatatatcttgtggaaaggacgaaacaccgtaatttctactaagtgtagatcgccccggggcccccaaccataatttctactaagtgtagatcgggccctgggccggcggctttttttaagcttggcgtggatccgatatcaactagatcttgaga

SEQ ID NO: 3006 - DNA, 170 bp, Artificial sequence
  Ep300.587_Ctcf.229
  crRNA array
cgatttcttggctttatatatcttgtggaaaggacgaaacaccgtaatttctactaagtgtagatcgccccggggcccccaaccataatttctactaagtgtagatggctggtggctgatagtctgttttttaagcttggcgtggatccgatatcaactagatcttgaga

SEQ ID NO: 3007 - DNA, 170 bp, Artificial sequence
  Ep300.587_Ctcf.809
  crRNA array
cgatttcttggctttatatatcttgtggaaaggacgaaacaccgtaatttctactaagtgtagatcgccccggggcccccaaccataatttctactaagtgtagataagcgctatcatgatcccaattttttaagcttggcgtggatccgatatcaactagatcttgaga

SEQ ID NO: 3008 - DNA, 170 bp, Artificial sequence
  Ep300.587_Elf3.826
  crRNA array
cgatttcttggctttatatatcttgtggaaaggacgaaacaccgtaatttctactaagtgtagatcgccccggggcccccaaccataatttctactaagtgtagattccgagacatcctaatccacttttttaagcttggcgtggatccgatatcaactagatcttgaga

SEQ ID NO: 3009 - DNA, 170 bp, Artificial sequence
  Ep300.587_Elf3.983
  crRNA array
cgatttcttggctttatatatcttgtggaaaggacgaaacaccgtaatttctactaagtgtagatcgccccggggcccccaaccataatttctactaagtgtagattaggccccctaactggaccattttttaagcttggcgtggatccgatatcaactagatcttgaga

SEQ ID NO: 3010 - DNA, 170 bp, Artificial sequence
  Ep300.587_Epha2.126
  crRNA array
cgatttcttggctttatatatcttgtggaaaggacgaaacaccgtaatttctactaagtgtagatcgccccggggcccccaaccataatttctactaagtgtagatcctgtgccgccgcggccgccttttttaagcttggcgtggatccgatatcaactagatcttgaga

SEQ ID NO: 3011 - DNA, 170 bp, Artificial sequence
  Ep300.587_Epha2.5
  crRNA array
cgatttcttggctttatatatcttgtggaaaggacgaaacaccgtaatttctactaagtgtagatcgccccggggcccccaaccataatttctactaagtgtagatcatgagctggcgccacccggttttttaagcttggcgtggatccgatatcaactagatcttgaga

SEQ ID NO: 3012 - DNA, 170 bp, Artificial sequence
  Ep300.587_Fat1.105
  crRNA array
cgatttcttggctttatatatcttgtggaaaggacgaaacaccgtaatttctactaagtgtagatcgccccggggcccccaaccataatttctactaagtgtagataactcgaggtgacaacaagtttttttaagcttggcgtggatccgatatcaactagatcttgaga

SEQ ID NO: 3013 - DNA, 170 bp, Artificial sequence
  Ep300.587_Fat1.122
  crRNA array
cgatttcttggctttatatatcttgtggaaaggacgaaacaccgtaatttctactaagtgtagatcgccccggggcccccaaccataatttctactaagtgtagatccatcgacatggaaacgggattttttaagcttggcgtggatccgatatcaactagatcttgaga

SEQ ID NO: 3014 - DNA, 170 bp, Artificial sequence
  Ep300.587_Fbxw7.21
  crRNA array
cgatttcttggctttatatatcttgtggaaaggacgaaacaccgtaatttctactaagtgtagatcgccccggggcccccaaccataatttctactaagtgtagattaatgtgccgtagaaacccattttttaagcttggcgtggatccgatatcaactagatcttgaga

SEQ ID NO: 3015 - DNA, 170 bp, Artificial sequence
  Ep300.587_Fbxw7.23
  crRNA array
cgatttcttggctttatatatcttgtggaaaggacgaaacaccgtaatttctactaagtgtagatcgccccggggcccccaaccataatttctactaagtgtagatatgtgccgtagaaacccatattttttaagcttggcgtggatccgatatcaactagatcttgaga

SEQ ID NO: 3016 - DNA, 170 bp, Artificial sequence
  Ep300.587_Gata3.34
  crRNA array
cgatttcttggctttatatatcttgtggaaaggacgaaacaccgtaatttctactaagtgtagatcgccccggggcccccaaccataatttctactaagtgtagatctaaactatcccgcaaagatttttttaagcttggcgtggatccgatatcaactagatcttgaga

SEQ ID NO: 3017 - DNA, 170 bp, Artificial sequence
  Ep300.587_Gata3.47
  crRNA array
cgatttcttggctttatatatcttgtggaaaggacgaaacaccgtaatttctactaagtgtagatcgccccggggcccccaaccataatttctactaagtgtagatcgtagtaggacgggacgtggttttttaagcttggcgtggatccgatatcaactagatcttgaga

SEQ ID NO: 3018 - DNA, 170 bp, Artificial sequence
  Ep300.587_H2-Q2.1
  crRNA array
cgatttcttggctttatatatcttgtggaaaggacgaaacaccgtaatttctactaagtgtagatcgccccggggcccccaaccataatttctactaagtgtagatagggcggccaccaacagcagttttttaagcttggcgtggatccgatatcaactagatcttgaga

SEQ ID NO: 3019 - DNA, 170 bp, Artificial sequence
  Ep300.587_H2-Q2.2
  crRNA array
cgatttcttggctttatatatcttgtggaaaggacgaaacaccgtaatttctactaagtgtagatcgccccggggcccccaaccataatttctactaagtgtagattaacctgcgcccgctgctgattttttaagcttggcgtggatccgatatcaactagatcttgaga

SEQ ID NO: 3020 - DNA, 170 bp, Artificial sequence
  Ep300.587_Kdm5c.1878
  crRNA array
cgatttcttggctttatatatcttgtggaaaggacgaaacaccgtaatttctactaagtgtagatcgccccggggcccccaaccataatttctactaagtgtagatagagcacggcacccgcccccttttttaagcttggcgtggatccgatatcaactagatcttgaga

SEQ ID NO: 3021 - DNA, 170 bp, Artificial sequence
  Ep300.587_Kdm5c.1879
  crRNA array
cgatttcttggctttatatatcttgtggaaaggacgaaacaccgtaatttctactaagtgtagatcgccccggggcccccaaccataatttctactaagtgtagatgagcacggcacccgccccccttttttaagcttggcgtggatccgatatcaactagatcttgaga

SEQ ID NO: 3022 - DNA, 170 bp, Artificial sequence
  Ep300.587_Kdm6a.56
  crRNA array
cgatttcttggctttatatatcttgtggaaaggacgaaacaccgtaatttctactaagtgtagatcgccccggggcccccaaccataatttctactaagtgtagattcgctgccgcctctcgcggcttttttaagcttggcgtggatccgatatcaactagatcttgaga

SEQ ID NO: 3023 - DNA, 170 bp, Artificial sequence
  Ep300.587_Kdm6a.57
  crRNA array
cgatttcttggctttatatatcttgtggaaaggacgaaacaccgtaatttctactaagtgtagatcgccccggggcccccaaccataatttctactaagtgtagatcgctgccgcctctcgcggcattttttaagcttggcgtggatccgatatcaactagatcttgaga

SEQ ID NO: 3024 - DNA, 170 bp, Artificial sequence
  Ep300.587_Kmt2b.265
  crRNA array
cgatttcttggctttatatatcttgtggaaaggacgaaacaccgtaatttctactaagtgtagatcgccccggggcccccaaccataatttctactaagtgtagatccccaagtgaagcccacctgttttttaagcttggcgtggatccgatatcaactagatcttgaga

SEQ ID NO: 3025 - DNA, 170 bp, Artificial sequence
  Ep300.587_Kmt2b.298
  crRNA array
cgatttcttggctttatatatcttgtggaaaggacgaaacaccgtaatttctactaagtgtagatcgccccggggcccccaaccataatttctactaagtgtagattccggcagggaccggctggcttttttaagcttggcgtggatccgatatcaactagatcttgaga

SEQ ID NO: 3026 - DNA, 170 bp, Artificial sequence
  Ep300.587_Kmt2c.1962
  crRNA array
cgatttcttggctttatatatcttgtggaaaggacgaaacaccgtaatttctactaagtgtagatcgccccggggcccccaaccataatttctactaagtgtagatgtgacgatctgtgccacaagttttttaagcttggcgtggatccgatatcaactagatcttgaga

SEQ ID NO: 3027 - DNA, 170 bp, Artificial sequence
  Ep300.587_Kmt2c.2236
  crRNA array
cgatttcttggctttatatatcttgtggaaaggacgaaacaccgtaatttctactaagtgtagatcgccccggggcccccaaccataatttctactaagtgtagatactcgacctccacctccctattttttaagcttggcgtggatccgatatcaactagatcttgaga

SEQ ID NO: 3028 - DNA, 170 bp, Artificial sequence
  Ep300.587_Kmt2d.316
  crRNA array
cgatttcttggctttatatatcttgtggaaaggacgaaacaccgtaatttctactaagtgtagatcgccccggggcccccaaccataatttctactaagtgtagatactccaggccacccaggtggttttttaagcttggcgtggatccgatatcaactagatcttgaga

SEQ ID NO: 3029 - DNA, 170 bp, Artificial sequence
  Ep300.587_Kmt2d.416
  crRNA array
cgatttcttggctttatatatcttgtggaaaggacgaaacaccgtaatttctactaagtgtagatcgccccggggcccccaaccataatttctactaagtgtagattaaacccccgggggaagggtttttttaagcttggcgtggatccgatatcaactagatcttgaga

SEQ ID NO: 3030 - DNA, 170 bp, Artificial sequence
  Ep300.587_Map2k4.119
  crRNA array
cgatttcttggctttatatatcttgtggaaaggacgaaacaccgtaatttctactaagtgtagatcgccccggggcccccaaccataatttctactaagtgtagattgctgtgtgggcggccacatttttttaagcttggcgtggatccgatatcaactagatcttgaga

SEQ ID NO: 3031 - DNA, 170 bp, Artificial sequence
  Ep300.587_Map2k4.1261
  crRNA array
cgatttcttggctttatatatcttgtggaaaggacgaaacaccgtaatttctactaagtgtagatcgccccggggcccccaaccataatttctactaagtgtagatgatgtagtaatgcggagtagttttttaagcttggcgtggatccgatatcaactagatcttgaga

SEQ ID NO: 3032 - DNA, 170 bp, Artificial sequence
  Ep300.587_Map3k1.235
  crRNA array
cgatttcttggctttatatatcttgtggaaaggacgaaacaccgtaatttctactaagtgtagatcgccccggggcccccaaccataatttctactaagtgtagataaaacgctactgatcgatcgttttttaagcttggcgtggatccgatatcaactagatcttgaga

SEQ ID NO: 3033 - DNA, 170 bp, Artificial sequence
  Ep300.587_Map3k1.3838
  crRNA array
cgatttcttggctttatatatcttgtggaaaggacgaaacaccgtaatttctactaagtgtagatcgccccggggcccccaaccataatttctactaagtgtagatccaacaacagggccccactattttttaagcttggcgtggatccgatatcaactagatcttgaga

SEQ ID NO: 3034 - DNA, 170 bp, Artificial sequence
  Ep300.587_Mga.1655
  crRNA array
cgatttcttggctttatatatcttgtggaaaggacgaaacaccgtaatttctactaagtgtagatcgccccggggcccccaaccataatttctactaagtgtagatcgagaagtggagagcatattttttttaagcttggcgtggatccgatatcaactagatcttgaga

SEQ ID NO: 3035 - DNA, 170 bp, Artificial sequence
  Ep300.587_Mga.93
  crRNA array
cgatttcttggctttatatatcttgtggaaaggacgaaacaccgtaatttctactaagtgtagatcgccccggggcccccaaccataatttctactaagtgtagatgagaaggctccccataatgtttttttaagcttggcgtggatccgatatcaactagatcttgaga

SEQ ID NO: 3036 - DNA, 170 bp, Artificial sequence
  Ep300.587_Nf1.746
  crRNA array
cgatttcttggctttatatatcttgtggaaaggacgaaacaccgtaatttctactaagtgtagatcgccccggggcccccaaccataatttctactaagtgtagattaagcataatgatgatgccattttttaagcttggcgtggatccgatatcaactagatcttgaga

SEQ ID NO: 3037 - DNA, 170 bp, Artificial sequence
  Ep300.587_Nf1.97
  crRNA array
cgatttcttggctttatatatcttgtggaaaggacgaaacaccgtaatttctactaagtgtagatcgccccggggcccccaaccataatttctactaagtgtagatagcccgctacatgctgatgcttttttaagcttggcgtggatccgatatcaactagatcttgaga

SEQ ID NO: 3038 - DNA, 170 bp, Artificial sequence
  Ep300.587_Nf2.356
  crRNA array
cgatttcttggctttatatatcttgtggaaaggacgaaacaccgtaatttctactaagtgtagatcgccccggggcccccaaccataatttctactaagtgtagatcggagtcatctgatagagatttttttaagcttggcgtggatccgatatcaactagatcttgaga

SEQ ID NO: 3039 - DNA, 170 bp, Artificial sequence
  Ep300.587_Nf2.768
  crRNA array
cgatttcttggctttatatatcttgtggaaaggacgaaacaccgtaatttctactaagtgtagatcgccccggggcccccaaccataatttctactaagtgtagatccgaagccccagtgtccggcttttttaagcttggcgtggatccgatatcaactagatcttgaga

SEQ ID NO: 3040 - DNA, 170 bp, Artificial sequence
  Ep300.587_Notch1.1849
  crRNA array
cgatttcttggctttatatatcttgtggaaaggacgaaacaccgtaatttctactaagtgtagatcgccccggggcccccaaccataatttctactaagtgtagatctggcgggtgggcggcgctgttttttaagcttggcgtggatccgatatcaactagatcttgaga

SEQ ID NO: 3041 - DNA, 170 bp, Artificial sequence
  Ep300.587_Notch1.649
  crRNA array
cgatttcttggctttatatatcttgtggaaaggacgaaacaccgtaatttctactaagtgtagatcgccccggggcccccaaccataatttctactaagtgtagattgggccaacgatgccaggacttttttaagcttggcgtggatccgatatcaactagatcttgaga

SEQ ID NO: 3042 - DNA, 170 bp, Artificial sequence
  Ep300.587_Nsd1.70
  crRNA array
cgatttcttggctttatatatcttgtggaaaggacgaaacaccgtaatttctactaagtgtagatcgccccggggcccccaaccataatttctactaagtgtagatactggtgtggacgatgcagattttttaagcttggcgtggatccgatatcaactagatcttgaga

SEQ ID NO: 3043 - DNA, 170 bp, Artificial sequence
  Ep300.587_Nsd1.90
  crRNA array
cgatttcttggctttatatatcttgtggaaaggacgaaacaccgtaatttctactaagtgtagatcgccccggggcccccaaccataatttctactaagtgtagataggagctaacggcaagaatgttttttaagcttggcgtggatccgatatcaactagatcttgaga

SEQ ID NO: 3044 - DNA, 170 bp, Artificial sequence
  Ep300.587_Pbrm1.1236
  crRNA array
cgatttcttggctttatatatcttgtggaaaggacgaaacaccgtaatttctactaagtgtagatcgccccggggcccccaaccataatttctactaagtgtagatgccgataaaaccaacagccgttttttaagcttggcgtggatccgatatcaactagatcttgaga

SEQ ID NO: 3045 - DNA, 170 bp, Artificial sequence
  Ep300.587_Pbrm1.969
  crRNA array
cgatttcttggctttatatatcttgtggaaaggacgaaacaccgtaatttctactaagtgtagatcgccccggggcccccaaccataatttctactaagtgtagatgagccctaatgaacagctcattttttaagcttggcgtggatccgatatcaactagatcttgaga

SEQ ID NO: 3046 - DNA, 170 bp, Artificial sequence
  Ep300.587_Pik3r1.76
  crRNA array
cgatttcttggctttatatatcttgtggaaaggacgaaacaccgtaatttctactaagtgtagatcgccccggggcccccaaccataatttctactaagtgtagataaaacctatacggcccgcacttttttaagcttggcgtggatccgatatcaactagatcttgaga

SEQ ID NO: 3047 - DNA, 170 bp, Artificial sequence
  Ep300.587_Pik3r1.77
  crRNA array
cgatttcttggctttatatatcttgtggaaaggacgaaacaccgtaatttctactaagtgtagatcgccccggggcccccaaccataatttctactaagtgtagataaacctatacggcccgcactttttttaagcttggcgtggatccgatatcaactagatcttgaga

SEQ ID NO: 3048 - DNA, 170 bp, Artificial sequence
  Ep300.587_Pten.240
  crRNA array
cgatttcttggctttatatatcttgtggaaaggacgaaacaccgtaatttctactaagtgtagatcgccccggggcccccaaccataatttctactaagtgtagattgcatacgctatagctgcttttttttaagcttggcgtggatccgatatcaactagatcttgaga

SEQ ID NO: 3049 - DNA, 170 bp, Artificial sequence
  Ep300.587_Pten.265
  crRNA array
cgatttcttggctttatatatcttgtggaaaggacgaaacaccgtaatttctactaagtgtagatcgccccggggcccccaaccataatttctactaagtgtagataagcgtggtgcgtgacgcacttttttaagcttggcgtggatccgatatcaactagatcttgaga

SEQ ID NO: 3050 - DNA, 170 bp, Artificial sequence
  Ep300.587_Rasa1.1478
  crRNA array
cgatttcttggctttatatatcttgtggaaaggacgaaacaccgtaatttctactaagtgtagatcgccccggggcccccaaccataatttctactaagtgtagatcgataatggtctatgatgtcttttttaagcttggcgtggatccgatatcaactagatcttgaga

SEQ ID NO: 3051 - DNA, 170 bp, Artificial sequence
  Ep300.587_Rasa1.223
  crRNA array
cgatttcttggctttatatatcttgtggaaaggacgaaacaccgtaatttctactaagtgtagatcgccccggggcccccaaccataatttctactaagtgtagattccatggagtatcgtgctcgttttttaagcttggcgtggatccgatatcaactagatcttgaga

SEQ ID NO: 3052 - DNA, 170 bp, Artificial sequence
  Ep300.587_Rb1.211
  crRNA array
cgatttcttggctttatatatcttgtggaaaggacgaaacaccgtaatttctactaagtgtagatcgccccggggcccccaaccataatttctactaagtgtagattctgacatgatcgggtacctttttttaagcttggcgtggatccgatatcaactagatcttgaga

SEQ ID NO: 3053 - DNA, 170 bp, Artificial sequence
  Ep300.587_Rb1.394
  crRNA array
cgatttcttggctttatatatcttgtggaaaggacgaaacaccgtaatttctactaagtgtagatcgccccggggcccccaaccataatttctactaagtgtagatagaaatctcgaagcaggatcttttttaagcttggcgtggatccgatatcaactagatcttgaga

SEQ ID NO: 3054 - DNA, 170 bp, Artificial sequence
  Ep300.587_Rbm10.5
  crRNA array
cgatttcttggctttatatatcttgtggaaaggacgaaacaccgtaatttctactaagtgtagatcgccccggggcccccaaccataatttctactaagtgtagatacgaaacctgaacccacacattttttaagcttggcgtggatccgatatcaactagatcttgaga

SEQ ID NO: 3055 - DNA, 170 bp, Artificial sequence
  Ep300.587_Rbm10.6
  crRNA array
cgatttcttggctttatatatcttgtggaaaggacgaaacaccgtaatttctactaagtgtagatcgccccggggcccccaaccataatttctactaagtgtagatcgaaacctgaacccacacagttttttaagcttggcgtggatccgatatcaactagatcttgaga

SEQ ID NO: 3056 - DNA, 170 bp, Artificial sequence
  Ep300.587_Rnf43.1920
  crRNA array
cgatttcttggctttatatatcttgtggaaaggacgaaacaccgtaatttctactaagtgtagatcgccccggggcccccaaccataatttctactaagtgtagatatccccgtgccgtggactccttttttaagcttggcgtggatccgatatcaactagatcttgaga

SEQ ID NO: 3057 - DNA, 170 bp, Artificial sequence
  Ep300.587_Rnf43.39
  crRNA array
cgatttcttggctttatatatcttgtggaaaggacgaaacaccgtaatttctactaagtgtagatcgccccggggcccccaaccataatttctactaagtgtagatcaaggggatcactctgataattttttaagcttggcgtggatccgatatcaactagatcttgaga

SEQ ID NO: 3058 - DNA, 170 bp, Artificial sequence
  Ep300.587_Runx1.204
  crRNA array
cgatttcttggctttatatatcttgtggaaaggacgaaacaccgtaatttctactaagtgtagatcgccccggggcccccaaccataatttctactaagtgtagattaaataagtccagccgttttttttttaagcttggcgtggatccgatatcaactagatcttgaga

SEQ ID NO: 3059 - DNA, 170 bp, Artificial sequence
  Ep300.587_Runx1.81
  crRNA array
cgatttcttggctttatatatcttgtggaaaggacgaaacaccgtaatttctactaagtgtagatcgccccggggcccccaaccataatttctactaagtgtagataggacgcgtatgggaattttttttttaagcttggcgtggatccgatatcaactagatcttgaga

SEQ ID NO: 3060 - DNA, 170 bp, Artificial sequence
  Ep300.587_Setd2.143
  crRNA array
cgatttcttggctttatatatcttgtggaaaggacgaaacaccgtaatttctactaagtgtagatcgccccggggcccccaaccataatttctactaagtgtagatgcacaaccacaacagactggttttttaagcttggcgtggatccgatatcaactagatcttgaga

SEQ ID NO: 3061 - DNA, 170 bp, Artificial sequence
  Ep300.587_Setd2.508
  crRNA array
cgatttcttggctttatatatcttgtggaaaggacgaaacaccgtaatttctactaagtgtagatcgccccggggcccccaaccataatttctactaagtgtagattacgatcccgagcacccgacttttttaagcttggcgtggatccgatatcaactagatcttgaga

SEQ ID NO: 3062 - DNA, 170 bp, Artificial sequence
  Ep300.587_Smad4.3038
  crRNA array
cgatttcttggctttatatatcttgtggaaaggacgaaacaccgtaatttctactaagtgtagatcgccccggggcccccaaccataatttctactaagtgtagatatctgcggcagtgtcaccggttttttaagcttggcgtggatccgatatcaactagatcttgaga

SEQ ID NO: 3063 - DNA, 170 bp, Artificial sequence
  Ep300.587_Smad4.39
  crRNA array
cgatttcttggctttatatatcttgtggaaaggacgaaacaccgtaatttctactaagtgtagatcgccccggggcccccaaccataatttctactaagtgtagatagtcaaacgcatactgacaattttttaagcttggcgtggatccgatatcaactagatcttgaga

SEQ ID NO: 3064 - DNA, 170 bp, Artificial sequence
  Ep300.587_Stag2.1409
  crRNA array
cgatttcttggctttatatatcttgtggaaaggacgaaacaccgtaatttctactaagtgtagatcgccccggggcccccaaccataatttctactaagtgtagatgctaataactgcggaagggcttttttaagcttggcgtggatccgatatcaactagatcttgaga

SEQ ID NO: 3065 - DNA, 170 bp, Artificial sequence
  Ep300.587_Stag2.4401
  crRNA array
cgatttcttggctttatatatcttgtggaaaggacgaaacaccgtaatttctactaagtgtagatcgccccggggcccccaaccataatttctactaagtgtagattaatcgtccagtggtgtatattttttaagcttggcgtggatccgatatcaactagatcttgaga

SEQ ID NO: 3066 - DNA, 170 bp, Artificial sequence
  Ep300.587_Tbl1xr1.1
  crRNA array
cgatttcttggctttatatatcttgtggaaaggacgaaacaccgtaatttctactaagtgtagatcgccccggggcccccaaccataatttctactaagtgtagatggatgcgcatactggtgaagttttttaagcttggcgtggatccgatatcaactagatcttgaga

SEQ ID NO: 3067 - DNA, 170 bp, Artificial sequence
  Ep300.587_Tbl1xr1.83
  crRNA array
cgatttcttggctttatatatcttgtggaaaggacgaaacaccgtaatttctactaagtgtagatcgccccggggcccccaaccataatttctactaagtgtagatatggtcgacccatcgagtctttttttaagcttggcgtggatccgatatcaactagatcttgaga

SEQ ID NO: 3068 - DNA, 170 bp, Artificial sequence
  Ep300.587_Tgfbr2.290
  crRNA array
cgatttcttggctttatatatcttgtggaaaggacgaaacaccgtaatttctactaagtgtagatcgccccggggcccccaaccataatttctactaagtgtagatcctctcggcgcccgggtaaattttttaagcttggcgtggatccgatatcaactagatcttgaga

SEQ ID NO: 3069 - DNA, 170 bp, Artificial sequence
  Ep300.587_Tgfbr2.292
  crRNA array
cgatttcttggctttatatatcttgtggaaaggacgaaacaccgtaatttctactaagtgtagatcgccccggggcccccaaccataatttctactaagtgtagatcccgggcgccgagagggaaattttttaagcttggcgtggatccgatatcaactagatcttgaga

SEQ ID NO: 3070 - DNA, 170 bp, Artificial sequence
  Ep300.587_Trp53.4
  crRNA array
cgatttcttggctttatatatcttgtggaaaggacgaaacaccgtaatttctactaagtgtagatcgccccggggcccccaaccataatttctactaagtgtagatccctgaactgcccccagggattttttaagcttggcgtggatccgatatcaactagatcttgaga

SEQ ID NO: 3071 - DNA, 170 bp, Artificial sequence
  Ep300.587_Trp53.528
  crRNA array
cgatttcttggctttatatatcttgtggaaaggacgaaacaccgtaatttctactaagtgtagatcgccccggggcccccaaccataatttctactaagtgtagatgctgggccagcagagacctgttttttaagcttggcgtggatccgatatcaactagatcttgaga

SEQ ID NO: 3072 - DNA, 170 bp, Artificial sequence
  Ep300.587_Vhl.1
  crRNA array
cgatttcttggctttatatatcttgtggaaaggacgaaacaccgtaatttctactaagtgtagatcgccccggggcccccaaccataatttctactaagtgtagatagggctcccggcggccatttttttttaagcttggcgtggatccgatatcaactagatcttgaga

SEQ ID NO: 3073 - DNA, 170 bp, Artificial sequence
  Ep300.587_Vhl.151
  crRNA array
cgatttcttggctttatatatcttgtggaaaggacgaaacaccgtaatttctactaagtgtagatcgccccggggcccccaaccataatttctactaagtgtagattagagcactcacccgagggattttttaagcttggcgtggatccgatatcaactagatcttgaga

SEQ ID NO: 3074 - DNA, 170 bp, Artificial sequence
  Ep300.587_Zc3h13.1387
  crRNA array
cgatttcttggctttatatatcttgtggaaaggacgaaacaccgtaatttctactaagtgtagatcgccccggggcccccaaccataatttctactaagtgtagatgtgacgccggtcatgtgactttttttaagcttggcgtggatccgatatcaactagatcttgaga

SEQ ID NO: 3075 - DNA, 170 bp, Artificial sequence
  Ep300.587_Zc3h13.1777
  crRNA array
cgatttcttggctttatatatcttgtggaaaggacgaaacaccgtaatttctactaagtgtagatcgccccggggcccccaaccataatttctactaagtgtagatgatgctgccagtgtagcggcttttttaagcttggcgtggatccgatatcaactagatcttgaga

SEQ ID NO: 3076 - DNA, 170 bp, Artificial sequence
  Epha2.126_Acvr2a.155
  crRNA array
cgatttcttggctttatatatcttgtggaaaggacgaaacaccgtaatttctactaagtgtagatcctgtgccgccgcggccgcctaatttctactaagtgtagatggacctggctaatcaagtatttttttaagcttggcgtggatccgatatcaactagatcttgaga

SEQ ID NO: 3077 - DNA, 170 bp, Artificial sequence
  Epha2.126_Acvr2a.70
  crRNA array
cgatttcttggctttatatatcttgtggaaaggacgaaacaccgtaatttctactaagtgtagatcctgtgccgccgcggccgcctaatttctactaagtgtagatcccgaggcgccggagaagccttttttaagcttggcgtggatccgatatcaactagatcttgaga

SEQ ID NO: 3078 - DNA, 170 bp, Artificial sequence
  Epha2.126_Apc.21
  crRNA array
cgatttcttggctttatatatcttgtggaaaggacgaaacaccgtaatttctactaagtgtagatcctgtgccgccgcggccgcctaatttctactaagtgtagatgtgatccacacgtgtagctgttttttaagcttggcgtggatccgatatcaactagatcttgaga

SEQ ID NO: 3079 - DNA, 170 bp, Artificial sequence
  Epha2.126_Apc.867
  crRNA array
cgatttcttggctttatatatcttgtggaaaggacgaaacaccgtaatttctactaagtgtagatcctgtgccgccgcggccgcctaatttctactaagtgtagatcagtcccaggcggcggaagcttttttaagcttggcgtggatccgatatcaactagatcttgaga

SEQ ID NO: 3080 - DNA, 170 bp, Artificial sequence
  Epha2.126_Arid1a.2
  crRNA array
cgatttcttggctttatatatcttgtggaaaggacgaaacaccgtaatttctactaagtgtagatcctgtgccgccgcggccgcctaatttctactaagtgtagatcccgcgcccccgtcctggggttttttaagcttggcgtggatccgatatcaactagatcttgaga

SEQ ID NO: 3081 - DNA, 170 bp, Artificial sequence
  Epha2.126_Arid1a.5
  crRNA array
cgatttcttggctttatatatcttgtggaaaggacgaaacaccgtaatttctactaagtgtagatcctgtgccgccgcggccgcctaatttctactaagtgtagatcccgcgctcggccgctgccgttttttaagcttggcgtggatccgatatcaactagatcttgaga

SEQ ID NO: 3082 - DNA, 170 bp, Artificial sequence
  Epha2.126_Arid2.166
  crRNA array
cgatttcttggctttatatatcttgtggaaaggacgaaacaccgtaatttctactaagtgtagatcctgtgccgccgcggccgcctaatttctactaagtgtagataaccgcgatctgggttttttttttttaagcttggcgtggatccgatatcaactagatcttgaga

SEQ ID NO: 3083 - DNA, 170 bp, Artificial sequence
  Epha2.126_Arid2.172
  crRNA array
cgatttcttggctttatatatcttgtggaaaggacgaaacaccgtaatttctactaagtgtagatcctgtgccgccgcggccgcctaatttctactaagtgtagatctggacgagctgcggcagttttttttaagcttggcgtggatccgatatcaactagatcttgaga

SEQ ID NO: 3084 - DNA, 170 bp, Artificial sequence
  Epha2.126_Atm.120
  crRNA array
cgatttcttggctttatatatcttgtggaaaggacgaaacaccgtaatttctactaagtgtagatcctgtgccgccgcggccgcctaatttctactaagtgtagatgacaggtagtcggcagctaattttttaagcttggcgtggatccgatatcaactagatcttgaga

SEQ ID NO: 3085 - DNA, 170 bp, Artificial sequence
  Epha2.126_Atm.997
  crRNA array
cgatttcttggctttatatatcttgtggaaaggacgaaacaccgtaatttctactaagtgtagatcctgtgccgccgcggccgcctaatttctactaagtgtagatgagaaagtctccgaatcgttttttttaagcttggcgtggatccgatatcaactagatcttgaga

SEQ ID NO: 3086 - DNA, 170 bp, Artificial sequence
  Epha2.126_Atrx.249
  crRNA array
cgatttcttggctttatatatcttgtggaaaggacgaaacaccgtaatttctactaagtgtagatcctgtgccgccgcggccgcctaatttctactaagtgtagattagccagtcgctcatatctcttttttaagcttggcgtggatccgatatcaactagatcttgaga

SEQ ID NO: 3087 - DNA, 170 bp, Artificial sequence
  Epha2.126_Atrx.251
  crRNA array
cgatttcttggctttatatatcttgtggaaaggacgaaacaccgtaatttctactaagtgtagatcctgtgccgccgcggccgcctaatttctactaagtgtagatgccagtcgctcatatctctgttttttaagcttggcgtggatccgatatcaactagatcttgaga

SEQ ID NO: 3088 - DNA, 170 bp, Artificial sequence
  Epha2.126_Bcor.203
  crRNA array
cgatttcttggctttatatatcttgtggaaaggacgaaacaccgtaatttctactaagtgtagatcctgtgccgccgcggccgcctaatttctactaagtgtagatccccggagcggagtccaggcttttttaagcttggcgtggatccgatatcaactagatcttgaga

SEQ ID NO: 3089 - DNA, 170 bp, Artificial sequence
  Epha2.126_Bcor.475
  crRNA array
cgatttcttggctttatatatcttgtggaaaggacgaaacaccgtaatttctactaagtgtagatcctgtgccgccgcggccgcctaatttctactaagtgtagattgcaacccctctgtatgggattttttaagcttggcgtggatccgatatcaactagatcttgaga

SEQ ID NO: 3090 - DNA, 170 bp, Artificial sequence
  Epha2.126_Brca1.112
  crRNA array
cgatttcttggctttatatatcttgtggaaaggacgaaacaccgtaatttctactaagtgtagatcctgtgccgccgcggccgcctaatttctactaagtgtagatctagacgctctgtggagactttttttaagcttggcgtggatccgatatcaactagatcttgaga

SEQ ID NO: 3091 - DNA, 170 bp, Artificial sequence
  Epha2.126_Brca1.53
  crRNA array
cgatttcttggctttatatatcttgtggaaaggacgaaacaccgtaatttctactaagtgtagatcctgtgccgccgcggccgcctaatttctactaagtgtagataatgaggaggcgtcgatcatttttttaagcttggcgtggatccgatatcaactagatcttgaga

SEQ ID NO: 3092 - DNA, 170 bp, Artificial sequence
  Epha2.126_Casp8.45
  crRNA array
cgatttcttggctttatatatcttgtggaaaggacgaaacaccgtaatttctactaagtgtagatcctgtgccgccgcggccgcctaatttctactaagtgtagatctaccgagatcctgtgaatgttttttaagcttggcgtggatccgatatcaactagatcttgaga

SEQ ID NO: 3093 - DNA, 170 bp, Artificial sequence
  Epha2.126_Casp8.54
  crRNA array
cgatttcttggctttatatatcttgtggaaaggacgaaacaccgtaatttctactaagtgtagatcctgtgccgccgcggccgcctaatttctactaagtgtagatcagtgcagtcgtcgtaagatttttttaagcttggcgtggatccgatatcaactagatcttgaga

SEQ ID NO: 3094 - DNA, 170 bp, Artificial sequence
  Epha2.126_Cbwd1.84
  crRNA array
cgatttcttggctttatatatcttgtggaaaggacgaaacaccgtaatttctactaagtgtagatcctgtgccgccgcggccgcctaatttctactaagtgtagatcacagcaggtaacatgccgcttttttaagcttggcgtggatccgatatcaactagatcttgaga

SEQ ID NO: 3095 - DNA, 170 bp, Artificial sequence
  Epha2.126_Cbwd1.85
  crRNA array
cgatttcttggctttatatatcttgtggaaaggacgaaacaccgtaatttctactaagtgtagatcctgtgccgccgcggccgcctaatttctactaagtgtagatacagcaggtaacatgccgccttttttaagcttggcgtggatccgatatcaactagatcttgaga

SEQ ID NO: 3096 - DNA, 170 bp, Artificial sequence
  Epha2.126_Cdh1.387
  crRNA array
cgatttcttggctttatatatcttgtggaaaggacgaaacaccgtaatttctactaagtgtagatcctgtgccgccgcggccgcctaatttctactaagtgtagatctcggcgtctgccgggtccgttttttaagcttggcgtggatccgatatcaactagatcttgaga

SEQ ID NO: 3097 - DNA, 170 bp, Artificial sequence
  Epha2.126_Cdh1.58
  crRNA array
cgatttcttggctttatatatcttgtggaaaggacgaaacaccgtaatttctactaagtgtagatcctgtgccgccgcggccgcctaatttctactaagtgtagatctcgtccgcgcccgggactcttttttaagcttggcgtggatccgatatcaactagatcttgaga

SEQ ID NO: 3098 - DNA, 170 bp, Artificial sequence
  Epha2.126_Cdkn2a.647
  crRNA array
cgatttcttggctttatatatcttgtggaaaggacgaaacaccgtaatttctactaagtgtagatcctgtgccgccgcggccgcctaatttctactaagtgtagatgcaatcacgggagggagcagttttttaagcttggcgtggatccgatatcaactagatcttgaga

SEQ ID NO: 3099 - DNA, 170 bp, Artificial sequence
  Epha2.126_Cdkn2a.648
  crRNA array
cgatttcttggctttatatatcttgtggaaaggacgaaacaccgtaatttctactaagtgtagatcctgtgccgccgcggccgcctaatttctactaagtgtagatcaatcacgggagggagcagattttttaagcttggcgtggatccgatatcaactagatcttgaga

SEQ ID NO: 3100 - DNA, 170 bp, Artificial sequence
  Epha2.126_Cic.162
  crRNA array
cgatttcttggctttatatatcttgtggaaaggacgaaacaccgtaatttctactaagtgtagatcctgtgccgccgcggccgcctaatttctactaagtgtagatcgcaggcgcgcccggcggagttttttaagcttggcgtggatccgatatcaactagatcttgaga

SEQ ID NO: 3101 - DNA, 170 bp, Artificial sequence
  Epha2.126_Cic.164
  crRNA array
cgatttcttggctttatatatcttgtggaaaggacgaaacaccgtaatttctactaagtgtagatcctgtgccgccgcggccgcctaatttctactaagtgtagatcgggccctgggccggcggctttttttaagcttggcgtggatccgatatcaactagatcttgaga

SEQ ID NO: 3102 - DNA, 170 bp, Artificial sequence
  Epha2.126_Ctcf.229
  crRNA array
cgatttcttggctttatatatcttgtggaaaggacgaaacaccgtaatttctactaagtgtagatcctgtgccgccgcggccgcctaatttctactaagtgtagatggctggtggctgatagtctgttttttaagcttggcgtggatccgatatcaactagatcttgaga

SEQ ID NO: 3103 - DNA, 170 bp, Artificial sequence
  Epha2.126_Ctcf.809
  crRNA array
cgatttcttggctttatatatcttgtggaaaggacgaaacaccgtaatttctactaagtgtagatcctgtgccgccgcggccgcctaatttctactaagtgtagataagcgctatcatgatcccaattttttaagcttggcgtggatccgatatcaactagatcttgaga

SEQ ID NO: 3104 - DNA, 170 bp, Artificial sequence
  Epha2.126_Elf3.826
  crRNA array
cgatttcttggctttatatatcttgtggaaaggacgaaacaccgtaatttctactaagtgtagatcctgtgccgccgcggccgcctaatttctactaagtgtagattccgagacatcctaatccacttttttaagcttggcgtggatccgatatcaactagatcttgaga

SEQ ID NO: 3105 - DNA, 170 bp, Artificial sequence
  Epha2.126_Elf3.983
  crRNA array
cgatttcttggctttatatatcttgtggaaaggacgaaacaccgtaatttctactaagtgtagatcctgtgccgccgcggccgcctaatttctactaagtgtagattaggccccctaactggaccattttttaagcttggcgtggatccgatatcaactagatcttgaga

SEQ ID NO: 3106 - DNA, 170 bp, Artificial sequence
  Epha2.126_Ep300.310
  crRNA array
cgatttcttggctttatatatcttgtggaaaggacgaaacaccgtaatttctactaagtgtagatcctgtgccgccgcggccgcctaatttctactaagtgtagatatggtacgacagtgaggaagttttttaagcttggcgtggatccgatatcaactagatcttgaga

SEQ ID NO: 3107 - DNA, 170 bp, Artificial sequence
  Epha2.126_Ep300.587
  crRNA array
cgatttcttggctttatatatcttgtggaaaggacgaaacaccgtaatttctactaagtgtagatcctgtgccgccgcggccgcctaatttctactaagtgtagatcgccccggggcccccaaccattttttaagcttggcgtggatccgatatcaactagatcttgaga

SEQ ID NO: 3108 - DNA, 170 bp, Artificial sequence
  Epha2.126_Fat1.105
  crRNA array
cgatttcttggctttatatatcttgtggaaaggacgaaacaccgtaatttctactaagtgtagatcctgtgccgccgcggccgcctaatttctactaagtgtagataactcgaggtgacaacaagtttttttaagcttggcgtggatccgatatcaactagatcttgaga

SEQ ID NO: 3109 - DNA, 170 bp, Artificial sequence
  Epha2.126_Fat1.122
  crRNA array
cgatttcttggctttatatatcttgtggaaaggacgaaacaccgtaatttctactaagtgtagatcctgtgccgccgcggccgcctaatttctactaagtgtagatccatcgacatggaaacgggattttttaagcttggcgtggatccgatatcaactagatcttgaga

SEQ ID NO: 3110 - DNA, 170 bp, Artificial sequence
  Epha2.126_Fbxw7.21
  crRNA array
cgatttcttggctttatatatcttgtggaaaggacgaaacaccgtaatttctactaagtgtagatcctgtgccgccgcggccgcctaatttctactaagtgtagattaatgtgccgtagaaacccattttttaagcttggcgtggatccgatatcaactagatcttgaga

SEQ ID NO: 3111 - DNA, 170 bp, Artificial sequence
  Epha2.126_Fbxw7.23
  crRNA array
cgatttcttggctttatatatcttgtggaaaggacgaaacaccgtaatttctactaagtgtagatcctgtgccgccgcggccgcctaatttctactaagtgtagatatgtgccgtagaaacccatattttttaagcttggcgtggatccgatatcaactagatcttgaga

SEQ ID NO: 3112 - DNA, 170 bp, Artificial sequence
  Epha2.126_Gata3.34
  crRNA array
cgatttcttggctttatatatcttgtggaaaggacgaaacaccgtaatttctactaagtgtagatcctgtgccgccgcggccgcctaatttctactaagtgtagatctaaactatcccgcaaagatttttttaagcttggcgtggatccgatatcaactagatcttgaga

SEQ ID NO: 3113 - DNA, 170 bp, Artificial sequence
  Epha2.126_Gata3.47
  crRNA array
cgatttcttggctttatatatcttgtggaaaggacgaaacaccgtaatttctactaagtgtagatcctgtgccgccgcggccgcctaatttctactaagtgtagatcgtagtaggacgggacgtggttttttaagcttggcgtggatccgatatcaactagatcttgaga

SEQ ID NO: 3114 - DNA, 170 bp, Artificial sequence
  Epha2.126_H2-Q2.1
  crRNA array
cgatttcttggctttatatatcttgtggaaaggacgaaacaccgtaatttctactaagtgtagatcctgtgccgccgcggccgcctaatttctactaagtgtagatagggcggccaccaacagcagttttttaagcttggcgtggatccgatatcaactagatcttgaga

SEQ ID NO: 3115 - DNA, 170 bp, Artificial sequence
  Epha2.126_H2-Q2.2
  crRNA array
cgatttcttggctttatatatcttgtggaaaggacgaaacaccgtaatttctactaagtgtagatcctgtgccgccgcggccgcctaatttctactaagtgtagattaacctgcgcccgctgctgattttttaagcttggcgtggatccgatatcaactagatcttgaga

SEQ ID NO: 3116 - DNA, 170 bp, Artificial sequence
  Epha2.126_Kdm5c.1878
  crRNA array
cgatttcttggctttatatatcttgtggaaaggacgaaacaccgtaatttctactaagtgtagatcctgtgccgccgcggccgcctaatttctactaagtgtagatagagcacggcacccgcccccttttttaagcttggcgtggatccgatatcaactagatcttgaga

SEQ ID NO: 3117 - DNA, 170 bp, Artificial sequence
  Epha2.126_Kdm5c.1879
  crRNA array
cgatttcttggctttatatatcttgtggaaaggacgaaacaccgtaatttctactaagtgtagatcctgtgccgccgcggccgcctaatttctactaagtgtagatgagcacggcacccgccccccttttttaagcttggcgtggatccgatatcaactagatcttgaga

SEQ ID NO: 3118 - DNA, 170 bp, Artificial sequence
  Epha2.126_Kdm6a.56
  crRNA array
cgatttcttggctttatatatcttgtggaaaggacgaaacaccgtaatttctactaagtgtagatcctgtgccgccgcggccgcctaatttctactaagtgtagattcgctgccgcctctcgcggcttttttaagcttggcgtggatccgatatcaactagatcttgaga

SEQ ID NO: 3119 - DNA, 170 bp, Artificial sequence
  Epha2.126_Kdm6a.57
  crRNA array
cgatttcttggctttatatatcttgtggaaaggacgaaacaccgtaatttctactaagtgtagatcctgtgccgccgcggccgcctaatttctactaagtgtagatcgctgccgcctctcgcggcattttttaagcttggcgtggatccgatatcaactagatcttgaga

SEQ ID NO: 3120 - DNA, 170 bp, Artificial sequence
  Epha2.126_Kmt2b.265
  crRNA array
cgatttcttggctttatatatcttgtggaaaggacgaaacaccgtaatttctactaagtgtagatcctgtgccgccgcggccgcctaatttctactaagtgtagatccccaagtgaagcccacctgttttttaagcttggcgtggatccgatatcaactagatcttgaga

SEQ ID NO: 3121 - DNA, 170 bp, Artificial sequence
  Epha2.126_Kmt2b.298
  crRNA array
cgatttcttggctttatatatcttgtggaaaggacgaaacaccgtaatttctactaagtgtagatcctgtgccgccgcggccgcctaatttctactaagtgtagattccggcagggaccggctggcttttttaagcttggcgtggatccgatatcaactagatcttgaga

SEQ ID NO: 3122 - DNA, 170 bp, Artificial sequence
  Epha2.126_Kmt2c.1962
  crRNA array
cgatttcttggctttatatatcttgtggaaaggacgaaacaccgtaatttctactaagtgtagatcctgtgccgccgcggccgcctaatttctactaagtgtagatgtgacgatctgtgccacaagttttttaagcttggcgtggatccgatatcaactagatcttgaga

SEQ ID NO: 3123 - DNA, 170 bp, Artificial sequence
  Epha2.126_Kmt2c.2236
  crRNA array
cgatttcttggctttatatatcttgtggaaaggacgaaacaccgtaatttctactaagtgtagatcctgtgccgccgcggccgcctaatttctactaagtgtagatactcgacctccacctccctattttttaagcttggcgtggatccgatatcaactagatcttgaga

SEQ ID NO: 3124 - DNA, 170 bp, Artificial sequence
  Epha2.126_Kmt2d.316
  crRNA array
cgatttcttggctttatatatcttgtggaaaggacgaaacaccgtaatttctactaagtgtagatcctgtgccgccgcggccgcctaatttctactaagtgtagatactccaggccacccaggtggttttttaagcttggcgtggatccgatatcaactagatcttgaga

SEQ ID NO: 3125 - DNA, 170 bp, Artificial sequence
  Epha2.126_Kmt2d.416
  crRNA array
cgatttcttggctttatatatcttgtggaaaggacgaaacaccgtaatttctactaagtgtagatcctgtgccgccgcggccgcctaatttctactaagtgtagattaaacccccgggggaagggtttttttaagcttggcgtggatccgatatcaactagatcttgaga

SEQ ID NO: 3126 - DNA, 170 bp, Artificial sequence
  Epha2.126_Map2k4.119
  crRNA array
cgatttcttggctttatatatcttgtggaaaggacgaaacaccgtaatttctactaagtgtagatcctgtgccgccgcggccgcctaatttctactaagtgtagattgctgtgtgggcggccacatttttttaagcttggcgtggatccgatatcaactagatcttgaga

SEQ ID NO: 3127 - DNA, 170 bp, Artificial sequence
  Epha2.126_Map2k4.1261
  crRNA array
cgatttcttggctttatatatcttgtggaaaggacgaaacaccgtaatttctactaagtgtagatcctgtgccgccgcggccgcctaatttctactaagtgtagatgatgtagtaatgcggagtagttttttaagcttggcgtggatccgatatcaactagatcttgaga

SEQ ID NO: 3128 - DNA, 170 bp, Artificial sequence
  Epha2.126_Map3k1.235
  crRNA array
cgatttcttggctttatatatcttgtggaaaggacgaaacaccgtaatttctactaagtgtagatcctgtgccgccgcggccgcctaatttctactaagtgtagataaaacgctactgatcgatcgttttttaagcttggcgtggatccgatatcaactagatcttgaga

SEQ ID NO: 3129 - DNA, 170 bp, Artificial sequence
  Epha2.126_Map3k1.3838
  crRNA array
cgatttcttggctttatatatcttgtggaaaggacgaaacaccgtaatttctactaagtgtagatcctgtgccgccgcggccgcctaatttctactaagtgtagatccaacaacagggccccactattttttaagcttggcgtggatccgatatcaactagatcttgaga

SEQ ID NO: 3130 - DNA, 170 bp, Artificial sequence
  Epha2.126_Mga.1655
  crRNA array
cgatttcttggctttatatatcttgtggaaaggacgaaacaccgtaatttctactaagtgtagatcctgtgccgccgcggccgcctaatttctactaagtgtagatcgagaagtggagagcatattttttttaagcttggcgtggatccgatatcaactagatcttgaga

SEQ ID NO: 3131 - DNA, 170 bp, Artificial sequence
  Epha2.126_Mga.93
  crRNA array
cgatttcttggctttatatatcttgtggaaaggacgaaacaccgtaatttctactaagtgtagatcctgtgccgccgcggccgcctaatttctactaagtgtagatgagaaggctccccataatgtttttttaagcttggcgtggatccgatatcaactagatcttgaga

SEQ ID NO: 3132 - DNA, 170 bp, Artificial sequence
  Epha2.126_Nf1.746
  crRNA array
cgatttcttggctttatatatcttgtggaaaggacgaaacaccgtaatttctactaagtgtagatcctgtgccgccgcggccgcctaatttctactaagtgtagattaagcataatgatgatgccattttttaagcttggcgtggatccgatatcaactagatcttgaga

SEQ ID NO: 3133 - DNA, 170 bp, Artificial sequence
  Epha2.126_Nf1.97
  crRNA array
cgatttcttggctttatatatcttgtggaaaggacgaaacaccgtaatttctactaagtgtagatcctgtgccgccgcggccgcctaatttctactaagtgtagatagcccgctacatgctgatgcttttttaagcttggcgtggatccgatatcaactagatcttgaga

SEQ ID NO: 3134 - DNA, 170 bp, Artificial sequence
  Epha2.126_Nf2.356
  crRNA array
cgatttcttggctttatatatcttgtggaaaggacgaaacaccgtaatttctactaagtgtagatcctgtgccgccgcggccgcctaatttctactaagtgtagatcggagtcatctgatagagatttttttaagcttggcgtggatccgatatcaactagatcttgaga

SEQ ID NO: 3135 - DNA, 170 bp, Artificial sequence
  Epha2.126_Nf2.768
  crRNA array
cgatttcttggctttatatatcttgtggaaaggacgaaacaccgtaatttctactaagtgtagatcctgtgccgccgcggccgcctaatttctactaagtgtagatccgaagccccagtgtccggcttttttaagcttggcgtggatccgatatcaactagatcttgaga

SEQ ID NO: 3136 - DNA, 170 bp, Artificial sequence
  Epha2.126_Notch1.1849
  crRNA array
cgatttcttggctttatatatcttgtggaaaggacgaaacaccgtaatttctactaagtgtagatcctgtgccgccgcggccgcctaatttctactaagtgtagatctggcgggtgggcggcgctgttttttaagcttggcgtggatccgatatcaactagatcttgaga

SEQ ID NO: 3137 - DNA, 170 bp, Artificial sequence
  Epha2.126_Notch1.649
  crRNA array
cgatttcttggctttatatatcttgtggaaaggacgaaacaccgtaatttctactaagtgtagatcctgtgccgccgcggccgcctaatttctactaagtgtagattgggccaacgatgccaggacttttttaagcttggcgtggatccgatatcaactagatcttgaga

SEQ ID NO: 3138 - DNA, 170 bp, Artificial sequence
  Epha2.126_Nsd1.70
  crRNA array
cgatttcttggctttatatatcttgtggaaaggacgaaacaccgtaatttctactaagtgtagatcctgtgccgccgcggccgcctaatttctactaagtgtagatactggtgtggacgatgcagattttttaagcttggcgtggatccgatatcaactagatcttgaga

SEQ ID NO: 3139 - DNA, 170 bp, Artificial sequence
  Epha2.126_Nsd1.90
  crRNA array
cgatttcttggctttatatatcttgtggaaaggacgaaacaccgtaatttctactaagtgtagatcctgtgccgccgcggccgcctaatttctactaagtgtagataggagctaacggcaagaatgttttttaagcttggcgtggatccgatatcaactagatcttgaga

SEQ ID NO: 3140 - DNA, 170 bp, Artificial sequence
  Epha2.126_Pbrm1.1236
  crRNA array
cgatttcttggctttatatatcttgtggaaaggacgaaacaccgtaatttctactaagtgtagatcctgtgccgccgcggccgcctaatttctactaagtgtagatgccgataaaaccaacagccgttttttaagcttggcgtggatccgatatcaactagatcttgaga

SEQ ID NO: 3141 - DNA, 170 bp, Artificial sequence
  Epha2.126_Pbrm1.969
  crRNA array
cgatttcttggctttatatatcttgtggaaaggacgaaacaccgtaatttctactaagtgtagatcctgtgccgccgcggccgcctaatttctactaagtgtagatgagccctaatgaacagctcattttttaagcttggcgtggatccgatatcaactagatcttgaga

SEQ ID NO: 3142 - DNA, 170 bp, Artificial sequence
  Epha2.126_Pik3r1.76
  crRNA array
cgatttcttggctttatatatcttgtggaaaggacgaaacaccgtaatttctactaagtgtagatcctgtgccgccgcggccgcctaatttctactaagtgtagataaaacctatacggcccgcacttttttaagcttggcgtggatccgatatcaactagatcttgaga

SEQ ID NO: 3143 - DNA, 170 bp, Artificial sequence
  Epha2.126_Pik3r1.77
  crRNA array
cgatttcttggctttatatatcttgtggaaaggacgaaacaccgtaatttctactaagtgtagatcctgtgccgccgcggccgcctaatttctactaagtgtagataaacctatacggcccgcactttttttaagcttggcgtggatccgatatcaactagatcttgaga

SEQ ID NO: 3144 - DNA, 170 bp, Artificial sequence
  Epha2.126_Pten.240
  crRNA array
cgatttcttggctttatatatcttgtggaaaggacgaaacaccgtaatttctactaagtgtagatcctgtgccgccgcggccgcctaatttctactaagtgtagattgcatacgctatagctgcttttttttaagcttggcgtggatccgatatcaactagatcttgaga

SEQ ID NO: 3145 - DNA, 170 bp, Artificial sequence
  Epha2.126_Pten.265
  crRNA array
cgatttcttggctttatatatcttgtggaaaggacgaaacaccgtaatttctactaagtgtagatcctgtgccgccgcggccgcctaatttctactaagtgtagataagcgtggtgcgtgacgcacttttttaagcttggcgtggatccgatatcaactagatcttgaga

SEQ ID NO: 3146 - DNA, 170 bp, Artificial sequence
  Epha2.126_Rasa1.1478
  crRNA array
cgatttcttggctttatatatcttgtggaaaggacgaaacaccgtaatttctactaagtgtagatcctgtgccgccgcggccgcctaatttctactaagtgtagatcgataatggtctatgatgtcttttttaagcttggcgtggatccgatatcaactagatcttgaga

SEQ ID NO: 3147 - DNA, 170 bp, Artificial sequence
  Epha2.126_Rasa1.223
  crRNA array
cgatttcttggctttatatatcttgtggaaaggacgaaacaccgtaatttctactaagtgtagatcctgtgccgccgcggccgcctaatttctactaagtgtagattccatggagtatcgtgctcgttttttaagcttggcgtggatccgatatcaactagatcttgaga

SEQ ID NO: 3148 - DNA, 170 bp, Artificial sequence
  Epha2.126_Rb1.211
  crRNA array
cgatttcttggctttatatatcttgtggaaaggacgaaacaccgtaatttctactaagtgtagatcctgtgccgccgcggccgcctaatttctactaagtgtagattctgacatgatcgggtacctttttttaagcttggcgtggatccgatatcaactagatcttgaga

SEQ ID NO: 3149 - DNA, 170 bp, Artificial sequence
  Epha2.126_Rb1.394
  crRNA array
cgatttcttggctttatatatcttgtggaaaggacgaaacaccgtaatttctactaagtgtagatcctgtgccgccgcggccgcctaatttctactaagtgtagatagaaatctcgaagcaggatcttttttaagcttggcgtggatccgatatcaactagatcttgaga

SEQ ID NO: 3150 - DNA, 170 bp, Artificial sequence
  Epha2.126_Rbm10.5
  crRNA array
cgatttcttggctttatatatcttgtggaaaggacgaaacaccgtaatttctactaagtgtagatcctgtgccgccgcggccgcctaatttctactaagtgtagatacgaaacctgaacccacacattttttaagcttggcgtggatccgatatcaactagatcttgaga

SEQ ID NO: 3151 - DNA, 170 bp, Artificial sequence
  Epha2.126_Rbm10.6
  crRNA array
cgatttcttggctttatatatcttgtggaaaggacgaaacaccgtaatttctactaagtgtagatcctgtgccgccgcggccgcctaatttctactaagtgtagatcgaaacctgaacccacacagttttttaagcttggcgtggatccgatatcaactagatcttgaga

SEQ ID NO: 3152 - DNA, 170 bp, Artificial sequence
  Epha2.126_Rnf43.1920
  crRNA array
cgatttcttggctttatatatcttgtggaaaggacgaaacaccgtaatttctactaagtgtagatcctgtgccgccgcggccgcctaatttctactaagtgtagatatccccgtgccgtggactccttttttaagcttggcgtggatccgatatcaactagatcttgaga

SEQ ID NO: 3153 - DNA, 170 bp, Artificial sequence
  Epha2.126_Rnf43.39
  crRNA array
cgatttcttggctttatatatcttgtggaaaggacgaaacaccgtaatttctactaagtgtagatcctgtgccgccgcggccgcctaatttctactaagtgtagatcaaggggatcactctgataattttttaagcttggcgtggatccgatatcaactagatcttgaga

SEQ ID NO: 3154 - DNA, 170 bp, Artificial sequence
  Epha2.126_Runx1.204
  crRNA array
cgatttcttggctttatatatcttgtggaaaggacgaaacaccgtaatttctactaagtgtagatcctgtgccgccgcggccgcctaatttctactaagtgtagattaaataagtccagccgttttttttttaagcttggcgtggatccgatatcaactagatcttgaga

SEQ ID NO: 3155 - DNA, 170 bp, Artificial sequence
  Epha2.126_Runx1.81
  crRNA array
cgatttcttggctttatatatcttgtggaaaggacgaaacaccgtaatttctactaagtgtagatcctgtgccgccgcggccgcctaatttctactaagtgtagataggacgcgtatgggaattttttttttaagcttggcgtggatccgatatcaactagatcttgaga

SEQ ID NO: 3156 - DNA, 170 bp, Artificial sequence
  Epha2.126_Setd2.143
  crRNA array
cgatttcttggctttatatatcttgtggaaaggacgaaacaccgtaatttctactaagtgtagatcctgtgccgccgcggccgcctaatttctactaagtgtagatgcacaaccacaacagactggttttttaagcttggcgtggatccgatatcaactagatcttgaga

SEQ ID NO: 3157 - DNA, 170 bp, Artificial sequence
  Epha2.126_Setd2.508
  crRNA array
cgatttcttggctttatatatcttgtggaaaggacgaaacaccgtaatttctactaagtgtagatcctgtgccgccgcggccgcctaatttctactaagtgtagattacgatcccgagcacccgacttttttaagcttggcgtggatccgatatcaactagatcttgaga

SEQ ID NO: 3158 - DNA, 170 bp, Artificial sequence
  Epha2.126_Smad4.3038
  crRNA array
cgatttcttggctttatatatcttgtggaaaggacgaaacaccgtaatttctactaagtgtagatcctgtgccgccgcggccgcctaatttctactaagtgtagatatctgcggcagtgtcaccggttttttaagcttggcgtggatccgatatcaactagatcttgaga

SEQ ID NO: 3159 - DNA, 170 bp, Artificial sequence
  Epha2.126_Smad4.39
  crRNA array
cgatttcttggctttatatatcttgtggaaaggacgaaacaccgtaatttctactaagtgtagatcctgtgccgccgcggccgcctaatttctactaagtgtagatagtcaaacgcatactgacaattttttaagcttggcgtggatccgatatcaactagatcttgaga

SEQ ID NO: 3160 - DNA, 170 bp, Artificial sequence
  Epha2.126_Stag2.1409
  crRNA array
cgatttcttggctttatatatcttgtggaaaggacgaaacaccgtaatttctactaagtgtagatcctgtgccgccgcggccgcctaatttctactaagtgtagatgctaataactgcggaagggcttttttaagcttggcgtggatccgatatcaactagatcttgaga

SEQ ID NO: 3161 - DNA, 170 bp, Artificial sequence
  Epha2.126_Stag2.4401
  crRNA array
cgatttcttggctttatatatcttgtggaaaggacgaaacaccgtaatttctactaagtgtagatcctgtgccgccgcggccgcctaatttctactaagtgtagattaatcgtccagtggtgtatattttttaagcttggcgtggatccgatatcaactagatcttgaga

SEQ ID NO: 3162 - DNA, 170 bp, Artificial sequence
  Epha2.126_Tbl1xr1.1
  crRNA array
cgatttcttggctttatatatcttgtggaaaggacgaaacaccgtaatttctactaagtgtagatcctgtgccgccgcggccgcctaatttctactaagtgtagatggatgcgcatactggtgaagttttttaagcttggcgtggatccgatatcaactagatcttgaga

SEQ ID NO: 3163 - DNA, 170 bp, Artificial sequence
  Epha2.126_Tbl1xr1.83
  crRNA array
cgatttcttggctttatatatcttgtggaaaggacgaaacaccgtaatttctactaagtgtagatcctgtgccgccgcggccgcctaatttctactaagtgtagatatggtcgacccatcgagtctttttttaagcttggcgtggatccgatatcaactagatcttgaga

SEQ ID NO: 3164 - DNA, 170 bp, Artificial sequence
  Epha2.126_Tgfbr2.290
  crRNA array
cgatttcttggctttatatatcttgtggaaaggacgaaacaccgtaatttctactaagtgtagatcctgtgccgccgcggccgcctaatttctactaagtgtagatcctctcggcgcccgggtaaattttttaagcttggcgtggatccgatatcaactagatcttgaga

SEQ ID NO: 3165 - DNA, 170 bp, Artificial sequence
  Epha2.126_Tgfbr2.292
  crRNA array
cgatttcttggctttatatatcttgtggaaaggacgaaacaccgtaatttctactaagtgtagatcctgtgccgccgcggccgcctaatttctactaagtgtagatcccgggcgccgagagggaaattttttaagcttggcgtggatccgatatcaactagatcttgaga

SEQ ID NO: 3166 - DNA, 170 bp, Artificial sequence
  Epha2.126_Trp53.4
  crRNA array
cgatttcttggctttatatatcttgtggaaaggacgaaacaccgtaatttctactaagtgtagatcctgtgccgccgcggccgcctaatttctactaagtgtagatccctgaactgcccccagggattttttaagcttggcgtggatccgatatcaactagatcttgaga

SEQ ID NO: 3167 - DNA, 170 bp, Artificial sequence
  Epha2.126_Trp53.528
  crRNA array
cgatttcttggctttatatatcttgtggaaaggacgaaacaccgtaatttctactaagtgtagatcctgtgccgccgcggccgcctaatttctactaagtgtagatgctgggccagcagagacctgttttttaagcttggcgtggatccgatatcaactagatcttgaga

SEQ ID NO: 3168 - DNA, 170 bp, Artificial sequence
  Epha2.126_Vhl.1
  crRNA array
cgatttcttggctttatatatcttgtggaaaggacgaaacaccgtaatttctactaagtgtagatcctgtgccgccgcggccgcctaatttctactaagtgtagatagggctcccggcggccatttttttttaagcttggcgtggatccgatatcaactagatcttgaga

SEQ ID NO: 3169 - DNA, 170 bp, Artificial sequence
  Epha2.126_Vhl.151
  crRNA array
cgatttcttggctttatatatcttgtggaaaggacgaaacaccgtaatttctactaagtgtagatcctgtgccgccgcggccgcctaatttctactaagtgtagattagagcactcacccgagggattttttaagcttggcgtggatccgatatcaactagatcttgaga

SEQ ID NO: 3170 - DNA, 170 bp, Artificial sequence
  Epha2.126_Zc3h13.1387
  crRNA array
cgatttcttggctttatatatcttgtggaaaggacgaaacaccgtaatttctactaagtgtagatcctgtgccgccgcggccgcctaatttctactaagtgtagatgtgacgccggtcatgtgactttttttaagcttggcgtggatccgatatcaactagatcttgaga

SEQ ID NO: 3171 - DNA, 170 bp, Artificial sequence
  Epha2.126_Zc3h13.1777
  crRNA array
cgatttcttggctttatatatcttgtggaaaggacgaaacaccgtaatttctactaagtgtagatcctgtgccgccgcggccgcctaatttctactaagtgtagatgatgctgccagtgtagcggcttttttaagcttggcgtggatccgatatcaactagatcttgaga

SEQ ID NO: 3172 - DNA, 170 bp, Artificial sequence
  Epha2.5_Acvr2a.155
  crRNA array
cgatttcttggctttatatatcttgtggaaaggacgaaacaccgtaatttctactaagtgtagatcatgagctggcgccacccggtaatttctactaagtgtagatggacctggctaatcaagtatttttttaagcttggcgtggatccgatatcaactagatcttgaga

SEQ ID NO: 3173 - DNA, 170 bp, Artificial sequence
  Epha2.5_Acvr2a.70
  crRNA array
cgatttcttggctttatatatcttgtggaaaggacgaaacaccgtaatttctactaagtgtagatcatgagctggcgccacccggtaatttctactaagtgtagatcccgaggcgccggagaagccttttttaagcttggcgtggatccgatatcaactagatcttgaga

SEQ ID NO: 3174 - DNA, 170 bp, Artificial sequence
  Epha2.5_Apc.21
  crRNA array
cgatttcttggctttatatatcttgtggaaaggacgaaacaccgtaatttctactaagtgtagatcatgagctggcgccacccggtaatttctactaagtgtagatgtgatccacacgtgtagctgttttttaagcttggcgtggatccgatatcaactagatcttgaga

SEQ ID NO: 3175 - DNA, 170 bp, Artificial sequence
  Epha2.5_Apc.867
  crRNA array
cgatttcttggctttatatatcttgtggaaaggacgaaacaccgtaatttctactaagtgtagatcatgagctggcgccacccggtaatttctactaagtgtagatcagtcccaggcggcggaagcttttttaagcttggcgtggatccgatatcaactagatcttgaga

SEQ ID NO: 3176 - DNA, 170 bp, Artificial sequence
  Epha2.5_Arid1a.2
  crRNA array
cgatttcttggctttatatatcttgtggaaaggacgaaacaccgtaatttctactaagtgtagatcatgagctggcgccacccggtaatttctactaagtgtagatcccgcgcccccgtcctggggttttttaagcttggcgtggatccgatatcaactagatcttgaga

SEQ ID NO: 3177 - DNA, 170 bp, Artificial sequence
  Epha2.5_Arid1a.5
  crRNA array
cgatttcttggctttatatatcttgtggaaaggacgaaacaccgtaatttctactaagtgtagatcatgagctggcgccacccggtaatttctactaagtgtagatcccgcgctcggccgctgccgttttttaagcttggcgtggatccgatatcaactagatcttgaga

SEQ ID NO: 3178 - DNA, 170 bp, Artificial sequence
  Epha2.5_Arid2.166
  crRNA array
cgatttcttggctttatatatcttgtggaaaggacgaaacaccgtaatttctactaagtgtagatcatgagctggcgccacccggtaatttctactaagtgtagataaccgcgatctgggttttttttttttaagcttggcgtggatccgatatcaactagatcttgaga

SEQ ID NO: 3179 - DNA, 170 bp, Artificial sequence
  Epha2.5_Arid2.172
  crRNA array
cgatttcttggctttatatatcttgtggaaaggacgaaacaccgtaatttctactaagtgtagatcatgagctggcgccacccggtaatttctactaagtgtagatctggacgagctgcggcagttttttttaagcttggcgtggatccgatatcaactagatcttgaga

SEQ ID NO: 3180 - DNA, 170 bp, Artificial sequence
  Epha2.5_Atm.120
  crRNA array
cgatttcttggctttatatatcttgtggaaaggacgaaacaccgtaatttctactaagtgtagatcatgagctggcgccacccggtaatttctactaagtgtagatgacaggtagtcggcagctaattttttaagcttggcgtggatccgatatcaactagatcttgaga

SEQ ID NO: 3181 - DNA, 170 bp, Artificial sequence
  Epha2.5_Atm.997
  crRNA array
cgatttcttggctttatatatcttgtggaaaggacgaaacaccgtaatttctactaagtgtagatcatgagctggcgccacccggtaatttctactaagtgtagatgagaaagtctccgaatcgttttttttaagcttggcgtggatccgatatcaactagatcttgaga

SEQ ID NO: 3182 - DNA, 170 bp, Artificial sequence
  Epha2.5_Atrx.249
  crRNA array
cgatttcttggctttatatatcttgtggaaaggacgaaacaccgtaatttctactaagtgtagatcatgagctggcgccacccggtaatttctactaagtgtagattagccagtcgctcatatctcttttttaagcttggcgtggatccgatatcaactagatcttgaga

SEQ ID NO: 3183 - DNA, 170 bp, Artificial sequence
  Epha2.5_Atrx.251
  crRNA array
cgatttcttggctttatatatcttgtggaaaggacgaaacaccgtaatttctactaagtgtagatcatgagctggcgccacccggtaatttctactaagtgtagatgccagtcgctcatatctctgttttttaagcttggcgtggatccgatatcaactagatcttgaga

SEQ ID NO: 3184 - DNA, 170 bp, Artificial sequence
  Epha2.5_Bcor.203
  crRNA array
cgatttcttggctttatatatcttgtggaaaggacgaaacaccgtaatttctactaagtgtagatcatgagctggcgccacccggtaatttctactaagtgtagatccccggagcggagtccaggcttttttaagcttggcgtggatccgatatcaactagatcttgaga

SEQ ID NO: 3185 - DNA, 170 bp, Artificial sequence
  Epha2.5_Bcor.475
  crRNA array
cgatttcttggctttatatatcttgtggaaaggacgaaacaccgtaatttctactaagtgtagatcatgagctggcgccacccggtaatttctactaagtgtagattgcaacccctctgtatgggattttttaagcttggcgtggatccgatatcaactagatcttgaga

SEQ ID NO: 3186 - DNA, 170 bp, Artificial sequence
  Epha2.5_Brca1.112
  crRNA array
cgatttcttggctttatatatcttgtggaaaggacgaaacaccgtaatttctactaagtgtagatcatgagctggcgccacccggtaatttctactaagtgtagatctagacgctctgtggagactttttttaagcttggcgtggatccgatatcaactagatcttgaga

SEQ ID NO: 3187 - DNA, 170 bp, Artificial sequence
  Epha2.5_Brca1.53
  crRNA array
cgatttcttggctttatatatcttgtggaaaggacgaaacaccgtaatttctactaagtgtagatcatgagctggcgccacccggtaatttctactaagtgtagataatgaggaggcgtcgatcatttttttaagcttggcgtggatccgatatcaactagatcttgaga

SEQ ID NO: 3188 - DNA, 170 bp, Artificial sequence
  Epha2.5_Casp8.45
  crRNA array
cgatttcttggctttatatatcttgtggaaaggacgaaacaccgtaatttctactaagtgtagatcatgagctggcgccacccggtaatttctactaagtgtagatctaccgagatcctgtgaatgttttttaagcttggcgtggatccgatatcaactagatcttgaga

SEQ ID NO: 3189 - DNA, 170 bp, Artificial sequence
  Epha2.5_Casp8.54
  crRNA array
cgatttcttggctttatatatcttgtggaaaggacgaaacaccgtaatttctactaagtgtagatcatgagctggcgccacccggtaatttctactaagtgtagatcagtgcagtcgtcgtaagatttttttaagcttggcgtggatccgatatcaactagatcttgaga

SEQ ID NO: 3190 - DNA, 170 bp, Artificial sequence
  Epha2.5_Cbwd1.84
  crRNA array
cgatttcttggctttatatatcttgtggaaaggacgaaacaccgtaatttctactaagtgtagatcatgagctggcgccacccggtaatttctactaagtgtagatcacagcaggtaacatgccgcttttttaagcttggcgtggatccgatatcaactagatcttgaga

SEQ ID NO: 3191 - DNA, 170 bp, Artificial sequence
  Epha2.5_Cbwd1.85
  crRNA array
cgatttcttggctttatatatcttgtggaaaggacgaaacaccgtaatttctactaagtgtagatcatgagctggcgccacccggtaatttctactaagtgtagatacagcaggtaacatgccgccttttttaagcttggcgtggatccgatatcaactagatcttgaga

SEQ ID NO: 3192 - DNA, 170 bp, Artificial sequence
  Epha2.5_Cdh1.387
  crRNA array
cgatttcttggctttatatatcttgtggaaaggacgaaacaccgtaatttctactaagtgtagatcatgagctggcgccacccggtaatttctactaagtgtagatctcggcgtctgccgggtccgttttttaagcttggcgtggatccgatatcaactagatcttgaga

SEQ ID NO: 3193 - DNA, 170 bp, Artificial sequence
  Epha2.5_Cdh1.58
  crRNA array
cgatttcttggctttatatatcttgtggaaaggacgaaacaccgtaatttctactaagtgtagatcatgagctggcgccacccggtaatttctactaagtgtagatctcgtccgcgcccgggactcttttttaagcttggcgtggatccgatatcaactagatcttgaga

SEQ ID NO: 3194 - DNA, 170 bp, Artificial sequence
  Epha2.5_Cdkn2a.647
  crRNA array
cgatttcttggctttatatatcttgtggaaaggacgaaacaccgtaatttctactaagtgtagatcatgagctggcgccacccggtaatttctactaagtgtagatgcaatcacgggagggagcagttttttaagcttggcgtggatccgatatcaactagatcttgaga

SEQ ID NO: 3195 - DNA, 170 bp, Artificial sequence
  Epha2.5_Cdkn2a.648
  crRNA array
cgatttcttggctttatatatcttgtggaaaggacgaaacaccgtaatttctactaagtgtagatcatgagctggcgccacccggtaatttctactaagtgtagatcaatcacgggagggagcagattttttaagcttggcgtggatccgatatcaactagatcttgaga

SEQ ID NO: 3196 - DNA, 170 bp, Artificial sequence
  Epha2.5_Cic.162
  crRNA array
cgatttcttggctttatatatcttgtggaaaggacgaaacaccgtaatttctactaagtgtagatcatgagctggcgccacccggtaatttctactaagtgtagatcgcaggcgcgcccggcggagttttttaagcttggcgtggatccgatatcaactagatcttgaga

SEQ ID NO: 3197 - DNA, 170 bp, Artificial sequence
  Epha2.5_Cic.164
  crRNA array
cgatttcttggctttatatatcttgtggaaaggacgaaacaccgtaatttctactaagtgtagatcatgagctggcgccacccggtaatttctactaagtgtagatcgggccctgggccggcggctttttttaagcttggcgtggatccgatatcaactagatcttgaga

SEQ ID NO: 3198 - DNA, 170 bp, Artificial sequence
  Epha2.5_Ctcf.229
  crRNA array
cgatttcttggctttatatatcttgtggaaaggacgaaacaccgtaatttctactaagtgtagatcatgagctggcgccacccggtaatttctactaagtgtagatggctggtggctgatagtctgttttttaagcttggcgtggatccgatatcaactagatcttgaga

SEQ ID NO: 3199 - DNA, 170 bp, Artificial sequence
  Epha2.5_Ctcf.809
  crRNA array
cgatttcttggctttatatatcttgtggaaaggacgaaacaccgtaatttctactaagtgtagatcatgagctggcgccacccggtaatttctactaagtgtagataagcgctatcatgatcccaattttttaagcttggcgtggatccgatatcaactagatcttgaga

SEQ ID NO: 3200 - DNA, 170 bp, Artificial sequence
  Epha2.5_Elf3.826
  crRNA array
cgatttcttggctttatatatcttgtggaaaggacgaaacaccgtaatttctactaagtgtagatcatgagctggcgccacccggtaatttctactaagtgtagattccgagacatcctaatccacttttttaagcttggcgtggatccgatatcaactagatcttgaga

SEQ ID NO: 3201 - DNA, 170 bp, Artificial sequence
  Epha2.5_Elf3.983
  crRNA array
cgatttcttggctttatatatcttgtggaaaggacgaaacaccgtaatttctactaagtgtagatcatgagctggcgccacccggtaatttctactaagtgtagattaggccccctaactggaccattttttaagcttggcgtggatccgatatcaactagatcttgaga

SEQ ID NO: 3202 - DNA, 170 bp, Artificial sequence
  Epha2.5_Ep300.310
  crRNA array
cgatttcttggctttatatatcttgtggaaaggacgaaacaccgtaatttctactaagtgtagatcatgagctggcgccacccggtaatttctactaagtgtagatatggtacgacagtgaggaagttttttaagcttggcgtggatccgatatcaactagatcttgaga

SEQ ID NO: 3203 - DNA, 170 bp, Artificial sequence
  Epha2.5_Ep300.587
  crRNA array
cgatttcttggctttatatatcttgtggaaaggacgaaacaccgtaatttctactaagtgtagatcatgagctggcgccacccggtaatttctactaagtgtagatcgccccggggcccccaaccattttttaagcttggcgtggatccgatatcaactagatcttgaga

SEQ ID NO: 3204 - DNA, 170 bp, Artificial sequence
  Epha2.5_Fat1.105
  crRNA array
cgatttcttggctttatatatcttgtggaaaggacgaaacaccgtaatttctactaagtgtagatcatgagctggcgccacccggtaatttctactaagtgtagataactcgaggtgacaacaagtttttttaagcttggcgtggatccgatatcaactagatcttgaga

SEQ ID NO: 3205 - DNA, 170 bp, Artificial sequence
  Epha2.5_Fat1.122
  crRNA array
cgatttcttggctttatatatcttgtggaaaggacgaaacaccgtaatttctactaagtgtagatcatgagctggcgccacccggtaatttctactaagtgtagatccatcgacatggaaacgggattttttaagcttggcgtggatccgatatcaactagatcttgaga

SEQ ID NO: 3206 - DNA, 170 bp, Artificial sequence
  Epha2.5_Fbxw7.21
  crRNA array
cgatttcttggctttatatatcttgtggaaaggacgaaacaccgtaatttctactaagtgtagatcatgagctggcgccacccggtaatttctactaagtgtagattaatgtgccgtagaaacccattttttaagcttggcgtggatccgatatcaactagatcttgaga

SEQ ID NO: 3207 - DNA, 170 bp, Artificial sequence
  Epha2.5_Fbxw7.23
  crRNA array
cgatttcttggctttatatatcttgtggaaaggacgaaacaccgtaatttctactaagtgtagatcatgagctggcgccacccggtaatttctactaagtgtagatatgtgccgtagaaacccatattttttaagcttggcgtggatccgatatcaactagatcttgaga

SEQ ID NO: 3208 - DNA, 170 bp, Artificial sequence
  Epha2.5_Gata3.34
  crRNA array
cgatttcttggctttatatatcttgtggaaaggacgaaacaccgtaatttctactaagtgtagatcatgagctggcgccacccggtaatttctactaagtgtagatctaaactatcccgcaaagatttttttaagcttggcgtggatccgatatcaactagatcttgaga

SEQ ID NO: 3209 - DNA, 170 bp, Artificial sequence
  Epha2.5_Gata3.47
  crRNA array
cgatttcttggctttatatatcttgtggaaaggacgaaacaccgtaatttctactaagtgtagatcatgagctggcgccacccggtaatttctactaagtgtagatcgtagtaggacgggacgtggttttttaagcttggcgtggatccgatatcaactagatcttgaga

SEQ ID NO: 3210 - DNA, 170 bp, Artificial sequence
  Epha2.5_H2-Q2.1
  crRNA array
cgatttcttggctttatatatcttgtggaaaggacgaaacaccgtaatttctactaagtgtagatcatgagctggcgccacccggtaatttctactaagtgtagatagggcggccaccaacagcagttttttaagcttggcgtggatccgatatcaactagatcttgaga

SEQ ID NO: 3211 - DNA, 170 bp, Artificial sequence
  Epha2.5_H2-Q2.2
  crRNA array
cgatttcttggctttatatatcttgtggaaaggacgaaacaccgtaatttctactaagtgtagatcatgagctggcgccacccggtaatttctactaagtgtagattaacctgcgcccgctgctgattttttaagcttggcgtggatccgatatcaactagatcttgaga

SEQ ID NO: 3212 - DNA, 170 bp, Artificial sequence
  Epha2.5_Kdm5c.1878
  crRNA array
cgatttcttggctttatatatcttgtggaaaggacgaaacaccgtaatttctactaagtgtagatcatgagctggcgccacccggtaatttctactaagtgtagatagagcacggcacccgcccccttttttaagcttggcgtggatccgatatcaactagatcttgaga

SEQ ID NO: 3213 - DNA, 170 bp, Artificial sequence
  Epha2.5_Kdm5c.1879
  crRNA array
cgatttcttggctttatatatcttgtggaaaggacgaaacaccgtaatttctactaagtgtagatcatgagctggcgccacccggtaatttctactaagtgtagatgagcacggcacccgccccccttttttaagcttggcgtggatccgatatcaactagatcttgaga

SEQ ID NO: 3214 - DNA, 170 bp, Artificial sequence
  Epha2.5_Kdm6a.56
  crRNA array
cgatttcttggctttatatatcttgtggaaaggacgaaacaccgtaatttctactaagtgtagatcatgagctggcgccacccggtaatttctactaagtgtagattcgctgccgcctctcgcggcttttttaagcttggcgtggatccgatatcaactagatcttgaga

SEQ ID NO: 3215 - DNA, 170 bp, Artificial sequence
  Epha2.5_Kdm6a.57
  crRNA array
cgatttcttggctttatatatcttgtggaaaggacgaaacaccgtaatttctactaagtgtagatcatgagctggcgccacccggtaatttctactaagtgtagatcgctgccgcctctcgcggcattttttaagcttggcgtggatccgatatcaactagatcttgaga

SEQ ID NO: 3216 - DNA, 170 bp, Artificial sequence
  Epha2.5_Kmt2b.265
  crRNA array
cgatttcttggctttatatatcttgtggaaaggacgaaacaccgtaatttctactaagtgtagatcatgagctggcgccacccggtaatttctactaagtgtagatccccaagtgaagcccacctgttttttaagcttggcgtggatccgatatcaactagatcttgaga

SEQ ID NO: 3217 - DNA, 170 bp, Artificial sequence
  Epha2.5_Kmt2b.298
  crRNA array
cgatttcttggctttatatatcttgtggaaaggacgaaacaccgtaatttctactaagtgtagatcatgagctggcgccacccggtaatttctactaagtgtagattccggcagggaccggctggcttttttaagcttggcgtggatccgatatcaactagatcttgaga

SEQ ID NO: 3218 - DNA, 170 bp, Artificial sequence
  Epha2.5_Kmt2c.1962
  crRNA array
cgatttcttggctttatatatcttgtggaaaggacgaaacaccgtaatttctactaagtgtagatcatgagctggcgccacccggtaatttctactaagtgtagatgtgacgatctgtgccacaagttttttaagcttggcgtggatccgatatcaactagatcttgaga

SEQ ID NO: 3219 - DNA, 170 bp, Artificial sequence
  Epha2.5_Kmt2c.2236
  crRNA array
cgatttcttggctttatatatcttgtggaaaggacgaaacaccgtaatttctactaagtgtagatcatgagctggcgccacccggtaatttctactaagtgtagatactcgacctccacctccctattttttaagcttggcgtggatccgatatcaactagatcttgaga

SEQ ID NO: 3220 - DNA, 170 bp, Artificial sequence
  Epha2.5_Kmt2d.316
  crRNA array
cgatttcttggctttatatatcttgtggaaaggacgaaacaccgtaatttctactaagtgtagatcatgagctggcgccacccggtaatttctactaagtgtagatactccaggccacccaggtggttttttaagcttggcgtggatccgatatcaactagatcttgaga

SEQ ID NO: 3221 - DNA, 170 bp, Artificial sequence
  Epha2.5_Kmt2d.416
  crRNA array
cgatttcttggctttatatatcttgtggaaaggacgaaacaccgtaatttctactaagtgtagatcatgagctggcgccacccggtaatttctactaagtgtagattaaacccccgggggaagggtttttttaagcttggcgtggatccgatatcaactagatcttgaga

SEQ ID NO: 3222 - DNA, 170 bp, Artificial sequence
  Epha2.5_Map2k4.119
  crRNA array
cgatttcttggctttatatatcttgtggaaaggacgaaacaccgtaatttctactaagtgtagatcatgagctggcgccacccggtaatttctactaagtgtagattgctgtgtgggcggccacatttttttaagcttggcgtggatccgatatcaactagatcttgaga

SEQ ID NO: 3223 - DNA, 170 bp, Artificial sequence
  Epha2.5_Map2k4.1261
  crRNA array
cgatttcttggctttatatatcttgtggaaaggacgaaacaccgtaatttctactaagtgtagatcatgagctggcgccacccggtaatttctactaagtgtagatgatgtagtaatgcggagtagttttttaagcttggcgtggatccgatatcaactagatcttgaga

SEQ ID NO: 3224 - DNA, 170 bp, Artificial sequence
  Epha2.5_Map3k1.235
  crRNA array
cgatttcttggctttatatatcttgtggaaaggacgaaacaccgtaatttctactaagtgtagatcatgagctggcgccacccggtaatttctactaagtgtagataaaacgctactgatcgatcgttttttaagcttggcgtggatccgatatcaactagatcttgaga

SEQ ID NO: 3225 - DNA, 170 bp, Artificial sequence
  Epha2.5_Map3k1.3838
  crRNA array
cgatttcttggctttatatatcttgtggaaaggacgaaacaccgtaatttctactaagtgtagatcatgagctggcgccacccggtaatttctactaagtgtagatccaacaacagggccccactattttttaagcttggcgtggatccgatatcaactagatcttgaga

SEQ ID NO: 3226 - DNA, 170 bp, Artificial sequence
  Epha2.5_Mga.1655
  crRNA array
cgatttcttggctttatatatcttgtggaaaggacgaaacaccgtaatttctactaagtgtagatcatgagctggcgccacccggtaatttctactaagtgtagatcgagaagtggagagcatattttttttaagcttggcgtggatccgatatcaactagatcttgaga

SEQ ID NO: 3227 - DNA, 170 bp, Artificial sequence
  Epha2.5_Mga.93
  crRNA array
cgatttcttggctttatatatcttgtggaaaggacgaaacaccgtaatttctactaagtgtagatcatgagctggcgccacccggtaatttctactaagtgtagatgagaaggctccccataatgtttttttaagcttggcgtggatccgatatcaactagatcttgaga

SEQ ID NO: 3228 - DNA, 170 bp, Artificial sequence
  Epha2.5_Nf1.746
  crRNA array
cgatttcttggctttatatatcttgtggaaaggacgaaacaccgtaatttctactaagtgtagatcatgagctggcgccacccggtaatttctactaagtgtagattaagcataatgatgatgccattttttaagcttggcgtggatccgatatcaactagatcttgaga

SEQ ID NO: 3229 - DNA, 170 bp, Artificial sequence
  Epha2.5_Nf1.97
  crRNA array
cgatttcttggctttatatatcttgtggaaaggacgaaacaccgtaatttctactaagtgtagatcatgagctggcgccacccggtaatttctactaagtgtagatagcccgctacatgctgatgcttttttaagcttggcgtggatccgatatcaactagatcttgaga

SEQ ID NO: 3230 - DNA, 170 bp, Artificial sequence
  Epha2.5_Nf2.356
  crRNA array
cgatttcttggctttatatatcttgtggaaaggacgaaacaccgtaatttctactaagtgtagatcatgagctggcgccacccggtaatttctactaagtgtagatcggagtcatctgatagagatttttttaagcttggcgtggatccgatatcaactagatcttgaga

SEQ ID NO: 3231 - DNA, 170 bp, Artificial sequence
  Epha2.5_Nf2.768
  crRNA array
cgatttcttggctttatatatcttgtggaaaggacgaaacaccgtaatttctactaagtgtagatcatgagctggcgccacccggtaatttctactaagtgtagatccgaagccccagtgtccggcttttttaagcttggcgtggatccgatatcaactagatcttgaga

SEQ ID NO: 3232 - DNA, 170 bp, Artificial sequence
  Epha2.5_Notch1.1849
  crRNA array
cgatttcttggctttatatatcttgtggaaaggacgaaacaccgtaatttctactaagtgtagatcatgagctggcgccacccggtaatttctactaagtgtagatctggcgggtgggcggcgctgttttttaagcttggcgtggatccgatatcaactagatcttgaga

SEQ ID NO: 3233 - DNA, 170 bp, Artificial sequence
  Epha2.5_Notch1.649
  crRNA array
cgatttcttggctttatatatcttgtggaaaggacgaaacaccgtaatttctactaagtgtagatcatgagctggcgccacccggtaatttctactaagtgtagattgggccaacgatgccaggacttttttaagcttggcgtggatccgatatcaactagatcttgaga

SEQ ID NO: 3234 - DNA, 170 bp, Artificial sequence
  Epha2.5_Nsd1.70
  crRNA array
cgatttcttggctttatatatcttgtggaaaggacgaaacaccgtaatttctactaagtgtagatcatgagctggcgccacccggtaatttctactaagtgtagatactggtgtggacgatgcagattttttaagcttggcgtggatccgatatcaactagatcttgaga

SEQ ID NO: 3235 - DNA, 170 bp, Artificial sequence
  Epha2.5_Nsd1.90
  crRNA array
cgatttcttggctttatatatcttgtggaaaggacgaaacaccgtaatttctactaagtgtagatcatgagctggcgccacccggtaatttctactaagtgtagataggagctaacggcaagaatgttttttaagcttggcgtggatccgatatcaactagatcttgaga

SEQ ID NO: 3236 - DNA, 170 bp, Artificial sequence
  Epha2.5_Pbrm1.1236
  crRNA array
cgatttcttggctttatatatcttgtggaaaggacgaaacaccgtaatttctactaagtgtagatcatgagctggcgccacccggtaatttctactaagtgtagatgccgataaaaccaacagccgttttttaagcttggcgtggatccgatatcaactagatcttgaga

SEQ ID NO: 3237 - DNA, 170 bp, Artificial sequence
  Epha2.5_Pbrm1.969
  crRNA array
cgatttcttggctttatatatcttgtggaaaggacgaaacaccgtaatttctactaagtgtagatcatgagctggcgccacccggtaatttctactaagtgtagatgagccctaatgaacagctcattttttaagcttggcgtggatccgatatcaactagatcttgaga

SEQ ID NO: 3238 - DNA, 170 bp, Artificial sequence
  Epha2.5_Pik3r1.76
  crRNA array
cgatttcttggctttatatatcttgtggaaaggacgaaacaccgtaatttctactaagtgtagatcatgagctggcgccacccggtaatttctactaagtgtagataaaacctatacggcccgcacttttttaagcttggcgtggatccgatatcaactagatcttgaga

SEQ ID NO: 3239 - DNA, 170 bp, Artificial sequence
  Epha2.5_Pik3r1.77
  crRNA array
cgatttcttggctttatatatcttgtggaaaggacgaaacaccgtaatttctactaagtgtagatcatgagctggcgccacccggtaatttctactaagtgtagataaacctatacggcccgcactttttttaagcttggcgtggatccgatatcaactagatcttgaga

SEQ ID NO: 3240 - DNA, 170 bp, Artificial sequence
  Epha2.5_Pten.240
  crRNA array
cgatttcttggctttatatatcttgtggaaaggacgaaacaccgtaatttctactaagtgtagatcatgagctggcgccacccggtaatttctactaagtgtagattgcatacgctatagctgcttttttttaagcttggcgtggatccgatatcaactagatcttgaga

SEQ ID NO: 3241 - DNA, 170 bp, Artificial sequence
  Epha2.5_Pten.265
  crRNA array
cgatttcttggctttatatatcttgtggaaaggacgaaacaccgtaatttctactaagtgtagatcatgagctggcgccacccggtaatttctactaagtgtagataagcgtggtgcgtgacgcacttttttaagcttggcgtggatccgatatcaactagatcttgaga

SEQ ID NO: 3242 - DNA, 170 bp, Artificial sequence
  Epha2.5_Rasa1.1478
  crRNA array
cgatttcttggctttatatatcttgtggaaaggacgaaacaccgtaatttctactaagtgtagatcatgagctggcgccacccggtaatttctactaagtgtagatcgataatggtctatgatgtcttttttaagcttggcgtggatccgatatcaactagatcttgaga

SEQ ID NO: 3243 - DNA, 170 bp, Artificial sequence
  Epha2.5_Rasa1.223
  crRNA array
cgatttcttggctttatatatcttgtggaaaggacgaaacaccgtaatttctactaagtgtagatcatgagctggcgccacccggtaatttctactaagtgtagattccatggagtatcgtgctcgttttttaagcttggcgtggatccgatatcaactagatcttgaga

SEQ ID NO: 3244 - DNA, 170 bp, Artificial sequence
  Epha2.5_Rb1.211
  crRNA array
cgatttcttggctttatatatcttgtggaaaggacgaaacaccgtaatttctactaagtgtagatcatgagctggcgccacccggtaatttctactaagtgtagattctgacatgatcgggtacctttttttaagcttggcgtggatccgatatcaactagatcttgaga

SEQ ID NO: 3245 - DNA, 170 bp, Artificial sequence
  Epha2.5_Rb1.394
  crRNA array
cgatttcttggctttatatatcttgtggaaaggacgaaacaccgtaatttctactaagtgtagatcatgagctggcgccacccggtaatttctactaagtgtagatagaaatctcgaagcaggatcttttttaagcttggcgtggatccgatatcaactagatcttgaga

SEQ ID NO: 3246 - DNA, 170 bp, Artificial sequence
  Epha2.5_Rbm10.5
  crRNA array
cgatttcttggctttatatatcttgtggaaaggacgaaacaccgtaatttctactaagtgtagatcatgagctggcgccacccggtaatttctactaagtgtagatacgaaacctgaacccacacattttttaagcttggcgtggatccgatatcaactagatcttgaga

SEQ ID NO: 3247 - DNA, 170 bp, Artificial sequence
  Epha2.5_Rbm10.6
  crRNA array
cgatttcttggctttatatatcttgtggaaaggacgaaacaccgtaatttctactaagtgtagatcatgagctggcgccacccggtaatttctactaagtgtagatcgaaacctgaacccacacagttttttaagcttggcgtggatccgatatcaactagatcttgaga

SEQ ID NO: 3248 - DNA, 170 bp, Artificial sequence
  Epha2.5_Rnf43.1920
  crRNA array
cgatttcttggctttatatatcttgtggaaaggacgaaacaccgtaatttctactaagtgtagatcatgagctggcgccacccggtaatttctactaagtgtagatatccccgtgccgtggactccttttttaagcttggcgtggatccgatatcaactagatcttgaga

SEQ ID NO: 3249 - DNA, 170 bp, Artificial sequence
  Epha2.5_Rnf43.39
  crRNA array
cgatttcttggctttatatatcttgtggaaaggacgaaacaccgtaatttctactaagtgtagatcatgagctggcgccacccggtaatttctactaagtgtagatcaaggggatcactctgataattttttaagcttggcgtggatccgatatcaactagatcttgaga

SEQ ID NO: 3250 - DNA, 170 bp, Artificial sequence
  Epha2.5_Runx1.204
  crRNA array
cgatttcttggctttatatatcttgtggaaaggacgaaacaccgtaatttctactaagtgtagatcatgagctggcgccacccggtaatttctactaagtgtagattaaataagtccagccgttttttttttaagcttggcgtggatccgatatcaactagatcttgaga

SEQ ID NO: 3251 - DNA, 170 bp, Artificial sequence
  Epha2.5_Runx1.81
  crRNA array
cgatttcttggctttatatatcttgtggaaaggacgaaacaccgtaatttctactaagtgtagatcatgagctggcgccacccggtaatttctactaagtgtagataggacgcgtatgggaattttttttttaagcttggcgtggatccgatatcaactagatcttgaga

SEQ ID NO: 3252 - DNA, 170 bp, Artificial sequence
  Epha2.5_Setd2.143
  crRNA array
cgatttcttggctttatatatcttgtggaaaggacgaaacaccgtaatttctactaagtgtagatcatgagctggcgccacccggtaatttctactaagtgtagatgcacaaccacaacagactggttttttaagcttggcgtggatccgatatcaactagatcttgaga

SEQ ID NO: 3253 - DNA, 170 bp, Artificial sequence
  Epha2.5_Setd2.508
  crRNA array
cgatttcttggctttatatatcttgtggaaaggacgaaacaccgtaatttctactaagtgtagatcatgagctggcgccacccggtaatttctactaagtgtagattacgatcccgagcacccgacttttttaagcttggcgtggatccgatatcaactagatcttgaga

SEQ ID NO: 3254 - DNA, 170 bp, Artificial sequence
  Epha2.5_Smad4.3038
  crRNA array
cgatttcttggctttatatatcttgtggaaaggacgaaacaccgtaatttctactaagtgtagatcatgagctggcgccacccggtaatttctactaagtgtagatatctgcggcagtgtcaccggttttttaagcttggcgtggatccgatatcaactagatcttgaga

SEQ ID NO: 3255 - DNA, 170 bp, Artificial sequence
  Epha2.5_Smad4.39
  crRNA array
cgatttcttggctttatatatcttgtggaaaggacgaaacaccgtaatttctactaagtgtagatcatgagctggcgccacccggtaatttctactaagtgtagatagtcaaacgcatactgacaattttttaagcttggcgtggatccgatatcaactagatcttgaga

SEQ ID NO: 3256 - DNA, 170 bp, Artificial sequence
  Epha2.5_Stag2.1409
  crRNA array
cgatttcttggctttatatatcttgtggaaaggacgaaacaccgtaatttctactaagtgtagatcatgagctggcgccacccggtaatttctactaagtgtagatgctaataactgcggaagggcttttttaagcttggcgtggatccgatatcaactagatcttgaga

SEQ ID NO: 3257 - DNA, 170 bp, Artificial sequence
  Epha2.5_Stag2.4401
  crRNA array
cgatttcttggctttatatatcttgtggaaaggacgaaacaccgtaatttctactaagtgtagatcatgagctggcgccacccggtaatttctactaagtgtagattaatcgtccagtggtgtatattttttaagcttggcgtggatccgatatcaactagatcttgaga

SEQ ID NO: 3258 - DNA, 170 bp, Artificial sequence
  Epha2.5_Tbl1xr1.1
  crRNA array
cgatttcttggctttatatatcttgtggaaaggacgaaacaccgtaatttctactaagtgtagatcatgagctggcgccacccggtaatttctactaagtgtagatggatgcgcatactggtgaagttttttaagcttggcgtggatccgatatcaactagatcttgaga

SEQ ID NO: 3259 - DNA, 170 bp, Artificial sequence
  Epha2.5_Tbl1xr1.83
  crRNA array
cgatttcttggctttatatatcttgtggaaaggacgaaacaccgtaatttctactaagtgtagatcatgagctggcgccacccggtaatttctactaagtgtagatatggtcgacccatcgagtctttttttaagcttggcgtggatccgatatcaactagatcttgaga

SEQ ID NO: 3260 - DNA, 170 bp, Artificial sequence
  Epha2.5_Tgfbr2.290
  crRNA array
cgatttcttggctttatatatcttgtggaaaggacgaaacaccgtaatttctactaagtgtagatcatgagctggcgccacccggtaatttctactaagtgtagatcctctcggcgcccgggtaaattttttaagcttggcgtggatccgatatcaactagatcttgaga

SEQ ID NO: 3261 - DNA, 170 bp, Artificial sequence
  Epha2.5_Tgfbr2.292
  crRNA array
cgatttcttggctttatatatcttgtggaaaggacgaaacaccgtaatttctactaagtgtagatcatgagctggcgccacccggtaatttctactaagtgtagatcccgggcgccgagagggaaattttttaagcttggcgtggatccgatatcaactagatcttgaga

SEQ ID NO: 3262 - DNA, 170 bp, Artificial sequence
  Epha2.5_Trp53.4
  crRNA array
cgatttcttggctttatatatcttgtggaaaggacgaaacaccgtaatttctactaagtgtagatcatgagctggcgccacccggtaatttctactaagtgtagatccctgaactgcccccagggattttttaagcttggcgtggatccgatatcaactagatcttgaga

SEQ ID NO: 3263 - DNA, 170 bp, Artificial sequence
  Epha2.5_Trp53.528
  crRNA array
cgatttcttggctttatatatcttgtggaaaggacgaaacaccgtaatttctactaagtgtagatcatgagctggcgccacccggtaatttctactaagtgtagatgctgggccagcagagacctgttttttaagcttggcgtggatccgatatcaactagatcttgaga

SEQ ID NO: 3264 - DNA, 170 bp, Artificial sequence
  Epha2.5_Vhl.1
  crRNA array
cgatttcttggctttatatatcttgtggaaaggacgaaacaccgtaatttctactaagtgtagatcatgagctggcgccacccggtaatttctactaagtgtagatagggctcccggcggccatttttttttaagcttggcgtggatccgatatcaactagatcttgaga

SEQ ID NO: 3265 - DNA, 170 bp, Artificial sequence
  Epha2.5_Vhl.151
  crRNA array
cgatttcttggctttatatatcttgtggaaaggacgaaacaccgtaatttctactaagtgtagatcatgagctggcgccacccggtaatttctactaagtgtagattagagcactcacccgagggattttttaagcttggcgtggatccgatatcaactagatcttgaga

SEQ ID NO: 3266 - DNA, 170 bp, Artificial sequence
  Epha2.5_Zc3h13.1387
  crRNA array
cgatttcttggctttatatatcttgtggaaaggacgaaacaccgtaatttctactaagtgtagatcatgagctggcgccacccggtaatttctactaagtgtagatgtgacgccggtcatgtgactttttttaagcttggcgtggatccgatatcaactagatcttgaga

SEQ ID NO: 3267 - DNA, 170 bp, Artificial sequence
  Epha2.5_Zc3h13.1777
  crRNA array
cgatttcttggctttatatatcttgtggaaaggacgaaacaccgtaatttctactaagtgtagatcatgagctggcgccacccggtaatttctactaagtgtagatgatgctgccagtgtagcggcttttttaagcttggcgtggatccgatatcaactagatcttgaga

SEQ ID NO: 3268 - DNA, 170 bp, Artificial sequence
  Fat1.105_Acvr2a.155
  crRNA array
cgatttcttggctttatatatcttgtggaaaggacgaaacaccgtaatttctactaagtgtagataactcgaggtgacaacaagttaatttctactaagtgtagatggacctggctaatcaagtatttttttaagcttggcgtggatccgatatcaactagatcttgaga

SEQ ID NO: 3269 - DNA, 170 bp, Artificial sequence
  Fat1.105_Acvr2a.70
  crRNA array
cgatttcttggctttatatatcttgtggaaaggacgaaacaccgtaatttctactaagtgtagataactcgaggtgacaacaagttaatttctactaagtgtagatcccgaggcgccggagaagccttttttaagcttggcgtggatccgatatcaactagatcttgaga

SEQ ID NO: 3270 - DNA, 170 bp, Artificial sequence
  Fat1.105_Apc.21
  crRNA array
cgatttcttggctttatatatcttgtggaaaggacgaaacaccgtaatttctactaagtgtagataactcgaggtgacaacaagttaatttctactaagtgtagatgtgatccacacgtgtagctgttttttaagcttggcgtggatccgatatcaactagatcttgaga

SEQ ID NO: 3271 - DNA, 170 bp, Artificial sequence
  Fat1.105_Apc.867
  crRNA array
cgatttcttggctttatatatcttgtggaaaggacgaaacaccgtaatttctactaagtgtagataactcgaggtgacaacaagttaatttctactaagtgtagatcagtcccaggcggcggaagcttttttaagcttggcgtggatccgatatcaactagatcttgaga

SEQ ID NO: 3272 - DNA, 170 bp, Artificial sequence
  Fat1.105_Arid1a.2
  crRNA array
cgatttcttggctttatatatcttgtggaaaggacgaaacaccgtaatttctactaagtgtagataactcgaggtgacaacaagttaatttctactaagtgtagatcccgcgcccccgtcctggggttttttaagcttggcgtggatccgatatcaactagatcttgaga

SEQ ID NO: 3273 - DNA, 170 bp, Artificial sequence
  Fat1.105_Arid1a.5
  crRNA array
cgatttcttggctttatatatcttgtggaaaggacgaaacaccgtaatttctactaagtgtagataactcgaggtgacaacaagttaatttctactaagtgtagatcccgcgctcggccgctgccgttttttaagcttggcgtggatccgatatcaactagatcttgaga

SEQ ID NO: 3274 - DNA, 170 bp, Artificial sequence
  Fat1.105_Arid2.166
  crRNA array
cgatttcttggctttatatatcttgtggaaaggacgaaacaccgtaatttctactaagtgtagataactcgaggtgacaacaagttaatttctactaagtgtagataaccgcgatctgggttttttttttttaagcttggcgtggatccgatatcaactagatcttgaga

SEQ ID NO: 3275 - DNA, 170 bp, Artificial sequence
  Fat1.105_Arid2.172
  crRNA array
cgatttcttggctttatatatcttgtggaaaggacgaaacaccgtaatttctactaagtgtagataactcgaggtgacaacaagttaatttctactaagtgtagatctggacgagctgcggcagttttttttaagcttggcgtggatccgatatcaactagatcttgaga

SEQ ID NO: 3276 - DNA, 170 bp, Artificial sequence
  Fat1.105_Atm.120
  crRNA array
cgatttcttggctttatatatcttgtggaaaggacgaaacaccgtaatttctactaagtgtagataactcgaggtgacaacaagttaatttctactaagtgtagatgacaggtagtcggcagctaattttttaagcttggcgtggatccgatatcaactagatcttgaga

SEQ ID NO: 3277 - DNA, 170 bp, Artificial sequence
  Fat1.105_Atm.997
  crRNA array
cgatttcttggctttatatatcttgtggaaaggacgaaacaccgtaatttctactaagtgtagataactcgaggtgacaacaagttaatttctactaagtgtagatgagaaagtctccgaatcgttttttttaagcttggcgtggatccgatatcaactagatcttgaga

SEQ ID NO: 3278 - DNA, 170 bp, Artificial sequence
  Fat1.105_Atrx.249
  crRNA array
cgatttcttggctttatatatcttgtggaaaggacgaaacaccgtaatttctactaagtgtagataactcgaggtgacaacaagttaatttctactaagtgtagattagccagtcgctcatatctcttttttaagcttggcgtggatccgatatcaactagatcttgaga

SEQ ID NO: 3279 - DNA, 170 bp, Artificial sequence
  Fat1.105_Atrx.251
  crRNA array
cgatttcttggctttatatatcttgtggaaaggacgaaacaccgtaatttctactaagtgtagataactcgaggtgacaacaagttaatttctactaagtgtagatgccagtcgctcatatctctgttttttaagcttggcgtggatccgatatcaactagatcttgaga

SEQ ID NO: 3280 - DNA, 170 bp, Artificial sequence
  Fat1.105_Bcor.203
  crRNA array
cgatttcttggctttatatatcttgtggaaaggacgaaacaccgtaatttctactaagtgtagataactcgaggtgacaacaagttaatttctactaagtgtagatccccggagcggagtccaggcttttttaagcttggcgtggatccgatatcaactagatcttgaga

SEQ ID NO: 3281 - DNA, 170 bp, Artificial sequence
  Fat1.105_Bcor.475
  crRNA array
cgatttcttggctttatatatcttgtggaaaggacgaaacaccgtaatttctactaagtgtagataactcgaggtgacaacaagttaatttctactaagtgtagattgcaacccctctgtatgggattttttaagcttggcgtggatccgatatcaactagatcttgaga

SEQ ID NO: 3282 - DNA, 170 bp, Artificial sequence
  Fat1.105_Brca1.112
  crRNA array
cgatttcttggctttatatatcttgtggaaaggacgaaacaccgtaatttctactaagtgtagataactcgaggtgacaacaagttaatttctactaagtgtagatctagacgctctgtggagactttttttaagcttggcgtggatccgatatcaactagatcttgaga

SEQ ID NO: 3283 - DNA, 170 bp, Artificial sequence
  Fat1.105_Brca1.53
  crRNA array
cgatttcttggctttatatatcttgtggaaaggacgaaacaccgtaatttctactaagtgtagataactcgaggtgacaacaagttaatttctactaagtgtagataatgaggaggcgtcgatcatttttttaagcttggcgtggatccgatatcaactagatcttgaga

SEQ ID NO: 3284 - DNA, 170 bp, Artificial sequence
  Fat1.105_Casp8.45
  crRNA array
cgatttcttggctttatatatcttgtggaaaggacgaaacaccgtaatttctactaagtgtagataactcgaggtgacaacaagttaatttctactaagtgtagatctaccgagatcctgtgaatgttttttaagcttggcgtggatccgatatcaactagatcttgaga

SEQ ID NO: 3285 - DNA, 170 bp, Artificial sequence
  Fat1.105_Casp8.54
  crRNA array
cgatttcttggctttatatatcttgtggaaaggacgaaacaccgtaatttctactaagtgtagataactcgaggtgacaacaagttaatttctactaagtgtagatcagtgcagtcgtcgtaagatttttttaagcttggcgtggatccgatatcaactagatcttgaga

SEQ ID NO: 3286 - DNA, 170 bp, Artificial sequence
  Fat1.105_Cbwd1.84
  crRNA array
cgatttcttggctttatatatcttgtggaaaggacgaaacaccgtaatttctactaagtgtagataactcgaggtgacaacaagttaatttctactaagtgtagatcacagcaggtaacatgccgcttttttaagcttggcgtggatccgatatcaactagatcttgaga

SEQ ID NO: 3287 - DNA, 170 bp, Artificial sequence
  Fat1.105_Cbwd1.85
  crRNA array
cgatttcttggctttatatatcttgtggaaaggacgaaacaccgtaatttctactaagtgtagataactcgaggtgacaacaagttaatttctactaagtgtagatacagcaggtaacatgccgccttttttaagcttggcgtggatccgatatcaactagatcttgaga

SEQ ID NO: 3288 - DNA, 170 bp, Artificial sequence
  Fat1.105_Cdh1.387
  crRNA array
cgatttcttggctttatatatcttgtggaaaggacgaaacaccgtaatttctactaagtgtagataactcgaggtgacaacaagttaatttctactaagtgtagatctcggcgtctgccgggtccgttttttaagcttggcgtggatccgatatcaactagatcttgaga

SEQ ID NO: 3289 - DNA, 170 bp, Artificial sequence
  Fat1.105_Cdh1.58
  crRNA array
cgatttcttggctttatatatcttgtggaaaggacgaaacaccgtaatttctactaagtgtagataactcgaggtgacaacaagttaatttctactaagtgtagatctcgtccgcgcccgggactcttttttaagcttggcgtggatccgatatcaactagatcttgaga

SEQ ID NO: 3290 - DNA, 170 bp, Artificial sequence
  Fat1.105_Cdkn2a.647
  crRNA array
cgatttcttggctttatatatcttgtggaaaggacgaaacaccgtaatttctactaagtgtagataactcgaggtgacaacaagttaatttctactaagtgtagatgcaatcacgggagggagcagttttttaagcttggcgtggatccgatatcaactagatcttgaga

SEQ ID NO: 3291 - DNA, 170 bp, Artificial sequence
  Fat1.105_Cdkn2a.648
  crRNA array
cgatttcttggctttatatatcttgtggaaaggacgaaacaccgtaatttctactaagtgtagataactcgaggtgacaacaagttaatttctactaagtgtagatcaatcacgggagggagcagattttttaagcttggcgtggatccgatatcaactagatcttgaga

SEQ ID NO: 3292 - DNA, 170 bp, Artificial sequence
  Fat1.105_Cic.162
  crRNA array
cgatttcttggctttatatatcttgtggaaaggacgaaacaccgtaatttctactaagtgtagataactcgaggtgacaacaagttaatttctactaagtgtagatcgcaggcgcgcccggcggagttttttaagcttggcgtggatccgatatcaactagatcttgaga

SEQ ID NO: 3293 - DNA, 170 bp, Artificial sequence
  Fat1.105_Cic.164
  crRNA array
cgatttcttggctttatatatcttgtggaaaggacgaaacaccgtaatttctactaagtgtagataactcgaggtgacaacaagttaatttctactaagtgtagatcgggccctgggccggcggctttttttaagcttggcgtggatccgatatcaactagatcttgaga

SEQ ID NO: 3294 - DNA, 170 bp, Artificial sequence
  Fat1.105_Ctcf.229
  crRNA array
cgatttcttggctttatatatcttgtggaaaggacgaaacaccgtaatttctactaagtgtagataactcgaggtgacaacaagttaatttctactaagtgtagatggctggtggctgatagtctgttttttaagcttggcgtggatccgatatcaactagatcttgaga

SEQ ID NO: 3295 - DNA, 170 bp, Artificial sequence
  Fat1.105_Ctcf.809
  crRNA array
cgatttcttggctttatatatcttgtggaaaggacgaaacaccgtaatttctactaagtgtagataactcgaggtgacaacaagttaatttctactaagtgtagataagcgctatcatgatcccaattttttaagcttggcgtggatccgatatcaactagatcttgaga

SEQ ID NO: 3296 - DNA, 170 bp, Artificial sequence
  Fat1.105_Elf3.826
  crRNA array
cgatttcttggctttatatatcttgtggaaaggacgaaacaccgtaatttctactaagtgtagataactcgaggtgacaacaagttaatttctactaagtgtagattccgagacatcctaatccacttttttaagcttggcgtggatccgatatcaactagatcttgaga

SEQ ID NO: 3297 - DNA, 170 bp, Artificial sequence
  Fat1.105_Elf3.983
  crRNA array
cgatttcttggctttatatatcttgtggaaaggacgaaacaccgtaatttctactaagtgtagataactcgaggtgacaacaagttaatttctactaagtgtagattaggccccctaactggaccattttttaagcttggcgtggatccgatatcaactagatcttgaga

SEQ ID NO: 3298 - DNA, 170 bp, Artificial sequence
  Fat1.105_Ep300.310
  crRNA array
cgatttcttggctttatatatcttgtggaaaggacgaaacaccgtaatttctactaagtgtagataactcgaggtgacaacaagttaatttctactaagtgtagatatggtacgacagtgaggaagttttttaagcttggcgtggatccgatatcaactagatcttgaga

SEQ ID NO: 3299 - DNA, 170 bp, Artificial sequence
  Fat1.105_Ep300.587
  crRNA array
cgatttcttggctttatatatcttgtggaaaggacgaaacaccgtaatttctactaagtgtagataactcgaggtgacaacaagttaatttctactaagtgtagatcgccccggggcccccaaccattttttaagcttggcgtggatccgatatcaactagatcttgaga

SEQ ID NO: 3300 - DNA, 170 bp, Artificial sequence
  Fat1.105_Epha2.126
  crRNA array
cgatttcttggctttatatatcttgtggaaaggacgaaacaccgtaatttctactaagtgtagataactcgaggtgacaacaagttaatttctactaagtgtagatcctgtgccgccgcggccgccttttttaagcttggcgtggatccgatatcaactagatcttgaga

SEQ ID NO: 3301 - DNA, 170 bp, Artificial sequence
  Fat1.105_Epha2.5
  crRNA array
cgatttcttggctttatatatcttgtggaaaggacgaaacaccgtaatttctactaagtgtagataactcgaggtgacaacaagttaatttctactaagtgtagatcatgagctggcgccacccggttttttaagcttggcgtggatccgatatcaactagatcttgaga

SEQ ID NO: 3302 - DNA, 170 bp, Artificial sequence
  Fat1.105_Fbxw7.21
  crRNA array
cgatttcttggctttatatatcttgtggaaaggacgaaacaccgtaatttctactaagtgtagataactcgaggtgacaacaagttaatttctactaagtgtagattaatgtgccgtagaaacccattttttaagcttggcgtggatccgatatcaactagatcttgaga

SEQ ID NO: 3303 - DNA, 170 bp, Artificial sequence
  Fat1.105_Fbxw7.23
  crRNA array
cgatttcttggctttatatatcttgtggaaaggacgaaacaccgtaatttctactaagtgtagataactcgaggtgacaacaagttaatttctactaagtgtagatatgtgccgtagaaacccatattttttaagcttggcgtggatccgatatcaactagatcttgaga

SEQ ID NO: 3304 - DNA, 170 bp, Artificial sequence
  Fat1.105_Gata3.34
  crRNA array
cgatttcttggctttatatatcttgtggaaaggacgaaacaccgtaatttctactaagtgtagataactcgaggtgacaacaagttaatttctactaagtgtagatctaaactatcccgcaaagatttttttaagcttggcgtggatccgatatcaactagatcttgaga

SEQ ID NO: 3305 - DNA, 170 bp, Artificial sequence
  Fat1.105_Gata3.47
  crRNA array
cgatttcttggctttatatatcttgtggaaaggacgaaacaccgtaatttctactaagtgtagataactcgaggtgacaacaagttaatttctactaagtgtagatcgtagtaggacgggacgtggttttttaagcttggcgtggatccgatatcaactagatcttgaga

SEQ ID NO: 3306 - DNA, 170 bp, Artificial sequence
  Fat1.105_H2-Q2.1
  crRNA array
cgatttcttggctttatatatcttgtggaaaggacgaaacaccgtaatttctactaagtgtagataactcgaggtgacaacaagttaatttctactaagtgtagatagggcggccaccaacagcagttttttaagcttggcgtggatccgatatcaactagatcttgaga

SEQ ID NO: 3307 - DNA, 170 bp, Artificial sequence
  Fat1.105_H2-Q2.2
  crRNA array
cgatttcttggctttatatatcttgtggaaaggacgaaacaccgtaatttctactaagtgtagataactcgaggtgacaacaagttaatttctactaagtgtagattaacctgcgcccgctgctgattttttaagcttggcgtggatccgatatcaactagatcttgaga

SEQ ID NO: 3308 - DNA, 170 bp, Artificial sequence
  Fat1.105_Kdm5c.1878
  crRNA array
cgatttcttggctttatatatcttgtggaaaggacgaaacaccgtaatttctactaagtgtagataactcgaggtgacaacaagttaatttctactaagtgtagatagagcacggcacccgcccccttttttaagcttggcgtggatccgatatcaactagatcttgaga

SEQ ID NO: 3309 - DNA, 170 bp, Artificial sequence
  Fat1.105_Kdm5c.1879
  crRNA array
cgatttcttggctttatatatcttgtggaaaggacgaaacaccgtaatttctactaagtgtagataactcgaggtgacaacaagttaatttctactaagtgtagatgagcacggcacccgccccccttttttaagcttggcgtggatccgatatcaactagatcttgaga

SEQ ID NO: 3310 - DNA, 170 bp, Artificial sequence
  Fat1.105_Kdm6a.56
  crRNA array
cgatttcttggctttatatatcttgtggaaaggacgaaacaccgtaatttctactaagtgtagataactcgaggtgacaacaagttaatttctactaagtgtagattcgctgccgcctctcgcggcttttttaagcttggcgtggatccgatatcaactagatcttgaga

SEQ ID NO: 3311 - DNA, 170 bp, Artificial sequence
  Fat1.105_Kdm6a.57
  crRNA array
cgatttcttggctttatatatcttgtggaaaggacgaaacaccgtaatttctactaagtgtagataactcgaggtgacaacaagttaatttctactaagtgtagatcgctgccgcctctcgcggcattttttaagcttggcgtggatccgatatcaactagatcttgaga

SEQ ID NO: 3312 - DNA, 170 bp, Artificial sequence
  Fat1.105_Kmt2b.265
  crRNA array
cgatttcttggctttatatatcttgtggaaaggacgaaacaccgtaatttctactaagtgtagataactcgaggtgacaacaagttaatttctactaagtgtagatccccaagtgaagcccacctgttttttaagcttggcgtggatccgatatcaactagatcttgaga

SEQ ID NO: 3313 - DNA, 170 bp, Artificial sequence
  Fat1.105_Kmt2b.298
  crRNA array
cgatttcttggctttatatatcttgtggaaaggacgaaacaccgtaatttctactaagtgtagataactcgaggtgacaacaagttaatttctactaagtgtagattccggcagggaccggctggcttttttaagcttggcgtggatccgatatcaactagatcttgaga

SEQ ID NO: 3314 - DNA, 170 bp, Artificial sequence
  Fat1.105_Kmt2c.1962
  crRNA array
cgatttcttggctttatatatcttgtggaaaggacgaaacaccgtaatttctactaagtgtagataactcgaggtgacaacaagttaatttctactaagtgtagatgtgacgatctgtgccacaagttttttaagcttggcgtggatccgatatcaactagatcttgaga

SEQ ID NO: 3315 - DNA, 170 bp, Artificial sequence
  Fat1.105_Kmt2c.2236
  crRNA array
cgatttcttggctttatatatcttgtggaaaggacgaaacaccgtaatttctactaagtgtagataactcgaggtgacaacaagttaatttctactaagtgtagatactcgacctccacctccctattttttaagcttggcgtggatccgatatcaactagatcttgaga

SEQ ID NO: 3316 - DNA, 170 bp, Artificial sequence
  Fat1.105_Kmt2d.316
  crRNA array
cgatttcttggctttatatatcttgtggaaaggacgaaacaccgtaatttctactaagtgtagataactcgaggtgacaacaagttaatttctactaagtgtagatactccaggccacccaggtggttttttaagcttggcgtggatccgatatcaactagatcttgaga

SEQ ID NO: 3317 - DNA, 170 bp, Artificial sequence
  Fat1.105_Kmt2d.416
  crRNA array
cgatttcttggctttatatatcttgtggaaaggacgaaacaccgtaatttctactaagtgtagataactcgaggtgacaacaagttaatttctactaagtgtagattaaacccccgggggaagggtttttttaagcttggcgtggatccgatatcaactagatcttgaga

SEQ ID NO: 3318 - DNA, 170 bp, Artificial sequence
  Fat1.105_Map2k4.119
  crRNA array
cgatttcttggctttatatatcttgtggaaaggacgaaacaccgtaatttctactaagtgtagataactcgaggtgacaacaagttaatttctactaagtgtagattgctgtgtgggcggccacatttttttaagcttggcgtggatccgatatcaactagatcttgaga

SEQ ID NO: 3319 - DNA, 170 bp, Artificial sequence
  Fat1.105_Map2k4.1261
  crRNA array
cgatttcttggctttatatatcttgtggaaaggacgaaacaccgtaatttctactaagtgtagataactcgaggtgacaacaagttaatttctactaagtgtagatgatgtagtaatgcggagtagttttttaagcttggcgtggatccgatatcaactagatcttgaga

SEQ ID NO: 3320 - DNA, 170 bp, Artificial sequence
  Fat1.105_Map3k1.235
  crRNA array
cgatttcttggctttatatatcttgtggaaaggacgaaacaccgtaatttctactaagtgtagataactcgaggtgacaacaagttaatttctactaagtgtagataaaacgctactgatcgatcgttttttaagcttggcgtggatccgatatcaactagatcttgaga

SEQ ID NO: 3321 - DNA, 170 bp, Artificial sequence
  Fat1.105_Map3k1.3838
  crRNA array
cgatttcttggctttatatatcttgtggaaaggacgaaacaccgtaatttctactaagtgtagataactcgaggtgacaacaagttaatttctactaagtgtagatccaacaacagggccccactattttttaagcttggcgtggatccgatatcaactagatcttgaga

SEQ ID NO: 3322 - DNA, 170 bp, Artificial sequence
  Fat1.105_Mga.1655
  crRNA array
cgatttcttggctttatatatcttgtggaaaggacgaaacaccgtaatttctactaagtgtagataactcgaggtgacaacaagttaatttctactaagtgtagatcgagaagtggagagcatattttttttaagcttggcgtggatccgatatcaactagatcttgaga

SEQ ID NO: 3323 - DNA, 170 bp, Artificial sequence
  Fat1.105_Mga.93
  crRNA array
cgatttcttggctttatatatcttgtggaaaggacgaaacaccgtaatttctactaagtgtagataactcgaggtgacaacaagttaatttctactaagtgtagatgagaaggctccccataatgtttttttaagcttggcgtggatccgatatcaactagatcttgaga

SEQ ID NO: 3324 - DNA, 170 bp, Artificial sequence
  Fat1.105_Nf1.746
  crRNA array
cgatttcttggctttatatatcttgtggaaaggacgaaacaccgtaatttctactaagtgtagataactcgaggtgacaacaagttaatttctactaagtgtagattaagcataatgatgatgccattttttaagcttggcgtggatccgatatcaactagatcttgaga

SEQ ID NO: 3325 - DNA, 170 bp, Artificial sequence
  Fat1.105_Nf1.97
  crRNA array
cgatttcttggctttatatatcttgtggaaaggacgaaacaccgtaatttctactaagtgtagataactcgaggtgacaacaagttaatttctactaagtgtagatagcccgctacatgctgatgcttttttaagcttggcgtggatccgatatcaactagatcttgaga

SEQ ID NO: 3326 - DNA, 170 bp, Artificial sequence
  Fat1.105_Nf2.356
  crRNA array
cgatttcttggctttatatatcttgtggaaaggacgaaacaccgtaatttctactaagtgtagataactcgaggtgacaacaagttaatttctactaagtgtagatcggagtcatctgatagagatttttttaagcttggcgtggatccgatatcaactagatcttgaga

SEQ ID NO: 3327 - DNA, 170 bp, Artificial sequence
  Fat1.105_Nf2.768
  crRNA array
cgatttcttggctttatatatcttgtggaaaggacgaaacaccgtaatttctactaagtgtagataactcgaggtgacaacaagttaatttctactaagtgtagatccgaagccccagtgtccggcttttttaagcttggcgtggatccgatatcaactagatcttgaga

SEQ ID NO: 3328 - DNA, 170 bp, Artificial sequence
  Fat1.105_Notch1.1849
  crRNA array
cgatttcttggctttatatatcttgtggaaaggacgaaacaccgtaatttctactaagtgtagataactcgaggtgacaacaagttaatttctactaagtgtagatctggcgggtgggcggcgctgttttttaagcttggcgtggatccgatatcaactagatcttgaga

SEQ ID NO: 3329 - DNA, 170 bp, Artificial sequence
  Fat1.105_Notch1.649
  crRNA array
cgatttcttggctttatatatcttgtggaaaggacgaaacaccgtaatttctactaagtgtagataactcgaggtgacaacaagttaatttctactaagtgtagattgggccaacgatgccaggacttttttaagcttggcgtggatccgatatcaactagatcttgaga

SEQ ID NO: 3330 - DNA, 170 bp, Artificial sequence
  Fat1.105_Nsd1.70
  crRNA array
cgatttcttggctttatatatcttgtggaaaggacgaaacaccgtaatttctactaagtgtagataactcgaggtgacaacaagttaatttctactaagtgtagatactggtgtggacgatgcagattttttaagcttggcgtggatccgatatcaactagatcttgaga

SEQ ID NO: 3331 - DNA, 170 bp, Artificial sequence
  Fat1.105_Nsd1.90
  crRNA array
cgatttcttggctttatatatcttgtggaaaggacgaaacaccgtaatttctactaagtgtagataactcgaggtgacaacaagttaatttctactaagtgtagataggagctaacggcaagaatgttttttaagcttggcgtggatccgatatcaactagatcttgaga

SEQ ID NO: 3332 - DNA, 170 bp, Artificial sequence
  Fat1.105_Pbrm1.1236
  crRNA array
cgatttcttggctttatatatcttgtggaaaggacgaaacaccgtaatttctactaagtgtagataactcgaggtgacaacaagttaatttctactaagtgtagatgccgataaaaccaacagccgttttttaagcttggcgtggatccgatatcaactagatcttgaga

SEQ ID NO: 3333 - DNA, 170 bp, Artificial sequence
  Fat1.105_Pbrm1.969
  crRNA array
cgatttcttggctttatatatcttgtggaaaggacgaaacaccgtaatttctactaagtgtagataactcgaggtgacaacaagttaatttctactaagtgtagatgagccctaatgaacagctcattttttaagcttggcgtggatccgatatcaactagatcttgaga

SEQ ID NO: 3334 - DNA, 170 bp, Artificial sequence
  Fat1.105_Pik3r1.76
  crRNA array
cgatttcttggctttatatatcttgtggaaaggacgaaacaccgtaatttctactaagtgtagataactcgaggtgacaacaagttaatttctactaagtgtagataaaacctatacggcccgcacttttttaagcttggcgtggatccgatatcaactagatcttgaga

SEQ ID NO: 3335 - DNA, 170 bp, Artificial sequence
  Fat1.105_Pik3r1.77
  crRNA array
cgatttcttggctttatatatcttgtggaaaggacgaaacaccgtaatttctactaagtgtagataactcgaggtgacaacaagttaatttctactaagtgtagataaacctatacggcccgcactttttttaagcttggcgtggatccgatatcaactagatcttgaga

SEQ ID NO: 3336 - DNA, 170 bp, Artificial sequence
  Fat1.105_Pten.240
  crRNA array
cgatttcttggctttatatatcttgtggaaaggacgaaacaccgtaatttctactaagtgtagataactcgaggtgacaacaagttaatttctactaagtgtagattgcatacgctatagctgcttttttttaagcttggcgtggatccgatatcaactagatcttgaga

SEQ ID NO: 3337 - DNA, 170 bp, Artificial sequence
  Fat1.105_Pten.265
  crRNA array
cgatttcttggctttatatatcttgtggaaaggacgaaacaccgtaatttctactaagtgtagataactcgaggtgacaacaagttaatttctactaagtgtagataagcgtggtgcgtgacgcacttttttaagcttggcgtggatccgatatcaactagatcttgaga

SEQ ID NO: 3338 - DNA, 170 bp, Artificial sequence
  Fat1.105_Rasa1.1478
  crRNA array
cgatttcttggctttatatatcttgtggaaaggacgaaacaccgtaatttctactaagtgtagataactcgaggtgacaacaagttaatttctactaagtgtagatcgataatggtctatgatgtcttttttaagcttggcgtggatccgatatcaactagatcttgaga

SEQ ID NO: 3339 - DNA, 170 bp, Artificial sequence
  Fat1.105_Rasa1.223
  crRNA array
cgatttcttggctttatatatcttgtggaaaggacgaaacaccgtaatttctactaagtgtagataactcgaggtgacaacaagttaatttctactaagtgtagattccatggagtatcgtgctcgttttttaagcttggcgtggatccgatatcaactagatcttgaga

SEQ ID NO: 3340 - DNA, 170 bp, Artificial sequence
  Fat1.105_Rb1.211
  crRNA array
cgatttcttggctttatatatcttgtggaaaggacgaaacaccgtaatttctactaagtgtagataactcgaggtgacaacaagttaatttctactaagtgtagattctgacatgatcgggtacctttttttaagcttggcgtggatccgatatcaactagatcttgaga

SEQ ID NO: 3341 - DNA, 170 bp, Artificial sequence
  Fat1.105_Rb1.394
  crRNA array
cgatttcttggctttatatatcttgtggaaaggacgaaacaccgtaatttctactaagtgtagataactcgaggtgacaacaagttaatttctactaagtgtagatagaaatctcgaagcaggatcttttttaagcttggcgtggatccgatatcaactagatcttgaga

SEQ ID NO: 3342 - DNA, 170 bp, Artificial sequence
  Fat1.105_Rbm10.5
  crRNA array
cgatttcttggctttatatatcttgtggaaaggacgaaacaccgtaatttctactaagtgtagataactcgaggtgacaacaagttaatttctactaagtgtagatacgaaacctgaacccacacattttttaagcttggcgtggatccgatatcaactagatcttgaga

SEQ ID NO: 3343 - DNA, 170 bp, Artificial sequence
  Fat1.105_Rbm10.6
  crRNA array
cgatttcttggctttatatatcttgtggaaaggacgaaacaccgtaatttctactaagtgtagataactcgaggtgacaacaagttaatttctactaagtgtagatcgaaacctgaacccacacagttttttaagcttggcgtggatccgatatcaactagatcttgaga

SEQ ID NO: 3344 - DNA, 170 bp, Artificial sequence
  Fat1.105_Rnf43.1920
  crRNA array
cgatttcttggctttatatatcttgtggaaaggacgaaacaccgtaatttctactaagtgtagataactcgaggtgacaacaagttaatttctactaagtgtagatatccccgtgccgtggactccttttttaagcttggcgtggatccgatatcaactagatcttgaga

SEQ ID NO: 3345 - DNA, 170 bp, Artificial sequence
  Fat1.105_Rnf43.39
  crRNA array
cgatttcttggctttatatatcttgtggaaaggacgaaacaccgtaatttctactaagtgtagataactcgaggtgacaacaagttaatttctactaagtgtagatcaaggggatcactctgataattttttaagcttggcgtggatccgatatcaactagatcttgaga

SEQ ID NO: 3346 - DNA, 170 bp, Artificial sequence
  Fat1.105_Runx1.204
  crRNA array
cgatttcttggctttatatatcttgtggaaaggacgaaacaccgtaatttctactaagtgtagataactcgaggtgacaacaagttaatttctactaagtgtagattaaataagtccagccgttttttttttaagcttggcgtggatccgatatcaactagatcttgaga

SEQ ID NO: 3347 - DNA, 170 bp, Artificial sequence
  Fat1.105_Runx1.81
  crRNA array
cgatttcttggctttatatatcttgtggaaaggacgaaacaccgtaatttctactaagtgtagataactcgaggtgacaacaagttaatttctactaagtgtagataggacgcgtatgggaattttttttttaagcttggcgtggatccgatatcaactagatcttgaga

SEQ ID NO: 3348 - DNA, 170 bp, Artificial sequence
  Fat1.105_Setd2.143
  crRNA array
cgatttcttggctttatatatcttgtggaaaggacgaaacaccgtaatttctactaagtgtagataactcgaggtgacaacaagttaatttctactaagtgtagatgcacaaccacaacagactggttttttaagcttggcgtggatccgatatcaactagatcttgaga

SEQ ID NO: 3349 - DNA, 170 bp, Artificial sequence
  Fat1.105_Setd2.508
  crRNA array
cgatttcttggctttatatatcttgtggaaaggacgaaacaccgtaatttctactaagtgtagataactcgaggtgacaacaagttaatttctactaagtgtagattacgatcccgagcacccgacttttttaagcttggcgtggatccgatatcaactagatcttgaga

SEQ ID NO: 3350 - DNA, 170 bp, Artificial sequence
  Fat1.105_Smad4.3038
  crRNA array
cgatttcttggctttatatatcttgtggaaaggacgaaacaccgtaatttctactaagtgtagataactcgaggtgacaacaagttaatttctactaagtgtagatatctgcggcagtgtcaccggttttttaagcttggcgtggatccgatatcaactagatcttgaga

SEQ ID NO: 3351 - DNA, 170 bp, Artificial sequence
  Fat1.105_Smad4.39
  crRNA array
cgatttcttggctttatatatcttgtggaaaggacgaaacaccgtaatttctactaagtgtagataactcgaggtgacaacaagttaatttctactaagtgtagatagtcaaacgcatactgacaattttttaagcttggcgtggatccgatatcaactagatcttgaga

SEQ ID NO: 3352 - DNA, 170 bp, Artificial sequence
  Fat1.105_Stag2.1409
  crRNA array
cgatttcttggctttatatatcttgtggaaaggacgaaacaccgtaatttctactaagtgtagataactcgaggtgacaacaagttaatttctactaagtgtagatgctaataactgcggaagggcttttttaagcttggcgtggatccgatatcaactagatcttgaga

SEQ ID NO: 3353 - DNA, 170 bp, Artificial sequence
  Fat1.105_Stag2.4401
  crRNA array
cgatttcttggctttatatatcttgtggaaaggacgaaacaccgtaatttctactaagtgtagataactcgaggtgacaacaagttaatttctactaagtgtagattaatcgtccagtggtgtatattttttaagcttggcgtggatccgatatcaactagatcttgaga

SEQ ID NO: 3354 - DNA, 170 bp, Artificial sequence
  Fat1.105_Tbl1xr1.1
  crRNA array
cgatttcttggctttatatatcttgtggaaaggacgaaacaccgtaatttctactaagtgtagataactcgaggtgacaacaagttaatttctactaagtgtagatggatgcgcatactggtgaagttttttaagcttggcgtggatccgatatcaactagatcttgaga

SEQ ID NO: 3355 - DNA, 170 bp, Artificial sequence
  Fat1.105_Tbl1xr1.83
  crRNA array
cgatttcttggctttatatatcttgtggaaaggacgaaacaccgtaatttctactaagtgtagataactcgaggtgacaacaagttaatttctactaagtgtagatatggtcgacccatcgagtctttttttaagcttggcgtggatccgatatcaactagatcttgaga

SEQ ID NO: 3356 - DNA, 170 bp, Artificial sequence
  Fat1.105_Tgfbr2.290
  crRNA array
cgatttcttggctttatatatcttgtggaaaggacgaaacaccgtaatttctactaagtgtagataactcgaggtgacaacaagttaatttctactaagtgtagatcctctcggcgcccgggtaaattttttaagcttggcgtggatccgatatcaactagatcttgaga

SEQ ID NO: 3357 - DNA, 170 bp, Artificial sequence
  Fat1.105_Tgfbr2.292
  crRNA array
cgatttcttggctttatatatcttgtggaaaggacgaaacaccgtaatttctactaagtgtagataactcgaggtgacaacaagttaatttctactaagtgtagatcccgggcgccgagagggaaattttttaagcttggcgtggatccgatatcaactagatcttgaga

SEQ ID NO: 3358 - DNA, 170 bp, Artificial sequence
  Fat1.105_Trp53.4
  crRNA array
cgatttcttggctttatatatcttgtggaaaggacgaaacaccgtaatttctactaagtgtagataactcgaggtgacaacaagttaatttctactaagtgtagatccctgaactgcccccagggattttttaagcttggcgtggatccgatatcaactagatcttgaga

SEQ ID NO: 3359 - DNA, 170 bp, Artificial sequence
  Fat1.105_Trp53.528
  crRNA array
cgatttcttggctttatatatcttgtggaaaggacgaaacaccgtaatttctactaagtgtagataactcgaggtgacaacaagttaatttctactaagtgtagatgctgggccagcagagacctgttttttaagcttggcgtggatccgatatcaactagatcttgaga

SEQ ID NO: 3360 - DNA, 170 bp, Artificial sequence
  Fat1.105_Vhl.1
  crRNA array
cgatttcttggctttatatatcttgtggaaaggacgaaacaccgtaatttctactaagtgtagataactcgaggtgacaacaagttaatttctactaagtgtagatagggctcccggcggccatttttttttaagcttggcgtggatccgatatcaactagatcttgaga

SEQ ID NO: 3361 - DNA, 170 bp, Artificial sequence
  Fat1.105_Vhl.151
  crRNA array
cgatttcttggctttatatatcttgtggaaaggacgaaacaccgtaatttctactaagtgtagataactcgaggtgacaacaagttaatttctactaagtgtagattagagcactcacccgagggattttttaagcttggcgtggatccgatatcaactagatcttgaga

SEQ ID NO: 3362 - DNA, 170 bp, Artificial sequence
  Fat1.105_Zc3h13.1387
  crRNA array
cgatttcttggctttatatatcttgtggaaaggacgaaacaccgtaatttctactaagtgtagataactcgaggtgacaacaagttaatttctactaagtgtagatgtgacgccggtcatgtgactttttttaagcttggcgtggatccgatatcaactagatcttgaga

SEQ ID NO: 3363 - DNA, 170 bp, Artificial sequence
  Fat1.105_Zc3h13.1777
  crRNA array
cgatttcttggctttatatatcttgtggaaaggacgaaacaccgtaatttctactaagtgtagataactcgaggtgacaacaagttaatttctactaagtgtagatgatgctgccagtgtagcggcttttttaagcttggcgtggatccgatatcaactagatcttgaga

SEQ ID NO: 3364 - DNA, 170 bp, Artificial sequence
  Fat1.122_Acvr2a.155
  crRNA array
cgatttcttggctttatatatcttgtggaaaggacgaaacaccgtaatttctactaagtgtagatccatcgacatggaaacgggataatttctactaagtgtagatggacctggctaatcaagtatttttttaagcttggcgtggatccgatatcaactagatcttgaga

SEQ ID NO: 3365 - DNA, 170 bp, Artificial sequence
  Fat1.122_Acvr2a.70
  crRNA array
cgatttcttggctttatatatcttgtggaaaggacgaaacaccgtaatttctactaagtgtagatccatcgacatggaaacgggataatttctactaagtgtagatcccgaggcgccggagaagccttttttaagcttggcgtggatccgatatcaactagatcttgaga

SEQ ID NO: 3366 - DNA, 170 bp, Artificial sequence
  Fat1.122_Apc.21
  crRNA array
cgatttcttggctttatatatcttgtggaaaggacgaaacaccgtaatttctactaagtgtagatccatcgacatggaaacgggataatttctactaagtgtagatgtgatccacacgtgtagctgttttttaagcttggcgtggatccgatatcaactagatcttgaga

SEQ ID NO: 3367 - DNA, 170 bp, Artificial sequence
  Fat1.122_Apc.867
  crRNA array
cgatttcttggctttatatatcttgtggaaaggacgaaacaccgtaatttctactaagtgtagatccatcgacatggaaacgggataatttctactaagtgtagatcagtcccaggcggcggaagcttttttaagcttggcgtggatccgatatcaactagatcttgaga

SEQ ID NO: 3368 - DNA, 170 bp, Artificial sequence
  Fat1.122_Arid1a.2
  crRNA array
cgatttcttggctttatatatcttgtggaaaggacgaaacaccgtaatttctactaagtgtagatccatcgacatggaaacgggataatttctactaagtgtagatcccgcgcccccgtcctggggttttttaagcttggcgtggatccgatatcaactagatcttgaga

SEQ ID NO: 3369 - DNA, 170 bp, Artificial sequence
  Fat1.122_Arid1a.5
  crRNA array
cgatttcttggctttatatatcttgtggaaaggacgaaacaccgtaatttctactaagtgtagatccatcgacatggaaacgggataatttctactaagtgtagatcccgcgctcggccgctgccgttttttaagcttggcgtggatccgatatcaactagatcttgaga

SEQ ID NO: 3370 - DNA, 170 bp, Artificial sequence
  Fat1.122_Arid2.166
  crRNA array
cgatttcttggctttatatatcttgtggaaaggacgaaacaccgtaatttctactaagtgtagatccatcgacatggaaacgggataatttctactaagtgtagataaccgcgatctgggttttttttttttaagcttggcgtggatccgatatcaactagatcttgaga

SEQ ID NO: 3371 - DNA, 170 bp, Artificial sequence
  Fat1.122_Arid2.172
  crRNA array
cgatttcttggctttatatatcttgtggaaaggacgaaacaccgtaatttctactaagtgtagatccatcgacatggaaacgggataatttctactaagtgtagatctggacgagctgcggcagttttttttaagcttggcgtggatccgatatcaactagatcttgaga

SEQ ID NO: 3372 - DNA, 170 bp, Artificial sequence
  Fat1.122_Atm.120
  crRNA array
cgatttcttggctttatatatcttgtggaaaggacgaaacaccgtaatttctactaagtgtagatccatcgacatggaaacgggataatttctactaagtgtagatgacaggtagtcggcagctaattttttaagcttggcgtggatccgatatcaactagatcttgaga

SEQ ID NO: 3373 - DNA, 170 bp, Artificial sequence
  Fat1.122_Atm.997
  crRNA array
cgatttcttggctttatatatcttgtggaaaggacgaaacaccgtaatttctactaagtgtagatccatcgacatggaaacgggataatttctactaagtgtagatgagaaagtctccgaatcgttttttttaagcttggcgtggatccgatatcaactagatcttgaga

SEQ ID NO: 3374 - DNA, 170 bp, Artificial sequence
  Fat1.122_Atrx.249
  crRNA array
cgatttcttggctttatatatcttgtggaaaggacgaaacaccgtaatttctactaagtgtagatccatcgacatggaaacgggataatttctactaagtgtagattagccagtcgctcatatctcttttttaagcttggcgtggatccgatatcaactagatcttgaga

SEQ ID NO: 3375 - DNA, 170 bp, Artificial sequence
  Fat1.122_Atrx.251
  crRNA array
cgatttcttggctttatatatcttgtggaaaggacgaaacaccgtaatttctactaagtgtagatccatcgacatggaaacgggataatttctactaagtgtagatgccagtcgctcatatctctgttttttaagcttggcgtggatccgatatcaactagatcttgaga

SEQ ID NO: 3376 - DNA, 170 bp, Artificial sequence
  Fat1.122_Bcor.203
  crRNA array
cgatttcttggctttatatatcttgtggaaaggacgaaacaccgtaatttctactaagtgtagatccatcgacatggaaacgggataatttctactaagtgtagatccccggagcggagtccaggcttttttaagcttggcgtggatccgatatcaactagatcttgaga

SEQ ID NO: 3377 - DNA, 170 bp, Artificial sequence
  Fat1.122_Bcor.475
  crRNA array
cgatttcttggctttatatatcttgtggaaaggacgaaacaccgtaatttctactaagtgtagatccatcgacatggaaacgggataatttctactaagtgtagattgcaacccctctgtatgggattttttaagcttggcgtggatccgatatcaactagatcttgaga

SEQ ID NO: 3378 - DNA, 170 bp, Artificial sequence
  Fat1.122_Brca1.112
  crRNA array
cgatttcttggctttatatatcttgtggaaaggacgaaacaccgtaatttctactaagtgtagatccatcgacatggaaacgggataatttctactaagtgtagatctagacgctctgtggagactttttttaagcttggcgtggatccgatatcaactagatcttgaga

SEQ ID NO: 3379 - DNA, 170 bp, Artificial sequence
  Fat1.122_Brca1.53
  crRNA array
cgatttcttggctttatatatcttgtggaaaggacgaaacaccgtaatttctactaagtgtagatccatcgacatggaaacgggataatttctactaagtgtagataatgaggaggcgtcgatcatttttttaagcttggcgtggatccgatatcaactagatcttgaga

SEQ ID NO: 3380 - DNA, 170 bp, Artificial sequence
  Fat1.122_Casp8.45
  crRNA array
cgatttcttggctttatatatcttgtggaaaggacgaaacaccgtaatttctactaagtgtagatccatcgacatggaaacgggataatttctactaagtgtagatctaccgagatcctgtgaatgttttttaagcttggcgtggatccgatatcaactagatcttgaga

SEQ ID NO: 3381 - DNA, 170 bp, Artificial sequence
  Fat1.122_Casp8.54
  crRNA array
cgatttcttggctttatatatcttgtggaaaggacgaaacaccgtaatttctactaagtgtagatccatcgacatggaaacgggataatttctactaagtgtagatcagtgcagtcgtcgtaagatttttttaagcttggcgtggatccgatatcaactagatcttgaga

SEQ ID NO: 3382 - DNA, 170 bp, Artificial sequence
  Fat1.122_Cbwd1.84
  crRNA array
cgatttcttggctttatatatcttgtggaaaggacgaaacaccgtaatttctactaagtgtagatccatcgacatggaaacgggataatttctactaagtgtagatcacagcaggtaacatgccgcttttttaagcttggcgtggatccgatatcaactagatcttgaga

SEQ ID NO: 3383 - DNA, 170 bp, Artificial sequence
  Fat1.122_Cbwd1.85
  crRNA array
cgatttcttggctttatatatcttgtggaaaggacgaaacaccgtaatttctactaagtgtagatccatcgacatggaaacgggataatttctactaagtgtagatacagcaggtaacatgccgccttttttaagcttggcgtggatccgatatcaactagatcttgaga

SEQ ID NO: 3384 - DNA, 170 bp, Artificial sequence
  Fat1.122_Cdh1.387
  crRNA array
cgatttcttggctttatatatcttgtggaaaggacgaaacaccgtaatttctactaagtgtagatccatcgacatggaaacgggataatttctactaagtgtagatctcggcgtctgccgggtccgttttttaagcttggcgtggatccgatatcaactagatcttgaga

SEQ ID NO: 3385 - DNA, 170 bp, Artificial sequence
  Fat1.122_Cdh1.58
  crRNA array
cgatttcttggctttatatatcttgtggaaaggacgaaacaccgtaatttctactaagtgtagatccatcgacatggaaacgggataatttctactaagtgtagatctcgtccgcgcccgggactcttttttaagcttggcgtggatccgatatcaactagatcttgaga

SEQ ID NO: 3386 - DNA, 170 bp, Artificial sequence
  Fat1.122_Cdkn2a.647
  crRNA array
cgatttcttggctttatatatcttgtggaaaggacgaaacaccgtaatttctactaagtgtagatccatcgacatggaaacgggataatttctactaagtgtagatgcaatcacgggagggagcagttttttaagcttggcgtggatccgatatcaactagatcttgaga

SEQ ID NO: 3387 - DNA, 170 bp, Artificial sequence
  Fat1.122_Cdkn2a.648
  crRNA array
cgatttcttggctttatatatcttgtggaaaggacgaaacaccgtaatttctactaagtgtagatccatcgacatggaaacgggataatttctactaagtgtagatcaatcacgggagggagcagattttttaagcttggcgtggatccgatatcaactagatcttgaga

SEQ ID NO: 3388 - DNA, 170 bp, Artificial sequence
  Fat1.122_Cic.162
  crRNA array
cgatttcttggctttatatatcttgtggaaaggacgaaacaccgtaatttctactaagtgtagatccatcgacatggaaacgggataatttctactaagtgtagatcgcaggcgcgcccggcggagttttttaagcttggcgtggatccgatatcaactagatcttgaga

SEQ ID NO: 3389 - DNA, 170 bp, Artificial sequence
  Fat1.122_Cic.164
  crRNA array
cgatttcttggctttatatatcttgtggaaaggacgaaacaccgtaatttctactaagtgtagatccatcgacatggaaacgggataatttctactaagtgtagatcgggccctgggccggcggctttttttaagcttggcgtggatccgatatcaactagatcttgaga

SEQ ID NO: 3390 - DNA, 170 bp, Artificial sequence
  Fat1.122_Ctcf.229
  crRNA array
cgatttcttggctttatatatcttgtggaaaggacgaaacaccgtaatttctactaagtgtagatccatcgacatggaaacgggataatttctactaagtgtagatggctggtggctgatagtctgttttttaagcttggcgtggatccgatatcaactagatcttgaga

SEQ ID NO: 3391 - DNA, 170 bp, Artificial sequence
  Fat1.122_Ctcf.809
  crRNA array
cgatttcttggctttatatatcttgtggaaaggacgaaacaccgtaatttctactaagtgtagatccatcgacatggaaacgggataatttctactaagtgtagataagcgctatcatgatcccaattttttaagcttggcgtggatccgatatcaactagatcttgaga

SEQ ID NO: 3392 - DNA, 170 bp, Artificial sequence
  Fat1.122_Elf3.826
  crRNA array
cgatttcttggctttatatatcttgtggaaaggacgaaacaccgtaatttctactaagtgtagatccatcgacatggaaacgggataatttctactaagtgtagattccgagacatcctaatccacttttttaagcttggcgtggatccgatatcaactagatcttgaga

SEQ ID NO: 3393 - DNA, 170 bp, Artificial sequence
  Fat1.122_Elf3.983
  crRNA array
cgatttcttggctttatatatcttgtggaaaggacgaaacaccgtaatttctactaagtgtagatccatcgacatggaaacgggataatttctactaagtgtagattaggccccctaactggaccattttttaagcttggcgtggatccgatatcaactagatcttgaga

SEQ ID NO: 3394 - DNA, 170 bp, Artificial sequence
  Fat1.122_Ep300.310
  crRNA array
cgatttcttggctttatatatcttgtggaaaggacgaaacaccgtaatttctactaagtgtagatccatcgacatggaaacgggataatttctactaagtgtagatatggtacgacagtgaggaagttttttaagcttggcgtggatccgatatcaactagatcttgaga

SEQ ID NO: 3395 - DNA, 170 bp, Artificial sequence
  Fat1.122_Ep300.587
  crRNA array
cgatttcttggctttatatatcttgtggaaaggacgaaacaccgtaatttctactaagtgtagatccatcgacatggaaacgggataatttctactaagtgtagatcgccccggggcccccaaccattttttaagcttggcgtggatccgatatcaactagatcttgaga

SEQ ID NO: 3396 - DNA, 170 bp, Artificial sequence
  Fat1.122_Epha2.126
  crRNA array
cgatttcttggctttatatatcttgtggaaaggacgaaacaccgtaatttctactaagtgtagatccatcgacatggaaacgggataatttctactaagtgtagatcctgtgccgccgcggccgccttttttaagcttggcgtggatccgatatcaactagatcttgaga

SEQ ID NO: 3397 - DNA, 170 bp, Artificial sequence
  Fat1.122_Epha2.5
  crRNA array
cgatttcttggctttatatatcttgtggaaaggacgaaacaccgtaatttctactaagtgtagatccatcgacatggaaacgggataatttctactaagtgtagatcatgagctggcgccacccggttttttaagcttggcgtggatccgatatcaactagatcttgaga

SEQ ID NO: 3398 - DNA, 170 bp, Artificial sequence
  Fat1.122_Fbxw7.21
  crRNA array
cgatttcttggctttatatatcttgtggaaaggacgaaacaccgtaatttctactaagtgtagatccatcgacatggaaacgggataatttctactaagtgtagattaatgtgccgtagaaacccattttttaagcttggcgtggatccgatatcaactagatcttgaga

SEQ ID NO: 3399 - DNA, 170 bp, Artificial sequence
  Fat1.122_Fbxw7.23
  crRNA array
cgatttcttggctttatatatcttgtggaaaggacgaaacaccgtaatttctactaagtgtagatccatcgacatggaaacgggataatttctactaagtgtagatatgtgccgtagaaacccatattttttaagcttggcgtggatccgatatcaactagatcttgaga

SEQ ID NO: 3400 - DNA, 170 bp, Artificial sequence
  Fat1.122_Gata3.34
  crRNA array
cgatttcttggctttatatatcttgtggaaaggacgaaacaccgtaatttctactaagtgtagatccatcgacatggaaacgggataatttctactaagtgtagatctaaactatcccgcaaagatttttttaagcttggcgtggatccgatatcaactagatcttgaga

SEQ ID NO: 3401 - DNA, 170 bp, Artificial sequence
  Fat1.122_Gata3.47
  crRNA array
cgatttcttggctttatatatcttgtggaaaggacgaaacaccgtaatttctactaagtgtagatccatcgacatggaaacgggataatttctactaagtgtagatcgtagtaggacgggacgtggttttttaagcttggcgtggatccgatatcaactagatcttgaga

SEQ ID NO: 3402 - DNA, 170 bp, Artificial sequence
  Fat1.122_H2-Q2.1
  crRNA array
cgatttcttggctttatatatcttgtggaaaggacgaaacaccgtaatttctactaagtgtagatccatcgacatggaaacgggataatttctactaagtgtagatagggcggccaccaacagcagttttttaagcttggcgtggatccgatatcaactagatcttgaga

SEQ ID NO: 3403 - DNA, 170 bp, Artificial sequence
  Fat1.122_H2-Q2.2
  crRNA array
cgatttcttggctttatatatcttgtggaaaggacgaaacaccgtaatttctactaagtgtagatccatcgacatggaaacgggataatttctactaagtgtagattaacctgcgcccgctgctgattttttaagcttggcgtggatccgatatcaactagatcttgaga

SEQ ID NO: 3404 - DNA, 170 bp, Artificial sequence
  Fat1.122_Kdm5c.1878
  crRNA array
cgatttcttggctttatatatcttgtggaaaggacgaaacaccgtaatttctactaagtgtagatccatcgacatggaaacgggataatttctactaagtgtagatagagcacggcacccgcccccttttttaagcttggcgtggatccgatatcaactagatcttgaga

SEQ ID NO: 3405 - DNA, 170 bp, Artificial sequence
  Fat1.122_Kdm5c.1879
  crRNA array
cgatttcttggctttatatatcttgtggaaaggacgaaacaccgtaatttctactaagtgtagatccatcgacatggaaacgggataatttctactaagtgtagatgagcacggcacccgccccccttttttaagcttggcgtggatccgatatcaactagatcttgaga

SEQ ID NO: 3406 - DNA, 170 bp, Artificial sequence
  Fat1.122_Kdm6a.56
  crRNA array
cgatttcttggctttatatatcttgtggaaaggacgaaacaccgtaatttctactaagtgtagatccatcgacatggaaacgggataatttctactaagtgtagattcgctgccgcctctcgcggcttttttaagcttggcgtggatccgatatcaactagatcttgaga

SEQ ID NO: 3407 - DNA, 170 bp, Artificial sequence
  Fat1.122_Kdm6a.57
  crRNA array
cgatttcttggctttatatatcttgtggaaaggacgaaacaccgtaatttctactaagtgtagatccatcgacatggaaacgggataatttctactaagtgtagatcgctgccgcctctcgcggcattttttaagcttggcgtggatccgatatcaactagatcttgaga

SEQ ID NO: 3408 - DNA, 170 bp, Artificial sequence
  Fat1.122_Kmt2b.265
  crRNA array
cgatttcttggctttatatatcttgtggaaaggacgaaacaccgtaatttctactaagtgtagatccatcgacatggaaacgggataatttctactaagtgtagatccccaagtgaagcccacctgttttttaagcttggcgtggatccgatatcaactagatcttgaga

SEQ ID NO: 3409 - DNA, 170 bp, Artificial sequence
  Fat1.122_Kmt2b.298
  crRNA array
cgatttcttggctttatatatcttgtggaaaggacgaaacaccgtaatttctactaagtgtagatccatcgacatggaaacgggataatttctactaagtgtagattccggcagggaccggctggcttttttaagcttggcgtggatccgatatcaactagatcttgaga

SEQ ID NO: 3410 - DNA, 170 bp, Artificial sequence
  Fat1.122_Kmt2c.1962
  crRNA array
cgatttcttggctttatatatcttgtggaaaggacgaaacaccgtaatttctactaagtgtagatccatcgacatggaaacgggataatttctactaagtgtagatgtgacgatctgtgccacaagttttttaagcttggcgtggatccgatatcaactagatcttgaga

SEQ ID NO: 3411 - DNA, 170 bp, Artificial sequence
  Fat1.122_Kmt2c.2236
  crRNA array
cgatttcttggctttatatatcttgtggaaaggacgaaacaccgtaatttctactaagtgtagatccatcgacatggaaacgggataatttctactaagtgtagatactcgacctccacctccctattttttaagcttggcgtggatccgatatcaactagatcttgaga

SEQ ID NO: 3412 - DNA, 170 bp, Artificial sequence
  Fat1.122_Kmt2d.316
  crRNA array
cgatttcttggctttatatatcttgtggaaaggacgaaacaccgtaatttctactaagtgtagatccatcgacatggaaacgggataatttctactaagtgtagatactccaggccacccaggtggttttttaagcttggcgtggatccgatatcaactagatcttgaga

SEQ ID NO: 3413 - DNA, 170 bp, Artificial sequence
  Fat1.122_Kmt2d.416
  crRNA array
cgatttcttggctttatatatcttgtggaaaggacgaaacaccgtaatttctactaagtgtagatccatcgacatggaaacgggataatttctactaagtgtagattaaacccccgggggaagggtttttttaagcttggcgtggatccgatatcaactagatcttgaga

SEQ ID NO: 3414 - DNA, 170 bp, Artificial sequence
  Fat1.122_Map2k4.119
  crRNA array
cgatttcttggctttatatatcttgtggaaaggacgaaacaccgtaatttctactaagtgtagatccatcgacatggaaacgggataatttctactaagtgtagattgctgtgtgggcggccacatttttttaagcttggcgtggatccgatatcaactagatcttgaga

SEQ ID NO: 3415 - DNA, 170 bp, Artificial sequence
  Fat1.122_Map2k4.1261
  crRNA array
cgatttcttggctttatatatcttgtggaaaggacgaaacaccgtaatttctactaagtgtagatccatcgacatggaaacgggataatttctactaagtgtagatgatgtagtaatgcggagtagttttttaagcttggcgtggatccgatatcaactagatcttgaga

SEQ ID NO: 3416 - DNA, 170 bp, Artificial sequence
  Fat1.122_Map3k1.235
  crRNA array
cgatttcttggctttatatatcttgtggaaaggacgaaacaccgtaatttctactaagtgtagatccatcgacatggaaacgggataatttctactaagtgtagataaaacgctactgatcgatcgttttttaagcttggcgtggatccgatatcaactagatcttgaga

SEQ ID NO: 3417 - DNA, 170 bp, Artificial sequence
  Fat1.122_Map3k1.3838
  crRNA array
cgatttcttggctttatatatcttgtggaaaggacgaaacaccgtaatttctactaagtgtagatccatcgacatggaaacgggataatttctactaagtgtagatccaacaacagggccccactattttttaagcttggcgtggatccgatatcaactagatcttgaga

SEQ ID NO: 3418 - DNA, 170 bp, Artificial sequence
  Fat1.122_Mga.1655
  crRNA array
cgatttcttggctttatatatcttgtggaaaggacgaaacaccgtaatttctactaagtgtagatccatcgacatggaaacgggataatttctactaagtgtagatcgagaagtggagagcatattttttttaagcttggcgtggatccgatatcaactagatcttgaga

SEQ ID NO: 3419 - DNA, 170 bp, Artificial sequence
  Fat1.122_Mga.93
  crRNA array
cgatttcttggctttatatatcttgtggaaaggacgaaacaccgtaatttctactaagtgtagatccatcgacatggaaacgggataatttctactaagtgtagatgagaaggctccccataatgtttttttaagcttggcgtggatccgatatcaactagatcttgaga

SEQ ID NO: 3420 - DNA, 170 bp, Artificial sequence
  Fat1.122_Nf1.746
  crRNA array
cgatttcttggctttatatatcttgtggaaaggacgaaacaccgtaatttctactaagtgtagatccatcgacatggaaacgggataatttctactaagtgtagattaagcataatgatgatgccattttttaagcttggcgtggatccgatatcaactagatcttgaga

SEQ ID NO: 3421 - DNA, 170 bp, Artificial sequence
  Fat1.122_Nf1.97
  crRNA array
cgatttcttggctttatatatcttgtggaaaggacgaaacaccgtaatttctactaagtgtagatccatcgacatggaaacgggataatttctactaagtgtagatagcccgctacatgctgatgcttttttaagcttggcgtggatccgatatcaactagatcttgaga

SEQ ID NO: 3422 - DNA, 170 bp, Artificial sequence
  Fat1.122_Nf2.356
  crRNA array
cgatttcttggctttatatatcttgtggaaaggacgaaacaccgtaatttctactaagtgtagatccatcgacatggaaacgggataatttctactaagtgtagatcggagtcatctgatagagatttttttaagcttggcgtggatccgatatcaactagatcttgaga

SEQ ID NO: 3423 - DNA, 170 bp, Artificial sequence
  Fat1.122_Nf2.768
  crRNA array
cgatttcttggctttatatatcttgtggaaaggacgaaacaccgtaatttctactaagtgtagatccatcgacatggaaacgggataatttctactaagtgtagatccgaagccccagtgtccggcttttttaagcttggcgtggatccgatatcaactagatcttgaga

SEQ ID NO: 3424 - DNA, 170 bp, Artificial sequence
  Fat1.122_Notch1.1849
  crRNA array
cgatttcttggctttatatatcttgtggaaaggacgaaacaccgtaatttctactaagtgtagatccatcgacatggaaacgggataatttctactaagtgtagatctggcgggtgggcggcgctgttttttaagcttggcgtggatccgatatcaactagatcttgaga

SEQ ID NO: 3425 - DNA, 170 bp, Artificial sequence
  Fat1.122_Notch1.649
  crRNA array
cgatttcttggctttatatatcttgtggaaaggacgaaacaccgtaatttctactaagtgtagatccatcgacatggaaacgggataatttctactaagtgtagattgggccaacgatgccaggacttttttaagcttggcgtggatccgatatcaactagatcttgaga

SEQ ID NO: 3426 - DNA, 170 bp, Artificial sequence
  Fat1.122_Nsd1.70
  crRNA array
cgatttcttggctttatatatcttgtggaaaggacgaaacaccgtaatttctactaagtgtagatccatcgacatggaaacgggataatttctactaagtgtagatactggtgtggacgatgcagattttttaagcttggcgtggatccgatatcaactagatcttgaga

SEQ ID NO: 3427 - DNA, 170 bp, Artificial sequence
  Fat1.122_Nsd1.90
  crRNA array
cgatttcttggctttatatatcttgtggaaaggacgaaacaccgtaatttctactaagtgtagatccatcgacatggaaacgggataatttctactaagtgtagataggagctaacggcaagaatgttttttaagcttggcgtggatccgatatcaactagatcttgaga

SEQ ID NO: 3428 - DNA, 170 bp, Artificial sequence
  Fat1.122_Pbrm1.1236
  crRNA array
cgatttcttggctttatatatcttgtggaaaggacgaaacaccgtaatttctactaagtgtagatccatcgacatggaaacgggataatttctactaagtgtagatgccgataaaaccaacagccgttttttaagcttggcgtggatccgatatcaactagatcttgaga

SEQ ID NO: 3429 - DNA, 170 bp, Artificial sequence
  Fat1.122_Pbrm1.969
  crRNA array
cgatttcttggctttatatatcttgtggaaaggacgaaacaccgtaatttctactaagtgtagatccatcgacatggaaacgggataatttctactaagtgtagatgagccctaatgaacagctcattttttaagcttggcgtggatccgatatcaactagatcttgaga

SEQ ID NO: 3430 - DNA, 170 bp, Artificial sequence
  Fat1.122_Pik3r1.76
  crRNA array
cgatttcttggctttatatatcttgtggaaaggacgaaacaccgtaatttctactaagtgtagatccatcgacatggaaacgggataatttctactaagtgtagataaaacctatacggcccgcacttttttaagcttggcgtggatccgatatcaactagatcttgaga

SEQ ID NO: 3431 - DNA, 170 bp, Artificial sequence
  Fat1.122_Pik3r1.77
  crRNA array
cgatttcttggctttatatatcttgtggaaaggacgaaacaccgtaatttctactaagtgtagatccatcgacatggaaacgggataatttctactaagtgtagataaacctatacggcccgcactttttttaagcttggcgtggatccgatatcaactagatcttgaga

SEQ ID NO: 3432 - DNA, 170 bp, Artificial sequence
  Fat1.122_Pten.240
  crRNA array
cgatttcttggctttatatatcttgtggaaaggacgaaacaccgtaatttctactaagtgtagatccatcgacatggaaacgggataatttctactaagtgtagattgcatacgctatagctgcttttttttaagcttggcgtggatccgatatcaactagatcttgaga

SEQ ID NO: 3433 - DNA, 170 bp, Artificial sequence
  Fat1.122_Pten.265
  crRNA array
cgatttcttggctttatatatcttgtggaaaggacgaaacaccgtaatttctactaagtgtagatccatcgacatggaaacgggataatttctactaagtgtagataagcgtggtgcgtgacgcacttttttaagcttggcgtggatccgatatcaactagatcttgaga

SEQ ID NO: 3434 - DNA, 170 bp, Artificial sequence
  Fat1.122_Rasa1.1478
  crRNA array
cgatttcttggctttatatatcttgtggaaaggacgaaacaccgtaatttctactaagtgtagatccatcgacatggaaacgggataatttctactaagtgtagatcgataatggtctatgatgtcttttttaagcttggcgtggatccgatatcaactagatcttgaga

SEQ ID NO: 3435 - DNA, 170 bp, Artificial sequence
  Fat1.122_Rasa1.223
  crRNA array
cgatttcttggctttatatatcttgtggaaaggacgaaacaccgtaatttctactaagtgtagatccatcgacatggaaacgggataatttctactaagtgtagattccatggagtatcgtgctcgttttttaagcttggcgtggatccgatatcaactagatcttgaga

SEQ ID NO: 3436 - DNA, 170 bp, Artificial sequence
  Fat1.122_Rb1.211
  crRNA array
cgatttcttggctttatatatcttgtggaaaggacgaaacaccgtaatttctactaagtgtagatccatcgacatggaaacgggataatttctactaagtgtagattctgacatgatcgggtacctttttttaagcttggcgtggatccgatatcaactagatcttgaga

SEQ ID NO: 3437 - DNA, 170 bp, Artificial sequence
  Fat1.122_Rb1.394
  crRNA array
cgatttcttggctttatatatcttgtggaaaggacgaaacaccgtaatttctactaagtgtagatccatcgacatggaaacgggataatttctactaagtgtagatagaaatctcgaagcaggatcttttttaagcttggcgtggatccgatatcaactagatcttgaga

SEQ ID NO: 3438 - DNA, 170 bp, Artificial sequence
  Fat1.122_Rbm10.5
  crRNA array
cgatttcttggctttatatatcttgtggaaaggacgaaacaccgtaatttctactaagtgtagatccatcgacatggaaacgggataatttctactaagtgtagatacgaaacctgaacccacacattttttaagcttggcgtggatccgatatcaactagatcttgaga

SEQ ID NO: 3439 - DNA, 170 bp, Artificial sequence
  Fat1.122_Rbm10.6
  crRNA array
cgatttcttggctttatatatcttgtggaaaggacgaaacaccgtaatttctactaagtgtagatccatcgacatggaaacgggataatttctactaagtgtagatcgaaacctgaacccacacagttttttaagcttggcgtggatccgatatcaactagatcttgaga

SEQ ID NO: 3440 - DNA, 170 bp, Artificial sequence
  Fat1.122_Rnf43.1920
  crRNA array
cgatttcttggctttatatatcttgtggaaaggacgaaacaccgtaatttctactaagtgtagatccatcgacatggaaacgggataatttctactaagtgtagatatccccgtgccgtggactccttttttaagcttggcgtggatccgatatcaactagatcttgaga

SEQ ID NO: 3441 - DNA, 170 bp, Artificial sequence
  Fat1.122_Rnf43.39
  crRNA array
cgatttcttggctttatatatcttgtggaaaggacgaaacaccgtaatttctactaagtgtagatccatcgacatggaaacgggataatttctactaagtgtagatcaaggggatcactctgataattttttaagcttggcgtggatccgatatcaactagatcttgaga

SEQ ID NO: 3442 - DNA, 170 bp, Artificial sequence
  Fat1.122_Runx1.204
  crRNA array
cgatttcttggctttatatatcttgtggaaaggacgaaacaccgtaatttctactaagtgtagatccatcgacatggaaacgggataatttctactaagtgtagattaaataagtccagccgttttttttttaagcttggcgtggatccgatatcaactagatcttgaga

SEQ ID NO: 3443 - DNA, 170 bp, Artificial sequence
  Fat1.122_Runx1.81
  crRNA array
cgatttcttggctttatatatcttgtggaaaggacgaaacaccgtaatttctactaagtgtagatccatcgacatggaaacgggataatttctactaagtgtagataggacgcgtatgggaattttttttttaagcttggcgtggatccgatatcaactagatcttgaga

SEQ ID NO: 3444 - DNA, 170 bp, Artificial sequence
  Fat1.122_Setd2.143
  crRNA array
cgatttcttggctttatatatcttgtggaaaggacgaaacaccgtaatttctactaagtgtagatccatcgacatggaaacgggataatttctactaagtgtagatgcacaaccacaacagactggttttttaagcttggcgtggatccgatatcaactagatcttgaga

SEQ ID NO: 3445 - DNA, 170 bp, Artificial sequence
  Fat1.122_Setd2.508
  crRNA array
cgatttcttggctttatatatcttgtggaaaggacgaaacaccgtaatttctactaagtgtagatccatcgacatggaaacgggataatttctactaagtgtagattacgatcccgagcacccgacttttttaagcttggcgtggatccgatatcaactagatcttgaga

SEQ ID NO: 3446 - DNA, 170 bp, Artificial sequence
  Fat1.122_Smad4.3038
  crRNA array
cgatttcttggctttatatatcttgtggaaaggacgaaacaccgtaatttctactaagtgtagatccatcgacatggaaacgggataatttctactaagtgtagatatctgcggcagtgtcaccggttttttaagcttggcgtggatccgatatcaactagatcttgaga

SEQ ID NO: 3447 - DNA, 170 bp, Artificial sequence
  Fat1.122_Smad4.39
  crRNA array
cgatttcttggctttatatatcttgtggaaaggacgaaacaccgtaatttctactaagtgtagatccatcgacatggaaacgggataatttctactaagtgtagatagtcaaacgcatactgacaattttttaagcttggcgtggatccgatatcaactagatcttgaga

SEQ ID NO: 3448 - DNA, 170 bp, Artificial sequence
  Fat1.122_Stag2.1409
  crRNA array
cgatttcttggctttatatatcttgtggaaaggacgaaacaccgtaatttctactaagtgtagatccatcgacatggaaacgggataatttctactaagtgtagatgctaataactgcggaagggcttttttaagcttggcgtggatccgatatcaactagatcttgaga

SEQ ID NO: 3449 - DNA, 170 bp, Artificial sequence
  Fat1.122_Stag2.4401
  crRNA array
cgatttcttggctttatatatcttgtggaaaggacgaaacaccgtaatttctactaagtgtagatccatcgacatggaaacgggataatttctactaagtgtagattaatcgtccagtggtgtatattttttaagcttggcgtggatccgatatcaactagatcttgaga

SEQ ID NO: 3450 - DNA, 170 bp, Artificial sequence
  Fat1.122_Tbl1xr1.1
  crRNA array
cgatttcttggctttatatatcttgtggaaaggacgaaacaccgtaatttctactaagtgtagatccatcgacatggaaacgggataatttctactaagtgtagatggatgcgcatactggtgaagttttttaagcttggcgtggatccgatatcaactagatcttgaga

SEQ ID NO: 3451 - DNA, 170 bp, Artificial sequence
  Fat1.122_Tbl1xr1.83
  crRNA array
cgatttcttggctttatatatcttgtggaaaggacgaaacaccgtaatttctactaagtgtagatccatcgacatggaaacgggataatttctactaagtgtagatatggtcgacccatcgagtctttttttaagcttggcgtggatccgatatcaactagatcttgaga

SEQ ID NO: 3452 - DNA, 170 bp, Artificial sequence
  Fat1.122_Tgfbr2.290
  crRNA array
cgatttcttggctttatatatcttgtggaaaggacgaaacaccgtaatttctactaagtgtagatccatcgacatggaaacgggataatttctactaagtgtagatcctctcggcgcccgggtaaattttttaagcttggcgtggatccgatatcaactagatcttgaga

SEQ ID NO: 3453 - DNA, 170 bp, Artificial sequence
  Fat1.122_Tgfbr2.292
  crRNA array
cgatttcttggctttatatatcttgtggaaaggacgaaacaccgtaatttctactaagtgtagatccatcgacatggaaacgggataatttctactaagtgtagatcccgggcgccgagagggaaattttttaagcttggcgtggatccgatatcaactagatcttgaga

SEQ ID NO: 3454 - DNA, 170 bp, Artificial sequence
  Fat1.122_Trp53.4
  crRNA array
cgatttcttggctttatatatcttgtggaaaggacgaaacaccgtaatttctactaagtgtagatccatcgacatggaaacgggataatttctactaagtgtagatccctgaactgcccccagggattttttaagcttggcgtggatccgatatcaactagatcttgaga

SEQ ID NO: 3455 - DNA, 170 bp, Artificial sequence
  Fat1.122_Trp53.528
  crRNA array
cgatttcttggctttatatatcttgtggaaaggacgaaacaccgtaatttctactaagtgtagatccatcgacatggaaacgggataatttctactaagtgtagatgctgggccagcagagacctgttttttaagcttggcgtggatccgatatcaactagatcttgaga

SEQ ID NO: 3456 - DNA, 170 bp, Artificial sequence
  Fat1.122_Vhl.1
  crRNA array
cgatttcttggctttatatatcttgtggaaaggacgaaacaccgtaatttctactaagtgtagatccatcgacatggaaacgggataatttctactaagtgtagatagggctcccggcggccatttttttttaagcttggcgtggatccgatatcaactagatcttgaga

SEQ ID NO: 3457 - DNA, 170 bp, Artificial sequence
  Fat1.122_Vhl.151
  crRNA array
cgatttcttggctttatatatcttgtggaaaggacgaaacaccgtaatttctactaagtgtagatccatcgacatggaaacgggataatttctactaagtgtagattagagcactcacccgagggattttttaagcttggcgtggatccgatatcaactagatcttgaga

SEQ ID NO: 3458 - DNA, 170 bp, Artificial sequence
  Fat1.122_Zc3h13.1387
  crRNA array
cgatttcttggctttatatatcttgtggaaaggacgaaacaccgtaatttctactaagtgtagatccatcgacatggaaacgggataatttctactaagtgtagatgtgacgccggtcatgtgactttttttaagcttggcgtggatccgatatcaactagatcttgaga

SEQ ID NO: 3459 - DNA, 170 bp, Artificial sequence
  Fat1.122_Zc3h13.1777
  crRNA array
cgatttcttggctttatatatcttgtggaaaggacgaaacaccgtaatttctactaagtgtagatccatcgacatggaaacgggataatttctactaagtgtagatgatgctgccagtgtagcggcttttttaagcttggcgtggatccgatatcaactagatcttgaga

SEQ ID NO: 3460 - DNA, 170 bp, Artificial sequence
  Fbxw7.21_Acvr2a.155
  crRNA array
cgatttcttggctttatatatcttgtggaaaggacgaaacaccgtaatttctactaagtgtagattaatgtgccgtagaaacccataatttctactaagtgtagatggacctggctaatcaagtatttttttaagcttggcgtggatccgatatcaactagatcttgaga

SEQ ID NO: 3461 - DNA, 170 bp, Artificial sequence
  Fbxw7.21_Acvr2a.70
  crRNA array
cgatttcttggctttatatatcttgtggaaaggacgaaacaccgtaatttctactaagtgtagattaatgtgccgtagaaacccataatttctactaagtgtagatcccgaggcgccggagaagccttttttaagcttggcgtggatccgatatcaactagatcttgaga

SEQ ID NO: 3462 - DNA, 170 bp, Artificial sequence
  Fbxw7.21_Apc.21
  crRNA array
cgatttcttggctttatatatcttgtggaaaggacgaaacaccgtaatttctactaagtgtagattaatgtgccgtagaaacccataatttctactaagtgtagatgtgatccacacgtgtagctgttttttaagcttggcgtggatccgatatcaactagatcttgaga

SEQ ID NO: 3463 - DNA, 170 bp, Artificial sequence
  Fbxw7.21_Apc.867
  crRNA array
cgatttcttggctttatatatcttgtggaaaggacgaaacaccgtaatttctactaagtgtagattaatgtgccgtagaaacccataatttctactaagtgtagatcagtcccaggcggcggaagcttttttaagcttggcgtggatccgatatcaactagatcttgaga

SEQ ID NO: 3464 - DNA, 170 bp, Artificial sequence
  Fbxw7.21_Arid1a.2
  crRNA array
cgatttcttggctttatatatcttgtggaaaggacgaaacaccgtaatttctactaagtgtagattaatgtgccgtagaaacccataatttctactaagtgtagatcccgcgcccccgtcctggggttttttaagcttggcgtggatccgatatcaactagatcttgaga

SEQ ID NO: 3465 - DNA, 170 bp, Artificial sequence
  Fbxw7.21_Arid1a.5
  crRNA array
cgatttcttggctttatatatcttgtggaaaggacgaaacaccgtaatttctactaagtgtagattaatgtgccgtagaaacccataatttctactaagtgtagatcccgcgctcggccgctgccgttttttaagcttggcgtggatccgatatcaactagatcttgaga

SEQ ID NO: 3466 - DNA, 170 bp, Artificial sequence
  Fbxw7.21_Arid2.166
  crRNA array
cgatttcttggctttatatatcttgtggaaaggacgaaacaccgtaatttctactaagtgtagattaatgtgccgtagaaacccataatttctactaagtgtagataaccgcgatctgggttttttttttttaagcttggcgtggatccgatatcaactagatcttgaga

SEQ ID NO: 3467 - DNA, 170 bp, Artificial sequence
  Fbxw7.21_Arid2.172
  crRNA array
cgatttcttggctttatatatcttgtggaaaggacgaaacaccgtaatttctactaagtgtagattaatgtgccgtagaaacccataatttctactaagtgtagatctggacgagctgcggcagttttttttaagcttggcgtggatccgatatcaactagatcttgaga

SEQ ID NO: 3468 - DNA, 170 bp, Artificial sequence
  Fbxw7.21_Atm.120
  crRNA array
cgatttcttggctttatatatcttgtggaaaggacgaaacaccgtaatttctactaagtgtagattaatgtgccgtagaaacccataatttctactaagtgtagatgacaggtagtcggcagctaattttttaagcttggcgtggatccgatatcaactagatcttgaga

SEQ ID NO: 3469 - DNA, 170 bp, Artificial sequence
  Fbxw7.21_Atm.997
  crRNA array
cgatttcttggctttatatatcttgtggaaaggacgaaacaccgtaatttctactaagtgtagattaatgtgccgtagaaacccataatttctactaagtgtagatgagaaagtctccgaatcgttttttttaagcttggcgtggatccgatatcaactagatcttgaga

SEQ ID NO: 3470 - DNA, 170 bp, Artificial sequence
  Fbxw7.21_Atrx.249
  crRNA array
cgatttcttggctttatatatcttgtggaaaggacgaaacaccgtaatttctactaagtgtagattaatgtgccgtagaaacccataatttctactaagtgtagattagccagtcgctcatatctcttttttaagcttggcgtggatccgatatcaactagatcttgaga

SEQ ID NO: 3471 - DNA, 170 bp, Artificial sequence
  Fbxw7.21_Atrx.251
  crRNA array
cgatttcttggctttatatatcttgtggaaaggacgaaacaccgtaatttctactaagtgtagattaatgtgccgtagaaacccataatttctactaagtgtagatgccagtcgctcatatctctgttttttaagcttggcgtggatccgatatcaactagatcttgaga

SEQ ID NO: 3472 - DNA, 170 bp, Artificial sequence
  Fbxw7.21_Bcor.203
  crRNA array
cgatttcttggctttatatatcttgtggaaaggacgaaacaccgtaatttctactaagtgtagattaatgtgccgtagaaacccataatttctactaagtgtagatccccggagcggagtccaggcttttttaagcttggcgtggatccgatatcaactagatcttgaga

SEQ ID NO: 3473 - DNA, 170 bp, Artificial sequence
  Fbxw7.21_Bcor.475
  crRNA array
cgatttcttggctttatatatcttgtggaaaggacgaaacaccgtaatttctactaagtgtagattaatgtgccgtagaaacccataatttctactaagtgtagattgcaacccctctgtatgggattttttaagcttggcgtggatccgatatcaactagatcttgaga

SEQ ID NO: 3474 - DNA, 170 bp, Artificial sequence
  Fbxw7.21_Brca1.112
  crRNA array
cgatttcttggctttatatatcttgtggaaaggacgaaacaccgtaatttctactaagtgtagattaatgtgccgtagaaacccataatttctactaagtgtagatctagacgctctgtggagactttttttaagcttggcgtggatccgatatcaactagatcttgaga

SEQ ID NO: 3475 - DNA, 170 bp, Artificial sequence
  Fbxw7.21_Brca1.53
  crRNA array
cgatttcttggctttatatatcttgtggaaaggacgaaacaccgtaatttctactaagtgtagattaatgtgccgtagaaacccataatttctactaagtgtagataatgaggaggcgtcgatcatttttttaagcttggcgtggatccgatatcaactagatcttgaga

SEQ ID NO: 3476 - DNA, 170 bp, Artificial sequence
  Fbxw7.21_Casp8.45
  crRNA array
cgatttcttggctttatatatcttgtggaaaggacgaaacaccgtaatttctactaagtgtagattaatgtgccgtagaaacccataatttctactaagtgtagatctaccgagatcctgtgaatgttttttaagcttggcgtggatccgatatcaactagatcttgaga

SEQ ID NO: 3477 - DNA, 170 bp, Artificial sequence
  Fbxw7.21_Casp8.54
  crRNA array
cgatttcttggctttatatatcttgtggaaaggacgaaacaccgtaatttctactaagtgtagattaatgtgccgtagaaacccataatttctactaagtgtagatcagtgcagtcgtcgtaagatttttttaagcttggcgtggatccgatatcaactagatcttgaga

SEQ ID NO: 3478 - DNA, 170 bp, Artificial sequence
  Fbxw7.21_Cbwd1.84
  crRNA array
cgatttcttggctttatatatcttgtggaaaggacgaaacaccgtaatttctactaagtgtagattaatgtgccgtagaaacccataatttctactaagtgtagatcacagcaggtaacatgccgcttttttaagcttggcgtggatccgatatcaactagatcttgaga

SEQ ID NO: 3479 - DNA, 170 bp, Artificial sequence
  Fbxw7.21_Cbwd1.85
  crRNA array
cgatttcttggctttatatatcttgtggaaaggacgaaacaccgtaatttctactaagtgtagattaatgtgccgtagaaacccataatttctactaagtgtagatacagcaggtaacatgccgccttttttaagcttggcgtggatccgatatcaactagatcttgaga

SEQ ID NO: 3480 - DNA, 170 bp, Artificial sequence
  Fbxw7.21_Cdh1.387
  crRNA array
cgatttcttggctttatatatcttgtggaaaggacgaaacaccgtaatttctactaagtgtagattaatgtgccgtagaaacccataatttctactaagtgtagatctcggcgtctgccgggtccgttttttaagcttggcgtggatccgatatcaactagatcttgaga

SEQ ID NO: 3481 - DNA, 170 bp, Artificial sequence
  Fbxw7.21_Cdh1.58
  crRNA array
cgatttcttggctttatatatcttgtggaaaggacgaaacaccgtaatttctactaagtgtagattaatgtgccgtagaaacccataatttctactaagtgtagatctcgtccgcgcccgggactcttttttaagcttggcgtggatccgatatcaactagatcttgaga

SEQ ID NO: 3482 - DNA, 170 bp, Artificial sequence
  Fbxw7.21_Cdkn2a.647
  crRNA array
cgatttcttggctttatatatcttgtggaaaggacgaaacaccgtaatttctactaagtgtagattaatgtgccgtagaaacccataatttctactaagtgtagatgcaatcacgggagggagcagttttttaagcttggcgtggatccgatatcaactagatcttgaga

SEQ ID NO: 3483 - DNA, 170 bp, Artificial sequence
  Fbxw7.21_Cdkn2a.648
  crRNA array
cgatttcttggctttatatatcttgtggaaaggacgaaacaccgtaatttctactaagtgtagattaatgtgccgtagaaacccataatttctactaagtgtagatcaatcacgggagggagcagattttttaagcttggcgtggatccgatatcaactagatcttgaga

SEQ ID NO: 3484 - DNA, 170 bp, Artificial sequence
  Fbxw7.21_Cic.162
  crRNA array
cgatttcttggctttatatatcttgtggaaaggacgaaacaccgtaatttctactaagtgtagattaatgtgccgtagaaacccataatttctactaagtgtagatcgcaggcgcgcccggcggagttttttaagcttggcgtggatccgatatcaactagatcttgaga

SEQ ID NO: 3485 - DNA, 170 bp, Artificial sequence
  Fbxw7.21_Cic.164
  crRNA array
cgatttcttggctttatatatcttgtggaaaggacgaaacaccgtaatttctactaagtgtagattaatgtgccgtagaaacccataatttctactaagtgtagatcgggccctgggccggcggctttttttaagcttggcgtggatccgatatcaactagatcttgaga

SEQ ID NO: 3486 - DNA, 170 bp, Artificial sequence
  Fbxw7.21_Ctcf.229
  crRNA array
cgatttcttggctttatatatcttgtggaaaggacgaaacaccgtaatttctactaagtgtagattaatgtgccgtagaaacccataatttctactaagtgtagatggctggtggctgatagtctgttttttaagcttggcgtggatccgatatcaactagatcttgaga

SEQ ID NO: 3487 - DNA, 170 bp, Artificial sequence
  Fbxw7.21_Ctcf.809
  crRNA array
cgatttcttggctttatatatcttgtggaaaggacgaaacaccgtaatttctactaagtgtagattaatgtgccgtagaaacccataatttctactaagtgtagataagcgctatcatgatcccaattttttaagcttggcgtggatccgatatcaactagatcttgaga

SEQ ID NO: 3488 - DNA, 170 bp, Artificial sequence
  Fbxw7.21_Elf3.826
  crRNA array
cgatttcttggctttatatatcttgtggaaaggacgaaacaccgtaatttctactaagtgtagattaatgtgccgtagaaacccataatttctactaagtgtagattccgagacatcctaatccacttttttaagcttggcgtggatccgatatcaactagatcttgaga

SEQ ID NO: 3489 - DNA, 170 bp, Artificial sequence
  Fbxw7.21_Elf3.983
  crRNA array
cgatttcttggctttatatatcttgtggaaaggacgaaacaccgtaatttctactaagtgtagattaatgtgccgtagaaacccataatttctactaagtgtagattaggccccctaactggaccattttttaagcttggcgtggatccgatatcaactagatcttgaga

SEQ ID NO: 3490 - DNA, 170 bp, Artificial sequence
  Fbxw7.21_Ep300.310
  crRNA array
cgatttcttggctttatatatcttgtggaaaggacgaaacaccgtaatttctactaagtgtagattaatgtgccgtagaaacccataatttctactaagtgtagatatggtacgacagtgaggaagttttttaagcttggcgtggatccgatatcaactagatcttgaga

SEQ ID NO: 3491 - DNA, 170 bp, Artificial sequence
  Fbxw7.21_Ep300.587
  crRNA array
cgatttcttggctttatatatcttgtggaaaggacgaaacaccgtaatttctactaagtgtagattaatgtgccgtagaaacccataatttctactaagtgtagatcgccccggggcccccaaccattttttaagcttggcgtggatccgatatcaactagatcttgaga

SEQ ID NO: 3492 - DNA, 170 bp, Artificial sequence
  Fbxw7.21_Epha2.126
  crRNA array
cgatttcttggctttatatatcttgtggaaaggacgaaacaccgtaatttctactaagtgtagattaatgtgccgtagaaacccataatttctactaagtgtagatcctgtgccgccgcggccgccttttttaagcttggcgtggatccgatatcaactagatcttgaga

SEQ ID NO: 3493 - DNA, 170 bp, Artificial sequence
  Fbxw7.21_Epha2.5
  crRNA array
cgatttcttggctttatatatcttgtggaaaggacgaaacaccgtaatttctactaagtgtagattaatgtgccgtagaaacccataatttctactaagtgtagatcatgagctggcgccacccggttttttaagcttggcgtggatccgatatcaactagatcttgaga

SEQ ID NO: 3494 - DNA, 170 bp, Artificial sequence
  Fbxw7.21_Fat1.105
  crRNA array
cgatttcttggctttatatatcttgtggaaaggacgaaacaccgtaatttctactaagtgtagattaatgtgccgtagaaacccataatttctactaagtgtagataactcgaggtgacaacaagtttttttaagcttggcgtggatccgatatcaactagatcttgaga

SEQ ID NO: 3495 - DNA, 170 bp, Artificial sequence
  Fbxw7.21_Fat1.122
  crRNA array
cgatttcttggctttatatatcttgtggaaaggacgaaacaccgtaatttctactaagtgtagattaatgtgccgtagaaacccataatttctactaagtgtagatccatcgacatggaaacgggattttttaagcttggcgtggatccgatatcaactagatcttgaga

SEQ ID NO: 3496 - DNA, 170 bp, Artificial sequence
  Fbxw7.21_Gata3.34
  crRNA array
cgatttcttggctttatatatcttgtggaaaggacgaaacaccgtaatttctactaagtgtagattaatgtgccgtagaaacccataatttctactaagtgtagatctaaactatcccgcaaagatttttttaagcttggcgtggatccgatatcaactagatcttgaga

SEQ ID NO: 3497 - DNA, 170 bp, Artificial sequence
  Fbxw7.21_Gata3.47
  crRNA array
cgatttcttggctttatatatcttgtggaaaggacgaaacaccgtaatttctactaagtgtagattaatgtgccgtagaaacccataatttctactaagtgtagatcgtagtaggacgggacgtggttttttaagcttggcgtggatccgatatcaactagatcttgaga

SEQ ID NO: 3498 - DNA, 170 bp, Artificial sequence
  Fbxw7.21_H2-Q2.1
  crRNA array
cgatttcttggctttatatatcttgtggaaaggacgaaacaccgtaatttctactaagtgtagattaatgtgccgtagaaacccataatttctactaagtgtagatagggcggccaccaacagcagttttttaagcttggcgtggatccgatatcaactagatcttgaga

SEQ ID NO: 3499 - DNA, 170 bp, Artificial sequence
  Fbxw7.21_H2-Q2.2
  crRNA array
cgatttcttggctttatatatcttgtggaaaggacgaaacaccgtaatttctactaagtgtagattaatgtgccgtagaaacccataatttctactaagtgtagattaacctgcgcccgctgctgattttttaagcttggcgtggatccgatatcaactagatcttgaga

SEQ ID NO: 3500 - DNA, 170 bp, Artificial sequence
  Fbxw7.21_Kdm5c.1878
  crRNA array
cgatttcttggctttatatatcttgtggaaaggacgaaacaccgtaatttctactaagtgtagattaatgtgccgtagaaacccataatttctactaagtgtagatagagcacggcacccgcccccttttttaagcttggcgtggatccgatatcaactagatcttgaga

SEQ ID NO: 3501 - DNA, 170 bp, Artificial sequence
  Fbxw7.21_Kdm5c.1879
  crRNA array
cgatttcttggctttatatatcttgtggaaaggacgaaacaccgtaatttctactaagtgtagattaatgtgccgtagaaacccataatttctactaagtgtagatgagcacggcacccgccccccttttttaagcttggcgtggatccgatatcaactagatcttgaga

SEQ ID NO: 3502 - DNA, 170 bp, Artificial sequence
  Fbxw7.21_Kdm6a.56
  crRNA array
cgatttcttggctttatatatcttgtggaaaggacgaaacaccgtaatttctactaagtgtagattaatgtgccgtagaaacccataatttctactaagtgtagattcgctgccgcctctcgcggcttttttaagcttggcgtggatccgatatcaactagatcttgaga

SEQ ID NO: 3503 - DNA, 170 bp, Artificial sequence
  Fbxw7.21_Kdm6a.57
  crRNA array
cgatttcttggctttatatatcttgtggaaaggacgaaacaccgtaatttctactaagtgtagattaatgtgccgtagaaacccataatttctactaagtgtagatcgctgccgcctctcgcggcattttttaagcttggcgtggatccgatatcaactagatcttgaga

SEQ ID NO: 3504 - DNA, 170 bp, Artificial sequence
  Fbxw7.21_Kmt2b.265
  crRNA array
cgatttcttggctttatatatcttgtggaaaggacgaaacaccgtaatttctactaagtgtagattaatgtgccgtagaaacccataatttctactaagtgtagatccccaagtgaagcccacctgttttttaagcttggcgtggatccgatatcaactagatcttgaga

SEQ ID NO: 3505 - DNA, 170 bp, Artificial sequence
  Fbxw7.21_Kmt2b.298
  crRNA array
cgatttcttggctttatatatcttgtggaaaggacgaaacaccgtaatttctactaagtgtagattaatgtgccgtagaaacccataatttctactaagtgtagattccggcagggaccggctggcttttttaagcttggcgtggatccgatatcaactagatcttgaga

SEQ ID NO: 3506 - DNA, 170 bp, Artificial sequence
  Fbxw7.21_Kmt2c.1962
  crRNA array
cgatttcttggctttatatatcttgtggaaaggacgaaacaccgtaatttctactaagtgtagattaatgtgccgtagaaacccataatttctactaagtgtagatgtgacgatctgtgccacaagttttttaagcttggcgtggatccgatatcaactagatcttgaga

SEQ ID NO: 3507 - DNA, 170 bp, Artificial sequence
  Fbxw7.21_Kmt2c.2236
  crRNA array
cgatttcttggctttatatatcttgtggaaaggacgaaacaccgtaatttctactaagtgtagattaatgtgccgtagaaacccataatttctactaagtgtagatactcgacctccacctccctattttttaagcttggcgtggatccgatatcaactagatcttgaga

SEQ ID NO: 3508 - DNA, 170 bp, Artificial sequence
  Fbxw7.21_Kmt2d.316
  crRNA array
cgatttcttggctttatatatcttgtggaaaggacgaaacaccgtaatttctactaagtgtagattaatgtgccgtagaaacccataatttctactaagtgtagatactccaggccacccaggtggttttttaagcttggcgtggatccgatatcaactagatcttgaga

SEQ ID NO: 3509 - DNA, 170 bp, Artificial sequence
  Fbxw7.21_Kmt2d.416
  crRNA array
cgatttcttggctttatatatcttgtggaaaggacgaaacaccgtaatttctactaagtgtagattaatgtgccgtagaaacccataatttctactaagtgtagattaaacccccgggggaagggtttttttaagcttggcgtggatccgatatcaactagatcttgaga

SEQ ID NO: 3510 - DNA, 170 bp, Artificial sequence
  Fbxw7.21_Map2k4.119
  crRNA array
cgatttcttggctttatatatcttgtggaaaggacgaaacaccgtaatttctactaagtgtagattaatgtgccgtagaaacccataatttctactaagtgtagattgctgtgtgggcggccacatttttttaagcttggcgtggatccgatatcaactagatcttgaga

SEQ ID NO: 3511 - DNA, 170 bp, Artificial sequence
  Fbxw7.21_Map2k4.1261
  crRNA array
cgatttcttggctttatatatcttgtggaaaggacgaaacaccgtaatttctactaagtgtagattaatgtgccgtagaaacccataatttctactaagtgtagatgatgtagtaatgcggagtagttttttaagcttggcgtggatccgatatcaactagatcttgaga

SEQ ID NO: 3512 - DNA, 170 bp, Artificial sequence
  Fbxw7.21_Map3k1.235
  crRNA array
cgatttcttggctttatatatcttgtggaaaggacgaaacaccgtaatttctactaagtgtagattaatgtgccgtagaaacccataatttctactaagtgtagataaaacgctactgatcgatcgttttttaagcttggcgtggatccgatatcaactagatcttgaga

SEQ ID NO: 3513 - DNA, 170 bp, Artificial sequence
  Fbxw7.21_Map3k1.3838
  crRNA array
cgatttcttggctttatatatcttgtggaaaggacgaaacaccgtaatttctactaagtgtagattaatgtgccgtagaaacccataatttctactaagtgtagatccaacaacagggccccactattttttaagcttggcgtggatccgatatcaactagatcttgaga

SEQ ID NO: 3514 - DNA, 170 bp, Artificial sequence
  Fbxw7.21_Mga.1655
  crRNA array
cgatttcttggctttatatatcttgtggaaaggacgaaacaccgtaatttctactaagtgtagattaatgtgccgtagaaacccataatttctactaagtgtagatcgagaagtggagagcatattttttttaagcttggcgtggatccgatatcaactagatcttgaga

SEQ ID NO: 3515 - DNA, 170 bp, Artificial sequence
  Fbxw7.21_Mga.93
  crRNA array
cgatttcttggctttatatatcttgtggaaaggacgaaacaccgtaatttctactaagtgtagattaatgtgccgtagaaacccataatttctactaagtgtagatgagaaggctccccataatgtttttttaagcttggcgtggatccgatatcaactagatcttgaga

SEQ ID NO: 3516 - DNA, 170 bp, Artificial sequence
  Fbxw7.21_Nf1.746
  crRNA array
cgatttcttggctttatatatcttgtggaaaggacgaaacaccgtaatttctactaagtgtagattaatgtgccgtagaaacccataatttctactaagtgtagattaagcataatgatgatgccattttttaagcttggcgtggatccgatatcaactagatcttgaga

SEQ ID NO: 3517 - DNA, 170 bp, Artificial sequence
  Fbxw7.21_Nf1.97
  crRNA array
cgatttcttggctttatatatcttgtggaaaggacgaaacaccgtaatttctactaagtgtagattaatgtgccgtagaaacccataatttctactaagtgtagatagcccgctacatgctgatgcttttttaagcttggcgtggatccgatatcaactagatcttgaga

SEQ ID NO: 3518 - DNA, 170 bp, Artificial sequence
  Fbxw7.21_Nf2.356
  crRNA array
cgatttcttggctttatatatcttgtggaaaggacgaaacaccgtaatttctactaagtgtagattaatgtgccgtagaaacccataatttctactaagtgtagatcggagtcatctgatagagatttttttaagcttggcgtggatccgatatcaactagatcttgaga

SEQ ID NO: 3519 - DNA, 170 bp, Artificial sequence
  Fbxw7.21_Nf2.768
  crRNA array
cgatttcttggctttatatatcttgtggaaaggacgaaacaccgtaatttctactaagtgtagattaatgtgccgtagaaacccataatttctactaagtgtagatccgaagccccagtgtccggcttttttaagcttggcgtggatccgatatcaactagatcttgaga

SEQ ID NO: 3520 - DNA, 170 bp, Artificial sequence
  Fbxw7.21_Notch1.1849
  crRNA array
cgatttcttggctttatatatcttgtggaaaggacgaaacaccgtaatttctactaagtgtagattaatgtgccgtagaaacccataatttctactaagtgtagatctggcgggtgggcggcgctgttttttaagcttggcgtggatccgatatcaactagatcttgaga

SEQ ID NO: 3521 - DNA, 170 bp, Artificial sequence
  Fbxw7.21_Notch1.649
  crRNA array
cgatttcttggctttatatatcttgtggaaaggacgaaacaccgtaatttctactaagtgtagattaatgtgccgtagaaacccataatttctactaagtgtagattgggccaacgatgccaggacttttttaagcttggcgtggatccgatatcaactagatcttgaga

SEQ ID NO: 3522 - DNA, 170 bp, Artificial sequence
  Fbxw7.21_Nsd1.70
  crRNA array
cgatttcttggctttatatatcttgtggaaaggacgaaacaccgtaatttctactaagtgtagattaatgtgccgtagaaacccataatttctactaagtgtagatactggtgtggacgatgcagattttttaagcttggcgtggatccgatatcaactagatcttgaga

SEQ ID NO: 3523 - DNA, 170 bp, Artificial sequence
  Fbxw7.21_Nsd1.90
  crRNA array
cgatttcttggctttatatatcttgtggaaaggacgaaacaccgtaatttctactaagtgtagattaatgtgccgtagaaacccataatttctactaagtgtagataggagctaacggcaagaatgttttttaagcttggcgtggatccgatatcaactagatcttgaga

SEQ ID NO: 3524 - DNA, 170 bp, Artificial sequence
  Fbxw7.21_Pbrm1.1236
  crRNA array
cgatttcttggctttatatatcttgtggaaaggacgaaacaccgtaatttctactaagtgtagattaatgtgccgtagaaacccataatttctactaagtgtagatgccgataaaaccaacagccgttttttaagcttggcgtggatccgatatcaactagatcttgaga

SEQ ID NO: 3525 - DNA, 170 bp, Artificial sequence
  Fbxw7.21_Pbrm1.969
  crRNA array
cgatttcttggctttatatatcttgtggaaaggacgaaacaccgtaatttctactaagtgtagattaatgtgccgtagaaacccataatttctactaagtgtagatgagccctaatgaacagctcattttttaagcttggcgtggatccgatatcaactagatcttgaga

SEQ ID NO: 3526 - DNA, 170 bp, Artificial sequence
  Fbxw7.21_Pik3r1.76
  crRNA array
cgatttcttggctttatatatcttgtggaaaggacgaaacaccgtaatttctactaagtgtagattaatgtgccgtagaaacccataatttctactaagtgtagataaaacctatacggcccgcacttttttaagcttggcgtggatccgatatcaactagatcttgaga

SEQ ID NO: 3527 - DNA, 170 bp, Artificial sequence
  Fbxw7.21_Pik3r1.77
  crRNA array
cgatttcttggctttatatatcttgtggaaaggacgaaacaccgtaatttctactaagtgtagattaatgtgccgtagaaacccataatttctactaagtgtagataaacctatacggcccgcactttttttaagcttggcgtggatccgatatcaactagatcttgaga

SEQ ID NO: 3528 - DNA, 170 bp, Artificial sequence
  Fbxw7.21_Pten.240
  crRNA array
cgatttcttggctttatatatcttgtggaaaggacgaaacaccgtaatttctactaagtgtagattaatgtgccgtagaaacccataatttctactaagtgtagattgcatacgctatagctgcttttttttaagcttggcgtggatccgatatcaactagatcttgaga

SEQ ID NO: 3529 - DNA, 170 bp, Artificial sequence
  Fbxw7.21_Pten.265
  crRNA array
cgatttcttggctttatatatcttgtggaaaggacgaaacaccgtaatttctactaagtgtagattaatgtgccgtagaaacccataatttctactaagtgtagataagcgtggtgcgtgacgcacttttttaagcttggcgtggatccgatatcaactagatcttgaga

SEQ ID NO: 3530 - DNA, 170 bp, Artificial sequence
  Fbxw7.21_Rasa1.1478
  crRNA array
cgatttcttggctttatatatcttgtggaaaggacgaaacaccgtaatttctactaagtgtagattaatgtgccgtagaaacccataatttctactaagtgtagatcgataatggtctatgatgtcttttttaagcttggcgtggatccgatatcaactagatcttgaga

SEQ ID NO: 3531 - DNA, 170 bp, Artificial sequence
  Fbxw7.21_Rasa1.223
  crRNA array
cgatttcttggctttatatatcttgtggaaaggacgaaacaccgtaatttctactaagtgtagattaatgtgccgtagaaacccataatttctactaagtgtagattccatggagtatcgtgctcgttttttaagcttggcgtggatccgatatcaactagatcttgaga

SEQ ID NO: 3532 - DNA, 170 bp, Artificial sequence
  Fbxw7.21_Rb1.211
  crRNA array
cgatttcttggctttatatatcttgtggaaaggacgaaacaccgtaatttctactaagtgtagattaatgtgccgtagaaacccataatttctactaagtgtagattctgacatgatcgggtacctttttttaagcttggcgtggatccgatatcaactagatcttgaga

SEQ ID NO: 3533 - DNA, 170 bp, Artificial sequence
  Fbxw7.21_Rb1.394
  crRNA array
cgatttcttggctttatatatcttgtggaaaggacgaaacaccgtaatttctactaagtgtagattaatgtgccgtagaaacccataatttctactaagtgtagatagaaatctcgaagcaggatcttttttaagcttggcgtggatccgatatcaactagatcttgaga

SEQ ID NO: 3534 - DNA, 170 bp, Artificial sequence
  Fbxw7.21_Rbm10.5
  crRNA array
cgatttcttggctttatatatcttgtggaaaggacgaaacaccgtaatttctactaagtgtagattaatgtgccgtagaaacccataatttctactaagtgtagatacgaaacctgaacccacacattttttaagcttggcgtggatccgatatcaactagatcttgaga

SEQ ID NO: 3535 - DNA, 170 bp, Artificial sequence
  Fbxw7.21_Rbm10.6
  crRNA array
cgatttcttggctttatatatcttgtggaaaggacgaaacaccgtaatttctactaagtgtagattaatgtgccgtagaaacccataatttctactaagtgtagatcgaaacctgaacccacacagttttttaagcttggcgtggatccgatatcaactagatcttgaga

SEQ ID NO: 3536 - DNA, 170 bp, Artificial sequence
  Fbxw7.21_Rnf43.1920
  crRNA array
cgatttcttggctttatatatcttgtggaaaggacgaaacaccgtaatttctactaagtgtagattaatgtgccgtagaaacccataatttctactaagtgtagatatccccgtgccgtggactccttttttaagcttggcgtggatccgatatcaactagatcttgaga

SEQ ID NO: 3537 - DNA, 170 bp, Artificial sequence
  Fbxw7.21_Rnf43.39
  crRNA array
cgatttcttggctttatatatcttgtggaaaggacgaaacaccgtaatttctactaagtgtagattaatgtgccgtagaaacccataatttctactaagtgtagatcaaggggatcactctgataattttttaagcttggcgtggatccgatatcaactagatcttgaga

SEQ ID NO: 3538 - DNA, 170 bp, Artificial sequence
  Fbxw7.21_Runx1.204
  crRNA array
cgatttcttggctttatatatcttgtggaaaggacgaaacaccgtaatttctactaagtgtagattaatgtgccgtagaaacccataatttctactaagtgtagattaaataagtccagccgttttttttttaagcttggcgtggatccgatatcaactagatcttgaga

SEQ ID NO: 3539 - DNA, 170 bp, Artificial sequence
  Fbxw7.21_Runx1.81
  crRNA array
cgatttcttggctttatatatcttgtggaaaggacgaaacaccgtaatttctactaagtgtagattaatgtgccgtagaaacccataatttctactaagtgtagataggacgcgtatgggaattttttttttaagcttggcgtggatccgatatcaactagatcttgaga

SEQ ID NO: 3540 - DNA, 170 bp, Artificial sequence
  Fbxw7.21_Setd2.143
  crRNA array
cgatttcttggctttatatatcttgtggaaaggacgaaacaccgtaatttctactaagtgtagattaatgtgccgtagaaacccataatttctactaagtgtagatgcacaaccacaacagactggttttttaagcttggcgtggatccgatatcaactagatcttgaga

SEQ ID NO: 3541 - DNA, 170 bp, Artificial sequence
  Fbxw7.21_Setd2.508
  crRNA array
cgatttcttggctttatatatcttgtggaaaggacgaaacaccgtaatttctactaagtgtagattaatgtgccgtagaaacccataatttctactaagtgtagattacgatcccgagcacccgacttttttaagcttggcgtggatccgatatcaactagatcttgaga

SEQ ID NO: 3542 - DNA, 170 bp, Artificial sequence
  Fbxw7.21_Smad4.3038
  crRNA array
cgatttcttggctttatatatcttgtggaaaggacgaaacaccgtaatttctactaagtgtagattaatgtgccgtagaaacccataatttctactaagtgtagatatctgcggcagtgtcaccggttttttaagcttggcgtggatccgatatcaactagatcttgaga

SEQ ID NO: 3543 - DNA, 170 bp, Artificial sequence
  Fbxw7.21_Smad4.39
  crRNA array
cgatttcttggctttatatatcttgtggaaaggacgaaacaccgtaatttctactaagtgtagattaatgtgccgtagaaacccataatttctactaagtgtagatagtcaaacgcatactgacaattttttaagcttggcgtggatccgatatcaactagatcttgaga

SEQ ID NO: 3544 - DNA, 170 bp, Artificial sequence
  Fbxw7.21_Stag2.1409
  crRNA array
cgatttcttggctttatatatcttgtggaaaggacgaaacaccgtaatttctactaagtgtagattaatgtgccgtagaaacccataatttctactaagtgtagatgctaataactgcggaagggcttttttaagcttggcgtggatccgatatcaactagatcttgaga

SEQ ID NO: 3545 - DNA, 170 bp, Artificial sequence
  Fbxw7.21_Stag2.4401
  crRNA array
cgatttcttggctttatatatcttgtggaaaggacgaaacaccgtaatttctactaagtgtagattaatgtgccgtagaaacccataatttctactaagtgtagattaatcgtccagtggtgtatattttttaagcttggcgtggatccgatatcaactagatcttgaga

SEQ ID NO: 3546 - DNA, 170 bp, Artificial sequence
  Fbxw7.21_Tbl1xr1.1
  crRNA array
cgatttcttggctttatatatcttgtggaaaggacgaaacaccgtaatttctactaagtgtagattaatgtgccgtagaaacccataatttctactaagtgtagatggatgcgcatactggtgaagttttttaagcttggcgtggatccgatatcaactagatcttgaga

SEQ ID NO: 3547 - DNA, 170 bp, Artificial sequence
  Fbxw7.21_Tbl1xr1.83
  crRNA array
cgatttcttggctttatatatcttgtggaaaggacgaaacaccgtaatttctactaagtgtagattaatgtgccgtagaaacccataatttctactaagtgtagatatggtcgacccatcgagtctttttttaagcttggcgtggatccgatatcaactagatcttgaga

SEQ ID NO: 3548 - DNA, 170 bp, Artificial sequence
  Fbxw7.21_Tgfbr2.290
  crRNA array
cgatttcttggctttatatatcttgtggaaaggacgaaacaccgtaatttctactaagtgtagattaatgtgccgtagaaacccataatttctactaagtgtagatcctctcggcgcccgggtaaattttttaagcttggcgtggatccgatatcaactagatcttgaga

SEQ ID NO: 3549 - DNA, 170 bp, Artificial sequence
  Fbxw7.21_Tgfbr2.292
  crRNA array
cgatttcttggctttatatatcttgtggaaaggacgaaacaccgtaatttctactaagtgtagattaatgtgccgtagaaacccataatttctactaagtgtagatcccgggcgccgagagggaaattttttaagcttggcgtggatccgatatcaactagatcttgaga

SEQ ID NO: 3550 - DNA, 170 bp, Artificial sequence
  Fbxw7.21_Trp53.4
  crRNA array
cgatttcttggctttatatatcttgtggaaaggacgaaacaccgtaatttctactaagtgtagattaatgtgccgtagaaacccataatttctactaagtgtagatccctgaactgcccccagggattttttaagcttggcgtggatccgatatcaactagatcttgaga

SEQ ID NO: 3551 - DNA, 170 bp, Artificial sequence
  Fbxw7.21_Trp53.528
  crRNA array
cgatttcttggctttatatatcttgtggaaaggacgaaacaccgtaatttctactaagtgtagattaatgtgccgtagaaacccataatttctactaagtgtagatgctgggccagcagagacctgttttttaagcttggcgtggatccgatatcaactagatcttgaga

SEQ ID NO: 3552 - DNA, 170 bp, Artificial sequence
  Fbxw7.21_Vhl.1
  crRNA array
cgatttcttggctttatatatcttgtggaaaggacgaaacaccgtaatttctactaagtgtagattaatgtgccgtagaaacccataatttctactaagtgtagatagggctcccggcggccatttttttttaagcttggcgtggatccgatatcaactagatcttgaga

SEQ ID NO: 3553 - DNA, 170 bp, Artificial sequence
  Fbxw7.21_Vhl.151
  crRNA array
cgatttcttggctttatatatcttgtggaaaggacgaaacaccgtaatttctactaagtgtagattaatgtgccgtagaaacccataatttctactaagtgtagattagagcactcacccgagggattttttaagcttggcgtggatccgatatcaactagatcttgaga

SEQ ID NO: 3554 - DNA, 170 bp, Artificial sequence
  Fbxw7.21_Zc3h13.1387
  crRNA array
cgatttcttggctttatatatcttgtggaaaggacgaaacaccgtaatttctactaagtgtagattaatgtgccgtagaaacccataatttctactaagtgtagatgtgacgccggtcatgtgactttttttaagcttggcgtggatccgatatcaactagatcttgaga

SEQ ID NO: 3555 - DNA, 170 bp, Artificial sequence
  Fbxw7.21_Zc3h13.1777
  crRNA array
cgatttcttggctttatatatcttgtggaaaggacgaaacaccgtaatttctactaagtgtagattaatgtgccgtagaaacccataatttctactaagtgtagatgatgctgccagtgtagcggcttttttaagcttggcgtggatccgatatcaactagatcttgaga

SEQ ID NO: 3556 - DNA, 170 bp, Artificial sequence
  Fbxw7.23_Acvr2a.155
  crRNA array
cgatttcttggctttatatatcttgtggaaaggacgaaacaccgtaatttctactaagtgtagatatgtgccgtagaaacccatataatttctactaagtgtagatggacctggctaatcaagtatttttttaagcttggcgtggatccgatatcaactagatcttgaga

SEQ ID NO: 3557 - DNA, 170 bp, Artificial sequence
  Fbxw7.23_Acvr2a.70
  crRNA array
cgatttcttggctttatatatcttgtggaaaggacgaaacaccgtaatttctactaagtgtagatatgtgccgtagaaacccatataatttctactaagtgtagatcccgaggcgccggagaagccttttttaagcttggcgtggatccgatatcaactagatcttgaga

SEQ ID NO: 3558 - DNA, 170 bp, Artificial sequence
  Fbxw7.23_Apc.21
  crRNA array
cgatttcttggctttatatatcttgtggaaaggacgaaacaccgtaatttctactaagtgtagatatgtgccgtagaaacccatataatttctactaagtgtagatgtgatccacacgtgtagctgttttttaagcttggcgtggatccgatatcaactagatcttgaga

SEQ ID NO: 3559 - DNA, 170 bp, Artificial sequence
  Fbxw7.23_Apc.867
  crRNA array
cgatttcttggctttatatatcttgtggaaaggacgaaacaccgtaatttctactaagtgtagatatgtgccgtagaaacccatataatttctactaagtgtagatcagtcccaggcggcggaagcttttttaagcttggcgtggatccgatatcaactagatcttgaga

SEQ ID NO: 3560 - DNA, 170 bp, Artificial sequence
  Fbxw7.23_Arid1a.2
  crRNA array
cgatttcttggctttatatatcttgtggaaaggacgaaacaccgtaatttctactaagtgtagatatgtgccgtagaaacccatataatttctactaagtgtagatcccgcgcccccgtcctggggttttttaagcttggcgtggatccgatatcaactagatcttgaga

SEQ ID NO: 3561 - DNA, 170 bp, Artificial sequence
  Fbxw7.23_Arid1a.5
  crRNA array
cgatttcttggctttatatatcttgtggaaaggacgaaacaccgtaatttctactaagtgtagatatgtgccgtagaaacccatataatttctactaagtgtagatcccgcgctcggccgctgccgttttttaagcttggcgtggatccgatatcaactagatcttgaga

SEQ ID NO: 3562 - DNA, 170 bp, Artificial sequence
  Fbxw7.23_Arid2.166
  crRNA array
cgatttcttggctttatatatcttgtggaaaggacgaaacaccgtaatttctactaagtgtagatatgtgccgtagaaacccatataatttctactaagtgtagataaccgcgatctgggttttttttttttaagcttggcgtggatccgatatcaactagatcttgaga

SEQ ID NO: 3563 - DNA, 170 bp, Artificial sequence
  Fbxw7.23_Arid2.172
  crRNA array
cgatttcttggctttatatatcttgtggaaaggacgaaacaccgtaatttctactaagtgtagatatgtgccgtagaaacccatataatttctactaagtgtagatctggacgagctgcggcagttttttttaagcttggcgtggatccgatatcaactagatcttgaga

SEQ ID NO: 3564 - DNA, 170 bp, Artificial sequence
  Fbxw7.23_Atm.120
  crRNA array
cgatttcttggctttatatatcttgtggaaaggacgaaacaccgtaatttctactaagtgtagatatgtgccgtagaaacccatataatttctactaagtgtagatgacaggtagtcggcagctaattttttaagcttggcgtggatccgatatcaactagatcttgaga

SEQ ID NO: 3565 - DNA, 170 bp, Artificial sequence
  Fbxw7.23_Atm.997
  crRNA array
cgatttcttggctttatatatcttgtggaaaggacgaaacaccgtaatttctactaagtgtagatatgtgccgtagaaacccatataatttctactaagtgtagatgagaaagtctccgaatcgttttttttaagcttggcgtggatccgatatcaactagatcttgaga

SEQ ID NO: 3566 - DNA, 170 bp, Artificial sequence
  Fbxw7.23_Atrx.249
  crRNA array
cgatttcttggctttatatatcttgtggaaaggacgaaacaccgtaatttctactaagtgtagatatgtgccgtagaaacccatataatttctactaagtgtagattagccagtcgctcatatctcttttttaagcttggcgtggatccgatatcaactagatcttgaga

SEQ ID NO: 3567 - DNA, 170 bp, Artificial sequence
  Fbxw7.23_Atrx.251
  crRNA array
cgatttcttggctttatatatcttgtggaaaggacgaaacaccgtaatttctactaagtgtagatatgtgccgtagaaacccatataatttctactaagtgtagatgccagtcgctcatatctctgttttttaagcttggcgtggatccgatatcaactagatcttgaga

SEQ ID NO: 3568 - DNA, 170 bp, Artificial sequence
  Fbxw7.23_Bcor.203
  crRNA array
cgatttcttggctttatatatcttgtggaaaggacgaaacaccgtaatttctactaagtgtagatatgtgccgtagaaacccatataatttctactaagtgtagatccccggagcggagtccaggcttttttaagcttggcgtggatccgatatcaactagatcttgaga

SEQ ID NO: 3569 - DNA, 170 bp, Artificial sequence
  Fbxw7.23_Bcor.475
  crRNA array
cgatttcttggctttatatatcttgtggaaaggacgaaacaccgtaatttctactaagtgtagatatgtgccgtagaaacccatataatttctactaagtgtagattgcaacccctctgtatgggattttttaagcttggcgtggatccgatatcaactagatcttgaga

SEQ ID NO: 3570 - DNA, 170 bp, Artificial sequence
  Fbxw7.23_Brca1.112
  crRNA array
cgatttcttggctttatatatcttgtggaaaggacgaaacaccgtaatttctactaagtgtagatatgtgccgtagaaacccatataatttctactaagtgtagatctagacgctctgtggagactttttttaagcttggcgtggatccgatatcaactagatcttgaga

SEQ ID NO: 3571 - DNA, 170 bp, Artificial sequence
  Fbxw7.23_Brca1.53
  crRNA array
cgatttcttggctttatatatcttgtggaaaggacgaaacaccgtaatttctactaagtgtagatatgtgccgtagaaacccatataatttctactaagtgtagataatgaggaggcgtcgatcatttttttaagcttggcgtggatccgatatcaactagatcttgaga

SEQ ID NO: 3572 - DNA, 170 bp, Artificial sequence
  Fbxw7.23_Casp8.45
  crRNA array
cgatttcttggctttatatatcttgtggaaaggacgaaacaccgtaatttctactaagtgtagatatgtgccgtagaaacccatataatttctactaagtgtagatctaccgagatcctgtgaatgttttttaagcttggcgtggatccgatatcaactagatcttgaga

SEQ ID NO: 3573 - DNA, 170 bp, Artificial sequence
  Fbxw7.23_Casp8.54
  crRNA array
cgatttcttggctttatatatcttgtggaaaggacgaaacaccgtaatttctactaagtgtagatatgtgccgtagaaacccatataatttctactaagtgtagatcagtgcagtcgtcgtaagatttttttaagcttggcgtggatccgatatcaactagatcttgaga

SEQ ID NO: 3574 - DNA, 170 bp, Artificial sequence
  Fbxw7.23_Cbwd1.84
  crRNA array
cgatttcttggctttatatatcttgtggaaaggacgaaacaccgtaatttctactaagtgtagatatgtgccgtagaaacccatataatttctactaagtgtagatcacagcaggtaacatgccgcttttttaagcttggcgtggatccgatatcaactagatcttgaga

SEQ ID NO: 3575 - DNA, 170 bp, Artificial sequence
  Fbxw7.23_Cbwd1.85
  crRNA array
cgatttcttggctttatatatcttgtggaaaggacgaaacaccgtaatttctactaagtgtagatatgtgccgtagaaacccatataatttctactaagtgtagatacagcaggtaacatgccgccttttttaagcttggcgtggatccgatatcaactagatcttgaga

SEQ ID NO: 3576 - DNA, 170 bp, Artificial sequence
  Fbxw7.23_Cdh1.387
  crRNA array
cgatttcttggctttatatatcttgtggaaaggacgaaacaccgtaatttctactaagtgtagatatgtgccgtagaaacccatataatttctactaagtgtagatctcggcgtctgccgggtccgttttttaagcttggcgtggatccgatatcaactagatcttgaga

SEQ ID NO: 3577 - DNA, 170 bp, Artificial sequence
  Fbxw7.23_Cdh1.58
  crRNA array
cgatttcttggctttatatatcttgtggaaaggacgaaacaccgtaatttctactaagtgtagatatgtgccgtagaaacccatataatttctactaagtgtagatctcgtccgcgcccgggactcttttttaagcttggcgtggatccgatatcaactagatcttgaga

SEQ ID NO: 3578 - DNA, 170 bp, Artificial sequence
  Fbxw7.23_Cdkn2a.647
  crRNA array
cgatttcttggctttatatatcttgtggaaaggacgaaacaccgtaatttctactaagtgtagatatgtgccgtagaaacccatataatttctactaagtgtagatgcaatcacgggagggagcagttttttaagcttggcgtggatccgatatcaactagatcttgaga

SEQ ID NO: 3579 - DNA, 170 bp, Artificial sequence
  Fbxw7.23_Cdkn2a.648
  crRNA array
cgatttcttggctttatatatcttgtggaaaggacgaaacaccgtaatttctactaagtgtagatatgtgccgtagaaacccatataatttctactaagtgtagatcaatcacgggagggagcagattttttaagcttggcgtggatccgatatcaactagatcttgaga

SEQ ID NO: 3580 - DNA, 170 bp, Artificial sequence
  Fbxw7.23_Cic.162
  crRNA array
cgatttcttggctttatatatcttgtggaaaggacgaaacaccgtaatttctactaagtgtagatatgtgccgtagaaacccatataatttctactaagtgtagatcgcaggcgcgcccggcggagttttttaagcttggcgtggatccgatatcaactagatcttgaga

SEQ ID NO: 3581 - DNA, 170 bp, Artificial sequence
  Fbxw7.23_Cic.164
  crRNA array
cgatttcttggctttatatatcttgtggaaaggacgaaacaccgtaatttctactaagtgtagatatgtgccgtagaaacccatataatttctactaagtgtagatcgggccctgggccggcggctttttttaagcttggcgtggatccgatatcaactagatcttgaga

SEQ ID NO: 3582 - DNA, 170 bp, Artificial sequence
  Fbxw7.23_Ctcf.229
  crRNA array
cgatttcttggctttatatatcttgtggaaaggacgaaacaccgtaatttctactaagtgtagatatgtgccgtagaaacccatataatttctactaagtgtagatggctggtggctgatagtctgttttttaagcttggcgtggatccgatatcaactagatcttgaga

SEQ ID NO: 3583 - DNA, 170 bp, Artificial sequence
  Fbxw7.23_Ctcf.809
  crRNA array
cgatttcttggctttatatatcttgtggaaaggacgaaacaccgtaatttctactaagtgtagatatgtgccgtagaaacccatataatttctactaagtgtagataagcgctatcatgatcccaattttttaagcttggcgtggatccgatatcaactagatcttgaga

SEQ ID NO: 3584 - DNA, 170 bp, Artificial sequence
  Fbxw7.23_Elf3.826
  crRNA array
cgatttcttggctttatatatcttgtggaaaggacgaaacaccgtaatttctactaagtgtagatatgtgccgtagaaacccatataatttctactaagtgtagattccgagacatcctaatccacttttttaagcttggcgtggatccgatatcaactagatcttgaga

SEQ ID NO: 3585 - DNA, 170 bp, Artificial sequence
  Fbxw7.23_Elf3.983
  crRNA array
cgatttcttggctttatatatcttgtggaaaggacgaaacaccgtaatttctactaagtgtagatatgtgccgtagaaacccatataatttctactaagtgtagattaggccccctaactggaccattttttaagcttggcgtggatccgatatcaactagatcttgaga

SEQ ID NO: 3586 - DNA, 170 bp, Artificial sequence
  Fbxw7.23_Ep300.310
  crRNA array
cgatttcttggctttatatatcttgtggaaaggacgaaacaccgtaatttctactaagtgtagatatgtgccgtagaaacccatataatttctactaagtgtagatatggtacgacagtgaggaagttttttaagcttggcgtggatccgatatcaactagatcttgaga

SEQ ID NO: 3587 - DNA, 170 bp, Artificial sequence
  Fbxw7.23_Ep300.587
  crRNA array
cgatttcttggctttatatatcttgtggaaaggacgaaacaccgtaatttctactaagtgtagatatgtgccgtagaaacccatataatttctactaagtgtagatcgccccggggcccccaaccattttttaagcttggcgtggatccgatatcaactagatcttgaga

SEQ ID NO: 3588 - DNA, 170 bp, Artificial sequence
  Fbxw7.23_Epha2.126
  crRNA array
cgatttcttggctttatatatcttgtggaaaggacgaaacaccgtaatttctactaagtgtagatatgtgccgtagaaacccatataatttctactaagtgtagatcctgtgccgccgcggccgccttttttaagcttggcgtggatccgatatcaactagatcttgaga

SEQ ID NO: 3589 - DNA, 170 bp, Artificial sequence
  Fbxw7.23_Epha2.5
  crRNA array
cgatttcttggctttatatatcttgtggaaaggacgaaacaccgtaatttctactaagtgtagatatgtgccgtagaaacccatataatttctactaagtgtagatcatgagctggcgccacccggttttttaagcttggcgtggatccgatatcaactagatcttgaga

SEQ ID NO: 3590 - DNA, 170 bp, Artificial sequence
  Fbxw7.23_Fat1.105
  crRNA array
cgatttcttggctttatatatcttgtggaaaggacgaaacaccgtaatttctactaagtgtagatatgtgccgtagaaacccatataatttctactaagtgtagataactcgaggtgacaacaagtttttttaagcttggcgtggatccgatatcaactagatcttgaga

SEQ ID NO: 3591 - DNA, 170 bp, Artificial sequence
  Fbxw7.23_Fat1.122
  crRNA array
cgatttcttggctttatatatcttgtggaaaggacgaaacaccgtaatttctactaagtgtagatatgtgccgtagaaacccatataatttctactaagtgtagatccatcgacatggaaacgggattttttaagcttggcgtggatccgatatcaactagatcttgaga

SEQ ID NO: 3592 - DNA, 170 bp, Artificial sequence
  Fbxw7.23_Gata3.34
  crRNA array
cgatttcttggctttatatatcttgtggaaaggacgaaacaccgtaatttctactaagtgtagatatgtgccgtagaaacccatataatttctactaagtgtagatctaaactatcccgcaaagatttttttaagcttggcgtggatccgatatcaactagatcttgaga

SEQ ID NO: 3593 - DNA, 170 bp, Artificial sequence
  Fbxw7.23_Gata3.47
  crRNA array
cgatttcttggctttatatatcttgtggaaaggacgaaacaccgtaatttctactaagtgtagatatgtgccgtagaaacccatataatttctactaagtgtagatcgtagtaggacgggacgtggttttttaagcttggcgtggatccgatatcaactagatcttgaga

SEQ ID NO: 3594 - DNA, 170 bp, Artificial sequence
  Fbxw7.23_H2-Q2.1
  crRNA array
cgatttcttggctttatatatcttgtggaaaggacgaaacaccgtaatttctactaagtgtagatatgtgccgtagaaacccatataatttctactaagtgtagatagggcggccaccaacagcagttttttaagcttggcgtggatccgatatcaactagatcttgaga

SEQ ID NO: 3595 - DNA, 170 bp, Artificial sequence
  Fbxw7.23_H2-Q2.2
  crRNA array
cgatttcttggctttatatatcttgtggaaaggacgaaacaccgtaatttctactaagtgtagatatgtgccgtagaaacccatataatttctactaagtgtagattaacctgcgcccgctgctgattttttaagcttggcgtggatccgatatcaactagatcttgaga

SEQ ID NO: 3596 - DNA, 170 bp, Artificial sequence
  Fbxw7.23_Kdm5c.1878
  crRNA array
cgatttcttggctttatatatcttgtggaaaggacgaaacaccgtaatttctactaagtgtagatatgtgccgtagaaacccatataatttctactaagtgtagatagagcacggcacccgcccccttttttaagcttggcgtggatccgatatcaactagatcttgaga

SEQ ID NO: 3597 - DNA, 170 bp, Artificial sequence
  Fbxw7.23_Kdm5c.1879
  crRNA array
cgatttcttggctttatatatcttgtggaaaggacgaaacaccgtaatttctactaagtgtagatatgtgccgtagaaacccatataatttctactaagtgtagatgagcacggcacccgccccccttttttaagcttggcgtggatccgatatcaactagatcttgaga

SEQ ID NO: 3598 - DNA, 170 bp, Artificial sequence
  Fbxw7.23_Kdm6a.56
  crRNA array
cgatttcttggctttatatatcttgtggaaaggacgaaacaccgtaatttctactaagtgtagatatgtgccgtagaaacccatataatttctactaagtgtagattcgctgccgcctctcgcggcttttttaagcttggcgtggatccgatatcaactagatcttgaga

SEQ ID NO: 3599 - DNA, 170 bp, Artificial sequence
  Fbxw7.23_Kdm6a.57
  crRNA array
cgatttcttggctttatatatcttgtggaaaggacgaaacaccgtaatttctactaagtgtagatatgtgccgtagaaacccatataatttctactaagtgtagatcgctgccgcctctcgcggcattttttaagcttggcgtggatccgatatcaactagatcttgaga

SEQ ID NO: 3600 - DNA, 170 bp, Artificial sequence
  Fbxw7.23_Kmt2b.265
  crRNA array
cgatttcttggctttatatatcttgtggaaaggacgaaacaccgtaatttctactaagtgtagatatgtgccgtagaaacccatataatttctactaagtgtagatccccaagtgaagcccacctgttttttaagcttggcgtggatccgatatcaactagatcttgaga

SEQ ID NO: 3601 - DNA, 170 bp, Artificial sequence
  Fbxw7.23_Kmt2b.298
  crRNA array
cgatttcttggctttatatatcttgtggaaaggacgaaacaccgtaatttctactaagtgtagatatgtgccgtagaaacccatataatttctactaagtgtagattccggcagggaccggctggcttttttaagcttggcgtggatccgatatcaactagatcttgaga

SEQ ID NO: 3602 - DNA, 170 bp, Artificial sequence
  Fbxw7.23_Kmt2c.1962
  crRNA array
cgatttcttggctttatatatcttgtggaaaggacgaaacaccgtaatttctactaagtgtagatatgtgccgtagaaacccatataatttctactaagtgtagatgtgacgatctgtgccacaagttttttaagcttggcgtggatccgatatcaactagatcttgaga

SEQ ID NO: 3603 - DNA, 170 bp, Artificial sequence
  Fbxw7.23_Kmt2c.2236
  crRNA array
cgatttcttggctttatatatcttgtggaaaggacgaaacaccgtaatttctactaagtgtagatatgtgccgtagaaacccatataatttctactaagtgtagatactcgacctccacctccctattttttaagcttggcgtggatccgatatcaactagatcttgaga

SEQ ID NO: 3604 - DNA, 170 bp, Artificial sequence
  Fbxw7.23_Kmt2d.316
  crRNA array
cgatttcttggctttatatatcttgtggaaaggacgaaacaccgtaatttctactaagtgtagatatgtgccgtagaaacccatataatttctactaagtgtagatactccaggccacccaggtggttttttaagcttggcgtggatccgatatcaactagatcttgaga

SEQ ID NO: 3605 - DNA, 170 bp, Artificial sequence
  Fbxw7.23_Kmt2d.416
  crRNA array
cgatttcttggctttatatatcttgtggaaaggacgaaacaccgtaatttctactaagtgtagatatgtgccgtagaaacccatataatttctactaagtgtagattaaacccccgggggaagggtttttttaagcttggcgtggatccgatatcaactagatcttgaga

SEQ ID NO: 3606 - DNA, 170 bp, Artificial sequence
  Fbxw7.23_Map2k4.119
  crRNA array
cgatttcttggctttatatatcttgtggaaaggacgaaacaccgtaatttctactaagtgtagatatgtgccgtagaaacccatataatttctactaagtgtagattgctgtgtgggcggccacatttttttaagcttggcgtggatccgatatcaactagatcttgaga

SEQ ID NO: 3607 - DNA, 170 bp, Artificial sequence
  Fbxw7.23_Map2k4.1261
  crRNA array
cgatttcttggctttatatatcttgtggaaaggacgaaacaccgtaatttctactaagtgtagatatgtgccgtagaaacccatataatttctactaagtgtagatgatgtagtaatgcggagtagttttttaagcttggcgtggatccgatatcaactagatcttgaga

SEQ ID NO: 3608 - DNA, 170 bp, Artificial sequence
  Fbxw7.23_Map3k1.235
  crRNA array
cgatttcttggctttatatatcttgtggaaaggacgaaacaccgtaatttctactaagtgtagatatgtgccgtagaaacccatataatttctactaagtgtagataaaacgctactgatcgatcgttttttaagcttggcgtggatccgatatcaactagatcttgaga

SEQ ID NO: 3609 - DNA, 170 bp, Artificial sequence
  Fbxw7.23_Map3k1.3838
  crRNA array
cgatttcttggctttatatatcttgtggaaaggacgaaacaccgtaatttctactaagtgtagatatgtgccgtagaaacccatataatttctactaagtgtagatccaacaacagggccccactattttttaagcttggcgtggatccgatatcaactagatcttgaga

SEQ ID NO: 3610 - DNA, 170 bp, Artificial sequence
  Fbxw7.23_Mga.1655
  crRNA array
cgatttcttggctttatatatcttgtggaaaggacgaaacaccgtaatttctactaagtgtagatatgtgccgtagaaacccatataatttctactaagtgtagatcgagaagtggagagcatattttttttaagcttggcgtggatccgatatcaactagatcttgaga

SEQ ID NO: 3611 - DNA, 170 bp, Artificial sequence
  Fbxw7.23_Mga.93
  crRNA array
cgatttcttggctttatatatcttgtggaaaggacgaaacaccgtaatttctactaagtgtagatatgtgccgtagaaacccatataatttctactaagtgtagatgagaaggctccccataatgtttttttaagcttggcgtggatccgatatcaactagatcttgaga

SEQ ID NO: 3612 - DNA, 170 bp, Artificial sequence
  Fbxw7.23_Nf1.746
  crRNA array
cgatttcttggctttatatatcttgtggaaaggacgaaacaccgtaatttctactaagtgtagatatgtgccgtagaaacccatataatttctactaagtgtagattaagcataatgatgatgccattttttaagcttggcgtggatccgatatcaactagatcttgaga

SEQ ID NO: 3613 - DNA, 170 bp, Artificial sequence
  Fbxw7.23_Nf1.97
  crRNA array
cgatttcttggctttatatatcttgtggaaaggacgaaacaccgtaatttctactaagtgtagatatgtgccgtagaaacccatataatttctactaagtgtagatagcccgctacatgctgatgcttttttaagcttggcgtggatccgatatcaactagatcttgaga

SEQ ID NO: 3614 - DNA, 170 bp, Artificial sequence
  Fbxw7.23_Nf2.356
  crRNA array
cgatttcttggctttatatatcttgtggaaaggacgaaacaccgtaatttctactaagtgtagatatgtgccgtagaaacccatataatttctactaagtgtagatcggagtcatctgatagagatttttttaagcttggcgtggatccgatatcaactagatcttgaga

SEQ ID NO: 3615 - DNA, 170 bp, Artificial sequence
  Fbxw7.23_Nf2.768
  crRNA array
cgatttcttggctttatatatcttgtggaaaggacgaaacaccgtaatttctactaagtgtagatatgtgccgtagaaacccatataatttctactaagtgtagatccgaagccccagtgtccggcttttttaagcttggcgtggatccgatatcaactagatcttgaga

SEQ ID NO: 3616 - DNA, 170 bp, Artificial sequence
  Fbxw7.23_Notch1.1849
  crRNA array
cgatttcttggctttatatatcttgtggaaaggacgaaacaccgtaatttctactaagtgtagatatgtgccgtagaaacccatataatttctactaagtgtagatctggcgggtgggcggcgctgttttttaagcttggcgtggatccgatatcaactagatcttgaga

SEQ ID NO: 3617 - DNA, 170 bp, Artificial sequence
  Fbxw7.23_Notch1.649
  crRNA array
cgatttcttggctttatatatcttgtggaaaggacgaaacaccgtaatttctactaagtgtagatatgtgccgtagaaacccatataatttctactaagtgtagattgggccaacgatgccaggacttttttaagcttggcgtggatccgatatcaactagatcttgaga

SEQ ID NO: 3618 - DNA, 170 bp, Artificial sequence
  Fbxw7.23_Nsd1.70
  crRNA array
cgatttcttggctttatatatcttgtggaaaggacgaaacaccgtaatttctactaagtgtagatatgtgccgtagaaacccatataatttctactaagtgtagatactggtgtggacgatgcagattttttaagcttggcgtggatccgatatcaactagatcttgaga

SEQ ID NO: 3619 - DNA, 170 bp, Artificial sequence
  Fbxw7.23_Nsd1.90
  crRNA array
cgatttcttggctttatatatcttgtggaaaggacgaaacaccgtaatttctactaagtgtagatatgtgccgtagaaacccatataatttctactaagtgtagataggagctaacggcaagaatgttttttaagcttggcgtggatccgatatcaactagatcttgaga

SEQ ID NO: 3620 - DNA, 170 bp, Artificial sequence
  Fbxw7.23_Pbrm1.1236
  crRNA array
cgatttcttggctttatatatcttgtggaaaggacgaaacaccgtaatttctactaagtgtagatatgtgccgtagaaacccatataatttctactaagtgtagatgccgataaaaccaacagccgttttttaagcttggcgtggatccgatatcaactagatcttgaga

SEQ ID NO: 3621 - DNA, 170 bp, Artificial sequence
  Fbxw7.23_Pbrm1.969
  crRNA array
cgatttcttggctttatatatcttgtggaaaggacgaaacaccgtaatttctactaagtgtagatatgtgccgtagaaacccatataatttctactaagtgtagatgagccctaatgaacagctcattttttaagcttggcgtggatccgatatcaactagatcttgaga

SEQ ID NO: 3622 - DNA, 170 bp, Artificial sequence
  Fbxw7.23_Pik3r1.76
  crRNA array
cgatttcttggctttatatatcttgtggaaaggacgaaacaccgtaatttctactaagtgtagatatgtgccgtagaaacccatataatttctactaagtgtagataaaacctatacggcccgcacttttttaagcttggcgtggatccgatatcaactagatcttgaga

SEQ ID NO: 3623 - DNA, 170 bp, Artificial sequence
  Fbxw7.23_Pik3r1.77
  crRNA array
cgatttcttggctttatatatcttgtggaaaggacgaaacaccgtaatttctactaagtgtagatatgtgccgtagaaacccatataatttctactaagtgtagataaacctatacggcccgcactttttttaagcttggcgtggatccgatatcaactagatcttgaga

SEQ ID NO: 3624 - DNA, 170 bp, Artificial sequence
  Fbxw7.23_Pten.240
  crRNA array
cgatttcttggctttatatatcttgtggaaaggacgaaacaccgtaatttctactaagtgtagatatgtgccgtagaaacccatataatttctactaagtgtagattgcatacgctatagctgcttttttttaagcttggcgtggatccgatatcaactagatcttgaga

SEQ ID NO: 3625 - DNA, 170 bp, Artificial sequence
  Fbxw7.23_Pten.265
  crRNA array
cgatttcttggctttatatatcttgtggaaaggacgaaacaccgtaatttctactaagtgtagatatgtgccgtagaaacccatataatttctactaagtgtagataagcgtggtgcgtgacgcacttttttaagcttggcgtggatccgatatcaactagatcttgaga

SEQ ID NO: 3626 - DNA, 170 bp, Artificial sequence
  Fbxw7.23_Rasa1.1478
  crRNA array
cgatttcttggctttatatatcttgtggaaaggacgaaacaccgtaatttctactaagtgtagatatgtgccgtagaaacccatataatttctactaagtgtagatcgataatggtctatgatgtcttttttaagcttggcgtggatccgatatcaactagatcttgaga

SEQ ID NO: 3627 - DNA, 170 bp, Artificial sequence
  Fbxw7.23_Rasa1.223
  crRNA array
cgatttcttggctttatatatcttgtggaaaggacgaaacaccgtaatttctactaagtgtagatatgtgccgtagaaacccatataatttctactaagtgtagattccatggagtatcgtgctcgttttttaagcttggcgtggatccgatatcaactagatcttgaga

SEQ ID NO: 3628 - DNA, 170 bp, Artificial sequence
  Fbxw7.23_Rb1.211
  crRNA array
cgatttcttggctttatatatcttgtggaaaggacgaaacaccgtaatttctactaagtgtagatatgtgccgtagaaacccatataatttctactaagtgtagattctgacatgatcgggtacctttttttaagcttggcgtggatccgatatcaactagatcttgaga

SEQ ID NO: 3629 - DNA, 170 bp, Artificial sequence
  Fbxw7.23_Rb1.394
  crRNA array
cgatttcttggctttatatatcttgtggaaaggacgaaacaccgtaatttctactaagtgtagatatgtgccgtagaaacccatataatttctactaagtgtagatagaaatctcgaagcaggatcttttttaagcttggcgtggatccgatatcaactagatcttgaga

SEQ ID NO: 3630 - DNA, 170 bp, Artificial sequence
  Fbxw7.23_Rbm10.5
  crRNA array
cgatttcttggctttatatatcttgtggaaaggacgaaacaccgtaatttctactaagtgtagatatgtgccgtagaaacccatataatttctactaagtgtagatacgaaacctgaacccacacattttttaagcttggcgtggatccgatatcaactagatcttgaga

SEQ ID NO: 3631 - DNA, 170 bp, Artificial sequence
  Fbxw7.23_Rbm10.6
  crRNA array
cgatttcttggctttatatatcttgtggaaaggacgaaacaccgtaatttctactaagtgtagatatgtgccgtagaaacccatataatttctactaagtgtagatcgaaacctgaacccacacagttttttaagcttggcgtggatccgatatcaactagatcttgaga

SEQ ID NO: 3632 - DNA, 170 bp, Artificial sequence
  Fbxw7.23_Rnf43.1920
  crRNA array
cgatttcttggctttatatatcttgtggaaaggacgaaacaccgtaatttctactaagtgtagatatgtgccgtagaaacccatataatttctactaagtgtagatatccccgtgccgtggactccttttttaagcttggcgtggatccgatatcaactagatcttgaga

SEQ ID NO: 3633 - DNA, 170 bp, Artificial sequence
  Fbxw7.23_Rnf43.39
  crRNA array
cgatttcttggctttatatatcttgtggaaaggacgaaacaccgtaatttctactaagtgtagatatgtgccgtagaaacccatataatttctactaagtgtagatcaaggggatcactctgataattttttaagcttggcgtggatccgatatcaactagatcttgaga

SEQ ID NO: 3634 - DNA, 170 bp, Artificial sequence
  Fbxw7.23_Runx1.204
  crRNA array
cgatttcttggctttatatatcttgtggaaaggacgaaacaccgtaatttctactaagtgtagatatgtgccgtagaaacccatataatttctactaagtgtagattaaataagtccagccgttttttttttaagcttggcgtggatccgatatcaactagatcttgaga

SEQ ID NO: 3635 - DNA, 170 bp, Artificial sequence
  Fbxw7.23_Runx1.81
  crRNA array
cgatttcttggctttatatatcttgtggaaaggacgaaacaccgtaatttctactaagtgtagatatgtgccgtagaaacccatataatttctactaagtgtagataggacgcgtatgggaattttttttttaagcttggcgtggatccgatatcaactagatcttgaga

SEQ ID NO: 3636 - DNA, 170 bp, Artificial sequence
  Fbxw7.23_Setd2.143
  crRNA array
cgatttcttggctttatatatcttgtggaaaggacgaaacaccgtaatttctactaagtgtagatatgtgccgtagaaacccatataatttctactaagtgtagatgcacaaccacaacagactggttttttaagcttggcgtggatccgatatcaactagatcttgaga

SEQ ID NO: 3637 - DNA, 170 bp, Artificial sequence
  Fbxw7.23_Setd2.508
  crRNA array
cgatttcttggctttatatatcttgtggaaaggacgaaacaccgtaatttctactaagtgtagatatgtgccgtagaaacccatataatttctactaagtgtagattacgatcccgagcacccgacttttttaagcttggcgtggatccgatatcaactagatcttgaga

SEQ ID NO: 3638 - DNA, 170 bp, Artificial sequence
  Fbxw7.23_Smad4.3038
  crRNA array
cgatttcttggctttatatatcttgtggaaaggacgaaacaccgtaatttctactaagtgtagatatgtgccgtagaaacccatataatttctactaagtgtagatatctgcggcagtgtcaccggttttttaagcttggcgtggatccgatatcaactagatcttgaga

SEQ ID NO: 3639 - DNA, 170 bp, Artificial sequence
  Fbxw7.23_Smad4.39
  crRNA array
cgatttcttggctttatatatcttgtggaaaggacgaaacaccgtaatttctactaagtgtagatatgtgccgtagaaacccatataatttctactaagtgtagatagtcaaacgcatactgacaattttttaagcttggcgtggatccgatatcaactagatcttgaga

SEQ ID NO: 3640 - DNA, 170 bp, Artificial sequence
  Fbxw7.23_Stag2.1409
  crRNA array
cgatttcttggctttatatatcttgtggaaaggacgaaacaccgtaatttctactaagtgtagatatgtgccgtagaaacccatataatttctactaagtgtagatgctaataactgcggaagggcttttttaagcttggcgtggatccgatatcaactagatcttgaga

SEQ ID NO: 3641 - DNA, 170 bp, Artificial sequence
  Fbxw7.23_Stag2.4401
  crRNA array
cgatttcttggctttatatatcttgtggaaaggacgaaacaccgtaatttctactaagtgtagatatgtgccgtagaaacccatataatttctactaagtgtagattaatcgtccagtggtgtatattttttaagcttggcgtggatccgatatcaactagatcttgaga

SEQ ID NO: 3642 - DNA, 170 bp, Artificial sequence
  Fbxw7.23_Tbl1xr1.1
  crRNA array
cgatttcttggctttatatatcttgtggaaaggacgaaacaccgtaatttctactaagtgtagatatgtgccgtagaaacccatataatttctactaagtgtagatggatgcgcatactggtgaagttttttaagcttggcgtggatccgatatcaactagatcttgaga

SEQ ID NO: 3643 - DNA, 170 bp, Artificial sequence
  Fbxw7.23_Tbl1xr1.83
  crRNA array
cgatttcttggctttatatatcttgtggaaaggacgaaacaccgtaatttctactaagtgtagatatgtgccgtagaaacccatataatttctactaagtgtagatatggtcgacccatcgagtctttttttaagcttggcgtggatccgatatcaactagatcttgaga

SEQ ID NO: 3644 - DNA, 170 bp, Artificial sequence
  Fbxw7.23_Tgfbr2.290
  crRNA array
cgatttcttggctttatatatcttgtggaaaggacgaaacaccgtaatttctactaagtgtagatatgtgccgtagaaacccatataatttctactaagtgtagatcctctcggcgcccgggtaaattttttaagcttggcgtggatccgatatcaactagatcttgaga

SEQ ID NO: 3645 - DNA, 170 bp, Artificial sequence
  Fbxw7.23_Tgfbr2.292
  crRNA array
cgatttcttggctttatatatcttgtggaaaggacgaaacaccgtaatttctactaagtgtagatatgtgccgtagaaacccatataatttctactaagtgtagatcccgggcgccgagagggaaattttttaagcttggcgtggatccgatatcaactagatcttgaga

SEQ ID NO: 3646 - DNA, 170 bp, Artificial sequence
  Fbxw7.23_Trp53.4
  crRNA array
cgatttcttggctttatatatcttgtggaaaggacgaaacaccgtaatttctactaagtgtagatatgtgccgtagaaacccatataatttctactaagtgtagatccctgaactgcccccagggattttttaagcttggcgtggatccgatatcaactagatcttgaga

SEQ ID NO: 3647 - DNA, 170 bp, Artificial sequence
  Fbxw7.23_Trp53.528
  crRNA array
cgatttcttggctttatatatcttgtggaaaggacgaaacaccgtaatttctactaagtgtagatatgtgccgtagaaacccatataatttctactaagtgtagatgctgggccagcagagacctgttttttaagcttggcgtggatccgatatcaactagatcttgaga

SEQ ID NO: 3648 - DNA, 170 bp, Artificial sequence
  Fbxw7.23_Vhl.1
  crRNA array
cgatttcttggctttatatatcttgtggaaaggacgaaacaccgtaatttctactaagtgtagatatgtgccgtagaaacccatataatttctactaagtgtagatagggctcccggcggccatttttttttaagcttggcgtggatccgatatcaactagatcttgaga

SEQ ID NO: 3649 - DNA, 170 bp, Artificial sequence
  Fbxw7.23_Vhl.151
  crRNA array
cgatttcttggctttatatatcttgtggaaaggacgaaacaccgtaatttctactaagtgtagatatgtgccgtagaaacccatataatttctactaagtgtagattagagcactcacccgagggattttttaagcttggcgtggatccgatatcaactagatcttgaga

SEQ ID NO: 3650 - DNA, 170 bp, Artificial sequence
  Fbxw7.23_Zc3h13.1387
  crRNA array
cgatttcttggctttatatatcttgtggaaaggacgaaacaccgtaatttctactaagtgtagatatgtgccgtagaaacccatataatttctactaagtgtagatgtgacgccggtcatgtgactttttttaagcttggcgtggatccgatatcaactagatcttgaga

SEQ ID NO: 3651 - DNA, 170 bp, Artificial sequence
  Fbxw7.23_Zc3h13.1777
  crRNA array
cgatttcttggctttatatatcttgtggaaaggacgaaacaccgtaatttctactaagtgtagatatgtgccgtagaaacccatataatttctactaagtgtagatgatgctgccagtgtagcggcttttttaagcttggcgtggatccgatatcaactagatcttgaga

SEQ ID NO: 3652 - DNA, 170 bp, Artificial sequence
  Gata3.34_Acvr2a.155
  crRNA array
cgatttcttggctttatatatcttgtggaaaggacgaaacaccgtaatttctactaagtgtagatctaaactatcccgcaaagattaatttctactaagtgtagatggacctggctaatcaagtatttttttaagcttggcgtggatccgatatcaactagatcttgaga

SEQ ID NO: 3653 - DNA, 170 bp, Artificial sequence
  Gata3.34_Acvr2a.70
  crRNA array
cgatttcttggctttatatatcttgtggaaaggacgaaacaccgtaatttctactaagtgtagatctaaactatcccgcaaagattaatttctactaagtgtagatcccgaggcgccggagaagccttttttaagcttggcgtggatccgatatcaactagatcttgaga

SEQ ID NO: 3654 - DNA, 170 bp, Artificial sequence
  Gata3.34_Apc.21
  crRNA array
cgatttcttggctttatatatcttgtggaaaggacgaaacaccgtaatttctactaagtgtagatctaaactatcccgcaaagattaatttctactaagtgtagatgtgatccacacgtgtagctgttttttaagcttggcgtggatccgatatcaactagatcttgaga

SEQ ID NO: 3655 - DNA, 170 bp, Artificial sequence
  Gata3.34_Apc.867
  crRNA array
cgatttcttggctttatatatcttgtggaaaggacgaaacaccgtaatttctactaagtgtagatctaaactatcccgcaaagattaatttctactaagtgtagatcagtcccaggcggcggaagcttttttaagcttggcgtggatccgatatcaactagatcttgaga

SEQ ID NO: 3656 - DNA, 170 bp, Artificial sequence
  Gata3.34_Arid1a.2
  crRNA array
cgatttcttggctttatatatcttgtggaaaggacgaaacaccgtaatttctactaagtgtagatctaaactatcccgcaaagattaatttctactaagtgtagatcccgcgcccccgtcctggggttttttaagcttggcgtggatccgatatcaactagatcttgaga

SEQ ID NO: 3657 - DNA, 170 bp, Artificial sequence
  Gata3.34_Arid1a.5
  crRNA array
cgatttcttggctttatatatcttgtggaaaggacgaaacaccgtaatttctactaagtgtagatctaaactatcccgcaaagattaatttctactaagtgtagatcccgcgctcggccgctgccgttttttaagcttggcgtggatccgatatcaactagatcttgaga

SEQ ID NO: 3658 - DNA, 170 bp, Artificial sequence
  Gata3.34_Arid2.166
  crRNA array
cgatttcttggctttatatatcttgtggaaaggacgaaacaccgtaatttctactaagtgtagatctaaactatcccgcaaagattaatttctactaagtgtagataaccgcgatctgggttttttttttttaagcttggcgtggatccgatatcaactagatcttgaga

SEQ ID NO: 3659 - DNA, 170 bp, Artificial sequence
  Gata3.34_Arid2.172
  crRNA array
cgatttcttggctttatatatcttgtggaaaggacgaaacaccgtaatttctactaagtgtagatctaaactatcccgcaaagattaatttctactaagtgtagatctggacgagctgcggcagttttttttaagcttggcgtggatccgatatcaactagatcttgaga

SEQ ID NO: 3660 - DNA, 170 bp, Artificial sequence
  Gata3.34_Atm.120
  crRNA array
cgatttcttggctttatatatcttgtggaaaggacgaaacaccgtaatttctactaagtgtagatctaaactatcccgcaaagattaatttctactaagtgtagatgacaggtagtcggcagctaattttttaagcttggcgtggatccgatatcaactagatcttgaga

SEQ ID NO: 3661 - DNA, 170 bp, Artificial sequence
  Gata3.34_Atm.997
  crRNA array
cgatttcttggctttatatatcttgtggaaaggacgaaacaccgtaatttctactaagtgtagatctaaactatcccgcaaagattaatttctactaagtgtagatgagaaagtctccgaatcgttttttttaagcttggcgtggatccgatatcaactagatcttgaga

SEQ ID NO: 3662 - DNA, 170 bp, Artificial sequence
  Gata3.34_Atrx.249
  crRNA array
cgatttcttggctttatatatcttgtggaaaggacgaaacaccgtaatttctactaagtgtagatctaaactatcccgcaaagattaatttctactaagtgtagattagccagtcgctcatatctcttttttaagcttggcgtggatccgatatcaactagatcttgaga

SEQ ID NO: 3663 - DNA, 170 bp, Artificial sequence
  Gata3.34_Atrx.251
  crRNA array
cgatttcttggctttatatatcttgtggaaaggacgaaacaccgtaatttctactaagtgtagatctaaactatcccgcaaagattaatttctactaagtgtagatgccagtcgctcatatctctgttttttaagcttggcgtggatccgatatcaactagatcttgaga

SEQ ID NO: 3664 - DNA, 170 bp, Artificial sequence
  Gata3.34_Bcor.203
  crRNA array
cgatttcttggctttatatatcttgtggaaaggacgaaacaccgtaatttctactaagtgtagatctaaactatcccgcaaagattaatttctactaagtgtagatccccggagcggagtccaggcttttttaagcttggcgtggatccgatatcaactagatcttgaga

SEQ ID NO: 3665 - DNA, 170 bp, Artificial sequence
  Gata3.34_Bcor.475
  crRNA array
cgatttcttggctttatatatcttgtggaaaggacgaaacaccgtaatttctactaagtgtagatctaaactatcccgcaaagattaatttctactaagtgtagattgcaacccctctgtatgggattttttaagcttggcgtggatccgatatcaactagatcttgaga

SEQ ID NO: 3666 - DNA, 170 bp, Artificial sequence
  Gata3.34_Brca1.112
  crRNA array
cgatttcttggctttatatatcttgtggaaaggacgaaacaccgtaatttctactaagtgtagatctaaactatcccgcaaagattaatttctactaagtgtagatctagacgctctgtggagactttttttaagcttggcgtggatccgatatcaactagatcttgaga

SEQ ID NO: 3667 - DNA, 170 bp, Artificial sequence
  Gata3.34_Brca1.53
  crRNA array
cgatttcttggctttatatatcttgtggaaaggacgaaacaccgtaatttctactaagtgtagatctaaactatcccgcaaagattaatttctactaagtgtagataatgaggaggcgtcgatcatttttttaagcttggcgtggatccgatatcaactagatcttgaga

SEQ ID NO: 3668 - DNA, 170 bp, Artificial sequence
  Gata3.34_Casp8.45
  crRNA array
cgatttcttggctttatatatcttgtggaaaggacgaaacaccgtaatttctactaagtgtagatctaaactatcccgcaaagattaatttctactaagtgtagatctaccgagatcctgtgaatgttttttaagcttggcgtggatccgatatcaactagatcttgaga

SEQ ID NO: 3669 - DNA, 170 bp, Artificial sequence
  Gata3.34_Casp8.54
  crRNA array
cgatttcttggctttatatatcttgtggaaaggacgaaacaccgtaatttctactaagtgtagatctaaactatcccgcaaagattaatttctactaagtgtagatcagtgcagtcgtcgtaagatttttttaagcttggcgtggatccgatatcaactagatcttgaga

SEQ ID NO: 3670 - DNA, 170 bp, Artificial sequence
  Gata3.34_Cbwd1.84
  crRNA array
cgatttcttggctttatatatcttgtggaaaggacgaaacaccgtaatttctactaagtgtagatctaaactatcccgcaaagattaatttctactaagtgtagatcacagcaggtaacatgccgcttttttaagcttggcgtggatccgatatcaactagatcttgaga

SEQ ID NO: 3671 - DNA, 170 bp, Artificial sequence
  Gata3.34_Cbwd1.85
  crRNA array
cgatttcttggctttatatatcttgtggaaaggacgaaacaccgtaatttctactaagtgtagatctaaactatcccgcaaagattaatttctactaagtgtagatacagcaggtaacatgccgccttttttaagcttggcgtggatccgatatcaactagatcttgaga

SEQ ID NO: 3672 - DNA, 170 bp, Artificial sequence
  Gata3.34_Cdh1.387
  crRNA array
cgatttcttggctttatatatcttgtggaaaggacgaaacaccgtaatttctactaagtgtagatctaaactatcccgcaaagattaatttctactaagtgtagatctcggcgtctgccgggtccgttttttaagcttggcgtggatccgatatcaactagatcttgaga

SEQ ID NO: 3673 - DNA, 170 bp, Artificial sequence
  Gata3.34_Cdh1.58
  crRNA array
cgatttcttggctttatatatcttgtggaaaggacgaaacaccgtaatttctactaagtgtagatctaaactatcccgcaaagattaatttctactaagtgtagatctcgtccgcgcccgggactcttttttaagcttggcgtggatccgatatcaactagatcttgaga

SEQ ID NO: 3674 - DNA, 170 bp, Artificial sequence
  Gata3.34_Cdkn2a.647
  crRNA array
cgatttcttggctttatatatcttgtggaaaggacgaaacaccgtaatttctactaagtgtagatctaaactatcccgcaaagattaatttctactaagtgtagatgcaatcacgggagggagcagttttttaagcttggcgtggatccgatatcaactagatcttgaga

SEQ ID NO: 3675 - DNA, 170 bp, Artificial sequence
  Gata3.34_Cdkn2a.648
  crRNA array
cgatttcttggctttatatatcttgtggaaaggacgaaacaccgtaatttctactaagtgtagatctaaactatcccgcaaagattaatttctactaagtgtagatcaatcacgggagggagcagattttttaagcttggcgtggatccgatatcaactagatcttgaga

SEQ ID NO: 3676 - DNA, 170 bp, Artificial sequence
  Gata3.34_Cic.162
  crRNA array
cgatttcttggctttatatatcttgtggaaaggacgaaacaccgtaatttctactaagtgtagatctaaactatcccgcaaagattaatttctactaagtgtagatcgcaggcgcgcccggcggagttttttaagcttggcgtggatccgatatcaactagatcttgaga

SEQ ID NO: 3677 - DNA, 170 bp, Artificial sequence
  Gata3.34_Cic.164
  crRNA array
cgatttcttggctttatatatcttgtggaaaggacgaaacaccgtaatttctactaagtgtagatctaaactatcccgcaaagattaatttctactaagtgtagatcgggccctgggccggcggctttttttaagcttggcgtggatccgatatcaactagatcttgaga

SEQ ID NO: 3678 - DNA, 170 bp, Artificial sequence
  Gata3.34_Ctcf.229
  crRNA array
cgatttcttggctttatatatcttgtggaaaggacgaaacaccgtaatttctactaagtgtagatctaaactatcccgcaaagattaatttctactaagtgtagatggctggtggctgatagtctgttttttaagcttggcgtggatccgatatcaactagatcttgaga

SEQ ID NO: 3679 - DNA, 170 bp, Artificial sequence
  Gata3.34_Ctcf.809
  crRNA array
cgatttcttggctttatatatcttgtggaaaggacgaaacaccgtaatttctactaagtgtagatctaaactatcccgcaaagattaatttctactaagtgtagataagcgctatcatgatcccaattttttaagcttggcgtggatccgatatcaactagatcttgaga

SEQ ID NO: 3680 - DNA, 170 bp, Artificial sequence
  Gata3.34_Elf3.826
  crRNA array
cgatttcttggctttatatatcttgtggaaaggacgaaacaccgtaatttctactaagtgtagatctaaactatcccgcaaagattaatttctactaagtgtagattccgagacatcctaatccacttttttaagcttggcgtggatccgatatcaactagatcttgaga

SEQ ID NO: 3681 - DNA, 170 bp, Artificial sequence
  Gata3.34_Elf3.983
  crRNA array
cgatttcttggctttatatatcttgtggaaaggacgaaacaccgtaatttctactaagtgtagatctaaactatcccgcaaagattaatttctactaagtgtagattaggccccctaactggaccattttttaagcttggcgtggatccgatatcaactagatcttgaga

SEQ ID NO: 3682 - DNA, 170 bp, Artificial sequence
  Gata3.34_Ep300.310
  crRNA array
cgatttcttggctttatatatcttgtggaaaggacgaaacaccgtaatttctactaagtgtagatctaaactatcccgcaaagattaatttctactaagtgtagatatggtacgacagtgaggaagttttttaagcttggcgtggatccgatatcaactagatcttgaga

SEQ ID NO: 3683 - DNA, 170 bp, Artificial sequence
  Gata3.34_Ep300.587
  crRNA array
cgatttcttggctttatatatcttgtggaaaggacgaaacaccgtaatttctactaagtgtagatctaaactatcccgcaaagattaatttctactaagtgtagatcgccccggggcccccaaccattttttaagcttggcgtggatccgatatcaactagatcttgaga

SEQ ID NO: 3684 - DNA, 170 bp, Artificial sequence
  Gata3.34_Epha2.126
  crRNA array
cgatttcttggctttatatatcttgtggaaaggacgaaacaccgtaatttctactaagtgtagatctaaactatcccgcaaagattaatttctactaagtgtagatcctgtgccgccgcggccgccttttttaagcttggcgtggatccgatatcaactagatcttgaga

SEQ ID NO: 3685 - DNA, 170 bp, Artificial sequence
  Gata3.34_Epha2.5
  crRNA array
cgatttcttggctttatatatcttgtggaaaggacgaaacaccgtaatttctactaagtgtagatctaaactatcccgcaaagattaatttctactaagtgtagatcatgagctggcgccacccggttttttaagcttggcgtggatccgatatcaactagatcttgaga

SEQ ID NO: 3686 - DNA, 170 bp, Artificial sequence
  Gata3.34_Fat1.105
  crRNA array
cgatttcttggctttatatatcttgtggaaaggacgaaacaccgtaatttctactaagtgtagatctaaactatcccgcaaagattaatttctactaagtgtagataactcgaggtgacaacaagtttttttaagcttggcgtggatccgatatcaactagatcttgaga

SEQ ID NO: 3687 - DNA, 170 bp, Artificial sequence
  Gata3.34_Fat1.122
  crRNA array
cgatttcttggctttatatatcttgtggaaaggacgaaacaccgtaatttctactaagtgtagatctaaactatcccgcaaagattaatttctactaagtgtagatccatcgacatggaaacgggattttttaagcttggcgtggatccgatatcaactagatcttgaga

SEQ ID NO: 3688 - DNA, 170 bp, Artificial sequence
  Gata3.34_Fbxw7.21
  crRNA array
cgatttcttggctttatatatcttgtggaaaggacgaaacaccgtaatttctactaagtgtagatctaaactatcccgcaaagattaatttctactaagtgtagattaatgtgccgtagaaacccattttttaagcttggcgtggatccgatatcaactagatcttgaga

SEQ ID NO: 3689 - DNA, 170 bp, Artificial sequence
  Gata3.34_Fbxw7.23
  crRNA array
cgatttcttggctttatatatcttgtggaaaggacgaaacaccgtaatttctactaagtgtagatctaaactatcccgcaaagattaatttctactaagtgtagatatgtgccgtagaaacccatattttttaagcttggcgtggatccgatatcaactagatcttgaga

SEQ ID NO: 3690 - DNA, 170 bp, Artificial sequence
  Gata3.34_H2-Q2.1
  crRNA array
cgatttcttggctttatatatcttgtggaaaggacgaaacaccgtaatttctactaagtgtagatctaaactatcccgcaaagattaatttctactaagtgtagatagggcggccaccaacagcagttttttaagcttggcgtggatccgatatcaactagatcttgaga

SEQ ID NO: 3691 - DNA, 170 bp, Artificial sequence
  Gata3.34_H2-Q2.2
  crRNA array
cgatttcttggctttatatatcttgtggaaaggacgaaacaccgtaatttctactaagtgtagatctaaactatcccgcaaagattaatttctactaagtgtagattaacctgcgcccgctgctgattttttaagcttggcgtggatccgatatcaactagatcttgaga

SEQ ID NO: 3692 - DNA, 170 bp, Artificial sequence
  Gata3.34_Kdm5c.1878
  crRNA array
cgatttcttggctttatatatcttgtggaaaggacgaaacaccgtaatttctactaagtgtagatctaaactatcccgcaaagattaatttctactaagtgtagatagagcacggcacccgcccccttttttaagcttggcgtggatccgatatcaactagatcttgaga

SEQ ID NO: 3693 - DNA, 170 bp, Artificial sequence
  Gata3.34_Kdm5c.1879
  crRNA array
cgatttcttggctttatatatcttgtggaaaggacgaaacaccgtaatttctactaagtgtagatctaaactatcccgcaaagattaatttctactaagtgtagatgagcacggcacccgccccccttttttaagcttggcgtggatccgatatcaactagatcttgaga

SEQ ID NO: 3694 - DNA, 170 bp, Artificial sequence
  Gata3.34_Kdm6a.56
  crRNA array
cgatttcttggctttatatatcttgtggaaaggacgaaacaccgtaatttctactaagtgtagatctaaactatcccgcaaagattaatttctactaagtgtagattcgctgccgcctctcgcggcttttttaagcttggcgtggatccgatatcaactagatcttgaga

SEQ ID NO: 3695 - DNA, 170 bp, Artificial sequence
  Gata3.34_Kdm6a.57
  crRNA array
cgatttcttggctttatatatcttgtggaaaggacgaaacaccgtaatttctactaagtgtagatctaaactatcccgcaaagattaatttctactaagtgtagatcgctgccgcctctcgcggcattttttaagcttggcgtggatccgatatcaactagatcttgaga

SEQ ID NO: 3696 - DNA, 170 bp, Artificial sequence
  Gata3.34_Kmt2b.265
  crRNA array
cgatttcttggctttatatatcttgtggaaaggacgaaacaccgtaatttctactaagtgtagatctaaactatcccgcaaagattaatttctactaagtgtagatccccaagtgaagcccacctgttttttaagcttggcgtggatccgatatcaactagatcttgaga

SEQ ID NO: 3697 - DNA, 170 bp, Artificial sequence
  Gata3.34_Kmt2b.298
  crRNA array
cgatttcttggctttatatatcttgtggaaaggacgaaacaccgtaatttctactaagtgtagatctaaactatcccgcaaagattaatttctactaagtgtagattccggcagggaccggctggcttttttaagcttggcgtggatccgatatcaactagatcttgaga

SEQ ID NO: 3698 - DNA, 170 bp, Artificial sequence
  Gata3.34_Kmt2c.1962
  crRNA array
cgatttcttggctttatatatcttgtggaaaggacgaaacaccgtaatttctactaagtgtagatctaaactatcccgcaaagattaatttctactaagtgtagatgtgacgatctgtgccacaagttttttaagcttggcgtggatccgatatcaactagatcttgaga

SEQ ID NO: 3699 - DNA, 170 bp, Artificial sequence
  Gata3.34_Kmt2c.2236
  crRNA array
cgatttcttggctttatatatcttgtggaaaggacgaaacaccgtaatttctactaagtgtagatctaaactatcccgcaaagattaatttctactaagtgtagatactcgacctccacctccctattttttaagcttggcgtggatccgatatcaactagatcttgaga

SEQ ID NO: 3700 - DNA, 170 bp, Artificial sequence
  Gata3.34_Kmt2d.316
  crRNA array
cgatttcttggctttatatatcttgtggaaaggacgaaacaccgtaatttctactaagtgtagatctaaactatcccgcaaagattaatttctactaagtgtagatactccaggccacccaggtggttttttaagcttggcgtggatccgatatcaactagatcttgaga

SEQ ID NO: 3701 - DNA, 170 bp, Artificial sequence
  Gata3.34_Kmt2d.416
  crRNA array
cgatttcttggctttatatatcttgtggaaaggacgaaacaccgtaatttctactaagtgtagatctaaactatcccgcaaagattaatttctactaagtgtagattaaacccccgggggaagggtttttttaagcttggcgtggatccgatatcaactagatcttgaga

SEQ ID NO: 3702 - DNA, 170 bp, Artificial sequence
  Gata3.34_Map2k4.119
  crRNA array
cgatttcttggctttatatatcttgtggaaaggacgaaacaccgtaatttctactaagtgtagatctaaactatcccgcaaagattaatttctactaagtgtagattgctgtgtgggcggccacatttttttaagcttggcgtggatccgatatcaactagatcttgaga

SEQ ID NO: 3703 - DNA, 170 bp, Artificial sequence
  Gata3.34_Map2k4.1261
  crRNA array
cgatttcttggctttatatatcttgtggaaaggacgaaacaccgtaatttctactaagtgtagatctaaactatcccgcaaagattaatttctactaagtgtagatgatgtagtaatgcggagtagttttttaagcttggcgtggatccgatatcaactagatcttgaga

SEQ ID NO: 3704 - DNA, 170 bp, Artificial sequence
  Gata3.34_Map3k1.235
  crRNA array
cgatttcttggctttatatatcttgtggaaaggacgaaacaccgtaatttctactaagtgtagatctaaactatcccgcaaagattaatttctactaagtgtagataaaacgctactgatcgatcgttttttaagcttggcgtggatccgatatcaactagatcttgaga

SEQ ID NO: 3705 - DNA, 170 bp, Artificial sequence
  Gata3.34_Map3k1.3838
  crRNA array
cgatttcttggctttatatatcttgtggaaaggacgaaacaccgtaatttctactaagtgtagatctaaactatcccgcaaagattaatttctactaagtgtagatccaacaacagggccccactattttttaagcttggcgtggatccgatatcaactagatcttgaga

SEQ ID NO: 3706 - DNA, 170 bp, Artificial sequence
  Gata3.34_Mga.1655
  crRNA array
cgatttcttggctttatatatcttgtggaaaggacgaaacaccgtaatttctactaagtgtagatctaaactatcccgcaaagattaatttctactaagtgtagatcgagaagtggagagcatattttttttaagcttggcgtggatccgatatcaactagatcttgaga

SEQ ID NO: 3707 - DNA, 170 bp, Artificial sequence
  Gata3.34_Mga.93
  crRNA array
cgatttcttggctttatatatcttgtggaaaggacgaaacaccgtaatttctactaagtgtagatctaaactatcccgcaaagattaatttctactaagtgtagatgagaaggctccccataatgtttttttaagcttggcgtggatccgatatcaactagatcttgaga

SEQ ID NO: 3708 - DNA, 170 bp, Artificial sequence
  Gata3.34_Nf1.746
  crRNA array
cgatttcttggctttatatatcttgtggaaaggacgaaacaccgtaatttctactaagtgtagatctaaactatcccgcaaagattaatttctactaagtgtagattaagcataatgatgatgccattttttaagcttggcgtggatccgatatcaactagatcttgaga

SEQ ID NO: 3709 - DNA, 170 bp, Artificial sequence
  Gata3.34_Nf1.97
  crRNA array
cgatttcttggctttatatatcttgtggaaaggacgaaacaccgtaatttctactaagtgtagatctaaactatcccgcaaagattaatttctactaagtgtagatagcccgctacatgctgatgcttttttaagcttggcgtggatccgatatcaactagatcttgaga

SEQ ID NO: 3710 - DNA, 170 bp, Artificial sequence
  Gata3.34_Nf2.356
  crRNA array
cgatttcttggctttatatatcttgtggaaaggacgaaacaccgtaatttctactaagtgtagatctaaactatcccgcaaagattaatttctactaagtgtagatcggagtcatctgatagagatttttttaagcttggcgtggatccgatatcaactagatcttgaga

SEQ ID NO: 3711 - DNA, 170 bp, Artificial sequence
  Gata3.34_Nf2.768
  crRNA array
cgatttcttggctttatatatcttgtggaaaggacgaaacaccgtaatttctactaagtgtagatctaaactatcccgcaaagattaatttctactaagtgtagatccgaagccccagtgtccggcttttttaagcttggcgtggatccgatatcaactagatcttgaga

SEQ ID NO: 3712 - DNA, 170 bp, Artificial sequence
  Gata3.34_Notch1.1849
  crRNA array
cgatttcttggctttatatatcttgtggaaaggacgaaacaccgtaatttctactaagtgtagatctaaactatcccgcaaagattaatttctactaagtgtagatctggcgggtgggcggcgctgttttttaagcttggcgtggatccgatatcaactagatcttgaga

SEQ ID NO: 3713 - DNA, 170 bp, Artificial sequence
  Gata3.34_Notch1.649
  crRNA array
cgatttcttggctttatatatcttgtggaaaggacgaaacaccgtaatttctactaagtgtagatctaaactatcccgcaaagattaatttctactaagtgtagattgggccaacgatgccaggacttttttaagcttggcgtggatccgatatcaactagatcttgaga

SEQ ID NO: 3714 - DNA, 170 bp, Artificial sequence
  Gata3.34_Nsd1.70
  crRNA array
cgatttcttggctttatatatcttgtggaaaggacgaaacaccgtaatttctactaagtgtagatctaaactatcccgcaaagattaatttctactaagtgtagatactggtgtggacgatgcagattttttaagcttggcgtggatccgatatcaactagatcttgaga

SEQ ID NO: 3715 - DNA, 170 bp, Artificial sequence
  Gata3.34_Nsd1.90
  crRNA array
cgatttcttggctttatatatcttgtggaaaggacgaaacaccgtaatttctactaagtgtagatctaaactatcccgcaaagattaatttctactaagtgtagataggagctaacggcaagaatgttttttaagcttggcgtggatccgatatcaactagatcttgaga

SEQ ID NO: 3716 - DNA, 170 bp, Artificial sequence
  Gata3.34_Pbrm1.1236
  crRNA array
cgatttcttggctttatatatcttgtggaaaggacgaaacaccgtaatttctactaagtgtagatctaaactatcccgcaaagattaatttctactaagtgtagatgccgataaaaccaacagccgttttttaagcttggcgtggatccgatatcaactagatcttgaga

SEQ ID NO: 3717 - DNA, 170 bp, Artificial sequence
  Gata3.34_Pbrm1.969
  crRNA array
cgatttcttggctttatatatcttgtggaaaggacgaaacaccgtaatttctactaagtgtagatctaaactatcccgcaaagattaatttctactaagtgtagatgagccctaatgaacagctcattttttaagcttggcgtggatccgatatcaactagatcttgaga

SEQ ID NO: 3718 - DNA, 170 bp, Artificial sequence
  Gata3.34_Pik3r1.76
  crRNA array
cgatttcttggctttatatatcttgtggaaaggacgaaacaccgtaatttctactaagtgtagatctaaactatcccgcaaagattaatttctactaagtgtagataaaacctatacggcccgcacttttttaagcttggcgtggatccgatatcaactagatcttgaga

SEQ ID NO: 3719 - DNA, 170 bp, Artificial sequence
  Gata3.34_Pik3r1.77
  crRNA array
cgatttcttggctttatatatcttgtggaaaggacgaaacaccgtaatttctactaagtgtagatctaaactatcccgcaaagattaatttctactaagtgtagataaacctatacggcccgcactttttttaagcttggcgtggatccgatatcaactagatcttgaga

SEQ ID NO: 3720 - DNA, 170 bp, Artificial sequence
  Gata3.34_Pten.240
  crRNA array
cgatttcttggctttatatatcttgtggaaaggacgaaacaccgtaatttctactaagtgtagatctaaactatcccgcaaagattaatttctactaagtgtagattgcatacgctatagctgcttttttttaagcttggcgtggatccgatatcaactagatcttgaga

SEQ ID NO: 3721 - DNA, 170 bp, Artificial sequence
  Gata3.34_Pten.265
  crRNA array
cgatttcttggctttatatatcttgtggaaaggacgaaacaccgtaatttctactaagtgtagatctaaactatcccgcaaagattaatttctactaagtgtagataagcgtggtgcgtgacgcacttttttaagcttggcgtggatccgatatcaactagatcttgaga

SEQ ID NO: 3722 - DNA, 170 bp, Artificial sequence
  Gata3.34_Rasa1.1478
  crRNA array
cgatttcttggctttatatatcttgtggaaaggacgaaacaccgtaatttctactaagtgtagatctaaactatcccgcaaagattaatttctactaagtgtagatcgataatggtctatgatgtcttttttaagcttggcgtggatccgatatcaactagatcttgaga

SEQ ID NO: 3723 - DNA, 170 bp, Artificial sequence
  Gata3.34_Rasa1.223
  crRNA array
cgatttcttggctttatatatcttgtggaaaggacgaaacaccgtaatttctactaagtgtagatctaaactatcccgcaaagattaatttctactaagtgtagattccatggagtatcgtgctcgttttttaagcttggcgtggatccgatatcaactagatcttgaga

SEQ ID NO: 3724 - DNA, 170 bp, Artificial sequence
  Gata3.34_Rb1.211
  crRNA array
cgatttcttggctttatatatcttgtggaaaggacgaaacaccgtaatttctactaagtgtagatctaaactatcccgcaaagattaatttctactaagtgtagattctgacatgatcgggtacctttttttaagcttggcgtggatccgatatcaactagatcttgaga

SEQ ID NO: 3725 - DNA, 170 bp, Artificial sequence
  Gata3.34_Rb1.394
  crRNA array
cgatttcttggctttatatatcttgtggaaaggacgaaacaccgtaatttctactaagtgtagatctaaactatcccgcaaagattaatttctactaagtgtagatagaaatctcgaagcaggatcttttttaagcttggcgtggatccgatatcaactagatcttgaga

SEQ ID NO: 3726 - DNA, 170 bp, Artificial sequence
  Gata3.34_Rbm10.5
  crRNA array
cgatttcttggctttatatatcttgtggaaaggacgaaacaccgtaatttctactaagtgtagatctaaactatcccgcaaagattaatttctactaagtgtagatacgaaacctgaacccacacattttttaagcttggcgtggatccgatatcaactagatcttgaga

SEQ ID NO: 3727 - DNA, 170 bp, Artificial sequence
  Gata3.34_Rbm10.6
  crRNA array
cgatttcttggctttatatatcttgtggaaaggacgaaacaccgtaatttctactaagtgtagatctaaactatcccgcaaagattaatttctactaagtgtagatcgaaacctgaacccacacagttttttaagcttggcgtggatccgatatcaactagatcttgaga

SEQ ID NO: 3728 - DNA, 170 bp, Artificial sequence
  Gata3.34_Rnf43.1920
  crRNA array
cgatttcttggctttatatatcttgtggaaaggacgaaacaccgtaatttctactaagtgtagatctaaactatcccgcaaagattaatttctactaagtgtagatatccccgtgccgtggactccttttttaagcttggcgtggatccgatatcaactagatcttgaga

SEQ ID NO: 3729 - DNA, 170 bp, Artificial sequence
  Gata3.34_Rnf43.39
  crRNA array
cgatttcttggctttatatatcttgtggaaaggacgaaacaccgtaatttctactaagtgtagatctaaactatcccgcaaagattaatttctactaagtgtagatcaaggggatcactctgataattttttaagcttggcgtggatccgatatcaactagatcttgaga

SEQ ID NO: 3730 - DNA, 170 bp, Artificial sequence
  Gata3.34_Runx1.204
  crRNA array
cgatttcttggctttatatatcttgtggaaaggacgaaacaccgtaatttctactaagtgtagatctaaactatcccgcaaagattaatttctactaagtgtagattaaataagtccagccgttttttttttaagcttggcgtggatccgatatcaactagatcttgaga

SEQ ID NO: 3731 - DNA, 170 bp, Artificial sequence
  Gata3.34_Runx1.81
  crRNA array
cgatttcttggctttatatatcttgtggaaaggacgaaacaccgtaatttctactaagtgtagatctaaactatcccgcaaagattaatttctactaagtgtagataggacgcgtatgggaattttttttttaagcttggcgtggatccgatatcaactagatcttgaga

SEQ ID NO: 3732 - DNA, 170 bp, Artificial sequence
  Gata3.34_Setd2.143
  crRNA array
cgatttcttggctttatatatcttgtggaaaggacgaaacaccgtaatttctactaagtgtagatctaaactatcccgcaaagattaatttctactaagtgtagatgcacaaccacaacagactggttttttaagcttggcgtggatccgatatcaactagatcttgaga

SEQ ID NO: 3733 - DNA, 170 bp, Artificial sequence
  Gata3.34_Setd2.508
  crRNA array
cgatttcttggctttatatatcttgtggaaaggacgaaacaccgtaatttctactaagtgtagatctaaactatcccgcaaagattaatttctactaagtgtagattacgatcccgagcacccgacttttttaagcttggcgtggatccgatatcaactagatcttgaga

SEQ ID NO: 3734 - DNA, 170 bp, Artificial sequence
  Gata3.34_Smad4.3038
  crRNA array
cgatttcttggctttatatatcttgtggaaaggacgaaacaccgtaatttctactaagtgtagatctaaactatcccgcaaagattaatttctactaagtgtagatatctgcggcagtgtcaccggttttttaagcttggcgtggatccgatatcaactagatcttgaga

SEQ ID NO: 3735 - DNA, 170 bp, Artificial sequence
  Gata3.34_Smad4.39
  crRNA array
cgatttcttggctttatatatcttgtggaaaggacgaaacaccgtaatttctactaagtgtagatctaaactatcccgcaaagattaatttctactaagtgtagatagtcaaacgcatactgacaattttttaagcttggcgtggatccgatatcaactagatcttgaga

SEQ ID NO: 3736 - DNA, 170 bp, Artificial sequence
  Gata3.34_Stag2.1409
  crRNA array
cgatttcttggctttatatatcttgtggaaaggacgaaacaccgtaatttctactaagtgtagatctaaactatcccgcaaagattaatttctactaagtgtagatgctaataactgcggaagggcttttttaagcttggcgtggatccgatatcaactagatcttgaga

SEQ ID NO: 3737 - DNA, 170 bp, Artificial sequence
  Gata3.34_Stag2.4401
  crRNA array
cgatttcttggctttatatatcttgtggaaaggacgaaacaccgtaatttctactaagtgtagatctaaactatcccgcaaagattaatttctactaagtgtagattaatcgtccagtggtgtatattttttaagcttggcgtggatccgatatcaactagatcttgaga

SEQ ID NO: 3738 - DNA, 170 bp, Artificial sequence
  Gata3.34_Tbl1xr1.1
  crRNA array
cgatttcttggctttatatatcttgtggaaaggacgaaacaccgtaatttctactaagtgtagatctaaactatcccgcaaagattaatttctactaagtgtagatggatgcgcatactggtgaagttttttaagcttggcgtggatccgatatcaactagatcttgaga

SEQ ID NO: 3739 - DNA, 170 bp, Artificial sequence
  Gata3.34_Tbl1xr1.83
  crRNA array
cgatttcttggctttatatatcttgtggaaaggacgaaacaccgtaatttctactaagtgtagatctaaactatcccgcaaagattaatttctactaagtgtagatatggtcgacccatcgagtctttttttaagcttggcgtggatccgatatcaactagatcttgaga

SEQ ID NO: 3740 - DNA, 170 bp, Artificial sequence
  Gata3.34_Tgfbr2.290
  crRNA array
cgatttcttggctttatatatcttgtggaaaggacgaaacaccgtaatttctactaagtgtagatctaaactatcccgcaaagattaatttctactaagtgtagatcctctcggcgcccgggtaaattttttaagcttggcgtggatccgatatcaactagatcttgaga

SEQ ID NO: 3741 - DNA, 170 bp, Artificial sequence
  Gata3.34_Tgfbr2.292
  crRNA array
cgatttcttggctttatatatcttgtggaaaggacgaaacaccgtaatttctactaagtgtagatctaaactatcccgcaaagattaatttctactaagtgtagatcccgggcgccgagagggaaattttttaagcttggcgtggatccgatatcaactagatcttgaga

SEQ ID NO: 3742 - DNA, 170 bp, Artificial sequence
  Gata3.34_Trp53.4
  crRNA array
cgatttcttggctttatatatcttgtggaaaggacgaaacaccgtaatttctactaagtgtagatctaaactatcccgcaaagattaatttctactaagtgtagatccctgaactgcccccagggattttttaagcttggcgtggatccgatatcaactagatcttgaga

SEQ ID NO: 3743 - DNA, 170 bp, Artificial sequence
  Gata3.34_Trp53.528
  crRNA array
cgatttcttggctttatatatcttgtggaaaggacgaaacaccgtaatttctactaagtgtagatctaaactatcccgcaaagattaatttctactaagtgtagatgctgggccagcagagacctgttttttaagcttggcgtggatccgatatcaactagatcttgaga

SEQ ID NO: 3744 - DNA, 170 bp, Artificial sequence
  Gata3.34_Vhl.1
  crRNA array
cgatttcttggctttatatatcttgtggaaaggacgaaacaccgtaatttctactaagtgtagatctaaactatcccgcaaagattaatttctactaagtgtagatagggctcccggcggccatttttttttaagcttggcgtggatccgatatcaactagatcttgaga

SEQ ID NO: 3745 - DNA, 170 bp, Artificial sequence
  Gata3.34_Vhl.151
  crRNA array
cgatttcttggctttatatatcttgtggaaaggacgaaacaccgtaatttctactaagtgtagatctaaactatcccgcaaagattaatttctactaagtgtagattagagcactcacccgagggattttttaagcttggcgtggatccgatatcaactagatcttgaga

SEQ ID NO: 3746 - DNA, 170 bp, Artificial sequence
  Gata3.34_Zc3h13.1387
  crRNA array
cgatttcttggctttatatatcttgtggaaaggacgaaacaccgtaatttctactaagtgtagatctaaactatcccgcaaagattaatttctactaagtgtagatgtgacgccggtcatgtgactttttttaagcttggcgtggatccgatatcaactagatcttgaga

SEQ ID NO: 3747 - DNA, 170 bp, Artificial sequence
  Gata3.34_Zc3h13.1777
  crRNA array
cgatttcttggctttatatatcttgtggaaaggacgaaacaccgtaatttctactaagtgtagatctaaactatcccgcaaagattaatttctactaagtgtagatgatgctgccagtgtagcggcttttttaagcttggcgtggatccgatatcaactagatcttgaga

SEQ ID NO: 3748 - DNA, 170 bp, Artificial sequence
  Gata3.47_Acvr2a.155
  crRNA array
cgatttcttggctttatatatcttgtggaaaggacgaaacaccgtaatttctactaagtgtagatcgtagtaggacgggacgtggtaatttctactaagtgtagatggacctggctaatcaagtatttttttaagcttggcgtggatccgatatcaactagatcttgaga

SEQ ID NO: 3749 - DNA, 170 bp, Artificial sequence
  Gata3.47_Acvr2a.70
  crRNA array
cgatttcttggctttatatatcttgtggaaaggacgaaacaccgtaatttctactaagtgtagatcgtagtaggacgggacgtggtaatttctactaagtgtagatcccgaggcgccggagaagccttttttaagcttggcgtggatccgatatcaactagatcttgaga

SEQ ID NO: 3750 - DNA, 170 bp, Artificial sequence
  Gata3.47_Apc.21
  crRNA array
cgatttcttggctttatatatcttgtggaaaggacgaaacaccgtaatttctactaagtgtagatcgtagtaggacgggacgtggtaatttctactaagtgtagatgtgatccacacgtgtagctgttttttaagcttggcgtggatccgatatcaactagatcttgaga

SEQ ID NO: 3751 - DNA, 170 bp, Artificial sequence
  Gata3.47_Apc.867
  crRNA array
cgatttcttggctttatatatcttgtggaaaggacgaaacaccgtaatttctactaagtgtagatcgtagtaggacgggacgtggtaatttctactaagtgtagatcagtcccaggcggcggaagcttttttaagcttggcgtggatccgatatcaactagatcttgaga

SEQ ID NO: 3752 - DNA, 170 bp, Artificial sequence
  Gata3.47_Arid1a.2
  crRNA array
cgatttcttggctttatatatcttgtggaaaggacgaaacaccgtaatttctactaagtgtagatcgtagtaggacgggacgtggtaatttctactaagtgtagatcccgcgcccccgtcctggggttttttaagcttggcgtggatccgatatcaactagatcttgaga

SEQ ID NO: 3753 - DNA, 170 bp, Artificial sequence
  Gata3.47_Arid1a.5
  crRNA array
cgatttcttggctttatatatcttgtggaaaggacgaaacaccgtaatttctactaagtgtagatcgtagtaggacgggacgtggtaatttctactaagtgtagatcccgcgctcggccgctgccgttttttaagcttggcgtggatccgatatcaactagatcttgaga

SEQ ID NO: 3754 - DNA, 170 bp, Artificial sequence
  Gata3.47_Arid2.166
  crRNA array
cgatttcttggctttatatatcttgtggaaaggacgaaacaccgtaatttctactaagtgtagatcgtagtaggacgggacgtggtaatttctactaagtgtagataaccgcgatctgggttttttttttttaagcttggcgtggatccgatatcaactagatcttgaga

SEQ ID NO: 3755 - DNA, 170 bp, Artificial sequence
  Gata3.47_Arid2.172
  crRNA array
cgatttcttggctttatatatcttgtggaaaggacgaaacaccgtaatttctactaagtgtagatcgtagtaggacgggacgtggtaatttctactaagtgtagatctggacgagctgcggcagttttttttaagcttggcgtggatccgatatcaactagatcttgaga

SEQ ID NO: 3756 - DNA, 170 bp, Artificial sequence
  Gata3.47_Atm.120
  crRNA array
cgatttcttggctttatatatcttgtggaaaggacgaaacaccgtaatttctactaagtgtagatcgtagtaggacgggacgtggtaatttctactaagtgtagatgacaggtagtcggcagctaattttttaagcttggcgtggatccgatatcaactagatcttgaga

SEQ ID NO: 3757 - DNA, 170 bp, Artificial sequence
  Gata3.47_Atm.997
  crRNA array
cgatttcttggctttatatatcttgtggaaaggacgaaacaccgtaatttctactaagtgtagatcgtagtaggacgggacgtggtaatttctactaagtgtagatgagaaagtctccgaatcgttttttttaagcttggcgtggatccgatatcaactagatcttgaga

SEQ ID NO: 3758 - DNA, 170 bp, Artificial sequence
  Gata3.47_Atrx.249
  crRNA array
cgatttcttggctttatatatcttgtggaaaggacgaaacaccgtaatttctactaagtgtagatcgtagtaggacgggacgtggtaatttctactaagtgtagattagccagtcgctcatatctcttttttaagcttggcgtggatccgatatcaactagatcttgaga

SEQ ID NO: 3759 - DNA, 170 bp, Artificial sequence
  Gata3.47_Atrx.251
  crRNA array
cgatttcttggctttatatatcttgtggaaaggacgaaacaccgtaatttctactaagtgtagatcgtagtaggacgggacgtggtaatttctactaagtgtagatgccagtcgctcatatctctgttttttaagcttggcgtggatccgatatcaactagatcttgaga

SEQ ID NO: 3760 - DNA, 170 bp, Artificial sequence
  Gata3.47_Bcor.203
  crRNA array
cgatttcttggctttatatatcttgtggaaaggacgaaacaccgtaatttctactaagtgtagatcgtagtaggacgggacgtggtaatttctactaagtgtagatccccggagcggagtccaggcttttttaagcttggcgtggatccgatatcaactagatcttgaga

SEQ ID NO: 3761 - DNA, 170 bp, Artificial sequence
  Gata3.47_Bcor.475
  crRNA array
cgatttcttggctttatatatcttgtggaaaggacgaaacaccgtaatttctactaagtgtagatcgtagtaggacgggacgtggtaatttctactaagtgtagattgcaacccctctgtatgggattttttaagcttggcgtggatccgatatcaactagatcttgaga

SEQ ID NO: 3762 - DNA, 170 bp, Artificial sequence
  Gata3.47_Brca1.112
  crRNA array
cgatttcttggctttatatatcttgtggaaaggacgaaacaccgtaatttctactaagtgtagatcgtagtaggacgggacgtggtaatttctactaagtgtagatctagacgctctgtggagactttttttaagcttggcgtggatccgatatcaactagatcttgaga

SEQ ID NO: 3763 - DNA, 170 bp, Artificial sequence
  Gata3.47_Brca1.53
  crRNA array
cgatttcttggctttatatatcttgtggaaaggacgaaacaccgtaatttctactaagtgtagatcgtagtaggacgggacgtggtaatttctactaagtgtagataatgaggaggcgtcgatcatttttttaagcttggcgtggatccgatatcaactagatcttgaga

SEQ ID NO: 3764 - DNA, 170 bp, Artificial sequence
  Gata3.47_Casp8.45
  crRNA array
cgatttcttggctttatatatcttgtggaaaggacgaaacaccgtaatttctactaagtgtagatcgtagtaggacgggacgtggtaatttctactaagtgtagatctaccgagatcctgtgaatgttttttaagcttggcgtggatccgatatcaactagatcttgaga

SEQ ID NO: 3765 - DNA, 170 bp, Artificial sequence
  Gata3.47_Casp8.54
  crRNA array
cgatttcttggctttatatatcttgtggaaaggacgaaacaccgtaatttctactaagtgtagatcgtagtaggacgggacgtggtaatttctactaagtgtagatcagtgcagtcgtcgtaagatttttttaagcttggcgtggatccgatatcaactagatcttgaga

SEQ ID NO: 3766 - DNA, 170 bp, Artificial sequence
  Gata3.47_Cbwd1.84
  crRNA array
cgatttcttggctttatatatcttgtggaaaggacgaaacaccgtaatttctactaagtgtagatcgtagtaggacgggacgtggtaatttctactaagtgtagatcacagcaggtaacatgccgcttttttaagcttggcgtggatccgatatcaactagatcttgaga

SEQ ID NO: 3767 - DNA, 170 bp, Artificial sequence
  Gata3.47_Cbwd1.85
  crRNA array
cgatttcttggctttatatatcttgtggaaaggacgaaacaccgtaatttctactaagtgtagatcgtagtaggacgggacgtggtaatttctactaagtgtagatacagcaggtaacatgccgccttttttaagcttggcgtggatccgatatcaactagatcttgaga

SEQ ID NO: 3768 - DNA, 170 bp, Artificial sequence
  Gata3.47_Cdh1.387
  crRNA array
cgatttcttggctttatatatcttgtggaaaggacgaaacaccgtaatttctactaagtgtagatcgtagtaggacgggacgtggtaatttctactaagtgtagatctcggcgtctgccgggtccgttttttaagcttggcgtggatccgatatcaactagatcttgaga

SEQ ID NO: 3769 - DNA, 170 bp, Artificial sequence
  Gata3.47_Cdh1.58
  crRNA array
cgatttcttggctttatatatcttgtggaaaggacgaaacaccgtaatttctactaagtgtagatcgtagtaggacgggacgtggtaatttctactaagtgtagatctcgtccgcgcccgggactcttttttaagcttggcgtggatccgatatcaactagatcttgaga

SEQ ID NO: 3770 - DNA, 170 bp, Artificial sequence
  Gata3.47_Cdkn2a.647
  crRNA array
cgatttcttggctttatatatcttgtggaaaggacgaaacaccgtaatttctactaagtgtagatcgtagtaggacgggacgtggtaatttctactaagtgtagatgcaatcacgggagggagcagttttttaagcttggcgtggatccgatatcaactagatcttgaga

SEQ ID NO: 3771 - DNA, 170 bp, Artificial sequence
  Gata3.47_Cdkn2a.648
  crRNA array
cgatttcttggctttatatatcttgtggaaaggacgaaacaccgtaatttctactaagtgtagatcgtagtaggacgggacgtggtaatttctactaagtgtagatcaatcacgggagggagcagattttttaagcttggcgtggatccgatatcaactagatcttgaga

SEQ ID NO: 3772 - DNA, 170 bp, Artificial sequence
  Gata3.47_Cic.162
  crRNA array
cgatttcttggctttatatatcttgtggaaaggacgaaacaccgtaatttctactaagtgtagatcgtagtaggacgggacgtggtaatttctactaagtgtagatcgcaggcgcgcccggcggagttttttaagcttggcgtggatccgatatcaactagatcttgaga

SEQ ID NO: 3773 - DNA, 170 bp, Artificial sequence
  Gata3.47_Cic.164
  crRNA array
cgatttcttggctttatatatcttgtggaaaggacgaaacaccgtaatttctactaagtgtagatcgtagtaggacgggacgtggtaatttctactaagtgtagatcgggccctgggccggcggctttttttaagcttggcgtggatccgatatcaactagatcttgaga

SEQ ID NO: 3774 - DNA, 170 bp, Artificial sequence
  Gata3.47_Ctcf.229
  crRNA array
cgatttcttggctttatatatcttgtggaaaggacgaaacaccgtaatttctactaagtgtagatcgtagtaggacgggacgtggtaatttctactaagtgtagatggctggtggctgatagtctgttttttaagcttggcgtggatccgatatcaactagatcttgaga

SEQ ID NO: 3775 - DNA, 170 bp, Artificial sequence
  Gata3.47_Ctcf.809
  crRNA array
cgatttcttggctttatatatcttgtggaaaggacgaaacaccgtaatttctactaagtgtagatcgtagtaggacgggacgtggtaatttctactaagtgtagataagcgctatcatgatcccaattttttaagcttggcgtggatccgatatcaactagatcttgaga

SEQ ID NO: 3776 - DNA, 170 bp, Artificial sequence
  Gata3.47_Elf3.826
  crRNA array
cgatttcttggctttatatatcttgtggaaaggacgaaacaccgtaatttctactaagtgtagatcgtagtaggacgggacgtggtaatttctactaagtgtagattccgagacatcctaatccacttttttaagcttggcgtggatccgatatcaactagatcttgaga

SEQ ID NO: 3777 - DNA, 170 bp, Artificial sequence
  Gata3.47_Elf3.983
  crRNA array
cgatttcttggctttatatatcttgtggaaaggacgaaacaccgtaatttctactaagtgtagatcgtagtaggacgggacgtggtaatttctactaagtgtagattaggccccctaactggaccattttttaagcttggcgtggatccgatatcaactagatcttgaga

SEQ ID NO: 3778 - DNA, 170 bp, Artificial sequence
  Gata3.47_Ep300.310
  crRNA array
cgatttcttggctttatatatcttgtggaaaggacgaaacaccgtaatttctactaagtgtagatcgtagtaggacgggacgtggtaatttctactaagtgtagatatggtacgacagtgaggaagttttttaagcttggcgtggatccgatatcaactagatcttgaga

SEQ ID NO: 3779 - DNA, 170 bp, Artificial sequence
  Gata3.47_Ep300.587
  crRNA array
cgatttcttggctttatatatcttgtggaaaggacgaaacaccgtaatttctactaagtgtagatcgtagtaggacgggacgtggtaatttctactaagtgtagatcgccccggggcccccaaccattttttaagcttggcgtggatccgatatcaactagatcttgaga

SEQ ID NO: 3780 - DNA, 170 bp, Artificial sequence
  Gata3.47_Epha2.126
  crRNA array
cgatttcttggctttatatatcttgtggaaaggacgaaacaccgtaatttctactaagtgtagatcgtagtaggacgggacgtggtaatttctactaagtgtagatcctgtgccgccgcggccgccttttttaagcttggcgtggatccgatatcaactagatcttgaga

SEQ ID NO: 3781 - DNA, 170 bp, Artificial sequence
  Gata3.47_Epha2.5
  crRNA array
cgatttcttggctttatatatcttgtggaaaggacgaaacaccgtaatttctactaagtgtagatcgtagtaggacgggacgtggtaatttctactaagtgtagatcatgagctggcgccacccggttttttaagcttggcgtggatccgatatcaactagatcttgaga

SEQ ID NO: 3782 - DNA, 170 bp, Artificial sequence
  Gata3.47_Fat1.105
  crRNA array
cgatttcttggctttatatatcttgtggaaaggacgaaacaccgtaatttctactaagtgtagatcgtagtaggacgggacgtggtaatttctactaagtgtagataactcgaggtgacaacaagtttttttaagcttggcgtggatccgatatcaactagatcttgaga

SEQ ID NO: 3783 - DNA, 170 bp, Artificial sequence
  Gata3.47_Fat1.122
  crRNA array
cgatttcttggctttatatatcttgtggaaaggacgaaacaccgtaatttctactaagtgtagatcgtagtaggacgggacgtggtaatttctactaagtgtagatccatcgacatggaaacgggattttttaagcttggcgtggatccgatatcaactagatcttgaga

SEQ ID NO: 3784 - DNA, 170 bp, Artificial sequence
  Gata3.47_Fbxw7.21
  crRNA array
cgatttcttggctttatatatcttgtggaaaggacgaaacaccgtaatttctactaagtgtagatcgtagtaggacgggacgtggtaatttctactaagtgtagattaatgtgccgtagaaacccattttttaagcttggcgtggatccgatatcaactagatcttgaga

SEQ ID NO: 3785 - DNA, 170 bp, Artificial sequence
  Gata3.47_Fbxw7.23
  crRNA array
cgatttcttggctttatatatcttgtggaaaggacgaaacaccgtaatttctactaagtgtagatcgtagtaggacgggacgtggtaatttctactaagtgtagatatgtgccgtagaaacccatattttttaagcttggcgtggatccgatatcaactagatcttgaga

SEQ ID NO: 3786 - DNA, 170 bp, Artificial sequence
  Gata3.47_H2-Q2.1
  crRNA array
cgatttcttggctttatatatcttgtggaaaggacgaaacaccgtaatttctactaagtgtagatcgtagtaggacgggacgtggtaatttctactaagtgtagatagggcggccaccaacagcagttttttaagcttggcgtggatccgatatcaactagatcttgaga

SEQ ID NO: 3787 - DNA, 170 bp, Artificial sequence
  Gata3.47_H2-Q2.2
  crRNA array
cgatttcttggctttatatatcttgtggaaaggacgaaacaccgtaatttctactaagtgtagatcgtagtaggacgggacgtggtaatttctactaagtgtagattaacctgcgcccgctgctgattttttaagcttggcgtggatccgatatcaactagatcttgaga

SEQ ID NO: 3788 - DNA, 170 bp, Artificial sequence
  Gata3.47_Kdm5c.1878
  crRNA array
cgatttcttggctttatatatcttgtggaaaggacgaaacaccgtaatttctactaagtgtagatcgtagtaggacgggacgtggtaatttctactaagtgtagatagagcacggcacccgcccccttttttaagcttggcgtggatccgatatcaactagatcttgaga

SEQ ID NO: 3789 - DNA, 170 bp, Artificial sequence
  Gata3.47_Kdm5c.1879
  crRNA array
cgatttcttggctttatatatcttgtggaaaggacgaaacaccgtaatttctactaagtgtagatcgtagtaggacgggacgtggtaatttctactaagtgtagatgagcacggcacccgccccccttttttaagcttggcgtggatccgatatcaactagatcttgaga

SEQ ID NO: 3790 - DNA, 170 bp, Artificial sequence
  Gata3.47_Kdm6a.56
  crRNA array
cgatttcttggctttatatatcttgtggaaaggacgaaacaccgtaatttctactaagtgtagatcgtagtaggacgggacgtggtaatttctactaagtgtagattcgctgccgcctctcgcggcttttttaagcttggcgtggatccgatatcaactagatcttgaga

SEQ ID NO: 3791 - DNA, 170 bp, Artificial sequence
  Gata3.47_Kdm6a.57
  crRNA array
cgatttcttggctttatatatcttgtggaaaggacgaaacaccgtaatttctactaagtgtagatcgtagtaggacgggacgtggtaatttctactaagtgtagatcgctgccgcctctcgcggcattttttaagcttggcgtggatccgatatcaactagatcttgaga

SEQ ID NO: 3792 - DNA, 170 bp, Artificial sequence
  Gata3.47_Kmt2b.265
  crRNA array
cgatttcttggctttatatatcttgtggaaaggacgaaacaccgtaatttctactaagtgtagatcgtagtaggacgggacgtggtaatttctactaagtgtagatccccaagtgaagcccacctgttttttaagcttggcgtggatccgatatcaactagatcttgaga

SEQ ID NO: 3793 - DNA, 170 bp, Artificial sequence
  Gata3.47_Kmt2b.298
  crRNA array
cgatttcttggctttatatatcttgtggaaaggacgaaacaccgtaatttctactaagtgtagatcgtagtaggacgggacgtggtaatttctactaagtgtagattccggcagggaccggctggcttttttaagcttggcgtggatccgatatcaactagatcttgaga

SEQ ID NO: 3794 - DNA, 170 bp, Artificial sequence
  Gata3.47_Kmt2c.1962
  crRNA array
cgatttcttggctttatatatcttgtggaaaggacgaaacaccgtaatttctactaagtgtagatcgtagtaggacgggacgtggtaatttctactaagtgtagatgtgacgatctgtgccacaagttttttaagcttggcgtggatccgatatcaactagatcttgaga

SEQ ID NO: 3795 - DNA, 170 bp, Artificial sequence
  Gata3.47_Kmt2c.2236
  crRNA array
cgatttcttggctttatatatcttgtggaaaggacgaaacaccgtaatttctactaagtgtagatcgtagtaggacgggacgtggtaatttctactaagtgtagatactcgacctccacctccctattttttaagcttggcgtggatccgatatcaactagatcttgaga

SEQ ID NO: 3796 - DNA, 170 bp, Artificial sequence
  Gata3.47_Kmt2d.316
  crRNA array
cgatttcttggctttatatatcttgtggaaaggacgaaacaccgtaatttctactaagtgtagatcgtagtaggacgggacgtggtaatttctactaagtgtagatactccaggccacccaggtggttttttaagcttggcgtggatccgatatcaactagatcttgaga

SEQ ID NO: 3797 - DNA, 170 bp, Artificial sequence
  Gata3.47_Kmt2d.416
  crRNA array
cgatttcttggctttatatatcttgtggaaaggacgaaacaccgtaatttctactaagtgtagatcgtagtaggacgggacgtggtaatttctactaagtgtagattaaacccccgggggaagggtttttttaagcttggcgtggatccgatatcaactagatcttgaga

SEQ ID NO: 3798 - DNA, 170 bp, Artificial sequence
  Gata3.47_Map2k4.119
  crRNA array
cgatttcttggctttatatatcttgtggaaaggacgaaacaccgtaatttctactaagtgtagatcgtagtaggacgggacgtggtaatttctactaagtgtagattgctgtgtgggcggccacatttttttaagcttggcgtggatccgatatcaactagatcttgaga

SEQ ID NO: 3799 - DNA, 170 bp, Artificial sequence
  Gata3.47_Map2k4.1261
  crRNA array
cgatttcttggctttatatatcttgtggaaaggacgaaacaccgtaatttctactaagtgtagatcgtagtaggacgggacgtggtaatttctactaagtgtagatgatgtagtaatgcggagtagttttttaagcttggcgtggatccgatatcaactagatcttgaga

SEQ ID NO: 3800 - DNA, 170 bp, Artificial sequence
  Gata3.47_Map3k1.235
  crRNA array
cgatttcttggctttatatatcttgtggaaaggacgaaacaccgtaatttctactaagtgtagatcgtagtaggacgggacgtggtaatttctactaagtgtagataaaacgctactgatcgatcgttttttaagcttggcgtggatccgatatcaactagatcttgaga

SEQ ID NO: 3801 - DNA, 170 bp, Artificial sequence
  Gata3.47_Map3k1.3838
  crRNA array
cgatttcttggctttatatatcttgtggaaaggacgaaacaccgtaatttctactaagtgtagatcgtagtaggacgggacgtggtaatttctactaagtgtagatccaacaacagggccccactattttttaagcttggcgtggatccgatatcaactagatcttgaga

SEQ ID NO: 3802 - DNA, 170 bp, Artificial sequence
  Gata3.47_Mga.1655
  crRNA array
cgatttcttggctttatatatcttgtggaaaggacgaaacaccgtaatttctactaagtgtagatcgtagtaggacgggacgtggtaatttctactaagtgtagatcgagaagtggagagcatattttttttaagcttggcgtggatccgatatcaactagatcttgaga

SEQ ID NO: 3803 - DNA, 170 bp, Artificial sequence
  Gata3.47_Mga.93
  crRNA array
cgatttcttggctttatatatcttgtggaaaggacgaaacaccgtaatttctactaagtgtagatcgtagtaggacgggacgtggtaatttctactaagtgtagatgagaaggctccccataatgtttttttaagcttggcgtggatccgatatcaactagatcttgaga

SEQ ID NO: 3804 - DNA, 170 bp, Artificial sequence
  Gata3.47_Nf1.746
  crRNA array
cgatttcttggctttatatatcttgtggaaaggacgaaacaccgtaatttctactaagtgtagatcgtagtaggacgggacgtggtaatttctactaagtgtagattaagcataatgatgatgccattttttaagcttggcgtggatccgatatcaactagatcttgaga

SEQ ID NO: 3805 - DNA, 170 bp, Artificial sequence
  Gata3.47_Nf1.97
  crRNA array
cgatttcttggctttatatatcttgtggaaaggacgaaacaccgtaatttctactaagtgtagatcgtagtaggacgggacgtggtaatttctactaagtgtagatagcccgctacatgctgatgcttttttaagcttggcgtggatccgatatcaactagatcttgaga

SEQ ID NO: 3806 - DNA, 170 bp, Artificial sequence
  Gata3.47_Nf2.356
  crRNA array
cgatttcttggctttatatatcttgtggaaaggacgaaacaccgtaatttctactaagtgtagatcgtagtaggacgggacgtggtaatttctactaagtgtagatcggagtcatctgatagagatttttttaagcttggcgtggatccgatatcaactagatcttgaga

SEQ ID NO: 3807 - DNA, 170 bp, Artificial sequence
  Gata3.47_Nf2.768
  crRNA array
cgatttcttggctttatatatcttgtggaaaggacgaaacaccgtaatttctactaagtgtagatcgtagtaggacgggacgtggtaatttctactaagtgtagatccgaagccccagtgtccggcttttttaagcttggcgtggatccgatatcaactagatcttgaga

SEQ ID NO: 3808 - DNA, 170 bp, Artificial sequence
  Gata3.47_Notch1.1849
  crRNA array
cgatttcttggctttatatatcttgtggaaaggacgaaacaccgtaatttctactaagtgtagatcgtagtaggacgggacgtggtaatttctactaagtgtagatctggcgggtgggcggcgctgttttttaagcttggcgtggatccgatatcaactagatcttgaga

SEQ ID NO: 3809 - DNA, 170 bp, Artificial sequence
  Gata3.47_Notch1.649
  crRNA array
cgatttcttggctttatatatcttgtggaaaggacgaaacaccgtaatttctactaagtgtagatcgtagtaggacgggacgtggtaatttctactaagtgtagattgggccaacgatgccaggacttttttaagcttggcgtggatccgatatcaactagatcttgaga

SEQ ID NO: 3810 - DNA, 170 bp, Artificial sequence
  Gata3.47_Nsd1.70
  crRNA array
cgatttcttggctttatatatcttgtggaaaggacgaaacaccgtaatttctactaagtgtagatcgtagtaggacgggacgtggtaatttctactaagtgtagatactggtgtggacgatgcagattttttaagcttggcgtggatccgatatcaactagatcttgaga

SEQ ID NO: 3811 - DNA, 170 bp, Artificial sequence
  Gata3.47_Nsd1.90
  crRNA array
cgatttcttggctttatatatcttgtggaaaggacgaaacaccgtaatttctactaagtgtagatcgtagtaggacgggacgtggtaatttctactaagtgtagataggagctaacggcaagaatgttttttaagcttggcgtggatccgatatcaactagatcttgaga

SEQ ID NO: 3812 - DNA, 170 bp, Artificial sequence
  Gata3.47_Pbrm1.1236
  crRNA array
cgatttcttggctttatatatcttgtggaaaggacgaaacaccgtaatttctactaagtgtagatcgtagtaggacgggacgtggtaatttctactaagtgtagatgccgataaaaccaacagccgttttttaagcttggcgtggatccgatatcaactagatcttgaga

SEQ ID NO: 3813 - DNA, 170 bp, Artificial sequence
  Gata3.47_Pbrm1.969
  crRNA array
cgatttcttggctttatatatcttgtggaaaggacgaaacaccgtaatttctactaagtgtagatcgtagtaggacgggacgtggtaatttctactaagtgtagatgagccctaatgaacagctcattttttaagcttggcgtggatccgatatcaactagatcttgaga

SEQ ID NO: 3814 - DNA, 170 bp, Artificial sequence
  Gata3.47_Pik3r1.76
  crRNA array
cgatttcttggctttatatatcttgtggaaaggacgaaacaccgtaatttctactaagtgtagatcgtagtaggacgggacgtggtaatttctactaagtgtagataaaacctatacggcccgcacttttttaagcttggcgtggatccgatatcaactagatcttgaga

SEQ ID NO: 3815 - DNA, 170 bp, Artificial sequence
  Gata3.47_Pik3r1.77
  crRNA array
cgatttcttggctttatatatcttgtggaaaggacgaaacaccgtaatttctactaagtgtagatcgtagtaggacgggacgtggtaatttctactaagtgtagataaacctatacggcccgcactttttttaagcttggcgtggatccgatatcaactagatcttgaga

SEQ ID NO: 3816 - DNA, 170 bp, Artificial sequence
  Gata3.47_Pten.240
  crRNA array
cgatttcttggctttatatatcttgtggaaaggacgaaacaccgtaatttctactaagtgtagatcgtagtaggacgggacgtggtaatttctactaagtgtagattgcatacgctatagctgcttttttttaagcttggcgtggatccgatatcaactagatcttgaga

SEQ ID NO: 3817 - DNA, 170 bp, Artificial sequence
  Gata3.47_Pten.265
  crRNA array
cgatttcttggctttatatatcttgtggaaaggacgaaacaccgtaatttctactaagtgtagatcgtagtaggacgggacgtggtaatttctactaagtgtagataagcgtggtgcgtgacgcacttttttaagcttggcgtggatccgatatcaactagatcttgaga

SEQ ID NO: 3818 - DNA, 170 bp, Artificial sequence
  Gata3.47_Rasa1.1478
  crRNA array
cgatttcttggctttatatatcttgtggaaaggacgaaacaccgtaatttctactaagtgtagatcgtagtaggacgggacgtggtaatttctactaagtgtagatcgataatggtctatgatgtcttttttaagcttggcgtggatccgatatcaactagatcttgaga

SEQ ID NO: 3819 - DNA, 170 bp, Artificial sequence
  Gata3.47_Rasa1.223
  crRNA array
cgatttcttggctttatatatcttgtggaaaggacgaaacaccgtaatttctactaagtgtagatcgtagtaggacgggacgtggtaatttctactaagtgtagattccatggagtatcgtgctcgttttttaagcttggcgtggatccgatatcaactagatcttgaga

SEQ ID NO: 3820 - DNA, 170 bp, Artificial sequence
  Gata3.47_Rb1.211
  crRNA array
cgatttcttggctttatatatcttgtggaaaggacgaaacaccgtaatttctactaagtgtagatcgtagtaggacgggacgtggtaatttctactaagtgtagattctgacatgatcgggtacctttttttaagcttggcgtggatccgatatcaactagatcttgaga

SEQ ID NO: 3821 - DNA, 170 bp, Artificial sequence
  Gata3.47_Rb1.394
  crRNA array
cgatttcttggctttatatatcttgtggaaaggacgaaacaccgtaatttctactaagtgtagatcgtagtaggacgggacgtggtaatttctactaagtgtagatagaaatctcgaagcaggatcttttttaagcttggcgtggatccgatatcaactagatcttgaga

SEQ ID NO: 3822 - DNA, 170 bp, Artificial sequence
  Gata3.47_Rbm10.5
  crRNA array
cgatttcttggctttatatatcttgtggaaaggacgaaacaccgtaatttctactaagtgtagatcgtagtaggacgggacgtggtaatttctactaagtgtagatacgaaacctgaacccacacattttttaagcttggcgtggatccgatatcaactagatcttgaga

SEQ ID NO: 3823 - DNA, 170 bp, Artificial sequence
  Gata3.47_Rbm10.6
  crRNA array
cgatttcttggctttatatatcttgtggaaaggacgaaacaccgtaatttctactaagtgtagatcgtagtaggacgggacgtggtaatttctactaagtgtagatcgaaacctgaacccacacagttttttaagcttggcgtggatccgatatcaactagatcttgaga

SEQ ID NO: 3824 - DNA, 170 bp, Artificial sequence
  Gata3.47_Rnf43.1920
  crRNA array
cgatttcttggctttatatatcttgtggaaaggacgaaacaccgtaatttctactaagtgtagatcgtagtaggacgggacgtggtaatttctactaagtgtagatatccccgtgccgtggactccttttttaagcttggcgtggatccgatatcaactagatcttgaga

SEQ ID NO: 3825 - DNA, 170 bp, Artificial sequence
  Gata3.47_Rnf43.39
  crRNA array
cgatttcttggctttatatatcttgtggaaaggacgaaacaccgtaatttctactaagtgtagatcgtagtaggacgggacgtggtaatttctactaagtgtagatcaaggggatcactctgataattttttaagcttggcgtggatccgatatcaactagatcttgaga

SEQ ID NO: 3826 - DNA, 170 bp, Artificial sequence
  Gata3.47_Runx1.204
  crRNA array
cgatttcttggctttatatatcttgtggaaaggacgaaacaccgtaatttctactaagtgtagatcgtagtaggacgggacgtggtaatttctactaagtgtagattaaataagtccagccgttttttttttaagcttggcgtggatccgatatcaactagatcttgaga

SEQ ID NO: 3827 - DNA, 170 bp, Artificial sequence
  Gata3.47_Runx1.81
  crRNA array
cgatttcttggctttatatatcttgtggaaaggacgaaacaccgtaatttctactaagtgtagatcgtagtaggacgggacgtggtaatttctactaagtgtagataggacgcgtatgggaattttttttttaagcttggcgtggatccgatatcaactagatcttgaga

SEQ ID NO: 3828 - DNA, 170 bp, Artificial sequence
  Gata3.47_Setd2.143
  crRNA array
cgatttcttggctttatatatcttgtggaaaggacgaaacaccgtaatttctactaagtgtagatcgtagtaggacgggacgtggtaatttctactaagtgtagatgcacaaccacaacagactggttttttaagcttggcgtggatccgatatcaactagatcttgaga

SEQ ID NO: 3829 - DNA, 170 bp, Artificial sequence
  Gata3.47_Setd2.508
  crRNA array
cgatttcttggctttatatatcttgtggaaaggacgaaacaccgtaatttctactaagtgtagatcgtagtaggacgggacgtggtaatttctactaagtgtagattacgatcccgagcacccgacttttttaagcttggcgtggatccgatatcaactagatcttgaga

SEQ ID NO: 3830 - DNA, 170 bp, Artificial sequence
  Gata3.47_Smad4.3038
  crRNA array
cgatttcttggctttatatatcttgtggaaaggacgaaacaccgtaatttctactaagtgtagatcgtagtaggacgggacgtggtaatttctactaagtgtagatatctgcggcagtgtcaccggttttttaagcttggcgtggatccgatatcaactagatcttgaga

SEQ ID NO: 3831 - DNA, 170 bp, Artificial sequence
  Gata3.47_Smad4.39
  crRNA array
cgatttcttggctttatatatcttgtggaaaggacgaaacaccgtaatttctactaagtgtagatcgtagtaggacgggacgtggtaatttctactaagtgtagatagtcaaacgcatactgacaattttttaagcttggcgtggatccgatatcaactagatcttgaga

SEQ ID NO: 3832 - DNA, 170 bp, Artificial sequence
  Gata3.47_Stag2.1409
  crRNA array
cgatttcttggctttatatatcttgtggaaaggacgaaacaccgtaatttctactaagtgtagatcgtagtaggacgggacgtggtaatttctactaagtgtagatgctaataactgcggaagggcttttttaagcttggcgtggatccgatatcaactagatcttgaga

SEQ ID NO: 3833 - DNA, 170 bp, Artificial sequence
  Gata3.47_Stag2.4401
  crRNA array
cgatttcttggctttatatatcttgtggaaaggacgaaacaccgtaatttctactaagtgtagatcgtagtaggacgggacgtggtaatttctactaagtgtagattaatcgtccagtggtgtatattttttaagcttggcgtggatccgatatcaactagatcttgaga

SEQ ID NO: 3834 - DNA, 170 bp, Artificial sequence
  Gata3.47_Tbl1xr1.1
  crRNA array
cgatttcttggctttatatatcttgtggaaaggacgaaacaccgtaatttctactaagtgtagatcgtagtaggacgggacgtggtaatttctactaagtgtagatggatgcgcatactggtgaagttttttaagcttggcgtggatccgatatcaactagatcttgaga

SEQ ID NO: 3835 - DNA, 170 bp, Artificial sequence
  Gata3.47_Tbl1xr1.83
  crRNA array
cgatttcttggctttatatatcttgtggaaaggacgaaacaccgtaatttctactaagtgtagatcgtagtaggacgggacgtggtaatttctactaagtgtagatatggtcgacccatcgagtctttttttaagcttggcgtggatccgatatcaactagatcttgaga

SEQ ID NO: 3836 - DNA, 170 bp, Artificial sequence
  Gata3.47_Tgfbr2.290
  crRNA array
cgatttcttggctttatatatcttgtggaaaggacgaaacaccgtaatttctactaagtgtagatcgtagtaggacgggacgtggtaatttctactaagtgtagatcctctcggcgcccgggtaaattttttaagcttggcgtggatccgatatcaactagatcttgaga

SEQ ID NO: 3837 - DNA, 170 bp, Artificial sequence
  Gata3.47_Tgfbr2.292
  crRNA array
cgatttcttggctttatatatcttgtggaaaggacgaaacaccgtaatttctactaagtgtagatcgtagtaggacgggacgtggtaatttctactaagtgtagatcccgggcgccgagagggaaattttttaagcttggcgtggatccgatatcaactagatcttgaga

SEQ ID NO: 3838 - DNA, 170 bp, Artificial sequence
  Gata3.47_Trp53.4
  crRNA array
cgatttcttggctttatatatcttgtggaaaggacgaaacaccgtaatttctactaagtgtagatcgtagtaggacgggacgtggtaatttctactaagtgtagatccctgaactgcccccagggattttttaagcttggcgtggatccgatatcaactagatcttgaga

SEQ ID NO: 3839 - DNA, 170 bp, Artificial sequence
  Gata3.47_Trp53.528
  crRNA array
cgatttcttggctttatatatcttgtggaaaggacgaaacaccgtaatttctactaagtgtagatcgtagtaggacgggacgtggtaatttctactaagtgtagatgctgggccagcagagacctgttttttaagcttggcgtggatccgatatcaactagatcttgaga

SEQ ID NO: 3840 - DNA, 170 bp, Artificial sequence
  Gata3.47_Vhl.1
  crRNA array
cgatttcttggctttatatatcttgtggaaaggacgaaacaccgtaatttctactaagtgtagatcgtagtaggacgggacgtggtaatttctactaagtgtagatagggctcccggcggccatttttttttaagcttggcgtggatccgatatcaactagatcttgaga

SEQ ID NO: 3841 - DNA, 170 bp, Artificial sequence
  Gata3.47_Vhl.151
  crRNA array
cgatttcttggctttatatatcttgtggaaaggacgaaacaccgtaatttctactaagtgtagatcgtagtaggacgggacgtggtaatttctactaagtgtagattagagcactcacccgagggattttttaagcttggcgtggatccgatatcaactagatcttgaga

SEQ ID NO: 3842 - DNA, 170 bp, Artificial sequence
  Gata3.47_Zc3h13.1387
  crRNA array
cgatttcttggctttatatatcttgtggaaaggacgaaacaccgtaatttctactaagtgtagatcgtagtaggacgggacgtggtaatttctactaagtgtagatgtgacgccggtcatgtgactttttttaagcttggcgtggatccgatatcaactagatcttgaga

SEQ ID NO: 3843 - DNA, 170 bp, Artificial sequence
  Gata3.47_Zc3h13.1777
  crRNA array
cgatttcttggctttatatatcttgtggaaaggacgaaacaccgtaatttctactaagtgtagatcgtagtaggacgggacgtggtaatttctactaagtgtagatgatgctgccagtgtagcggcttttttaagcttggcgtggatccgatatcaactagatcttgaga

SEQ ID NO: 3844 - DNA, 170 bp, Artificial sequence
  H2-Q2.1_Acvr2a.155
  crRNA array
cgatttcttggctttatatatcttgtggaaaggacgaaacaccgtaatttctactaagtgtagatagggcggccaccaacagcagtaatttctactaagtgtagatggacctggctaatcaagtatttttttaagcttggcgtggatccgatatcaactagatcttgaga

SEQ ID NO: 3845 - DNA, 170 bp, Artificial sequence
  H2-Q2.1_Acvr2a.70
  crRNA array
cgatttcttggctttatatatcttgtggaaaggacgaaacaccgtaatttctactaagtgtagatagggcggccaccaacagcagtaatttctactaagtgtagatcccgaggcgccggagaagccttttttaagcttggcgtggatccgatatcaactagatcttgaga

SEQ ID NO: 3846 - DNA, 170 bp, Artificial sequence
  H2-Q2.1_Apc.21
  crRNA array
cgatttcttggctttatatatcttgtggaaaggacgaaacaccgtaatttctactaagtgtagatagggcggccaccaacagcagtaatttctactaagtgtagatgtgatccacacgtgtagctgttttttaagcttggcgtggatccgatatcaactagatcttgaga

SEQ ID NO: 3847 - DNA, 170 bp, Artificial sequence
  H2-Q2.1_Apc.867
  crRNA array
cgatttcttggctttatatatcttgtggaaaggacgaaacaccgtaatttctactaagtgtagatagggcggccaccaacagcagtaatttctactaagtgtagatcagtcccaggcggcggaagcttttttaagcttggcgtggatccgatatcaactagatcttgaga

SEQ ID NO: 3848 - DNA, 170 bp, Artificial sequence
  H2-Q2.1_Arid1a.2
  crRNA array
cgatttcttggctttatatatcttgtggaaaggacgaaacaccgtaatttctactaagtgtagatagggcggccaccaacagcagtaatttctactaagtgtagatcccgcgcccccgtcctggggttttttaagcttggcgtggatccgatatcaactagatcttgaga

SEQ ID NO: 3849 - DNA, 170 bp, Artificial sequence
  H2-Q2.1_Arid1a.5
  crRNA array
cgatttcttggctttatatatcttgtggaaaggacgaaacaccgtaatttctactaagtgtagatagggcggccaccaacagcagtaatttctactaagtgtagatcccgcgctcggccgctgccgttttttaagcttggcgtggatccgatatcaactagatcttgaga

SEQ ID NO: 3850 - DNA, 170 bp, Artificial sequence
  H2-Q2.1_Arid2.166
  crRNA array
cgatttcttggctttatatatcttgtggaaaggacgaaacaccgtaatttctactaagtgtagatagggcggccaccaacagcagtaatttctactaagtgtagataaccgcgatctgggttttttttttttaagcttggcgtggatccgatatcaactagatcttgaga

SEQ ID NO: 3851 - DNA, 170 bp, Artificial sequence
  H2-Q2.1_Arid2.172
  crRNA array
cgatttcttggctttatatatcttgtggaaaggacgaaacaccgtaatttctactaagtgtagatagggcggccaccaacagcagtaatttctactaagtgtagatctggacgagctgcggcagttttttttaagcttggcgtggatccgatatcaactagatcttgaga

SEQ ID NO: 3852 - DNA, 170 bp, Artificial sequence
  H2-Q2.1_Atm.120
  crRNA array
cgatttcttggctttatatatcttgtggaaaggacgaaacaccgtaatttctactaagtgtagatagggcggccaccaacagcagtaatttctactaagtgtagatgacaggtagtcggcagctaattttttaagcttggcgtggatccgatatcaactagatcttgaga

SEQ ID NO: 3853 - DNA, 170 bp, Artificial sequence
  H2-Q2.1_Atm.997
  crRNA array
cgatttcttggctttatatatcttgtggaaaggacgaaacaccgtaatttctactaagtgtagatagggcggccaccaacagcagtaatttctactaagtgtagatgagaaagtctccgaatcgttttttttaagcttggcgtggatccgatatcaactagatcttgaga

SEQ ID NO: 3854 - DNA, 170 bp, Artificial sequence
  H2-Q2.1_Atrx.249
  crRNA array
cgatttcttggctttatatatcttgtggaaaggacgaaacaccgtaatttctactaagtgtagatagggcggccaccaacagcagtaatttctactaagtgtagattagccagtcgctcatatctcttttttaagcttggcgtggatccgatatcaactagatcttgaga

SEQ ID NO: 3855 - DNA, 170 bp, Artificial sequence
  H2-Q2.1_Atrx.251
  crRNA array
cgatttcttggctttatatatcttgtggaaaggacgaaacaccgtaatttctactaagtgtagatagggcggccaccaacagcagtaatttctactaagtgtagatgccagtcgctcatatctctgttttttaagcttggcgtggatccgatatcaactagatcttgaga

SEQ ID NO: 3856 - DNA, 170 bp, Artificial sequence
  H2-Q2.1_Bcor.203
  crRNA array
cgatttcttggctttatatatcttgtggaaaggacgaaacaccgtaatttctactaagtgtagatagggcggccaccaacagcagtaatttctactaagtgtagatccccggagcggagtccaggcttttttaagcttggcgtggatccgatatcaactagatcttgaga

SEQ ID NO: 3857 - DNA, 170 bp, Artificial sequence
  H2-Q2.1_Bcor.475
  crRNA array
cgatttcttggctttatatatcttgtggaaaggacgaaacaccgtaatttctactaagtgtagatagggcggccaccaacagcagtaatttctactaagtgtagattgcaacccctctgtatgggattttttaagcttggcgtggatccgatatcaactagatcttgaga

SEQ ID NO: 3858 - DNA, 170 bp, Artificial sequence
  H2-Q2.1_Brca1.112
  crRNA array
cgatttcttggctttatatatcttgtggaaaggacgaaacaccgtaatttctactaagtgtagatagggcggccaccaacagcagtaatttctactaagtgtagatctagacgctctgtggagactttttttaagcttggcgtggatccgatatcaactagatcttgaga

SEQ ID NO: 3859 - DNA, 170 bp, Artificial sequence
  H2-Q2.1_Brca1.53
  crRNA array
cgatttcttggctttatatatcttgtggaaaggacgaaacaccgtaatttctactaagtgtagatagggcggccaccaacagcagtaatttctactaagtgtagataatgaggaggcgtcgatcatttttttaagcttggcgtggatccgatatcaactagatcttgaga

SEQ ID NO: 3860 - DNA, 170 bp, Artificial sequence
  H2-Q2.1_Casp8.45
  crRNA array
cgatttcttggctttatatatcttgtggaaaggacgaaacaccgtaatttctactaagtgtagatagggcggccaccaacagcagtaatttctactaagtgtagatctaccgagatcctgtgaatgttttttaagcttggcgtggatccgatatcaactagatcttgaga

SEQ ID NO: 3861 - DNA, 170 bp, Artificial sequence
  H2-Q2.1_Casp8.54
  crRNA array
cgatttcttggctttatatatcttgtggaaaggacgaaacaccgtaatttctactaagtgtagatagggcggccaccaacagcagtaatttctactaagtgtagatcagtgcagtcgtcgtaagatttttttaagcttggcgtggatccgatatcaactagatcttgaga

SEQ ID NO: 3862 - DNA, 170 bp, Artificial sequence
  H2-Q2.1_Cbwd1.84
  crRNA array
cgatttcttggctttatatatcttgtggaaaggacgaaacaccgtaatttctactaagtgtagatagggcggccaccaacagcagtaatttctactaagtgtagatcacagcaggtaacatgccgcttttttaagcttggcgtggatccgatatcaactagatcttgaga

SEQ ID NO: 3863 - DNA, 170 bp, Artificial sequence
  H2-Q2.1_Cbwd1.85
  crRNA array
cgatttcttggctttatatatcttgtggaaaggacgaaacaccgtaatttctactaagtgtagatagggcggccaccaacagcagtaatttctactaagtgtagatacagcaggtaacatgccgccttttttaagcttggcgtggatccgatatcaactagatcttgaga

SEQ ID NO: 3864 - DNA, 170 bp, Artificial sequence
  H2-Q2.1_Cdh1.387
  crRNA array
cgatttcttggctttatatatcttgtggaaaggacgaaacaccgtaatttctactaagtgtagatagggcggccaccaacagcagtaatttctactaagtgtagatctcggcgtctgccgggtccgttttttaagcttggcgtggatccgatatcaactagatcttgaga

SEQ ID NO: 3865 - DNA, 170 bp, Artificial sequence
  H2-Q2.1_Cdh1.58
  crRNA array
cgatttcttggctttatatatcttgtggaaaggacgaaacaccgtaatttctactaagtgtagatagggcggccaccaacagcagtaatttctactaagtgtagatctcgtccgcgcccgggactcttttttaagcttggcgtggatccgatatcaactagatcttgaga

SEQ ID NO: 3866 - DNA, 170 bp, Artificial sequence
  H2-Q2.1_Cdkn2a.647
  crRNA array
cgatttcttggctttatatatcttgtggaaaggacgaaacaccgtaatttctactaagtgtagatagggcggccaccaacagcagtaatttctactaagtgtagatgcaatcacgggagggagcagttttttaagcttggcgtggatccgatatcaactagatcttgaga

SEQ ID NO: 3867 - DNA, 170 bp, Artificial sequence
  H2-Q2.1_Cdkn2a.648
  crRNA array
cgatttcttggctttatatatcttgtggaaaggacgaaacaccgtaatttctactaagtgtagatagggcggccaccaacagcagtaatttctactaagtgtagatcaatcacgggagggagcagattttttaagcttggcgtggatccgatatcaactagatcttgaga

SEQ ID NO: 3868 - DNA, 170 bp, Artificial sequence
  H2-Q2.1_Cic.162
  crRNA array
cgatttcttggctttatatatcttgtggaaaggacgaaacaccgtaatttctactaagtgtagatagggcggccaccaacagcagtaatttctactaagtgtagatcgcaggcgcgcccggcggagttttttaagcttggcgtggatccgatatcaactagatcttgaga

SEQ ID NO: 3869 - DNA, 170 bp, Artificial sequence
  H2-Q2.1_Cic.164
  crRNA array
cgatttcttggctttatatatcttgtggaaaggacgaaacaccgtaatttctactaagtgtagatagggcggccaccaacagcagtaatttctactaagtgtagatcgggccctgggccggcggctttttttaagcttggcgtggatccgatatcaactagatcttgaga

SEQ ID NO: 3870 - DNA, 170 bp, Artificial sequence
  H2-Q2.1_Ctcf.229
  crRNA array
cgatttcttggctttatatatcttgtggaaaggacgaaacaccgtaatttctactaagtgtagatagggcggccaccaacagcagtaatttctactaagtgtagatggctggtggctgatagtctgttttttaagcttggcgtggatccgatatcaactagatcttgaga

SEQ ID NO: 3871 - DNA, 170 bp, Artificial sequence
  H2-Q2.1_Ctcf.809
  crRNA array
cgatttcttggctttatatatcttgtggaaaggacgaaacaccgtaatttctactaagtgtagatagggcggccaccaacagcagtaatttctactaagtgtagataagcgctatcatgatcccaattttttaagcttggcgtggatccgatatcaactagatcttgaga

SEQ ID NO: 3872 - DNA, 170 bp, Artificial sequence
  H2-Q2.1_Elf3.826
  crRNA array
cgatttcttggctttatatatcttgtggaaaggacgaaacaccgtaatttctactaagtgtagatagggcggccaccaacagcagtaatttctactaagtgtagattccgagacatcctaatccacttttttaagcttggcgtggatccgatatcaactagatcttgaga

SEQ ID NO: 3873 - DNA, 170 bp, Artificial sequence
  H2-Q2.1_Elf3.983
  crRNA array
cgatttcttggctttatatatcttgtggaaaggacgaaacaccgtaatttctactaagtgtagatagggcggccaccaacagcagtaatttctactaagtgtagattaggccccctaactggaccattttttaagcttggcgtggatccgatatcaactagatcttgaga

SEQ ID NO: 3874 - DNA, 170 bp, Artificial sequence
  H2-Q2.1_Ep300.310
  crRNA array
cgatttcttggctttatatatcttgtggaaaggacgaaacaccgtaatttctactaagtgtagatagggcggccaccaacagcagtaatttctactaagtgtagatatggtacgacagtgaggaagttttttaagcttggcgtggatccgatatcaactagatcttgaga

SEQ ID NO: 3875 - DNA, 170 bp, Artificial sequence
  H2-Q2.1_Ep300.587
  crRNA array
cgatttcttggctttatatatcttgtggaaaggacgaaacaccgtaatttctactaagtgtagatagggcggccaccaacagcagtaatttctactaagtgtagatcgccccggggcccccaaccattttttaagcttggcgtggatccgatatcaactagatcttgaga

SEQ ID NO: 3876 - DNA, 170 bp, Artificial sequence
  H2-Q2.1_Epha2.126
  crRNA array
cgatttcttggctttatatatcttgtggaaaggacgaaacaccgtaatttctactaagtgtagatagggcggccaccaacagcagtaatttctactaagtgtagatcctgtgccgccgcggccgccttttttaagcttggcgtggatccgatatcaactagatcttgaga

SEQ ID NO: 3877 - DNA, 170 bp, Artificial sequence
  H2-Q2.1_Epha2.5
  crRNA array
cgatttcttggctttatatatcttgtggaaaggacgaaacaccgtaatttctactaagtgtagatagggcggccaccaacagcagtaatttctactaagtgtagatcatgagctggcgccacccggttttttaagcttggcgtggatccgatatcaactagatcttgaga

SEQ ID NO: 3878 - DNA, 170 bp, Artificial sequence
  H2-Q2.1_Fat1.105
  crRNA array
cgatttcttggctttatatatcttgtggaaaggacgaaacaccgtaatttctactaagtgtagatagggcggccaccaacagcagtaatttctactaagtgtagataactcgaggtgacaacaagtttttttaagcttggcgtggatccgatatcaactagatcttgaga

SEQ ID NO: 3879 - DNA, 170 bp, Artificial sequence
  H2-Q2.1_Fat1.122
  crRNA array
cgatttcttggctttatatatcttgtggaaaggacgaaacaccgtaatttctactaagtgtagatagggcggccaccaacagcagtaatttctactaagtgtagatccatcgacatggaaacgggattttttaagcttggcgtggatccgatatcaactagatcttgaga

SEQ ID NO: 3880 - DNA, 170 bp, Artificial sequence
  H2-Q2.1_Fbxw7.21
  crRNA array
cgatttcttggctttatatatcttgtggaaaggacgaaacaccgtaatttctactaagtgtagatagggcggccaccaacagcagtaatttctactaagtgtagattaatgtgccgtagaaacccattttttaagcttggcgtggatccgatatcaactagatcttgaga

SEQ ID NO: 3881 - DNA, 170 bp, Artificial sequence
  H2-Q2.1_Fbxw7.23
  crRNA array
cgatttcttggctttatatatcttgtggaaaggacgaaacaccgtaatttctactaagtgtagatagggcggccaccaacagcagtaatttctactaagtgtagatatgtgccgtagaaacccatattttttaagcttggcgtggatccgatatcaactagatcttgaga

SEQ ID NO: 3882 - DNA, 170 bp, Artificial sequence
  H2-Q2.1_Gata3.34
  crRNA array
cgatttcttggctttatatatcttgtggaaaggacgaaacaccgtaatttctactaagtgtagatagggcggccaccaacagcagtaatttctactaagtgtagatctaaactatcccgcaaagatttttttaagcttggcgtggatccgatatcaactagatcttgaga

SEQ ID NO: 3883 - DNA, 170 bp, Artificial sequence
  H2-Q2.1_Gata3.47
  crRNA array
cgatttcttggctttatatatcttgtggaaaggacgaaacaccgtaatttctactaagtgtagatagggcggccaccaacagcagtaatttctactaagtgtagatcgtagtaggacgggacgtggttttttaagcttggcgtggatccgatatcaactagatcttgaga

SEQ ID NO: 3884 - DNA, 170 bp, Artificial sequence
  H2-Q2.1_Kdm5c.1878
  crRNA array
cgatttcttggctttatatatcttgtggaaaggacgaaacaccgtaatttctactaagtgtagatagggcggccaccaacagcagtaatttctactaagtgtagatagagcacggcacccgcccccttttttaagcttggcgtggatccgatatcaactagatcttgaga

SEQ ID NO: 3885 - DNA, 170 bp, Artificial sequence
  H2-Q2.1_Kdm5c.1879
  crRNA array
cgatttcttggctttatatatcttgtggaaaggacgaaacaccgtaatttctactaagtgtagatagggcggccaccaacagcagtaatttctactaagtgtagatgagcacggcacccgccccccttttttaagcttggcgtggatccgatatcaactagatcttgaga

SEQ ID NO: 3886 - DNA, 170 bp, Artificial sequence
  H2-Q2.1_Kdm6a.56
  crRNA array
cgatttcttggctttatatatcttgtggaaaggacgaaacaccgtaatttctactaagtgtagatagggcggccaccaacagcagtaatttctactaagtgtagattcgctgccgcctctcgcggcttttttaagcttggcgtggatccgatatcaactagatcttgaga

SEQ ID NO: 3887 - DNA, 170 bp, Artificial sequence
  H2-Q2.1_Kdm6a.57
  crRNA array
cgatttcttggctttatatatcttgtggaaaggacgaaacaccgtaatttctactaagtgtagatagggcggccaccaacagcagtaatttctactaagtgtagatcgctgccgcctctcgcggcattttttaagcttggcgtggatccgatatcaactagatcttgaga

SEQ ID NO: 3888 - DNA, 170 bp, Artificial sequence
  H2-Q2.1_Kmt2b.265
  crRNA array
cgatttcttggctttatatatcttgtggaaaggacgaaacaccgtaatttctactaagtgtagatagggcggccaccaacagcagtaatttctactaagtgtagatccccaagtgaagcccacctgttttttaagcttggcgtggatccgatatcaactagatcttgaga

SEQ ID NO: 3889 - DNA, 170 bp, Artificial sequence
  H2-Q2.1_Kmt2b.298
  crRNA array
cgatttcttggctttatatatcttgtggaaaggacgaaacaccgtaatttctactaagtgtagatagggcggccaccaacagcagtaatttctactaagtgtagattccggcagggaccggctggcttttttaagcttggcgtggatccgatatcaactagatcttgaga

SEQ ID NO: 3890 - DNA, 170 bp, Artificial sequence
  H2-Q2.1_Kmt2c.1962
  crRNA array
cgatttcttggctttatatatcttgtggaaaggacgaaacaccgtaatttctactaagtgtagatagggcggccaccaacagcagtaatttctactaagtgtagatgtgacgatctgtgccacaagttttttaagcttggcgtggatccgatatcaactagatcttgaga

SEQ ID NO: 3891 - DNA, 170 bp, Artificial sequence
  H2-Q2.1_Kmt2c.2236
  crRNA array
cgatttcttggctttatatatcttgtggaaaggacgaaacaccgtaatttctactaagtgtagatagggcggccaccaacagcagtaatttctactaagtgtagatactcgacctccacctccctattttttaagcttggcgtggatccgatatcaactagatcttgaga

SEQ ID NO: 3892 - DNA, 170 bp, Artificial sequence
  H2-Q2.1_Kmt2d.316
  crRNA array
cgatttcttggctttatatatcttgtggaaaggacgaaacaccgtaatttctactaagtgtagatagggcggccaccaacagcagtaatttctactaagtgtagatactccaggccacccaggtggttttttaagcttggcgtggatccgatatcaactagatcttgaga

SEQ ID NO: 3893 - DNA, 170 bp, Artificial sequence
  H2-Q2.1_Kmt2d.416
  crRNA array
cgatttcttggctttatatatcttgtggaaaggacgaaacaccgtaatttctactaagtgtagatagggcggccaccaacagcagtaatttctactaagtgtagattaaacccccgggggaagggtttttttaagcttggcgtggatccgatatcaactagatcttgaga

SEQ ID NO: 3894 - DNA, 170 bp, Artificial sequence
  H2-Q2.1_Map2k4.119
  crRNA array
cgatttcttggctttatatatcttgtggaaaggacgaaacaccgtaatttctactaagtgtagatagggcggccaccaacagcagtaatttctactaagtgtagattgctgtgtgggcggccacatttttttaagcttggcgtggatccgatatcaactagatcttgaga

SEQ ID NO: 3895 - DNA, 170 bp, Artificial sequence
  H2-Q2.1_Map2k4.1261
  crRNA array
cgatttcttggctttatatatcttgtggaaaggacgaaacaccgtaatttctactaagtgtagatagggcggccaccaacagcagtaatttctactaagtgtagatgatgtagtaatgcggagtagttttttaagcttggcgtggatccgatatcaactagatcttgaga

SEQ ID NO: 3896 - DNA, 170 bp, Artificial sequence
  H2-Q2.1_Map3k1.235
  crRNA array
cgatttcttggctttatatatcttgtggaaaggacgaaacaccgtaatttctactaagtgtagatagggcggccaccaacagcagtaatttctactaagtgtagataaaacgctactgatcgatcgttttttaagcttggcgtggatccgatatcaactagatcttgaga

SEQ ID NO: 3897 - DNA, 170 bp, Artificial sequence
  H2-Q2.1_Map3k1.3838
  crRNA array
cgatttcttggctttatatatcttgtggaaaggacgaaacaccgtaatttctactaagtgtagatagggcggccaccaacagcagtaatttctactaagtgtagatccaacaacagggccccactattttttaagcttggcgtggatccgatatcaactagatcttgaga

SEQ ID NO: 3898 - DNA, 170 bp, Artificial sequence
  H2-Q2.1_Mga.1655
  crRNA array
cgatttcttggctttatatatcttgtggaaaggacgaaacaccgtaatttctactaagtgtagatagggcggccaccaacagcagtaatttctactaagtgtagatcgagaagtggagagcatattttttttaagcttggcgtggatccgatatcaactagatcttgaga

SEQ ID NO: 3899 - DNA, 170 bp, Artificial sequence
  H2-Q2.1_Mga.93
  crRNA array
cgatttcttggctttatatatcttgtggaaaggacgaaacaccgtaatttctactaagtgtagatagggcggccaccaacagcagtaatttctactaagtgtagatgagaaggctccccataatgtttttttaagcttggcgtggatccgatatcaactagatcttgaga

SEQ ID NO: 3900 - DNA, 170 bp, Artificial sequence
  H2-Q2.1_Nf1.746
  crRNA array
cgatttcttggctttatatatcttgtggaaaggacgaaacaccgtaatttctactaagtgtagatagggcggccaccaacagcagtaatttctactaagtgtagattaagcataatgatgatgccattttttaagcttggcgtggatccgatatcaactagatcttgaga

SEQ ID NO: 3901 - DNA, 170 bp, Artificial sequence
  H2-Q2.1_Nf1.97
  crRNA array
cgatttcttggctttatatatcttgtggaaaggacgaaacaccgtaatttctactaagtgtagatagggcggccaccaacagcagtaatttctactaagtgtagatagcccgctacatgctgatgcttttttaagcttggcgtggatccgatatcaactagatcttgaga

SEQ ID NO: 3902 - DNA, 170 bp, Artificial sequence
  H2-Q2.1_Nf2.356
  crRNA array
cgatttcttggctttatatatcttgtggaaaggacgaaacaccgtaatttctactaagtgtagatagggcggccaccaacagcagtaatttctactaagtgtagatcggagtcatctgatagagatttttttaagcttggcgtggatccgatatcaactagatcttgaga

SEQ ID NO: 3903 - DNA, 170 bp, Artificial sequence
  H2-Q2.1_Nf2.768
  crRNA array
cgatttcttggctttatatatcttgtggaaaggacgaaacaccgtaatttctactaagtgtagatagggcggccaccaacagcagtaatttctactaagtgtagatccgaagccccagtgtccggcttttttaagcttggcgtggatccgatatcaactagatcttgaga

SEQ ID NO: 3904 - DNA, 170 bp, Artificial sequence
  H2-Q2.1_Notch1.1849
  crRNA array
cgatttcttggctttatatatcttgtggaaaggacgaaacaccgtaatttctactaagtgtagatagggcggccaccaacagcagtaatttctactaagtgtagatctggcgggtgggcggcgctgttttttaagcttggcgtggatccgatatcaactagatcttgaga

SEQ ID NO: 3905 - DNA, 170 bp, Artificial sequence
  H2-Q2.1_Notch1.649
  crRNA array
cgatttcttggctttatatatcttgtggaaaggacgaaacaccgtaatttctactaagtgtagatagggcggccaccaacagcagtaatttctactaagtgtagattgggccaacgatgccaggacttttttaagcttggcgtggatccgatatcaactagatcttgaga

SEQ ID NO: 3906 - DNA, 170 bp, Artificial sequence
  H2-Q2.1_Nsd1.70
  crRNA array
cgatttcttggctttatatatcttgtggaaaggacgaaacaccgtaatttctactaagtgtagatagggcggccaccaacagcagtaatttctactaagtgtagatactggtgtggacgatgcagattttttaagcttggcgtggatccgatatcaactagatcttgaga

SEQ ID NO: 3907 - DNA, 170 bp, Artificial sequence
  H2-Q2.1_Nsd1.90
  crRNA array
cgatttcttggctttatatatcttgtggaaaggacgaaacaccgtaatttctactaagtgtagatagggcggccaccaacagcagtaatttctactaagtgtagataggagctaacggcaagaatgttttttaagcttggcgtggatccgatatcaactagatcttgaga

SEQ ID NO: 3908 - DNA, 170 bp, Artificial sequence
  H2-Q2.1_Pbrm1.1236
  crRNA array
cgatttcttggctttatatatcttgtggaaaggacgaaacaccgtaatttctactaagtgtagatagggcggccaccaacagcagtaatttctactaagtgtagatgccgataaaaccaacagccgttttttaagcttggcgtggatccgatatcaactagatcttgaga

SEQ ID NO: 3909 - DNA, 170 bp, Artificial sequence
  H2-Q2.1_Pbrm1.969
  crRNA array
cgatttcttggctttatatatcttgtggaaaggacgaaacaccgtaatttctactaagtgtagatagggcggccaccaacagcagtaatttctactaagtgtagatgagccctaatgaacagctcattttttaagcttggcgtggatccgatatcaactagatcttgaga

SEQ ID NO: 3910 - DNA, 170 bp, Artificial sequence
  H2-Q2.1_Pik3r1.76
  crRNA array
cgatttcttggctttatatatcttgtggaaaggacgaaacaccgtaatttctactaagtgtagatagggcggccaccaacagcagtaatttctactaagtgtagataaaacctatacggcccgcacttttttaagcttggcgtggatccgatatcaactagatcttgaga

SEQ ID NO: 3911 - DNA, 170 bp, Artificial sequence
  H2-Q2.1_Pik3r1.77
  crRNA array
cgatttcttggctttatatatcttgtggaaaggacgaaacaccgtaatttctactaagtgtagatagggcggccaccaacagcagtaatttctactaagtgtagataaacctatacggcccgcactttttttaagcttggcgtggatccgatatcaactagatcttgaga

SEQ ID NO: 3912 - DNA, 170 bp, Artificial sequence
  H2-Q2.1_Pten.240
  crRNA array
cgatttcttggctttatatatcttgtggaaaggacgaaacaccgtaatttctactaagtgtagatagggcggccaccaacagcagtaatttctactaagtgtagattgcatacgctatagctgcttttttttaagcttggcgtggatccgatatcaactagatcttgaga

SEQ ID NO: 3913 - DNA, 170 bp, Artificial sequence
  H2-Q2.1_Pten.265
  crRNA array
cgatttcttggctttatatatcttgtggaaaggacgaaacaccgtaatttctactaagtgtagatagggcggccaccaacagcagtaatttctactaagtgtagataagcgtggtgcgtgacgcacttttttaagcttggcgtggatccgatatcaactagatcttgaga

SEQ ID NO: 3914 - DNA, 170 bp, Artificial sequence
  H2-Q2.1_Rasa1.1478
  crRNA array
cgatttcttggctttatatatcttgtggaaaggacgaaacaccgtaatttctactaagtgtagatagggcggccaccaacagcagtaatttctactaagtgtagatcgataatggtctatgatgtcttttttaagcttggcgtggatccgatatcaactagatcttgaga

SEQ ID NO: 3915 - DNA, 170 bp, Artificial sequence
  H2-Q2.1_Rasa1.223
  crRNA array
cgatttcttggctttatatatcttgtggaaaggacgaaacaccgtaatttctactaagtgtagatagggcggccaccaacagcagtaatttctactaagtgtagattccatggagtatcgtgctcgttttttaagcttggcgtggatccgatatcaactagatcttgaga

SEQ ID NO: 3916 - DNA, 170 bp, Artificial sequence
  H2-Q2.1_Rb1.211
  crRNA array
cgatttcttggctttatatatcttgtggaaaggacgaaacaccgtaatttctactaagtgtagatagggcggccaccaacagcagtaatttctactaagtgtagattctgacatgatcgggtacctttttttaagcttggcgtggatccgatatcaactagatcttgaga

SEQ ID NO: 3917 - DNA, 170 bp, Artificial sequence
  H2-Q2.1_Rb1.394
  crRNA array
cgatttcttggctttatatatcttgtggaaaggacgaaacaccgtaatttctactaagtgtagatagggcggccaccaacagcagtaatttctactaagtgtagatagaaatctcgaagcaggatcttttttaagcttggcgtggatccgatatcaactagatcttgaga

SEQ ID NO: 3918 - DNA, 170 bp, Artificial sequence
  H2-Q2.1_Rbm10.5
  crRNA array
cgatttcttggctttatatatcttgtggaaaggacgaaacaccgtaatttctactaagtgtagatagggcggccaccaacagcagtaatttctactaagtgtagatacgaaacctgaacccacacattttttaagcttggcgtggatccgatatcaactagatcttgaga

SEQ ID NO: 3919 - DNA, 170 bp, Artificial sequence
  H2-Q2.1_Rbm10.6
  crRNA array
cgatttcttggctttatatatcttgtggaaaggacgaaacaccgtaatttctactaagtgtagatagggcggccaccaacagcagtaatttctactaagtgtagatcgaaacctgaacccacacagttttttaagcttggcgtggatccgatatcaactagatcttgaga

SEQ ID NO: 3920 - DNA, 170 bp, Artificial sequence
  H2-Q2.1_Rnf43.1920
  crRNA array
cgatttcttggctttatatatcttgtggaaaggacgaaacaccgtaatttctactaagtgtagatagggcggccaccaacagcagtaatttctactaagtgtagatatccccgtgccgtggactccttttttaagcttggcgtggatccgatatcaactagatcttgaga

SEQ ID NO: 3921 - DNA, 170 bp, Artificial sequence
  H2-Q2.1_Rnf43.39
  crRNA array
cgatttcttggctttatatatcttgtggaaaggacgaaacaccgtaatttctactaagtgtagatagggcggccaccaacagcagtaatttctactaagtgtagatcaaggggatcactctgataattttttaagcttggcgtggatccgatatcaactagatcttgaga

SEQ ID NO: 3922 - DNA, 170 bp, Artificial sequence
  H2-Q2.1_Runx1.204
  crRNA array
cgatttcttggctttatatatcttgtggaaaggacgaaacaccgtaatttctactaagtgtagatagggcggccaccaacagcagtaatttctactaagtgtagattaaataagtccagccgttttttttttaagcttggcgtggatccgatatcaactagatcttgaga

SEQ ID NO: 3923 - DNA, 170 bp, Artificial sequence
  H2-Q2.1_Runx1.81
  crRNA array
cgatttcttggctttatatatcttgtggaaaggacgaaacaccgtaatttctactaagtgtagatagggcggccaccaacagcagtaatttctactaagtgtagataggacgcgtatgggaattttttttttaagcttggcgtggatccgatatcaactagatcttgaga

SEQ ID NO: 3924 - DNA, 170 bp, Artificial sequence
  H2-Q2.1_Setd2.143
  crRNA array
cgatttcttggctttatatatcttgtggaaaggacgaaacaccgtaatttctactaagtgtagatagggcggccaccaacagcagtaatttctactaagtgtagatgcacaaccacaacagactggttttttaagcttggcgtggatccgatatcaactagatcttgaga

SEQ ID NO: 3925 - DNA, 170 bp, Artificial sequence
  H2-Q2.1_Setd2.508
  crRNA array
cgatttcttggctttatatatcttgtggaaaggacgaaacaccgtaatttctactaagtgtagatagggcggccaccaacagcagtaatttctactaagtgtagattacgatcccgagcacccgacttttttaagcttggcgtggatccgatatcaactagatcttgaga

SEQ ID NO: 3926 - DNA, 170 bp, Artificial sequence
  H2-Q2.1_Smad4.3038
  crRNA array
cgatttcttggctttatatatcttgtggaaaggacgaaacaccgtaatttctactaagtgtagatagggcggccaccaacagcagtaatttctactaagtgtagatatctgcggcagtgtcaccggttttttaagcttggcgtggatccgatatcaactagatcttgaga

SEQ ID NO: 3927 - DNA, 170 bp, Artificial sequence
  H2-Q2.1_Smad4.39
  crRNA array
cgatttcttggctttatatatcttgtggaaaggacgaaacaccgtaatttctactaagtgtagatagggcggccaccaacagcagtaatttctactaagtgtagatagtcaaacgcatactgacaattttttaagcttggcgtggatccgatatcaactagatcttgaga

SEQ ID NO: 3928 - DNA, 170 bp, Artificial sequence
  H2-Q2.1_Stag2.1409
  crRNA array
cgatttcttggctttatatatcttgtggaaaggacgaaacaccgtaatttctactaagtgtagatagggcggccaccaacagcagtaatttctactaagtgtagatgctaataactgcggaagggcttttttaagcttggcgtggatccgatatcaactagatcttgaga

SEQ ID NO: 3929 - DNA, 170 bp, Artificial sequence
  H2-Q2.1_Stag2.4401
  crRNA array
cgatttcttggctttatatatcttgtggaaaggacgaaacaccgtaatttctactaagtgtagatagggcggccaccaacagcagtaatttctactaagtgtagattaatcgtccagtggtgtatattttttaagcttggcgtggatccgatatcaactagatcttgaga

SEQ ID NO: 3930 - DNA, 170 bp, Artificial sequence
  H2-Q2.1_Tbl1xr1.1
  crRNA array
cgatttcttggctttatatatcttgtggaaaggacgaaacaccgtaatttctactaagtgtagatagggcggccaccaacagcagtaatttctactaagtgtagatggatgcgcatactggtgaagttttttaagcttggcgtggatccgatatcaactagatcttgaga

SEQ ID NO: 3931 - DNA, 170 bp, Artificial sequence
  H2-Q2.1_Tbl1xr1.83
  crRNA array
cgatttcttggctttatatatcttgtggaaaggacgaaacaccgtaatttctactaagtgtagatagggcggccaccaacagcagtaatttctactaagtgtagatatggtcgacccatcgagtctttttttaagcttggcgtggatccgatatcaactagatcttgaga

SEQ ID NO: 3932 - DNA, 170 bp, Artificial sequence
  H2-Q2.1_Tgfbr2.290
  crRNA array
cgatttcttggctttatatatcttgtggaaaggacgaaacaccgtaatttctactaagtgtagatagggcggccaccaacagcagtaatttctactaagtgtagatcctctcggcgcccgggtaaattttttaagcttggcgtggatccgatatcaactagatcttgaga

SEQ ID NO: 3933 - DNA, 170 bp, Artificial sequence
  H2-Q2.1_Tgfbr2.292
  crRNA array
cgatttcttggctttatatatcttgtggaaaggacgaaacaccgtaatttctactaagtgtagatagggcggccaccaacagcagtaatttctactaagtgtagatcccgggcgccgagagggaaattttttaagcttggcgtggatccgatatcaactagatcttgaga

SEQ ID NO: 3934 - DNA, 170 bp, Artificial sequence
  H2-Q2.1_Trp53.4
  crRNA array
cgatttcttggctttatatatcttgtggaaaggacgaaacaccgtaatttctactaagtgtagatagggcggccaccaacagcagtaatttctactaagtgtagatccctgaactgcccccagggattttttaagcttggcgtggatccgatatcaactagatcttgaga

SEQ ID NO: 3935 - DNA, 170 bp, Artificial sequence
  H2-Q2.1_Trp53.528
  crRNA array
cgatttcttggctttatatatcttgtggaaaggacgaaacaccgtaatttctactaagtgtagatagggcggccaccaacagcagtaatttctactaagtgtagatgctgggccagcagagacctgttttttaagcttggcgtggatccgatatcaactagatcttgaga

SEQ ID NO: 3936 - DNA, 170 bp, Artificial sequence
  H2-Q2.1_Vhl.1
  crRNA array
cgatttcttggctttatatatcttgtggaaaggacgaaacaccgtaatttctactaagtgtagatagggcggccaccaacagcagtaatttctactaagtgtagatagggctcccggcggccatttttttttaagcttggcgtggatccgatatcaactagatcttgaga

SEQ ID NO: 3937 - DNA, 170 bp, Artificial sequence
  H2-Q2.1_Vhl.151
  crRNA array
cgatttcttggctttatatatcttgtggaaaggacgaaacaccgtaatttctactaagtgtagatagggcggccaccaacagcagtaatttctactaagtgtagattagagcactcacccgagggattttttaagcttggcgtggatccgatatcaactagatcttgaga

SEQ ID NO: 3938 - DNA, 170 bp, Artificial sequence
  H2-Q2.1_Zc3h13.1387
  crRNA array
cgatttcttggctttatatatcttgtggaaaggacgaaacaccgtaatttctactaagtgtagatagggcggccaccaacagcagtaatttctactaagtgtagatgtgacgccggtcatgtgactttttttaagcttggcgtggatccgatatcaactagatcttgaga

SEQ ID NO: 3939 - DNA, 170 bp, Artificial sequence
  H2-Q2.1_Zc3h13.1777
  crRNA array
cgatttcttggctttatatatcttgtggaaaggacgaaacaccgtaatttctactaagtgtagatagggcggccaccaacagcagtaatttctactaagtgtagatgatgctgccagtgtagcggcttttttaagcttggcgtggatccgatatcaactagatcttgaga

SEQ ID NO: 3940 - DNA, 170 bp, Artificial sequence
  H2-Q2.2_Acvr2a.155
  crRNA array
cgatttcttggctttatatatcttgtggaaaggacgaaacaccgtaatttctactaagtgtagattaacctgcgcccgctgctgataatttctactaagtgtagatggacctggctaatcaagtatttttttaagcttggcgtggatccgatatcaactagatcttgaga

SEQ ID NO: 3941 - DNA, 170 bp, Artificial sequence
  H2-Q2.2_Acvr2a.70
  crRNA array
cgatttcttggctttatatatcttgtggaaaggacgaaacaccgtaatttctactaagtgtagattaacctgcgcccgctgctgataatttctactaagtgtagatcccgaggcgccggagaagccttttttaagcttggcgtggatccgatatcaactagatcttgaga

SEQ ID NO: 3942 - DNA, 170 bp, Artificial sequence
  H2-Q2.2_Apc.21
  crRNA array
cgatttcttggctttatatatcttgtggaaaggacgaaacaccgtaatttctactaagtgtagattaacctgcgcccgctgctgataatttctactaagtgtagatgtgatccacacgtgtagctgttttttaagcttggcgtggatccgatatcaactagatcttgaga

SEQ ID NO: 3943 - DNA, 170 bp, Artificial sequence
  H2-Q2.2_Apc.867
  crRNA array
cgatttcttggctttatatatcttgtggaaaggacgaaacaccgtaatttctactaagtgtagattaacctgcgcccgctgctgataatttctactaagtgtagatcagtcccaggcggcggaagcttttttaagcttggcgtggatccgatatcaactagatcttgaga

SEQ ID NO: 3944 - DNA, 170 bp, Artificial sequence
  H2-Q2.2_Arid1a.2
  crRNA array
cgatttcttggctttatatatcttgtggaaaggacgaaacaccgtaatttctactaagtgtagattaacctgcgcccgctgctgataatttctactaagtgtagatcccgcgcccccgtcctggggttttttaagcttggcgtggatccgatatcaactagatcttgaga

SEQ ID NO: 3945 - DNA, 170 bp, Artificial sequence
  H2-Q2.2_Arid1a.5
  crRNA array
cgatttcttggctttatatatcttgtggaaaggacgaaacaccgtaatttctactaagtgtagattaacctgcgcccgctgctgataatttctactaagtgtagatcccgcgctcggccgctgccgttttttaagcttggcgtggatccgatatcaactagatcttgaga

SEQ ID NO: 3946 - DNA, 170 bp, Artificial sequence
  H2-Q2.2_Arid2.166
  crRNA array
cgatttcttggctttatatatcttgtggaaaggacgaaacaccgtaatttctactaagtgtagattaacctgcgcccgctgctgataatttctactaagtgtagataaccgcgatctgggttttttttttttaagcttggcgtggatccgatatcaactagatcttgaga

SEQ ID NO: 3947 - DNA, 170 bp, Artificial sequence
  H2-Q2.2_Arid2.172
  crRNA array
cgatttcttggctttatatatcttgtggaaaggacgaaacaccgtaatttctactaagtgtagattaacctgcgcccgctgctgataatttctactaagtgtagatctggacgagctgcggcagttttttttaagcttggcgtggatccgatatcaactagatcttgaga

SEQ ID NO: 3948 - DNA, 170 bp, Artificial sequence
  H2-Q2.2_Atm.120
  crRNA array
cgatttcttggctttatatatcttgtggaaaggacgaaacaccgtaatttctactaagtgtagattaacctgcgcccgctgctgataatttctactaagtgtagatgacaggtagtcggcagctaattttttaagcttggcgtggatccgatatcaactagatcttgaga

SEQ ID NO: 3949 - DNA, 170 bp, Artificial sequence
  H2-Q2.2_Atm.997
  crRNA array
cgatttcttggctttatatatcttgtggaaaggacgaaacaccgtaatttctactaagtgtagattaacctgcgcccgctgctgataatttctactaagtgtagatgagaaagtctccgaatcgttttttttaagcttggcgtggatccgatatcaactagatcttgaga

SEQ ID NO: 3950 - DNA, 170 bp, Artificial sequence
  H2-Q2.2_Atrx.249
  crRNA array
cgatttcttggctttatatatcttgtggaaaggacgaaacaccgtaatttctactaagtgtagattaacctgcgcccgctgctgataatttctactaagtgtagattagccagtcgctcatatctcttttttaagcttggcgtggatccgatatcaactagatcttgaga

SEQ ID NO: 3951 - DNA, 170 bp, Artificial sequence
  H2-Q2.2_Atrx.251
  crRNA array
cgatttcttggctttatatatcttgtggaaaggacgaaacaccgtaatttctactaagtgtagattaacctgcgcccgctgctgataatttctactaagtgtagatgccagtcgctcatatctctgttttttaagcttggcgtggatccgatatcaactagatcttgaga

SEQ ID NO: 3952 - DNA, 170 bp, Artificial sequence
  H2-Q2.2_Bcor.203
  crRNA array
cgatttcttggctttatatatcttgtggaaaggacgaaacaccgtaatttctactaagtgtagattaacctgcgcccgctgctgataatttctactaagtgtagatccccggagcggagtccaggcttttttaagcttggcgtggatccgatatcaactagatcttgaga

SEQ ID NO: 3953 - DNA, 170 bp, Artificial sequence
  H2-Q2.2_Bcor.475
  crRNA array
cgatttcttggctttatatatcttgtggaaaggacgaaacaccgtaatttctactaagtgtagattaacctgcgcccgctgctgataatttctactaagtgtagattgcaacccctctgtatgggattttttaagcttggcgtggatccgatatcaactagatcttgaga

SEQ ID NO: 3954 - DNA, 170 bp, Artificial sequence
  H2-Q2.2_Brca1.112
  crRNA array
cgatttcttggctttatatatcttgtggaaaggacgaaacaccgtaatttctactaagtgtagattaacctgcgcccgctgctgataatttctactaagtgtagatctagacgctctgtggagactttttttaagcttggcgtggatccgatatcaactagatcttgaga

SEQ ID NO: 3955 - DNA, 170 bp, Artificial sequence
  H2-Q2.2_Brca1.53
  crRNA array
cgatttcttggctttatatatcttgtggaaaggacgaaacaccgtaatttctactaagtgtagattaacctgcgcccgctgctgataatttctactaagtgtagataatgaggaggcgtcgatcatttttttaagcttggcgtggatccgatatcaactagatcttgaga

SEQ ID NO: 3956 - DNA, 170 bp, Artificial sequence
  H2-Q2.2_Casp8.45
  crRNA array
cgatttcttggctttatatatcttgtggaaaggacgaaacaccgtaatttctactaagtgtagattaacctgcgcccgctgctgataatttctactaagtgtagatctaccgagatcctgtgaatgttttttaagcttggcgtggatccgatatcaactagatcttgaga

SEQ ID NO: 3957 - DNA, 170 bp, Artificial sequence
  H2-Q2.2_Casp8.54
  crRNA array
cgatttcttggctttatatatcttgtggaaaggacgaaacaccgtaatttctactaagtgtagattaacctgcgcccgctgctgataatttctactaagtgtagatcagtgcagtcgtcgtaagatttttttaagcttggcgtggatccgatatcaactagatcttgaga

SEQ ID NO: 3958 - DNA, 170 bp, Artificial sequence
  H2-Q2.2_Cbwd1.84
  crRNA array
cgatttcttggctttatatatcttgtggaaaggacgaaacaccgtaatttctactaagtgtagattaacctgcgcccgctgctgataatttctactaagtgtagatcacagcaggtaacatgccgcttttttaagcttggcgtggatccgatatcaactagatcttgaga

SEQ ID NO: 3959 - DNA, 170 bp, Artificial sequence
  H2-Q2.2_Cbwd1.85
  crRNA array
cgatttcttggctttatatatcttgtggaaaggacgaaacaccgtaatttctactaagtgtagattaacctgcgcccgctgctgataatttctactaagtgtagatacagcaggtaacatgccgccttttttaagcttggcgtggatccgatatcaactagatcttgaga

SEQ ID NO: 3960 - DNA, 170 bp, Artificial sequence
  H2-Q2.2_Cdh1.387
  crRNA array
cgatttcttggctttatatatcttgtggaaaggacgaaacaccgtaatttctactaagtgtagattaacctgcgcccgctgctgataatttctactaagtgtagatctcggcgtctgccgggtccgttttttaagcttggcgtggatccgatatcaactagatcttgaga

SEQ ID NO: 3961 - DNA, 170 bp, Artificial sequence
  H2-Q2.2_Cdh1.58
  crRNA array
cgatttcttggctttatatatcttgtggaaaggacgaaacaccgtaatttctactaagtgtagattaacctgcgcccgctgctgataatttctactaagtgtagatctcgtccgcgcccgggactcttttttaagcttggcgtggatccgatatcaactagatcttgaga

SEQ ID NO: 3962 - DNA, 170 bp, Artificial sequence
  H2-Q2.2_Cdkn2a.647
  crRNA array
cgatttcttggctttatatatcttgtggaaaggacgaaacaccgtaatttctactaagtgtagattaacctgcgcccgctgctgataatttctactaagtgtagatgcaatcacgggagggagcagttttttaagcttggcgtggatccgatatcaactagatcttgaga

SEQ ID NO: 3963 - DNA, 170 bp, Artificial sequence
  H2-Q2.2_Cdkn2a.648
  crRNA array
cgatttcttggctttatatatcttgtggaaaggacgaaacaccgtaatttctactaagtgtagattaacctgcgcccgctgctgataatttctactaagtgtagatcaatcacgggagggagcagattttttaagcttggcgtggatccgatatcaactagatcttgaga

SEQ ID NO: 3964 - DNA, 170 bp, Artificial sequence
  H2-Q2.2_Cic.162
  crRNA array
cgatttcttggctttatatatcttgtggaaaggacgaaacaccgtaatttctactaagtgtagattaacctgcgcccgctgctgataatttctactaagtgtagatcgcaggcgcgcccggcggagttttttaagcttggcgtggatccgatatcaactagatcttgaga

SEQ ID NO: 3965 - DNA, 170 bp, Artificial sequence
  H2-Q2.2_Cic.164
  crRNA array
cgatttcttggctttatatatcttgtggaaaggacgaaacaccgtaatttctactaagtgtagattaacctgcgcccgctgctgataatttctactaagtgtagatcgggccctgggccggcggctttttttaagcttggcgtggatccgatatcaactagatcttgaga

SEQ ID NO: 3966 - DNA, 170 bp, Artificial sequence
  H2-Q2.2_Ctcf.229
  crRNA array
cgatttcttggctttatatatcttgtggaaaggacgaaacaccgtaatttctactaagtgtagattaacctgcgcccgctgctgataatttctactaagtgtagatggctggtggctgatagtctgttttttaagcttggcgtggatccgatatcaactagatcttgaga

SEQ ID NO: 3967 - DNA, 170 bp, Artificial sequence
  H2-Q2.2_Ctcf.809
  crRNA array
cgatttcttggctttatatatcttgtggaaaggacgaaacaccgtaatttctactaagtgtagattaacctgcgcccgctgctgataatttctactaagtgtagataagcgctatcatgatcccaattttttaagcttggcgtggatccgatatcaactagatcttgaga

SEQ ID NO: 3968 - DNA, 170 bp, Artificial sequence
  H2-Q2.2_Elf3.826
  crRNA array
cgatttcttggctttatatatcttgtggaaaggacgaaacaccgtaatttctactaagtgtagattaacctgcgcccgctgctgataatttctactaagtgtagattccgagacatcctaatccacttttttaagcttggcgtggatccgatatcaactagatcttgaga

SEQ ID NO: 3969 - DNA, 170 bp, Artificial sequence
  H2-Q2.2_Elf3.983
  crRNA array
cgatttcttggctttatatatcttgtggaaaggacgaaacaccgtaatttctactaagtgtagattaacctgcgcccgctgctgataatttctactaagtgtagattaggccccctaactggaccattttttaagcttggcgtggatccgatatcaactagatcttgaga

SEQ ID NO: 3970 - DNA, 170 bp, Artificial sequence
  H2-Q2.2_Ep300.310
  crRNA array
cgatttcttggctttatatatcttgtggaaaggacgaaacaccgtaatttctactaagtgtagattaacctgcgcccgctgctgataatttctactaagtgtagatatggtacgacagtgaggaagttttttaagcttggcgtggatccgatatcaactagatcttgaga

SEQ ID NO: 3971 - DNA, 170 bp, Artificial sequence
  H2-Q2.2_Ep300.587
  crRNA array
cgatttcttggctttatatatcttgtggaaaggacgaaacaccgtaatttctactaagtgtagattaacctgcgcccgctgctgataatttctactaagtgtagatcgccccggggcccccaaccattttttaagcttggcgtggatccgatatcaactagatcttgaga

SEQ ID NO: 3972 - DNA, 170 bp, Artificial sequence
  H2-Q2.2_Epha2.126
  crRNA array
cgatttcttggctttatatatcttgtggaaaggacgaaacaccgtaatttctactaagtgtagattaacctgcgcccgctgctgataatttctactaagtgtagatcctgtgccgccgcggccgccttttttaagcttggcgtggatccgatatcaactagatcttgaga

SEQ ID NO: 3973 - DNA, 170 bp, Artificial sequence
  H2-Q2.2_Epha2.5
  crRNA array
cgatttcttggctttatatatcttgtggaaaggacgaaacaccgtaatttctactaagtgtagattaacctgcgcccgctgctgataatttctactaagtgtagatcatgagctggcgccacccggttttttaagcttggcgtggatccgatatcaactagatcttgaga

SEQ ID NO: 3974 - DNA, 170 bp, Artificial sequence
  H2-Q2.2_Fat1.105
  crRNA array
cgatttcttggctttatatatcttgtggaaaggacgaaacaccgtaatttctactaagtgtagattaacctgcgcccgctgctgataatttctactaagtgtagataactcgaggtgacaacaagtttttttaagcttggcgtggatccgatatcaactagatcttgaga

SEQ ID NO: 3975 - DNA, 170 bp, Artificial sequence
  H2-Q2.2_Fat1.122
  crRNA array
cgatttcttggctttatatatcttgtggaaaggacgaaacaccgtaatttctactaagtgtagattaacctgcgcccgctgctgataatttctactaagtgtagatccatcgacatggaaacgggattttttaagcttggcgtggatccgatatcaactagatcttgaga

SEQ ID NO: 3976 - DNA, 170 bp, Artificial sequence
  H2-Q2.2_Fbxw7.21
  crRNA array
cgatttcttggctttatatatcttgtggaaaggacgaaacaccgtaatttctactaagtgtagattaacctgcgcccgctgctgataatttctactaagtgtagattaatgtgccgtagaaacccattttttaagcttggcgtggatccgatatcaactagatcttgaga

SEQ ID NO: 3977 - DNA, 170 bp, Artificial sequence
  H2-Q2.2_Fbxw7.23
  crRNA array
cgatttcttggctttatatatcttgtggaaaggacgaaacaccgtaatttctactaagtgtagattaacctgcgcccgctgctgataatttctactaagtgtagatatgtgccgtagaaacccatattttttaagcttggcgtggatccgatatcaactagatcttgaga

SEQ ID NO: 3978 - DNA, 170 bp, Artificial sequence
  H2-Q2.2_Gata3.34
  crRNA array
cgatttcttggctttatatatcttgtggaaaggacgaaacaccgtaatttctactaagtgtagattaacctgcgcccgctgctgataatttctactaagtgtagatctaaactatcccgcaaagatttttttaagcttggcgtggatccgatatcaactagatcttgaga

SEQ ID NO: 3979 - DNA, 170 bp, Artificial sequence
  H2-Q2.2_Gata3.47
  crRNA array
cgatttcttggctttatatatcttgtggaaaggacgaaacaccgtaatttctactaagtgtagattaacctgcgcccgctgctgataatttctactaagtgtagatcgtagtaggacgggacgtggttttttaagcttggcgtggatccgatatcaactagatcttgaga

SEQ ID NO: 3980 - DNA, 170 bp, Artificial sequence
  H2-Q2.2_Kdm5c.1878
  crRNA array
cgatttcttggctttatatatcttgtggaaaggacgaaacaccgtaatttctactaagtgtagattaacctgcgcccgctgctgataatttctactaagtgtagatagagcacggcacccgcccccttttttaagcttggcgtggatccgatatcaactagatcttgaga

SEQ ID NO: 3981 - DNA, 170 bp, Artificial sequence
  H2-Q2.2_Kdm5c.1879
  crRNA array
cgatttcttggctttatatatcttgtggaaaggacgaaacaccgtaatttctactaagtgtagattaacctgcgcccgctgctgataatttctactaagtgtagatgagcacggcacccgccccccttttttaagcttggcgtggatccgatatcaactagatcttgaga

SEQ ID NO: 3982 - DNA, 170 bp, Artificial sequence
  H2-Q2.2_Kdm6a.56
  crRNA array
cgatttcttggctttatatatcttgtggaaaggacgaaacaccgtaatttctactaagtgtagattaacctgcgcccgctgctgataatttctactaagtgtagattcgctgccgcctctcgcggcttttttaagcttggcgtggatccgatatcaactagatcttgaga

SEQ ID NO: 3983 - DNA, 170 bp, Artificial sequence
  H2-Q2.2_Kdm6a.57
  crRNA array
cgatttcttggctttatatatcttgtggaaaggacgaaacaccgtaatttctactaagtgtagattaacctgcgcccgctgctgataatttctactaagtgtagatcgctgccgcctctcgcggcattttttaagcttggcgtggatccgatatcaactagatcttgaga

SEQ ID NO: 3984 - DNA, 170 bp, Artificial sequence
  H2-Q2.2_Kmt2b.265
  crRNA array
cgatttcttggctttatatatcttgtggaaaggacgaaacaccgtaatttctactaagtgtagattaacctgcgcccgctgctgataatttctactaagtgtagatccccaagtgaagcccacctgttttttaagcttggcgtggatccgatatcaactagatcttgaga

SEQ ID NO: 3985 - DNA, 170 bp, Artificial sequence
  H2-Q2.2_Kmt2b.298
  crRNA array
cgatttcttggctttatatatcttgtggaaaggacgaaacaccgtaatttctactaagtgtagattaacctgcgcccgctgctgataatttctactaagtgtagattccggcagggaccggctggcttttttaagcttggcgtggatccgatatcaactagatcttgaga

SEQ ID NO: 3986 - DNA, 170 bp, Artificial sequence
  H2-Q2.2_Kmt2c.1962
  crRNA array
cgatttcttggctttatatatcttgtggaaaggacgaaacaccgtaatttctactaagtgtagattaacctgcgcccgctgctgataatttctactaagtgtagatgtgacgatctgtgccacaagttttttaagcttggcgtggatccgatatcaactagatcttgaga

SEQ ID NO: 3987 - DNA, 170 bp, Artificial sequence
  H2-Q2.2_Kmt2c.2236
  crRNA array
cgatttcttggctttatatatcttgtggaaaggacgaaacaccgtaatttctactaagtgtagattaacctgcgcccgctgctgataatttctactaagtgtagatactcgacctccacctccctattttttaagcttggcgtggatccgatatcaactagatcttgaga

SEQ ID NO: 3988 - DNA, 170 bp, Artificial sequence
  H2-Q2.2_Kmt2d.316
  crRNA array
cgatttcttggctttatatatcttgtggaaaggacgaaacaccgtaatttctactaagtgtagattaacctgcgcccgctgctgataatttctactaagtgtagatactccaggccacccaggtggttttttaagcttggcgtggatccgatatcaactagatcttgaga

SEQ ID NO: 3989 - DNA, 170 bp, Artificial sequence
  H2-Q2.2_Kmt2d.416
  crRNA array
cgatttcttggctttatatatcttgtggaaaggacgaaacaccgtaatttctactaagtgtagattaacctgcgcccgctgctgataatttctactaagtgtagattaaacccccgggggaagggtttttttaagcttggcgtggatccgatatcaactagatcttgaga

SEQ ID NO: 3990 - DNA, 170 bp, Artificial sequence
  H2-Q2.2_Map2k4.119
  crRNA array
cgatttcttggctttatatatcttgtggaaaggacgaaacaccgtaatttctactaagtgtagattaacctgcgcccgctgctgataatttctactaagtgtagattgctgtgtgggcggccacatttttttaagcttggcgtggatccgatatcaactagatcttgaga

SEQ ID NO: 3991 - DNA, 170 bp, Artificial sequence
  H2-Q2.2_Map2k4.1261
  crRNA array
cgatttcttggctttatatatcttgtggaaaggacgaaacaccgtaatttctactaagtgtagattaacctgcgcccgctgctgataatttctactaagtgtagatgatgtagtaatgcggagtagttttttaagcttggcgtggatccgatatcaactagatcttgaga

SEQ ID NO: 3992 - DNA, 170 bp, Artificial sequence
  H2-Q2.2_Map3k1.235
  crRNA array
cgatttcttggctttatatatcttgtggaaaggacgaaacaccgtaatttctactaagtgtagattaacctgcgcccgctgctgataatttctactaagtgtagataaaacgctactgatcgatcgttttttaagcttggcgtggatccgatatcaactagatcttgaga

SEQ ID NO: 3993 - DNA, 170 bp, Artificial sequence
  H2-Q2.2_Map3k1.3838
  crRNA array
cgatttcttggctttatatatcttgtggaaaggacgaaacaccgtaatttctactaagtgtagattaacctgcgcccgctgctgataatttctactaagtgtagatccaacaacagggccccactattttttaagcttggcgtggatccgatatcaactagatcttgaga

SEQ ID NO: 3994 - DNA, 170 bp, Artificial sequence
  H2-Q2.2_Mga.1655
  crRNA array
cgatttcttggctttatatatcttgtggaaaggacgaaacaccgtaatttctactaagtgtagattaacctgcgcccgctgctgataatttctactaagtgtagatcgagaagtggagagcatattttttttaagcttggcgtggatccgatatcaactagatcttgaga

SEQ ID NO: 3995 - DNA, 170 bp, Artificial sequence
  H2-Q2.2_Mga.93
  crRNA array
cgatttcttggctttatatatcttgtggaaaggacgaaacaccgtaatttctactaagtgtagattaacctgcgcccgctgctgataatttctactaagtgtagatgagaaggctccccataatgtttttttaagcttggcgtggatccgatatcaactagatcttgaga

SEQ ID NO: 3996 - DNA, 170 bp, Artificial sequence
  H2-Q2.2_Nf1.746
  crRNA array
cgatttcttggctttatatatcttgtggaaaggacgaaacaccgtaatttctactaagtgtagattaacctgcgcccgctgctgataatttctactaagtgtagattaagcataatgatgatgccattttttaagcttggcgtggatccgatatcaactagatcttgaga

SEQ ID NO: 3997 - DNA, 170 bp, Artificial sequence
  H2-Q2.2_Nf1.97
  crRNA array
cgatttcttggctttatatatcttgtggaaaggacgaaacaccgtaatttctactaagtgtagattaacctgcgcccgctgctgataatttctactaagtgtagatagcccgctacatgctgatgcttttttaagcttggcgtggatccgatatcaactagatcttgaga

SEQ ID NO: 3998 - DNA, 170 bp, Artificial sequence
  H2-Q2.2_Nf2.356
  crRNA array
cgatttcttggctttatatatcttgtggaaaggacgaaacaccgtaatttctactaagtgtagattaacctgcgcccgctgctgataatttctactaagtgtagatcggagtcatctgatagagatttttttaagcttggcgtggatccgatatcaactagatcttgaga

SEQ ID NO: 3999 - DNA, 170 bp, Artificial sequence
  H2-Q2.2_Nf2.768
  crRNA array
cgatttcttggctttatatatcttgtggaaaggacgaaacaccgtaatttctactaagtgtagattaacctgcgcccgctgctgataatttctactaagtgtagatccgaagccccagtgtccggcttttttaagcttggcgtggatccgatatcaactagatcttgaga

SEQ ID NO: 4000 - DNA, 170 bp, Artificial sequence
  H2-Q2.2_Notch1.1849
  crRNA array
cgatttcttggctttatatatcttgtggaaaggacgaaacaccgtaatttctactaagtgtagattaacctgcgcccgctgctgataatttctactaagtgtagatctggcgggtgggcggcgctgttttttaagcttggcgtggatccgatatcaactagatcttgaga

SEQ ID NO: 4001 - DNA, 170 bp, Artificial sequence
  H2-Q2.2_Notch1.649
  crRNA array
cgatttcttggctttatatatcttgtggaaaggacgaaacaccgtaatttctactaagtgtagattaacctgcgcccgctgctgataatttctactaagtgtagattgggccaacgatgccaggacttttttaagcttggcgtggatccgatatcaactagatcttgaga

SEQ ID NO: 4002 - DNA, 170 bp, Artificial sequence
  H2-Q2.2_Nsd1.70
  crRNA array
cgatttcttggctttatatatcttgtggaaaggacgaaacaccgtaatttctactaagtgtagattaacctgcgcccgctgctgataatttctactaagtgtagatactggtgtggacgatgcagattttttaagcttggcgtggatccgatatcaactagatcttgaga

SEQ ID NO: 4003 - DNA, 170 bp, Artificial sequence
  H2-Q2.2_Nsd1.90
  crRNA array
cgatttcttggctttatatatcttgtggaaaggacgaaacaccgtaatttctactaagtgtagattaacctgcgcccgctgctgataatttctactaagtgtagataggagctaacggcaagaatgttttttaagcttggcgtggatccgatatcaactagatcttgaga

SEQ ID NO: 4004 - DNA, 170 bp, Artificial sequence
  H2-Q2.2_Pbrm1.1236
  crRNA array
cgatttcttggctttatatatcttgtggaaaggacgaaacaccgtaatttctactaagtgtagattaacctgcgcccgctgctgataatttctactaagtgtagatgccgataaaaccaacagccgttttttaagcttggcgtggatccgatatcaactagatcttgaga

SEQ ID NO: 4005 - DNA, 170 bp, Artificial sequence
  H2-Q2.2_Pbrm1.969
  crRNA array
cgatttcttggctttatatatcttgtggaaaggacgaaacaccgtaatttctactaagtgtagattaacctgcgcccgctgctgataatttctactaagtgtagatgagccctaatgaacagctcattttttaagcttggcgtggatccgatatcaactagatcttgaga

SEQ ID NO: 4006 - DNA, 170 bp, Artificial sequence
  H2-Q2.2_Pik3r1.76
  crRNA array
cgatttcttggctttatatatcttgtggaaaggacgaaacaccgtaatttctactaagtgtagattaacctgcgcccgctgctgataatttctactaagtgtagataaaacctatacggcccgcacttttttaagcttggcgtggatccgatatcaactagatcttgaga

SEQ ID NO: 4007 - DNA, 170 bp, Artificial sequence
  H2-Q2.2_Pik3r1.77
  crRNA array
cgatttcttggctttatatatcttgtggaaaggacgaaacaccgtaatttctactaagtgtagattaacctgcgcccgctgctgataatttctactaagtgtagataaacctatacggcccgcactttttttaagcttggcgtggatccgatatcaactagatcttgaga

SEQ ID NO: 4008 - DNA, 170 bp, Artificial sequence
  H2-Q2.2_Pten.240
  crRNA array
cgatttcttggctttatatatcttgtggaaaggacgaaacaccgtaatttctactaagtgtagattaacctgcgcccgctgctgataatttctactaagtgtagattgcatacgctatagctgcttttttttaagcttggcgtggatccgatatcaactagatcttgaga

SEQ ID NO: 4009 - DNA, 170 bp, Artificial sequence
  H2-Q2.2_Pten.265
  crRNA array
cgatttcttggctttatatatcttgtggaaaggacgaaacaccgtaatttctactaagtgtagattaacctgcgcccgctgctgataatttctactaagtgtagataagcgtggtgcgtgacgcacttttttaagcttggcgtggatccgatatcaactagatcttgaga

SEQ ID NO: 4010 - DNA, 170 bp, Artificial sequence
  H2-Q2.2_Rasa1.1478
  crRNA array
cgatttcttggctttatatatcttgtggaaaggacgaaacaccgtaatttctactaagtgtagattaacctgcgcccgctgctgataatttctactaagtgtagatcgataatggtctatgatgtcttttttaagcttggcgtggatccgatatcaactagatcttgaga

SEQ ID NO: 4011 - DNA, 170 bp, Artificial sequence
  H2-Q2.2_Rasa1.223
  crRNA array
cgatttcttggctttatatatcttgtggaaaggacgaaacaccgtaatttctactaagtgtagattaacctgcgcccgctgctgataatttctactaagtgtagattccatggagtatcgtgctcgttttttaagcttggcgtggatccgatatcaactagatcttgaga

SEQ ID NO: 4012 - DNA, 170 bp, Artificial sequence
  H2-Q2.2_Rb1.211
  crRNA array
cgatttcttggctttatatatcttgtggaaaggacgaaacaccgtaatttctactaagtgtagattaacctgcgcccgctgctgataatttctactaagtgtagattctgacatgatcgggtacctttttttaagcttggcgtggatccgatatcaactagatcttgaga

SEQ ID NO: 4013 - DNA, 170 bp, Artificial sequence
  H2-Q2.2_Rb1.394
  crRNA array
cgatttcttggctttatatatcttgtggaaaggacgaaacaccgtaatttctactaagtgtagattaacctgcgcccgctgctgataatttctactaagtgtagatagaaatctcgaagcaggatcttttttaagcttggcgtggatccgatatcaactagatcttgaga

SEQ ID NO: 4014 - DNA, 170 bp, Artificial sequence
  H2-Q2.2_Rbm10.5
  crRNA array
cgatttcttggctttatatatcttgtggaaaggacgaaacaccgtaatttctactaagtgtagattaacctgcgcccgctgctgataatttctactaagtgtagatacgaaacctgaacccacacattttttaagcttggcgtggatccgatatcaactagatcttgaga

SEQ ID NO: 4015 - DNA, 170 bp, Artificial sequence
  H2-Q2.2_Rbm10.6
  crRNA array
cgatttcttggctttatatatcttgtggaaaggacgaaacaccgtaatttctactaagtgtagattaacctgcgcccgctgctgataatttctactaagtgtagatcgaaacctgaacccacacagttttttaagcttggcgtggatccgatatcaactagatcttgaga

SEQ ID NO: 4016 - DNA, 170 bp, Artificial sequence
  H2-Q2.2_Rnf43.1920
  crRNA array
cgatttcttggctttatatatcttgtggaaaggacgaaacaccgtaatttctactaagtgtagattaacctgcgcccgctgctgataatttctactaagtgtagatatccccgtgccgtggactccttttttaagcttggcgtggatccgatatcaactagatcttgaga

SEQ ID NO: 4017 - DNA, 170 bp, Artificial sequence
  H2-Q2.2_Rnf43.39
  crRNA array
cgatttcttggctttatatatcttgtggaaaggacgaaacaccgtaatttctactaagtgtagattaacctgcgcccgctgctgataatttctactaagtgtagatcaaggggatcactctgataattttttaagcttggcgtggatccgatatcaactagatcttgaga

SEQ ID NO: 4018 - DNA, 170 bp, Artificial sequence
  H2-Q2.2_Runx1.204
  crRNA array
cgatttcttggctttatatatcttgtggaaaggacgaaacaccgtaatttctactaagtgtagattaacctgcgcccgctgctgataatttctactaagtgtagattaaataagtccagccgttttttttttaagcttggcgtggatccgatatcaactagatcttgaga

SEQ ID NO: 4019 - DNA, 170 bp, Artificial sequence
  H2-Q2.2_Runx1.81
  crRNA array
cgatttcttggctttatatatcttgtggaaaggacgaaacaccgtaatttctactaagtgtagattaacctgcgcccgctgctgataatttctactaagtgtagataggacgcgtatgggaattttttttttaagcttggcgtggatccgatatcaactagatcttgaga

SEQ ID NO: 4020 - DNA, 170 bp, Artificial sequence
  H2-Q2.2_Setd2.143
  crRNA array
cgatttcttggctttatatatcttgtggaaaggacgaaacaccgtaatttctactaagtgtagattaacctgcgcccgctgctgataatttctactaagtgtagatgcacaaccacaacagactggttttttaagcttggcgtggatccgatatcaactagatcttgaga

SEQ ID NO: 4021 - DNA, 170 bp, Artificial sequence
  H2-Q2.2_Setd2.508
  crRNA array
cgatttcttggctttatatatcttgtggaaaggacgaaacaccgtaatttctactaagtgtagattaacctgcgcccgctgctgataatttctactaagtgtagattacgatcccgagcacccgacttttttaagcttggcgtggatccgatatcaactagatcttgaga

SEQ ID NO: 4022 - DNA, 170 bp, Artificial sequence
  H2-Q2.2_Smad4.3038
  crRNA array
cgatttcttggctttatatatcttgtggaaaggacgaaacaccgtaatttctactaagtgtagattaacctgcgcccgctgctgataatttctactaagtgtagatatctgcggcagtgtcaccggttttttaagcttggcgtggatccgatatcaactagatcttgaga

SEQ ID NO: 4023 - DNA, 170 bp, Artificial sequence
  H2-Q2.2_Smad4.39
  crRNA array
cgatttcttggctttatatatcttgtggaaaggacgaaacaccgtaatttctactaagtgtagattaacctgcgcccgctgctgataatttctactaagtgtagatagtcaaacgcatactgacaattttttaagcttggcgtggatccgatatcaactagatcttgaga

SEQ ID NO: 4024 - DNA, 170 bp, Artificial sequence
  H2-Q2.2_Stag2.1409
  crRNA array
cgatttcttggctttatatatcttgtggaaaggacgaaacaccgtaatttctactaagtgtagattaacctgcgcccgctgctgataatttctactaagtgtagatgctaataactgcggaagggcttttttaagcttggcgtggatccgatatcaactagatcttgaga

SEQ ID NO: 4025 - DNA, 170 bp, Artificial sequence
  H2-Q2.2_Stag2.4401
  crRNA array
cgatttcttggctttatatatcttgtggaaaggacgaaacaccgtaatttctactaagtgtagattaacctgcgcccgctgctgataatttctactaagtgtagattaatcgtccagtggtgtatattttttaagcttggcgtggatccgatatcaactagatcttgaga

SEQ ID NO: 4026 - DNA, 170 bp, Artificial sequence
  H2-Q2.2_Tbl1xr1.1
  crRNA array
cgatttcttggctttatatatcttgtggaaaggacgaaacaccgtaatttctactaagtgtagattaacctgcgcccgctgctgataatttctactaagtgtagatggatgcgcatactggtgaagttttttaagcttggcgtggatccgatatcaactagatcttgaga

SEQ ID NO: 4027 - DNA, 170 bp, Artificial sequence
  H2-Q2.2_Tbl1xr1.83
  crRNA array
cgatttcttggctttatatatcttgtggaaaggacgaaacaccgtaatttctactaagtgtagattaacctgcgcccgctgctgataatttctactaagtgtagatatggtcgacccatcgagtctttttttaagcttggcgtggatccgatatcaactagatcttgaga

SEQ ID NO: 4028 - DNA, 170 bp, Artificial sequence
  H2-Q2.2_Tgfbr2.290
  crRNA array
cgatttcttggctttatatatcttgtggaaaggacgaaacaccgtaatttctactaagtgtagattaacctgcgcccgctgctgataatttctactaagtgtagatcctctcggcgcccgggtaaattttttaagcttggcgtggatccgatatcaactagatcttgaga

SEQ ID NO: 4029 - DNA, 170 bp, Artificial sequence
  H2-Q2.2_Tgfbr2.292
  crRNA array
cgatttcttggctttatatatcttgtggaaaggacgaaacaccgtaatttctactaagtgtagattaacctgcgcccgctgctgataatttctactaagtgtagatcccgggcgccgagagggaaattttttaagcttggcgtggatccgatatcaactagatcttgaga

SEQ ID NO: 4030 - DNA, 170 bp, Artificial sequence
  H2-Q2.2_Trp53.4
  crRNA array
cgatttcttggctttatatatcttgtggaaaggacgaaacaccgtaatttctactaagtgtagattaacctgcgcccgctgctgataatttctactaagtgtagatccctgaactgcccccagggattttttaagcttggcgtggatccgatatcaactagatcttgaga

SEQ ID NO: 4031 - DNA, 170 bp, Artificial sequence
  H2-Q2.2_Trp53.528
  crRNA array
cgatttcttggctttatatatcttgtggaaaggacgaaacaccgtaatttctactaagtgtagattaacctgcgcccgctgctgataatttctactaagtgtagatgctgggccagcagagacctgttttttaagcttggcgtggatccgatatcaactagatcttgaga

SEQ ID NO: 4032 - DNA, 170 bp, Artificial sequence
  H2-Q2.2_Vhl.1
  crRNA array
cgatttcttggctttatatatcttgtggaaaggacgaaacaccgtaatttctactaagtgtagattaacctgcgcccgctgctgataatttctactaagtgtagatagggctcccggcggccatttttttttaagcttggcgtggatccgatatcaactagatcttgaga

SEQ ID NO: 4033 - DNA, 170 bp, Artificial sequence
  H2-Q2.2_Vhl.151
  crRNA array
cgatttcttggctttatatatcttgtggaaaggacgaaacaccgtaatttctactaagtgtagattaacctgcgcccgctgctgataatttctactaagtgtagattagagcactcacccgagggattttttaagcttggcgtggatccgatatcaactagatcttgaga

SEQ ID NO: 4034 - DNA, 170 bp, Artificial sequence
  H2-Q2.2_Zc3h13.1387
  crRNA array
cgatttcttggctttatatatcttgtggaaaggacgaaacaccgtaatttctactaagtgtagattaacctgcgcccgctgctgataatttctactaagtgtagatgtgacgccggtcatgtgactttttttaagcttggcgtggatccgatatcaactagatcttgaga

SEQ ID NO: 4035 - DNA, 170 bp, Artificial sequence
  H2-Q2.2_Zc3h13.1777
  crRNA array
cgatttcttggctttatatatcttgtggaaaggacgaaacaccgtaatttctactaagtgtagattaacctgcgcccgctgctgataatttctactaagtgtagatgatgctgccagtgtagcggcttttttaagcttggcgtggatccgatatcaactagatcttgaga

SEQ ID NO: 4036 - DNA, 170 bp, Artificial sequence
  Kdm5c.1878_Acvr2a.155
  crRNA array
cgatttcttggctttatatatcttgtggaaaggacgaaacaccgtaatttctactaagtgtagatagagcacggcacccgccccctaatttctactaagtgtagatggacctggctaatcaagtatttttttaagcttggcgtggatccgatatcaactagatcttgaga

SEQ ID NO: 4037 - DNA, 170 bp, Artificial sequence
  Kdm5c.1878_Acvr2a.70
  crRNA array
cgatttcttggctttatatatcttgtggaaaggacgaaacaccgtaatttctactaagtgtagatagagcacggcacccgccccctaatttctactaagtgtagatcccgaggcgccggagaagccttttttaagcttggcgtggatccgatatcaactagatcttgaga

SEQ ID NO: 4038 - DNA, 170 bp, Artificial sequence
  Kdm5c.1878_Apc.21
  crRNA array
cgatttcttggctttatatatcttgtggaaaggacgaaacaccgtaatttctactaagtgtagatagagcacggcacccgccccctaatttctactaagtgtagatgtgatccacacgtgtagctgttttttaagcttggcgtggatccgatatcaactagatcttgaga

SEQ ID NO: 4039 - DNA, 170 bp, Artificial sequence
  Kdm5c.1878_Apc.867
  crRNA array
cgatttcttggctttatatatcttgtggaaaggacgaaacaccgtaatttctactaagtgtagatagagcacggcacccgccccctaatttctactaagtgtagatcagtcccaggcggcggaagcttttttaagcttggcgtggatccgatatcaactagatcttgaga

SEQ ID NO: 4040 - DNA, 170 bp, Artificial sequence
  Kdm5c.1878_Arid1a.2
  crRNA array
cgatttcttggctttatatatcttgtggaaaggacgaaacaccgtaatttctactaagtgtagatagagcacggcacccgccccctaatttctactaagtgtagatcccgcgcccccgtcctggggttttttaagcttggcgtggatccgatatcaactagatcttgaga

SEQ ID NO: 4041 - DNA, 170 bp, Artificial sequence
  Kdm5c.1878_Arid1a.5
  crRNA array
cgatttcttggctttatatatcttgtggaaaggacgaaacaccgtaatttctactaagtgtagatagagcacggcacccgccccctaatttctactaagtgtagatcccgcgctcggccgctgccgttttttaagcttggcgtggatccgatatcaactagatcttgaga

SEQ ID NO: 4042 - DNA, 170 bp, Artificial sequence
  Kdm5c.1878_Arid2.166
  crRNA array
cgatttcttggctttatatatcttgtggaaaggacgaaacaccgtaatttctactaagtgtagatagagcacggcacccgccccctaatttctactaagtgtagataaccgcgatctgggttttttttttttaagcttggcgtggatccgatatcaactagatcttgaga

SEQ ID NO: 4043 - DNA, 170 bp, Artificial sequence
  Kdm5c.1878_Arid2.172
  crRNA array
cgatttcttggctttatatatcttgtggaaaggacgaaacaccgtaatttctactaagtgtagatagagcacggcacccgccccctaatttctactaagtgtagatctggacgagctgcggcagttttttttaagcttggcgtggatccgatatcaactagatcttgaga

SEQ ID NO: 4044 - DNA, 170 bp, Artificial sequence
  Kdm5c.1878_Atm.120
  crRNA array
cgatttcttggctttatatatcttgtggaaaggacgaaacaccgtaatttctactaagtgtagatagagcacggcacccgccccctaatttctactaagtgtagatgacaggtagtcggcagctaattttttaagcttggcgtggatccgatatcaactagatcttgaga

SEQ ID NO: 4045 - DNA, 170 bp, Artificial sequence
  Kdm5c.1878_Atm.997
  crRNA array
cgatttcttggctttatatatcttgtggaaaggacgaaacaccgtaatttctactaagtgtagatagagcacggcacccgccccctaatttctactaagtgtagatgagaaagtctccgaatcgttttttttaagcttggcgtggatccgatatcaactagatcttgaga

SEQ ID NO: 4046 - DNA, 170 bp, Artificial sequence
  Kdm5c.1878_Atrx.249
  crRNA array
cgatttcttggctttatatatcttgtggaaaggacgaaacaccgtaatttctactaagtgtagatagagcacggcacccgccccctaatttctactaagtgtagattagccagtcgctcatatctcttttttaagcttggcgtggatccgatatcaactagatcttgaga

SEQ ID NO: 4047 - DNA, 170 bp, Artificial sequence
  Kdm5c.1878_Atrx.251
  crRNA array
cgatttcttggctttatatatcttgtggaaaggacgaaacaccgtaatttctactaagtgtagatagagcacggcacccgccccctaatttctactaagtgtagatgccagtcgctcatatctctgttttttaagcttggcgtggatccgatatcaactagatcttgaga

SEQ ID NO: 4048 - DNA, 170 bp, Artificial sequence
  Kdm5c.1878_Bcor.203
  crRNA array
cgatttcttggctttatatatcttgtggaaaggacgaaacaccgtaatttctactaagtgtagatagagcacggcacccgccccctaatttctactaagtgtagatccccggagcggagtccaggcttttttaagcttggcgtggatccgatatcaactagatcttgaga

SEQ ID NO: 4049 - DNA, 170 bp, Artificial sequence
  Kdm5c.1878_Bcor.475
  crRNA array
cgatttcttggctttatatatcttgtggaaaggacgaaacaccgtaatttctactaagtgtagatagagcacggcacccgccccctaatttctactaagtgtagattgcaacccctctgtatgggattttttaagcttggcgtggatccgatatcaactagatcttgaga

SEQ ID NO: 4050 - DNA, 170 bp, Artificial sequence
  Kdm5c.1878_Brca1.112
  crRNA array
cgatttcttggctttatatatcttgtggaaaggacgaaacaccgtaatttctactaagtgtagatagagcacggcacccgccccctaatttctactaagtgtagatctagacgctctgtggagactttttttaagcttggcgtggatccgatatcaactagatcttgaga

SEQ ID NO: 4051 - DNA, 170 bp, Artificial sequence
  Kdm5c.1878_Brca1.53
  crRNA array
cgatttcttggctttatatatcttgtggaaaggacgaaacaccgtaatttctactaagtgtagatagagcacggcacccgccccctaatttctactaagtgtagataatgaggaggcgtcgatcatttttttaagcttggcgtggatccgatatcaactagatcttgaga

SEQ ID NO: 4052 - DNA, 170 bp, Artificial sequence
  Kdm5c.1878_Casp8.45
  crRNA array
cgatttcttggctttatatatcttgtggaaaggacgaaacaccgtaatttctactaagtgtagatagagcacggcacccgccccctaatttctactaagtgtagatctaccgagatcctgtgaatgttttttaagcttggcgtggatccgatatcaactagatcttgaga

SEQ ID NO: 4053 - DNA, 170 bp, Artificial sequence
  Kdm5c.1878_Casp8.54
  crRNA array
cgatttcttggctttatatatcttgtggaaaggacgaaacaccgtaatttctactaagtgtagatagagcacggcacccgccccctaatttctactaagtgtagatcagtgcagtcgtcgtaagatttttttaagcttggcgtggatccgatatcaactagatcttgaga

SEQ ID NO: 4054 - DNA, 170 bp, Artificial sequence
  Kdm5c.1878_Cbwd1.84
  crRNA array
cgatttcttggctttatatatcttgtggaaaggacgaaacaccgtaatttctactaagtgtagatagagcacggcacccgccccctaatttctactaagtgtagatcacagcaggtaacatgccgcttttttaagcttggcgtggatccgatatcaactagatcttgaga

SEQ ID NO: 4055 - DNA, 170 bp, Artificial sequence
  Kdm5c.1878_Cbwd1.85
  crRNA array
cgatttcttggctttatatatcttgtggaaaggacgaaacaccgtaatttctactaagtgtagatagagcacggcacccgccccctaatttctactaagtgtagatacagcaggtaacatgccgccttttttaagcttggcgtggatccgatatcaactagatcttgaga

SEQ ID NO: 4056 - DNA, 170 bp, Artificial sequence
  Kdm5c.1878_Cdh1.387
  crRNA array
cgatttcttggctttatatatcttgtggaaaggacgaaacaccgtaatttctactaagtgtagatagagcacggcacccgccccctaatttctactaagtgtagatctcggcgtctgccgggtccgttttttaagcttggcgtggatccgatatcaactagatcttgaga

SEQ ID NO: 4057 - DNA, 170 bp, Artificial sequence
  Kdm5c.1878_Cdh1.58
  crRNA array
cgatttcttggctttatatatcttgtggaaaggacgaaacaccgtaatttctactaagtgtagatagagcacggcacccgccccctaatttctactaagtgtagatctcgtccgcgcccgggactcttttttaagcttggcgtggatccgatatcaactagatcttgaga

SEQ ID NO: 4058 - DNA, 170 bp, Artificial sequence
  Kdm5c.1878_Cdkn2a.647
  crRNA array
cgatttcttggctttatatatcttgtggaaaggacgaaacaccgtaatttctactaagtgtagatagagcacggcacccgccccctaatttctactaagtgtagatgcaatcacgggagggagcagttttttaagcttggcgtggatccgatatcaactagatcttgaga

SEQ ID NO: 4059 - DNA, 170 bp, Artificial sequence
  Kdm5c.1878_Cdkn2a.648
  crRNA array
cgatttcttggctttatatatcttgtggaaaggacgaaacaccgtaatttctactaagtgtagatagagcacggcacccgccccctaatttctactaagtgtagatcaatcacgggagggagcagattttttaagcttggcgtggatccgatatcaactagatcttgaga

SEQ ID NO: 4060 - DNA, 170 bp, Artificial sequence
  Kdm5c.1878_Cic.162
  crRNA array
cgatttcttggctttatatatcttgtggaaaggacgaaacaccgtaatttctactaagtgtagatagagcacggcacccgccccctaatttctactaagtgtagatcgcaggcgcgcccggcggagttttttaagcttggcgtggatccgatatcaactagatcttgaga

SEQ ID NO: 4061 - DNA, 170 bp, Artificial sequence
  Kdm5c.1878_Cic.164
  crRNA array
cgatttcttggctttatatatcttgtggaaaggacgaaacaccgtaatttctactaagtgtagatagagcacggcacccgccccctaatttctactaagtgtagatcgggccctgggccggcggctttttttaagcttggcgtggatccgatatcaactagatcttgaga

SEQ ID NO: 4062 - DNA, 170 bp, Artificial sequence
  Kdm5c.1878_Ctcf.229
  crRNA array
cgatttcttggctttatatatcttgtggaaaggacgaaacaccgtaatttctactaagtgtagatagagcacggcacccgccccctaatttctactaagtgtagatggctggtggctgatagtctgttttttaagcttggcgtggatccgatatcaactagatcttgaga

SEQ ID NO: 4063 - DNA, 170 bp, Artificial sequence
  Kdm5c.1878_Ctcf.809
  crRNA array
cgatttcttggctttatatatcttgtggaaaggacgaaacaccgtaatttctactaagtgtagatagagcacggcacccgccccctaatttctactaagtgtagataagcgctatcatgatcccaattttttaagcttggcgtggatccgatatcaactagatcttgaga

SEQ ID NO: 4064 - DNA, 170 bp, Artificial sequence
  Kdm5c.1878_Elf3.826
  crRNA array
cgatttcttggctttatatatcttgtggaaaggacgaaacaccgtaatttctactaagtgtagatagagcacggcacccgccccctaatttctactaagtgtagattccgagacatcctaatccacttttttaagcttggcgtggatccgatatcaactagatcttgaga

SEQ ID NO: 4065 - DNA, 170 bp, Artificial sequence
  Kdm5c.1878_Elf3.983
  crRNA array
cgatttcttggctttatatatcttgtggaaaggacgaaacaccgtaatttctactaagtgtagatagagcacggcacccgccccctaatttctactaagtgtagattaggccccctaactggaccattttttaagcttggcgtggatccgatatcaactagatcttgaga

SEQ ID NO: 4066 - DNA, 170 bp, Artificial sequence
  Kdm5c.1878_Ep300.310
  crRNA array
cgatttcttggctttatatatcttgtggaaaggacgaaacaccgtaatttctactaagtgtagatagagcacggcacccgccccctaatttctactaagtgtagatatggtacgacagtgaggaagttttttaagcttggcgtggatccgatatcaactagatcttgaga

SEQ ID NO: 4067 - DNA, 170 bp, Artificial sequence
  Kdm5c.1878_Ep300.587
  crRNA array
cgatttcttggctttatatatcttgtggaaaggacgaaacaccgtaatttctactaagtgtagatagagcacggcacccgccccctaatttctactaagtgtagatcgccccggggcccccaaccattttttaagcttggcgtggatccgatatcaactagatcttgaga

SEQ ID NO: 4068 - DNA, 170 bp, Artificial sequence
  Kdm5c.1878_Epha2.126
  crRNA array
cgatttcttggctttatatatcttgtggaaaggacgaaacaccgtaatttctactaagtgtagatagagcacggcacccgccccctaatttctactaagtgtagatcctgtgccgccgcggccgccttttttaagcttggcgtggatccgatatcaactagatcttgaga

SEQ ID NO: 4069 - DNA, 170 bp, Artificial sequence
  Kdm5c.1878_Epha2.5
  crRNA array
cgatttcttggctttatatatcttgtggaaaggacgaaacaccgtaatttctactaagtgtagatagagcacggcacccgccccctaatttctactaagtgtagatcatgagctggcgccacccggttttttaagcttggcgtggatccgatatcaactagatcttgaga

SEQ ID NO: 4070 - DNA, 170 bp, Artificial sequence
  Kdm5c.1878_Fat1.105
  crRNA array
cgatttcttggctttatatatcttgtggaaaggacgaaacaccgtaatttctactaagtgtagatagagcacggcacccgccccctaatttctactaagtgtagataactcgaggtgacaacaagtttttttaagcttggcgtggatccgatatcaactagatcttgaga

SEQ ID NO: 4071 - DNA, 170 bp, Artificial sequence
  Kdm5c.1878_Fat1.122
  crRNA array
cgatttcttggctttatatatcttgtggaaaggacgaaacaccgtaatttctactaagtgtagatagagcacggcacccgccccctaatttctactaagtgtagatccatcgacatggaaacgggattttttaagcttggcgtggatccgatatcaactagatcttgaga

SEQ ID NO: 4072 - DNA, 170 bp, Artificial sequence
  Kdm5c.1878_Fbxw7.21
  crRNA array
cgatttcttggctttatatatcttgtggaaaggacgaaacaccgtaatttctactaagtgtagatagagcacggcacccgccccctaatttctactaagtgtagattaatgtgccgtagaaacccattttttaagcttggcgtggatccgatatcaactagatcttgaga

SEQ ID NO: 4073 - DNA, 170 bp, Artificial sequence
  Kdm5c.1878_Fbxw7.23
  crRNA array
cgatttcttggctttatatatcttgtggaaaggacgaaacaccgtaatttctactaagtgtagatagagcacggcacccgccccctaatttctactaagtgtagatatgtgccgtagaaacccatattttttaagcttggcgtggatccgatatcaactagatcttgaga

SEQ ID NO: 4074 - DNA, 170 bp, Artificial sequence
  Kdm5c.1878_Gata3.34
  crRNA array
cgatttcttggctttatatatcttgtggaaaggacgaaacaccgtaatttctactaagtgtagatagagcacggcacccgccccctaatttctactaagtgtagatctaaactatcccgcaaagatttttttaagcttggcgtggatccgatatcaactagatcttgaga

SEQ ID NO: 4075 - DNA, 170 bp, Artificial sequence
  Kdm5c.1878_Gata3.47
  crRNA array
cgatttcttggctttatatatcttgtggaaaggacgaaacaccgtaatttctactaagtgtagatagagcacggcacccgccccctaatttctactaagtgtagatcgtagtaggacgggacgtggttttttaagcttggcgtggatccgatatcaactagatcttgaga

SEQ ID NO: 4076 - DNA, 170 bp, Artificial sequence
  Kdm5c.1878_H2-Q2.1
  crRNA array
cgatttcttggctttatatatcttgtggaaaggacgaaacaccgtaatttctactaagtgtagatagagcacggcacccgccccctaatttctactaagtgtagatagggcggccaccaacagcagttttttaagcttggcgtggatccgatatcaactagatcttgaga

SEQ ID NO: 4077 - DNA, 170 bp, Artificial sequence
  Kdm5c.1878_H2-Q2.2
  crRNA array
cgatttcttggctttatatatcttgtggaaaggacgaaacaccgtaatttctactaagtgtagatagagcacggcacccgccccctaatttctactaagtgtagattaacctgcgcccgctgctgattttttaagcttggcgtggatccgatatcaactagatcttgaga

SEQ ID NO: 4078 - DNA, 170 bp, Artificial sequence
  Kdm5c.1878_Kdm6a.56
  crRNA array
cgatttcttggctttatatatcttgtggaaaggacgaaacaccgtaatttctactaagtgtagatagagcacggcacccgccccctaatttctactaagtgtagattcgctgccgcctctcgcggcttttttaagcttggcgtggatccgatatcaactagatcttgaga

SEQ ID NO: 4079 - DNA, 170 bp, Artificial sequence
  Kdm5c.1878_Kdm6a.57
  crRNA array
cgatttcttggctttatatatcttgtggaaaggacgaaacaccgtaatttctactaagtgtagatagagcacggcacccgccccctaatttctactaagtgtagatcgctgccgcctctcgcggcattttttaagcttggcgtggatccgatatcaactagatcttgaga

SEQ ID NO: 4080 - DNA, 170 bp, Artificial sequence
  Kdm5c.1878_Kmt2b.265
  crRNA array
cgatttcttggctttatatatcttgtggaaaggacgaaacaccgtaatttctactaagtgtagatagagcacggcacccgccccctaatttctactaagtgtagatccccaagtgaagcccacctgttttttaagcttggcgtggatccgatatcaactagatcttgaga

SEQ ID NO: 4081 - DNA, 170 bp, Artificial sequence
  Kdm5c.1878_Kmt2b.298
  crRNA array
cgatttcttggctttatatatcttgtggaaaggacgaaacaccgtaatttctactaagtgtagatagagcacggcacccgccccctaatttctactaagtgtagattccggcagggaccggctggcttttttaagcttggcgtggatccgatatcaactagatcttgaga

SEQ ID NO: 4082 - DNA, 170 bp, Artificial sequence
  Kdm5c.1878_Kmt2c.1962
  crRNA array
cgatttcttggctttatatatcttgtggaaaggacgaaacaccgtaatttctactaagtgtagatagagcacggcacccgccccctaatttctactaagtgtagatgtgacgatctgtgccacaagttttttaagcttggcgtggatccgatatcaactagatcttgaga

SEQ ID NO: 4083 - DNA, 170 bp, Artificial sequence
  Kdm5c.1878_Kmt2c.2236
  crRNA array
cgatttcttggctttatatatcttgtggaaaggacgaaacaccgtaatttctactaagtgtagatagagcacggcacccgccccctaatttctactaagtgtagatactcgacctccacctccctattttttaagcttggcgtggatccgatatcaactagatcttgaga

SEQ ID NO: 4084 - DNA, 170 bp, Artificial sequence
  Kdm5c.1878_Kmt2d.316
  crRNA array
cgatttcttggctttatatatcttgtggaaaggacgaaacaccgtaatttctactaagtgtagatagagcacggcacccgccccctaatttctactaagtgtagatactccaggccacccaggtggttttttaagcttggcgtggatccgatatcaactagatcttgaga

SEQ ID NO: 4085 - DNA, 170 bp, Artificial sequence
  Kdm5c.1878_Kmt2d.416
  crRNA array
cgatttcttggctttatatatcttgtggaaaggacgaaacaccgtaatttctactaagtgtagatagagcacggcacccgccccctaatttctactaagtgtagattaaacccccgggggaagggtttttttaagcttggcgtggatccgatatcaactagatcttgaga

SEQ ID NO: 4086 - DNA, 170 bp, Artificial sequence
  Kdm5c.1878_Map2k4.119
  crRNA array
cgatttcttggctttatatatcttgtggaaaggacgaaacaccgtaatttctactaagtgtagatagagcacggcacccgccccctaatttctactaagtgtagattgctgtgtgggcggccacatttttttaagcttggcgtggatccgatatcaactagatcttgaga

SEQ ID NO: 4087 - DNA, 170 bp, Artificial sequence
  Kdm5c.1878_Map2k4.1261
  crRNA array
cgatttcttggctttatatatcttgtggaaaggacgaaacaccgtaatttctactaagtgtagatagagcacggcacccgccccctaatttctactaagtgtagatgatgtagtaatgcggagtagttttttaagcttggcgtggatccgatatcaactagatcttgaga

SEQ ID NO: 4088 - DNA, 170 bp, Artificial sequence
  Kdm5c.1878_Map3k1.235
  crRNA array
cgatttcttggctttatatatcttgtggaaaggacgaaacaccgtaatttctactaagtgtagatagagcacggcacccgccccctaatttctactaagtgtagataaaacgctactgatcgatcgttttttaagcttggcgtggatccgatatcaactagatcttgaga

SEQ ID NO: 4089 - DNA, 170 bp, Artificial sequence
  Kdm5c.1878_Map3k1.3838
  crRNA array
cgatttcttggctttatatatcttgtggaaaggacgaaacaccgtaatttctactaagtgtagatagagcacggcacccgccccctaatttctactaagtgtagatccaacaacagggccccactattttttaagcttggcgtggatccgatatcaactagatcttgaga

SEQ ID NO: 4090 - DNA, 170 bp, Artificial sequence
  Kdm5c.1878_Mga.1655
  crRNA array
cgatttcttggctttatatatcttgtggaaaggacgaaacaccgtaatttctactaagtgtagatagagcacggcacccgccccctaatttctactaagtgtagatcgagaagtggagagcatattttttttaagcttggcgtggatccgatatcaactagatcttgaga

SEQ ID NO: 4091 - DNA, 170 bp, Artificial sequence
  Kdm5c.1878_Mga.93
  crRNA array
cgatttcttggctttatatatcttgtggaaaggacgaaacaccgtaatttctactaagtgtagatagagcacggcacccgccccctaatttctactaagtgtagatgagaaggctccccataatgtttttttaagcttggcgtggatccgatatcaactagatcttgaga

SEQ ID NO: 4092 - DNA, 170 bp, Artificial sequence
  Kdm5c.1878_Nf1.746
  crRNA array
cgatttcttggctttatatatcttgtggaaaggacgaaacaccgtaatttctactaagtgtagatagagcacggcacccgccccctaatttctactaagtgtagattaagcataatgatgatgccattttttaagcttggcgtggatccgatatcaactagatcttgaga

SEQ ID NO: 4093 - DNA, 170 bp, Artificial sequence
  Kdm5c.1878_Nf1.97
  crRNA array
cgatttcttggctttatatatcttgtggaaaggacgaaacaccgtaatttctactaagtgtagatagagcacggcacccgccccctaatttctactaagtgtagatagcccgctacatgctgatgcttttttaagcttggcgtggatccgatatcaactagatcttgaga

SEQ ID NO: 4094 - DNA, 170 bp, Artificial sequence
  Kdm5c.1878_Nf2.356
  crRNA array
cgatttcttggctttatatatcttgtggaaaggacgaaacaccgtaatttctactaagtgtagatagagcacggcacccgccccctaatttctactaagtgtagatcggagtcatctgatagagatttttttaagcttggcgtggatccgatatcaactagatcttgaga

SEQ ID NO: 4095 - DNA, 170 bp, Artificial sequence
  Kdm5c.1878_Nf2.768
  crRNA array
cgatttcttggctttatatatcttgtggaaaggacgaaacaccgtaatttctactaagtgtagatagagcacggcacccgccccctaatttctactaagtgtagatccgaagccccagtgtccggcttttttaagcttggcgtggatccgatatcaactagatcttgaga

SEQ ID NO: 4096 - DNA, 170 bp, Artificial sequence
  Kdm5c.1878_Notch1.1849
  crRNA array
cgatttcttggctttatatatcttgtggaaaggacgaaacaccgtaatttctactaagtgtagatagagcacggcacccgccccctaatttctactaagtgtagatctggcgggtgggcggcgctgttttttaagcttggcgtggatccgatatcaactagatcttgaga

SEQ ID NO: 4097 - DNA, 170 bp, Artificial sequence
  Kdm5c.1878_Notch1.649
  crRNA array
cgatttcttggctttatatatcttgtggaaaggacgaaacaccgtaatttctactaagtgtagatagagcacggcacccgccccctaatttctactaagtgtagattgggccaacgatgccaggacttttttaagcttggcgtggatccgatatcaactagatcttgaga

SEQ ID NO: 4098 - DNA, 170 bp, Artificial sequence
  Kdm5c.1878_Nsd1.70
  crRNA array
cgatttcttggctttatatatcttgtggaaaggacgaaacaccgtaatttctactaagtgtagatagagcacggcacccgccccctaatttctactaagtgtagatactggtgtggacgatgcagattttttaagcttggcgtggatccgatatcaactagatcttgaga

SEQ ID NO: 4099 - DNA, 170 bp, Artificial sequence
  Kdm5c.1878_Nsd1.90
  crRNA array
cgatttcttggctttatatatcttgtggaaaggacgaaacaccgtaatttctactaagtgtagatagagcacggcacccgccccctaatttctactaagtgtagataggagctaacggcaagaatgttttttaagcttggcgtggatccgatatcaactagatcttgaga

SEQ ID NO: 4100 - DNA, 170 bp, Artificial sequence
  Kdm5c.1878_Pbrm1.1236
  crRNA array
cgatttcttggctttatatatcttgtggaaaggacgaaacaccgtaatttctactaagtgtagatagagcacggcacccgccccctaatttctactaagtgtagatgccgataaaaccaacagccgttttttaagcttggcgtggatccgatatcaactagatcttgaga

SEQ ID NO: 4101 - DNA, 170 bp, Artificial sequence
  Kdm5c.1878_Pbrm1.969
  crRNA array
cgatttcttggctttatatatcttgtggaaaggacgaaacaccgtaatttctactaagtgtagatagagcacggcacccgccccctaatttctactaagtgtagatgagccctaatgaacagctcattttttaagcttggcgtggatccgatatcaactagatcttgaga

SEQ ID NO: 4102 - DNA, 170 bp, Artificial sequence
  Kdm5c.1878_Pik3r1.76
  crRNA array
cgatttcttggctttatatatcttgtggaaaggacgaaacaccgtaatttctactaagtgtagatagagcacggcacccgccccctaatttctactaagtgtagataaaacctatacggcccgcacttttttaagcttggcgtggatccgatatcaactagatcttgaga

SEQ ID NO: 4103 - DNA, 170 bp, Artificial sequence
  Kdm5c.1878_Pik3r1.77
  crRNA array
cgatttcttggctttatatatcttgtggaaaggacgaaacaccgtaatttctactaagtgtagatagagcacggcacccgccccctaatttctactaagtgtagataaacctatacggcccgcactttttttaagcttggcgtggatccgatatcaactagatcttgaga

SEQ ID NO: 4104 - DNA, 170 bp, Artificial sequence
  Kdm5c.1878_Pten.240
  crRNA array
cgatttcttggctttatatatcttgtggaaaggacgaaacaccgtaatttctactaagtgtagatagagcacggcacccgccccctaatttctactaagtgtagattgcatacgctatagctgcttttttttaagcttggcgtggatccgatatcaactagatcttgaga

SEQ ID NO: 4105 - DNA, 170 bp, Artificial sequence
  Kdm5c.1878_Pten.265
  crRNA array
cgatttcttggctttatatatcttgtggaaaggacgaaacaccgtaatttctactaagtgtagatagagcacggcacccgccccctaatttctactaagtgtagataagcgtggtgcgtgacgcacttttttaagcttggcgtggatccgatatcaactagatcttgaga

SEQ ID NO: 4106 - DNA, 170 bp, Artificial sequence
  Kdm5c.1878_Rasa1.1478
  crRNA array
cgatttcttggctttatatatcttgtggaaaggacgaaacaccgtaatttctactaagtgtagatagagcacggcacccgccccctaatttctactaagtgtagatcgataatggtctatgatgtcttttttaagcttggcgtggatccgatatcaactagatcttgaga

SEQ ID NO: 4107 - DNA, 170 bp, Artificial sequence
  Kdm5c.1878_Rasa1.223
  crRNA array
cgatttcttggctttatatatcttgtggaaaggacgaaacaccgtaatttctactaagtgtagatagagcacggcacccgccccctaatttctactaagtgtagattccatggagtatcgtgctcgttttttaagcttggcgtggatccgatatcaactagatcttgaga

SEQ ID NO: 4108 - DNA, 170 bp, Artificial sequence
  Kdm5c.1878_Rb1.211
  crRNA array
cgatttcttggctttatatatcttgtggaaaggacgaaacaccgtaatttctactaagtgtagatagagcacggcacccgccccctaatttctactaagtgtagattctgacatgatcgggtacctttttttaagcttggcgtggatccgatatcaactagatcttgaga

SEQ ID NO: 4109 - DNA, 170 bp, Artificial sequence
  Kdm5c.1878_Rb1.394
  crRNA array
cgatttcttggctttatatatcttgtggaaaggacgaaacaccgtaatttctactaagtgtagatagagcacggcacccgccccctaatttctactaagtgtagatagaaatctcgaagcaggatcttttttaagcttggcgtggatccgatatcaactagatcttgaga

SEQ ID NO: 4110 - DNA, 170 bp, Artificial sequence
  Kdm5c.1878_Rbm10.5
  crRNA array
cgatttcttggctttatatatcttgtggaaaggacgaaacaccgtaatttctactaagtgtagatagagcacggcacccgccccctaatttctactaagtgtagatacgaaacctgaacccacacattttttaagcttggcgtggatccgatatcaactagatcttgaga

SEQ ID NO: 4111 - DNA, 170 bp, Artificial sequence
  Kdm5c.1878_Rbm10.6
  crRNA array
cgatttcttggctttatatatcttgtggaaaggacgaaacaccgtaatttctactaagtgtagatagagcacggcacccgccccctaatttctactaagtgtagatcgaaacctgaacccacacagttttttaagcttggcgtggatccgatatcaactagatcttgaga

SEQ ID NO: 4112 - DNA, 170 bp, Artificial sequence
  Kdm5c.1878_Rnf43.1920
  crRNA array
cgatttcttggctttatatatcttgtggaaaggacgaaacaccgtaatttctactaagtgtagatagagcacggcacccgccccctaatttctactaagtgtagatatccccgtgccgtggactccttttttaagcttggcgtggatccgatatcaactagatcttgaga

SEQ ID NO: 4113 - DNA, 170 bp, Artificial sequence
  Kdm5c.1878_Rnf43.39
  crRNA array
cgatttcttggctttatatatcttgtggaaaggacgaaacaccgtaatttctactaagtgtagatagagcacggcacccgccccctaatttctactaagtgtagatcaaggggatcactctgataattttttaagcttggcgtggatccgatatcaactagatcttgaga

SEQ ID NO: 4114 - DNA, 170 bp, Artificial sequence
  Kdm5c.1878_Runx1.204
  crRNA array
cgatttcttggctttatatatcttgtggaaaggacgaaacaccgtaatttctactaagtgtagatagagcacggcacccgccccctaatttctactaagtgtagattaaataagtccagccgttttttttttaagcttggcgtggatccgatatcaactagatcttgaga

SEQ ID NO: 4115 - DNA, 170 bp, Artificial sequence
  Kdm5c.1878_Runx1.81
  crRNA array
cgatttcttggctttatatatcttgtggaaaggacgaaacaccgtaatttctactaagtgtagatagagcacggcacccgccccctaatttctactaagtgtagataggacgcgtatgggaattttttttttaagcttggcgtggatccgatatcaactagatcttgaga

SEQ ID NO: 4116 - DNA, 170 bp, Artificial sequence
  Kdm5c.1878_Setd2.143
  crRNA array
cgatttcttggctttatatatcttgtggaaaggacgaaacaccgtaatttctactaagtgtagatagagcacggcacccgccccctaatttctactaagtgtagatgcacaaccacaacagactggttttttaagcttggcgtggatccgatatcaactagatcttgaga

SEQ ID NO: 4117 - DNA, 170 bp, Artificial sequence
  Kdm5c.1878_Setd2.508
  crRNA array
cgatttcttggctttatatatcttgtggaaaggacgaaacaccgtaatttctactaagtgtagatagagcacggcacccgccccctaatttctactaagtgtagattacgatcccgagcacccgacttttttaagcttggcgtggatccgatatcaactagatcttgaga

SEQ ID NO: 4118 - DNA, 170 bp, Artificial sequence
  Kdm5c.1878_Smad4.3038
  crRNA array
cgatttcttggctttatatatcttgtggaaaggacgaaacaccgtaatttctactaagtgtagatagagcacggcacccgccccctaatttctactaagtgtagatatctgcggcagtgtcaccggttttttaagcttggcgtggatccgatatcaactagatcttgaga

SEQ ID NO: 4119 - DNA, 170 bp, Artificial sequence
  Kdm5c.1878_Smad4.39
  crRNA array
cgatttcttggctttatatatcttgtggaaaggacgaaacaccgtaatttctactaagtgtagatagagcacggcacccgccccctaatttctactaagtgtagatagtcaaacgcatactgacaattttttaagcttggcgtggatccgatatcaactagatcttgaga

SEQ ID NO: 4120 - DNA, 170 bp, Artificial sequence
  Kdm5c.1878_Stag2.1409
  crRNA array
cgatttcttggctttatatatcttgtggaaaggacgaaacaccgtaatttctactaagtgtagatagagcacggcacccgccccctaatttctactaagtgtagatgctaataactgcggaagggcttttttaagcttggcgtggatccgatatcaactagatcttgaga

SEQ ID NO: 4121 - DNA, 170 bp, Artificial sequence
  Kdm5c.1878_Stag2.4401
  crRNA array
cgatttcttggctttatatatcttgtggaaaggacgaaacaccgtaatttctactaagtgtagatagagcacggcacccgccccctaatttctactaagtgtagattaatcgtccagtggtgtatattttttaagcttggcgtggatccgatatcaactagatcttgaga

SEQ ID NO: 4122 - DNA, 170 bp, Artificial sequence
  Kdm5c.1878_Tbl1xr1.1
  crRNA array
cgatttcttggctttatatatcttgtggaaaggacgaaacaccgtaatttctactaagtgtagatagagcacggcacccgccccctaatttctactaagtgtagatggatgcgcatactggtgaagttttttaagcttggcgtggatccgatatcaactagatcttgaga

SEQ ID NO: 4123 - DNA, 170 bp, Artificial sequence
  Kdm5c.1878_Tbl1xr1.83
  crRNA array
cgatttcttggctttatatatcttgtggaaaggacgaaacaccgtaatttctactaagtgtagatagagcacggcacccgccccctaatttctactaagtgtagatatggtcgacccatcgagtctttttttaagcttggcgtggatccgatatcaactagatcttgaga

SEQ ID NO: 4124 - DNA, 170 bp, Artificial sequence
  Kdm5c.1878_Tgfbr2.290
  crRNA array
cgatttcttggctttatatatcttgtggaaaggacgaaacaccgtaatttctactaagtgtagatagagcacggcacccgccccctaatttctactaagtgtagatcctctcggcgcccgggtaaattttttaagcttggcgtggatccgatatcaactagatcttgaga

SEQ ID NO: 4125 - DNA, 170 bp, Artificial sequence
  Kdm5c.1878_Tgfbr2.292
  crRNA array
cgatttcttggctttatatatcttgtggaaaggacgaaacaccgtaatttctactaagtgtagatagagcacggcacccgccccctaatttctactaagtgtagatcccgggcgccgagagggaaattttttaagcttggcgtggatccgatatcaactagatcttgaga

SEQ ID NO: 4126 - DNA, 170 bp, Artificial sequence
  Kdm5c.1878_Trp53.4
  crRNA array
cgatttcttggctttatatatcttgtggaaaggacgaaacaccgtaatttctactaagtgtagatagagcacggcacccgccccctaatttctactaagtgtagatccctgaactgcccccagggattttttaagcttggcgtggatccgatatcaactagatcttgaga

SEQ ID NO: 4127 - DNA, 170 bp, Artificial sequence
  Kdm5c.1878_Trp53.528
  crRNA array
cgatttcttggctttatatatcttgtggaaaggacgaaacaccgtaatttctactaagtgtagatagagcacggcacccgccccctaatttctactaagtgtagatgctgggccagcagagacctgttttttaagcttggcgtggatccgatatcaactagatcttgaga

SEQ ID NO: 4128 - DNA, 170 bp, Artificial sequence
  Kdm5c.1878_Vhl.1
  crRNA array
cgatttcttggctttatatatcttgtggaaaggacgaaacaccgtaatttctactaagtgtagatagagcacggcacccgccccctaatttctactaagtgtagatagggctcccggcggccatttttttttaagcttggcgtggatccgatatcaactagatcttgaga

SEQ ID NO: 4129 - DNA, 170 bp, Artificial sequence
  Kdm5c.1878_Vhl.151
  crRNA array
cgatttcttggctttatatatcttgtggaaaggacgaaacaccgtaatttctactaagtgtagatagagcacggcacccgccccctaatttctactaagtgtagattagagcactcacccgagggattttttaagcttggcgtggatccgatatcaactagatcttgaga

SEQ ID NO: 4130 - DNA, 170 bp, Artificial sequence
  Kdm5c.1878_Zc3h13.1387
  crRNA array
cgatttcttggctttatatatcttgtggaaaggacgaaacaccgtaatttctactaagtgtagatagagcacggcacccgccccctaatttctactaagtgtagatgtgacgccggtcatgtgactttttttaagcttggcgtggatccgatatcaactagatcttgaga

SEQ ID NO: 4131 - DNA, 170 bp, Artificial sequence
  Kdm5c.1878_Zc3h13.1777
  crRNA array
cgatttcttggctttatatatcttgtggaaaggacgaaacaccgtaatttctactaagtgtagatagagcacggcacccgccccctaatttctactaagtgtagatgatgctgccagtgtagcggcttttttaagcttggcgtggatccgatatcaactagatcttgaga

SEQ ID NO: 4132 - DNA, 170 bp, Artificial sequence
  Kdm5c.1879_Acvr2a.155
  crRNA array
cgatttcttggctttatatatcttgtggaaaggacgaaacaccgtaatttctactaagtgtagatgagcacggcacccgcccccctaatttctactaagtgtagatggacctggctaatcaagtatttttttaagcttggcgtggatccgatatcaactagatcttgaga

SEQ ID NO: 4133 - DNA, 170 bp, Artificial sequence
  Kdm5c.1879_Acvr2a.70
  crRNA array
cgatttcttggctttatatatcttgtggaaaggacgaaacaccgtaatttctactaagtgtagatgagcacggcacccgcccccctaatttctactaagtgtagatcccgaggcgccggagaagccttttttaagcttggcgtggatccgatatcaactagatcttgaga

SEQ ID NO: 4134 - DNA, 170 bp, Artificial sequence
  Kdm5c.1879_Apc.21
  crRNA array
cgatttcttggctttatatatcttgtggaaaggacgaaacaccgtaatttctactaagtgtagatgagcacggcacccgcccccctaatttctactaagtgtagatgtgatccacacgtgtagctgttttttaagcttggcgtggatccgatatcaactagatcttgaga

SEQ ID NO: 4135 - DNA, 170 bp, Artificial sequence
  Kdm5c.1879_Apc.867
  crRNA array
cgatttcttggctttatatatcttgtggaaaggacgaaacaccgtaatttctactaagtgtagatgagcacggcacccgcccccctaatttctactaagtgtagatcagtcccaggcggcggaagcttttttaagcttggcgtggatccgatatcaactagatcttgaga

SEQ ID NO: 4136 - DNA, 170 bp, Artificial sequence
  Kdm5c.1879_Arid1a.2
  crRNA array
cgatttcttggctttatatatcttgtggaaaggacgaaacaccgtaatttctactaagtgtagatgagcacggcacccgcccccctaatttctactaagtgtagatcccgcgcccccgtcctggggttttttaagcttggcgtggatccgatatcaactagatcttgaga

SEQ ID NO: 4137 - DNA, 170 bp, Artificial sequence
  Kdm5c.1879_Arid1a.5
  crRNA array
cgatttcttggctttatatatcttgtggaaaggacgaaacaccgtaatttctactaagtgtagatgagcacggcacccgcccccctaatttctactaagtgtagatcccgcgctcggccgctgccgttttttaagcttggcgtggatccgatatcaactagatcttgaga

SEQ ID NO: 4138 - DNA, 170 bp, Artificial sequence
  Kdm5c.1879_Arid2.166
  crRNA array
cgatttcttggctttatatatcttgtggaaaggacgaaacaccgtaatttctactaagtgtagatgagcacggcacccgcccccctaatttctactaagtgtagataaccgcgatctgggttttttttttttaagcttggcgtggatccgatatcaactagatcttgaga

SEQ ID NO: 4139 - DNA, 170 bp, Artificial sequence
  Kdm5c.1879_Arid2.172
  crRNA array
cgatttcttggctttatatatcttgtggaaaggacgaaacaccgtaatttctactaagtgtagatgagcacggcacccgcccccctaatttctactaagtgtagatctggacgagctgcggcagttttttttaagcttggcgtggatccgatatcaactagatcttgaga

SEQ ID NO: 4140 - DNA, 170 bp, Artificial sequence
  Kdm5c.1879_Atm.120
  crRNA array
cgatttcttggctttatatatcttgtggaaaggacgaaacaccgtaatttctactaagtgtagatgagcacggcacccgcccccctaatttctactaagtgtagatgacaggtagtcggcagctaattttttaagcttggcgtggatccgatatcaactagatcttgaga

SEQ ID NO: 4141 - DNA, 170 bp, Artificial sequence
  Kdm5c.1879_Atm.997
  crRNA array
cgatttcttggctttatatatcttgtggaaaggacgaaacaccgtaatttctactaagtgtagatgagcacggcacccgcccccctaatttctactaagtgtagatgagaaagtctccgaatcgttttttttaagcttggcgtggatccgatatcaactagatcttgaga

SEQ ID NO: 4142 - DNA, 170 bp, Artificial sequence
  Kdm5c.1879_Atrx.249
  crRNA array
cgatttcttggctttatatatcttgtggaaaggacgaaacaccgtaatttctactaagtgtagatgagcacggcacccgcccccctaatttctactaagtgtagattagccagtcgctcatatctcttttttaagcttggcgtggatccgatatcaactagatcttgaga

SEQ ID NO: 4143 - DNA, 170 bp, Artificial sequence
  Kdm5c.1879_Atrx.251
  crRNA array
cgatttcttggctttatatatcttgtggaaaggacgaaacaccgtaatttctactaagtgtagatgagcacggcacccgcccccctaatttctactaagtgtagatgccagtcgctcatatctctgttttttaagcttggcgtggatccgatatcaactagatcttgaga

SEQ ID NO: 4144 - DNA, 170 bp, Artificial sequence
  Kdm5c.1879_Bcor.203
  crRNA array
cgatttcttggctttatatatcttgtggaaaggacgaaacaccgtaatttctactaagtgtagatgagcacggcacccgcccccctaatttctactaagtgtagatccccggagcggagtccaggcttttttaagcttggcgtggatccgatatcaactagatcttgaga

SEQ ID NO: 4145 - DNA, 170 bp, Artificial sequence
  Kdm5c.1879_Bcor.475
  crRNA array
cgatttcttggctttatatatcttgtggaaaggacgaaacaccgtaatttctactaagtgtagatgagcacggcacccgcccccctaatttctactaagtgtagattgcaacccctctgtatgggattttttaagcttggcgtggatccgatatcaactagatcttgaga

SEQ ID NO: 4146 - DNA, 170 bp, Artificial sequence
  Kdm5c.1879_Brca1.112
  crRNA array
cgatttcttggctttatatatcttgtggaaaggacgaaacaccgtaatttctactaagtgtagatgagcacggcacccgcccccctaatttctactaagtgtagatctagacgctctgtggagactttttttaagcttggcgtggatccgatatcaactagatcttgaga

SEQ ID NO: 4147 - DNA, 170 bp, Artificial sequence
  Kdm5c.1879_Brca1.53
  crRNA array
cgatttcttggctttatatatcttgtggaaaggacgaaacaccgtaatttctactaagtgtagatgagcacggcacccgcccccctaatttctactaagtgtagataatgaggaggcgtcgatcatttttttaagcttggcgtggatccgatatcaactagatcttgaga

SEQ ID NO: 4148 - DNA, 170 bp, Artificial sequence
  Kdm5c.1879_Casp8.45
  crRNA array
cgatttcttggctttatatatcttgtggaaaggacgaaacaccgtaatttctactaagtgtagatgagcacggcacccgcccccctaatttctactaagtgtagatctaccgagatcctgtgaatgttttttaagcttggcgtggatccgatatcaactagatcttgaga

SEQ ID NO: 4149 - DNA, 170 bp, Artificial sequence
  Kdm5c.1879_Casp8.54
  crRNA array
cgatttcttggctttatatatcttgtggaaaggacgaaacaccgtaatttctactaagtgtagatgagcacggcacccgcccccctaatttctactaagtgtagatcagtgcagtcgtcgtaagatttttttaagcttggcgtggatccgatatcaactagatcttgaga

SEQ ID NO: 4150 - DNA, 170 bp, Artificial sequence
  Kdm5c.1879_Cbwd1.84
  crRNA array
cgatttcttggctttatatatcttgtggaaaggacgaaacaccgtaatttctactaagtgtagatgagcacggcacccgcccccctaatttctactaagtgtagatcacagcaggtaacatgccgcttttttaagcttggcgtggatccgatatcaactagatcttgaga

SEQ ID NO: 4151 - DNA, 170 bp, Artificial sequence
  Kdm5c.1879_Cbwd1.85
  crRNA array
cgatttcttggctttatatatcttgtggaaaggacgaaacaccgtaatttctactaagtgtagatgagcacggcacccgcccccctaatttctactaagtgtagatacagcaggtaacatgccgccttttttaagcttggcgtggatccgatatcaactagatcttgaga

SEQ ID NO: 4152 - DNA, 170 bp, Artificial sequence
  Kdm5c.1879_Cdh1.387
  crRNA array
cgatttcttggctttatatatcttgtggaaaggacgaaacaccgtaatttctactaagtgtagatgagcacggcacccgcccccctaatttctactaagtgtagatctcggcgtctgccgggtccgttttttaagcttggcgtggatccgatatcaactagatcttgaga

SEQ ID NO: 4153 - DNA, 170 bp, Artificial sequence
  Kdm5c.1879_Cdh1.58
  crRNA array
cgatttcttggctttatatatcttgtggaaaggacgaaacaccgtaatttctactaagtgtagatgagcacggcacccgcccccctaatttctactaagtgtagatctcgtccgcgcccgggactcttttttaagcttggcgtggatccgatatcaactagatcttgaga

SEQ ID NO: 4154 - DNA, 170 bp, Artificial sequence
  Kdm5c.1879_Cdkn2a.647
  crRNA array
cgatttcttggctttatatatcttgtggaaaggacgaaacaccgtaatttctactaagtgtagatgagcacggcacccgcccccctaatttctactaagtgtagatgcaatcacgggagggagcagttttttaagcttggcgtggatccgatatcaactagatcttgaga

SEQ ID NO: 4155 - DNA, 170 bp, Artificial sequence
  Kdm5c.1879_Cdkn2a.648
  crRNA array
cgatttcttggctttatatatcttgtggaaaggacgaaacaccgtaatttctactaagtgtagatgagcacggcacccgcccccctaatttctactaagtgtagatcaatcacgggagggagcagattttttaagcttggcgtggatccgatatcaactagatcttgaga

SEQ ID NO: 4156 - DNA, 170 bp, Artificial sequence
  Kdm5c.1879_Cic.162
  crRNA array
cgatttcttggctttatatatcttgtggaaaggacgaaacaccgtaatttctactaagtgtagatgagcacggcacccgcccccctaatttctactaagtgtagatcgcaggcgcgcccggcggagttttttaagcttggcgtggatccgatatcaactagatcttgaga

SEQ ID NO: 4157 - DNA, 170 bp, Artificial sequence
  Kdm5c.1879_Cic.164
  crRNA array
cgatttcttggctttatatatcttgtggaaaggacgaaacaccgtaatttctactaagtgtagatgagcacggcacccgcccccctaatttctactaagtgtagatcgggccctgggccggcggctttttttaagcttggcgtggatccgatatcaactagatcttgaga

SEQ ID NO: 4158 - DNA, 170 bp, Artificial sequence
  Kdm5c.1879_Ctcf.229
  crRNA array
cgatttcttggctttatatatcttgtggaaaggacgaaacaccgtaatttctactaagtgtagatgagcacggcacccgcccccctaatttctactaagtgtagatggctggtggctgatagtctgttttttaagcttggcgtggatccgatatcaactagatcttgaga

SEQ ID NO: 4159 - DNA, 170 bp, Artificial sequence
  Kdm5c.1879_Ctcf.809
  crRNA array
cgatttcttggctttatatatcttgtggaaaggacgaaacaccgtaatttctactaagtgtagatgagcacggcacccgcccccctaatttctactaagtgtagataagcgctatcatgatcccaattttttaagcttggcgtggatccgatatcaactagatcttgaga

SEQ ID NO: 4160 - DNA, 170 bp, Artificial sequence
  Kdm5c.1879_Elf3.826
  crRNA array
cgatttcttggctttatatatcttgtggaaaggacgaaacaccgtaatttctactaagtgtagatgagcacggcacccgcccccctaatttctactaagtgtagattccgagacatcctaatccacttttttaagcttggcgtggatccgatatcaactagatcttgaga

SEQ ID NO: 4161 - DNA, 170 bp, Artificial sequence
  Kdm5c.1879_Elf3.983
  crRNA array
cgatttcttggctttatatatcttgtggaaaggacgaaacaccgtaatttctactaagtgtagatgagcacggcacccgcccccctaatttctactaagtgtagattaggccccctaactggaccattttttaagcttggcgtggatccgatatcaactagatcttgaga

SEQ ID NO: 4162 - DNA, 170 bp, Artificial sequence
  Kdm5c.1879_Ep300.310
  crRNA array
cgatttcttggctttatatatcttgtggaaaggacgaaacaccgtaatttctactaagtgtagatgagcacggcacccgcccccctaatttctactaagtgtagatatggtacgacagtgaggaagttttttaagcttggcgtggatccgatatcaactagatcttgaga

SEQ ID NO: 4163 - DNA, 170 bp, Artificial sequence
  Kdm5c.1879_Ep300.587
  crRNA array
cgatttcttggctttatatatcttgtggaaaggacgaaacaccgtaatttctactaagtgtagatgagcacggcacccgcccccctaatttctactaagtgtagatcgccccggggcccccaaccattttttaagcttggcgtggatccgatatcaactagatcttgaga

SEQ ID NO: 4164 - DNA, 170 bp, Artificial sequence
  Kdm5c.1879_Epha2.126
  crRNA array
cgatttcttggctttatatatcttgtggaaaggacgaaacaccgtaatttctactaagtgtagatgagcacggcacccgcccccctaatttctactaagtgtagatcctgtgccgccgcggccgccttttttaagcttggcgtggatccgatatcaactagatcttgaga

SEQ ID NO: 4165 - DNA, 170 bp, Artificial sequence
  Kdm5c.1879_Epha2.5
  crRNA array
cgatttcttggctttatatatcttgtggaaaggacgaaacaccgtaatttctactaagtgtagatgagcacggcacccgcccccctaatttctactaagtgtagatcatgagctggcgccacccggttttttaagcttggcgtggatccgatatcaactagatcttgaga

SEQ ID NO: 4166 - DNA, 170 bp, Artificial sequence
  Kdm5c.1879_Fat1.105
  crRNA array
cgatttcttggctttatatatcttgtggaaaggacgaaacaccgtaatttctactaagtgtagatgagcacggcacccgcccccctaatttctactaagtgtagataactcgaggtgacaacaagtttttttaagcttggcgtggatccgatatcaactagatcttgaga

SEQ ID NO: 4167 - DNA, 170 bp, Artificial sequence
  Kdm5c.1879_Fat1.122
  crRNA array
cgatttcttggctttatatatcttgtggaaaggacgaaacaccgtaatttctactaagtgtagatgagcacggcacccgcccccctaatttctactaagtgtagatccatcgacatggaaacgggattttttaagcttggcgtggatccgatatcaactagatcttgaga

SEQ ID NO: 4168 - DNA, 170 bp, Artificial sequence
  Kdm5c.1879_Fbxw7.21
  crRNA array
cgatttcttggctttatatatcttgtggaaaggacgaaacaccgtaatttctactaagtgtagatgagcacggcacccgcccccctaatttctactaagtgtagattaatgtgccgtagaaacccattttttaagcttggcgtggatccgatatcaactagatcttgaga

SEQ ID NO: 4169 - DNA, 170 bp, Artificial sequence
  Kdm5c.1879_Fbxw7.23
  crRNA array
cgatttcttggctttatatatcttgtggaaaggacgaaacaccgtaatttctactaagtgtagatgagcacggcacccgcccccctaatttctactaagtgtagatatgtgccgtagaaacccatattttttaagcttggcgtggatccgatatcaactagatcttgaga

SEQ ID NO: 4170 - DNA, 170 bp, Artificial sequence
  Kdm5c.1879_Gata3.34
  crRNA array
cgatttcttggctttatatatcttgtggaaaggacgaaacaccgtaatttctactaagtgtagatgagcacggcacccgcccccctaatttctactaagtgtagatctaaactatcccgcaaagatttttttaagcttggcgtggatccgatatcaactagatcttgaga

SEQ ID NO: 4171 - DNA, 170 bp, Artificial sequence
  Kdm5c.1879_Gata3.47
  crRNA array
cgatttcttggctttatatatcttgtggaaaggacgaaacaccgtaatttctactaagtgtagatgagcacggcacccgcccccctaatttctactaagtgtagatcgtagtaggacgggacgtggttttttaagcttggcgtggatccgatatcaactagatcttgaga

SEQ ID NO: 4172 - DNA, 170 bp, Artificial sequence
  Kdm5c.1879_H2-Q2.1
  crRNA array
cgatttcttggctttatatatcttgtggaaaggacgaaacaccgtaatttctactaagtgtagatgagcacggcacccgcccccctaatttctactaagtgtagatagggcggccaccaacagcagttttttaagcttggcgtggatccgatatcaactagatcttgaga

SEQ ID NO: 4173 - DNA, 170 bp, Artificial sequence
  Kdm5c.1879_H2-Q2.2
  crRNA array
cgatttcttggctttatatatcttgtggaaaggacgaaacaccgtaatttctactaagtgtagatgagcacggcacccgcccccctaatttctactaagtgtagattaacctgcgcccgctgctgattttttaagcttggcgtggatccgatatcaactagatcttgaga

SEQ ID NO: 4174 - DNA, 170 bp, Artificial sequence
  Kdm5c.1879_Kdm6a.56
  crRNA array
cgatttcttggctttatatatcttgtggaaaggacgaaacaccgtaatttctactaagtgtagatgagcacggcacccgcccccctaatttctactaagtgtagattcgctgccgcctctcgcggcttttttaagcttggcgtggatccgatatcaactagatcttgaga

SEQ ID NO: 4175 - DNA, 170 bp, Artificial sequence
  Kdm5c.1879_Kdm6a.57
  crRNA array
cgatttcttggctttatatatcttgtggaaaggacgaaacaccgtaatttctactaagtgtagatgagcacggcacccgcccccctaatttctactaagtgtagatcgctgccgcctctcgcggcattttttaagcttggcgtggatccgatatcaactagatcttgaga

SEQ ID NO: 4176 - DNA, 170 bp, Artificial sequence
  Kdm5c.1879_Kmt2b.265
  crRNA array
cgatttcttggctttatatatcttgtggaaaggacgaaacaccgtaatttctactaagtgtagatgagcacggcacccgcccccctaatttctactaagtgtagatccccaagtgaagcccacctgttttttaagcttggcgtggatccgatatcaactagatcttgaga

SEQ ID NO: 4177 - DNA, 170 bp, Artificial sequence
  Kdm5c.1879_Kmt2b.298
  crRNA array
cgatttcttggctttatatatcttgtggaaaggacgaaacaccgtaatttctactaagtgtagatgagcacggcacccgcccccctaatttctactaagtgtagattccggcagggaccggctggcttttttaagcttggcgtggatccgatatcaactagatcttgaga

SEQ ID NO: 4178 - DNA, 170 bp, Artificial sequence
  Kdm5c.1879_Kmt2c.1962
  crRNA array
cgatttcttggctttatatatcttgtggaaaggacgaaacaccgtaatttctactaagtgtagatgagcacggcacccgcccccctaatttctactaagtgtagatgtgacgatctgtgccacaagttttttaagcttggcgtggatccgatatcaactagatcttgaga

SEQ ID NO: 4179 - DNA, 170 bp, Artificial sequence
  Kdm5c.1879_Kmt2c.2236
  crRNA array
cgatttcttggctttatatatcttgtggaaaggacgaaacaccgtaatttctactaagtgtagatgagcacggcacccgcccccctaatttctactaagtgtagatactcgacctccacctccctattttttaagcttggcgtggatccgatatcaactagatcttgaga

SEQ ID NO: 4180 - DNA, 170 bp, Artificial sequence
  Kdm5c.1879_Kmt2d.316
  crRNA array
cgatttcttggctttatatatcttgtggaaaggacgaaacaccgtaatttctactaagtgtagatgagcacggcacccgcccccctaatttctactaagtgtagatactccaggccacccaggtggttttttaagcttggcgtggatccgatatcaactagatcttgaga

SEQ ID NO: 4181 - DNA, 170 bp, Artificial sequence
  Kdm5c.1879_Kmt2d.416
  crRNA array
cgatttcttggctttatatatcttgtggaaaggacgaaacaccgtaatttctactaagtgtagatgagcacggcacccgcccccctaatttctactaagtgtagattaaacccccgggggaagggtttttttaagcttggcgtggatccgatatcaactagatcttgaga

SEQ ID NO: 4182 - DNA, 170 bp, Artificial sequence
  Kdm5c.1879_Map2k4.119
  crRNA array
cgatttcttggctttatatatcttgtggaaaggacgaaacaccgtaatttctactaagtgtagatgagcacggcacccgcccccctaatttctactaagtgtagattgctgtgtgggcggccacatttttttaagcttggcgtggatccgatatcaactagatcttgaga

SEQ ID NO: 4183 - DNA, 170 bp, Artificial sequence
  Kdm5c.1879_Map2k4.1261
  crRNA array
cgatttcttggctttatatatcttgtggaaaggacgaaacaccgtaatttctactaagtgtagatgagcacggcacccgcccccctaatttctactaagtgtagatgatgtagtaatgcggagtagttttttaagcttggcgtggatccgatatcaactagatcttgaga

SEQ ID NO: 4184 - DNA, 170 bp, Artificial sequence
  Kdm5c.1879_Map3k1.235
  crRNA array
cgatttcttggctttatatatcttgtggaaaggacgaaacaccgtaatttctactaagtgtagatgagcacggcacccgcccccctaatttctactaagtgtagataaaacgctactgatcgatcgttttttaagcttggcgtggatccgatatcaactagatcttgaga

SEQ ID NO: 4185 - DNA, 170 bp, Artificial sequence
  Kdm5c.1879_Map3k1.3838
  crRNA array
cgatttcttggctttatatatcttgtggaaaggacgaaacaccgtaatttctactaagtgtagatgagcacggcacccgcccccctaatttctactaagtgtagatccaacaacagggccccactattttttaagcttggcgtggatccgatatcaactagatcttgaga

SEQ ID NO: 4186 - DNA, 170 bp, Artificial sequence
  Kdm5c.1879_Mga.1655
  crRNA array
cgatttcttggctttatatatcttgtggaaaggacgaaacaccgtaatttctactaagtgtagatgagcacggcacccgcccccctaatttctactaagtgtagatcgagaagtggagagcatattttttttaagcttggcgtggatccgatatcaactagatcttgaga

SEQ ID NO: 4187 - DNA, 170 bp, Artificial sequence
  Kdm5c.1879_Mga.93
  crRNA array
cgatttcttggctttatatatcttgtggaaaggacgaaacaccgtaatttctactaagtgtagatgagcacggcacccgcccccctaatttctactaagtgtagatgagaaggctccccataatgtttttttaagcttggcgtggatccgatatcaactagatcttgaga

SEQ ID NO: 4188 - DNA, 170 bp, Artificial sequence
  Kdm5c.1879_Nf1.746
  crRNA array
cgatttcttggctttatatatcttgtggaaaggacgaaacaccgtaatttctactaagtgtagatgagcacggcacccgcccccctaatttctactaagtgtagattaagcataatgatgatgccattttttaagcttggcgtggatccgatatcaactagatcttgaga

SEQ ID NO: 4189 - DNA, 170 bp, Artificial sequence
  Kdm5c.1879_Nf1.97
  crRNA array
cgatttcttggctttatatatcttgtggaaaggacgaaacaccgtaatttctactaagtgtagatgagcacggcacccgcccccctaatttctactaagtgtagatagcccgctacatgctgatgcttttttaagcttggcgtggatccgatatcaactagatcttgaga

SEQ ID NO: 4190 - DNA, 170 bp, Artificial sequence
  Kdm5c.1879_Nf2.356
  crRNA array
cgatttcttggctttatatatcttgtggaaaggacgaaacaccgtaatttctactaagtgtagatgagcacggcacccgcccccctaatttctactaagtgtagatcggagtcatctgatagagatttttttaagcttggcgtggatccgatatcaactagatcttgaga

SEQ ID NO: 4191 - DNA, 170 bp, Artificial sequence
  Kdm5c.1879_Nf2.768
  crRNA array
cgatttcttggctttatatatcttgtggaaaggacgaaacaccgtaatttctactaagtgtagatgagcacggcacccgcccccctaatttctactaagtgtagatccgaagccccagtgtccggcttttttaagcttggcgtggatccgatatcaactagatcttgaga

SEQ ID NO: 4192 - DNA, 170 bp, Artificial sequence
  Kdm5c.1879_Notch1.1849
  crRNA array
cgatttcttggctttatatatcttgtggaaaggacgaaacaccgtaatttctactaagtgtagatgagcacggcacccgcccccctaatttctactaagtgtagatctggcgggtgggcggcgctgttttttaagcttggcgtggatccgatatcaactagatcttgaga

SEQ ID NO: 4193 - DNA, 170 bp, Artificial sequence
  Kdm5c.1879_Notch1.649
  crRNA array
cgatttcttggctttatatatcttgtggaaaggacgaaacaccgtaatttctactaagtgtagatgagcacggcacccgcccccctaatttctactaagtgtagattgggccaacgatgccaggacttttttaagcttggcgtggatccgatatcaactagatcttgaga

SEQ ID NO: 4194 - DNA, 170 bp, Artificial sequence
  Kdm5c.1879_Nsd1.70
  crRNA array
cgatttcttggctttatatatcttgtggaaaggacgaaacaccgtaatttctactaagtgtagatgagcacggcacccgcccccctaatttctactaagtgtagatactggtgtggacgatgcagattttttaagcttggcgtggatccgatatcaactagatcttgaga

SEQ ID NO: 4195 - DNA, 170 bp, Artificial sequence
  Kdm5c.1879_Nsd1.90
  crRNA array
cgatttcttggctttatatatcttgtggaaaggacgaaacaccgtaatttctactaagtgtagatgagcacggcacccgcccccctaatttctactaagtgtagataggagctaacggcaagaatgttttttaagcttggcgtggatccgatatcaactagatcttgaga

SEQ ID NO: 4196 - DNA, 170 bp, Artificial sequence
  Kdm5c.1879_Pbrm1.1236
  crRNA array
cgatttcttggctttatatatcttgtggaaaggacgaaacaccgtaatttctactaagtgtagatgagcacggcacccgcccccctaatttctactaagtgtagatgccgataaaaccaacagccgttttttaagcttggcgtggatccgatatcaactagatcttgaga

SEQ ID NO: 4197 - DNA, 170 bp, Artificial sequence
  Kdm5c.1879_Pbrm1.969
  crRNA array
cgatttcttggctttatatatcttgtggaaaggacgaaacaccgtaatttctactaagtgtagatgagcacggcacccgcccccctaatttctactaagtgtagatgagccctaatgaacagctcattttttaagcttggcgtggatccgatatcaactagatcttgaga

SEQ ID NO: 4198 - DNA, 170 bp, Artificial sequence
  Kdm5c.1879_Pik3r1.76
  crRNA array
cgatttcttggctttatatatcttgtggaaaggacgaaacaccgtaatttctactaagtgtagatgagcacggcacccgcccccctaatttctactaagtgtagataaaacctatacggcccgcacttttttaagcttggcgtggatccgatatcaactagatcttgaga

SEQ ID NO: 4199 - DNA, 170 bp, Artificial sequence
  Kdm5c.1879_Pik3r1.77
  crRNA array
cgatttcttggctttatatatcttgtggaaaggacgaaacaccgtaatttctactaagtgtagatgagcacggcacccgcccccctaatttctactaagtgtagataaacctatacggcccgcactttttttaagcttggcgtggatccgatatcaactagatcttgaga

SEQ ID NO: 4200 - DNA, 170 bp, Artificial sequence
  Kdm5c.1879_Pten.240
  crRNA array
cgatttcttggctttatatatcttgtggaaaggacgaaacaccgtaatttctactaagtgtagatgagcacggcacccgcccccctaatttctactaagtgtagattgcatacgctatagctgcttttttttaagcttggcgtggatccgatatcaactagatcttgaga

SEQ ID NO: 4201 - DNA, 170 bp, Artificial sequence
  Kdm5c.1879_Pten.265
  crRNA array
cgatttcttggctttatatatcttgtggaaaggacgaaacaccgtaatttctactaagtgtagatgagcacggcacccgcccccctaatttctactaagtgtagataagcgtggtgcgtgacgcacttttttaagcttggcgtggatccgatatcaactagatcttgaga

SEQ ID NO: 4202 - DNA, 170 bp, Artificial sequence
  Kdm5c.1879_Rasa1.1478
  crRNA array
cgatttcttggctttatatatcttgtggaaaggacgaaacaccgtaatttctactaagtgtagatgagcacggcacccgcccccctaatttctactaagtgtagatcgataatggtctatgatgtcttttttaagcttggcgtggatccgatatcaactagatcttgaga

SEQ ID NO: 4203 - DNA, 170 bp, Artificial sequence
  Kdm5c.1879_Rasa1.223
  crRNA array
cgatttcttggctttatatatcttgtggaaaggacgaaacaccgtaatttctactaagtgtagatgagcacggcacccgcccccctaatttctactaagtgtagattccatggagtatcgtgctcgttttttaagcttggcgtggatccgatatcaactagatcttgaga

SEQ ID NO: 4204 - DNA, 170 bp, Artificial sequence
  Kdm5c.1879_Rb1.211
  crRNA array
cgatttcttggctttatatatcttgtggaaaggacgaaacaccgtaatttctactaagtgtagatgagcacggcacccgcccccctaatttctactaagtgtagattctgacatgatcgggtacctttttttaagcttggcgtggatccgatatcaactagatcttgaga

SEQ ID NO: 4205 - DNA, 170 bp, Artificial sequence
  Kdm5c.1879_Rb1.394
  crRNA array
cgatttcttggctttatatatcttgtggaaaggacgaaacaccgtaatttctactaagtgtagatgagcacggcacccgcccccctaatttctactaagtgtagatagaaatctcgaagcaggatcttttttaagcttggcgtggatccgatatcaactagatcttgaga

SEQ ID NO: 4206 - DNA, 170 bp, Artificial sequence
  Kdm5c.1879_Rbm10.5
  crRNA array
cgatttcttggctttatatatcttgtggaaaggacgaaacaccgtaatttctactaagtgtagatgagcacggcacccgcccccctaatttctactaagtgtagatacgaaacctgaacccacacattttttaagcttggcgtggatccgatatcaactagatcttgaga

SEQ ID NO: 4207 - DNA, 170 bp, Artificial sequence
  Kdm5c.1879_Rbm10.6
  crRNA array
cgatttcttggctttatatatcttgtggaaaggacgaaacaccgtaatttctactaagtgtagatgagcacggcacccgcccccctaatttctactaagtgtagatcgaaacctgaacccacacagttttttaagcttggcgtggatccgatatcaactagatcttgaga

SEQ ID NO: 4208 - DNA, 170 bp, Artificial sequence
  Kdm5c.1879_Rnf43.1920
  crRNA array
cgatttcttggctttatatatcttgtggaaaggacgaaacaccgtaatttctactaagtgtagatgagcacggcacccgcccccctaatttctactaagtgtagatatccccgtgccgtggactccttttttaagcttggcgtggatccgatatcaactagatcttgaga

SEQ ID NO: 4209 - DNA, 170 bp, Artificial sequence
  Kdm5c.1879_Rnf43.39
  crRNA array
cgatttcttggctttatatatcttgtggaaaggacgaaacaccgtaatttctactaagtgtagatgagcacggcacccgcccccctaatttctactaagtgtagatcaaggggatcactctgataattttttaagcttggcgtggatccgatatcaactagatcttgaga

SEQ ID NO: 4210 - DNA, 170 bp, Artificial sequence
  Kdm5c.1879_Runx1.204
  crRNA array
cgatttcttggctttatatatcttgtggaaaggacgaaacaccgtaatttctactaagtgtagatgagcacggcacccgcccccctaatttctactaagtgtagattaaataagtccagccgttttttttttaagcttggcgtggatccgatatcaactagatcttgaga

SEQ ID NO: 4211 - DNA, 170 bp, Artificial sequence
  Kdm5c.1879_Runx1.81
  crRNA array
cgatttcttggctttatatatcttgtggaaaggacgaaacaccgtaatttctactaagtgtagatgagcacggcacccgcccccctaatttctactaagtgtagataggacgcgtatgggaattttttttttaagcttggcgtggatccgatatcaactagatcttgaga

SEQ ID NO: 4212 - DNA, 170 bp, Artificial sequence
  Kdm5c.1879_Setd2.143
  crRNA array
cgatttcttggctttatatatcttgtggaaaggacgaaacaccgtaatttctactaagtgtagatgagcacggcacccgcccccctaatttctactaagtgtagatgcacaaccacaacagactggttttttaagcttggcgtggatccgatatcaactagatcttgaga

SEQ ID NO: 4213 - DNA, 170 bp, Artificial sequence
  Kdm5c.1879_Setd2.508
  crRNA array
cgatttcttggctttatatatcttgtggaaaggacgaaacaccgtaatttctactaagtgtagatgagcacggcacccgcccccctaatttctactaagtgtagattacgatcccgagcacccgacttttttaagcttggcgtggatccgatatcaactagatcttgaga

SEQ ID NO: 4214 - DNA, 170 bp, Artificial sequence
  Kdm5c.1879_Smad4.3038
  crRNA array
cgatttcttggctttatatatcttgtggaaaggacgaaacaccgtaatttctactaagtgtagatgagcacggcacccgcccccctaatttctactaagtgtagatatctgcggcagtgtcaccggttttttaagcttggcgtggatccgatatcaactagatcttgaga

SEQ ID NO: 4215 - DNA, 170 bp, Artificial sequence
  Kdm5c.1879_Smad4.39
  crRNA array
cgatttcttggctttatatatcttgtggaaaggacgaaacaccgtaatttctactaagtgtagatgagcacggcacccgcccccctaatttctactaagtgtagatagtcaaacgcatactgacaattttttaagcttggcgtggatccgatatcaactagatcttgaga

SEQ ID NO: 4216 - DNA, 170 bp, Artificial sequence
  Kdm5c.1879_Stag2.1409
  crRNA array
cgatttcttggctttatatatcttgtggaaaggacgaaacaccgtaatttctactaagtgtagatgagcacggcacccgcccccctaatttctactaagtgtagatgctaataactgcggaagggcttttttaagcttggcgtggatccgatatcaactagatcttgaga

SEQ ID NO: 4217 - DNA, 170 bp, Artificial sequence
  Kdm5c.1879_Stag2.4401
  crRNA array
cgatttcttggctttatatatcttgtggaaaggacgaaacaccgtaatttctactaagtgtagatgagcacggcacccgcccccctaatttctactaagtgtagattaatcgtccagtggtgtatattttttaagcttggcgtggatccgatatcaactagatcttgaga

SEQ ID NO: 4218 - DNA, 170 bp, Artificial sequence
  Kdm5c.1879_Tbl1xr1.1
  crRNA array
cgatttcttggctttatatatcttgtggaaaggacgaaacaccgtaatttctactaagtgtagatgagcacggcacccgcccccctaatttctactaagtgtagatggatgcgcatactggtgaagttttttaagcttggcgtggatccgatatcaactagatcttgaga

SEQ ID NO: 4219 - DNA, 170 bp, Artificial sequence
  Kdm5c.1879_Tbl1xr1.83
  crRNA array
cgatttcttggctttatatatcttgtggaaaggacgaaacaccgtaatttctactaagtgtagatgagcacggcacccgcccccctaatttctactaagtgtagatatggtcgacccatcgagtctttttttaagcttggcgtggatccgatatcaactagatcttgaga

SEQ ID NO: 4220 - DNA, 170 bp, Artificial sequence
  Kdm5c.1879_Tgfbr2.290
  crRNA array
cgatttcttggctttatatatcttgtggaaaggacgaaacaccgtaatttctactaagtgtagatgagcacggcacccgcccccctaatttctactaagtgtagatcctctcggcgcccgggtaaattttttaagcttggcgtggatccgatatcaactagatcttgaga

SEQ ID NO: 4221 - DNA, 170 bp, Artificial sequence
  Kdm5c.1879_Tgfbr2.292
  crRNA array
cgatttcttggctttatatatcttgtggaaaggacgaaacaccgtaatttctactaagtgtagatgagcacggcacccgcccccctaatttctactaagtgtagatcccgggcgccgagagggaaattttttaagcttggcgtggatccgatatcaactagatcttgaga

SEQ ID NO: 4222 - DNA, 170 bp, Artificial sequence
  Kdm5c.1879_Trp53.4
  crRNA array
cgatttcttggctttatatatcttgtggaaaggacgaaacaccgtaatttctactaagtgtagatgagcacggcacccgcccccctaatttctactaagtgtagatccctgaactgcccccagggattttttaagcttggcgtggatccgatatcaactagatcttgaga

SEQ ID NO: 4223 - DNA, 170 bp, Artificial sequence
  Kdm5c.1879_Trp53.528
  crRNA array
cgatttcttggctttatatatcttgtggaaaggacgaaacaccgtaatttctactaagtgtagatgagcacggcacccgcccccctaatttctactaagtgtagatgctgggccagcagagacctgttttttaagcttggcgtggatccgatatcaactagatcttgaga

SEQ ID NO: 4224 - DNA, 170 bp, Artificial sequence
  Kdm5c.1879_Vhl.1
  crRNA array
cgatttcttggctttatatatcttgtggaaaggacgaaacaccgtaatttctactaagtgtagatgagcacggcacccgcccccctaatttctactaagtgtagatagggctcccggcggccatttttttttaagcttggcgtggatccgatatcaactagatcttgaga

SEQ ID NO: 4225 - DNA, 170 bp, Artificial sequence
  Kdm5c.1879_Vhl.151
  crRNA array
cgatttcttggctttatatatcttgtggaaaggacgaaacaccgtaatttctactaagtgtagatgagcacggcacccgcccccctaatttctactaagtgtagattagagcactcacccgagggattttttaagcttggcgtggatccgatatcaactagatcttgaga

SEQ ID NO: 4226 - DNA, 170 bp, Artificial sequence
  Kdm5c.1879_Zc3h13.1387
  crRNA array
cgatttcttggctttatatatcttgtggaaaggacgaaacaccgtaatttctactaagtgtagatgagcacggcacccgcccccctaatttctactaagtgtagatgtgacgccggtcatgtgactttttttaagcttggcgtggatccgatatcaactagatcttgaga

SEQ ID NO: 4227 - DNA, 170 bp, Artificial sequence
  Kdm5c.1879_Zc3h13.1777
  crRNA array
cgatttcttggctttatatatcttgtggaaaggacgaaacaccgtaatttctactaagtgtagatgagcacggcacccgcccccctaatttctactaagtgtagatgatgctgccagtgtagcggcttttttaagcttggcgtggatccgatatcaactagatcttgaga

SEQ ID NO: 4228 - DNA, 170 bp, Artificial sequence
  Kdm6a.56_Acvr2a.155
  crRNA array
cgatttcttggctttatatatcttgtggaaaggacgaaacaccgtaatttctactaagtgtagattcgctgccgcctctcgcggctaatttctactaagtgtagatggacctggctaatcaagtatttttttaagcttggcgtggatccgatatcaactagatcttgaga

SEQ ID NO: 4229 - DNA, 170 bp, Artificial sequence
  Kdm6a.56_Acvr2a.70
  crRNA array
cgatttcttggctttatatatcttgtggaaaggacgaaacaccgtaatttctactaagtgtagattcgctgccgcctctcgcggctaatttctactaagtgtagatcccgaggcgccggagaagccttttttaagcttggcgtggatccgatatcaactagatcttgaga

SEQ ID NO: 4230 - DNA, 170 bp, Artificial sequence
  Kdm6a.56_Apc.21
  crRNA array
cgatttcttggctttatatatcttgtggaaaggacgaaacaccgtaatttctactaagtgtagattcgctgccgcctctcgcggctaatttctactaagtgtagatgtgatccacacgtgtagctgttttttaagcttggcgtggatccgatatcaactagatcttgaga

SEQ ID NO: 4231 - DNA, 170 bp, Artificial sequence
  Kdm6a.56_Apc.867
  crRNA array
cgatttcttggctttatatatcttgtggaaaggacgaaacaccgtaatttctactaagtgtagattcgctgccgcctctcgcggctaatttctactaagtgtagatcagtcccaggcggcggaagcttttttaagcttggcgtggatccgatatcaactagatcttgaga

SEQ ID NO: 4232 - DNA, 170 bp, Artificial sequence
  Kdm6a.56_Arid1a.2
  crRNA array
cgatttcttggctttatatatcttgtggaaaggacgaaacaccgtaatttctactaagtgtagattcgctgccgcctctcgcggctaatttctactaagtgtagatcccgcgcccccgtcctggggttttttaagcttggcgtggatccgatatcaactagatcttgaga

SEQ ID NO: 4233 - DNA, 170 bp, Artificial sequence
  Kdm6a.56_Arid1a.5
  crRNA array
cgatttcttggctttatatatcttgtggaaaggacgaaacaccgtaatttctactaagtgtagattcgctgccgcctctcgcggctaatttctactaagtgtagatcccgcgctcggccgctgccgttttttaagcttggcgtggatccgatatcaactagatcttgaga

SEQ ID NO: 4234 - DNA, 170 bp, Artificial sequence
  Kdm6a.56_Arid2.166
  crRNA array
cgatttcttggctttatatatcttgtggaaaggacgaaacaccgtaatttctactaagtgtagattcgctgccgcctctcgcggctaatttctactaagtgtagataaccgcgatctgggttttttttttttaagcttggcgtggatccgatatcaactagatcttgaga

SEQ ID NO: 4235 - DNA, 170 bp, Artificial sequence
  Kdm6a.56_Arid2.172
  crRNA array
cgatttcttggctttatatatcttgtggaaaggacgaaacaccgtaatttctactaagtgtagattcgctgccgcctctcgcggctaatttctactaagtgtagatctggacgagctgcggcagttttttttaagcttggcgtggatccgatatcaactagatcttgaga

SEQ ID NO: 4236 - DNA, 170 bp, Artificial sequence
  Kdm6a.56_Atm.120
  crRNA array
cgatttcttggctttatatatcttgtggaaaggacgaaacaccgtaatttctactaagtgtagattcgctgccgcctctcgcggctaatttctactaagtgtagatgacaggtagtcggcagctaattttttaagcttggcgtggatccgatatcaactagatcttgaga

SEQ ID NO: 4237 - DNA, 170 bp, Artificial sequence
  Kdm6a.56_Atm.997
  crRNA array
cgatttcttggctttatatatcttgtggaaaggacgaaacaccgtaatttctactaagtgtagattcgctgccgcctctcgcggctaatttctactaagtgtagatgagaaagtctccgaatcgttttttttaagcttggcgtggatccgatatcaactagatcttgaga

SEQ ID NO: 4238 - DNA, 170 bp, Artificial sequence
  Kdm6a.56_Atrx.249
  crRNA array
cgatttcttggctttatatatcttgtggaaaggacgaaacaccgtaatttctactaagtgtagattcgctgccgcctctcgcggctaatttctactaagtgtagattagccagtcgctcatatctcttttttaagcttggcgtggatccgatatcaactagatcttgaga

SEQ ID NO: 4239 - DNA, 170 bp, Artificial sequence
  Kdm6a.56_Atrx.251
  crRNA array
cgatttcttggctttatatatcttgtggaaaggacgaaacaccgtaatttctactaagtgtagattcgctgccgcctctcgcggctaatttctactaagtgtagatgccagtcgctcatatctctgttttttaagcttggcgtggatccgatatcaactagatcttgaga

SEQ ID NO: 4240 - DNA, 170 bp, Artificial sequence
  Kdm6a.56_Bcor.203
  crRNA array
cgatttcttggctttatatatcttgtggaaaggacgaaacaccgtaatttctactaagtgtagattcgctgccgcctctcgcggctaatttctactaagtgtagatccccggagcggagtccaggcttttttaagcttggcgtggatccgatatcaactagatcttgaga

SEQ ID NO: 4241 - DNA, 170 bp, Artificial sequence
  Kdm6a.56_Bcor.475
  crRNA array
cgatttcttggctttatatatcttgtggaaaggacgaaacaccgtaatttctactaagtgtagattcgctgccgcctctcgcggctaatttctactaagtgtagattgcaacccctctgtatgggattttttaagcttggcgtggatccgatatcaactagatcttgaga

SEQ ID NO: 4242 - DNA, 170 bp, Artificial sequence
  Kdm6a.56_Brca1.112
  crRNA array
cgatttcttggctttatatatcttgtggaaaggacgaaacaccgtaatttctactaagtgtagattcgctgccgcctctcgcggctaatttctactaagtgtagatctagacgctctgtggagactttttttaagcttggcgtggatccgatatcaactagatcttgaga

SEQ ID NO: 4243 - DNA, 170 bp, Artificial sequence
  Kdm6a.56_Brca1.53
  crRNA array
cgatttcttggctttatatatcttgtggaaaggacgaaacaccgtaatttctactaagtgtagattcgctgccgcctctcgcggctaatttctactaagtgtagataatgaggaggcgtcgatcatttttttaagcttggcgtggatccgatatcaactagatcttgaga

SEQ ID NO: 4244 - DNA, 170 bp, Artificial sequence
  Kdm6a.56_Casp8.45
  crRNA array
cgatttcttggctttatatatcttgtggaaaggacgaaacaccgtaatttctactaagtgtagattcgctgccgcctctcgcggctaatttctactaagtgtagatctaccgagatcctgtgaatgttttttaagcttggcgtggatccgatatcaactagatcttgaga

SEQ ID NO: 4245 - DNA, 170 bp, Artificial sequence
  Kdm6a.56_Casp8.54
  crRNA array
cgatttcttggctttatatatcttgtggaaaggacgaaacaccgtaatttctactaagtgtagattcgctgccgcctctcgcggctaatttctactaagtgtagatcagtgcagtcgtcgtaagatttttttaagcttggcgtggatccgatatcaactagatcttgaga

SEQ ID NO: 4246 - DNA, 170 bp, Artificial sequence
  Kdm6a.56_Cbwd1.84
  crRNA array
cgatttcttggctttatatatcttgtggaaaggacgaaacaccgtaatttctactaagtgtagattcgctgccgcctctcgcggctaatttctactaagtgtagatcacagcaggtaacatgccgcttttttaagcttggcgtggatccgatatcaactagatcttgaga

SEQ ID NO: 4247 - DNA, 170 bp, Artificial sequence
  Kdm6a.56_Cbwd1.85
  crRNA array
cgatttcttggctttatatatcttgtggaaaggacgaaacaccgtaatttctactaagtgtagattcgctgccgcctctcgcggctaatttctactaagtgtagatacagcaggtaacatgccgccttttttaagcttggcgtggatccgatatcaactagatcttgaga

SEQ ID NO: 4248 - DNA, 170 bp, Artificial sequence
  Kdm6a.56_Cdh1.387
  crRNA array
cgatttcttggctttatatatcttgtggaaaggacgaaacaccgtaatttctactaagtgtagattcgctgccgcctctcgcggctaatttctactaagtgtagatctcggcgtctgccgggtccgttttttaagcttggcgtggatccgatatcaactagatcttgaga

SEQ ID NO: 4249 - DNA, 170 bp, Artificial sequence
  Kdm6a.56_Cdh1.58
  crRNA array
cgatttcttggctttatatatcttgtggaaaggacgaaacaccgtaatttctactaagtgtagattcgctgccgcctctcgcggctaatttctactaagtgtagatctcgtccgcgcccgggactcttttttaagcttggcgtggatccgatatcaactagatcttgaga

SEQ ID NO: 4250 - DNA, 170 bp, Artificial sequence
  Kdm6a.56_Cdkn2a.647
  crRNA array
cgatttcttggctttatatatcttgtggaaaggacgaaacaccgtaatttctactaagtgtagattcgctgccgcctctcgcggctaatttctactaagtgtagatgcaatcacgggagggagcagttttttaagcttggcgtggatccgatatcaactagatcttgaga

SEQ ID NO: 4251 - DNA, 170 bp, Artificial sequence
  Kdm6a.56_Cdkn2a.648
  crRNA array
cgatttcttggctttatatatcttgtggaaaggacgaaacaccgtaatttctactaagtgtagattcgctgccgcctctcgcggctaatttctactaagtgtagatcaatcacgggagggagcagattttttaagcttggcgtggatccgatatcaactagatcttgaga

SEQ ID NO: 4252 - DNA, 170 bp, Artificial sequence
  Kdm6a.56_Cic.162
  crRNA array
cgatttcttggctttatatatcttgtggaaaggacgaaacaccgtaatttctactaagtgtagattcgctgccgcctctcgcggctaatttctactaagtgtagatcgcaggcgcgcccggcggagttttttaagcttggcgtggatccgatatcaactagatcttgaga

SEQ ID NO: 4253 - DNA, 170 bp, Artificial sequence
  Kdm6a.56_Cic.164
  crRNA array
cgatttcttggctttatatatcttgtggaaaggacgaaacaccgtaatttctactaagtgtagattcgctgccgcctctcgcggctaatttctactaagtgtagatcgggccctgggccggcggctttttttaagcttggcgtggatccgatatcaactagatcttgaga

SEQ ID NO: 4254 - DNA, 170 bp, Artificial sequence
  Kdm6a.56_Ctcf.229
  crRNA array
cgatttcttggctttatatatcttgtggaaaggacgaaacaccgtaatttctactaagtgtagattcgctgccgcctctcgcggctaatttctactaagtgtagatggctggtggctgatagtctgttttttaagcttggcgtggatccgatatcaactagatcttgaga

SEQ ID NO: 4255 - DNA, 170 bp, Artificial sequence
  Kdm6a.56_Ctcf.809
  crRNA array
cgatttcttggctttatatatcttgtggaaaggacgaaacaccgtaatttctactaagtgtagattcgctgccgcctctcgcggctaatttctactaagtgtagataagcgctatcatgatcccaattttttaagcttggcgtggatccgatatcaactagatcttgaga

SEQ ID NO: 4256 - DNA, 170 bp, Artificial sequence
  Kdm6a.56_Elf3.826
  crRNA array
cgatttcttggctttatatatcttgtggaaaggacgaaacaccgtaatttctactaagtgtagattcgctgccgcctctcgcggctaatttctactaagtgtagattccgagacatcctaatccacttttttaagcttggcgtggatccgatatcaactagatcttgaga

SEQ ID NO: 4257 - DNA, 170 bp, Artificial sequence
  Kdm6a.56_Elf3.983
  crRNA array
cgatttcttggctttatatatcttgtggaaaggacgaaacaccgtaatttctactaagtgtagattcgctgccgcctctcgcggctaatttctactaagtgtagattaggccccctaactggaccattttttaagcttggcgtggatccgatatcaactagatcttgaga

SEQ ID NO: 4258 - DNA, 170 bp, Artificial sequence
  Kdm6a.56_Ep300.310
  crRNA array
cgatttcttggctttatatatcttgtggaaaggacgaaacaccgtaatttctactaagtgtagattcgctgccgcctctcgcggctaatttctactaagtgtagatatggtacgacagtgaggaagttttttaagcttggcgtggatccgatatcaactagatcttgaga

SEQ ID NO: 4259 - DNA, 170 bp, Artificial sequence
  Kdm6a.56_Ep300.587
  crRNA array
cgatttcttggctttatatatcttgtggaaaggacgaaacaccgtaatttctactaagtgtagattcgctgccgcctctcgcggctaatttctactaagtgtagatcgccccggggcccccaaccattttttaagcttggcgtggatccgatatcaactagatcttgaga

SEQ ID NO: 4260 - DNA, 170 bp, Artificial sequence
  Kdm6a.56_Epha2.126
  crRNA array
cgatttcttggctttatatatcttgtggaaaggacgaaacaccgtaatttctactaagtgtagattcgctgccgcctctcgcggctaatttctactaagtgtagatcctgtgccgccgcggccgccttttttaagcttggcgtggatccgatatcaactagatcttgaga

SEQ ID NO: 4261 - DNA, 170 bp, Artificial sequence
  Kdm6a.56_Epha2.5
  crRNA array
cgatttcttggctttatatatcttgtggaaaggacgaaacaccgtaatttctactaagtgtagattcgctgccgcctctcgcggctaatttctactaagtgtagatcatgagctggcgccacccggttttttaagcttggcgtggatccgatatcaactagatcttgaga

SEQ ID NO: 4262 - DNA, 170 bp, Artificial sequence
  Kdm6a.56_Fat1.105
  crRNA array
cgatttcttggctttatatatcttgtggaaaggacgaaacaccgtaatttctactaagtgtagattcgctgccgcctctcgcggctaatttctactaagtgtagataactcgaggtgacaacaagtttttttaagcttggcgtggatccgatatcaactagatcttgaga

SEQ ID NO: 4263 - DNA, 170 bp, Artificial sequence
  Kdm6a.56_Fat1.122
  crRNA array
cgatttcttggctttatatatcttgtggaaaggacgaaacaccgtaatttctactaagtgtagattcgctgccgcctctcgcggctaatttctactaagtgtagatccatcgacatggaaacgggattttttaagcttggcgtggatccgatatcaactagatcttgaga

SEQ ID NO: 4264 - DNA, 170 bp, Artificial sequence
  Kdm6a.56_Fbxw7.21
  crRNA array
cgatttcttggctttatatatcttgtggaaaggacgaaacaccgtaatttctactaagtgtagattcgctgccgcctctcgcggctaatttctactaagtgtagattaatgtgccgtagaaacccattttttaagcttggcgtggatccgatatcaactagatcttgaga

SEQ ID NO: 4265 - DNA, 170 bp, Artificial sequence
  Kdm6a.56_Fbxw7.23
  crRNA array
cgatttcttggctttatatatcttgtggaaaggacgaaacaccgtaatttctactaagtgtagattcgctgccgcctctcgcggctaatttctactaagtgtagatatgtgccgtagaaacccatattttttaagcttggcgtggatccgatatcaactagatcttgaga

SEQ ID NO: 4266 - DNA, 170 bp, Artificial sequence
  Kdm6a.56_Gata3.34
  crRNA array
cgatttcttggctttatatatcttgtggaaaggacgaaacaccgtaatttctactaagtgtagattcgctgccgcctctcgcggctaatttctactaagtgtagatctaaactatcccgcaaagatttttttaagcttggcgtggatccgatatcaactagatcttgaga

SEQ ID NO: 4267 - DNA, 170 bp, Artificial sequence
  Kdm6a.56_Gata3.47
  crRNA array
cgatttcttggctttatatatcttgtggaaaggacgaaacaccgtaatttctactaagtgtagattcgctgccgcctctcgcggctaatttctactaagtgtagatcgtagtaggacgggacgtggttttttaagcttggcgtggatccgatatcaactagatcttgaga

SEQ ID NO: 4268 - DNA, 170 bp, Artificial sequence
  Kdm6a.56_H2-Q2.1
  crRNA array
cgatttcttggctttatatatcttgtggaaaggacgaaacaccgtaatttctactaagtgtagattcgctgccgcctctcgcggctaatttctactaagtgtagatagggcggccaccaacagcagttttttaagcttggcgtggatccgatatcaactagatcttgaga

SEQ ID NO: 4269 - DNA, 170 bp, Artificial sequence
  Kdm6a.56_H2-Q2.2
  crRNA array
cgatttcttggctttatatatcttgtggaaaggacgaaacaccgtaatttctactaagtgtagattcgctgccgcctctcgcggctaatttctactaagtgtagattaacctgcgcccgctgctgattttttaagcttggcgtggatccgatatcaactagatcttgaga

SEQ ID NO: 4270 - DNA, 170 bp, Artificial sequence
  Kdm6a.56_Kdm5c.1878
  crRNA array
cgatttcttggctttatatatcttgtggaaaggacgaaacaccgtaatttctactaagtgtagattcgctgccgcctctcgcggctaatttctactaagtgtagatagagcacggcacccgcccccttttttaagcttggcgtggatccgatatcaactagatcttgaga

SEQ ID NO: 4271 - DNA, 170 bp, Artificial sequence
  Kdm6a.56_Kdm5c.1879
  crRNA array
cgatttcttggctttatatatcttgtggaaaggacgaaacaccgtaatttctactaagtgtagattcgctgccgcctctcgcggctaatttctactaagtgtagatgagcacggcacccgccccccttttttaagcttggcgtggatccgatatcaactagatcttgaga

SEQ ID NO: 4272 - DNA, 170 bp, Artificial sequence
  Kdm6a.56_Kmt2b.265
  crRNA array
cgatttcttggctttatatatcttgtggaaaggacgaaacaccgtaatttctactaagtgtagattcgctgccgcctctcgcggctaatttctactaagtgtagatccccaagtgaagcccacctgttttttaagcttggcgtggatccgatatcaactagatcttgaga

SEQ ID NO: 4273 - DNA, 170 bp, Artificial sequence
  Kdm6a.56_Kmt2b.298
  crRNA array
cgatttcttggctttatatatcttgtggaaaggacgaaacaccgtaatttctactaagtgtagattcgctgccgcctctcgcggctaatttctactaagtgtagattccggcagggaccggctggcttttttaagcttggcgtggatccgatatcaactagatcttgaga

SEQ ID NO: 4274 - DNA, 170 bp, Artificial sequence
  Kdm6a.56_Kmt2c.1962
  crRNA array
cgatttcttggctttatatatcttgtggaaaggacgaaacaccgtaatttctactaagtgtagattcgctgccgcctctcgcggctaatttctactaagtgtagatgtgacgatctgtgccacaagttttttaagcttggcgtggatccgatatcaactagatcttgaga

SEQ ID NO: 4275 - DNA, 170 bp, Artificial sequence
  Kdm6a.56_Kmt2c.2236
  crRNA array
cgatttcttggctttatatatcttgtggaaaggacgaaacaccgtaatttctactaagtgtagattcgctgccgcctctcgcggctaatttctactaagtgtagatactcgacctccacctccctattttttaagcttggcgtggatccgatatcaactagatcttgaga

SEQ ID NO: 4276 - DNA, 170 bp, Artificial sequence
  Kdm6a.56_Kmt2d.316
  crRNA array
cgatttcttggctttatatatcttgtggaaaggacgaaacaccgtaatttctactaagtgtagattcgctgccgcctctcgcggctaatttctactaagtgtagatactccaggccacccaggtggttttttaagcttggcgtggatccgatatcaactagatcttgaga

SEQ ID NO: 4277 - DNA, 170 bp, Artificial sequence
  Kdm6a.56_Kmt2d.416
  crRNA array
cgatttcttggctttatatatcttgtggaaaggacgaaacaccgtaatttctactaagtgtagattcgctgccgcctctcgcggctaatttctactaagtgtagattaaacccccgggggaagggtttttttaagcttggcgtggatccgatatcaactagatcttgaga

SEQ ID NO: 4278 - DNA, 170 bp, Artificial sequence
  Kdm6a.56_Map2k4.119
  crRNA array
cgatttcttggctttatatatcttgtggaaaggacgaaacaccgtaatttctactaagtgtagattcgctgccgcctctcgcggctaatttctactaagtgtagattgctgtgtgggcggccacatttttttaagcttggcgtggatccgatatcaactagatcttgaga

SEQ ID NO: 4279 - DNA, 170 bp, Artificial sequence
  Kdm6a.56_Map2k4.1261
  crRNA array
cgatttcttggctttatatatcttgtggaaaggacgaaacaccgtaatttctactaagtgtagattcgctgccgcctctcgcggctaatttctactaagtgtagatgatgtagtaatgcggagtagttttttaagcttggcgtggatccgatatcaactagatcttgaga

SEQ ID NO: 4280 - DNA, 170 bp, Artificial sequence
  Kdm6a.56_Map3k1.235
  crRNA array
cgatttcttggctttatatatcttgtggaaaggacgaaacaccgtaatttctactaagtgtagattcgctgccgcctctcgcggctaatttctactaagtgtagataaaacgctactgatcgatcgttttttaagcttggcgtggatccgatatcaactagatcttgaga

SEQ ID NO: 4281 - DNA, 170 bp, Artificial sequence
  Kdm6a.56_Map3k1.3838
  crRNA array
cgatttcttggctttatatatcttgtggaaaggacgaaacaccgtaatttctactaagtgtagattcgctgccgcctctcgcggctaatttctactaagtgtagatccaacaacagggccccactattttttaagcttggcgtggatccgatatcaactagatcttgaga

SEQ ID NO: 4282 - DNA, 170 bp, Artificial sequence
  Kdm6a.56_Mga.1655
  crRNA array
cgatttcttggctttatatatcttgtggaaaggacgaaacaccgtaatttctactaagtgtagattcgctgccgcctctcgcggctaatttctactaagtgtagatcgagaagtggagagcatattttttttaagcttggcgtggatccgatatcaactagatcttgaga

SEQ ID NO: 4283 - DNA, 170 bp, Artificial sequence
  Kdm6a.56_Mga.93
  crRNA array
cgatttcttggctttatatatcttgtggaaaggacgaaacaccgtaatttctactaagtgtagattcgctgccgcctctcgcggctaatttctactaagtgtagatgagaaggctccccataatgtttttttaagcttggcgtggatccgatatcaactagatcttgaga

SEQ ID NO: 4284 - DNA, 170 bp, Artificial sequence
  Kdm6a.56_Nf1.746
  crRNA array
cgatttcttggctttatatatcttgtggaaaggacgaaacaccgtaatttctactaagtgtagattcgctgccgcctctcgcggctaatttctactaagtgtagattaagcataatgatgatgccattttttaagcttggcgtggatccgatatcaactagatcttgaga

SEQ ID NO: 4285 - DNA, 170 bp, Artificial sequence
  Kdm6a.56_Nf1.97
  crRNA array
cgatttcttggctttatatatcttgtggaaaggacgaaacaccgtaatttctactaagtgtagattcgctgccgcctctcgcggctaatttctactaagtgtagatagcccgctacatgctgatgcttttttaagcttggcgtggatccgatatcaactagatcttgaga

SEQ ID NO: 4286 - DNA, 170 bp, Artificial sequence
  Kdm6a.56_Nf2.356
  crRNA array
cgatttcttggctttatatatcttgtggaaaggacgaaacaccgtaatttctactaagtgtagattcgctgccgcctctcgcggctaatttctactaagtgtagatcggagtcatctgatagagatttttttaagcttggcgtggatccgatatcaactagatcttgaga

SEQ ID NO: 4287 - DNA, 170 bp, Artificial sequence
  Kdm6a.56_Nf2.768
  crRNA array
cgatttcttggctttatatatcttgtggaaaggacgaaacaccgtaatttctactaagtgtagattcgctgccgcctctcgcggctaatttctactaagtgtagatccgaagccccagtgtccggcttttttaagcttggcgtggatccgatatcaactagatcttgaga

SEQ ID NO: 4288 - DNA, 170 bp, Artificial sequence
  Kdm6a.56_Notch1.1849
  crRNA array
cgatttcttggctttatatatcttgtggaaaggacgaaacaccgtaatttctactaagtgtagattcgctgccgcctctcgcggctaatttctactaagtgtagatctggcgggtgggcggcgctgttttttaagcttggcgtggatccgatatcaactagatcttgaga

SEQ ID NO: 4289 - DNA, 170 bp, Artificial sequence
  Kdm6a.56_Notch1.649
  crRNA array
cgatttcttggctttatatatcttgtggaaaggacgaaacaccgtaatttctactaagtgtagattcgctgccgcctctcgcggctaatttctactaagtgtagattgggccaacgatgccaggacttttttaagcttggcgtggatccgatatcaactagatcttgaga

SEQ ID NO: 4290 - DNA, 170 bp, Artificial sequence
  Kdm6a.56_Nsd1.70
  crRNA array
cgatttcttggctttatatatcttgtggaaaggacgaaacaccgtaatttctactaagtgtagattcgctgccgcctctcgcggctaatttctactaagtgtagatactggtgtggacgatgcagattttttaagcttggcgtggatccgatatcaactagatcttgaga

SEQ ID NO: 4291 - DNA, 170 bp, Artificial sequence
  Kdm6a.56_Nsd1.90
  crRNA array
cgatttcttggctttatatatcttgtggaaaggacgaaacaccgtaatttctactaagtgtagattcgctgccgcctctcgcggctaatttctactaagtgtagataggagctaacggcaagaatgttttttaagcttggcgtggatccgatatcaactagatcttgaga

SEQ ID NO: 4292 - DNA, 170 bp, Artificial sequence
  Kdm6a.56_Pbrm1.1236
  crRNA array
cgatttcttggctttatatatcttgtggaaaggacgaaacaccgtaatttctactaagtgtagattcgctgccgcctctcgcggctaatttctactaagtgtagatgccgataaaaccaacagccgttttttaagcttggcgtggatccgatatcaactagatcttgaga

SEQ ID NO: 4293 - DNA, 170 bp, Artificial sequence
  Kdm6a.56_Pbrm1.969
  crRNA array
cgatttcttggctttatatatcttgtggaaaggacgaaacaccgtaatttctactaagtgtagattcgctgccgcctctcgcggctaatttctactaagtgtagatgagccctaatgaacagctcattttttaagcttggcgtggatccgatatcaactagatcttgaga

SEQ ID NO: 4294 - DNA, 170 bp, Artificial sequence
  Kdm6a.56_Pik3r1.76
  crRNA array
cgatttcttggctttatatatcttgtggaaaggacgaaacaccgtaatttctactaagtgtagattcgctgccgcctctcgcggctaatttctactaagtgtagataaaacctatacggcccgcacttttttaagcttggcgtggatccgatatcaactagatcttgaga

SEQ ID NO: 4295 - DNA, 170 bp, Artificial sequence
  Kdm6a.56_Pik3r1.77
  crRNA array
cgatttcttggctttatatatcttgtggaaaggacgaaacaccgtaatttctactaagtgtagattcgctgccgcctctcgcggctaatttctactaagtgtagataaacctatacggcccgcactttttttaagcttggcgtggatccgatatcaactagatcttgaga

SEQ ID NO: 4296 - DNA, 170 bp, Artificial sequence
  Kdm6a.56_Pten.240
  crRNA array
cgatttcttggctttatatatcttgtggaaaggacgaaacaccgtaatttctactaagtgtagattcgctgccgcctctcgcggctaatttctactaagtgtagattgcatacgctatagctgcttttttttaagcttggcgtggatccgatatcaactagatcttgaga

SEQ ID NO: 4297 - DNA, 170 bp, Artificial sequence
  Kdm6a.56_Pten.265
  crRNA array
cgatttcttggctttatatatcttgtggaaaggacgaaacaccgtaatttctactaagtgtagattcgctgccgcctctcgcggctaatttctactaagtgtagataagcgtggtgcgtgacgcacttttttaagcttggcgtggatccgatatcaactagatcttgaga

SEQ ID NO: 4298 - DNA, 170 bp, Artificial sequence
  Kdm6a.56_Rasa1.1478
  crRNA array
cgatttcttggctttatatatcttgtggaaaggacgaaacaccgtaatttctactaagtgtagattcgctgccgcctctcgcggctaatttctactaagtgtagatcgataatggtctatgatgtcttttttaagcttggcgtggatccgatatcaactagatcttgaga

SEQ ID NO: 4299 - DNA, 170 bp, Artificial sequence
  Kdm6a.56_Rasa1.223
  crRNA array
cgatttcttggctttatatatcttgtggaaaggacgaaacaccgtaatttctactaagtgtagattcgctgccgcctctcgcggctaatttctactaagtgtagattccatggagtatcgtgctcgttttttaagcttggcgtggatccgatatcaactagatcttgaga

SEQ ID NO: 4300 - DNA, 170 bp, Artificial sequence
  Kdm6a.56_Rb1.211
  crRNA array
cgatttcttggctttatatatcttgtggaaaggacgaaacaccgtaatttctactaagtgtagattcgctgccgcctctcgcggctaatttctactaagtgtagattctgacatgatcgggtacctttttttaagcttggcgtggatccgatatcaactagatcttgaga

SEQ ID NO: 4301 - DNA, 170 bp, Artificial sequence
  Kdm6a.56_Rb1.394
  crRNA array
cgatttcttggctttatatatcttgtggaaaggacgaaacaccgtaatttctactaagtgtagattcgctgccgcctctcgcggctaatttctactaagtgtagatagaaatctcgaagcaggatcttttttaagcttggcgtggatccgatatcaactagatcttgaga

SEQ ID NO: 4302 - DNA, 170 bp, Artificial sequence
  Kdm6a.56_Rbm10.5
  crRNA array
cgatttcttggctttatatatcttgtggaaaggacgaaacaccgtaatttctactaagtgtagattcgctgccgcctctcgcggctaatttctactaagtgtagatacgaaacctgaacccacacattttttaagcttggcgtggatccgatatcaactagatcttgaga

SEQ ID NO: 4303 - DNA, 170 bp, Artificial sequence
  Kdm6a.56_Rbm10.6
  crRNA array
cgatttcttggctttatatatcttgtggaaaggacgaaacaccgtaatttctactaagtgtagattcgctgccgcctctcgcggctaatttctactaagtgtagatcgaaacctgaacccacacagttttttaagcttggcgtggatccgatatcaactagatcttgaga

SEQ ID NO: 4304 - DNA, 170 bp, Artificial sequence
  Kdm6a.56_Rnf43.1920
  crRNA array
cgatttcttggctttatatatcttgtggaaaggacgaaacaccgtaatttctactaagtgtagattcgctgccgcctctcgcggctaatttctactaagtgtagatatccccgtgccgtggactccttttttaagcttggcgtggatccgatatcaactagatcttgaga

SEQ ID NO: 4305 - DNA, 170 bp, Artificial sequence
  Kdm6a.56_Rnf43.39
  crRNA array
cgatttcttggctttatatatcttgtggaaaggacgaaacaccgtaatttctactaagtgtagattcgctgccgcctctcgcggctaatttctactaagtgtagatcaaggggatcactctgataattttttaagcttggcgtggatccgatatcaactagatcttgaga

SEQ ID NO: 4306 - DNA, 170 bp, Artificial sequence
  Kdm6a.56_Runx1.204
  crRNA array
cgatttcttggctttatatatcttgtggaaaggacgaaacaccgtaatttctactaagtgtagattcgctgccgcctctcgcggctaatttctactaagtgtagattaaataagtccagccgttttttttttaagcttggcgtggatccgatatcaactagatcttgaga

SEQ ID NO: 4307 - DNA, 170 bp, Artificial sequence
  Kdm6a.56_Runx1.81
  crRNA array
cgatttcttggctttatatatcttgtggaaaggacgaaacaccgtaatttctactaagtgtagattcgctgccgcctctcgcggctaatttctactaagtgtagataggacgcgtatgggaattttttttttaagcttggcgtggatccgatatcaactagatcttgaga

SEQ ID NO: 4308 - DNA, 170 bp, Artificial sequence
  Kdm6a.56_Setd2.143
  crRNA array
cgatttcttggctttatatatcttgtggaaaggacgaaacaccgtaatttctactaagtgtagattcgctgccgcctctcgcggctaatttctactaagtgtagatgcacaaccacaacagactggttttttaagcttggcgtggatccgatatcaactagatcttgaga

SEQ ID NO: 4309 - DNA, 170 bp, Artificial sequence
  Kdm6a.56_Setd2.508
  crRNA array
cgatttcttggctttatatatcttgtggaaaggacgaaacaccgtaatttctactaagtgtagattcgctgccgcctctcgcggctaatttctactaagtgtagattacgatcccgagcacccgacttttttaagcttggcgtggatccgatatcaactagatcttgaga

SEQ ID NO: 4310 - DNA, 170 bp, Artificial sequence
  Kdm6a.56_Smad4.3038
  crRNA array
cgatttcttggctttatatatcttgtggaaaggacgaaacaccgtaatttctactaagtgtagattcgctgccgcctctcgcggctaatttctactaagtgtagatatctgcggcagtgtcaccggttttttaagcttggcgtggatccgatatcaactagatcttgaga

SEQ ID NO: 4311 - DNA, 170 bp, Artificial sequence
  Kdm6a.56_Smad4.39
  crRNA array
cgatttcttggctttatatatcttgtggaaaggacgaaacaccgtaatttctactaagtgtagattcgctgccgcctctcgcggctaatttctactaagtgtagatagtcaaacgcatactgacaattttttaagcttggcgtggatccgatatcaactagatcttgaga

SEQ ID NO: 4312 - DNA, 170 bp, Artificial sequence
  Kdm6a.56_Stag2.1409
  crRNA array
cgatttcttggctttatatatcttgtggaaaggacgaaacaccgtaatttctactaagtgtagattcgctgccgcctctcgcggctaatttctactaagtgtagatgctaataactgcggaagggcttttttaagcttggcgtggatccgatatcaactagatcttgaga

SEQ ID NO: 4313 - DNA, 170 bp, Artificial sequence
  Kdm6a.56_Stag2.4401
  crRNA array
cgatttcttggctttatatatcttgtggaaaggacgaaacaccgtaatttctactaagtgtagattcgctgccgcctctcgcggctaatttctactaagtgtagattaatcgtccagtggtgtatattttttaagcttggcgtggatccgatatcaactagatcttgaga

SEQ ID NO: 4314 - DNA, 170 bp, Artificial sequence
  Kdm6a.56_Tbl1xr1.1
  crRNA array
cgatttcttggctttatatatcttgtggaaaggacgaaacaccgtaatttctactaagtgtagattcgctgccgcctctcgcggctaatttctactaagtgtagatggatgcgcatactggtgaagttttttaagcttggcgtggatccgatatcaactagatcttgaga

SEQ ID NO: 4315 - DNA, 170 bp, Artificial sequence
  Kdm6a.56_Tbl1xr1.83
  crRNA array
cgatttcttggctttatatatcttgtggaaaggacgaaacaccgtaatttctactaagtgtagattcgctgccgcctctcgcggctaatttctactaagtgtagatatggtcgacccatcgagtctttttttaagcttggcgtggatccgatatcaactagatcttgaga

SEQ ID NO: 4316 - DNA, 170 bp, Artificial sequence
  Kdm6a.56_Tgfbr2.290
  crRNA array
cgatttcttggctttatatatcttgtggaaaggacgaaacaccgtaatttctactaagtgtagattcgctgccgcctctcgcggctaatttctactaagtgtagatcctctcggcgcccgggtaaattttttaagcttggcgtggatccgatatcaactagatcttgaga

SEQ ID NO: 4317 - DNA, 170 bp, Artificial sequence
  Kdm6a.56_Tgfbr2.292
  crRNA array
cgatttcttggctttatatatcttgtggaaaggacgaaacaccgtaatttctactaagtgtagattcgctgccgcctctcgcggctaatttctactaagtgtagatcccgggcgccgagagggaaattttttaagcttggcgtggatccgatatcaactagatcttgaga

SEQ ID NO: 4318 - DNA, 170 bp, Artificial sequence
  Kdm6a.56_Trp53.4
  crRNA array
cgatttcttggctttatatatcttgtggaaaggacgaaacaccgtaatttctactaagtgtagattcgctgccgcctctcgcggctaatttctactaagtgtagatccctgaactgcccccagggattttttaagcttggcgtggatccgatatcaactagatcttgaga

SEQ ID NO: 4319 - DNA, 170 bp, Artificial sequence
  Kdm6a.56_Trp53.528
  crRNA array
cgatttcttggctttatatatcttgtggaaaggacgaaacaccgtaatttctactaagtgtagattcgctgccgcctctcgcggctaatttctactaagtgtagatgctgggccagcagagacctgttttttaagcttggcgtggatccgatatcaactagatcttgaga

SEQ ID NO: 4320 - DNA, 170 bp, Artificial sequence
  Kdm6a.56_Vhl.1
  crRNA array
cgatttcttggctttatatatcttgtggaaaggacgaaacaccgtaatttctactaagtgtagattcgctgccgcctctcgcggctaatttctactaagtgtagatagggctcccggcggccatttttttttaagcttggcgtggatccgatatcaactagatcttgaga

SEQ ID NO: 4321 - DNA, 170 bp, Artificial sequence
  Kdm6a.56_Vhl.151
  crRNA array
cgatttcttggctttatatatcttgtggaaaggacgaaacaccgtaatttctactaagtgtagattcgctgccgcctctcgcggctaatttctactaagtgtagattagagcactcacccgagggattttttaagcttggcgtggatccgatatcaactagatcttgaga

SEQ ID NO: 4322 - DNA, 170 bp, Artificial sequence
  Kdm6a.56_Zc3h13.1387
  crRNA array
cgatttcttggctttatatatcttgtggaaaggacgaaacaccgtaatttctactaagtgtagattcgctgccgcctctcgcggctaatttctactaagtgtagatgtgacgccggtcatgtgactttttttaagcttggcgtggatccgatatcaactagatcttgaga

SEQ ID NO: 4323 - DNA, 170 bp, Artificial sequence
  Kdm6a.56_Zc3h13.1777
  crRNA array
cgatttcttggctttatatatcttgtggaaaggacgaaacaccgtaatttctactaagtgtagattcgctgccgcctctcgcggctaatttctactaagtgtagatgatgctgccagtgtagcggcttttttaagcttggcgtggatccgatatcaactagatcttgaga

SEQ ID NO: 4324 - DNA, 170 bp, Artificial sequence
  Kdm6a.57_Acvr2a.155
  crRNA array
cgatttcttggctttatatatcttgtggaaaggacgaaacaccgtaatttctactaagtgtagatcgctgccgcctctcgcggcataatttctactaagtgtagatggacctggctaatcaagtatttttttaagcttggcgtggatccgatatcaactagatcttgaga

SEQ ID NO: 4325 - DNA, 170 bp, Artificial sequence
  Kdm6a.57_Acvr2a.70
  crRNA array
cgatttcttggctttatatatcttgtggaaaggacgaaacaccgtaatttctactaagtgtagatcgctgccgcctctcgcggcataatttctactaagtgtagatcccgaggcgccggagaagccttttttaagcttggcgtggatccgatatcaactagatcttgaga

SEQ ID NO: 4326 - DNA, 170 bp, Artificial sequence
  Kdm6a.57_Apc.21
  crRNA array
cgatttcttggctttatatatcttgtggaaaggacgaaacaccgtaatttctactaagtgtagatcgctgccgcctctcgcggcataatttctactaagtgtagatgtgatccacacgtgtagctgttttttaagcttggcgtggatccgatatcaactagatcttgaga

SEQ ID NO: 4327 - DNA, 170 bp, Artificial sequence
  Kdm6a.57_Apc.867
  crRNA array
cgatttcttggctttatatatcttgtggaaaggacgaaacaccgtaatttctactaagtgtagatcgctgccgcctctcgcggcataatttctactaagtgtagatcagtcccaggcggcggaagcttttttaagcttggcgtggatccgatatcaactagatcttgaga

SEQ ID NO: 4328 - DNA, 170 bp, Artificial sequence
  Kdm6a.57_Arid1a.2
  crRNA array
cgatttcttggctttatatatcttgtggaaaggacgaaacaccgtaatttctactaagtgtagatcgctgccgcctctcgcggcataatttctactaagtgtagatcccgcgcccccgtcctggggttttttaagcttggcgtggatccgatatcaactagatcttgaga

SEQ ID NO: 4329 - DNA, 170 bp, Artificial sequence
  Kdm6a.57_Arid1a.5
  crRNA array
cgatttcttggctttatatatcttgtggaaaggacgaaacaccgtaatttctactaagtgtagatcgctgccgcctctcgcggcataatttctactaagtgtagatcccgcgctcggccgctgccgttttttaagcttggcgtggatccgatatcaactagatcttgaga

SEQ ID NO: 4330 - DNA, 170 bp, Artificial sequence
  Kdm6a.57_Arid2.166
  crRNA array
cgatttcttggctttatatatcttgtggaaaggacgaaacaccgtaatttctactaagtgtagatcgctgccgcctctcgcggcataatttctactaagtgtagataaccgcgatctgggttttttttttttaagcttggcgtggatccgatatcaactagatcttgaga

SEQ ID NO: 4331 - DNA, 170 bp, Artificial sequence
  Kdm6a.57_Arid2.172
  crRNA array
cgatttcttggctttatatatcttgtggaaaggacgaaacaccgtaatttctactaagtgtagatcgctgccgcctctcgcggcataatttctactaagtgtagatctggacgagctgcggcagttttttttaagcttggcgtggatccgatatcaactagatcttgaga

SEQ ID NO: 4332 - DNA, 170 bp, Artificial sequence
  Kdm6a.57_Atm.120
  crRNA array
cgatttcttggctttatatatcttgtggaaaggacgaaacaccgtaatttctactaagtgtagatcgctgccgcctctcgcggcataatttctactaagtgtagatgacaggtagtcggcagctaattttttaagcttggcgtggatccgatatcaactagatcttgaga

SEQ ID NO: 4333 - DNA, 170 bp, Artificial sequence
  Kdm6a.57_Atm.997
  crRNA array
cgatttcttggctttatatatcttgtggaaaggacgaaacaccgtaatttctactaagtgtagatcgctgccgcctctcgcggcataatttctactaagtgtagatgagaaagtctccgaatcgttttttttaagcttggcgtggatccgatatcaactagatcttgaga

SEQ ID NO: 4334 - DNA, 170 bp, Artificial sequence
  Kdm6a.57_Atrx.249
  crRNA array
cgatttcttggctttatatatcttgtggaaaggacgaaacaccgtaatttctactaagtgtagatcgctgccgcctctcgcggcataatttctactaagtgtagattagccagtcgctcatatctcttttttaagcttggcgtggatccgatatcaactagatcttgaga

SEQ ID NO: 4335 - DNA, 170 bp, Artificial sequence
  Kdm6a.57_Atrx.251
  crRNA array
cgatttcttggctttatatatcttgtggaaaggacgaaacaccgtaatttctactaagtgtagatcgctgccgcctctcgcggcataatttctactaagtgtagatgccagtcgctcatatctctgttttttaagcttggcgtggatccgatatcaactagatcttgaga

SEQ ID NO: 4336 - DNA, 170 bp, Artificial sequence
  Kdm6a.57_Bcor.203
  crRNA array
cgatttcttggctttatatatcttgtggaaaggacgaaacaccgtaatttctactaagtgtagatcgctgccgcctctcgcggcataatttctactaagtgtagatccccggagcggagtccaggcttttttaagcttggcgtggatccgatatcaactagatcttgaga

SEQ ID NO: 4337 - DNA, 170 bp, Artificial sequence
  Kdm6a.57_Bcor.475
  crRNA array
cgatttcttggctttatatatcttgtggaaaggacgaaacaccgtaatttctactaagtgtagatcgctgccgcctctcgcggcataatttctactaagtgtagattgcaacccctctgtatgggattttttaagcttggcgtggatccgatatcaactagatcttgaga

SEQ ID NO: 4338 - DNA, 170 bp, Artificial sequence
  Kdm6a.57_Brca1.112
  crRNA array
cgatttcttggctttatatatcttgtggaaaggacgaaacaccgtaatttctactaagtgtagatcgctgccgcctctcgcggcataatttctactaagtgtagatctagacgctctgtggagactttttttaagcttggcgtggatccgatatcaactagatcttgaga

SEQ ID NO: 4339 - DNA, 170 bp, Artificial sequence
  Kdm6a.57_Brca1.53
  crRNA array
cgatttcttggctttatatatcttgtggaaaggacgaaacaccgtaatttctactaagtgtagatcgctgccgcctctcgcggcataatttctactaagtgtagataatgaggaggcgtcgatcatttttttaagcttggcgtggatccgatatcaactagatcttgaga

SEQ ID NO: 4340 - DNA, 170 bp, Artificial sequence
  Kdm6a.57_Casp8.45
  crRNA array
cgatttcttggctttatatatcttgtggaaaggacgaaacaccgtaatttctactaagtgtagatcgctgccgcctctcgcggcataatttctactaagtgtagatctaccgagatcctgtgaatgttttttaagcttggcgtggatccgatatcaactagatcttgaga

SEQ ID NO: 4341 - DNA, 170 bp, Artificial sequence
  Kdm6a.57_Casp8.54
  crRNA array
cgatttcttggctttatatatcttgtggaaaggacgaaacaccgtaatttctactaagtgtagatcgctgccgcctctcgcggcataatttctactaagtgtagatcagtgcagtcgtcgtaagatttttttaagcttggcgtggatccgatatcaactagatcttgaga

SEQ ID NO: 4342 - DNA, 170 bp, Artificial sequence
  Kdm6a.57_Cbwd1.84
  crRNA array
cgatttcttggctttatatatcttgtggaaaggacgaaacaccgtaatttctactaagtgtagatcgctgccgcctctcgcggcataatttctactaagtgtagatcacagcaggtaacatgccgcttttttaagcttggcgtggatccgatatcaactagatcttgaga

SEQ ID NO: 4343 - DNA, 170 bp, Artificial sequence
  Kdm6a.57_Cbwd1.85
  crRNA array
cgatttcttggctttatatatcttgtggaaaggacgaaacaccgtaatttctactaagtgtagatcgctgccgcctctcgcggcataatttctactaagtgtagatacagcaggtaacatgccgccttttttaagcttggcgtggatccgatatcaactagatcttgaga

SEQ ID NO: 4344 - DNA, 170 bp, Artificial sequence
  Kdm6a.57_Cdh1.387
  crRNA array
cgatttcttggctttatatatcttgtggaaaggacgaaacaccgtaatttctactaagtgtagatcgctgccgcctctcgcggcataatttctactaagtgtagatctcggcgtctgccgggtccgttttttaagcttggcgtggatccgatatcaactagatcttgaga

SEQ ID NO: 4345 - DNA, 170 bp, Artificial sequence
  Kdm6a.57_Cdh1.58
  crRNA array
cgatttcttggctttatatatcttgtggaaaggacgaaacaccgtaatttctactaagtgtagatcgctgccgcctctcgcggcataatttctactaagtgtagatctcgtccgcgcccgggactcttttttaagcttggcgtggatccgatatcaactagatcttgaga

SEQ ID NO: 4346 - DNA, 170 bp, Artificial sequence
  Kdm6a.57_Cdkn2a.647
  crRNA array
cgatttcttggctttatatatcttgtggaaaggacgaaacaccgtaatttctactaagtgtagatcgctgccgcctctcgcggcataatttctactaagtgtagatgcaatcacgggagggagcagttttttaagcttggcgtggatccgatatcaactagatcttgaga

SEQ ID NO: 4347 - DNA, 170 bp, Artificial sequence
  Kdm6a.57_Cdkn2a.648
  crRNA array
cgatttcttggctttatatatcttgtggaaaggacgaaacaccgtaatttctactaagtgtagatcgctgccgcctctcgcggcataatttctactaagtgtagatcaatcacgggagggagcagattttttaagcttggcgtggatccgatatcaactagatcttgaga

SEQ ID NO: 4348 - DNA, 170 bp, Artificial sequence
  Kdm6a.57_Cic.162
  crRNA array
cgatttcttggctttatatatcttgtggaaaggacgaaacaccgtaatttctactaagtgtagatcgctgccgcctctcgcggcataatttctactaagtgtagatcgcaggcgcgcccggcggagttttttaagcttggcgtggatccgatatcaactagatcttgaga

SEQ ID NO: 4349 - DNA, 170 bp, Artificial sequence
  Kdm6a.57_Cic.164
  crRNA array
cgatttcttggctttatatatcttgtggaaaggacgaaacaccgtaatttctactaagtgtagatcgctgccgcctctcgcggcataatttctactaagtgtagatcgggccctgggccggcggctttttttaagcttggcgtggatccgatatcaactagatcttgaga

SEQ ID NO: 4350 - DNA, 170 bp, Artificial sequence
  Kdm6a.57_Ctcf.229
  crRNA array
cgatttcttggctttatatatcttgtggaaaggacgaaacaccgtaatttctactaagtgtagatcgctgccgcctctcgcggcataatttctactaagtgtagatggctggtggctgatagtctgttttttaagcttggcgtggatccgatatcaactagatcttgaga

SEQ ID NO: 4351 - DNA, 170 bp, Artificial sequence
  Kdm6a.57_Ctcf.809
  crRNA array
cgatttcttggctttatatatcttgtggaaaggacgaaacaccgtaatttctactaagtgtagatcgctgccgcctctcgcggcataatttctactaagtgtagataagcgctatcatgatcccaattttttaagcttggcgtggatccgatatcaactagatcttgaga

SEQ ID NO: 4352 - DNA, 170 bp, Artificial sequence
  Kdm6a.57_Elf3.826
  crRNA array
cgatttcttggctttatatatcttgtggaaaggacgaaacaccgtaatttctactaagtgtagatcgctgccgcctctcgcggcataatttctactaagtgtagattccgagacatcctaatccacttttttaagcttggcgtggatccgatatcaactagatcttgaga

SEQ ID NO: 4353 - DNA, 170 bp, Artificial sequence
  Kdm6a.57_Elf3.983
  crRNA array
cgatttcttggctttatatatcttgtggaaaggacgaaacaccgtaatttctactaagtgtagatcgctgccgcctctcgcggcataatttctactaagtgtagattaggccccctaactggaccattttttaagcttggcgtggatccgatatcaactagatcttgaga

SEQ ID NO: 4354 - DNA, 170 bp, Artificial sequence
  Kdm6a.57_Ep300.310
  crRNA array
cgatttcttggctttatatatcttgtggaaaggacgaaacaccgtaatttctactaagtgtagatcgctgccgcctctcgcggcataatttctactaagtgtagatatggtacgacagtgaggaagttttttaagcttggcgtggatccgatatcaactagatcttgaga

SEQ ID NO: 4355 - DNA, 170 bp, Artificial sequence
  Kdm6a.57_Ep300.587
  crRNA array
cgatttcttggctttatatatcttgtggaaaggacgaaacaccgtaatttctactaagtgtagatcgctgccgcctctcgcggcataatttctactaagtgtagatcgccccggggcccccaaccattttttaagcttggcgtggatccgatatcaactagatcttgaga

SEQ ID NO: 4356 - DNA, 170 bp, Artificial sequence
  Kdm6a.57_Epha2.126
  crRNA array
cgatttcttggctttatatatcttgtggaaaggacgaaacaccgtaatttctactaagtgtagatcgctgccgcctctcgcggcataatttctactaagtgtagatcctgtgccgccgcggccgccttttttaagcttggcgtggatccgatatcaactagatcttgaga

SEQ ID NO: 4357 - DNA, 170 bp, Artificial sequence
  Kdm6a.57_Epha2.5
  crRNA array
cgatttcttggctttatatatcttgtggaaaggacgaaacaccgtaatttctactaagtgtagatcgctgccgcctctcgcggcataatttctactaagtgtagatcatgagctggcgccacccggttttttaagcttggcgtggatccgatatcaactagatcttgaga

SEQ ID NO: 4358 - DNA, 170 bp, Artificial sequence
  Kdm6a.57_Fat1.105
  crRNA array
cgatttcttggctttatatatcttgtggaaaggacgaaacaccgtaatttctactaagtgtagatcgctgccgcctctcgcggcataatttctactaagtgtagataactcgaggtgacaacaagtttttttaagcttggcgtggatccgatatcaactagatcttgaga

SEQ ID NO: 4359 - DNA, 170 bp, Artificial sequence
  Kdm6a.57_Fat1.122
  crRNA array
cgatttcttggctttatatatcttgtggaaaggacgaaacaccgtaatttctactaagtgtagatcgctgccgcctctcgcggcataatttctactaagtgtagatccatcgacatggaaacgggattttttaagcttggcgtggatccgatatcaactagatcttgaga

SEQ ID NO: 4360 - DNA, 170 bp, Artificial sequence
  Kdm6a.57_Fbxw7.21
  crRNA array
cgatttcttggctttatatatcttgtggaaaggacgaaacaccgtaatttctactaagtgtagatcgctgccgcctctcgcggcataatttctactaagtgtagattaatgtgccgtagaaacccattttttaagcttggcgtggatccgatatcaactagatcttgaga

SEQ ID NO: 4361 - DNA, 170 bp, Artificial sequence
  Kdm6a.57_Fbxw7.23
  crRNA array
cgatttcttggctttatatatcttgtggaaaggacgaaacaccgtaatttctactaagtgtagatcgctgccgcctctcgcggcataatttctactaagtgtagatatgtgccgtagaaacccatattttttaagcttggcgtggatccgatatcaactagatcttgaga

SEQ ID NO: 4362 - DNA, 170 bp, Artificial sequence
  Kdm6a.57_Gata3.34
  crRNA array
cgatttcttggctttatatatcttgtggaaaggacgaaacaccgtaatttctactaagtgtagatcgctgccgcctctcgcggcataatttctactaagtgtagatctaaactatcccgcaaagatttttttaagcttggcgtggatccgatatcaactagatcttgaga

SEQ ID NO: 4363 - DNA, 170 bp, Artificial sequence
  Kdm6a.57_Gata3.47
  crRNA array
cgatttcttggctttatatatcttgtggaaaggacgaaacaccgtaatttctactaagtgtagatcgctgccgcctctcgcggcataatttctactaagtgtagatcgtagtaggacgggacgtggttttttaagcttggcgtggatccgatatcaactagatcttgaga

SEQ ID NO: 4364 - DNA, 170 bp, Artificial sequence
  Kdm6a.57_H2-Q2.1
  crRNA array
cgatttcttggctttatatatcttgtggaaaggacgaaacaccgtaatttctactaagtgtagatcgctgccgcctctcgcggcataatttctactaagtgtagatagggcggccaccaacagcagttttttaagcttggcgtggatccgatatcaactagatcttgaga

SEQ ID NO: 4365 - DNA, 170 bp, Artificial sequence
  Kdm6a.57_H2-Q2.2
  crRNA array
cgatttcttggctttatatatcttgtggaaaggacgaaacaccgtaatttctactaagtgtagatcgctgccgcctctcgcggcataatttctactaagtgtagattaacctgcgcccgctgctgattttttaagcttggcgtggatccgatatcaactagatcttgaga

SEQ ID NO: 4366 - DNA, 170 bp, Artificial sequence
  Kdm6a.57_Kdm5c.1878
  crRNA array
cgatttcttggctttatatatcttgtggaaaggacgaaacaccgtaatttctactaagtgtagatcgctgccgcctctcgcggcataatttctactaagtgtagatagagcacggcacccgcccccttttttaagcttggcgtggatccgatatcaactagatcttgaga

SEQ ID NO: 4367 - DNA, 170 bp, Artificial sequence
  Kdm6a.57_Kdm5c.1879
  crRNA array
cgatttcttggctttatatatcttgtggaaaggacgaaacaccgtaatttctactaagtgtagatcgctgccgcctctcgcggcataatttctactaagtgtagatgagcacggcacccgccccccttttttaagcttggcgtggatccgatatcaactagatcttgaga

SEQ ID NO: 4368 - DNA, 170 bp, Artificial sequence
  Kdm6a.57_Kmt2b.265
  crRNA array
cgatttcttggctttatatatcttgtggaaaggacgaaacaccgtaatttctactaagtgtagatcgctgccgcctctcgcggcataatttctactaagtgtagatccccaagtgaagcccacctgttttttaagcttggcgtggatccgatatcaactagatcttgaga

SEQ ID NO: 4369 - DNA, 170 bp, Artificial sequence
  Kdm6a.57_Kmt2b.298
  crRNA array
cgatttcttggctttatatatcttgtggaaaggacgaaacaccgtaatttctactaagtgtagatcgctgccgcctctcgcggcataatttctactaagtgtagattccggcagggaccggctggcttttttaagcttggcgtggatccgatatcaactagatcttgaga

SEQ ID NO: 4370 - DNA, 170 bp, Artificial sequence
  Kdm6a.57_Kmt2c.1962
  crRNA array
cgatttcttggctttatatatcttgtggaaaggacgaaacaccgtaatttctactaagtgtagatcgctgccgcctctcgcggcataatttctactaagtgtagatgtgacgatctgtgccacaagttttttaagcttggcgtggatccgatatcaactagatcttgaga

SEQ ID NO: 4371 - DNA, 170 bp, Artificial sequence
  Kdm6a.57_Kmt2c.2236
  crRNA array
cgatttcttggctttatatatcttgtggaaaggacgaaacaccgtaatttctactaagtgtagatcgctgccgcctctcgcggcataatttctactaagtgtagatactcgacctccacctccctattttttaagcttggcgtggatccgatatcaactagatcttgaga

SEQ ID NO: 4372 - DNA, 170 bp, Artificial sequence
  Kdm6a.57_Kmt2d.316
  crRNA array
cgatttcttggctttatatatcttgtggaaaggacgaaacaccgtaatttctactaagtgtagatcgctgccgcctctcgcggcataatttctactaagtgtagatactccaggccacccaggtggttttttaagcttggcgtggatccgatatcaactagatcttgaga

SEQ ID NO: 4373 - DNA, 170 bp, Artificial sequence
  Kdm6a.57_Kmt2d.416
  crRNA array
cgatttcttggctttatatatcttgtggaaaggacgaaacaccgtaatttctactaagtgtagatcgctgccgcctctcgcggcataatttctactaagtgtagattaaacccccgggggaagggtttttttaagcttggcgtggatccgatatcaactagatcttgaga

SEQ ID NO: 4374 - DNA, 170 bp, Artificial sequence
  Kdm6a.57_Map2k4.119
  crRNA array
cgatttcttggctttatatatcttgtggaaaggacgaaacaccgtaatttctactaagtgtagatcgctgccgcctctcgcggcataatttctactaagtgtagattgctgtgtgggcggccacatttttttaagcttggcgtggatccgatatcaactagatcttgaga

SEQ ID NO: 4375 - DNA, 170 bp, Artificial sequence
  Kdm6a.57_Map2k4.1261
  crRNA array
cgatttcttggctttatatatcttgtggaaaggacgaaacaccgtaatttctactaagtgtagatcgctgccgcctctcgcggcataatttctactaagtgtagatgatgtagtaatgcggagtagttttttaagcttggcgtggatccgatatcaactagatcttgaga

SEQ ID NO: 4376 - DNA, 170 bp, Artificial sequence
  Kdm6a.57_Map3k1.235
  crRNA array
cgatttcttggctttatatatcttgtggaaaggacgaaacaccgtaatttctactaagtgtagatcgctgccgcctctcgcggcataatttctactaagtgtagataaaacgctactgatcgatcgttttttaagcttggcgtggatccgatatcaactagatcttgaga

SEQ ID NO: 4377 - DNA, 170 bp, Artificial sequence
  Kdm6a.57_Map3k1.3838
  crRNA array
cgatttcttggctttatatatcttgtggaaaggacgaaacaccgtaatttctactaagtgtagatcgctgccgcctctcgcggcataatttctactaagtgtagatccaacaacagggccccactattttttaagcttggcgtggatccgatatcaactagatcttgaga

SEQ ID NO: 4378 - DNA, 170 bp, Artificial sequence
  Kdm6a.57_Mga.1655
  crRNA array
cgatttcttggctttatatatcttgtggaaaggacgaaacaccgtaatttctactaagtgtagatcgctgccgcctctcgcggcataatttctactaagtgtagatcgagaagtggagagcatattttttttaagcttggcgtggatccgatatcaactagatcttgaga

SEQ ID NO: 4379 - DNA, 170 bp, Artificial sequence
  Kdm6a.57_Mga.93
  crRNA array
cgatttcttggctttatatatcttgtggaaaggacgaaacaccgtaatttctactaagtgtagatcgctgccgcctctcgcggcataatttctactaagtgtagatgagaaggctccccataatgtttttttaagcttggcgtggatccgatatcaactagatcttgaga

SEQ ID NO: 4380 - DNA, 170 bp, Artificial sequence
  Kdm6a.57_Nf1.746
  crRNA array
cgatttcttggctttatatatcttgtggaaaggacgaaacaccgtaatttctactaagtgtagatcgctgccgcctctcgcggcataatttctactaagtgtagattaagcataatgatgatgccattttttaagcttggcgtggatccgatatcaactagatcttgaga

SEQ ID NO: 4381 - DNA, 170 bp, Artificial sequence
  Kdm6a.57_Nf1.97
  crRNA array
cgatttcttggctttatatatcttgtggaaaggacgaaacaccgtaatttctactaagtgtagatcgctgccgcctctcgcggcataatttctactaagtgtagatagcccgctacatgctgatgcttttttaagcttggcgtggatccgatatcaactagatcttgaga

SEQ ID NO: 4382 - DNA, 170 bp, Artificial sequence
  Kdm6a.57_Nf2.356
  crRNA array
cgatttcttggctttatatatcttgtggaaaggacgaaacaccgtaatttctactaagtgtagatcgctgccgcctctcgcggcataatttctactaagtgtagatcggagtcatctgatagagatttttttaagcttggcgtggatccgatatcaactagatcttgaga

SEQ ID NO: 4383 - DNA, 170 bp, Artificial sequence
  Kdm6a.57_Nf2.768
  crRNA array
cgatttcttggctttatatatcttgtggaaaggacgaaacaccgtaatttctactaagtgtagatcgctgccgcctctcgcggcataatttctactaagtgtagatccgaagccccagtgtccggcttttttaagcttggcgtggatccgatatcaactagatcttgaga

SEQ ID NO: 4384 - DNA, 170 bp, Artificial sequence
  Kdm6a.57_Notch1.1849
  crRNA array
cgatttcttggctttatatatcttgtggaaaggacgaaacaccgtaatttctactaagtgtagatcgctgccgcctctcgcggcataatttctactaagtgtagatctggcgggtgggcggcgctgttttttaagcttggcgtggatccgatatcaactagatcttgaga

SEQ ID NO: 4385 - DNA, 170 bp, Artificial sequence
  Kdm6a.57_Notch1.649
  crRNA array
cgatttcttggctttatatatcttgtggaaaggacgaaacaccgtaatttctactaagtgtagatcgctgccgcctctcgcggcataatttctactaagtgtagattgggccaacgatgccaggacttttttaagcttggcgtggatccgatatcaactagatcttgaga

SEQ ID NO: 4386 - DNA, 170 bp, Artificial sequence
  Kdm6a.57_Nsd1.70
  crRNA array
cgatttcttggctttatatatcttgtggaaaggacgaaacaccgtaatttctactaagtgtagatcgctgccgcctctcgcggcataatttctactaagtgtagatactggtgtggacgatgcagattttttaagcttggcgtggatccgatatcaactagatcttgaga

SEQ ID NO: 4387 - DNA, 170 bp, Artificial sequence
  Kdm6a.57_Nsd1.90
  crRNA array
cgatttcttggctttatatatcttgtggaaaggacgaaacaccgtaatttctactaagtgtagatcgctgccgcctctcgcggcataatttctactaagtgtagataggagctaacggcaagaatgttttttaagcttggcgtggatccgatatcaactagatcttgaga

SEQ ID NO: 4388 - DNA, 170 bp, Artificial sequence
  Kdm6a.57_Pbrm1.1236
  crRNA array
cgatttcttggctttatatatcttgtggaaaggacgaaacaccgtaatttctactaagtgtagatcgctgccgcctctcgcggcataatttctactaagtgtagatgccgataaaaccaacagccgttttttaagcttggcgtggatccgatatcaactagatcttgaga

SEQ ID NO: 4389 - DNA, 170 bp, Artificial sequence
  Kdm6a.57_Pbrm1.969
  crRNA array
cgatttcttggctttatatatcttgtggaaaggacgaaacaccgtaatttctactaagtgtagatcgctgccgcctctcgcggcataatttctactaagtgtagatgagccctaatgaacagctcattttttaagcttggcgtggatccgatatcaactagatcttgaga

SEQ ID NO: 4390 - DNA, 170 bp, Artificial sequence
  Kdm6a.57_Pik3r1.76
  crRNA array
cgatttcttggctttatatatcttgtggaaaggacgaaacaccgtaatttctactaagtgtagatcgctgccgcctctcgcggcataatttctactaagtgtagataaaacctatacggcccgcacttttttaagcttggcgtggatccgatatcaactagatcttgaga

SEQ ID NO: 4391 - DNA, 170 bp, Artificial sequence
  Kdm6a.57_Pik3r1.77
  crRNA array
cgatttcttggctttatatatcttgtggaaaggacgaaacaccgtaatttctactaagtgtagatcgctgccgcctctcgcggcataatttctactaagtgtagataaacctatacggcccgcactttttttaagcttggcgtggatccgatatcaactagatcttgaga

SEQ ID NO: 4392 - DNA, 170 bp, Artificial sequence
  Kdm6a.57_Pten.240
  crRNA array
cgatttcttggctttatatatcttgtggaaaggacgaaacaccgtaatttctactaagtgtagatcgctgccgcctctcgcggcataatttctactaagtgtagattgcatacgctatagctgcttttttttaagcttggcgtggatccgatatcaactagatcttgaga

SEQ ID NO: 4393 - DNA, 170 bp, Artificial sequence
  Kdm6a.57_Pten.265
  crRNA array
cgatttcttggctttatatatcttgtggaaaggacgaaacaccgtaatttctactaagtgtagatcgctgccgcctctcgcggcataatttctactaagtgtagataagcgtggtgcgtgacgcacttttttaagcttggcgtggatccgatatcaactagatcttgaga

SEQ ID NO: 4394 - DNA, 170 bp, Artificial sequence
  Kdm6a.57_Rasa1.1478
  crRNA array
cgatttcttggctttatatatcttgtggaaaggacgaaacaccgtaatttctactaagtgtagatcgctgccgcctctcgcggcataatttctactaagtgtagatcgataatggtctatgatgtcttttttaagcttggcgtggatccgatatcaactagatcttgaga

SEQ ID NO: 4395 - DNA, 170 bp, Artificial sequence
  Kdm6a.57_Rasa1.223
  crRNA array
cgatttcttggctttatatatcttgtggaaaggacgaaacaccgtaatttctactaagtgtagatcgctgccgcctctcgcggcataatttctactaagtgtagattccatggagtatcgtgctcgttttttaagcttggcgtggatccgatatcaactagatcttgaga

SEQ ID NO: 4396 - DNA, 170 bp, Artificial sequence
  Kdm6a.57_Rb1.211
  crRNA array
cgatttcttggctttatatatcttgtggaaaggacgaaacaccgtaatttctactaagtgtagatcgctgccgcctctcgcggcataatttctactaagtgtagattctgacatgatcgggtacctttttttaagcttggcgtggatccgatatcaactagatcttgaga

SEQ ID NO: 4397 - DNA, 170 bp, Artificial sequence
  Kdm6a.57_Rb1.394
  crRNA array
cgatttcttggctttatatatcttgtggaaaggacgaaacaccgtaatttctactaagtgtagatcgctgccgcctctcgcggcataatttctactaagtgtagatagaaatctcgaagcaggatcttttttaagcttggcgtggatccgatatcaactagatcttgaga

SEQ ID NO: 4398 - DNA, 170 bp, Artificial sequence
  Kdm6a.57_Rbm10.5
  crRNA array
cgatttcttggctttatatatcttgtggaaaggacgaaacaccgtaatttctactaagtgtagatcgctgccgcctctcgcggcataatttctactaagtgtagatacgaaacctgaacccacacattttttaagcttggcgtggatccgatatcaactagatcttgaga

SEQ ID NO: 4399 - DNA, 170 bp, Artificial sequence
  Kdm6a.57_Rbm10.6
  crRNA array
cgatttcttggctttatatatcttgtggaaaggacgaaacaccgtaatttctactaagtgtagatcgctgccgcctctcgcggcataatttctactaagtgtagatcgaaacctgaacccacacagttttttaagcttggcgtggatccgatatcaactagatcttgaga

SEQ ID NO: 4400 - DNA, 170 bp, Artificial sequence
  Kdm6a.57_Rnf43.1920
  crRNA array
cgatttcttggctttatatatcttgtggaaaggacgaaacaccgtaatttctactaagtgtagatcgctgccgcctctcgcggcataatttctactaagtgtagatatccccgtgccgtggactccttttttaagcttggcgtggatccgatatcaactagatcttgaga

SEQ ID NO: 4401 - DNA, 170 bp, Artificial sequence
  Kdm6a.57_Rnf43.39
  crRNA array
cgatttcttggctttatatatcttgtggaaaggacgaaacaccgtaatttctactaagtgtagatcgctgccgcctctcgcggcataatttctactaagtgtagatcaaggggatcactctgataattttttaagcttggcgtggatccgatatcaactagatcttgaga

SEQ ID NO: 4402 - DNA, 170 bp, Artificial sequence
  Kdm6a.57_Runx1.204
  crRNA array
cgatttcttggctttatatatcttgtggaaaggacgaaacaccgtaatttctactaagtgtagatcgctgccgcctctcgcggcataatttctactaagtgtagattaaataagtccagccgttttttttttaagcttggcgtggatccgatatcaactagatcttgaga

SEQ ID NO: 4403 - DNA, 170 bp, Artificial sequence
  Kdm6a.57_Runx1.81
  crRNA array
cgatttcttggctttatatatcttgtggaaaggacgaaacaccgtaatttctactaagtgtagatcgctgccgcctctcgcggcataatttctactaagtgtagataggacgcgtatgggaattttttttttaagcttggcgtggatccgatatcaactagatcttgaga

SEQ ID NO: 4404 - DNA, 170 bp, Artificial sequence
  Kdm6a.57_Setd2.143
  crRNA array
cgatttcttggctttatatatcttgtggaaaggacgaaacaccgtaatttctactaagtgtagatcgctgccgcctctcgcggcataatttctactaagtgtagatgcacaaccacaacagactggttttttaagcttggcgtggatccgatatcaactagatcttgaga

SEQ ID NO: 4405 - DNA, 170 bp, Artificial sequence
  Kdm6a.57_Setd2.508
  crRNA array
cgatttcttggctttatatatcttgtggaaaggacgaaacaccgtaatttctactaagtgtagatcgctgccgcctctcgcggcataatttctactaagtgtagattacgatcccgagcacccgacttttttaagcttggcgtggatccgatatcaactagatcttgaga

SEQ ID NO: 4406 - DNA, 170 bp, Artificial sequence
  Kdm6a.57_Smad4.3038
  crRNA array
cgatttcttggctttatatatcttgtggaaaggacgaaacaccgtaatttctactaagtgtagatcgctgccgcctctcgcggcataatttctactaagtgtagatatctgcggcagtgtcaccggttttttaagcttggcgtggatccgatatcaactagatcttgaga

SEQ ID NO: 4407 - DNA, 170 bp, Artificial sequence
  Kdm6a.57_Smad4.39
  crRNA array
cgatttcttggctttatatatcttgtggaaaggacgaaacaccgtaatttctactaagtgtagatcgctgccgcctctcgcggcataatttctactaagtgtagatagtcaaacgcatactgacaattttttaagcttggcgtggatccgatatcaactagatcttgaga

SEQ ID NO: 4408 - DNA, 170 bp, Artificial sequence
  Kdm6a.57_Stag2.1409
  crRNA array
cgatttcttggctttatatatcttgtggaaaggacgaaacaccgtaatttctactaagtgtagatcgctgccgcctctcgcggcataatttctactaagtgtagatgctaataactgcggaagggcttttttaagcttggcgtggatccgatatcaactagatcttgaga

SEQ ID NO: 4409 - DNA, 170 bp, Artificial sequence
  Kdm6a.57_Stag2.4401
  crRNA array
cgatttcttggctttatatatcttgtggaaaggacgaaacaccgtaatttctactaagtgtagatcgctgccgcctctcgcggcataatttctactaagtgtagattaatcgtccagtggtgtatattttttaagcttggcgtggatccgatatcaactagatcttgaga

SEQ ID NO: 4410 - DNA, 170 bp, Artificial sequence
  Kdm6a.57_Tbl1xr1.1
  crRNA array
cgatttcttggctttatatatcttgtggaaaggacgaaacaccgtaatttctactaagtgtagatcgctgccgcctctcgcggcataatttctactaagtgtagatggatgcgcatactggtgaagttttttaagcttggcgtggatccgatatcaactagatcttgaga

SEQ ID NO: 4411 - DNA, 170 bp, Artificial sequence
  Kdm6a.57_Tbl1xr1.83
  crRNA array
cgatttcttggctttatatatcttgtggaaaggacgaaacaccgtaatttctactaagtgtagatcgctgccgcctctcgcggcataatttctactaagtgtagatatggtcgacccatcgagtctttttttaagcttggcgtggatccgatatcaactagatcttgaga

SEQ ID NO: 4412 - DNA, 170 bp, Artificial sequence
  Kdm6a.57_Tgfbr2.290
  crRNA array
cgatttcttggctttatatatcttgtggaaaggacgaaacaccgtaatttctactaagtgtagatcgctgccgcctctcgcggcataatttctactaagtgtagatcctctcggcgcccgggtaaattttttaagcttggcgtggatccgatatcaactagatcttgaga

SEQ ID NO: 4413 - DNA, 170 bp, Artificial sequence
  Kdm6a.57_Tgfbr2.292
  crRNA array
cgatttcttggctttatatatcttgtggaaaggacgaaacaccgtaatttctactaagtgtagatcgctgccgcctctcgcggcataatttctactaagtgtagatcccgggcgccgagagggaaattttttaagcttggcgtggatccgatatcaactagatcttgaga

SEQ ID NO: 4414 - DNA, 170 bp, Artificial sequence
  Kdm6a.57_Trp53.4
  crRNA array
cgatttcttggctttatatatcttgtggaaaggacgaaacaccgtaatttctactaagtgtagatcgctgccgcctctcgcggcataatttctactaagtgtagatccctgaactgcccccagggattttttaagcttggcgtggatccgatatcaactagatcttgaga

SEQ ID NO: 4415 - DNA, 170 bp, Artificial sequence
  Kdm6a.57_Trp53.528
  crRNA array
cgatttcttggctttatatatcttgtggaaaggacgaaacaccgtaatttctactaagtgtagatcgctgccgcctctcgcggcataatttctactaagtgtagatgctgggccagcagagacctgttttttaagcttggcgtggatccgatatcaactagatcttgaga

SEQ ID NO: 4416 - DNA, 170 bp, Artificial sequence
  Kdm6a.57_Vhl.1
  crRNA array
cgatttcttggctttatatatcttgtggaaaggacgaaacaccgtaatttctactaagtgtagatcgctgccgcctctcgcggcataatttctactaagtgtagatagggctcccggcggccatttttttttaagcttggcgtggatccgatatcaactagatcttgaga

SEQ ID NO: 4417 - DNA, 170 bp, Artificial sequence
  Kdm6a.57_Vhl.151
  crRNA array
cgatttcttggctttatatatcttgtggaaaggacgaaacaccgtaatttctactaagtgtagatcgctgccgcctctcgcggcataatttctactaagtgtagattagagcactcacccgagggattttttaagcttggcgtggatccgatatcaactagatcttgaga

SEQ ID NO: 4418 - DNA, 170 bp, Artificial sequence
  Kdm6a.57_Zc3h13.1387
  crRNA array
cgatttcttggctttatatatcttgtggaaaggacgaaacaccgtaatttctactaagtgtagatcgctgccgcctctcgcggcataatttctactaagtgtagatgtgacgccggtcatgtgactttttttaagcttggcgtggatccgatatcaactagatcttgaga

SEQ ID NO: 4419 - DNA, 170 bp, Artificial sequence
  Kdm6a.57_Zc3h13.1777
  crRNA array
cgatttcttggctttatatatcttgtggaaaggacgaaacaccgtaatttctactaagtgtagatcgctgccgcctctcgcggcataatttctactaagtgtagatgatgctgccagtgtagcggcttttttaagcttggcgtggatccgatatcaactagatcttgaga

SEQ ID NO: 4420 - DNA, 170 bp, Artificial sequence
  Kmt2b.265_Acvr2a.155
  crRNA array
cgatttcttggctttatatatcttgtggaaaggacgaaacaccgtaatttctactaagtgtagatccccaagtgaagcccacctgtaatttctactaagtgtagatggacctggctaatcaagtatttttttaagcttggcgtggatccgatatcaactagatcttgaga

SEQ ID NO: 4421 - DNA, 170 bp, Artificial sequence
  Kmt2b.265_Acvr2a.70
  crRNA array
cgatttcttggctttatatatcttgtggaaaggacgaaacaccgtaatttctactaagtgtagatccccaagtgaagcccacctgtaatttctactaagtgtagatcccgaggcgccggagaagccttttttaagcttggcgtggatccgatatcaactagatcttgaga

SEQ ID NO: 4422 - DNA, 170 bp, Artificial sequence
  Kmt2b.265_Apc.21
  crRNA array
cgatttcttggctttatatatcttgtggaaaggacgaaacaccgtaatttctactaagtgtagatccccaagtgaagcccacctgtaatttctactaagtgtagatgtgatccacacgtgtagctgttttttaagcttggcgtggatccgatatcaactagatcttgaga

SEQ ID NO: 4423 - DNA, 170 bp, Artificial sequence
  Kmt2b.265_Apc.867
  crRNA array
cgatttcttggctttatatatcttgtggaaaggacgaaacaccgtaatttctactaagtgtagatccccaagtgaagcccacctgtaatttctactaagtgtagatcagtcccaggcggcggaagcttttttaagcttggcgtggatccgatatcaactagatcttgaga

SEQ ID NO: 4424 - DNA, 170 bp, Artificial sequence
  Kmt2b.265_Arid1a.2
  crRNA array
cgatttcttggctttatatatcttgtggaaaggacgaaacaccgtaatttctactaagtgtagatccccaagtgaagcccacctgtaatttctactaagtgtagatcccgcgcccccgtcctggggttttttaagcttggcgtggatccgatatcaactagatcttgaga

SEQ ID NO: 4425 - DNA, 170 bp, Artificial sequence
  Kmt2b.265_Arid1a.5
  crRNA array
cgatttcttggctttatatatcttgtggaaaggacgaaacaccgtaatttctactaagtgtagatccccaagtgaagcccacctgtaatttctactaagtgtagatcccgcgctcggccgctgccgttttttaagcttggcgtggatccgatatcaactagatcttgaga

SEQ ID NO: 4426 - DNA, 170 bp, Artificial sequence
  Kmt2b.265_Arid2.166
  crRNA array
cgatttcttggctttatatatcttgtggaaaggacgaaacaccgtaatttctactaagtgtagatccccaagtgaagcccacctgtaatttctactaagtgtagataaccgcgatctgggttttttttttttaagcttggcgtggatccgatatcaactagatcttgaga

SEQ ID NO: 4427 - DNA, 170 bp, Artificial sequence
  Kmt2b.265_Arid2.172
  crRNA array
cgatttcttggctttatatatcttgtggaaaggacgaaacaccgtaatttctactaagtgtagatccccaagtgaagcccacctgtaatttctactaagtgtagatctggacgagctgcggcagttttttttaagcttggcgtggatccgatatcaactagatcttgaga

SEQ ID NO: 4428 - DNA, 170 bp, Artificial sequence
  Kmt2b.265_Atm.120
  crRNA array
cgatttcttggctttatatatcttgtggaaaggacgaaacaccgtaatttctactaagtgtagatccccaagtgaagcccacctgtaatttctactaagtgtagatgacaggtagtcggcagctaattttttaagcttggcgtggatccgatatcaactagatcttgaga

SEQ ID NO: 4429 - DNA, 170 bp, Artificial sequence
  Kmt2b.265_Atm.997
  crRNA array
cgatttcttggctttatatatcttgtggaaaggacgaaacaccgtaatttctactaagtgtagatccccaagtgaagcccacctgtaatttctactaagtgtagatgagaaagtctccgaatcgttttttttaagcttggcgtggatccgatatcaactagatcttgaga

SEQ ID NO: 4430 - DNA, 170 bp, Artificial sequence
  Kmt2b.265_Atrx.249
  crRNA array
cgatttcttggctttatatatcttgtggaaaggacgaaacaccgtaatttctactaagtgtagatccccaagtgaagcccacctgtaatttctactaagtgtagattagccagtcgctcatatctcttttttaagcttggcgtggatccgatatcaactagatcttgaga

SEQ ID NO: 4431 - DNA, 170 bp, Artificial sequence
  Kmt2b.265_Atrx.251
  crRNA array
cgatttcttggctttatatatcttgtggaaaggacgaaacaccgtaatttctactaagtgtagatccccaagtgaagcccacctgtaatttctactaagtgtagatgccagtcgctcatatctctgttttttaagcttggcgtggatccgatatcaactagatcttgaga

SEQ ID NO: 4432 - DNA, 170 bp, Artificial sequence
  Kmt2b.265_Bcor.203
  crRNA array
cgatttcttggctttatatatcttgtggaaaggacgaaacaccgtaatttctactaagtgtagatccccaagtgaagcccacctgtaatttctactaagtgtagatccccggagcggagtccaggcttttttaagcttggcgtggatccgatatcaactagatcttgaga

SEQ ID NO: 4433 - DNA, 170 bp, Artificial sequence
  Kmt2b.265_Bcor.475
  crRNA array
cgatttcttggctttatatatcttgtggaaaggacgaaacaccgtaatttctactaagtgtagatccccaagtgaagcccacctgtaatttctactaagtgtagattgcaacccctctgtatgggattttttaagcttggcgtggatccgatatcaactagatcttgaga

SEQ ID NO: 4434 - DNA, 170 bp, Artificial sequence
  Kmt2b.265_Brca1.112
  crRNA array
cgatttcttggctttatatatcttgtggaaaggacgaaacaccgtaatttctactaagtgtagatccccaagtgaagcccacctgtaatttctactaagtgtagatctagacgctctgtggagactttttttaagcttggcgtggatccgatatcaactagatcttgaga

SEQ ID NO: 4435 - DNA, 170 bp, Artificial sequence
  Kmt2b.265_Brca1.53
  crRNA array
cgatttcttggctttatatatcttgtggaaaggacgaaacaccgtaatttctactaagtgtagatccccaagtgaagcccacctgtaatttctactaagtgtagataatgaggaggcgtcgatcatttttttaagcttggcgtggatccgatatcaactagatcttgaga

SEQ ID NO: 4436 - DNA, 170 bp, Artificial sequence
  Kmt2b.265_Casp8.45
  crRNA array
cgatttcttggctttatatatcttgtggaaaggacgaaacaccgtaatttctactaagtgtagatccccaagtgaagcccacctgtaatttctactaagtgtagatctaccgagatcctgtgaatgttttttaagcttggcgtggatccgatatcaactagatcttgaga

SEQ ID NO: 4437 - DNA, 170 bp, Artificial sequence
  Kmt2b.265_Casp8.54
  crRNA array
cgatttcttggctttatatatcttgtggaaaggacgaaacaccgtaatttctactaagtgtagatccccaagtgaagcccacctgtaatttctactaagtgtagatcagtgcagtcgtcgtaagatttttttaagcttggcgtggatccgatatcaactagatcttgaga

SEQ ID NO: 4438 - DNA, 170 bp, Artificial sequence
  Kmt2b.265_Cbwd1.84
  crRNA array
cgatttcttggctttatatatcttgtggaaaggacgaaacaccgtaatttctactaagtgtagatccccaagtgaagcccacctgtaatttctactaagtgtagatcacagcaggtaacatgccgcttttttaagcttggcgtggatccgatatcaactagatcttgaga

SEQ ID NO: 4439 - DNA, 170 bp, Artificial sequence
  Kmt2b.265_Cbwd1.85
  crRNA array
cgatttcttggctttatatatcttgtggaaaggacgaaacaccgtaatttctactaagtgtagatccccaagtgaagcccacctgtaatttctactaagtgtagatacagcaggtaacatgccgccttttttaagcttggcgtggatccgatatcaactagatcttgaga

SEQ ID NO: 4440 - DNA, 170 bp, Artificial sequence
  Kmt2b.265_Cdh1.387
  crRNA array
cgatttcttggctttatatatcttgtggaaaggacgaaacaccgtaatttctactaagtgtagatccccaagtgaagcccacctgtaatttctactaagtgtagatctcggcgtctgccgggtccgttttttaagcttggcgtggatccgatatcaactagatcttgaga

SEQ ID NO: 4441 - DNA, 170 bp, Artificial sequence
  Kmt2b.265_Cdh1.58
  crRNA array
cgatttcttggctttatatatcttgtggaaaggacgaaacaccgtaatttctactaagtgtagatccccaagtgaagcccacctgtaatttctactaagtgtagatctcgtccgcgcccgggactcttttttaagcttggcgtggatccgatatcaactagatcttgaga

SEQ ID NO: 4442 - DNA, 170 bp, Artificial sequence
  Kmt2b.265_Cdkn2a.647
  crRNA array
cgatttcttggctttatatatcttgtggaaaggacgaaacaccgtaatttctactaagtgtagatccccaagtgaagcccacctgtaatttctactaagtgtagatgcaatcacgggagggagcagttttttaagcttggcgtggatccgatatcaactagatcttgaga

SEQ ID NO: 4443 - DNA, 170 bp, Artificial sequence
  Kmt2b.265_Cdkn2a.648
  crRNA array
cgatttcttggctttatatatcttgtggaaaggacgaaacaccgtaatttctactaagtgtagatccccaagtgaagcccacctgtaatttctactaagtgtagatcaatcacgggagggagcagattttttaagcttggcgtggatccgatatcaactagatcttgaga

SEQ ID NO: 4444 - DNA, 170 bp, Artificial sequence
  Kmt2b.265_Cic.162
  crRNA array
cgatttcttggctttatatatcttgtggaaaggacgaaacaccgtaatttctactaagtgtagatccccaagtgaagcccacctgtaatttctactaagtgtagatcgcaggcgcgcccggcggagttttttaagcttggcgtggatccgatatcaactagatcttgaga

SEQ ID NO: 4445 - DNA, 170 bp, Artificial sequence
  Kmt2b.265_Cic.164
  crRNA array
cgatttcttggctttatatatcttgtggaaaggacgaaacaccgtaatttctactaagtgtagatccccaagtgaagcccacctgtaatttctactaagtgtagatcgggccctgggccggcggctttttttaagcttggcgtggatccgatatcaactagatcttgaga

SEQ ID NO: 4446 - DNA, 170 bp, Artificial sequence
  Kmt2b.265_Ctcf.229
  crRNA array
cgatttcttggctttatatatcttgtggaaaggacgaaacaccgtaatttctactaagtgtagatccccaagtgaagcccacctgtaatttctactaagtgtagatggctggtggctgatagtctgttttttaagcttggcgtggatccgatatcaactagatcttgaga

SEQ ID NO: 4447 - DNA, 170 bp, Artificial sequence
  Kmt2b.265_Ctcf.809
  crRNA array
cgatttcttggctttatatatcttgtggaaaggacgaaacaccgtaatttctactaagtgtagatccccaagtgaagcccacctgtaatttctactaagtgtagataagcgctatcatgatcccaattttttaagcttggcgtggatccgatatcaactagatcttgaga

SEQ ID NO: 4448 - DNA, 170 bp, Artificial sequence
  Kmt2b.265_Elf3.826
  crRNA array
cgatttcttggctttatatatcttgtggaaaggacgaaacaccgtaatttctactaagtgtagatccccaagtgaagcccacctgtaatttctactaagtgtagattccgagacatcctaatccacttttttaagcttggcgtggatccgatatcaactagatcttgaga

SEQ ID NO: 4449 - DNA, 170 bp, Artificial sequence
  Kmt2b.265_Elf3.983
  crRNA array
cgatttcttggctttatatatcttgtggaaaggacgaaacaccgtaatttctactaagtgtagatccccaagtgaagcccacctgtaatttctactaagtgtagattaggccccctaactggaccattttttaagcttggcgtggatccgatatcaactagatcttgaga

SEQ ID NO: 4450 - DNA, 170 bp, Artificial sequence
  Kmt2b.265_Ep300.310
  crRNA array
cgatttcttggctttatatatcttgtggaaaggacgaaacaccgtaatttctactaagtgtagatccccaagtgaagcccacctgtaatttctactaagtgtagatatggtacgacagtgaggaagttttttaagcttggcgtggatccgatatcaactagatcttgaga

SEQ ID NO: 4451 - DNA, 170 bp, Artificial sequence
  Kmt2b.265_Ep300.587
  crRNA array
cgatttcttggctttatatatcttgtggaaaggacgaaacaccgtaatttctactaagtgtagatccccaagtgaagcccacctgtaatttctactaagtgtagatcgccccggggcccccaaccattttttaagcttggcgtggatccgatatcaactagatcttgaga

SEQ ID NO: 4452 - DNA, 170 bp, Artificial sequence
  Kmt2b.265_Epha2.126
  crRNA array
cgatttcttggctttatatatcttgtggaaaggacgaaacaccgtaatttctactaagtgtagatccccaagtgaagcccacctgtaatttctactaagtgtagatcctgtgccgccgcggccgccttttttaagcttggcgtggatccgatatcaactagatcttgaga

SEQ ID NO: 4453 - DNA, 170 bp, Artificial sequence
  Kmt2b.265_Epha2.5
  crRNA array
cgatttcttggctttatatatcttgtggaaaggacgaaacaccgtaatttctactaagtgtagatccccaagtgaagcccacctgtaatttctactaagtgtagatcatgagctggcgccacccggttttttaagcttggcgtggatccgatatcaactagatcttgaga

SEQ ID NO: 4454 - DNA, 170 bp, Artificial sequence
  Kmt2b.265_Fat1.105
  crRNA array
cgatttcttggctttatatatcttgtggaaaggacgaaacaccgtaatttctactaagtgtagatccccaagtgaagcccacctgtaatttctactaagtgtagataactcgaggtgacaacaagtttttttaagcttggcgtggatccgatatcaactagatcttgaga

SEQ ID NO: 4455 - DNA, 170 bp, Artificial sequence
  Kmt2b.265_Fat1.122
  crRNA array
cgatttcttggctttatatatcttgtggaaaggacgaaacaccgtaatttctactaagtgtagatccccaagtgaagcccacctgtaatttctactaagtgtagatccatcgacatggaaacgggattttttaagcttggcgtggatccgatatcaactagatcttgaga

SEQ ID NO: 4456 - DNA, 170 bp, Artificial sequence
  Kmt2b.265_Fbxw7.21
  crRNA array
cgatttcttggctttatatatcttgtggaaaggacgaaacaccgtaatttctactaagtgtagatccccaagtgaagcccacctgtaatttctactaagtgtagattaatgtgccgtagaaacccattttttaagcttggcgtggatccgatatcaactagatcttgaga

SEQ ID NO: 4457 - DNA, 170 bp, Artificial sequence
  Kmt2b.265_Fbxw7.23
  crRNA array
cgatttcttggctttatatatcttgtggaaaggacgaaacaccgtaatttctactaagtgtagatccccaagtgaagcccacctgtaatttctactaagtgtagatatgtgccgtagaaacccatattttttaagcttggcgtggatccgatatcaactagatcttgaga

SEQ ID NO: 4458 - DNA, 170 bp, Artificial sequence
  Kmt2b.265_Gata3.34
  crRNA array
cgatttcttggctttatatatcttgtggaaaggacgaaacaccgtaatttctactaagtgtagatccccaagtgaagcccacctgtaatttctactaagtgtagatctaaactatcccgcaaagatttttttaagcttggcgtggatccgatatcaactagatcttgaga

SEQ ID NO: 4459 - DNA, 170 bp, Artificial sequence
  Kmt2b.265_Gata3.47
  crRNA array
cgatttcttggctttatatatcttgtggaaaggacgaaacaccgtaatttctactaagtgtagatccccaagtgaagcccacctgtaatttctactaagtgtagatcgtagtaggacgggacgtggttttttaagcttggcgtggatccgatatcaactagatcttgaga

SEQ ID NO: 4460 - DNA, 170 bp, Artificial sequence
  Kmt2b.265_H2-Q2.1
  crRNA array
cgatttcttggctttatatatcttgtggaaaggacgaaacaccgtaatttctactaagtgtagatccccaagtgaagcccacctgtaatttctactaagtgtagatagggcggccaccaacagcagttttttaagcttggcgtggatccgatatcaactagatcttgaga

SEQ ID NO: 4461 - DNA, 170 bp, Artificial sequence
  Kmt2b.265_H2-Q2.2
  crRNA array
cgatttcttggctttatatatcttgtggaaaggacgaaacaccgtaatttctactaagtgtagatccccaagtgaagcccacctgtaatttctactaagtgtagattaacctgcgcccgctgctgattttttaagcttggcgtggatccgatatcaactagatcttgaga

SEQ ID NO: 4462 - DNA, 170 bp, Artificial sequence
  Kmt2b.265_Kdm5c.1878
  crRNA array
cgatttcttggctttatatatcttgtggaaaggacgaaacaccgtaatttctactaagtgtagatccccaagtgaagcccacctgtaatttctactaagtgtagatagagcacggcacccgcccccttttttaagcttggcgtggatccgatatcaactagatcttgaga

SEQ ID NO: 4463 - DNA, 170 bp, Artificial sequence
  Kmt2b.265_Kdm5c.1879
  crRNA array
cgatttcttggctttatatatcttgtggaaaggacgaaacaccgtaatttctactaagtgtagatccccaagtgaagcccacctgtaatttctactaagtgtagatgagcacggcacccgccccccttttttaagcttggcgtggatccgatatcaactagatcttgaga

SEQ ID NO: 4464 - DNA, 170 bp, Artificial sequence
  Kmt2b.265_Kdm6a.56
  crRNA array
cgatttcttggctttatatatcttgtggaaaggacgaaacaccgtaatttctactaagtgtagatccccaagtgaagcccacctgtaatttctactaagtgtagattcgctgccgcctctcgcggcttttttaagcttggcgtggatccgatatcaactagatcttgaga

SEQ ID NO: 4465 - DNA, 170 bp, Artificial sequence
  Kmt2b.265_Kdm6a.57
  crRNA array
cgatttcttggctttatatatcttgtggaaaggacgaaacaccgtaatttctactaagtgtagatccccaagtgaagcccacctgtaatttctactaagtgtagatcgctgccgcctctcgcggcattttttaagcttggcgtggatccgatatcaactagatcttgaga

SEQ ID NO: 4466 - DNA, 170 bp, Artificial sequence
  Kmt2b.265_Kmt2c.1962
  crRNA array
cgatttcttggctttatatatcttgtggaaaggacgaaacaccgtaatttctactaagtgtagatccccaagtgaagcccacctgtaatttctactaagtgtagatgtgacgatctgtgccacaagttttttaagcttggcgtggatccgatatcaactagatcttgaga

SEQ ID NO: 4467 - DNA, 170 bp, Artificial sequence
  Kmt2b.265_Kmt2c.2236
  crRNA array
cgatttcttggctttatatatcttgtggaaaggacgaaacaccgtaatttctactaagtgtagatccccaagtgaagcccacctgtaatttctactaagtgtagatactcgacctccacctccctattttttaagcttggcgtggatccgatatcaactagatcttgaga

SEQ ID NO: 4468 - DNA, 170 bp, Artificial sequence
  Kmt2b.265_Kmt2d.316
  crRNA array
cgatttcttggctttatatatcttgtggaaaggacgaaacaccgtaatttctactaagtgtagatccccaagtgaagcccacctgtaatttctactaagtgtagatactccaggccacccaggtggttttttaagcttggcgtggatccgatatcaactagatcttgaga

SEQ ID NO: 4469 - DNA, 170 bp, Artificial sequence
  Kmt2b.265_Kmt2d.416
  crRNA array
cgatttcttggctttatatatcttgtggaaaggacgaaacaccgtaatttctactaagtgtagatccccaagtgaagcccacctgtaatttctactaagtgtagattaaacccccgggggaagggtttttttaagcttggcgtggatccgatatcaactagatcttgaga

SEQ ID NO: 4470 - DNA, 170 bp, Artificial sequence
  Kmt2b.265_Map2k4.119
  crRNA array
cgatttcttggctttatatatcttgtggaaaggacgaaacaccgtaatttctactaagtgtagatccccaagtgaagcccacctgtaatttctactaagtgtagattgctgtgtgggcggccacatttttttaagcttggcgtggatccgatatcaactagatcttgaga

SEQ ID NO: 4471 - DNA, 170 bp, Artificial sequence
  Kmt2b.265_Map2k4.1261
  crRNA array
cgatttcttggctttatatatcttgtggaaaggacgaaacaccgtaatttctactaagtgtagatccccaagtgaagcccacctgtaatttctactaagtgtagatgatgtagtaatgcggagtagttttttaagcttggcgtggatccgatatcaactagatcttgaga

SEQ ID NO: 4472 - DNA, 170 bp, Artificial sequence
  Kmt2b.265_Map3k1.235
  crRNA array
cgatttcttggctttatatatcttgtggaaaggacgaaacaccgtaatttctactaagtgtagatccccaagtgaagcccacctgtaatttctactaagtgtagataaaacgctactgatcgatcgttttttaagcttggcgtggatccgatatcaactagatcttgaga

SEQ ID NO: 4473 - DNA, 170 bp, Artificial sequence
  Kmt2b.265_Map3k1.3838
  crRNA array
cgatttcttggctttatatatcttgtggaaaggacgaaacaccgtaatttctactaagtgtagatccccaagtgaagcccacctgtaatttctactaagtgtagatccaacaacagggccccactattttttaagcttggcgtggatccgatatcaactagatcttgaga

SEQ ID NO: 4474 - DNA, 170 bp, Artificial sequence
  Kmt2b.265_Mga.1655
  crRNA array
cgatttcttggctttatatatcttgtggaaaggacgaaacaccgtaatttctactaagtgtagatccccaagtgaagcccacctgtaatttctactaagtgtagatcgagaagtggagagcatattttttttaagcttggcgtggatccgatatcaactagatcttgaga

SEQ ID NO: 4475 - DNA, 170 bp, Artificial sequence
  Kmt2b.265_Mga.93
  crRNA array
cgatttcttggctttatatatcttgtggaaaggacgaaacaccgtaatttctactaagtgtagatccccaagtgaagcccacctgtaatttctactaagtgtagatgagaaggctccccataatgtttttttaagcttggcgtggatccgatatcaactagatcttgaga

SEQ ID NO: 4476 - DNA, 170 bp, Artificial sequence
  Kmt2b.265_Nf1.746
  crRNA array
cgatttcttggctttatatatcttgtggaaaggacgaaacaccgtaatttctactaagtgtagatccccaagtgaagcccacctgtaatttctactaagtgtagattaagcataatgatgatgccattttttaagcttggcgtggatccgatatcaactagatcttgaga

SEQ ID NO: 4477 - DNA, 170 bp, Artificial sequence
  Kmt2b.265_Nf1.97
  crRNA array
cgatttcttggctttatatatcttgtggaaaggacgaaacaccgtaatttctactaagtgtagatccccaagtgaagcccacctgtaatttctactaagtgtagatagcccgctacatgctgatgcttttttaagcttggcgtggatccgatatcaactagatcttgaga

SEQ ID NO: 4478 - DNA, 170 bp, Artificial sequence
  Kmt2b.265_Nf2.356
  crRNA array
cgatttcttggctttatatatcttgtggaaaggacgaaacaccgtaatttctactaagtgtagatccccaagtgaagcccacctgtaatttctactaagtgtagatcggagtcatctgatagagatttttttaagcttggcgtggatccgatatcaactagatcttgaga

SEQ ID NO: 4479 - DNA, 170 bp, Artificial sequence
  Kmt2b.265_Nf2.768
  crRNA array
cgatttcttggctttatatatcttgtggaaaggacgaaacaccgtaatttctactaagtgtagatccccaagtgaagcccacctgtaatttctactaagtgtagatccgaagccccagtgtccggcttttttaagcttggcgtggatccgatatcaactagatcttgaga

SEQ ID NO: 4480 - DNA, 170 bp, Artificial sequence
  Kmt2b.265_Notch1.1849
  crRNA array
cgatttcttggctttatatatcttgtggaaaggacgaaacaccgtaatttctactaagtgtagatccccaagtgaagcccacctgtaatttctactaagtgtagatctggcgggtgggcggcgctgttttttaagcttggcgtggatccgatatcaactagatcttgaga

SEQ ID NO: 4481 - DNA, 170 bp, Artificial sequence
  Kmt2b.265_Notch1.649
  crRNA array
cgatttcttggctttatatatcttgtggaaaggacgaaacaccgtaatttctactaagtgtagatccccaagtgaagcccacctgtaatttctactaagtgtagattgggccaacgatgccaggacttttttaagcttggcgtggatccgatatcaactagatcttgaga

SEQ ID NO: 4482 - DNA, 170 bp, Artificial sequence
  Kmt2b.265_Nsd1.70
  crRNA array
cgatttcttggctttatatatcttgtggaaaggacgaaacaccgtaatttctactaagtgtagatccccaagtgaagcccacctgtaatttctactaagtgtagatactggtgtggacgatgcagattttttaagcttggcgtggatccgatatcaactagatcttgaga

SEQ ID NO: 4483 - DNA, 170 bp, Artificial sequence
  Kmt2b.265_Nsd1.90
  crRNA array
cgatttcttggctttatatatcttgtggaaaggacgaaacaccgtaatttctactaagtgtagatccccaagtgaagcccacctgtaatttctactaagtgtagataggagctaacggcaagaatgttttttaagcttggcgtggatccgatatcaactagatcttgaga

SEQ ID NO: 4484 - DNA, 170 bp, Artificial sequence
  Kmt2b.265_Pbrm1.1236
  crRNA array
cgatttcttggctttatatatcttgtggaaaggacgaaacaccgtaatttctactaagtgtagatccccaagtgaagcccacctgtaatttctactaagtgtagatgccgataaaaccaacagccgttttttaagcttggcgtggatccgatatcaactagatcttgaga

SEQ ID NO: 4485 - DNA, 170 bp, Artificial sequence
  Kmt2b.265_Pbrm1.969
  crRNA array
cgatttcttggctttatatatcttgtggaaaggacgaaacaccgtaatttctactaagtgtagatccccaagtgaagcccacctgtaatttctactaagtgtagatgagccctaatgaacagctcattttttaagcttggcgtggatccgatatcaactagatcttgaga

SEQ ID NO: 4486 - DNA, 170 bp, Artificial sequence
  Kmt2b.265_Pik3r1.76
  crRNA array
cgatttcttggctttatatatcttgtggaaaggacgaaacaccgtaatttctactaagtgtagatccccaagtgaagcccacctgtaatttctactaagtgtagataaaacctatacggcccgcacttttttaagcttggcgtggatccgatatcaactagatcttgaga

SEQ ID NO: 4487 - DNA, 170 bp, Artificial sequence
  Kmt2b.265_Pik3r1.77
  crRNA array
cgatttcttggctttatatatcttgtggaaaggacgaaacaccgtaatttctactaagtgtagatccccaagtgaagcccacctgtaatttctactaagtgtagataaacctatacggcccgcactttttttaagcttggcgtggatccgatatcaactagatcttgaga

SEQ ID NO: 4488 - DNA, 170 bp, Artificial sequence
  Kmt2b.265_Pten.240
  crRNA array
cgatttcttggctttatatatcttgtggaaaggacgaaacaccgtaatttctactaagtgtagatccccaagtgaagcccacctgtaatttctactaagtgtagattgcatacgctatagctgcttttttttaagcttggcgtggatccgatatcaactagatcttgaga

SEQ ID NO: 4489 - DNA, 170 bp, Artificial sequence
  Kmt2b.265_Pten.265
  crRNA array
cgatttcttggctttatatatcttgtggaaaggacgaaacaccgtaatttctactaagtgtagatccccaagtgaagcccacctgtaatttctactaagtgtagataagcgtggtgcgtgacgcacttttttaagcttggcgtggatccgatatcaactagatcttgaga

SEQ ID NO: 4490 - DNA, 170 bp, Artificial sequence
  Kmt2b.265_Rasa1.1478
  crRNA array
cgatttcttggctttatatatcttgtggaaaggacgaaacaccgtaatttctactaagtgtagatccccaagtgaagcccacctgtaatttctactaagtgtagatcgataatggtctatgatgtcttttttaagcttggcgtggatccgatatcaactagatcttgaga

SEQ ID NO: 4491 - DNA, 170 bp, Artificial sequence
  Kmt2b.265_Rasa1.223
  crRNA array
cgatttcttggctttatatatcttgtggaaaggacgaaacaccgtaatttctactaagtgtagatccccaagtgaagcccacctgtaatttctactaagtgtagattccatggagtatcgtgctcgttttttaagcttggcgtggatccgatatcaactagatcttgaga

SEQ ID NO: 4492 - DNA, 170 bp, Artificial sequence
  Kmt2b.265_Rb1.211
  crRNA array
cgatttcttggctttatatatcttgtggaaaggacgaaacaccgtaatttctactaagtgtagatccccaagtgaagcccacctgtaatttctactaagtgtagattctgacatgatcgggtacctttttttaagcttggcgtggatccgatatcaactagatcttgaga

SEQ ID NO: 4493 - DNA, 170 bp, Artificial sequence
  Kmt2b.265_Rb1.394
  crRNA array
cgatttcttggctttatatatcttgtggaaaggacgaaacaccgtaatttctactaagtgtagatccccaagtgaagcccacctgtaatttctactaagtgtagatagaaatctcgaagcaggatcttttttaagcttggcgtggatccgatatcaactagatcttgaga

SEQ ID NO: 4494 - DNA, 170 bp, Artificial sequence
  Kmt2b.265_Rbm10.5
  crRNA array
cgatttcttggctttatatatcttgtggaaaggacgaaacaccgtaatttctactaagtgtagatccccaagtgaagcccacctgtaatttctactaagtgtagatacgaaacctgaacccacacattttttaagcttggcgtggatccgatatcaactagatcttgaga

SEQ ID NO: 4495 - DNA, 170 bp, Artificial sequence
  Kmt2b.265_Rbm10.6
  crRNA array
cgatttcttggctttatatatcttgtggaaaggacgaaacaccgtaatttctactaagtgtagatccccaagtgaagcccacctgtaatttctactaagtgtagatcgaaacctgaacccacacagttttttaagcttggcgtggatccgatatcaactagatcttgaga

SEQ ID NO: 4496 - DNA, 170 bp, Artificial sequence
  Kmt2b.265_Rnf43.1920
  crRNA array
cgatttcttggctttatatatcttgtggaaaggacgaaacaccgtaatttctactaagtgtagatccccaagtgaagcccacctgtaatttctactaagtgtagatatccccgtgccgtggactccttttttaagcttggcgtggatccgatatcaactagatcttgaga

SEQ ID NO: 4497 - DNA, 170 bp, Artificial sequence
  Kmt2b.265_Rnf43.39
  crRNA array
cgatttcttggctttatatatcttgtggaaaggacgaaacaccgtaatttctactaagtgtagatccccaagtgaagcccacctgtaatttctactaagtgtagatcaaggggatcactctgataattttttaagcttggcgtggatccgatatcaactagatcttgaga

SEQ ID NO: 4498 - DNA, 170 bp, Artificial sequence
  Kmt2b.265_Runx1.204
  crRNA array
cgatttcttggctttatatatcttgtggaaaggacgaaacaccgtaatttctactaagtgtagatccccaagtgaagcccacctgtaatttctactaagtgtagattaaataagtccagccgttttttttttaagcttggcgtggatccgatatcaactagatcttgaga

SEQ ID NO: 4499 - DNA, 170 bp, Artificial sequence
  Kmt2b.265_Runx1.81
  crRNA array
cgatttcttggctttatatatcttgtggaaaggacgaaacaccgtaatttctactaagtgtagatccccaagtgaagcccacctgtaatttctactaagtgtagataggacgcgtatgggaattttttttttaagcttggcgtggatccgatatcaactagatcttgaga

SEQ ID NO: 4500 - DNA, 170 bp, Artificial sequence
  Kmt2b.265_Setd2.143
  crRNA array
cgatttcttggctttatatatcttgtggaaaggacgaaacaccgtaatttctactaagtgtagatccccaagtgaagcccacctgtaatttctactaagtgtagatgcacaaccacaacagactggttttttaagcttggcgtggatccgatatcaactagatcttgaga

SEQ ID NO: 4501 - DNA, 170 bp, Artificial sequence
  Kmt2b.265_Setd2.508
  crRNA array
cgatttcttggctttatatatcttgtggaaaggacgaaacaccgtaatttctactaagtgtagatccccaagtgaagcccacctgtaatttctactaagtgtagattacgatcccgagcacccgacttttttaagcttggcgtggatccgatatcaactagatcttgaga

SEQ ID NO: 4502 - DNA, 170 bp, Artificial sequence
  Kmt2b.265_Smad4.3038
  crRNA array
cgatttcttggctttatatatcttgtggaaaggacgaaacaccgtaatttctactaagtgtagatccccaagtgaagcccacctgtaatttctactaagtgtagatatctgcggcagtgtcaccggttttttaagcttggcgtggatccgatatcaactagatcttgaga

SEQ ID NO: 4503 - DNA, 170 bp, Artificial sequence
  Kmt2b.265_Smad4.39
  crRNA array
cgatttcttggctttatatatcttgtggaaaggacgaaacaccgtaatttctactaagtgtagatccccaagtgaagcccacctgtaatttctactaagtgtagatagtcaaacgcatactgacaattttttaagcttggcgtggatccgatatcaactagatcttgaga

SEQ ID NO: 4504 - DNA, 170 bp, Artificial sequence
  Kmt2b.265_Stag2.1409
  crRNA array
cgatttcttggctttatatatcttgtggaaaggacgaaacaccgtaatttctactaagtgtagatccccaagtgaagcccacctgtaatttctactaagtgtagatgctaataactgcggaagggcttttttaagcttggcgtggatccgatatcaactagatcttgaga

SEQ ID NO: 4505 - DNA, 170 bp, Artificial sequence
  Kmt2b.265_Stag2.4401
  crRNA array
cgatttcttggctttatatatcttgtggaaaggacgaaacaccgtaatttctactaagtgtagatccccaagtgaagcccacctgtaatttctactaagtgtagattaatcgtccagtggtgtatattttttaagcttggcgtggatccgatatcaactagatcttgaga

SEQ ID NO: 4506 - DNA, 170 bp, Artificial sequence
  Kmt2b.265_Tbl1xr1.1
  crRNA array
cgatttcttggctttatatatcttgtggaaaggacgaaacaccgtaatttctactaagtgtagatccccaagtgaagcccacctgtaatttctactaagtgtagatggatgcgcatactggtgaagttttttaagcttggcgtggatccgatatcaactagatcttgaga

SEQ ID NO: 4507 - DNA, 170 bp, Artificial sequence
  Kmt2b.265_Tbl1xr1.83
  crRNA array
cgatttcttggctttatatatcttgtggaaaggacgaaacaccgtaatttctactaagtgtagatccccaagtgaagcccacctgtaatttctactaagtgtagatatggtcgacccatcgagtctttttttaagcttggcgtggatccgatatcaactagatcttgaga

SEQ ID NO: 4508 - DNA, 170 bp, Artificial sequence
  Kmt2b.265_Tgfbr2.290
  crRNA array
cgatttcttggctttatatatcttgtggaaaggacgaaacaccgtaatttctactaagtgtagatccccaagtgaagcccacctgtaatttctactaagtgtagatcctctcggcgcccgggtaaattttttaagcttggcgtggatccgatatcaactagatcttgaga

SEQ ID NO: 4509 - DNA, 170 bp, Artificial sequence
  Kmt2b.265_Tgfbr2.292
  crRNA array
cgatttcttggctttatatatcttgtggaaaggacgaaacaccgtaatttctactaagtgtagatccccaagtgaagcccacctgtaatttctactaagtgtagatcccgggcgccgagagggaaattttttaagcttggcgtggatccgatatcaactagatcttgaga

SEQ ID NO: 4510 - DNA, 170 bp, Artificial sequence
  Kmt2b.265_Trp53.4
  crRNA array
cgatttcttggctttatatatcttgtggaaaggacgaaacaccgtaatttctactaagtgtagatccccaagtgaagcccacctgtaatttctactaagtgtagatccctgaactgcccccagggattttttaagcttggcgtggatccgatatcaactagatcttgaga

SEQ ID NO: 4511 - DNA, 170 bp, Artificial sequence
  Kmt2b.265_Trp53.528
  crRNA array
cgatttcttggctttatatatcttgtggaaaggacgaaacaccgtaatttctactaagtgtagatccccaagtgaagcccacctgtaatttctactaagtgtagatgctgggccagcagagacctgttttttaagcttggcgtggatccgatatcaactagatcttgaga

SEQ ID NO: 4512 - DNA, 170 bp, Artificial sequence
  Kmt2b.265_Vhl.1
  crRNA array
cgatttcttggctttatatatcttgtggaaaggacgaaacaccgtaatttctactaagtgtagatccccaagtgaagcccacctgtaatttctactaagtgtagatagggctcccggcggccatttttttttaagcttggcgtggatccgatatcaactagatcttgaga

SEQ ID NO: 4513 - DNA, 170 bp, Artificial sequence
  Kmt2b.265_Vhl.151
  crRNA array
cgatttcttggctttatatatcttgtggaaaggacgaaacaccgtaatttctactaagtgtagatccccaagtgaagcccacctgtaatttctactaagtgtagattagagcactcacccgagggattttttaagcttggcgtggatccgatatcaactagatcttgaga

SEQ ID NO: 4514 - DNA, 170 bp, Artificial sequence
  Kmt2b.265_Zc3h13.1387
  crRNA array
cgatttcttggctttatatatcttgtggaaaggacgaaacaccgtaatttctactaagtgtagatccccaagtgaagcccacctgtaatttctactaagtgtagatgtgacgccggtcatgtgactttttttaagcttggcgtggatccgatatcaactagatcttgaga

SEQ ID NO: 4515 - DNA, 170 bp, Artificial sequence
  Kmt2b.265_Zc3h13.1777
  crRNA array
cgatttcttggctttatatatcttgtggaaaggacgaaacaccgtaatttctactaagtgtagatccccaagtgaagcccacctgtaatttctactaagtgtagatgatgctgccagtgtagcggcttttttaagcttggcgtggatccgatatcaactagatcttgaga

SEQ ID NO: 4516 - DNA, 170 bp, Artificial sequence
  Kmt2b.298_Acvr2a.155
  crRNA array
cgatttcttggctttatatatcttgtggaaaggacgaaacaccgtaatttctactaagtgtagattccggcagggaccggctggctaatttctactaagtgtagatggacctggctaatcaagtatttttttaagcttggcgtggatccgatatcaactagatcttgaga

SEQ ID NO: 4517 - DNA, 170 bp, Artificial sequence
  Kmt2b.298_Acvr2a.70
  crRNA array
cgatttcttggctttatatatcttgtggaaaggacgaaacaccgtaatttctactaagtgtagattccggcagggaccggctggctaatttctactaagtgtagatcccgaggcgccggagaagccttttttaagcttggcgtggatccgatatcaactagatcttgaga

SEQ ID NO: 4518 - DNA, 170 bp, Artificial sequence
  Kmt2b.298_Apc.21
  crRNA array
cgatttcttggctttatatatcttgtggaaaggacgaaacaccgtaatttctactaagtgtagattccggcagggaccggctggctaatttctactaagtgtagatgtgatccacacgtgtagctgttttttaagcttggcgtggatccgatatcaactagatcttgaga

SEQ ID NO: 4519 - DNA, 170 bp, Artificial sequence
  Kmt2b.298_Apc.867
  crRNA array
cgatttcttggctttatatatcttgtggaaaggacgaaacaccgtaatttctactaagtgtagattccggcagggaccggctggctaatttctactaagtgtagatcagtcccaggcggcggaagcttttttaagcttggcgtggatccgatatcaactagatcttgaga

SEQ ID NO: 4520 - DNA, 170 bp, Artificial sequence
  Kmt2b.298_Arid1a.2
  crRNA array
cgatttcttggctttatatatcttgtggaaaggacgaaacaccgtaatttctactaagtgtagattccggcagggaccggctggctaatttctactaagtgtagatcccgcgcccccgtcctggggttttttaagcttggcgtggatccgatatcaactagatcttgaga

SEQ ID NO: 4521 - DNA, 170 bp, Artificial sequence
  Kmt2b.298_Arid1a.5
  crRNA array
cgatttcttggctttatatatcttgtggaaaggacgaaacaccgtaatttctactaagtgtagattccggcagggaccggctggctaatttctactaagtgtagatcccgcgctcggccgctgccgttttttaagcttggcgtggatccgatatcaactagatcttgaga

SEQ ID NO: 4522 - DNA, 170 bp, Artificial sequence
  Kmt2b.298_Arid2.166
  crRNA array
cgatttcttggctttatatatcttgtggaaaggacgaaacaccgtaatttctactaagtgtagattccggcagggaccggctggctaatttctactaagtgtagataaccgcgatctgggttttttttttttaagcttggcgtggatccgatatcaactagatcttgaga

SEQ ID NO: 4523 - DNA, 170 bp, Artificial sequence
  Kmt2b.298_Arid2.172
  crRNA array
cgatttcttggctttatatatcttgtggaaaggacgaaacaccgtaatttctactaagtgtagattccggcagggaccggctggctaatttctactaagtgtagatctggacgagctgcggcagttttttttaagcttggcgtggatccgatatcaactagatcttgaga

SEQ ID NO: 4524 - DNA, 170 bp, Artificial sequence
  Kmt2b.298_Atm.120
  crRNA array
cgatttcttggctttatatatcttgtggaaaggacgaaacaccgtaatttctactaagtgtagattccggcagggaccggctggctaatttctactaagtgtagatgacaggtagtcggcagctaattttttaagcttggcgtggatccgatatcaactagatcttgaga

SEQ ID NO: 4525 - DNA, 170 bp, Artificial sequence
  Kmt2b.298_Atm.997
  crRNA array
cgatttcttggctttatatatcttgtggaaaggacgaaacaccgtaatttctactaagtgtagattccggcagggaccggctggctaatttctactaagtgtagatgagaaagtctccgaatcgttttttttaagcttggcgtggatccgatatcaactagatcttgaga

SEQ ID NO: 4526 - DNA, 170 bp, Artificial sequence
  Kmt2b.298_Atrx.249
  crRNA array
cgatttcttggctttatatatcttgtggaaaggacgaaacaccgtaatttctactaagtgtagattccggcagggaccggctggctaatttctactaagtgtagattagccagtcgctcatatctcttttttaagcttggcgtggatccgatatcaactagatcttgaga

SEQ ID NO: 4527 - DNA, 170 bp, Artificial sequence
  Kmt2b.298_Atrx.251
  crRNA array
cgatttcttggctttatatatcttgtggaaaggacgaaacaccgtaatttctactaagtgtagattccggcagggaccggctggctaatttctactaagtgtagatgccagtcgctcatatctctgttttttaagcttggcgtggatccgatatcaactagatcttgaga

SEQ ID NO: 4528 - DNA, 170 bp, Artificial sequence
  Kmt2b.298_Bcor.203
  crRNA array
cgatttcttggctttatatatcttgtggaaaggacgaaacaccgtaatttctactaagtgtagattccggcagggaccggctggctaatttctactaagtgtagatccccggagcggagtccaggcttttttaagcttggcgtggatccgatatcaactagatcttgaga

SEQ ID NO: 4529 - DNA, 170 bp, Artificial sequence
  Kmt2b.298_Bcor.475
  crRNA array
cgatttcttggctttatatatcttgtggaaaggacgaaacaccgtaatttctactaagtgtagattccggcagggaccggctggctaatttctactaagtgtagattgcaacccctctgtatgggattttttaagcttggcgtggatccgatatcaactagatcttgaga

SEQ ID NO: 4530 - DNA, 170 bp, Artificial sequence
  Kmt2b.298_Brca1.112
  crRNA array
cgatttcttggctttatatatcttgtggaaaggacgaaacaccgtaatttctactaagtgtagattccggcagggaccggctggctaatttctactaagtgtagatctagacgctctgtggagactttttttaagcttggcgtggatccgatatcaactagatcttgaga

SEQ ID NO: 4531 - DNA, 170 bp, Artificial sequence
  Kmt2b.298_Brca1.53
  crRNA array
cgatttcttggctttatatatcttgtggaaaggacgaaacaccgtaatttctactaagtgtagattccggcagggaccggctggctaatttctactaagtgtagataatgaggaggcgtcgatcatttttttaagcttggcgtggatccgatatcaactagatcttgaga

SEQ ID NO: 4532 - DNA, 170 bp, Artificial sequence
  Kmt2b.298_Casp8.45
  crRNA array
cgatttcttggctttatatatcttgtggaaaggacgaaacaccgtaatttctactaagtgtagattccggcagggaccggctggctaatttctactaagtgtagatctaccgagatcctgtgaatgttttttaagcttggcgtggatccgatatcaactagatcttgaga

SEQ ID NO: 4533 - DNA, 170 bp, Artificial sequence
  Kmt2b.298_Casp8.54
  crRNA array
cgatttcttggctttatatatcttgtggaaaggacgaaacaccgtaatttctactaagtgtagattccggcagggaccggctggctaatttctactaagtgtagatcagtgcagtcgtcgtaagatttttttaagcttggcgtggatccgatatcaactagatcttgaga

SEQ ID NO: 4534 - DNA, 170 bp, Artificial sequence
  Kmt2b.298_Cbwd1.84
  crRNA array
cgatttcttggctttatatatcttgtggaaaggacgaaacaccgtaatttctactaagtgtagattccggcagggaccggctggctaatttctactaagtgtagatcacagcaggtaacatgccgcttttttaagcttggcgtggatccgatatcaactagatcttgaga

SEQ ID NO: 4535 - DNA, 170 bp, Artificial sequence
  Kmt2b.298_Cbwd1.85
  crRNA array
cgatttcttggctttatatatcttgtggaaaggacgaaacaccgtaatttctactaagtgtagattccggcagggaccggctggctaatttctactaagtgtagatacagcaggtaacatgccgccttttttaagcttggcgtggatccgatatcaactagatcttgaga

SEQ ID NO: 4536 - DNA, 170 bp, Artificial sequence
  Kmt2b.298_Cdh1.387
  crRNA array
cgatttcttggctttatatatcttgtggaaaggacgaaacaccgtaatttctactaagtgtagattccggcagggaccggctggctaatttctactaagtgtagatctcggcgtctgccgggtccgttttttaagcttggcgtggatccgatatcaactagatcttgaga

SEQ ID NO: 4537 - DNA, 170 bp, Artificial sequence
  Kmt2b.298_Cdh1.58
  crRNA array
cgatttcttggctttatatatcttgtggaaaggacgaaacaccgtaatttctactaagtgtagattccggcagggaccggctggctaatttctactaagtgtagatctcgtccgcgcccgggactcttttttaagcttggcgtggatccgatatcaactagatcttgaga

SEQ ID NO: 4538 - DNA, 170 bp, Artificial sequence
  Kmt2b.298_Cdkn2a.647
  crRNA array
cgatttcttggctttatatatcttgtggaaaggacgaaacaccgtaatttctactaagtgtagattccggcagggaccggctggctaatttctactaagtgtagatgcaatcacgggagggagcagttttttaagcttggcgtggatccgatatcaactagatcttgaga

SEQ ID NO: 4539 - DNA, 170 bp, Artificial sequence
  Kmt2b.298_Cdkn2a.648
  crRNA array
cgatttcttggctttatatatcttgtggaaaggacgaaacaccgtaatttctactaagtgtagattccggcagggaccggctggctaatttctactaagtgtagatcaatcacgggagggagcagattttttaagcttggcgtggatccgatatcaactagatcttgaga

SEQ ID NO: 4540 - DNA, 170 bp, Artificial sequence
  Kmt2b.298_Cic.162
  crRNA array
cgatttcttggctttatatatcttgtggaaaggacgaaacaccgtaatttctactaagtgtagattccggcagggaccggctggctaatttctactaagtgtagatcgcaggcgcgcccggcggagttttttaagcttggcgtggatccgatatcaactagatcttgaga

SEQ ID NO: 4541 - DNA, 170 bp, Artificial sequence
  Kmt2b.298_Cic.164
  crRNA array
cgatttcttggctttatatatcttgtggaaaggacgaaacaccgtaatttctactaagtgtagattccggcagggaccggctggctaatttctactaagtgtagatcgggccctgggccggcggctttttttaagcttggcgtggatccgatatcaactagatcttgaga

SEQ ID NO: 4542 - DNA, 170 bp, Artificial sequence
  Kmt2b.298_Ctcf.229
  crRNA array
cgatttcttggctttatatatcttgtggaaaggacgaaacaccgtaatttctactaagtgtagattccggcagggaccggctggctaatttctactaagtgtagatggctggtggctgatagtctgttttttaagcttggcgtggatccgatatcaactagatcttgaga

SEQ ID NO: 4543 - DNA, 170 bp, Artificial sequence
  Kmt2b.298_Ctcf.809
  crRNA array
cgatttcttggctttatatatcttgtggaaaggacgaaacaccgtaatttctactaagtgtagattccggcagggaccggctggctaatttctactaagtgtagataagcgctatcatgatcccaattttttaagcttggcgtggatccgatatcaactagatcttgaga

SEQ ID NO: 4544 - DNA, 170 bp, Artificial sequence
  Kmt2b.298_Elf3.826
  crRNA array
cgatttcttggctttatatatcttgtggaaaggacgaaacaccgtaatttctactaagtgtagattccggcagggaccggctggctaatttctactaagtgtagattccgagacatcctaatccacttttttaagcttggcgtggatccgatatcaactagatcttgaga

SEQ ID NO: 4545 - DNA, 170 bp, Artificial sequence
  Kmt2b.298_Elf3.983
  crRNA array
cgatttcttggctttatatatcttgtggaaaggacgaaacaccgtaatttctactaagtgtagattccggcagggaccggctggctaatttctactaagtgtagattaggccccctaactggaccattttttaagcttggcgtggatccgatatcaactagatcttgaga

SEQ ID NO: 4546 - DNA, 170 bp, Artificial sequence
  Kmt2b.298_Ep300.310
  crRNA array
cgatttcttggctttatatatcttgtggaaaggacgaaacaccgtaatttctactaagtgtagattccggcagggaccggctggctaatttctactaagtgtagatatggtacgacagtgaggaagttttttaagcttggcgtggatccgatatcaactagatcttgaga

SEQ ID NO: 4547 - DNA, 170 bp, Artificial sequence
  Kmt2b.298_Ep300.587
  crRNA array
cgatttcttggctttatatatcttgtggaaaggacgaaacaccgtaatttctactaagtgtagattccggcagggaccggctggctaatttctactaagtgtagatcgccccggggcccccaaccattttttaagcttggcgtggatccgatatcaactagatcttgaga

SEQ ID NO: 4548 - DNA, 170 bp, Artificial sequence
  Kmt2b.298_Epha2.126
  crRNA array
cgatttcttggctttatatatcttgtggaaaggacgaaacaccgtaatttctactaagtgtagattccggcagggaccggctggctaatttctactaagtgtagatcctgtgccgccgcggccgccttttttaagcttggcgtggatccgatatcaactagatcttgaga

SEQ ID NO: 4549 - DNA, 170 bp, Artificial sequence
  Kmt2b.298_Epha2.5
  crRNA array
cgatttcttggctttatatatcttgtggaaaggacgaaacaccgtaatttctactaagtgtagattccggcagggaccggctggctaatttctactaagtgtagatcatgagctggcgccacccggttttttaagcttggcgtggatccgatatcaactagatcttgaga

SEQ ID NO: 4550 - DNA, 170 bp, Artificial sequence
  Kmt2b.298_Fat1.105
  crRNA array
cgatttcttggctttatatatcttgtggaaaggacgaaacaccgtaatttctactaagtgtagattccggcagggaccggctggctaatttctactaagtgtagataactcgaggtgacaacaagtttttttaagcttggcgtggatccgatatcaactagatcttgaga

SEQ ID NO: 4551 - DNA, 170 bp, Artificial sequence
  Kmt2b.298_Fat1.122
  crRNA array
cgatttcttggctttatatatcttgtggaaaggacgaaacaccgtaatttctactaagtgtagattccggcagggaccggctggctaatttctactaagtgtagatccatcgacatggaaacgggattttttaagcttggcgtggatccgatatcaactagatcttgaga

SEQ ID NO: 4552 - DNA, 170 bp, Artificial sequence
  Kmt2b.298_Fbxw7.21
  crRNA array
cgatttcttggctttatatatcttgtggaaaggacgaaacaccgtaatttctactaagtgtagattccggcagggaccggctggctaatttctactaagtgtagattaatgtgccgtagaaacccattttttaagcttggcgtggatccgatatcaactagatcttgaga

SEQ ID NO: 4553 - DNA, 170 bp, Artificial sequence
  Kmt2b.298_Fbxw7.23
  crRNA array
cgatttcttggctttatatatcttgtggaaaggacgaaacaccgtaatttctactaagtgtagattccggcagggaccggctggctaatttctactaagtgtagatatgtgccgtagaaacccatattttttaagcttggcgtggatccgatatcaactagatcttgaga

SEQ ID NO: 4554 - DNA, 170 bp, Artificial sequence
  Kmt2b.298_Gata3.34
  crRNA array
cgatttcttggctttatatatcttgtggaaaggacgaaacaccgtaatttctactaagtgtagattccggcagggaccggctggctaatttctactaagtgtagatctaaactatcccgcaaagatttttttaagcttggcgtggatccgatatcaactagatcttgaga

SEQ ID NO: 4555 - DNA, 170 bp, Artificial sequence
  Kmt2b.298_Gata3.47
  crRNA array
cgatttcttggctttatatatcttgtggaaaggacgaaacaccgtaatttctactaagtgtagattccggcagggaccggctggctaatttctactaagtgtagatcgtagtaggacgggacgtggttttttaagcttggcgtggatccgatatcaactagatcttgaga

SEQ ID NO: 4556 - DNA, 170 bp, Artificial sequence
  Kmt2b.298_H2-Q2.1
  crRNA array
cgatttcttggctttatatatcttgtggaaaggacgaaacaccgtaatttctactaagtgtagattccggcagggaccggctggctaatttctactaagtgtagatagggcggccaccaacagcagttttttaagcttggcgtggatccgatatcaactagatcttgaga

SEQ ID NO: 4557 - DNA, 170 bp, Artificial sequence
  Kmt2b.298_H2-Q2.2
  crRNA array
cgatttcttggctttatatatcttgtggaaaggacgaaacaccgtaatttctactaagtgtagattccggcagggaccggctggctaatttctactaagtgtagattaacctgcgcccgctgctgattttttaagcttggcgtggatccgatatcaactagatcttgaga

SEQ ID NO: 4558 - DNA, 170 bp, Artificial sequence
  Kmt2b.298_Kdm5c.1878
  crRNA array
cgatttcttggctttatatatcttgtggaaaggacgaaacaccgtaatttctactaagtgtagattccggcagggaccggctggctaatttctactaagtgtagatagagcacggcacccgcccccttttttaagcttggcgtggatccgatatcaactagatcttgaga

SEQ ID NO: 4559 - DNA, 170 bp, Artificial sequence
  Kmt2b.298_Kdm5c.1879
  crRNA array
cgatttcttggctttatatatcttgtggaaaggacgaaacaccgtaatttctactaagtgtagattccggcagggaccggctggctaatttctactaagtgtagatgagcacggcacccgccccccttttttaagcttggcgtggatccgatatcaactagatcttgaga

SEQ ID NO: 4560 - DNA, 170 bp, Artificial sequence
  Kmt2b.298_Kdm6a.56
  crRNA array
cgatttcttggctttatatatcttgtggaaaggacgaaacaccgtaatttctactaagtgtagattccggcagggaccggctggctaatttctactaagtgtagattcgctgccgcctctcgcggcttttttaagcttggcgtggatccgatatcaactagatcttgaga

SEQ ID NO: 4561 - DNA, 170 bp, Artificial sequence
  Kmt2b.298_Kdm6a.57
  crRNA array
cgatttcttggctttatatatcttgtggaaaggacgaaacaccgtaatttctactaagtgtagattccggcagggaccggctggctaatttctactaagtgtagatcgctgccgcctctcgcggcattttttaagcttggcgtggatccgatatcaactagatcttgaga

SEQ ID NO: 4562 - DNA, 170 bp, Artificial sequence
  Kmt2b.298_Kmt2c.1962
  crRNA array
cgatttcttggctttatatatcttgtggaaaggacgaaacaccgtaatttctactaagtgtagattccggcagggaccggctggctaatttctactaagtgtagatgtgacgatctgtgccacaagttttttaagcttggcgtggatccgatatcaactagatcttgaga

SEQ ID NO: 4563 - DNA, 170 bp, Artificial sequence
  Kmt2b.298_Kmt2c.2236
  crRNA array
cgatttcttggctttatatatcttgtggaaaggacgaaacaccgtaatttctactaagtgtagattccggcagggaccggctggctaatttctactaagtgtagatactcgacctccacctccctattttttaagcttggcgtggatccgatatcaactagatcttgaga

SEQ ID NO: 4564 - DNA, 170 bp, Artificial sequence
  Kmt2b.298_Kmt2d.316
  crRNA array
cgatttcttggctttatatatcttgtggaaaggacgaaacaccgtaatttctactaagtgtagattccggcagggaccggctggctaatttctactaagtgtagatactccaggccacccaggtggttttttaagcttggcgtggatccgatatcaactagatcttgaga

SEQ ID NO: 4565 - DNA, 170 bp, Artificial sequence
  Kmt2b.298_Kmt2d.416
  crRNA array
cgatttcttggctttatatatcttgtggaaaggacgaaacaccgtaatttctactaagtgtagattccggcagggaccggctggctaatttctactaagtgtagattaaacccccgggggaagggtttttttaagcttggcgtggatccgatatcaactagatcttgaga

SEQ ID NO: 4566 - DNA, 170 bp, Artificial sequence
  Kmt2b.298_Map2k4.119
  crRNA array
cgatttcttggctttatatatcttgtggaaaggacgaaacaccgtaatttctactaagtgtagattccggcagggaccggctggctaatttctactaagtgtagattgctgtgtgggcggccacatttttttaagcttggcgtggatccgatatcaactagatcttgaga

SEQ ID NO: 4567 - DNA, 170 bp, Artificial sequence
  Kmt2b.298_Map2k4.1261
  crRNA array
cgatttcttggctttatatatcttgtggaaaggacgaaacaccgtaatttctactaagtgtagattccggcagggaccggctggctaatttctactaagtgtagatgatgtagtaatgcggagtagttttttaagcttggcgtggatccgatatcaactagatcttgaga

SEQ ID NO: 4568 - DNA, 170 bp, Artificial sequence
  Kmt2b.298_Map3k1.235
  crRNA array
cgatttcttggctttatatatcttgtggaaaggacgaaacaccgtaatttctactaagtgtagattccggcagggaccggctggctaatttctactaagtgtagataaaacgctactgatcgatcgttttttaagcttggcgtggatccgatatcaactagatcttgaga

SEQ ID NO: 4569 - DNA, 170 bp, Artificial sequence
  Kmt2b.298_Map3k1.3838
  crRNA array
cgatttcttggctttatatatcttgtggaaaggacgaaacaccgtaatttctactaagtgtagattccggcagggaccggctggctaatttctactaagtgtagatccaacaacagggccccactattttttaagcttggcgtggatccgatatcaactagatcttgaga

SEQ ID NO: 4570 - DNA, 170 bp, Artificial sequence
  Kmt2b.298_Mga.1655
  crRNA array
cgatttcttggctttatatatcttgtggaaaggacgaaacaccgtaatttctactaagtgtagattccggcagggaccggctggctaatttctactaagtgtagatcgagaagtggagagcatattttttttaagcttggcgtggatccgatatcaactagatcttgaga

SEQ ID NO: 4571 - DNA, 170 bp, Artificial sequence
  Kmt2b.298_Mga.93
  crRNA array
cgatttcttggctttatatatcttgtggaaaggacgaaacaccgtaatttctactaagtgtagattccggcagggaccggctggctaatttctactaagtgtagatgagaaggctccccataatgtttttttaagcttggcgtggatccgatatcaactagatcttgaga

SEQ ID NO: 4572 - DNA, 170 bp, Artificial sequence
  Kmt2b.298_Nf1.746
  crRNA array
cgatttcttggctttatatatcttgtggaaaggacgaaacaccgtaatttctactaagtgtagattccggcagggaccggctggctaatttctactaagtgtagattaagcataatgatgatgccattttttaagcttggcgtggatccgatatcaactagatcttgaga

SEQ ID NO: 4573 - DNA, 170 bp, Artificial sequence
  Kmt2b.298_Nf1.97
  crRNA array
cgatttcttggctttatatatcttgtggaaaggacgaaacaccgtaatttctactaagtgtagattccggcagggaccggctggctaatttctactaagtgtagatagcccgctacatgctgatgcttttttaagcttggcgtggatccgatatcaactagatcttgaga

SEQ ID NO: 4574 - DNA, 170 bp, Artificial sequence
  Kmt2b.298_Nf2.356
  crRNA array
cgatttcttggctttatatatcttgtggaaaggacgaaacaccgtaatttctactaagtgtagattccggcagggaccggctggctaatttctactaagtgtagatcggagtcatctgatagagatttttttaagcttggcgtggatccgatatcaactagatcttgaga

SEQ ID NO: 4575 - DNA, 170 bp, Artificial sequence
  Kmt2b.298_Nf2.768
  crRNA array
cgatttcttggctttatatatcttgtggaaaggacgaaacaccgtaatttctactaagtgtagattccggcagggaccggctggctaatttctactaagtgtagatccgaagccccagtgtccggcttttttaagcttggcgtggatccgatatcaactagatcttgaga

SEQ ID NO: 4576 - DNA, 170 bp, Artificial sequence
  Kmt2b.298_Notch1.1849
  crRNA array
cgatttcttggctttatatatcttgtggaaaggacgaaacaccgtaatttctactaagtgtagattccggcagggaccggctggctaatttctactaagtgtagatctggcgggtgggcggcgctgttttttaagcttggcgtggatccgatatcaactagatcttgaga

SEQ ID NO: 4577 - DNA, 170 bp, Artificial sequence
  Kmt2b.298_Notch1.649
  crRNA array
cgatttcttggctttatatatcttgtggaaaggacgaaacaccgtaatttctactaagtgtagattccggcagggaccggctggctaatttctactaagtgtagattgggccaacgatgccaggacttttttaagcttggcgtggatccgatatcaactagatcttgaga

SEQ ID NO: 4578 - DNA, 170 bp, Artificial sequence
  Kmt2b.298_Nsd1.70
  crRNA array
cgatttcttggctttatatatcttgtggaaaggacgaaacaccgtaatttctactaagtgtagattccggcagggaccggctggctaatttctactaagtgtagatactggtgtggacgatgcagattttttaagcttggcgtggatccgatatcaactagatcttgaga

SEQ ID NO: 4579 - DNA, 170 bp, Artificial sequence
  Kmt2b.298_Nsd1.90
  crRNA array
cgatttcttggctttatatatcttgtggaaaggacgaaacaccgtaatttctactaagtgtagattccggcagggaccggctggctaatttctactaagtgtagataggagctaacggcaagaatgttttttaagcttggcgtggatccgatatcaactagatcttgaga

SEQ ID NO: 4580 - DNA, 170 bp, Artificial sequence
  Kmt2b.298_Pbrm1.1236
  crRNA array
cgatttcttggctttatatatcttgtggaaaggacgaaacaccgtaatttctactaagtgtagattccggcagggaccggctggctaatttctactaagtgtagatgccgataaaaccaacagccgttttttaagcttggcgtggatccgatatcaactagatcttgaga

SEQ ID NO: 4581 - DNA, 170 bp, Artificial sequence
  Kmt2b.298_Pbrm1.969
  crRNA array
cgatttcttggctttatatatcttgtggaaaggacgaaacaccgtaatttctactaagtgtagattccggcagggaccggctggctaatttctactaagtgtagatgagccctaatgaacagctcattttttaagcttggcgtggatccgatatcaactagatcttgaga

SEQ ID NO: 4582 - DNA, 170 bp, Artificial sequence
  Kmt2b.298_Pik3r1.76
  crRNA array
cgatttcttggctttatatatcttgtggaaaggacgaaacaccgtaatttctactaagtgtagattccggcagggaccggctggctaatttctactaagtgtagataaaacctatacggcccgcacttttttaagcttggcgtggatccgatatcaactagatcttgaga

SEQ ID NO: 4583 - DNA, 170 bp, Artificial sequence
  Kmt2b.298_Pik3r1.77
  crRNA array
cgatttcttggctttatatatcttgtggaaaggacgaaacaccgtaatttctactaagtgtagattccggcagggaccggctggctaatttctactaagtgtagataaacctatacggcccgcactttttttaagcttggcgtggatccgatatcaactagatcttgaga

SEQ ID NO: 4584 - DNA, 170 bp, Artificial sequence
  Kmt2b.298_Pten.240
  crRNA array
cgatttcttggctttatatatcttgtggaaaggacgaaacaccgtaatttctactaagtgtagattccggcagggaccggctggctaatttctactaagtgtagattgcatacgctatagctgcttttttttaagcttggcgtggatccgatatcaactagatcttgaga

SEQ ID NO: 4585 - DNA, 170 bp, Artificial sequence
  Kmt2b.298_Pten.265
  crRNA array
cgatttcttggctttatatatcttgtggaaaggacgaaacaccgtaatttctactaagtgtagattccggcagggaccggctggctaatttctactaagtgtagataagcgtggtgcgtgacgcacttttttaagcttggcgtggatccgatatcaactagatcttgaga

SEQ ID NO: 4586 - DNA, 170 bp, Artificial sequence
  Kmt2b.298_Rasa1.1478
  crRNA array
cgatttcttggctttatatatcttgtggaaaggacgaaacaccgtaatttctactaagtgtagattccggcagggaccggctggctaatttctactaagtgtagatcgataatggtctatgatgtcttttttaagcttggcgtggatccgatatcaactagatcttgaga

SEQ ID NO: 4587 - DNA, 170 bp, Artificial sequence
  Kmt2b.298_Rasa1.223
  crRNA array
cgatttcttggctttatatatcttgtggaaaggacgaaacaccgtaatttctactaagtgtagattccggcagggaccggctggctaatttctactaagtgtagattccatggagtatcgtgctcgttttttaagcttggcgtggatccgatatcaactagatcttgaga

SEQ ID NO: 4588 - DNA, 170 bp, Artificial sequence
  Kmt2b.298_Rb1.211
  crRNA array
cgatttcttggctttatatatcttgtggaaaggacgaaacaccgtaatttctactaagtgtagattccggcagggaccggctggctaatttctactaagtgtagattctgacatgatcgggtacctttttttaagcttggcgtggatccgatatcaactagatcttgaga

SEQ ID NO: 4589 - DNA, 170 bp, Artificial sequence
  Kmt2b.298_Rb1.394
  crRNA array
cgatttcttggctttatatatcttgtggaaaggacgaaacaccgtaatttctactaagtgtagattccggcagggaccggctggctaatttctactaagtgtagatagaaatctcgaagcaggatcttttttaagcttggcgtggatccgatatcaactagatcttgaga

SEQ ID NO: 4590 - DNA, 170 bp, Artificial sequence
  Kmt2b.298_Rbm10.5
  crRNA array
cgatttcttggctttatatatcttgtggaaaggacgaaacaccgtaatttctactaagtgtagattccggcagggaccggctggctaatttctactaagtgtagatacgaaacctgaacccacacattttttaagcttggcgtggatccgatatcaactagatcttgaga

SEQ ID NO: 4591 - DNA, 170 bp, Artificial sequence
  Kmt2b.298_Rbm10.6
  crRNA array
cgatttcttggctttatatatcttgtggaaaggacgaaacaccgtaatttctactaagtgtagattccggcagggaccggctggctaatttctactaagtgtagatcgaaacctgaacccacacagttttttaagcttggcgtggatccgatatcaactagatcttgaga

SEQ ID NO: 4592 - DNA, 170 bp, Artificial sequence
  Kmt2b.298_Rnf43.1920
  crRNA array
cgatttcttggctttatatatcttgtggaaaggacgaaacaccgtaatttctactaagtgtagattccggcagggaccggctggctaatttctactaagtgtagatatccccgtgccgtggactccttttttaagcttggcgtggatccgatatcaactagatcttgaga

SEQ ID NO: 4593 - DNA, 170 bp, Artificial sequence
  Kmt2b.298_Rnf43.39
  crRNA array
cgatttcttggctttatatatcttgtggaaaggacgaaacaccgtaatttctactaagtgtagattccggcagggaccggctggctaatttctactaagtgtagatcaaggggatcactctgataattttttaagcttggcgtggatccgatatcaactagatcttgaga

SEQ ID NO: 4594 - DNA, 170 bp, Artificial sequence
  Kmt2b.298_Runx1.204
  crRNA array
cgatttcttggctttatatatcttgtggaaaggacgaaacaccgtaatttctactaagtgtagattccggcagggaccggctggctaatttctactaagtgtagattaaataagtccagccgttttttttttaagcttggcgtggatccgatatcaactagatcttgaga

SEQ ID NO: 4595 - DNA, 170 bp, Artificial sequence
  Kmt2b.298_Runx1.81
  crRNA array
cgatttcttggctttatatatcttgtggaaaggacgaaacaccgtaatttctactaagtgtagattccggcagggaccggctggctaatttctactaagtgtagataggacgcgtatgggaattttttttttaagcttggcgtggatccgatatcaactagatcttgaga

SEQ ID NO: 4596 - DNA, 170 bp, Artificial sequence
  Kmt2b.298_Setd2.143
  crRNA array
cgatttcttggctttatatatcttgtggaaaggacgaaacaccgtaatttctactaagtgtagattccggcagggaccggctggctaatttctactaagtgtagatgcacaaccacaacagactggttttttaagcttggcgtggatccgatatcaactagatcttgaga

SEQ ID NO: 4597 - DNA, 170 bp, Artificial sequence
  Kmt2b.298_Setd2.508
  crRNA array
cgatttcttggctttatatatcttgtggaaaggacgaaacaccgtaatttctactaagtgtagattccggcagggaccggctggctaatttctactaagtgtagattacgatcccgagcacccgacttttttaagcttggcgtggatccgatatcaactagatcttgaga

SEQ ID NO: 4598 - DNA, 170 bp, Artificial sequence
  Kmt2b.298_Smad4.3038
  crRNA array
cgatttcttggctttatatatcttgtggaaaggacgaaacaccgtaatttctactaagtgtagattccggcagggaccggctggctaatttctactaagtgtagatatctgcggcagtgtcaccggttttttaagcttggcgtggatccgatatcaactagatcttgaga

SEQ ID NO: 4599 - DNA, 170 bp, Artificial sequence
  Kmt2b.298_Smad4.39
  crRNA array
cgatttcttggctttatatatcttgtggaaaggacgaaacaccgtaatttctactaagtgtagattccggcagggaccggctggctaatttctactaagtgtagatagtcaaacgcatactgacaattttttaagcttggcgtggatccgatatcaactagatcttgaga

SEQ ID NO: 4600 - DNA, 170 bp, Artificial sequence
  Kmt2b.298_Stag2.1409
  crRNA array
cgatttcttggctttatatatcttgtggaaaggacgaaacaccgtaatttctactaagtgtagattccggcagggaccggctggctaatttctactaagtgtagatgctaataactgcggaagggcttttttaagcttggcgtggatccgatatcaactagatcttgaga

SEQ ID NO: 4601 - DNA, 170 bp, Artificial sequence
  Kmt2b.298_Stag2.4401
  crRNA array
cgatttcttggctttatatatcttgtggaaaggacgaaacaccgtaatttctactaagtgtagattccggcagggaccggctggctaatttctactaagtgtagattaatcgtccagtggtgtatattttttaagcttggcgtggatccgatatcaactagatcttgaga

SEQ ID NO: 4602 - DNA, 170 bp, Artificial sequence
  Kmt2b.298_Tbl1xr1.1
  crRNA array
cgatttcttggctttatatatcttgtggaaaggacgaaacaccgtaatttctactaagtgtagattccggcagggaccggctggctaatttctactaagtgtagatggatgcgcatactggtgaagttttttaagcttggcgtggatccgatatcaactagatcttgaga

SEQ ID NO: 4603 - DNA, 170 bp, Artificial sequence
  Kmt2b.298_Tbl1xr1.83
  crRNA array
cgatttcttggctttatatatcttgtggaaaggacgaaacaccgtaatttctactaagtgtagattccggcagggaccggctggctaatttctactaagtgtagatatggtcgacccatcgagtctttttttaagcttggcgtggatccgatatcaactagatcttgaga

SEQ ID NO: 4604 - DNA, 170 bp, Artificial sequence
  Kmt2b.298_Tgfbr2.290
  crRNA array
cgatttcttggctttatatatcttgtggaaaggacgaaacaccgtaatttctactaagtgtagattccggcagggaccggctggctaatttctactaagtgtagatcctctcggcgcccgggtaaattttttaagcttggcgtggatccgatatcaactagatcttgaga

SEQ ID NO: 4605 - DNA, 170 bp, Artificial sequence
  Kmt2b.298_Tgfbr2.292
  crRNA array
cgatttcttggctttatatatcttgtggaaaggacgaaacaccgtaatttctactaagtgtagattccggcagggaccggctggctaatttctactaagtgtagatcccgggcgccgagagggaaattttttaagcttggcgtggatccgatatcaactagatcttgaga

SEQ ID NO: 4606 - DNA, 170 bp, Artificial sequence
  Kmt2b.298_Trp53.4
  crRNA array
cgatttcttggctttatatatcttgtggaaaggacgaaacaccgtaatttctactaagtgtagattccggcagggaccggctggctaatttctactaagtgtagatccctgaactgcccccagggattttttaagcttggcgtggatccgatatcaactagatcttgaga

SEQ ID NO: 4607 - DNA, 170 bp, Artificial sequence
  Kmt2b.298_Trp53.528
  crRNA array
cgatttcttggctttatatatcttgtggaaaggacgaaacaccgtaatttctactaagtgtagattccggcagggaccggctggctaatttctactaagtgtagatgctgggccagcagagacctgttttttaagcttggcgtggatccgatatcaactagatcttgaga

SEQ ID NO: 4608 - DNA, 170 bp, Artificial sequence
  Kmt2b.298_Vhl.1
  crRNA array
cgatttcttggctttatatatcttgtggaaaggacgaaacaccgtaatttctactaagtgtagattccggcagggaccggctggctaatttctactaagtgtagatagggctcccggcggccatttttttttaagcttggcgtggatccgatatcaactagatcttgaga

SEQ ID NO: 4609 - DNA, 170 bp, Artificial sequence
  Kmt2b.298_Vhl.151
  crRNA array
cgatttcttggctttatatatcttgtggaaaggacgaaacaccgtaatttctactaagtgtagattccggcagggaccggctggctaatttctactaagtgtagattagagcactcacccgagggattttttaagcttggcgtggatccgatatcaactagatcttgaga

SEQ ID NO: 4610 - DNA, 170 bp, Artificial sequence
  Kmt2b.298_Zc3h13.1387
  crRNA array
cgatttcttggctttatatatcttgtggaaaggacgaaacaccgtaatttctactaagtgtagattccggcagggaccggctggctaatttctactaagtgtagatgtgacgccggtcatgtgactttttttaagcttggcgtggatccgatatcaactagatcttgaga

SEQ ID NO: 4611 - DNA, 170 bp, Artificial sequence
  Kmt2b.298_Zc3h13.1777
  crRNA array
cgatttcttggctttatatatcttgtggaaaggacgaaacaccgtaatttctactaagtgtagattccggcagggaccggctggctaatttctactaagtgtagatgatgctgccagtgtagcggcttttttaagcttggcgtggatccgatatcaactagatcttgaga

SEQ ID NO: 4612 - DNA, 170 bp, Artificial sequence
  Kmt2c.1962_Acvr2a.155
  crRNA array
cgatttcttggctttatatatcttgtggaaaggacgaaacaccgtaatttctactaagtgtagatgtgacgatctgtgccacaagtaatttctactaagtgtagatggacctggctaatcaagtatttttttaagcttggcgtggatccgatatcaactagatcttgaga

SEQ ID NO: 4613 - DNA, 170 bp, Artificial sequence
  Kmt2c.1962_Acvr2a.70
  crRNA array
cgatttcttggctttatatatcttgtggaaaggacgaaacaccgtaatttctactaagtgtagatgtgacgatctgtgccacaagtaatttctactaagtgtagatcccgaggcgccggagaagccttttttaagcttggcgtggatccgatatcaactagatcttgaga

SEQ ID NO: 4614 - DNA, 170 bp, Artificial sequence
  Kmt2c.1962_Apc.21
  crRNA array
cgatttcttggctttatatatcttgtggaaaggacgaaacaccgtaatttctactaagtgtagatgtgacgatctgtgccacaagtaatttctactaagtgtagatgtgatccacacgtgtagctgttttttaagcttggcgtggatccgatatcaactagatcttgaga

SEQ ID NO: 4615 - DNA, 170 bp, Artificial sequence
  Kmt2c.1962_Apc.867
  crRNA array
cgatttcttggctttatatatcttgtggaaaggacgaaacaccgtaatttctactaagtgtagatgtgacgatctgtgccacaagtaatttctactaagtgtagatcagtcccaggcggcggaagcttttttaagcttggcgtggatccgatatcaactagatcttgaga

SEQ ID NO: 4616 - DNA, 170 bp, Artificial sequence
  Kmt2c.1962_Arid1a.2
  crRNA array
cgatttcttggctttatatatcttgtggaaaggacgaaacaccgtaatttctactaagtgtagatgtgacgatctgtgccacaagtaatttctactaagtgtagatcccgcgcccccgtcctggggttttttaagcttggcgtggatccgatatcaactagatcttgaga

SEQ ID NO: 4617 - DNA, 170 bp, Artificial sequence
  Kmt2c.1962_Arid1a.5
  crRNA array
cgatttcttggctttatatatcttgtggaaaggacgaaacaccgtaatttctactaagtgtagatgtgacgatctgtgccacaagtaatttctactaagtgtagatcccgcgctcggccgctgccgttttttaagcttggcgtggatccgatatcaactagatcttgaga

SEQ ID NO: 4618 - DNA, 170 bp, Artificial sequence
  Kmt2c.1962_Arid2.166
  crRNA array
cgatttcttggctttatatatcttgtggaaaggacgaaacaccgtaatttctactaagtgtagatgtgacgatctgtgccacaagtaatttctactaagtgtagataaccgcgatctgggttttttttttttaagcttggcgtggatccgatatcaactagatcttgaga

SEQ ID NO: 4619 - DNA, 170 bp, Artificial sequence
  Kmt2c.1962_Arid2.172
  crRNA array
cgatttcttggctttatatatcttgtggaaaggacgaaacaccgtaatttctactaagtgtagatgtgacgatctgtgccacaagtaatttctactaagtgtagatctggacgagctgcggcagttttttttaagcttggcgtggatccgatatcaactagatcttgaga

SEQ ID NO: 4620 - DNA, 170 bp, Artificial sequence
  Kmt2c.1962_Atm.120
  crRNA array
cgatttcttggctttatatatcttgtggaaaggacgaaacaccgtaatttctactaagtgtagatgtgacgatctgtgccacaagtaatttctactaagtgtagatgacaggtagtcggcagctaattttttaagcttggcgtggatccgatatcaactagatcttgaga

SEQ ID NO: 4621 - DNA, 170 bp, Artificial sequence
  Kmt2c.1962_Atm.997
  crRNA array
cgatttcttggctttatatatcttgtggaaaggacgaaacaccgtaatttctactaagtgtagatgtgacgatctgtgccacaagtaatttctactaagtgtagatgagaaagtctccgaatcgttttttttaagcttggcgtggatccgatatcaactagatcttgaga

SEQ ID NO: 4622 - DNA, 170 bp, Artificial sequence
  Kmt2c.1962_Atrx.249
  crRNA array
cgatttcttggctttatatatcttgtggaaaggacgaaacaccgtaatttctactaagtgtagatgtgacgatctgtgccacaagtaatttctactaagtgtagattagccagtcgctcatatctcttttttaagcttggcgtggatccgatatcaactagatcttgaga

SEQ ID NO: 4623 - DNA, 170 bp, Artificial sequence
  Kmt2c.1962_Atrx.251
  crRNA array
cgatttcttggctttatatatcttgtggaaaggacgaaacaccgtaatttctactaagtgtagatgtgacgatctgtgccacaagtaatttctactaagtgtagatgccagtcgctcatatctctgttttttaagcttggcgtggatccgatatcaactagatcttgaga

SEQ ID NO: 4624 - DNA, 170 bp, Artificial sequence
  Kmt2c.1962_Bcor.203
  crRNA array
cgatttcttggctttatatatcttgtggaaaggacgaaacaccgtaatttctactaagtgtagatgtgacgatctgtgccacaagtaatttctactaagtgtagatccccggagcggagtccaggcttttttaagcttggcgtggatccgatatcaactagatcttgaga

SEQ ID NO: 4625 - DNA, 170 bp, Artificial sequence
  Kmt2c.1962_Bcor.475
  crRNA array
cgatttcttggctttatatatcttgtggaaaggacgaaacaccgtaatttctactaagtgtagatgtgacgatctgtgccacaagtaatttctactaagtgtagattgcaacccctctgtatgggattttttaagcttggcgtggatccgatatcaactagatcttgaga

SEQ ID NO: 4626 - DNA, 170 bp, Artificial sequence
  Kmt2c.1962_Brca1.112
  crRNA array
cgatttcttggctttatatatcttgtggaaaggacgaaacaccgtaatttctactaagtgtagatgtgacgatctgtgccacaagtaatttctactaagtgtagatctagacgctctgtggagactttttttaagcttggcgtggatccgatatcaactagatcttgaga

SEQ ID NO: 4627 - DNA, 170 bp, Artificial sequence
  Kmt2c.1962_Brca1.53
  crRNA array
cgatttcttggctttatatatcttgtggaaaggacgaaacaccgtaatttctactaagtgtagatgtgacgatctgtgccacaagtaatttctactaagtgtagataatgaggaggcgtcgatcatttttttaagcttggcgtggatccgatatcaactagatcttgaga

SEQ ID NO: 4628 - DNA, 170 bp, Artificial sequence
  Kmt2c.1962_Casp8.45
  crRNA array
cgatttcttggctttatatatcttgtggaaaggacgaaacaccgtaatttctactaagtgtagatgtgacgatctgtgccacaagtaatttctactaagtgtagatctaccgagatcctgtgaatgttttttaagcttggcgtggatccgatatcaactagatcttgaga

SEQ ID NO: 4629 - DNA, 170 bp, Artificial sequence
  Kmt2c.1962_Casp8.54
  crRNA array
cgatttcttggctttatatatcttgtggaaaggacgaaacaccgtaatttctactaagtgtagatgtgacgatctgtgccacaagtaatttctactaagtgtagatcagtgcagtcgtcgtaagatttttttaagcttggcgtggatccgatatcaactagatcttgaga

SEQ ID NO: 4630 - DNA, 170 bp, Artificial sequence
  Kmt2c.1962_Cbwd1.84
  crRNA array
cgatttcttggctttatatatcttgtggaaaggacgaaacaccgtaatttctactaagtgtagatgtgacgatctgtgccacaagtaatttctactaagtgtagatcacagcaggtaacatgccgcttttttaagcttggcgtggatccgatatcaactagatcttgaga

SEQ ID NO: 4631 - DNA, 170 bp, Artificial sequence
  Kmt2c.1962_Cbwd1.85
  crRNA array
cgatttcttggctttatatatcttgtggaaaggacgaaacaccgtaatttctactaagtgtagatgtgacgatctgtgccacaagtaatttctactaagtgtagatacagcaggtaacatgccgccttttttaagcttggcgtggatccgatatcaactagatcttgaga

SEQ ID NO: 4632 - DNA, 170 bp, Artificial sequence
  Kmt2c.1962_Cdh1.387
  crRNA array
cgatttcttggctttatatatcttgtggaaaggacgaaacaccgtaatttctactaagtgtagatgtgacgatctgtgccacaagtaatttctactaagtgtagatctcggcgtctgccgggtccgttttttaagcttggcgtggatccgatatcaactagatcttgaga

SEQ ID NO: 4633 - DNA, 170 bp, Artificial sequence
  Kmt2c.1962_Cdh1.58
  crRNA array
cgatttcttggctttatatatcttgtggaaaggacgaaacaccgtaatttctactaagtgtagatgtgacgatctgtgccacaagtaatttctactaagtgtagatctcgtccgcgcccgggactcttttttaagcttggcgtggatccgatatcaactagatcttgaga

SEQ ID NO: 4634 - DNA, 170 bp, Artificial sequence
  Kmt2c.1962_Cdkn2a.647
  crRNA array
cgatttcttggctttatatatcttgtggaaaggacgaaacaccgtaatttctactaagtgtagatgtgacgatctgtgccacaagtaatttctactaagtgtagatgcaatcacgggagggagcagttttttaagcttggcgtggatccgatatcaactagatcttgaga

SEQ ID NO: 4635 - DNA, 170 bp, Artificial sequence
  Kmt2c.1962_Cdkn2a.648
  crRNA array
cgatttcttggctttatatatcttgtggaaaggacgaaacaccgtaatttctactaagtgtagatgtgacgatctgtgccacaagtaatttctactaagtgtagatcaatcacgggagggagcagattttttaagcttggcgtggatccgatatcaactagatcttgaga

SEQ ID NO: 4636 - DNA, 170 bp, Artificial sequence
  Kmt2c.1962_Cic.162
  crRNA array
cgatttcttggctttatatatcttgtggaaaggacgaaacaccgtaatttctactaagtgtagatgtgacgatctgtgccacaagtaatttctactaagtgtagatcgcaggcgcgcccggcggagttttttaagcttggcgtggatccgatatcaactagatcttgaga

SEQ ID NO: 4637 - DNA, 170 bp, Artificial sequence
  Kmt2c.1962_Cic.164
  crRNA array
cgatttcttggctttatatatcttgtggaaaggacgaaacaccgtaatttctactaagtgtagatgtgacgatctgtgccacaagtaatttctactaagtgtagatcgggccctgggccggcggctttttttaagcttggcgtggatccgatatcaactagatcttgaga

SEQ ID NO: 4638 - DNA, 170 bp, Artificial sequence
  Kmt2c.1962_Ctcf.229
  crRNA array
cgatttcttggctttatatatcttgtggaaaggacgaaacaccgtaatttctactaagtgtagatgtgacgatctgtgccacaagtaatttctactaagtgtagatggctggtggctgatagtctgttttttaagcttggcgtggatccgatatcaactagatcttgaga

SEQ ID NO: 4639 - DNA, 170 bp, Artificial sequence
  Kmt2c.1962_Ctcf.809
  crRNA array
cgatttcttggctttatatatcttgtggaaaggacgaaacaccgtaatttctactaagtgtagatgtgacgatctgtgccacaagtaatttctactaagtgtagataagcgctatcatgatcccaattttttaagcttggcgtggatccgatatcaactagatcttgaga

SEQ ID NO: 4640 - DNA, 170 bp, Artificial sequence
  Kmt2c.1962_Elf3.826
  crRNA array
cgatttcttggctttatatatcttgtggaaaggacgaaacaccgtaatttctactaagtgtagatgtgacgatctgtgccacaagtaatttctactaagtgtagattccgagacatcctaatccacttttttaagcttggcgtggatccgatatcaactagatcttgaga

SEQ ID NO: 4641 - DNA, 170 bp, Artificial sequence
  Kmt2c.1962_Elf3.983
  crRNA array
cgatttcttggctttatatatcttgtggaaaggacgaaacaccgtaatttctactaagtgtagatgtgacgatctgtgccacaagtaatttctactaagtgtagattaggccccctaactggaccattttttaagcttggcgtggatccgatatcaactagatcttgaga

SEQ ID NO: 4642 - DNA, 170 bp, Artificial sequence
  Kmt2c.1962_Ep300.310
  crRNA array
cgatttcttggctttatatatcttgtggaaaggacgaaacaccgtaatttctactaagtgtagatgtgacgatctgtgccacaagtaatttctactaagtgtagatatggtacgacagtgaggaagttttttaagcttggcgtggatccgatatcaactagatcttgaga

SEQ ID NO: 4643 - DNA, 170 bp, Artificial sequence
  Kmt2c.1962_Ep300.587
  crRNA array
cgatttcttggctttatatatcttgtggaaaggacgaaacaccgtaatttctactaagtgtagatgtgacgatctgtgccacaagtaatttctactaagtgtagatcgccccggggcccccaaccattttttaagcttggcgtggatccgatatcaactagatcttgaga

SEQ ID NO: 4644 - DNA, 170 bp, Artificial sequence
  Kmt2c.1962_Epha2.126
  crRNA array
cgatttcttggctttatatatcttgtggaaaggacgaaacaccgtaatttctactaagtgtagatgtgacgatctgtgccacaagtaatttctactaagtgtagatcctgtgccgccgcggccgccttttttaagcttggcgtggatccgatatcaactagatcttgaga

SEQ ID NO: 4645 - DNA, 170 bp, Artificial sequence
  Kmt2c.1962_Epha2.5
  crRNA array
cgatttcttggctttatatatcttgtggaaaggacgaaacaccgtaatttctactaagtgtagatgtgacgatctgtgccacaagtaatttctactaagtgtagatcatgagctggcgccacccggttttttaagcttggcgtggatccgatatcaactagatcttgaga

SEQ ID NO: 4646 - DNA, 170 bp, Artificial sequence
  Kmt2c.1962_Fat1.105
  crRNA array
cgatttcttggctttatatatcttgtggaaaggacgaaacaccgtaatttctactaagtgtagatgtgacgatctgtgccacaagtaatttctactaagtgtagataactcgaggtgacaacaagtttttttaagcttggcgtggatccgatatcaactagatcttgaga

SEQ ID NO: 4647 - DNA, 170 bp, Artificial sequence
  Kmt2c.1962_Fat1.122
  crRNA array
cgatttcttggctttatatatcttgtggaaaggacgaaacaccgtaatttctactaagtgtagatgtgacgatctgtgccacaagtaatttctactaagtgtagatccatcgacatggaaacgggattttttaagcttggcgtggatccgatatcaactagatcttgaga

SEQ ID NO: 4648 - DNA, 170 bp, Artificial sequence
  Kmt2c.1962_Fbxw7.21
  crRNA array
cgatttcttggctttatatatcttgtggaaaggacgaaacaccgtaatttctactaagtgtagatgtgacgatctgtgccacaagtaatttctactaagtgtagattaatgtgccgtagaaacccattttttaagcttggcgtggatccgatatcaactagatcttgaga

SEQ ID NO: 4649 - DNA, 170 bp, Artificial sequence
  Kmt2c.1962_Fbxw7.23
  crRNA array
cgatttcttggctttatatatcttgtggaaaggacgaaacaccgtaatttctactaagtgtagatgtgacgatctgtgccacaagtaatttctactaagtgtagatatgtgccgtagaaacccatattttttaagcttggcgtggatccgatatcaactagatcttgaga

SEQ ID NO: 4650 - DNA, 170 bp, Artificial sequence
  Kmt2c.1962_Gata3.34
  crRNA array
cgatttcttggctttatatatcttgtggaaaggacgaaacaccgtaatttctactaagtgtagatgtgacgatctgtgccacaagtaatttctactaagtgtagatctaaactatcccgcaaagatttttttaagcttggcgtggatccgatatcaactagatcttgaga

SEQ ID NO: 4651 - DNA, 170 bp, Artificial sequence
  Kmt2c.1962_Gata3.47
  crRNA array
cgatttcttggctttatatatcttgtggaaaggacgaaacaccgtaatttctactaagtgtagatgtgacgatctgtgccacaagtaatttctactaagtgtagatcgtagtaggacgggacgtggttttttaagcttggcgtggatccgatatcaactagatcttgaga

SEQ ID NO: 4652 - DNA, 170 bp, Artificial sequence
  Kmt2c.1962_H2-Q2.1
  crRNA array
cgatttcttggctttatatatcttgtggaaaggacgaaacaccgtaatttctactaagtgtagatgtgacgatctgtgccacaagtaatttctactaagtgtagatagggcggccaccaacagcagttttttaagcttggcgtggatccgatatcaactagatcttgaga

SEQ ID NO: 4653 - DNA, 170 bp, Artificial sequence
  Kmt2c.1962_H2-Q2.2
  crRNA array
cgatttcttggctttatatatcttgtggaaaggacgaaacaccgtaatttctactaagtgtagatgtgacgatctgtgccacaagtaatttctactaagtgtagattaacctgcgcccgctgctgattttttaagcttggcgtggatccgatatcaactagatcttgaga

SEQ ID NO: 4654 - DNA, 170 bp, Artificial sequence
  Kmt2c.1962_Kdm5c.1878
  crRNA array
cgatttcttggctttatatatcttgtggaaaggacgaaacaccgtaatttctactaagtgtagatgtgacgatctgtgccacaagtaatttctactaagtgtagatagagcacggcacccgcccccttttttaagcttggcgtggatccgatatcaactagatcttgaga

SEQ ID NO: 4655 - DNA, 170 bp, Artificial sequence
  Kmt2c.1962_Kdm5c.1879
  crRNA array
cgatttcttggctttatatatcttgtggaaaggacgaaacaccgtaatttctactaagtgtagatgtgacgatctgtgccacaagtaatttctactaagtgtagatgagcacggcacccgccccccttttttaagcttggcgtggatccgatatcaactagatcttgaga

SEQ ID NO: 4656 - DNA, 170 bp, Artificial sequence
  Kmt2c.1962_Kdm6a.56
  crRNA array
cgatttcttggctttatatatcttgtggaaaggacgaaacaccgtaatttctactaagtgtagatgtgacgatctgtgccacaagtaatttctactaagtgtagattcgctgccgcctctcgcggcttttttaagcttggcgtggatccgatatcaactagatcttgaga

SEQ ID NO: 4657 - DNA, 170 bp, Artificial sequence
  Kmt2c.1962_Kdm6a.57
  crRNA array
cgatttcttggctttatatatcttgtggaaaggacgaaacaccgtaatttctactaagtgtagatgtgacgatctgtgccacaagtaatttctactaagtgtagatcgctgccgcctctcgcggcattttttaagcttggcgtggatccgatatcaactagatcttgaga

SEQ ID NO: 4658 - DNA, 170 bp, Artificial sequence
  Kmt2c.1962_Kmt2b.265
  crRNA array
cgatttcttggctttatatatcttgtggaaaggacgaaacaccgtaatttctactaagtgtagatgtgacgatctgtgccacaagtaatttctactaagtgtagatccccaagtgaagcccacctgttttttaagcttggcgtggatccgatatcaactagatcttgaga

SEQ ID NO: 4659 - DNA, 170 bp, Artificial sequence
  Kmt2c.1962_Kmt2b.298
  crRNA array
cgatttcttggctttatatatcttgtggaaaggacgaaacaccgtaatttctactaagtgtagatgtgacgatctgtgccacaagtaatttctactaagtgtagattccggcagggaccggctggcttttttaagcttggcgtggatccgatatcaactagatcttgaga

SEQ ID NO: 4660 - DNA, 170 bp, Artificial sequence
  Kmt2c.1962_Kmt2d.316
  crRNA array
cgatttcttggctttatatatcttgtggaaaggacgaaacaccgtaatttctactaagtgtagatgtgacgatctgtgccacaagtaatttctactaagtgtagatactccaggccacccaggtggttttttaagcttggcgtggatccgatatcaactagatcttgaga

SEQ ID NO: 4661 - DNA, 170 bp, Artificial sequence
  Kmt2c.1962_Kmt2d.416
  crRNA array
cgatttcttggctttatatatcttgtggaaaggacgaaacaccgtaatttctactaagtgtagatgtgacgatctgtgccacaagtaatttctactaagtgtagattaaacccccgggggaagggtttttttaagcttggcgtggatccgatatcaactagatcttgaga

SEQ ID NO: 4662 - DNA, 170 bp, Artificial sequence
  Kmt2c.1962_Map2k4.119
  crRNA array
cgatttcttggctttatatatcttgtggaaaggacgaaacaccgtaatttctactaagtgtagatgtgacgatctgtgccacaagtaatttctactaagtgtagattgctgtgtgggcggccacatttttttaagcttggcgtggatccgatatcaactagatcttgaga

SEQ ID NO: 4663 - DNA, 170 bp, Artificial sequence
  Kmt2c.1962_Map2k4.1261
  crRNA array
cgatttcttggctttatatatcttgtggaaaggacgaaacaccgtaatttctactaagtgtagatgtgacgatctgtgccacaagtaatttctactaagtgtagatgatgtagtaatgcggagtagttttttaagcttggcgtggatccgatatcaactagatcttgaga

SEQ ID NO: 4664 - DNA, 170 bp, Artificial sequence
  Kmt2c.1962_Map3k1.235
  crRNA array
cgatttcttggctttatatatcttgtggaaaggacgaaacaccgtaatttctactaagtgtagatgtgacgatctgtgccacaagtaatttctactaagtgtagataaaacgctactgatcgatcgttttttaagcttggcgtggatccgatatcaactagatcttgaga

SEQ ID NO: 4665 - DNA, 170 bp, Artificial sequence
  Kmt2c.1962_Map3k1.3838
  crRNA array
cgatttcttggctttatatatcttgtggaaaggacgaaacaccgtaatttctactaagtgtagatgtgacgatctgtgccacaagtaatttctactaagtgtagatccaacaacagggccccactattttttaagcttggcgtggatccgatatcaactagatcttgaga

SEQ ID NO: 4666 - DNA, 170 bp, Artificial sequence
  Kmt2c.1962_Mga.1655
  crRNA array
cgatttcttggctttatatatcttgtggaaaggacgaaacaccgtaatttctactaagtgtagatgtgacgatctgtgccacaagtaatttctactaagtgtagatcgagaagtggagagcatattttttttaagcttggcgtggatccgatatcaactagatcttgaga

SEQ ID NO: 4667 - DNA, 170 bp, Artificial sequence
  Kmt2c.1962_Mga.93
  crRNA array
cgatttcttggctttatatatcttgtggaaaggacgaaacaccgtaatttctactaagtgtagatgtgacgatctgtgccacaagtaatttctactaagtgtagatgagaaggctccccataatgtttttttaagcttggcgtggatccgatatcaactagatcttgaga

SEQ ID NO: 4668 - DNA, 170 bp, Artificial sequence
  Kmt2c.1962_Nf1.746
  crRNA array
cgatttcttggctttatatatcttgtggaaaggacgaaacaccgtaatttctactaagtgtagatgtgacgatctgtgccacaagtaatttctactaagtgtagattaagcataatgatgatgccattttttaagcttggcgtggatccgatatcaactagatcttgaga

SEQ ID NO: 4669 - DNA, 170 bp, Artificial sequence
  Kmt2c.1962_Nf1.97
  crRNA array
cgatttcttggctttatatatcttgtggaaaggacgaaacaccgtaatttctactaagtgtagatgtgacgatctgtgccacaagtaatttctactaagtgtagatagcccgctacatgctgatgcttttttaagcttggcgtggatccgatatcaactagatcttgaga

SEQ ID NO: 4670 - DNA, 170 bp, Artificial sequence
  Kmt2c.1962_Nf2.356
  crRNA array
cgatttcttggctttatatatcttgtggaaaggacgaaacaccgtaatttctactaagtgtagatgtgacgatctgtgccacaagtaatttctactaagtgtagatcggagtcatctgatagagatttttttaagcttggcgtggatccgatatcaactagatcttgaga

SEQ ID NO: 4671 - DNA, 170 bp, Artificial sequence
  Kmt2c.1962_Nf2.768
  crRNA array
cgatttcttggctttatatatcttgtggaaaggacgaaacaccgtaatttctactaagtgtagatgtgacgatctgtgccacaagtaatttctactaagtgtagatccgaagccccagtgtccggcttttttaagcttggcgtggatccgatatcaactagatcttgaga

SEQ ID NO: 4672 - DNA, 170 bp, Artificial sequence
  Kmt2c.1962_Notch1.1849
  crRNA array
cgatttcttggctttatatatcttgtggaaaggacgaaacaccgtaatttctactaagtgtagatgtgacgatctgtgccacaagtaatttctactaagtgtagatctggcgggtgggcggcgctgttttttaagcttggcgtggatccgatatcaactagatcttgaga

SEQ ID NO: 4673 - DNA, 170 bp, Artificial sequence
  Kmt2c.1962_Notch1.649
  crRNA array
cgatttcttggctttatatatcttgtggaaaggacgaaacaccgtaatttctactaagtgtagatgtgacgatctgtgccacaagtaatttctactaagtgtagattgggccaacgatgccaggacttttttaagcttggcgtggatccgatatcaactagatcttgaga

SEQ ID NO: 4674 - DNA, 170 bp, Artificial sequence
  Kmt2c.1962_Nsd1.70
  crRNA array
cgatttcttggctttatatatcttgtggaaaggacgaaacaccgtaatttctactaagtgtagatgtgacgatctgtgccacaagtaatttctactaagtgtagatactggtgtggacgatgcagattttttaagcttggcgtggatccgatatcaactagatcttgaga

SEQ ID NO: 4675 - DNA, 170 bp, Artificial sequence
  Kmt2c.1962_Nsd1.90
  crRNA array
cgatttcttggctttatatatcttgtggaaaggacgaaacaccgtaatttctactaagtgtagatgtgacgatctgtgccacaagtaatttctactaagtgtagataggagctaacggcaagaatgttttttaagcttggcgtggatccgatatcaactagatcttgaga

SEQ ID NO: 4676 - DNA, 170 bp, Artificial sequence
  Kmt2c.1962_Pbrm1.1236
  crRNA array
cgatttcttggctttatatatcttgtggaaaggacgaaacaccgtaatttctactaagtgtagatgtgacgatctgtgccacaagtaatttctactaagtgtagatgccgataaaaccaacagccgttttttaagcttggcgtggatccgatatcaactagatcttgaga

SEQ ID NO: 4677 - DNA, 170 bp, Artificial sequence
  Kmt2c.1962_Pbrm1.969
  crRNA array
cgatttcttggctttatatatcttgtggaaaggacgaaacaccgtaatttctactaagtgtagatgtgacgatctgtgccacaagtaatttctactaagtgtagatgagccctaatgaacagctcattttttaagcttggcgtggatccgatatcaactagatcttgaga

SEQ ID NO: 4678 - DNA, 170 bp, Artificial sequence
  Kmt2c.1962_Pik3r1.76
  crRNA array
cgatttcttggctttatatatcttgtggaaaggacgaaacaccgtaatttctactaagtgtagatgtgacgatctgtgccacaagtaatttctactaagtgtagataaaacctatacggcccgcacttttttaagcttggcgtggatccgatatcaactagatcttgaga

SEQ ID NO: 4679 - DNA, 170 bp, Artificial sequence
  Kmt2c.1962_Pik3r1.77
  crRNA array
cgatttcttggctttatatatcttgtggaaaggacgaaacaccgtaatttctactaagtgtagatgtgacgatctgtgccacaagtaatttctactaagtgtagataaacctatacggcccgcactttttttaagcttggcgtggatccgatatcaactagatcttgaga

SEQ ID NO: 4680 - DNA, 170 bp, Artificial sequence
  Kmt2c.1962_Pten.240
  crRNA array
cgatttcttggctttatatatcttgtggaaaggacgaaacaccgtaatttctactaagtgtagatgtgacgatctgtgccacaagtaatttctactaagtgtagattgcatacgctatagctgcttttttttaagcttggcgtggatccgatatcaactagatcttgaga

SEQ ID NO: 4681 - DNA, 170 bp, Artificial sequence
  Kmt2c.1962_Pten.265
  crRNA array
cgatttcttggctttatatatcttgtggaaaggacgaaacaccgtaatttctactaagtgtagatgtgacgatctgtgccacaagtaatttctactaagtgtagataagcgtggtgcgtgacgcacttttttaagcttggcgtggatccgatatcaactagatcttgaga

SEQ ID NO: 4682 - DNA, 170 bp, Artificial sequence
  Kmt2c.1962_Rasa1.1478
  crRNA array
cgatttcttggctttatatatcttgtggaaaggacgaaacaccgtaatttctactaagtgtagatgtgacgatctgtgccacaagtaatttctactaagtgtagatcgataatggtctatgatgtcttttttaagcttggcgtggatccgatatcaactagatcttgaga

SEQ ID NO: 4683 - DNA, 170 bp, Artificial sequence
  Kmt2c.1962_Rasa1.223
  crRNA array
cgatttcttggctttatatatcttgtggaaaggacgaaacaccgtaatttctactaagtgtagatgtgacgatctgtgccacaagtaatttctactaagtgtagattccatggagtatcgtgctcgttttttaagcttggcgtggatccgatatcaactagatcttgaga

SEQ ID NO: 4684 - DNA, 170 bp, Artificial sequence
  Kmt2c.1962_Rb1.211
  crRNA array
cgatttcttggctttatatatcttgtggaaaggacgaaacaccgtaatttctactaagtgtagatgtgacgatctgtgccacaagtaatttctactaagtgtagattctgacatgatcgggtacctttttttaagcttggcgtggatccgatatcaactagatcttgaga

SEQ ID NO: 4685 - DNA, 170 bp, Artificial sequence
  Kmt2c.1962_Rb1.394
  crRNA array
cgatttcttggctttatatatcttgtggaaaggacgaaacaccgtaatttctactaagtgtagatgtgacgatctgtgccacaagtaatttctactaagtgtagatagaaatctcgaagcaggatcttttttaagcttggcgtggatccgatatcaactagatcttgaga

SEQ ID NO: 4686 - DNA, 170 bp, Artificial sequence
  Kmt2c.1962_Rbm10.5
  crRNA array
cgatttcttggctttatatatcttgtggaaaggacgaaacaccgtaatttctactaagtgtagatgtgacgatctgtgccacaagtaatttctactaagtgtagatacgaaacctgaacccacacattttttaagcttggcgtggatccgatatcaactagatcttgaga

SEQ ID NO: 4687 - DNA, 170 bp, Artificial sequence
  Kmt2c.1962_Rbm10.6
  crRNA array
cgatttcttggctttatatatcttgtggaaaggacgaaacaccgtaatttctactaagtgtagatgtgacgatctgtgccacaagtaatttctactaagtgtagatcgaaacctgaacccacacagttttttaagcttggcgtggatccgatatcaactagatcttgaga

SEQ ID NO: 4688 - DNA, 170 bp, Artificial sequence
  Kmt2c.1962_Rnf43.1920
  crRNA array
cgatttcttggctttatatatcttgtggaaaggacgaaacaccgtaatttctactaagtgtagatgtgacgatctgtgccacaagtaatttctactaagtgtagatatccccgtgccgtggactccttttttaagcttggcgtggatccgatatcaactagatcttgaga

SEQ ID NO: 4689 - DNA, 170 bp, Artificial sequence
  Kmt2c.1962_Rnf43.39
  crRNA array
cgatttcttggctttatatatcttgtggaaaggacgaaacaccgtaatttctactaagtgtagatgtgacgatctgtgccacaagtaatttctactaagtgtagatcaaggggatcactctgataattttttaagcttggcgtggatccgatatcaactagatcttgaga

SEQ ID NO: 4690 - DNA, 170 bp, Artificial sequence
  Kmt2c.1962_Runx1.204
  crRNA array
cgatttcttggctttatatatcttgtggaaaggacgaaacaccgtaatttctactaagtgtagatgtgacgatctgtgccacaagtaatttctactaagtgtagattaaataagtccagccgttttttttttaagcttggcgtggatccgatatcaactagatcttgaga

SEQ ID NO: 4691 - DNA, 170 bp, Artificial sequence
  Kmt2c.1962_Runx1.81
  crRNA array
cgatttcttggctttatatatcttgtggaaaggacgaaacaccgtaatttctactaagtgtagatgtgacgatctgtgccacaagtaatttctactaagtgtagataggacgcgtatgggaattttttttttaagcttggcgtggatccgatatcaactagatcttgaga

SEQ ID NO: 4692 - DNA, 170 bp, Artificial sequence
  Kmt2c.1962_Setd2.143
  crRNA array
cgatttcttggctttatatatcttgtggaaaggacgaaacaccgtaatttctactaagtgtagatgtgacgatctgtgccacaagtaatttctactaagtgtagatgcacaaccacaacagactggttttttaagcttggcgtggatccgatatcaactagatcttgaga

SEQ ID NO: 4693 - DNA, 170 bp, Artificial sequence
  Kmt2c.1962_Setd2.508
  crRNA array
cgatttcttggctttatatatcttgtggaaaggacgaaacaccgtaatttctactaagtgtagatgtgacgatctgtgccacaagtaatttctactaagtgtagattacgatcccgagcacccgacttttttaagcttggcgtggatccgatatcaactagatcttgaga

SEQ ID NO: 4694 - DNA, 170 bp, Artificial sequence
  Kmt2c.1962_Smad4.3038
  crRNA array
cgatttcttggctttatatatcttgtggaaaggacgaaacaccgtaatttctactaagtgtagatgtgacgatctgtgccacaagtaatttctactaagtgtagatatctgcggcagtgtcaccggttttttaagcttggcgtggatccgatatcaactagatcttgaga

SEQ ID NO: 4695 - DNA, 170 bp, Artificial sequence
  Kmt2c.1962_Smad4.39
  crRNA array
cgatttcttggctttatatatcttgtggaaaggacgaaacaccgtaatttctactaagtgtagatgtgacgatctgtgccacaagtaatttctactaagtgtagatagtcaaacgcatactgacaattttttaagcttggcgtggatccgatatcaactagatcttgaga

SEQ ID NO: 4696 - DNA, 170 bp, Artificial sequence
  Kmt2c.1962_Stag2.1409
  crRNA array
cgatttcttggctttatatatcttgtggaaaggacgaaacaccgtaatttctactaagtgtagatgtgacgatctgtgccacaagtaatttctactaagtgtagatgctaataactgcggaagggcttttttaagcttggcgtggatccgatatcaactagatcttgaga

SEQ ID NO: 4697 - DNA, 170 bp, Artificial sequence
  Kmt2c.1962_Stag2.4401
  crRNA array
cgatttcttggctttatatatcttgtggaaaggacgaaacaccgtaatttctactaagtgtagatgtgacgatctgtgccacaagtaatttctactaagtgtagattaatcgtccagtggtgtatattttttaagcttggcgtggatccgatatcaactagatcttgaga

SEQ ID NO: 4698 - DNA, 170 bp, Artificial sequence
  Kmt2c.1962_Tbl1xr1.1
  crRNA array
cgatttcttggctttatatatcttgtggaaaggacgaaacaccgtaatttctactaagtgtagatgtgacgatctgtgccacaagtaatttctactaagtgtagatggatgcgcatactggtgaagttttttaagcttggcgtggatccgatatcaactagatcttgaga

SEQ ID NO: 4699 - DNA, 170 bp, Artificial sequence
  Kmt2c.1962_Tbl1xr1.83
  crRNA array
cgatttcttggctttatatatcttgtggaaaggacgaaacaccgtaatttctactaagtgtagatgtgacgatctgtgccacaagtaatttctactaagtgtagatatggtcgacccatcgagtctttttttaagcttggcgtggatccgatatcaactagatcttgaga

SEQ ID NO: 4700 - DNA, 170 bp, Artificial sequence
  Kmt2c.1962_Tgfbr2.290
  crRNA array
cgatttcttggctttatatatcttgtggaaaggacgaaacaccgtaatttctactaagtgtagatgtgacgatctgtgccacaagtaatttctactaagtgtagatcctctcggcgcccgggtaaattttttaagcttggcgtggatccgatatcaactagatcttgaga

SEQ ID NO: 4701 - DNA, 170 bp, Artificial sequence
  Kmt2c.1962_Tgfbr2.292
  crRNA array
cgatttcttggctttatatatcttgtggaaaggacgaaacaccgtaatttctactaagtgtagatgtgacgatctgtgccacaagtaatttctactaagtgtagatcccgggcgccgagagggaaattttttaagcttggcgtggatccgatatcaactagatcttgaga

SEQ ID NO: 4702 - DNA, 170 bp, Artificial sequence
  Kmt2c.1962_Trp53.4
  crRNA array
cgatttcttggctttatatatcttgtggaaaggacgaaacaccgtaatttctactaagtgtagatgtgacgatctgtgccacaagtaatttctactaagtgtagatccctgaactgcccccagggattttttaagcttggcgtggatccgatatcaactagatcttgaga

SEQ ID NO: 4703 - DNA, 170 bp, Artificial sequence
  Kmt2c.1962_Trp53.528
  crRNA array
cgatttcttggctttatatatcttgtggaaaggacgaaacaccgtaatttctactaagtgtagatgtgacgatctgtgccacaagtaatttctactaagtgtagatgctgggccagcagagacctgttttttaagcttggcgtggatccgatatcaactagatcttgaga

SEQ ID NO: 4704 - DNA, 170 bp, Artificial sequence
  Kmt2c.1962_Vhl.1
  crRNA array
cgatttcttggctttatatatcttgtggaaaggacgaaacaccgtaatttctactaagtgtagatgtgacgatctgtgccacaagtaatttctactaagtgtagatagggctcccggcggccatttttttttaagcttggcgtggatccgatatcaactagatcttgaga

SEQ ID NO: 4705 - DNA, 170 bp, Artificial sequence
  Kmt2c.1962_Vhl.151
  crRNA array
cgatttcttggctttatatatcttgtggaaaggacgaaacaccgtaatttctactaagtgtagatgtgacgatctgtgccacaagtaatttctactaagtgtagattagagcactcacccgagggattttttaagcttggcgtggatccgatatcaactagatcttgaga

SEQ ID NO: 4706 - DNA, 170 bp, Artificial sequence
  Kmt2c.1962_Zc3h13.1387
  crRNA array
cgatttcttggctttatatatcttgtggaaaggacgaaacaccgtaatttctactaagtgtagatgtgacgatctgtgccacaagtaatttctactaagtgtagatgtgacgccggtcatgtgactttttttaagcttggcgtggatccgatatcaactagatcttgaga

SEQ ID NO: 4707 - DNA, 170 bp, Artificial sequence
  Kmt2c.1962_Zc3h13.1777
  crRNA array
cgatttcttggctttatatatcttgtggaaaggacgaaacaccgtaatttctactaagtgtagatgtgacgatctgtgccacaagtaatttctactaagtgtagatgatgctgccagtgtagcggcttttttaagcttggcgtggatccgatatcaactagatcttgaga

SEQ ID NO: 4708 - DNA, 170 bp, Artificial sequence
  Kmt2c.2236_Acvr2a.155
  crRNA array
cgatttcttggctttatatatcttgtggaaaggacgaaacaccgtaatttctactaagtgtagatactcgacctccacctccctataatttctactaagtgtagatggacctggctaatcaagtatttttttaagcttggcgtggatccgatatcaactagatcttgaga

SEQ ID NO: 4709 - DNA, 170 bp, Artificial sequence
  Kmt2c.2236_Acvr2a.70
  crRNA array
cgatttcttggctttatatatcttgtggaaaggacgaaacaccgtaatttctactaagtgtagatactcgacctccacctccctataatttctactaagtgtagatcccgaggcgccggagaagccttttttaagcttggcgtggatccgatatcaactagatcttgaga

SEQ ID NO: 4710 - DNA, 170 bp, Artificial sequence
  Kmt2c.2236_Apc.21
  crRNA array
cgatttcttggctttatatatcttgtggaaaggacgaaacaccgtaatttctactaagtgtagatactcgacctccacctccctataatttctactaagtgtagatgtgatccacacgtgtagctgttttttaagcttggcgtggatccgatatcaactagatcttgaga

SEQ ID NO: 4711 - DNA, 170 bp, Artificial sequence
  Kmt2c.2236_Apc.867
  crRNA array
cgatttcttggctttatatatcttgtggaaaggacgaaacaccgtaatttctactaagtgtagatactcgacctccacctccctataatttctactaagtgtagatcagtcccaggcggcggaagcttttttaagcttggcgtggatccgatatcaactagatcttgaga

SEQ ID NO: 4712 - DNA, 170 bp, Artificial sequence
  Kmt2c.2236_Arid1a.2
  crRNA array
cgatttcttggctttatatatcttgtggaaaggacgaaacaccgtaatttctactaagtgtagatactcgacctccacctccctataatttctactaagtgtagatcccgcgcccccgtcctggggttttttaagcttggcgtggatccgatatcaactagatcttgaga

SEQ ID NO: 4713 - DNA, 170 bp, Artificial sequence
  Kmt2c.2236_Arid1a.5
  crRNA array
cgatttcttggctttatatatcttgtggaaaggacgaaacaccgtaatttctactaagtgtagatactcgacctccacctccctataatttctactaagtgtagatcccgcgctcggccgctgccgttttttaagcttggcgtggatccgatatcaactagatcttgaga

SEQ ID NO: 4714 - DNA, 170 bp, Artificial sequence
  Kmt2c.2236_Arid2.166
  crRNA array
cgatttcttggctttatatatcttgtggaaaggacgaaacaccgtaatttctactaagtgtagatactcgacctccacctccctataatttctactaagtgtagataaccgcgatctgggttttttttttttaagcttggcgtggatccgatatcaactagatcttgaga

SEQ ID NO: 4715 - DNA, 170 bp, Artificial sequence
  Kmt2c.2236_Arid2.172
  crRNA array
cgatttcttggctttatatatcttgtggaaaggacgaaacaccgtaatttctactaagtgtagatactcgacctccacctccctataatttctactaagtgtagatctggacgagctgcggcagttttttttaagcttggcgtggatccgatatcaactagatcttgaga

SEQ ID NO: 4716 - DNA, 170 bp, Artificial sequence
  Kmt2c.2236_Atm.120
  crRNA array
cgatttcttggctttatatatcttgtggaaaggacgaaacaccgtaatttctactaagtgtagatactcgacctccacctccctataatttctactaagtgtagatgacaggtagtcggcagctaattttttaagcttggcgtggatccgatatcaactagatcttgaga

SEQ ID NO: 4717 - DNA, 170 bp, Artificial sequence
  Kmt2c.2236_Atm.997
  crRNA array
cgatttcttggctttatatatcttgtggaaaggacgaaacaccgtaatttctactaagtgtagatactcgacctccacctccctataatttctactaagtgtagatgagaaagtctccgaatcgttttttttaagcttggcgtggatccgatatcaactagatcttgaga

SEQ ID NO: 4718 - DNA, 170 bp, Artificial sequence
  Kmt2c.2236_Atrx.249
  crRNA array
cgatttcttggctttatatatcttgtggaaaggacgaaacaccgtaatttctactaagtgtagatactcgacctccacctccctataatttctactaagtgtagattagccagtcgctcatatctcttttttaagcttggcgtggatccgatatcaactagatcttgaga

SEQ ID NO: 4719 - DNA, 170 bp, Artificial sequence
  Kmt2c.2236_Atrx.251
  crRNA array
cgatttcttggctttatatatcttgtggaaaggacgaaacaccgtaatttctactaagtgtagatactcgacctccacctccctataatttctactaagtgtagatgccagtcgctcatatctctgttttttaagcttggcgtggatccgatatcaactagatcttgaga

SEQ ID NO: 4720 - DNA, 170 bp, Artificial sequence
  Kmt2c.2236_Bcor.203
  crRNA array
cgatttcttggctttatatatcttgtggaaaggacgaaacaccgtaatttctactaagtgtagatactcgacctccacctccctataatttctactaagtgtagatccccggagcggagtccaggcttttttaagcttggcgtggatccgatatcaactagatcttgaga

SEQ ID NO: 4721 - DNA, 170 bp, Artificial sequence
  Kmt2c.2236_Bcor.475
  crRNA array
cgatttcttggctttatatatcttgtggaaaggacgaaacaccgtaatttctactaagtgtagatactcgacctccacctccctataatttctactaagtgtagattgcaacccctctgtatgggattttttaagcttggcgtggatccgatatcaactagatcttgaga

SEQ ID NO: 4722 - DNA, 170 bp, Artificial sequence
  Kmt2c.2236_Brca1.112
  crRNA array
cgatttcttggctttatatatcttgtggaaaggacgaaacaccgtaatttctactaagtgtagatactcgacctccacctccctataatttctactaagtgtagatctagacgctctgtggagactttttttaagcttggcgtggatccgatatcaactagatcttgaga

SEQ ID NO: 4723 - DNA, 170 bp, Artificial sequence
  Kmt2c.2236_Brca1.53
  crRNA array
cgatttcttggctttatatatcttgtggaaaggacgaaacaccgtaatttctactaagtgtagatactcgacctccacctccctataatttctactaagtgtagataatgaggaggcgtcgatcatttttttaagcttggcgtggatccgatatcaactagatcttgaga

SEQ ID NO: 4724 - DNA, 170 bp, Artificial sequence
  Kmt2c.2236_Casp8.45
  crRNA array
cgatttcttggctttatatatcttgtggaaaggacgaaacaccgtaatttctactaagtgtagatactcgacctccacctccctataatttctactaagtgtagatctaccgagatcctgtgaatgttttttaagcttggcgtggatccgatatcaactagatcttgaga

SEQ ID NO: 4725 - DNA, 170 bp, Artificial sequence
  Kmt2c.2236_Casp8.54
  crRNA array
cgatttcttggctttatatatcttgtggaaaggacgaaacaccgtaatttctactaagtgtagatactcgacctccacctccctataatttctactaagtgtagatcagtgcagtcgtcgtaagatttttttaagcttggcgtggatccgatatcaactagatcttgaga

SEQ ID NO: 4726 - DNA, 170 bp, Artificial sequence
  Kmt2c.2236_Cbwd1.84
  crRNA array
cgatttcttggctttatatatcttgtggaaaggacgaaacaccgtaatttctactaagtgtagatactcgacctccacctccctataatttctactaagtgtagatcacagcaggtaacatgccgcttttttaagcttggcgtggatccgatatcaactagatcttgaga

SEQ ID NO: 4727 - DNA, 170 bp, Artificial sequence
  Kmt2c.2236_Cbwd1.85
  crRNA array
cgatttcttggctttatatatcttgtggaaaggacgaaacaccgtaatttctactaagtgtagatactcgacctccacctccctataatttctactaagtgtagatacagcaggtaacatgccgccttttttaagcttggcgtggatccgatatcaactagatcttgaga

SEQ ID NO: 4728 - DNA, 170 bp, Artificial sequence
  Kmt2c.2236_Cdh1.387
  crRNA array
cgatttcttggctttatatatcttgtggaaaggacgaaacaccgtaatttctactaagtgtagatactcgacctccacctccctataatttctactaagtgtagatctcggcgtctgccgggtccgttttttaagcttggcgtggatccgatatcaactagatcttgaga

SEQ ID NO: 4729 - DNA, 170 bp, Artificial sequence
  Kmt2c.2236_Cdh1.58
  crRNA array
cgatttcttggctttatatatcttgtggaaaggacgaaacaccgtaatttctactaagtgtagatactcgacctccacctccctataatttctactaagtgtagatctcgtccgcgcccgggactcttttttaagcttggcgtggatccgatatcaactagatcttgaga

SEQ ID NO: 4730 - DNA, 170 bp, Artificial sequence
  Kmt2c.2236_Cdkn2a.647
  crRNA array
cgatttcttggctttatatatcttgtggaaaggacgaaacaccgtaatttctactaagtgtagatactcgacctccacctccctataatttctactaagtgtagatgcaatcacgggagggagcagttttttaagcttggcgtggatccgatatcaactagatcttgaga

SEQ ID NO: 4731 - DNA, 170 bp, Artificial sequence
  Kmt2c.2236_Cdkn2a.648
  crRNA array
cgatttcttggctttatatatcttgtggaaaggacgaaacaccgtaatttctactaagtgtagatactcgacctccacctccctataatttctactaagtgtagatcaatcacgggagggagcagattttttaagcttggcgtggatccgatatcaactagatcttgaga

SEQ ID NO: 4732 - DNA, 170 bp, Artificial sequence
  Kmt2c.2236_Cic.162
  crRNA array
cgatttcttggctttatatatcttgtggaaaggacgaaacaccgtaatttctactaagtgtagatactcgacctccacctccctataatttctactaagtgtagatcgcaggcgcgcccggcggagttttttaagcttggcgtggatccgatatcaactagatcttgaga

SEQ ID NO: 4733 - DNA, 170 bp, Artificial sequence
  Kmt2c.2236_Cic.164
  crRNA array
cgatttcttggctttatatatcttgtggaaaggacgaaacaccgtaatttctactaagtgtagatactcgacctccacctccctataatttctactaagtgtagatcgggccctgggccggcggctttttttaagcttggcgtggatccgatatcaactagatcttgaga

SEQ ID NO: 4734 - DNA, 170 bp, Artificial sequence
  Kmt2c.2236_Ctcf.229
  crRNA array
cgatttcttggctttatatatcttgtggaaaggacgaaacaccgtaatttctactaagtgtagatactcgacctccacctccctataatttctactaagtgtagatggctggtggctgatagtctgttttttaagcttggcgtggatccgatatcaactagatcttgaga

SEQ ID NO: 4735 - DNA, 170 bp, Artificial sequence
  Kmt2c.2236_Ctcf.809
  crRNA array
cgatttcttggctttatatatcttgtggaaaggacgaaacaccgtaatttctactaagtgtagatactcgacctccacctccctataatttctactaagtgtagataagcgctatcatgatcccaattttttaagcttggcgtggatccgatatcaactagatcttgaga

SEQ ID NO: 4736 - DNA, 170 bp, Artificial sequence
  Kmt2c.2236_Elf3.826
  crRNA array
cgatttcttggctttatatatcttgtggaaaggacgaaacaccgtaatttctactaagtgtagatactcgacctccacctccctataatttctactaagtgtagattccgagacatcctaatccacttttttaagcttggcgtggatccgatatcaactagatcttgaga

SEQ ID NO: 4737 - DNA, 170 bp, Artificial sequence
  Kmt2c.2236_Elf3.983
  crRNA array
cgatttcttggctttatatatcttgtggaaaggacgaaacaccgtaatttctactaagtgtagatactcgacctccacctccctataatttctactaagtgtagattaggccccctaactggaccattttttaagcttggcgtggatccgatatcaactagatcttgaga

SEQ ID NO: 4738 - DNA, 170 bp, Artificial sequence
  Kmt2c.2236_Ep300.310
  crRNA array
cgatttcttggctttatatatcttgtggaaaggacgaaacaccgtaatttctactaagtgtagatactcgacctccacctccctataatttctactaagtgtagatatggtacgacagtgaggaagttttttaagcttggcgtggatccgatatcaactagatcttgaga

SEQ ID NO: 4739 - DNA, 170 bp, Artificial sequence
  Kmt2c.2236_Ep300.587
  crRNA array
cgatttcttggctttatatatcttgtggaaaggacgaaacaccgtaatttctactaagtgtagatactcgacctccacctccctataatttctactaagtgtagatcgccccggggcccccaaccattttttaagcttggcgtggatccgatatcaactagatcttgaga

SEQ ID NO: 4740 - DNA, 170 bp, Artificial sequence
  Kmt2c.2236_Epha2.126
  crRNA array
cgatttcttggctttatatatcttgtggaaaggacgaaacaccgtaatttctactaagtgtagatactcgacctccacctccctataatttctactaagtgtagatcctgtgccgccgcggccgccttttttaagcttggcgtggatccgatatcaactagatcttgaga

SEQ ID NO: 4741 - DNA, 170 bp, Artificial sequence
  Kmt2c.2236_Epha2.5
  crRNA array
cgatttcttggctttatatatcttgtggaaaggacgaaacaccgtaatttctactaagtgtagatactcgacctccacctccctataatttctactaagtgtagatcatgagctggcgccacccggttttttaagcttggcgtggatccgatatcaactagatcttgaga

SEQ ID NO: 4742 - DNA, 170 bp, Artificial sequence
  Kmt2c.2236_Fat1.105
  crRNA array
cgatttcttggctttatatatcttgtggaaaggacgaaacaccgtaatttctactaagtgtagatactcgacctccacctccctataatttctactaagtgtagataactcgaggtgacaacaagtttttttaagcttggcgtggatccgatatcaactagatcttgaga

SEQ ID NO: 4743 - DNA, 170 bp, Artificial sequence
  Kmt2c.2236_Fat1.122
  crRNA array
cgatttcttggctttatatatcttgtggaaaggacgaaacaccgtaatttctactaagtgtagatactcgacctccacctccctataatttctactaagtgtagatccatcgacatggaaacgggattttttaagcttggcgtggatccgatatcaactagatcttgaga

SEQ ID NO: 4744 - DNA, 170 bp, Artificial sequence
  Kmt2c.2236_Fbxw7.21
  crRNA array
cgatttcttggctttatatatcttgtggaaaggacgaaacaccgtaatttctactaagtgtagatactcgacctccacctccctataatttctactaagtgtagattaatgtgccgtagaaacccattttttaagcttggcgtggatccgatatcaactagatcttgaga

SEQ ID NO: 4745 - DNA, 170 bp, Artificial sequence
  Kmt2c.2236_Fbxw7.23
  crRNA array
cgatttcttggctttatatatcttgtggaaaggacgaaacaccgtaatttctactaagtgtagatactcgacctccacctccctataatttctactaagtgtagatatgtgccgtagaaacccatattttttaagcttggcgtggatccgatatcaactagatcttgaga

SEQ ID NO: 4746 - DNA, 170 bp, Artificial sequence
  Kmt2c.2236_Gata3.34
  crRNA array
cgatttcttggctttatatatcttgtggaaaggacgaaacaccgtaatttctactaagtgtagatactcgacctccacctccctataatttctactaagtgtagatctaaactatcccgcaaagatttttttaagcttggcgtggatccgatatcaactagatcttgaga

SEQ ID NO: 4747 - DNA, 170 bp, Artificial sequence
  Kmt2c.2236_Gata3.47
  crRNA array
cgatttcttggctttatatatcttgtggaaaggacgaaacaccgtaatttctactaagtgtagatactcgacctccacctccctataatttctactaagtgtagatcgtagtaggacgggacgtggttttttaagcttggcgtggatccgatatcaactagatcttgaga

SEQ ID NO: 4748 - DNA, 170 bp, Artificial sequence
  Kmt2c.2236_H2-Q2.1
  crRNA array
cgatttcttggctttatatatcttgtggaaaggacgaaacaccgtaatttctactaagtgtagatactcgacctccacctccctataatttctactaagtgtagatagggcggccaccaacagcagttttttaagcttggcgtggatccgatatcaactagatcttgaga

SEQ ID NO: 4749 - DNA, 170 bp, Artificial sequence
  Kmt2c.2236_H2-Q2.2
  crRNA array
cgatttcttggctttatatatcttgtggaaaggacgaaacaccgtaatttctactaagtgtagatactcgacctccacctccctataatttctactaagtgtagattaacctgcgcccgctgctgattttttaagcttggcgtggatccgatatcaactagatcttgaga

SEQ ID NO: 4750 - DNA, 170 bp, Artificial sequence
  Kmt2c.2236_Kdm5c.1878
  crRNA array
cgatttcttggctttatatatcttgtggaaaggacgaaacaccgtaatttctactaagtgtagatactcgacctccacctccctataatttctactaagtgtagatagagcacggcacccgcccccttttttaagcttggcgtggatccgatatcaactagatcttgaga

SEQ ID NO: 4751 - DNA, 170 bp, Artificial sequence
  Kmt2c.2236_Kdm5c.1879
  crRNA array
cgatttcttggctttatatatcttgtggaaaggacgaaacaccgtaatttctactaagtgtagatactcgacctccacctccctataatttctactaagtgtagatgagcacggcacccgccccccttttttaagcttggcgtggatccgatatcaactagatcttgaga

SEQ ID NO: 4752 - DNA, 170 bp, Artificial sequence
  Kmt2c.2236_Kdm6a.56
  crRNA array
cgatttcttggctttatatatcttgtggaaaggacgaaacaccgtaatttctactaagtgtagatactcgacctccacctccctataatttctactaagtgtagattcgctgccgcctctcgcggcttttttaagcttggcgtggatccgatatcaactagatcttgaga

SEQ ID NO: 4753 - DNA, 170 bp, Artificial sequence
  Kmt2c.2236_Kdm6a.57
  crRNA array
cgatttcttggctttatatatcttgtggaaaggacgaaacaccgtaatttctactaagtgtagatactcgacctccacctccctataatttctactaagtgtagatcgctgccgcctctcgcggcattttttaagcttggcgtggatccgatatcaactagatcttgaga

SEQ ID NO: 4754 - DNA, 170 bp, Artificial sequence
  Kmt2c.2236_Kmt2b.265
  crRNA array
cgatttcttggctttatatatcttgtggaaaggacgaaacaccgtaatttctactaagtgtagatactcgacctccacctccctataatttctactaagtgtagatccccaagtgaagcccacctgttttttaagcttggcgtggatccgatatcaactagatcttgaga

SEQ ID NO: 4755 - DNA, 170 bp, Artificial sequence
  Kmt2c.2236_Kmt2b.298
  crRNA array
cgatttcttggctttatatatcttgtggaaaggacgaaacaccgtaatttctactaagtgtagatactcgacctccacctccctataatttctactaagtgtagattccggcagggaccggctggcttttttaagcttggcgtggatccgatatcaactagatcttgaga

SEQ ID NO: 4756 - DNA, 170 bp, Artificial sequence
  Kmt2c.2236_Kmt2d.316
  crRNA array
cgatttcttggctttatatatcttgtggaaaggacgaaacaccgtaatttctactaagtgtagatactcgacctccacctccctataatttctactaagtgtagatactccaggccacccaggtggttttttaagcttggcgtggatccgatatcaactagatcttgaga

SEQ ID NO: 4757 - DNA, 170 bp, Artificial sequence
  Kmt2c.2236_Kmt2d.416
  crRNA array
cgatttcttggctttatatatcttgtggaaaggacgaaacaccgtaatttctactaagtgtagatactcgacctccacctccctataatttctactaagtgtagattaaacccccgggggaagggtttttttaagcttggcgtggatccgatatcaactagatcttgaga

SEQ ID NO: 4758 - DNA, 170 bp, Artificial sequence
  Kmt2c.2236_Map2k4.119
  crRNA array
cgatttcttggctttatatatcttgtggaaaggacgaaacaccgtaatttctactaagtgtagatactcgacctccacctccctataatttctactaagtgtagattgctgtgtgggcggccacatttttttaagcttggcgtggatccgatatcaactagatcttgaga

SEQ ID NO: 4759 - DNA, 170 bp, Artificial sequence
  Kmt2c.2236_Map2k4.1261
  crRNA array
cgatttcttggctttatatatcttgtggaaaggacgaaacaccgtaatttctactaagtgtagatactcgacctccacctccctataatttctactaagtgtagatgatgtagtaatgcggagtagttttttaagcttggcgtggatccgatatcaactagatcttgaga

SEQ ID NO: 4760 - DNA, 170 bp, Artificial sequence
  Kmt2c.2236_Map3k1.235
  crRNA array
cgatttcttggctttatatatcttgtggaaaggacgaaacaccgtaatttctactaagtgtagatactcgacctccacctccctataatttctactaagtgtagataaaacgctactgatcgatcgttttttaagcttggcgtggatccgatatcaactagatcttgaga

SEQ ID NO: 4761 - DNA, 170 bp, Artificial sequence
  Kmt2c.2236_Map3k1.3838
  crRNA array
cgatttcttggctttatatatcttgtggaaaggacgaaacaccgtaatttctactaagtgtagatactcgacctccacctccctataatttctactaagtgtagatccaacaacagggccccactattttttaagcttggcgtggatccgatatcaactagatcttgaga

SEQ ID NO: 4762 - DNA, 170 bp, Artificial sequence
  Kmt2c.2236_Mga.1655
  crRNA array
cgatttcttggctttatatatcttgtggaaaggacgaaacaccgtaatttctactaagtgtagatactcgacctccacctccctataatttctactaagtgtagatcgagaagtggagagcatattttttttaagcttggcgtggatccgatatcaactagatcttgaga

SEQ ID NO: 4763 - DNA, 170 bp, Artificial sequence
  Kmt2c.2236_Mga.93
  crRNA array
cgatttcttggctttatatatcttgtggaaaggacgaaacaccgtaatttctactaagtgtagatactcgacctccacctccctataatttctactaagtgtagatgagaaggctccccataatgtttttttaagcttggcgtggatccgatatcaactagatcttgaga

SEQ ID NO: 4764 - DNA, 170 bp, Artificial sequence
  Kmt2c.2236_Nf1.746
  crRNA array
cgatttcttggctttatatatcttgtggaaaggacgaaacaccgtaatttctactaagtgtagatactcgacctccacctccctataatttctactaagtgtagattaagcataatgatgatgccattttttaagcttggcgtggatccgatatcaactagatcttgaga

SEQ ID NO: 4765 - DNA, 170 bp, Artificial sequence
  Kmt2c.2236_Nf1.97
  crRNA array
cgatttcttggctttatatatcttgtggaaaggacgaaacaccgtaatttctactaagtgtagatactcgacctccacctccctataatttctactaagtgtagatagcccgctacatgctgatgcttttttaagcttggcgtggatccgatatcaactagatcttgaga

SEQ ID NO: 4766 - DNA, 170 bp, Artificial sequence
  Kmt2c.2236_Nf2.356
  crRNA array
cgatttcttggctttatatatcttgtggaaaggacgaaacaccgtaatttctactaagtgtagatactcgacctccacctccctataatttctactaagtgtagatcggagtcatctgatagagatttttttaagcttggcgtggatccgatatcaactagatcttgaga

SEQ ID NO: 4767 - DNA, 170 bp, Artificial sequence
  Kmt2c.2236_Nf2.768
  crRNA array
cgatttcttggctttatatatcttgtggaaaggacgaaacaccgtaatttctactaagtgtagatactcgacctccacctccctataatttctactaagtgtagatccgaagccccagtgtccggcttttttaagcttggcgtggatccgatatcaactagatcttgaga

SEQ ID NO: 4768 - DNA, 170 bp, Artificial sequence
  Kmt2c.2236_Notch1.1849
  crRNA array
cgatttcttggctttatatatcttgtggaaaggacgaaacaccgtaatttctactaagtgtagatactcgacctccacctccctataatttctactaagtgtagatctggcgggtgggcggcgctgttttttaagcttggcgtggatccgatatcaactagatcttgaga

SEQ ID NO: 4769 - DNA, 170 bp, Artificial sequence
  Kmt2c.2236_Notch1.649
  crRNA array
cgatttcttggctttatatatcttgtggaaaggacgaaacaccgtaatttctactaagtgtagatactcgacctccacctccctataatttctactaagtgtagattgggccaacgatgccaggacttttttaagcttggcgtggatccgatatcaactagatcttgaga

SEQ ID NO: 4770 - DNA, 170 bp, Artificial sequence
  Kmt2c.2236_Nsd1.70
  crRNA array
cgatttcttggctttatatatcttgtggaaaggacgaaacaccgtaatttctactaagtgtagatactcgacctccacctccctataatttctactaagtgtagatactggtgtggacgatgcagattttttaagcttggcgtggatccgatatcaactagatcttgaga

SEQ ID NO: 4771 - DNA, 170 bp, Artificial sequence
  Kmt2c.2236_Nsd1.90
  crRNA array
cgatttcttggctttatatatcttgtggaaaggacgaaacaccgtaatttctactaagtgtagatactcgacctccacctccctataatttctactaagtgtagataggagctaacggcaagaatgttttttaagcttggcgtggatccgatatcaactagatcttgaga

SEQ ID NO: 4772 - DNA, 170 bp, Artificial sequence
  Kmt2c.2236_Pbrm1.1236
  crRNA array
cgatttcttggctttatatatcttgtggaaaggacgaaacaccgtaatttctactaagtgtagatactcgacctccacctccctataatttctactaagtgtagatgccgataaaaccaacagccgttttttaagcttggcgtggatccgatatcaactagatcttgaga

SEQ ID NO: 4773 - DNA, 170 bp, Artificial sequence
  Kmt2c.2236_Pbrm1.969
  crRNA array
cgatttcttggctttatatatcttgtggaaaggacgaaacaccgtaatttctactaagtgtagatactcgacctccacctccctataatttctactaagtgtagatgagccctaatgaacagctcattttttaagcttggcgtggatccgatatcaactagatcttgaga

SEQ ID NO: 4774 - DNA, 170 bp, Artificial sequence
  Kmt2c.2236_Pik3r1.76
  crRNA array
cgatttcttggctttatatatcttgtggaaaggacgaaacaccgtaatttctactaagtgtagatactcgacctccacctccctataatttctactaagtgtagataaaacctatacggcccgcacttttttaagcttggcgtggatccgatatcaactagatcttgaga

SEQ ID NO: 4775 - DNA, 170 bp, Artificial sequence
  Kmt2c.2236_Pik3r1.77
  crRNA array
cgatttcttggctttatatatcttgtggaaaggacgaaacaccgtaatttctactaagtgtagatactcgacctccacctccctataatttctactaagtgtagataaacctatacggcccgcactttttttaagcttggcgtggatccgatatcaactagatcttgaga

SEQ ID NO: 4776 - DNA, 170 bp, Artificial sequence
  Kmt2c.2236_Pten.240
  crRNA array
cgatttcttggctttatatatcttgtggaaaggacgaaacaccgtaatttctactaagtgtagatactcgacctccacctccctataatttctactaagtgtagattgcatacgctatagctgcttttttttaagcttggcgtggatccgatatcaactagatcttgaga

SEQ ID NO: 4777 - DNA, 170 bp, Artificial sequence
  Kmt2c.2236_Pten.265
  crRNA array
cgatttcttggctttatatatcttgtggaaaggacgaaacaccgtaatttctactaagtgtagatactcgacctccacctccctataatttctactaagtgtagataagcgtggtgcgtgacgcacttttttaagcttggcgtggatccgatatcaactagatcttgaga

SEQ ID NO: 4778 - DNA, 170 bp, Artificial sequence
  Kmt2c.2236_Rasa1.1478
  crRNA array
cgatttcttggctttatatatcttgtggaaaggacgaaacaccgtaatttctactaagtgtagatactcgacctccacctccctataatttctactaagtgtagatcgataatggtctatgatgtcttttttaagcttggcgtggatccgatatcaactagatcttgaga

SEQ ID NO: 4779 - DNA, 170 bp, Artificial sequence
  Kmt2c.2236_Rasa1.223
  crRNA array
cgatttcttggctttatatatcttgtggaaaggacgaaacaccgtaatttctactaagtgtagatactcgacctccacctccctataatttctactaagtgtagattccatggagtatcgtgctcgttttttaagcttggcgtggatccgatatcaactagatcttgaga

SEQ ID NO: 4780 - DNA, 170 bp, Artificial sequence
  Kmt2c.2236_Rb1.211
  crRNA array
cgatttcttggctttatatatcttgtggaaaggacgaaacaccgtaatttctactaagtgtagatactcgacctccacctccctataatttctactaagtgtagattctgacatgatcgggtacctttttttaagcttggcgtggatccgatatcaactagatcttgaga

SEQ ID NO: 4781 - DNA, 170 bp, Artificial sequence
  Kmt2c.2236_Rb1.394
  crRNA array
cgatttcttggctttatatatcttgtggaaaggacgaaacaccgtaatttctactaagtgtagatactcgacctccacctccctataatttctactaagtgtagatagaaatctcgaagcaggatcttttttaagcttggcgtggatccgatatcaactagatcttgaga

SEQ ID NO: 4782 - DNA, 170 bp, Artificial sequence
  Kmt2c.2236_Rbm10.5
  crRNA array
cgatttcttggctttatatatcttgtggaaaggacgaaacaccgtaatttctactaagtgtagatactcgacctccacctccctataatttctactaagtgtagatacgaaacctgaacccacacattttttaagcttggcgtggatccgatatcaactagatcttgaga

SEQ ID NO: 4783 - DNA, 170 bp, Artificial sequence
  Kmt2c.2236_Rbm10.6
  crRNA array
cgatttcttggctttatatatcttgtggaaaggacgaaacaccgtaatttctactaagtgtagatactcgacctccacctccctataatttctactaagtgtagatcgaaacctgaacccacacagttttttaagcttggcgtggatccgatatcaactagatcttgaga

SEQ ID NO: 4784 - DNA, 170 bp, Artificial sequence
  Kmt2c.2236_Rnf43.1920
  crRNA array
cgatttcttggctttatatatcttgtggaaaggacgaaacaccgtaatttctactaagtgtagatactcgacctccacctccctataatttctactaagtgtagatatccccgtgccgtggactccttttttaagcttggcgtggatccgatatcaactagatcttgaga

SEQ ID NO: 4785 - DNA, 170 bp, Artificial sequence
  Kmt2c.2236_Rnf43.39
  crRNA array
cgatttcttggctttatatatcttgtggaaaggacgaaacaccgtaatttctactaagtgtagatactcgacctccacctccctataatttctactaagtgtagatcaaggggatcactctgataattttttaagcttggcgtggatccgatatcaactagatcttgaga

SEQ ID NO: 4786 - DNA, 170 bp, Artificial sequence
  Kmt2c.2236_Runx1.204
  crRNA array
cgatttcttggctttatatatcttgtggaaaggacgaaacaccgtaatttctactaagtgtagatactcgacctccacctccctataatttctactaagtgtagattaaataagtccagccgttttttttttaagcttggcgtggatccgatatcaactagatcttgaga

SEQ ID NO: 4787 - DNA, 170 bp, Artificial sequence
  Kmt2c.2236_Runx1.81
  crRNA array
cgatttcttggctttatatatcttgtggaaaggacgaaacaccgtaatttctactaagtgtagatactcgacctccacctccctataatttctactaagtgtagataggacgcgtatgggaattttttttttaagcttggcgtggatccgatatcaactagatcttgaga

SEQ ID NO: 4788 - DNA, 170 bp, Artificial sequence
  Kmt2c.2236_Setd2.143
  crRNA array
cgatttcttggctttatatatcttgtggaaaggacgaaacaccgtaatttctactaagtgtagatactcgacctccacctccctataatttctactaagtgtagatgcacaaccacaacagactggttttttaagcttggcgtggatccgatatcaactagatcttgaga

SEQ ID NO: 4789 - DNA, 170 bp, Artificial sequence
  Kmt2c.2236_Setd2.508
  crRNA array
cgatttcttggctttatatatcttgtggaaaggacgaaacaccgtaatttctactaagtgtagatactcgacctccacctccctataatttctactaagtgtagattacgatcccgagcacccgacttttttaagcttggcgtggatccgatatcaactagatcttgaga

SEQ ID NO: 4790 - DNA, 170 bp, Artificial sequence
  Kmt2c.2236_Smad4.3038
  crRNA array
cgatttcttggctttatatatcttgtggaaaggacgaaacaccgtaatttctactaagtgtagatactcgacctccacctccctataatttctactaagtgtagatatctgcggcagtgtcaccggttttttaagcttggcgtggatccgatatcaactagatcttgaga

SEQ ID NO: 4791 - DNA, 170 bp, Artificial sequence
  Kmt2c.2236_Smad4.39
  crRNA array
cgatttcttggctttatatatcttgtggaaaggacgaaacaccgtaatttctactaagtgtagatactcgacctccacctccctataatttctactaagtgtagatagtcaaacgcatactgacaattttttaagcttggcgtggatccgatatcaactagatcttgaga

SEQ ID NO: 4792 - DNA, 170 bp, Artificial sequence
  Kmt2c.2236_Stag2.1409
  crRNA array
cgatttcttggctttatatatcttgtggaaaggacgaaacaccgtaatttctactaagtgtagatactcgacctccacctccctataatttctactaagtgtagatgctaataactgcggaagggcttttttaagcttggcgtggatccgatatcaactagatcttgaga

SEQ ID NO: 4793 - DNA, 170 bp, Artificial sequence
  Kmt2c.2236_Stag2.4401
  crRNA array
cgatttcttggctttatatatcttgtggaaaggacgaaacaccgtaatttctactaagtgtagatactcgacctccacctccctataatttctactaagtgtagattaatcgtccagtggtgtatattttttaagcttggcgtggatccgatatcaactagatcttgaga

SEQ ID NO: 4794 - DNA, 170 bp, Artificial sequence
  Kmt2c.2236_Tbl1xr1.1
  crRNA array
cgatttcttggctttatatatcttgtggaaaggacgaaacaccgtaatttctactaagtgtagatactcgacctccacctccctataatttctactaagtgtagatggatgcgcatactggtgaagttttttaagcttggcgtggatccgatatcaactagatcttgaga

SEQ ID NO: 4795 - DNA, 170 bp, Artificial sequence
  Kmt2c.2236_Tbl1xr1.83
  crRNA array
cgatttcttggctttatatatcttgtggaaaggacgaaacaccgtaatttctactaagtgtagatactcgacctccacctccctataatttctactaagtgtagatatggtcgacccatcgagtctttttttaagcttggcgtggatccgatatcaactagatcttgaga

SEQ ID NO: 4796 - DNA, 170 bp, Artificial sequence
  Kmt2c.2236_Tgfbr2.290
  crRNA array
cgatttcttggctttatatatcttgtggaaaggacgaaacaccgtaatttctactaagtgtagatactcgacctccacctccctataatttctactaagtgtagatcctctcggcgcccgggtaaattttttaagcttggcgtggatccgatatcaactagatcttgaga

SEQ ID NO: 4797 - DNA, 170 bp, Artificial sequence
  Kmt2c.2236_Tgfbr2.292
  crRNA array
cgatttcttggctttatatatcttgtggaaaggacgaaacaccgtaatttctactaagtgtagatactcgacctccacctccctataatttctactaagtgtagatcccgggcgccgagagggaaattttttaagcttggcgtggatccgatatcaactagatcttgaga

SEQ ID NO: 4798 - DNA, 170 bp, Artificial sequence
  Kmt2c.2236_Trp53.4
  crRNA array
cgatttcttggctttatatatcttgtggaaaggacgaaacaccgtaatttctactaagtgtagatactcgacctccacctccctataatttctactaagtgtagatccctgaactgcccccagggattttttaagcttggcgtggatccgatatcaactagatcttgaga

SEQ ID NO: 4799 - DNA, 170 bp, Artificial sequence
  Kmt2c.2236_Trp53.528
  crRNA array
cgatttcttggctttatatatcttgtggaaaggacgaaacaccgtaatttctactaagtgtagatactcgacctccacctccctataatttctactaagtgtagatgctgggccagcagagacctgttttttaagcttggcgtggatccgatatcaactagatcttgaga

SEQ ID NO: 4800 - DNA, 170 bp, Artificial sequence
  Kmt2c.2236_Vhl.1
  crRNA array
cgatttcttggctttatatatcttgtggaaaggacgaaacaccgtaatttctactaagtgtagatactcgacctccacctccctataatttctactaagtgtagatagggctcccggcggccatttttttttaagcttggcgtggatccgatatcaactagatcttgaga

SEQ ID NO: 4801 - DNA, 170 bp, Artificial sequence
  Kmt2c.2236_Vhl.151
  crRNA array
cgatttcttggctttatatatcttgtggaaaggacgaaacaccgtaatttctactaagtgtagatactcgacctccacctccctataatttctactaagtgtagattagagcactcacccgagggattttttaagcttggcgtggatccgatatcaactagatcttgaga

SEQ ID NO: 4802 - DNA, 170 bp, Artificial sequence
  Kmt2c.2236_Zc3h13.1387
  crRNA array
cgatttcttggctttatatatcttgtggaaaggacgaaacaccgtaatttctactaagtgtagatactcgacctccacctccctataatttctactaagtgtagatgtgacgccggtcatgtgactttttttaagcttggcgtggatccgatatcaactagatcttgaga

SEQ ID NO: 4803 - DNA, 170 bp, Artificial sequence
  Kmt2c.2236_Zc3h13.1777
  crRNA array
cgatttcttggctttatatatcttgtggaaaggacgaaacaccgtaatttctactaagtgtagatactcgacctccacctccctataatttctactaagtgtagatgatgctgccagtgtagcggcttttttaagcttggcgtggatccgatatcaactagatcttgaga

SEQ ID NO: 4804 - DNA, 170 bp, Artificial sequence
  Kmt2d.316_Acvr2a.155
  crRNA array
cgatttcttggctttatatatcttgtggaaaggacgaaacaccgtaatttctactaagtgtagatactccaggccacccaggtggtaatttctactaagtgtagatggacctggctaatcaagtatttttttaagcttggcgtggatccgatatcaactagatcttgaga

SEQ ID NO: 4805 - DNA, 170 bp, Artificial sequence
  Kmt2d.316_Acvr2a.70
  crRNA array
cgatttcttggctttatatatcttgtggaaaggacgaaacaccgtaatttctactaagtgtagatactccaggccacccaggtggtaatttctactaagtgtagatcccgaggcgccggagaagccttttttaagcttggcgtggatccgatatcaactagatcttgaga

SEQ ID NO: 4806 - DNA, 170 bp, Artificial sequence
  Kmt2d.316_Apc.21
  crRNA array
cgatttcttggctttatatatcttgtggaaaggacgaaacaccgtaatttctactaagtgtagatactccaggccacccaggtggtaatttctactaagtgtagatgtgatccacacgtgtagctgttttttaagcttggcgtggatccgatatcaactagatcttgaga

SEQ ID NO: 4807 - DNA, 170 bp, Artificial sequence
  Kmt2d.316_Apc.867
  crRNA array
cgatttcttggctttatatatcttgtggaaaggacgaaacaccgtaatttctactaagtgtagatactccaggccacccaggtggtaatttctactaagtgtagatcagtcccaggcggcggaagcttttttaagcttggcgtggatccgatatcaactagatcttgaga

SEQ ID NO: 4808 - DNA, 170 bp, Artificial sequence
  Kmt2d.316_Arid1a.2
  crRNA array
cgatttcttggctttatatatcttgtggaaaggacgaaacaccgtaatttctactaagtgtagatactccaggccacccaggtggtaatttctactaagtgtagatcccgcgcccccgtcctggggttttttaagcttggcgtggatccgatatcaactagatcttgaga

SEQ ID NO: 4809 - DNA, 170 bp, Artificial sequence
  Kmt2d.316_Arid1a.5
  crRNA array
cgatttcttggctttatatatcttgtggaaaggacgaaacaccgtaatttctactaagtgtagatactccaggccacccaggtggtaatttctactaagtgtagatcccgcgctcggccgctgccgttttttaagcttggcgtggatccgatatcaactagatcttgaga

SEQ ID NO: 4810 - DNA, 170 bp, Artificial sequence
  Kmt2d.316_Arid2.166
  crRNA array
cgatttcttggctttatatatcttgtggaaaggacgaaacaccgtaatttctactaagtgtagatactccaggccacccaggtggtaatttctactaagtgtagataaccgcgatctgggttttttttttttaagcttggcgtggatccgatatcaactagatcttgaga

SEQ ID NO: 4811 - DNA, 170 bp, Artificial sequence
  Kmt2d.316_Arid2.172
  crRNA array
cgatttcttggctttatatatcttgtggaaaggacgaaacaccgtaatttctactaagtgtagatactccaggccacccaggtggtaatttctactaagtgtagatctggacgagctgcggcagttttttttaagcttggcgtggatccgatatcaactagatcttgaga

SEQ ID NO: 4812 - DNA, 170 bp, Artificial sequence
  Kmt2d.316_Atm.120
  crRNA array
cgatttcttggctttatatatcttgtggaaaggacgaaacaccgtaatttctactaagtgtagatactccaggccacccaggtggtaatttctactaagtgtagatgacaggtagtcggcagctaattttttaagcttggcgtggatccgatatcaactagatcttgaga

SEQ ID NO: 4813 - DNA, 170 bp, Artificial sequence
  Kmt2d.316_Atm.997
  crRNA array
cgatttcttggctttatatatcttgtggaaaggacgaaacaccgtaatttctactaagtgtagatactccaggccacccaggtggtaatttctactaagtgtagatgagaaagtctccgaatcgttttttttaagcttggcgtggatccgatatcaactagatcttgaga

SEQ ID NO: 4814 - DNA, 170 bp, Artificial sequence
  Kmt2d.316_Atrx.249
  crRNA array
cgatttcttggctttatatatcttgtggaaaggacgaaacaccgtaatttctactaagtgtagatactccaggccacccaggtggtaatttctactaagtgtagattagccagtcgctcatatctcttttttaagcttggcgtggatccgatatcaactagatcttgaga

SEQ ID NO: 4815 - DNA, 170 bp, Artificial sequence
  Kmt2d.316_Atrx.251
  crRNA array
cgatttcttggctttatatatcttgtggaaaggacgaaacaccgtaatttctactaagtgtagatactccaggccacccaggtggtaatttctactaagtgtagatgccagtcgctcatatctctgttttttaagcttggcgtggatccgatatcaactagatcttgaga

SEQ ID NO: 4816 - DNA, 170 bp, Artificial sequence
  Kmt2d.316_Bcor.203
  crRNA array
cgatttcttggctttatatatcttgtggaaaggacgaaacaccgtaatttctactaagtgtagatactccaggccacccaggtggtaatttctactaagtgtagatccccggagcggagtccaggcttttttaagcttggcgtggatccgatatcaactagatcttgaga

SEQ ID NO: 4817 - DNA, 170 bp, Artificial sequence
  Kmt2d.316_Bcor.475
  crRNA array
cgatttcttggctttatatatcttgtggaaaggacgaaacaccgtaatttctactaagtgtagatactccaggccacccaggtggtaatttctactaagtgtagattgcaacccctctgtatgggattttttaagcttggcgtggatccgatatcaactagatcttgaga

SEQ ID NO: 4818 - DNA, 170 bp, Artificial sequence
  Kmt2d.316_Brca1.112
  crRNA array
cgatttcttggctttatatatcttgtggaaaggacgaaacaccgtaatttctactaagtgtagatactccaggccacccaggtggtaatttctactaagtgtagatctagacgctctgtggagactttttttaagcttggcgtggatccgatatcaactagatcttgaga

SEQ ID NO: 4819 - DNA, 170 bp, Artificial sequence
  Kmt2d.316_Brca1.53
  crRNA array
cgatttcttggctttatatatcttgtggaaaggacgaaacaccgtaatttctactaagtgtagatactccaggccacccaggtggtaatttctactaagtgtagataatgaggaggcgtcgatcatttttttaagcttggcgtggatccgatatcaactagatcttgaga

SEQ ID NO: 4820 - DNA, 170 bp, Artificial sequence
  Kmt2d.316_Casp8.45
  crRNA array
cgatttcttggctttatatatcttgtggaaaggacgaaacaccgtaatttctactaagtgtagatactccaggccacccaggtggtaatttctactaagtgtagatctaccgagatcctgtgaatgttttttaagcttggcgtggatccgatatcaactagatcttgaga

SEQ ID NO: 4821 - DNA, 170 bp, Artificial sequence
  Kmt2d.316_Casp8.54
  crRNA array
cgatttcttggctttatatatcttgtggaaaggacgaaacaccgtaatttctactaagtgtagatactccaggccacccaggtggtaatttctactaagtgtagatcagtgcagtcgtcgtaagatttttttaagcttggcgtggatccgatatcaactagatcttgaga

SEQ ID NO: 4822 - DNA, 170 bp, Artificial sequence
  Kmt2d.316_Cbwd1.84
  crRNA array
cgatttcttggctttatatatcttgtggaaaggacgaaacaccgtaatttctactaagtgtagatactccaggccacccaggtggtaatttctactaagtgtagatcacagcaggtaacatgccgcttttttaagcttggcgtggatccgatatcaactagatcttgaga

SEQ ID NO: 4823 - DNA, 170 bp, Artificial sequence
  Kmt2d.316_Cbwd1.85
  crRNA array
cgatttcttggctttatatatcttgtggaaaggacgaaacaccgtaatttctactaagtgtagatactccaggccacccaggtggtaatttctactaagtgtagatacagcaggtaacatgccgccttttttaagcttggcgtggatccgatatcaactagatcttgaga

SEQ ID NO: 4824 - DNA, 170 bp, Artificial sequence
  Kmt2d.316_Cdh1.387
  crRNA array
cgatttcttggctttatatatcttgtggaaaggacgaaacaccgtaatttctactaagtgtagatactccaggccacccaggtggtaatttctactaagtgtagatctcggcgtctgccgggtccgttttttaagcttggcgtggatccgatatcaactagatcttgaga

SEQ ID NO: 4825 - DNA, 170 bp, Artificial sequence
  Kmt2d.316_Cdh1.58
  crRNA array
cgatttcttggctttatatatcttgtggaaaggacgaaacaccgtaatttctactaagtgtagatactccaggccacccaggtggtaatttctactaagtgtagatctcgtccgcgcccgggactcttttttaagcttggcgtggatccgatatcaactagatcttgaga

SEQ ID NO: 4826 - DNA, 170 bp, Artificial sequence
  Kmt2d.316_Cdkn2a.647
  crRNA array
cgatttcttggctttatatatcttgtggaaaggacgaaacaccgtaatttctactaagtgtagatactccaggccacccaggtggtaatttctactaagtgtagatgcaatcacgggagggagcagttttttaagcttggcgtggatccgatatcaactagatcttgaga

SEQ ID NO: 4827 - DNA, 170 bp, Artificial sequence
  Kmt2d.316_Cdkn2a.648
  crRNA array
cgatttcttggctttatatatcttgtggaaaggacgaaacaccgtaatttctactaagtgtagatactccaggccacccaggtggtaatttctactaagtgtagatcaatcacgggagggagcagattttttaagcttggcgtggatccgatatcaactagatcttgaga

SEQ ID NO: 4828 - DNA, 170 bp, Artificial sequence
  Kmt2d.316_Cic.162
  crRNA array
cgatttcttggctttatatatcttgtggaaaggacgaaacaccgtaatttctactaagtgtagatactccaggccacccaggtggtaatttctactaagtgtagatcgcaggcgcgcccggcggagttttttaagcttggcgtggatccgatatcaactagatcttgaga

SEQ ID NO: 4829 - DNA, 170 bp, Artificial sequence
  Kmt2d.316_Cic.164
  crRNA array
cgatttcttggctttatatatcttgtggaaaggacgaaacaccgtaatttctactaagtgtagatactccaggccacccaggtggtaatttctactaagtgtagatcgggccctgggccggcggctttttttaagcttggcgtggatccgatatcaactagatcttgaga

SEQ ID NO: 4830 - DNA, 170 bp, Artificial sequence
  Kmt2d.316_Ctcf.229
  crRNA array
cgatttcttggctttatatatcttgtggaaaggacgaaacaccgtaatttctactaagtgtagatactccaggccacccaggtggtaatttctactaagtgtagatggctggtggctgatagtctgttttttaagcttggcgtggatccgatatcaactagatcttgaga

SEQ ID NO: 4831 - DNA, 170 bp, Artificial sequence
  Kmt2d.316_Ctcf.809
  crRNA array
cgatttcttggctttatatatcttgtggaaaggacgaaacaccgtaatttctactaagtgtagatactccaggccacccaggtggtaatttctactaagtgtagataagcgctatcatgatcccaattttttaagcttggcgtggatccgatatcaactagatcttgaga

SEQ ID NO: 4832 - DNA, 170 bp, Artificial sequence
  Kmt2d.316_Elf3.826
  crRNA array
cgatttcttggctttatatatcttgtggaaaggacgaaacaccgtaatttctactaagtgtagatactccaggccacccaggtggtaatttctactaagtgtagattccgagacatcctaatccacttttttaagcttggcgtggatccgatatcaactagatcttgaga

SEQ ID NO: 4833 - DNA, 170 bp, Artificial sequence
  Kmt2d.316_Elf3.983
  crRNA array
cgatttcttggctttatatatcttgtggaaaggacgaaacaccgtaatttctactaagtgtagatactccaggccacccaggtggtaatttctactaagtgtagattaggccccctaactggaccattttttaagcttggcgtggatccgatatcaactagatcttgaga

SEQ ID NO: 4834 - DNA, 170 bp, Artificial sequence
  Kmt2d.316_Ep300.310
  crRNA array
cgatttcttggctttatatatcttgtggaaaggacgaaacaccgtaatttctactaagtgtagatactccaggccacccaggtggtaatttctactaagtgtagatatggtacgacagtgaggaagttttttaagcttggcgtggatccgatatcaactagatcttgaga

SEQ ID NO: 4835 - DNA, 170 bp, Artificial sequence
  Kmt2d.316_Ep300.587
  crRNA array
cgatttcttggctttatatatcttgtggaaaggacgaaacaccgtaatttctactaagtgtagatactccaggccacccaggtggtaatttctactaagtgtagatcgccccggggcccccaaccattttttaagcttggcgtggatccgatatcaactagatcttgaga

SEQ ID NO: 4836 - DNA, 170 bp, Artificial sequence
  Kmt2d.316_Epha2.126
  crRNA array
cgatttcttggctttatatatcttgtggaaaggacgaaacaccgtaatttctactaagtgtagatactccaggccacccaggtggtaatttctactaagtgtagatcctgtgccgccgcggccgccttttttaagcttggcgtggatccgatatcaactagatcttgaga

SEQ ID NO: 4837 - DNA, 170 bp, Artificial sequence
  Kmt2d.316_Epha2.5
  crRNA array
cgatttcttggctttatatatcttgtggaaaggacgaaacaccgtaatttctactaagtgtagatactccaggccacccaggtggtaatttctactaagtgtagatcatgagctggcgccacccggttttttaagcttggcgtggatccgatatcaactagatcttgaga

SEQ ID NO: 4838 - DNA, 170 bp, Artificial sequence
  Kmt2d.316_Fat1.105
  crRNA array
cgatttcttggctttatatatcttgtggaaaggacgaaacaccgtaatttctactaagtgtagatactccaggccacccaggtggtaatttctactaagtgtagataactcgaggtgacaacaagtttttttaagcttggcgtggatccgatatcaactagatcttgaga

SEQ ID NO: 4839 - DNA, 170 bp, Artificial sequence
  Kmt2d.316_Fat1.122
  crRNA array
cgatttcttggctttatatatcttgtggaaaggacgaaacaccgtaatttctactaagtgtagatactccaggccacccaggtggtaatttctactaagtgtagatccatcgacatggaaacgggattttttaagcttggcgtggatccgatatcaactagatcttgaga

SEQ ID NO: 4840 - DNA, 170 bp, Artificial sequence
  Kmt2d.316_Fbxw7.21
  crRNA array
cgatttcttggctttatatatcttgtggaaaggacgaaacaccgtaatttctactaagtgtagatactccaggccacccaggtggtaatttctactaagtgtagattaatgtgccgtagaaacccattttttaagcttggcgtggatccgatatcaactagatcttgaga

SEQ ID NO: 4841 - DNA, 170 bp, Artificial sequence
  Kmt2d.316_Fbxw7.23
  crRNA array
cgatttcttggctttatatatcttgtggaaaggacgaaacaccgtaatttctactaagtgtagatactccaggccacccaggtggtaatttctactaagtgtagatatgtgccgtagaaacccatattttttaagcttggcgtggatccgatatcaactagatcttgaga

SEQ ID NO: 4842 - DNA, 170 bp, Artificial sequence
  Kmt2d.316_Gata3.34
  crRNA array
cgatttcttggctttatatatcttgtggaaaggacgaaacaccgtaatttctactaagtgtagatactccaggccacccaggtggtaatttctactaagtgtagatctaaactatcccgcaaagatttttttaagcttggcgtggatccgatatcaactagatcttgaga

SEQ ID NO: 4843 - DNA, 170 bp, Artificial sequence
  Kmt2d.316_Gata3.47
  crRNA array
cgatttcttggctttatatatcttgtggaaaggacgaaacaccgtaatttctactaagtgtagatactccaggccacccaggtggtaatttctactaagtgtagatcgtagtaggacgggacgtggttttttaagcttggcgtggatccgatatcaactagatcttgaga

SEQ ID NO: 4844 - DNA, 170 bp, Artificial sequence
  Kmt2d.316_H2-Q2.1
  crRNA array
cgatttcttggctttatatatcttgtggaaaggacgaaacaccgtaatttctactaagtgtagatactccaggccacccaggtggtaatttctactaagtgtagatagggcggccaccaacagcagttttttaagcttggcgtggatccgatatcaactagatcttgaga

SEQ ID NO: 4845 - DNA, 170 bp, Artificial sequence
  Kmt2d.316_H2-Q2.2
  crRNA array
cgatttcttggctttatatatcttgtggaaaggacgaaacaccgtaatttctactaagtgtagatactccaggccacccaggtggtaatttctactaagtgtagattaacctgcgcccgctgctgattttttaagcttggcgtggatccgatatcaactagatcttgaga

SEQ ID NO: 4846 - DNA, 170 bp, Artificial sequence
  Kmt2d.316_Kdm5c.1878
  crRNA array
cgatttcttggctttatatatcttgtggaaaggacgaaacaccgtaatttctactaagtgtagatactccaggccacccaggtggtaatttctactaagtgtagatagagcacggcacccgcccccttttttaagcttggcgtggatccgatatcaactagatcttgaga

SEQ ID NO: 4847 - DNA, 170 bp, Artificial sequence
  Kmt2d.316_Kdm5c.1879
  crRNA array
cgatttcttggctttatatatcttgtggaaaggacgaaacaccgtaatttctactaagtgtagatactccaggccacccaggtggtaatttctactaagtgtagatgagcacggcacccgccccccttttttaagcttggcgtggatccgatatcaactagatcttgaga

SEQ ID NO: 4848 - DNA, 170 bp, Artificial sequence
  Kmt2d.316_Kdm6a.56
  crRNA array
cgatttcttggctttatatatcttgtggaaaggacgaaacaccgtaatttctactaagtgtagatactccaggccacccaggtggtaatttctactaagtgtagattcgctgccgcctctcgcggcttttttaagcttggcgtggatccgatatcaactagatcttgaga

SEQ ID NO: 4849 - DNA, 170 bp, Artificial sequence
  Kmt2d.316_Kdm6a.57
  crRNA array
cgatttcttggctttatatatcttgtggaaaggacgaaacaccgtaatttctactaagtgtagatactccaggccacccaggtggtaatttctactaagtgtagatcgctgccgcctctcgcggcattttttaagcttggcgtggatccgatatcaactagatcttgaga

SEQ ID NO: 4850 - DNA, 170 bp, Artificial sequence
  Kmt2d.316_Kmt2b.265
  crRNA array
cgatttcttggctttatatatcttgtggaaaggacgaaacaccgtaatttctactaagtgtagatactccaggccacccaggtggtaatttctactaagtgtagatccccaagtgaagcccacctgttttttaagcttggcgtggatccgatatcaactagatcttgaga

SEQ ID NO: 4851 - DNA, 170 bp, Artificial sequence
  Kmt2d.316_Kmt2b.298
  crRNA array
cgatttcttggctttatatatcttgtggaaaggacgaaacaccgtaatttctactaagtgtagatactccaggccacccaggtggtaatttctactaagtgtagattccggcagggaccggctggcttttttaagcttggcgtggatccgatatcaactagatcttgaga

SEQ ID NO: 4852 - DNA, 170 bp, Artificial sequence
  Kmt2d.316_Kmt2c.1962
  crRNA array
cgatttcttggctttatatatcttgtggaaaggacgaaacaccgtaatttctactaagtgtagatactccaggccacccaggtggtaatttctactaagtgtagatgtgacgatctgtgccacaagttttttaagcttggcgtggatccgatatcaactagatcttgaga

SEQ ID NO: 4853 - DNA, 170 bp, Artificial sequence
  Kmt2d.316_Kmt2c.2236
  crRNA array
cgatttcttggctttatatatcttgtggaaaggacgaaacaccgtaatttctactaagtgtagatactccaggccacccaggtggtaatttctactaagtgtagatactcgacctccacctccctattttttaagcttggcgtggatccgatatcaactagatcttgaga

SEQ ID NO: 4854 - DNA, 170 bp, Artificial sequence
  Kmt2d.316_Map2k4.119
  crRNA array
cgatttcttggctttatatatcttgtggaaaggacgaaacaccgtaatttctactaagtgtagatactccaggccacccaggtggtaatttctactaagtgtagattgctgtgtgggcggccacatttttttaagcttggcgtggatccgatatcaactagatcttgaga

SEQ ID NO: 4855 - DNA, 170 bp, Artificial sequence
  Kmt2d.316_Map2k4.1261
  crRNA array
cgatttcttggctttatatatcttgtggaaaggacgaaacaccgtaatttctactaagtgtagatactccaggccacccaggtggtaatttctactaagtgtagatgatgtagtaatgcggagtagttttttaagcttggcgtggatccgatatcaactagatcttgaga

SEQ ID NO: 4856 - DNA, 170 bp, Artificial sequence
  Kmt2d.316_Map3k1.235
  crRNA array
cgatttcttggctttatatatcttgtggaaaggacgaaacaccgtaatttctactaagtgtagatactccaggccacccaggtggtaatttctactaagtgtagataaaacgctactgatcgatcgttttttaagcttggcgtggatccgatatcaactagatcttgaga

SEQ ID NO: 4857 - DNA, 170 bp, Artificial sequence
  Kmt2d.316_Map3k1.3838
  crRNA array
cgatttcttggctttatatatcttgtggaaaggacgaaacaccgtaatttctactaagtgtagatactccaggccacccaggtggtaatttctactaagtgtagatccaacaacagggccccactattttttaagcttggcgtggatccgatatcaactagatcttgaga

SEQ ID NO: 4858 - DNA, 170 bp, Artificial sequence
  Kmt2d.316_Mga.1655
  crRNA array
cgatttcttggctttatatatcttgtggaaaggacgaaacaccgtaatttctactaagtgtagatactccaggccacccaggtggtaatttctactaagtgtagatcgagaagtggagagcatattttttttaagcttggcgtggatccgatatcaactagatcttgaga

SEQ ID NO: 4859 - DNA, 170 bp, Artificial sequence
  Kmt2d.316_Mga.93
  crRNA array
cgatttcttggctttatatatcttgtggaaaggacgaaacaccgtaatttctactaagtgtagatactccaggccacccaggtggtaatttctactaagtgtagatgagaaggctccccataatgtttttttaagcttggcgtggatccgatatcaactagatcttgaga

SEQ ID NO: 4860 - DNA, 170 bp, Artificial sequence
  Kmt2d.316_Nf1.746
  crRNA array
cgatttcttggctttatatatcttgtggaaaggacgaaacaccgtaatttctactaagtgtagatactccaggccacccaggtggtaatttctactaagtgtagattaagcataatgatgatgccattttttaagcttggcgtggatccgatatcaactagatcttgaga

SEQ ID NO: 4861 - DNA, 170 bp, Artificial sequence
  Kmt2d.316_Nf1.97
  crRNA array
cgatttcttggctttatatatcttgtggaaaggacgaaacaccgtaatttctactaagtgtagatactccaggccacccaggtggtaatttctactaagtgtagatagcccgctacatgctgatgcttttttaagcttggcgtggatccgatatcaactagatcttgaga

SEQ ID NO: 4862 - DNA, 170 bp, Artificial sequence
  Kmt2d.316_Nf2.356
  crRNA array
cgatttcttggctttatatatcttgtggaaaggacgaaacaccgtaatttctactaagtgtagatactccaggccacccaggtggtaatttctactaagtgtagatcggagtcatctgatagagatttttttaagcttggcgtggatccgatatcaactagatcttgaga

SEQ ID NO: 4863 - DNA, 170 bp, Artificial sequence
  Kmt2d.316_Nf2.768
  crRNA array
cgatttcttggctttatatatcttgtggaaaggacgaaacaccgtaatttctactaagtgtagatactccaggccacccaggtggtaatttctactaagtgtagatccgaagccccagtgtccggcttttttaagcttggcgtggatccgatatcaactagatcttgaga

SEQ ID NO: 4864 - DNA, 170 bp, Artificial sequence
  Kmt2d.316_Notch1.1849
  crRNA array
cgatttcttggctttatatatcttgtggaaaggacgaaacaccgtaatttctactaagtgtagatactccaggccacccaggtggtaatttctactaagtgtagatctggcgggtgggcggcgctgttttttaagcttggcgtggatccgatatcaactagatcttgaga

SEQ ID NO: 4865 - DNA, 170 bp, Artificial sequence
  Kmt2d.316_Notch1.649
  crRNA array
cgatttcttggctttatatatcttgtggaaaggacgaaacaccgtaatttctactaagtgtagatactccaggccacccaggtggtaatttctactaagtgtagattgggccaacgatgccaggacttttttaagcttggcgtggatccgatatcaactagatcttgaga

SEQ ID NO: 4866 - DNA, 170 bp, Artificial sequence
  Kmt2d.316_Nsd1.70
  crRNA array
cgatttcttggctttatatatcttgtggaaaggacgaaacaccgtaatttctactaagtgtagatactccaggccacccaggtggtaatttctactaagtgtagatactggtgtggacgatgcagattttttaagcttggcgtggatccgatatcaactagatcttgaga

SEQ ID NO: 4867 - DNA, 170 bp, Artificial sequence
  Kmt2d.316_Nsd1.90
  crRNA array
cgatttcttggctttatatatcttgtggaaaggacgaaacaccgtaatttctactaagtgtagatactccaggccacccaggtggtaatttctactaagtgtagataggagctaacggcaagaatgttttttaagcttggcgtggatccgatatcaactagatcttgaga

SEQ ID NO: 4868 - DNA, 170 bp, Artificial sequence
  Kmt2d.316_Pbrm1.1236
  crRNA array
cgatttcttggctttatatatcttgtggaaaggacgaaacaccgtaatttctactaagtgtagatactccaggccacccaggtggtaatttctactaagtgtagatgccgataaaaccaacagccgttttttaagcttggcgtggatccgatatcaactagatcttgaga

SEQ ID NO: 4869 - DNA, 170 bp, Artificial sequence
  Kmt2d.316_Pbrm1.969
  crRNA array
cgatttcttggctttatatatcttgtggaaaggacgaaacaccgtaatttctactaagtgtagatactccaggccacccaggtggtaatttctactaagtgtagatgagccctaatgaacagctcattttttaagcttggcgtggatccgatatcaactagatcttgaga

SEQ ID NO: 4870 - DNA, 170 bp, Artificial sequence
  Kmt2d.316_Pik3r1.76
  crRNA array
cgatttcttggctttatatatcttgtggaaaggacgaaacaccgtaatttctactaagtgtagatactccaggccacccaggtggtaatttctactaagtgtagataaaacctatacggcccgcacttttttaagcttggcgtggatccgatatcaactagatcttgaga

SEQ ID NO: 4871 - DNA, 170 bp, Artificial sequence
  Kmt2d.316_Pik3r1.77
  crRNA array
cgatttcttggctttatatatcttgtggaaaggacgaaacaccgtaatttctactaagtgtagatactccaggccacccaggtggtaatttctactaagtgtagataaacctatacggcccgcactttttttaagcttggcgtggatccgatatcaactagatcttgaga

SEQ ID NO: 4872 - DNA, 170 bp, Artificial sequence
  Kmt2d.316_Pten.240
  crRNA array
cgatttcttggctttatatatcttgtggaaaggacgaaacaccgtaatttctactaagtgtagatactccaggccacccaggtggtaatttctactaagtgtagattgcatacgctatagctgcttttttttaagcttggcgtggatccgatatcaactagatcttgaga

SEQ ID NO: 4873 - DNA, 170 bp, Artificial sequence
  Kmt2d.316_Pten.265
  crRNA array
cgatttcttggctttatatatcttgtggaaaggacgaaacaccgtaatttctactaagtgtagatactccaggccacccaggtggtaatttctactaagtgtagataagcgtggtgcgtgacgcacttttttaagcttggcgtggatccgatatcaactagatcttgaga

SEQ ID NO: 4874 - DNA, 170 bp, Artificial sequence
  Kmt2d.316_Rasa1.1478
  crRNA array
cgatttcttggctttatatatcttgtggaaaggacgaaacaccgtaatttctactaagtgtagatactccaggccacccaggtggtaatttctactaagtgtagatcgataatggtctatgatgtcttttttaagcttggcgtggatccgatatcaactagatcttgaga

SEQ ID NO: 4875 - DNA, 170 bp, Artificial sequence
  Kmt2d.316_Rasa1.223
  crRNA array
cgatttcttggctttatatatcttgtggaaaggacgaaacaccgtaatttctactaagtgtagatactccaggccacccaggtggtaatttctactaagtgtagattccatggagtatcgtgctcgttttttaagcttggcgtggatccgatatcaactagatcttgaga

SEQ ID NO: 4876 - DNA, 170 bp, Artificial sequence
  Kmt2d.316_Rb1.211
  crRNA array
cgatttcttggctttatatatcttgtggaaaggacgaaacaccgtaatttctactaagtgtagatactccaggccacccaggtggtaatttctactaagtgtagattctgacatgatcgggtacctttttttaagcttggcgtggatccgatatcaactagatcttgaga

SEQ ID NO: 4877 - DNA, 170 bp, Artificial sequence
  Kmt2d.316_Rb1.394
  crRNA array
cgatttcttggctttatatatcttgtggaaaggacgaaacaccgtaatttctactaagtgtagatactccaggccacccaggtggtaatttctactaagtgtagatagaaatctcgaagcaggatcttttttaagcttggcgtggatccgatatcaactagatcttgaga

SEQ ID NO: 4878 - DNA, 170 bp, Artificial sequence
  Kmt2d.316_Rbm10.5
  crRNA array
cgatttcttggctttatatatcttgtggaaaggacgaaacaccgtaatttctactaagtgtagatactccaggccacccaggtggtaatttctactaagtgtagatacgaaacctgaacccacacattttttaagcttggcgtggatccgatatcaactagatcttgaga

SEQ ID NO: 4879 - DNA, 170 bp, Artificial sequence
  Kmt2d.316_Rbm10.6
  crRNA array
cgatttcttggctttatatatcttgtggaaaggacgaaacaccgtaatttctactaagtgtagatactccaggccacccaggtggtaatttctactaagtgtagatcgaaacctgaacccacacagttttttaagcttggcgtggatccgatatcaactagatcttgaga

SEQ ID NO: 4880 - DNA, 170 bp, Artificial sequence
  Kmt2d.316_Rnf43.1920
  crRNA array
cgatttcttggctttatatatcttgtggaaaggacgaaacaccgtaatttctactaagtgtagatactccaggccacccaggtggtaatttctactaagtgtagatatccccgtgccgtggactccttttttaagcttggcgtggatccgatatcaactagatcttgaga

SEQ ID NO: 4881 - DNA, 170 bp, Artificial sequence
  Kmt2d.316_Rnf43.39
  crRNA array
cgatttcttggctttatatatcttgtggaaaggacgaaacaccgtaatttctactaagtgtagatactccaggccacccaggtggtaatttctactaagtgtagatcaaggggatcactctgataattttttaagcttggcgtggatccgatatcaactagatcttgaga

SEQ ID NO: 4882 - DNA, 170 bp, Artificial sequence
  Kmt2d.316_Runx1.204
  crRNA array
cgatttcttggctttatatatcttgtggaaaggacgaaacaccgtaatttctactaagtgtagatactccaggccacccaggtggtaatttctactaagtgtagattaaataagtccagccgttttttttttaagcttggcgtggatccgatatcaactagatcttgaga

SEQ ID NO: 4883 - DNA, 170 bp, Artificial sequence
  Kmt2d.316_Runx1.81
  crRNA array
cgatttcttggctttatatatcttgtggaaaggacgaaacaccgtaatttctactaagtgtagatactccaggccacccaggtggtaatttctactaagtgtagataggacgcgtatgggaattttttttttaagcttggcgtggatccgatatcaactagatcttgaga

SEQ ID NO: 4884 - DNA, 170 bp, Artificial sequence
  Kmt2d.316_Setd2.143
  crRNA array
cgatttcttggctttatatatcttgtggaaaggacgaaacaccgtaatttctactaagtgtagatactccaggccacccaggtggtaatttctactaagtgtagatgcacaaccacaacagactggttttttaagcttggcgtggatccgatatcaactagatcttgaga

SEQ ID NO: 4885 - DNA, 170 bp, Artificial sequence
  Kmt2d.316_Setd2.508
  crRNA array
cgatttcttggctttatatatcttgtggaaaggacgaaacaccgtaatttctactaagtgtagatactccaggccacccaggtggtaatttctactaagtgtagattacgatcccgagcacccgacttttttaagcttggcgtggatccgatatcaactagatcttgaga

SEQ ID NO: 4886 - DNA, 170 bp, Artificial sequence
  Kmt2d.316_Smad4.3038
  crRNA array
cgatttcttggctttatatatcttgtggaaaggacgaaacaccgtaatttctactaagtgtagatactccaggccacccaggtggtaatttctactaagtgtagatatctgcggcagtgtcaccggttttttaagcttggcgtggatccgatatcaactagatcttgaga

SEQ ID NO: 4887 - DNA, 170 bp, Artificial sequence
  Kmt2d.316_Smad4.39
  crRNA array
cgatttcttggctttatatatcttgtggaaaggacgaaacaccgtaatttctactaagtgtagatactccaggccacccaggtggtaatttctactaagtgtagatagtcaaacgcatactgacaattttttaagcttggcgtggatccgatatcaactagatcttgaga

SEQ ID NO: 4888 - DNA, 170 bp, Artificial sequence
  Kmt2d.316_Stag2.1409
  crRNA array
cgatttcttggctttatatatcttgtggaaaggacgaaacaccgtaatttctactaagtgtagatactccaggccacccaggtggtaatttctactaagtgtagatgctaataactgcggaagggcttttttaagcttggcgtggatccgatatcaactagatcttgaga

SEQ ID NO: 4889 - DNA, 170 bp, Artificial sequence
  Kmt2d.316_Stag2.4401
  crRNA array
cgatttcttggctttatatatcttgtggaaaggacgaaacaccgtaatttctactaagtgtagatactccaggccacccaggtggtaatttctactaagtgtagattaatcgtccagtggtgtatattttttaagcttggcgtggatccgatatcaactagatcttgaga

SEQ ID NO: 4890 - DNA, 170 bp, Artificial sequence
  Kmt2d.316_Tbl1xr1.1
  crRNA array
cgatttcttggctttatatatcttgtggaaaggacgaaacaccgtaatttctactaagtgtagatactccaggccacccaggtggtaatttctactaagtgtagatggatgcgcatactggtgaagttttttaagcttggcgtggatccgatatcaactagatcttgaga

SEQ ID NO: 4891 - DNA, 170 bp, Artificial sequence
  Kmt2d.316_Tbl1xr1.83
  crRNA array
cgatttcttggctttatatatcttgtggaaaggacgaaacaccgtaatttctactaagtgtagatactccaggccacccaggtggtaatttctactaagtgtagatatggtcgacccatcgagtctttttttaagcttggcgtggatccgatatcaactagatcttgaga

SEQ ID NO: 4892 - DNA, 170 bp, Artificial sequence
  Kmt2d.316_Tgfbr2.290
  crRNA array
cgatttcttggctttatatatcttgtggaaaggacgaaacaccgtaatttctactaagtgtagatactccaggccacccaggtggtaatttctactaagtgtagatcctctcggcgcccgggtaaattttttaagcttggcgtggatccgatatcaactagatcttgaga

SEQ ID NO: 4893 - DNA, 170 bp, Artificial sequence
  Kmt2d.316_Tgfbr2.292
  crRNA array
cgatttcttggctttatatatcttgtggaaaggacgaaacaccgtaatttctactaagtgtagatactccaggccacccaggtggtaatttctactaagtgtagatcccgggcgccgagagggaaattttttaagcttggcgtggatccgatatcaactagatcttgaga

SEQ ID NO: 4894 - DNA, 170 bp, Artificial sequence
  Kmt2d.316_Trp53.4
  crRNA array
cgatttcttggctttatatatcttgtggaaaggacgaaacaccgtaatttctactaagtgtagatactccaggccacccaggtggtaatttctactaagtgtagatccctgaactgcccccagggattttttaagcttggcgtggatccgatatcaactagatcttgaga

SEQ ID NO: 4895 - DNA, 170 bp, Artificial sequence
  Kmt2d.316_Trp53.528
  crRNA array
cgatttcttggctttatatatcttgtggaaaggacgaaacaccgtaatttctactaagtgtagatactccaggccacccaggtggtaatttctactaagtgtagatgctgggccagcagagacctgttttttaagcttggcgtggatccgatatcaactagatcttgaga

SEQ ID NO: 4896 - DNA, 170 bp, Artificial sequence
  Kmt2d.316_Vhl.1
  crRNA array
cgatttcttggctttatatatcttgtggaaaggacgaaacaccgtaatttctactaagtgtagatactccaggccacccaggtggtaatttctactaagtgtagatagggctcccggcggccatttttttttaagcttggcgtggatccgatatcaactagatcttgaga

SEQ ID NO: 4897 - DNA, 170 bp, Artificial sequence
  Kmt2d.316_Vhl.151
  crRNA array
cgatttcttggctttatatatcttgtggaaaggacgaaacaccgtaatttctactaagtgtagatactccaggccacccaggtggtaatttctactaagtgtagattagagcactcacccgagggattttttaagcttggcgtggatccgatatcaactagatcttgaga

SEQ ID NO: 4898 - DNA, 170 bp, Artificial sequence
  Kmt2d.316_Zc3h13.1387
  crRNA array
cgatttcttggctttatatatcttgtggaaaggacgaaacaccgtaatttctactaagtgtagatactccaggccacccaggtggtaatttctactaagtgtagatgtgacgccggtcatgtgactttttttaagcttggcgtggatccgatatcaactagatcttgaga

SEQ ID NO: 4899 - DNA, 170 bp, Artificial sequence
  Kmt2d.316_Zc3h13.1777
  crRNA array
cgatttcttggctttatatatcttgtggaaaggacgaaacaccgtaatttctactaagtgtagatactccaggccacccaggtggtaatttctactaagtgtagatgatgctgccagtgtagcggcttttttaagcttggcgtggatccgatatcaactagatcttgaga

SEQ ID NO: 4900 - DNA, 170 bp, Artificial sequence
  Kmt2d.416_Acvr2a.155
  crRNA array
cgatttcttggctttatatatcttgtggaaaggacgaaacaccgtaatttctactaagtgtagattaaacccccgggggaagggttaatttctactaagtgtagatggacctggctaatcaagtatttttttaagcttggcgtggatccgatatcaactagatcttgaga

SEQ ID NO: 4901 - DNA, 170 bp, Artificial sequence
  Kmt2d.416_Acvr2a.70
  crRNA array
cgatttcttggctttatatatcttgtggaaaggacgaaacaccgtaatttctactaagtgtagattaaacccccgggggaagggttaatttctactaagtgtagatcccgaggcgccggagaagccttttttaagcttggcgtggatccgatatcaactagatcttgaga

SEQ ID NO: 4902 - DNA, 170 bp, Artificial sequence
  Kmt2d.416_Apc.21
  crRNA array
cgatttcttggctttatatatcttgtggaaaggacgaaacaccgtaatttctactaagtgtagattaaacccccgggggaagggttaatttctactaagtgtagatgtgatccacacgtgtagctgttttttaagcttggcgtggatccgatatcaactagatcttgaga

SEQ ID NO: 4903 - DNA, 170 bp, Artificial sequence
  Kmt2d.416_Apc.867
  crRNA array
cgatttcttggctttatatatcttgtggaaaggacgaaacaccgtaatttctactaagtgtagattaaacccccgggggaagggttaatttctactaagtgtagatcagtcccaggcggcggaagcttttttaagcttggcgtggatccgatatcaactagatcttgaga

SEQ ID NO: 4904 - DNA, 170 bp, Artificial sequence
  Kmt2d.416_Arid1a.2
  crRNA array
cgatttcttggctttatatatcttgtggaaaggacgaaacaccgtaatttctactaagtgtagattaaacccccgggggaagggttaatttctactaagtgtagatcccgcgcccccgtcctggggttttttaagcttggcgtggatccgatatcaactagatcttgaga

SEQ ID NO: 4905 - DNA, 170 bp, Artificial sequence
  Kmt2d.416_Arid1a.5
  crRNA array
cgatttcttggctttatatatcttgtggaaaggacgaaacaccgtaatttctactaagtgtagattaaacccccgggggaagggttaatttctactaagtgtagatcccgcgctcggccgctgccgttttttaagcttggcgtggatccgatatcaactagatcttgaga

SEQ ID NO: 4906 - DNA, 170 bp, Artificial sequence
  Kmt2d.416_Arid2.166
  crRNA array
cgatttcttggctttatatatcttgtggaaaggacgaaacaccgtaatttctactaagtgtagattaaacccccgggggaagggttaatttctactaagtgtagataaccgcgatctgggttttttttttttaagcttggcgtggatccgatatcaactagatcttgaga

SEQ ID NO: 4907 - DNA, 170 bp, Artificial sequence
  Kmt2d.416_Arid2.172
  crRNA array
cgatttcttggctttatatatcttgtggaaaggacgaaacaccgtaatttctactaagtgtagattaaacccccgggggaagggttaatttctactaagtgtagatctggacgagctgcggcagttttttttaagcttggcgtggatccgatatcaactagatcttgaga

SEQ ID NO: 4908 - DNA, 170 bp, Artificial sequence
  Kmt2d.416_Atm.120
  crRNA array
cgatttcttggctttatatatcttgtggaaaggacgaaacaccgtaatttctactaagtgtagattaaacccccgggggaagggttaatttctactaagtgtagatgacaggtagtcggcagctaattttttaagcttggcgtggatccgatatcaactagatcttgaga

SEQ ID NO: 4909 - DNA, 170 bp, Artificial sequence
  Kmt2d.416_Atm.997
  crRNA array
cgatttcttggctttatatatcttgtggaaaggacgaaacaccgtaatttctactaagtgtagattaaacccccgggggaagggttaatttctactaagtgtagatgagaaagtctccgaatcgttttttttaagcttggcgtggatccgatatcaactagatcttgaga

SEQ ID NO: 4910 - DNA, 170 bp, Artificial sequence
  Kmt2d.416_Atrx.249
  crRNA array
cgatttcttggctttatatatcttgtggaaaggacgaaacaccgtaatttctactaagtgtagattaaacccccgggggaagggttaatttctactaagtgtagattagccagtcgctcatatctcttttttaagcttggcgtggatccgatatcaactagatcttgaga

SEQ ID NO: 4911 - DNA, 170 bp, Artificial sequence
  Kmt2d.416_Atrx.251
  crRNA array
cgatttcttggctttatatatcttgtggaaaggacgaaacaccgtaatttctactaagtgtagattaaacccccgggggaagggttaatttctactaagtgtagatgccagtcgctcatatctctgttttttaagcttggcgtggatccgatatcaactagatcttgaga

SEQ ID NO: 4912 - DNA, 170 bp, Artificial sequence
  Kmt2d.416_Bcor.203
  crRNA array
cgatttcttggctttatatatcttgtggaaaggacgaaacaccgtaatttctactaagtgtagattaaacccccgggggaagggttaatttctactaagtgtagatccccggagcggagtccaggcttttttaagcttggcgtggatccgatatcaactagatcttgaga

SEQ ID NO: 4913 - DNA, 170 bp, Artificial sequence
  Kmt2d.416_Bcor.475
  crRNA array
cgatttcttggctttatatatcttgtggaaaggacgaaacaccgtaatttctactaagtgtagattaaacccccgggggaagggttaatttctactaagtgtagattgcaacccctctgtatgggattttttaagcttggcgtggatccgatatcaactagatcttgaga

SEQ ID NO: 4914 - DNA, 170 bp, Artificial sequence
  Kmt2d.416_Brca1.112
  crRNA array
cgatttcttggctttatatatcttgtggaaaggacgaaacaccgtaatttctactaagtgtagattaaacccccgggggaagggttaatttctactaagtgtagatctagacgctctgtggagactttttttaagcttggcgtggatccgatatcaactagatcttgaga

SEQ ID NO: 4915 - DNA, 170 bp, Artificial sequence
  Kmt2d.416_Brca1.53
  crRNA array
cgatttcttggctttatatatcttgtggaaaggacgaaacaccgtaatttctactaagtgtagattaaacccccgggggaagggttaatttctactaagtgtagataatgaggaggcgtcgatcatttttttaagcttggcgtggatccgatatcaactagatcttgaga

SEQ ID NO: 4916 - DNA, 170 bp, Artificial sequence
  Kmt2d.416_Casp8.45
  crRNA array
cgatttcttggctttatatatcttgtggaaaggacgaaacaccgtaatttctactaagtgtagattaaacccccgggggaagggttaatttctactaagtgtagatctaccgagatcctgtgaatgttttttaagcttggcgtggatccgatatcaactagatcttgaga

SEQ ID NO: 4917 - DNA, 170 bp, Artificial sequence
  Kmt2d.416_Casp8.54
  crRNA array
cgatttcttggctttatatatcttgtggaaaggacgaaacaccgtaatttctactaagtgtagattaaacccccgggggaagggttaatttctactaagtgtagatcagtgcagtcgtcgtaagatttttttaagcttggcgtggatccgatatcaactagatcttgaga

SEQ ID NO: 4918 - DNA, 170 bp, Artificial sequence
  Kmt2d.416_Cbwd1.84
  crRNA array
cgatttcttggctttatatatcttgtggaaaggacgaaacaccgtaatttctactaagtgtagattaaacccccgggggaagggttaatttctactaagtgtagatcacagcaggtaacatgccgcttttttaagcttggcgtggatccgatatcaactagatcttgaga

SEQ ID NO: 4919 - DNA, 170 bp, Artificial sequence
  Kmt2d.416_Cbwd1.85
  crRNA array
cgatttcttggctttatatatcttgtggaaaggacgaaacaccgtaatttctactaagtgtagattaaacccccgggggaagggttaatttctactaagtgtagatacagcaggtaacatgccgccttttttaagcttggcgtggatccgatatcaactagatcttgaga

SEQ ID NO: 4920 - DNA, 170 bp, Artificial sequence
  Kmt2d.416_Cdh1.387
  crRNA array
cgatttcttggctttatatatcttgtggaaaggacgaaacaccgtaatttctactaagtgtagattaaacccccgggggaagggttaatttctactaagtgtagatctcggcgtctgccgggtccgttttttaagcttggcgtggatccgatatcaactagatcttgaga

SEQ ID NO: 4921 - DNA, 170 bp, Artificial sequence
  Kmt2d.416_Cdh1.58
  crRNA array
cgatttcttggctttatatatcttgtggaaaggacgaaacaccgtaatttctactaagtgtagattaaacccccgggggaagggttaatttctactaagtgtagatctcgtccgcgcccgggactcttttttaagcttggcgtggatccgatatcaactagatcttgaga

SEQ ID NO: 4922 - DNA, 170 bp, Artificial sequence
  Kmt2d.416_Cdkn2a.647
  crRNA array
cgatttcttggctttatatatcttgtggaaaggacgaaacaccgtaatttctactaagtgtagattaaacccccgggggaagggttaatttctactaagtgtagatgcaatcacgggagggagcagttttttaagcttggcgtggatccgatatcaactagatcttgaga

SEQ ID NO: 4923 - DNA, 170 bp, Artificial sequence
  Kmt2d.416_Cdkn2a.648
  crRNA array
cgatttcttggctttatatatcttgtggaaaggacgaaacaccgtaatttctactaagtgtagattaaacccccgggggaagggttaatttctactaagtgtagatcaatcacgggagggagcagattttttaagcttggcgtggatccgatatcaactagatcttgaga

SEQ ID NO: 4924 - DNA, 170 bp, Artificial sequence
  Kmt2d.416_Cic.162
  crRNA array
cgatttcttggctttatatatcttgtggaaaggacgaaacaccgtaatttctactaagtgtagattaaacccccgggggaagggttaatttctactaagtgtagatcgcaggcgcgcccggcggagttttttaagcttggcgtggatccgatatcaactagatcttgaga

SEQ ID NO: 4925 - DNA, 170 bp, Artificial sequence
  Kmt2d.416_Cic.164
  crRNA array
cgatttcttggctttatatatcttgtggaaaggacgaaacaccgtaatttctactaagtgtagattaaacccccgggggaagggttaatttctactaagtgtagatcgggccctgggccggcggctttttttaagcttggcgtggatccgatatcaactagatcttgaga

SEQ ID NO: 4926 - DNA, 170 bp, Artificial sequence
  Kmt2d.416_Ctcf.229
  crRNA array
cgatttcttggctttatatatcttgtggaaaggacgaaacaccgtaatttctactaagtgtagattaaacccccgggggaagggttaatttctactaagtgtagatggctggtggctgatagtctgttttttaagcttggcgtggatccgatatcaactagatcttgaga

SEQ ID NO: 4927 - DNA, 170 bp, Artificial sequence
  Kmt2d.416_Ctcf.809
  crRNA array
cgatttcttggctttatatatcttgtggaaaggacgaaacaccgtaatttctactaagtgtagattaaacccccgggggaagggttaatttctactaagtgtagataagcgctatcatgatcccaattttttaagcttggcgtggatccgatatcaactagatcttgaga

SEQ ID NO: 4928 - DNA, 170 bp, Artificial sequence
  Kmt2d.416_Elf3.826
  crRNA array
cgatttcttggctttatatatcttgtggaaaggacgaaacaccgtaatttctactaagtgtagattaaacccccgggggaagggttaatttctactaagtgtagattccgagacatcctaatccacttttttaagcttggcgtggatccgatatcaactagatcttgaga

SEQ ID NO: 4929 - DNA, 170 bp, Artificial sequence
  Kmt2d.416_Elf3.983
  crRNA array
cgatttcttggctttatatatcttgtggaaaggacgaaacaccgtaatttctactaagtgtagattaaacccccgggggaagggttaatttctactaagtgtagattaggccccctaactggaccattttttaagcttggcgtggatccgatatcaactagatcttgaga

SEQ ID NO: 4930 - DNA, 170 bp, Artificial sequence
  Kmt2d.416_Ep300.310
  crRNA array
cgatttcttggctttatatatcttgtggaaaggacgaaacaccgtaatttctactaagtgtagattaaacccccgggggaagggttaatttctactaagtgtagatatggtacgacagtgaggaagttttttaagcttggcgtggatccgatatcaactagatcttgaga

SEQ ID NO: 4931 - DNA, 170 bp, Artificial sequence
  Kmt2d.416_Ep300.587
  crRNA array
cgatttcttggctttatatatcttgtggaaaggacgaaacaccgtaatttctactaagtgtagattaaacccccgggggaagggttaatttctactaagtgtagatcgccccggggcccccaaccattttttaagcttggcgtggatccgatatcaactagatcttgaga

SEQ ID NO: 4932 - DNA, 170 bp, Artificial sequence
  Kmt2d.416_Epha2.126
  crRNA array
cgatttcttggctttatatatcttgtggaaaggacgaaacaccgtaatttctactaagtgtagattaaacccccgggggaagggttaatttctactaagtgtagatcctgtgccgccgcggccgccttttttaagcttggcgtggatccgatatcaactagatcttgaga

SEQ ID NO: 4933 - DNA, 170 bp, Artificial sequence
  Kmt2d.416_Epha2.5
  crRNA array
cgatttcttggctttatatatcttgtggaaaggacgaaacaccgtaatttctactaagtgtagattaaacccccgggggaagggttaatttctactaagtgtagatcatgagctggcgccacccggttttttaagcttggcgtggatccgatatcaactagatcttgaga

SEQ ID NO: 4934 - DNA, 170 bp, Artificial sequence
  Kmt2d.416_Fat1.105
  crRNA array
cgatttcttggctttatatatcttgtggaaaggacgaaacaccgtaatttctactaagtgtagattaaacccccgggggaagggttaatttctactaagtgtagataactcgaggtgacaacaagtttttttaagcttggcgtggatccgatatcaactagatcttgaga

SEQ ID NO: 4935 - DNA, 170 bp, Artificial sequence
  Kmt2d.416_Fat1.122
  crRNA array
cgatttcttggctttatatatcttgtggaaaggacgaaacaccgtaatttctactaagtgtagattaaacccccgggggaagggttaatttctactaagtgtagatccatcgacatggaaacgggattttttaagcttggcgtggatccgatatcaactagatcttgaga

SEQ ID NO: 4936 - DNA, 170 bp, Artificial sequence
  Kmt2d.416_Fbxw7.21
  crRNA array
cgatttcttggctttatatatcttgtggaaaggacgaaacaccgtaatttctactaagtgtagattaaacccccgggggaagggttaatttctactaagtgtagattaatgtgccgtagaaacccattttttaagcttggcgtggatccgatatcaactagatcttgaga

SEQ ID NO: 4937 - DNA, 170 bp, Artificial sequence
  Kmt2d.416_Fbxw7.23
  crRNA array
cgatttcttggctttatatatcttgtggaaaggacgaaacaccgtaatttctactaagtgtagattaaacccccgggggaagggttaatttctactaagtgtagatatgtgccgtagaaacccatattttttaagcttggcgtggatccgatatcaactagatcttgaga

SEQ ID NO: 4938 - DNA, 170 bp, Artificial sequence
  Kmt2d.416_Gata3.34
  crRNA array
cgatttcttggctttatatatcttgtggaaaggacgaaacaccgtaatttctactaagtgtagattaaacccccgggggaagggttaatttctactaagtgtagatctaaactatcccgcaaagatttttttaagcttggcgtggatccgatatcaactagatcttgaga

SEQ ID NO: 4939 - DNA, 170 bp, Artificial sequence
  Kmt2d.416_Gata3.47
  crRNA array
cgatttcttggctttatatatcttgtggaaaggacgaaacaccgtaatttctactaagtgtagattaaacccccgggggaagggttaatttctactaagtgtagatcgtagtaggacgggacgtggttttttaagcttggcgtggatccgatatcaactagatcttgaga

SEQ ID NO: 4940 - DNA, 170 bp, Artificial sequence
  Kmt2d.416_H2-Q2.1
  crRNA array
cgatttcttggctttatatatcttgtggaaaggacgaaacaccgtaatttctactaagtgtagattaaacccccgggggaagggttaatttctactaagtgtagatagggcggccaccaacagcagttttttaagcttggcgtggatccgatatcaactagatcttgaga

SEQ ID NO: 4941 - DNA, 170 bp, Artificial sequence
  Kmt2d.416_H2-Q2.2
  crRNA array
cgatttcttggctttatatatcttgtggaaaggacgaaacaccgtaatttctactaagtgtagattaaacccccgggggaagggttaatttctactaagtgtagattaacctgcgcccgctgctgattttttaagcttggcgtggatccgatatcaactagatcttgaga

SEQ ID NO: 4942 - DNA, 170 bp, Artificial sequence
  Kmt2d.416_Kdm5c.1878
  crRNA array
cgatttcttggctttatatatcttgtggaaaggacgaaacaccgtaatttctactaagtgtagattaaacccccgggggaagggttaatttctactaagtgtagatagagcacggcacccgcccccttttttaagcttggcgtggatccgatatcaactagatcttgaga

SEQ ID NO: 4943 - DNA, 170 bp, Artificial sequence
  Kmt2d.416_Kdm5c.1879
  crRNA array
cgatttcttggctttatatatcttgtggaaaggacgaaacaccgtaatttctactaagtgtagattaaacccccgggggaagggttaatttctactaagtgtagatgagcacggcacccgccccccttttttaagcttggcgtggatccgatatcaactagatcttgaga

SEQ ID NO: 4944 - DNA, 170 bp, Artificial sequence
  Kmt2d.416_Kdm6a.56
  crRNA array
cgatttcttggctttatatatcttgtggaaaggacgaaacaccgtaatttctactaagtgtagattaaacccccgggggaagggttaatttctactaagtgtagattcgctgccgcctctcgcggcttttttaagcttggcgtggatccgatatcaactagatcttgaga

SEQ ID NO: 4945 - DNA, 170 bp, Artificial sequence
  Kmt2d.416_Kdm6a.57
  crRNA array
cgatttcttggctttatatatcttgtggaaaggacgaaacaccgtaatttctactaagtgtagattaaacccccgggggaagggttaatttctactaagtgtagatcgctgccgcctctcgcggcattttttaagcttggcgtggatccgatatcaactagatcttgaga

SEQ ID NO: 4946 - DNA, 170 bp, Artificial sequence
  Kmt2d.416_Kmt2b.265
  crRNA array
cgatttcttggctttatatatcttgtggaaaggacgaaacaccgtaatttctactaagtgtagattaaacccccgggggaagggttaatttctactaagtgtagatccccaagtgaagcccacctgttttttaagcttggcgtggatccgatatcaactagatcttgaga

SEQ ID NO: 4947 - DNA, 170 bp, Artificial sequence
  Kmt2d.416_Kmt2b.298
  crRNA array
cgatttcttggctttatatatcttgtggaaaggacgaaacaccgtaatttctactaagtgtagattaaacccccgggggaagggttaatttctactaagtgtagattccggcagggaccggctggcttttttaagcttggcgtggatccgatatcaactagatcttgaga

SEQ ID NO: 4948 - DNA, 170 bp, Artificial sequence
  Kmt2d.416_Kmt2c.1962
  crRNA array
cgatttcttggctttatatatcttgtggaaaggacgaaacaccgtaatttctactaagtgtagattaaacccccgggggaagggttaatttctactaagtgtagatgtgacgatctgtgccacaagttttttaagcttggcgtggatccgatatcaactagatcttgaga

SEQ ID NO: 4949 - DNA, 170 bp, Artificial sequence
  Kmt2d.416_Kmt2c.2236
  crRNA array
cgatttcttggctttatatatcttgtggaaaggacgaaacaccgtaatttctactaagtgtagattaaacccccgggggaagggttaatttctactaagtgtagatactcgacctccacctccctattttttaagcttggcgtggatccgatatcaactagatcttgaga

SEQ ID NO: 4950 - DNA, 170 bp, Artificial sequence
  Kmt2d.416_Map2k4.119
  crRNA array
cgatttcttggctttatatatcttgtggaaaggacgaaacaccgtaatttctactaagtgtagattaaacccccgggggaagggttaatttctactaagtgtagattgctgtgtgggcggccacatttttttaagcttggcgtggatccgatatcaactagatcttgaga

SEQ ID NO: 4951 - DNA, 170 bp, Artificial sequence
  Kmt2d.416_Map2k4.1261
  crRNA array
cgatttcttggctttatatatcttgtggaaaggacgaaacaccgtaatttctactaagtgtagattaaacccccgggggaagggttaatttctactaagtgtagatgatgtagtaatgcggagtagttttttaagcttggcgtggatccgatatcaactagatcttgaga

SEQ ID NO: 4952 - DNA, 170 bp, Artificial sequence
  Kmt2d.416_Map3k1.235
  crRNA array
cgatttcttggctttatatatcttgtggaaaggacgaaacaccgtaatttctactaagtgtagattaaacccccgggggaagggttaatttctactaagtgtagataaaacgctactgatcgatcgttttttaagcttggcgtggatccgatatcaactagatcttgaga

SEQ ID NO: 4953 - DNA, 170 bp, Artificial sequence
  Kmt2d.416_Map3k1.3838
  crRNA array
cgatttcttggctttatatatcttgtggaaaggacgaaacaccgtaatttctactaagtgtagattaaacccccgggggaagggttaatttctactaagtgtagatccaacaacagggccccactattttttaagcttggcgtggatccgatatcaactagatcttgaga

SEQ ID NO: 4954 - DNA, 170 bp, Artificial sequence
  Kmt2d.416_Mga.1655
  crRNA array
cgatttcttggctttatatatcttgtggaaaggacgaaacaccgtaatttctactaagtgtagattaaacccccgggggaagggttaatttctactaagtgtagatcgagaagtggagagcatattttttttaagcttggcgtggatccgatatcaactagatcttgaga

SEQ ID NO: 4955 - DNA, 170 bp, Artificial sequence
  Kmt2d.416_Mga.93
  crRNA array
cgatttcttggctttatatatcttgtggaaaggacgaaacaccgtaatttctactaagtgtagattaaacccccgggggaagggttaatttctactaagtgtagatgagaaggctccccataatgtttttttaagcttggcgtggatccgatatcaactagatcttgaga

SEQ ID NO: 4956 - DNA, 170 bp, Artificial sequence
  Kmt2d.416_Nf1.746
  crRNA array
cgatttcttggctttatatatcttgtggaaaggacgaaacaccgtaatttctactaagtgtagattaaacccccgggggaagggttaatttctactaagtgtagattaagcataatgatgatgccattttttaagcttggcgtggatccgatatcaactagatcttgaga

SEQ ID NO: 4957 - DNA, 170 bp, Artificial sequence
  Kmt2d.416_Nf1.97
  crRNA array
cgatttcttggctttatatatcttgtggaaaggacgaaacaccgtaatttctactaagtgtagattaaacccccgggggaagggttaatttctactaagtgtagatagcccgctacatgctgatgcttttttaagcttggcgtggatccgatatcaactagatcttgaga

SEQ ID NO: 4958 - DNA, 170 bp, Artificial sequence
  Kmt2d.416_Nf2.356
  crRNA array
cgatttcttggctttatatatcttgtggaaaggacgaaacaccgtaatttctactaagtgtagattaaacccccgggggaagggttaatttctactaagtgtagatcggagtcatctgatagagatttttttaagcttggcgtggatccgatatcaactagatcttgaga

SEQ ID NO: 4959 - DNA, 170 bp, Artificial sequence
  Kmt2d.416_Nf2.768
  crRNA array
cgatttcttggctttatatatcttgtggaaaggacgaaacaccgtaatttctactaagtgtagattaaacccccgggggaagggttaatttctactaagtgtagatccgaagccccagtgtccggcttttttaagcttggcgtggatccgatatcaactagatcttgaga

SEQ ID NO: 4960 - DNA, 170 bp, Artificial sequence
  Kmt2d.416_Notch1.1849
  crRNA array
cgatttcttggctttatatatcttgtggaaaggacgaaacaccgtaatttctactaagtgtagattaaacccccgggggaagggttaatttctactaagtgtagatctggcgggtgggcggcgctgttttttaagcttggcgtggatccgatatcaactagatcttgaga

SEQ ID NO: 4961 - DNA, 170 bp, Artificial sequence
  Kmt2d.416_Notch1.649
  crRNA array
cgatttcttggctttatatatcttgtggaaaggacgaaacaccgtaatttctactaagtgtagattaaacccccgggggaagggttaatttctactaagtgtagattgggccaacgatgccaggacttttttaagcttggcgtggatccgatatcaactagatcttgaga

SEQ ID NO: 4962 - DNA, 170 bp, Artificial sequence
  Kmt2d.416_Nsd1.70
  crRNA array
cgatttcttggctttatatatcttgtggaaaggacgaaacaccgtaatttctactaagtgtagattaaacccccgggggaagggttaatttctactaagtgtagatactggtgtggacgatgcagattttttaagcttggcgtggatccgatatcaactagatcttgaga

SEQ ID NO: 4963 - DNA, 170 bp, Artificial sequence
  Kmt2d.416_Nsd1.90
  crRNA array
cgatttcttggctttatatatcttgtggaaaggacgaaacaccgtaatttctactaagtgtagattaaacccccgggggaagggttaatttctactaagtgtagataggagctaacggcaagaatgttttttaagcttggcgtggatccgatatcaactagatcttgaga

SEQ ID NO: 4964 - DNA, 170 bp, Artificial sequence
  Kmt2d.416_Pbrm1.1236
  crRNA array
cgatttcttggctttatatatcttgtggaaaggacgaaacaccgtaatttctactaagtgtagattaaacccccgggggaagggttaatttctactaagtgtagatgccgataaaaccaacagccgttttttaagcttggcgtggatccgatatcaactagatcttgaga

SEQ ID NO: 4965 - DNA, 170 bp, Artificial sequence
  Kmt2d.416_Pbrm1.969
  crRNA array
cgatttcttggctttatatatcttgtggaaaggacgaaacaccgtaatttctactaagtgtagattaaacccccgggggaagggttaatttctactaagtgtagatgagccctaatgaacagctcattttttaagcttggcgtggatccgatatcaactagatcttgaga

SEQ ID NO: 4966 - DNA, 170 bp, Artificial sequence
  Kmt2d.416_Pik3r1.76
  crRNA array
cgatttcttggctttatatatcttgtggaaaggacgaaacaccgtaatttctactaagtgtagattaaacccccgggggaagggttaatttctactaagtgtagataaaacctatacggcccgcacttttttaagcttggcgtggatccgatatcaactagatcttgaga

SEQ ID NO: 4967 - DNA, 170 bp, Artificial sequence
  Kmt2d.416_Pik3r1.77
  crRNA array
cgatttcttggctttatatatcttgtggaaaggacgaaacaccgtaatttctactaagtgtagattaaacccccgggggaagggttaatttctactaagtgtagataaacctatacggcccgcactttttttaagcttggcgtggatccgatatcaactagatcttgaga

SEQ ID NO: 4968 - DNA, 170 bp, Artificial sequence
  Kmt2d.416_Pten.240
  crRNA array
cgatttcttggctttatatatcttgtggaaaggacgaaacaccgtaatttctactaagtgtagattaaacccccgggggaagggttaatttctactaagtgtagattgcatacgctatagctgcttttttttaagcttggcgtggatccgatatcaactagatcttgaga

SEQ ID NO: 4969 - DNA, 170 bp, Artificial sequence
  Kmt2d.416_Pten.265
  crRNA array
cgatttcttggctttatatatcttgtggaaaggacgaaacaccgtaatttctactaagtgtagattaaacccccgggggaagggttaatttctactaagtgtagataagcgtggtgcgtgacgcacttttttaagcttggcgtggatccgatatcaactagatcttgaga

SEQ ID NO: 4970 - DNA, 170 bp, Artificial sequence
  Kmt2d.416_Rasa1.1478
  crRNA array
cgatttcttggctttatatatcttgtggaaaggacgaaacaccgtaatttctactaagtgtagattaaacccccgggggaagggttaatttctactaagtgtagatcgataatggtctatgatgtcttttttaagcttggcgtggatccgatatcaactagatcttgaga

SEQ ID NO: 4971 - DNA, 170 bp, Artificial sequence
  Kmt2d.416_Rasa1.223
  crRNA array
cgatttcttggctttatatatcttgtggaaaggacgaaacaccgtaatttctactaagtgtagattaaacccccgggggaagggttaatttctactaagtgtagattccatggagtatcgtgctcgttttttaagcttggcgtggatccgatatcaactagatcttgaga

SEQ ID NO: 4972 - DNA, 170 bp, Artificial sequence
  Kmt2d.416_Rb1.211
  crRNA array
cgatttcttggctttatatatcttgtggaaaggacgaaacaccgtaatttctactaagtgtagattaaacccccgggggaagggttaatttctactaagtgtagattctgacatgatcgggtacctttttttaagcttggcgtggatccgatatcaactagatcttgaga

SEQ ID NO: 4973 - DNA, 170 bp, Artificial sequence
  Kmt2d.416_Rb1.394
  crRNA array
cgatttcttggctttatatatcttgtggaaaggacgaaacaccgtaatttctactaagtgtagattaaacccccgggggaagggttaatttctactaagtgtagatagaaatctcgaagcaggatcttttttaagcttggcgtggatccgatatcaactagatcttgaga

SEQ ID NO: 4974 - DNA, 170 bp, Artificial sequence
  Kmt2d.416_Rbm10.5
  crRNA array
cgatttcttggctttatatatcttgtggaaaggacgaaacaccgtaatttctactaagtgtagattaaacccccgggggaagggttaatttctactaagtgtagatacgaaacctgaacccacacattttttaagcttggcgtggatccgatatcaactagatcttgaga

SEQ ID NO: 4975 - DNA, 170 bp, Artificial sequence
  Kmt2d.416_Rbm10.6
  crRNA array
cgatttcttggctttatatatcttgtggaaaggacgaaacaccgtaatttctactaagtgtagattaaacccccgggggaagggttaatttctactaagtgtagatcgaaacctgaacccacacagttttttaagcttggcgtggatccgatatcaactagatcttgaga

SEQ ID NO: 4976 - DNA, 170 bp, Artificial sequence
  Kmt2d.416_Rnf43.1920
  crRNA array
cgatttcttggctttatatatcttgtggaaaggacgaaacaccgtaatttctactaagtgtagattaaacccccgggggaagggttaatttctactaagtgtagatatccccgtgccgtggactccttttttaagcttggcgtggatccgatatcaactagatcttgaga

SEQ ID NO: 4977 - DNA, 170 bp, Artificial sequence
  Kmt2d.416_Rnf43.39
  crRNA array
cgatttcttggctttatatatcttgtggaaaggacgaaacaccgtaatttctactaagtgtagattaaacccccgggggaagggttaatttctactaagtgtagatcaaggggatcactctgataattttttaagcttggcgtggatccgatatcaactagatcttgaga

SEQ ID NO: 4978 - DNA, 170 bp, Artificial sequence
  Kmt2d.416_Runx1.204
  crRNA array
cgatttcttggctttatatatcttgtggaaaggacgaaacaccgtaatttctactaagtgtagattaaacccccgggggaagggttaatttctactaagtgtagattaaataagtccagccgttttttttttaagcttggcgtggatccgatatcaactagatcttgaga

SEQ ID NO: 4979 - DNA, 170 bp, Artificial sequence
  Kmt2d.416_Runx1.81
  crRNA array
cgatttcttggctttatatatcttgtggaaaggacgaaacaccgtaatttctactaagtgtagattaaacccccgggggaagggttaatttctactaagtgtagataggacgcgtatgggaattttttttttaagcttggcgtggatccgatatcaactagatcttgaga

SEQ ID NO: 4980 - DNA, 170 bp, Artificial sequence
  Kmt2d.416_Setd2.143
  crRNA array
cgatttcttggctttatatatcttgtggaaaggacgaaacaccgtaatttctactaagtgtagattaaacccccgggggaagggttaatttctactaagtgtagatgcacaaccacaacagactggttttttaagcttggcgtggatccgatatcaactagatcttgaga

SEQ ID NO: 4981 - DNA, 170 bp, Artificial sequence
  Kmt2d.416_Setd2.508
  crRNA array
cgatttcttggctttatatatcttgtggaaaggacgaaacaccgtaatttctactaagtgtagattaaacccccgggggaagggttaatttctactaagtgtagattacgatcccgagcacccgacttttttaagcttggcgtggatccgatatcaactagatcttgaga

SEQ ID NO: 4982 - DNA, 170 bp, Artificial sequence
  Kmt2d.416_Smad4.3038
  crRNA array
cgatttcttggctttatatatcttgtggaaaggacgaaacaccgtaatttctactaagtgtagattaaacccccgggggaagggttaatttctactaagtgtagatatctgcggcagtgtcaccggttttttaagcttggcgtggatccgatatcaactagatcttgaga

SEQ ID NO: 4983 - DNA, 170 bp, Artificial sequence
  Kmt2d.416_Smad4.39
  crRNA array
cgatttcttggctttatatatcttgtggaaaggacgaaacaccgtaatttctactaagtgtagattaaacccccgggggaagggttaatttctactaagtgtagatagtcaaacgcatactgacaattttttaagcttggcgtggatccgatatcaactagatcttgaga

SEQ ID NO: 4984 - DNA, 170 bp, Artificial sequence
  Kmt2d.416_Stag2.1409
  crRNA array
cgatttcttggctttatatatcttgtggaaaggacgaaacaccgtaatttctactaagtgtagattaaacccccgggggaagggttaatttctactaagtgtagatgctaataactgcggaagggcttttttaagcttggcgtggatccgatatcaactagatcttgaga

SEQ ID NO: 4985 - DNA, 170 bp, Artificial sequence
  Kmt2d.416_Stag2.4401
  crRNA array
cgatttcttggctttatatatcttgtggaaaggacgaaacaccgtaatttctactaagtgtagattaaacccccgggggaagggttaatttctactaagtgtagattaatcgtccagtggtgtatattttttaagcttggcgtggatccgatatcaactagatcttgaga

SEQ ID NO: 4986 - DNA, 170 bp, Artificial sequence
  Kmt2d.416_Tbl1xr1.1
  crRNA array
cgatttcttggctttatatatcttgtggaaaggacgaaacaccgtaatttctactaagtgtagattaaacccccgggggaagggttaatttctactaagtgtagatggatgcgcatactggtgaagttttttaagcttggcgtggatccgatatcaactagatcttgaga

SEQ ID NO: 4987 - DNA, 170 bp, Artificial sequence
  Kmt2d.416_Tbl1xr1.83
  crRNA array
cgatttcttggctttatatatcttgtggaaaggacgaaacaccgtaatttctactaagtgtagattaaacccccgggggaagggttaatttctactaagtgtagatatggtcgacccatcgagtctttttttaagcttggcgtggatccgatatcaactagatcttgaga

SEQ ID NO: 4988 - DNA, 170 bp, Artificial sequence
  Kmt2d.416_Tgfbr2.290
  crRNA array
cgatttcttggctttatatatcttgtggaaaggacgaaacaccgtaatttctactaagtgtagattaaacccccgggggaagggttaatttctactaagtgtagatcctctcggcgcccgggtaaattttttaagcttggcgtggatccgatatcaactagatcttgaga

SEQ ID NO: 4989 - DNA, 170 bp, Artificial sequence
  Kmt2d.416_Tgfbr2.292
  crRNA array
cgatttcttggctttatatatcttgtggaaaggacgaaacaccgtaatttctactaagtgtagattaaacccccgggggaagggttaatttctactaagtgtagatcccgggcgccgagagggaaattttttaagcttggcgtggatccgatatcaactagatcttgaga

SEQ ID NO: 4990 - DNA, 170 bp, Artificial sequence
  Kmt2d.416_Trp53.4
  crRNA array
cgatttcttggctttatatatcttgtggaaaggacgaaacaccgtaatttctactaagtgtagattaaacccccgggggaagggttaatttctactaagtgtagatccctgaactgcccccagggattttttaagcttggcgtggatccgatatcaactagatcttgaga

SEQ ID NO: 4991 - DNA, 170 bp, Artificial sequence
  Kmt2d.416_Trp53.528
  crRNA array
cgatttcttggctttatatatcttgtggaaaggacgaaacaccgtaatttctactaagtgtagattaaacccccgggggaagggttaatttctactaagtgtagatgctgggccagcagagacctgttttttaagcttggcgtggatccgatatcaactagatcttgaga

SEQ ID NO: 4992 - DNA, 170 bp, Artificial sequence
  Kmt2d.416_Vhl.1
  crRNA array
cgatttcttggctttatatatcttgtggaaaggacgaaacaccgtaatttctactaagtgtagattaaacccccgggggaagggttaatttctactaagtgtagatagggctcccggcggccatttttttttaagcttggcgtggatccgatatcaactagatcttgaga

SEQ ID NO: 4993 - DNA, 170 bp, Artificial sequence
  Kmt2d.416_Vhl.151
  crRNA array
cgatttcttggctttatatatcttgtggaaaggacgaaacaccgtaatttctactaagtgtagattaaacccccgggggaagggttaatttctactaagtgtagattagagcactcacccgagggattttttaagcttggcgtggatccgatatcaactagatcttgaga

SEQ ID NO: 4994 - DNA, 170 bp, Artificial sequence
  Kmt2d.416_Zc3h13.1387
  crRNA array
cgatttcttggctttatatatcttgtggaaaggacgaaacaccgtaatttctactaagtgtagattaaacccccgggggaagggttaatttctactaagtgtagatgtgacgccggtcatgtgactttttttaagcttggcgtggatccgatatcaactagatcttgaga

SEQ ID NO: 4995 - DNA, 170 bp, Artificial sequence
  Kmt2d.416_Zc3h13.1777
  crRNA array
cgatttcttggctttatatatcttgtggaaaggacgaaacaccgtaatttctactaagtgtagattaaacccccgggggaagggttaatttctactaagtgtagatgatgctgccagtgtagcggcttttttaagcttggcgtggatccgatatcaactagatcttgaga

SEQ ID NO: 4996 - DNA, 170 bp, Artificial sequence
  Map2k4.119_Acvr2a.155
  crRNA array
cgatttcttggctttatatatcttgtggaaaggacgaaacaccgtaatttctactaagtgtagattgctgtgtgggcggccacattaatttctactaagtgtagatggacctggctaatcaagtatttttttaagcttggcgtggatccgatatcaactagatcttgaga

SEQ ID NO: 4997 - DNA, 170 bp, Artificial sequence
  Map2k4.119_Acvr2a.70
  crRNA array
cgatttcttggctttatatatcttgtggaaaggacgaaacaccgtaatttctactaagtgtagattgctgtgtgggcggccacattaatttctactaagtgtagatcccgaggcgccggagaagccttttttaagcttggcgtggatccgatatcaactagatcttgaga

SEQ ID NO: 4998 - DNA, 170 bp, Artificial sequence
  Map2k4.119_Apc.21
  crRNA array
cgatttcttggctttatatatcttgtggaaaggacgaaacaccgtaatttctactaagtgtagattgctgtgtgggcggccacattaatttctactaagtgtagatgtgatccacacgtgtagctgttttttaagcttggcgtggatccgatatcaactagatcttgaga

SEQ ID NO: 4999 - DNA, 170 bp, Artificial sequence
  Map2k4.119_Apc.867
  crRNA array
cgatttcttggctttatatatcttgtggaaaggacgaaacaccgtaatttctactaagtgtagattgctgtgtgggcggccacattaatttctactaagtgtagatcagtcccaggcggcggaagcttttttaagcttggcgtggatccgatatcaactagatcttgaga

SEQ ID NO: 5000 - DNA, 170 bp, Artificial sequence
  Map2k4.119_Arid1a.2
  crRNA array
cgatttcttggctttatatatcttgtggaaaggacgaaacaccgtaatttctactaagtgtagattgctgtgtgggcggccacattaatttctactaagtgtagatcccgcgcccccgtcctggggttttttaagcttggcgtggatccgatatcaactagatcttgaga

SEQ ID NO: 5001 - DNA, 170 bp, Artificial sequence
  Map2k4.119_Arid1a.5
  crRNA array
cgatttcttggctttatatatcttgtggaaaggacgaaacaccgtaatttctactaagtgtagattgctgtgtgggcggccacattaatttctactaagtgtagatcccgcgctcggccgctgccgttttttaagcttggcgtggatccgatatcaactagatcttgaga

SEQ ID NO: 5002 - DNA, 170 bp, Artificial sequence
  Map2k4.119_Arid2.166
  crRNA array
cgatttcttggctttatatatcttgtggaaaggacgaaacaccgtaatttctactaagtgtagattgctgtgtgggcggccacattaatttctactaagtgtagataaccgcgatctgggttttttttttttaagcttggcgtggatccgatatcaactagatcttgaga

SEQ ID NO: 5003 - DNA, 170 bp, Artificial sequence
  Map2k4.119_Arid2.172
  crRNA array
cgatttcttggctttatatatcttgtggaaaggacgaaacaccgtaatttctactaagtgtagattgctgtgtgggcggccacattaatttctactaagtgtagatctggacgagctgcggcagttttttttaagcttggcgtggatccgatatcaactagatcttgaga

SEQ ID NO: 5004 - DNA, 170 bp, Artificial sequence
  Map2k4.119_Atm.120
  crRNA array
cgatttcttggctttatatatcttgtggaaaggacgaaacaccgtaatttctactaagtgtagattgctgtgtgggcggccacattaatttctactaagtgtagatgacaggtagtcggcagctaattttttaagcttggcgtggatccgatatcaactagatcttgaga

SEQ ID NO: 5005 - DNA, 170 bp, Artificial sequence
  Map2k4.119_Atm.997
  crRNA array
cgatttcttggctttatatatcttgtggaaaggacgaaacaccgtaatttctactaagtgtagattgctgtgtgggcggccacattaatttctactaagtgtagatgagaaagtctccgaatcgttttttttaagcttggcgtggatccgatatcaactagatcttgaga

SEQ ID NO: 5006 - DNA, 170 bp, Artificial sequence
  Map2k4.119_Atrx.249
  crRNA array
cgatttcttggctttatatatcttgtggaaaggacgaaacaccgtaatttctactaagtgtagattgctgtgtgggcggccacattaatttctactaagtgtagattagccagtcgctcatatctcttttttaagcttggcgtggatccgatatcaactagatcttgaga

SEQ ID NO: 5007 - DNA, 170 bp, Artificial sequence
  Map2k4.119_Atrx.251
  crRNA array
cgatttcttggctttatatatcttgtggaaaggacgaaacaccgtaatttctactaagtgtagattgctgtgtgggcggccacattaatttctactaagtgtagatgccagtcgctcatatctctgttttttaagcttggcgtggatccgatatcaactagatcttgaga

SEQ ID NO: 5008 - DNA, 170 bp, Artificial sequence
  Map2k4.119_Bcor.203
  crRNA array
cgatttcttggctttatatatcttgtggaaaggacgaaacaccgtaatttctactaagtgtagattgctgtgtgggcggccacattaatttctactaagtgtagatccccggagcggagtccaggcttttttaagcttggcgtggatccgatatcaactagatcttgaga

SEQ ID NO: 5009 - DNA, 170 bp, Artificial sequence
  Map2k4.119_Bcor.475
  crRNA array
cgatttcttggctttatatatcttgtggaaaggacgaaacaccgtaatttctactaagtgtagattgctgtgtgggcggccacattaatttctactaagtgtagattgcaacccctctgtatgggattttttaagcttggcgtggatccgatatcaactagatcttgaga

SEQ ID NO: 5010 - DNA, 170 bp, Artificial sequence
  Map2k4.119_Brca1.112
  crRNA array
cgatttcttggctttatatatcttgtggaaaggacgaaacaccgtaatttctactaagtgtagattgctgtgtgggcggccacattaatttctactaagtgtagatctagacgctctgtggagactttttttaagcttggcgtggatccgatatcaactagatcttgaga

SEQ ID NO: 5011 - DNA, 170 bp, Artificial sequence
  Map2k4.119_Brca1.53
  crRNA array
cgatttcttggctttatatatcttgtggaaaggacgaaacaccgtaatttctactaagtgtagattgctgtgtgggcggccacattaatttctactaagtgtagataatgaggaggcgtcgatcatttttttaagcttggcgtggatccgatatcaactagatcttgaga

SEQ ID NO: 5012 - DNA, 170 bp, Artificial sequence
  Map2k4.119_Casp8.45
  crRNA array
cgatttcttggctttatatatcttgtggaaaggacgaaacaccgtaatttctactaagtgtagattgctgtgtgggcggccacattaatttctactaagtgtagatctaccgagatcctgtgaatgttttttaagcttggcgtggatccgatatcaactagatcttgaga

SEQ ID NO: 5013 - DNA, 170 bp, Artificial sequence
  Map2k4.119_Casp8.54
  crRNA array
cgatttcttggctttatatatcttgtggaaaggacgaaacaccgtaatttctactaagtgtagattgctgtgtgggcggccacattaatttctactaagtgtagatcagtgcagtcgtcgtaagatttttttaagcttggcgtggatccgatatcaactagatcttgaga

SEQ ID NO: 5014 - DNA, 170 bp, Artificial sequence
  Map2k4.119_Cbwd1.84
  crRNA array
cgatttcttggctttatatatcttgtggaaaggacgaaacaccgtaatttctactaagtgtagattgctgtgtgggcggccacattaatttctactaagtgtagatcacagcaggtaacatgccgcttttttaagcttggcgtggatccgatatcaactagatcttgaga

SEQ ID NO: 5015 - DNA, 170 bp, Artificial sequence
  Map2k4.119_Cbwd1.85
  crRNA array
cgatttcttggctttatatatcttgtggaaaggacgaaacaccgtaatttctactaagtgtagattgctgtgtgggcggccacattaatttctactaagtgtagatacagcaggtaacatgccgccttttttaagcttggcgtggatccgatatcaactagatcttgaga

SEQ ID NO: 5016 - DNA, 170 bp, Artificial sequence
  Map2k4.119_Cdh1.387
  crRNA array
cgatttcttggctttatatatcttgtggaaaggacgaaacaccgtaatttctactaagtgtagattgctgtgtgggcggccacattaatttctactaagtgtagatctcggcgtctgccgggtccgttttttaagcttggcgtggatccgatatcaactagatcttgaga

SEQ ID NO: 5017 - DNA, 170 bp, Artificial sequence
  Map2k4.119_Cdh1.58
  crRNA array
cgatttcttggctttatatatcttgtggaaaggacgaaacaccgtaatttctactaagtgtagattgctgtgtgggcggccacattaatttctactaagtgtagatctcgtccgcgcccgggactcttttttaagcttggcgtggatccgatatcaactagatcttgaga

SEQ ID NO: 5018 - DNA, 170 bp, Artificial sequence
  Map2k4.119_Cdkn2a.647
  crRNA array
cgatttcttggctttatatatcttgtggaaaggacgaaacaccgtaatttctactaagtgtagattgctgtgtgggcggccacattaatttctactaagtgtagatgcaatcacgggagggagcagttttttaagcttggcgtggatccgatatcaactagatcttgaga

SEQ ID NO: 5019 - DNA, 170 bp, Artificial sequence
  Map2k4.119_Cdkn2a.648
  crRNA array
cgatttcttggctttatatatcttgtggaaaggacgaaacaccgtaatttctactaagtgtagattgctgtgtgggcggccacattaatttctactaagtgtagatcaatcacgggagggagcagattttttaagcttggcgtggatccgatatcaactagatcttgaga

SEQ ID NO: 5020 - DNA, 170 bp, Artificial sequence
  Map2k4.119_Cic.162
  crRNA array
cgatttcttggctttatatatcttgtggaaaggacgaaacaccgtaatttctactaagtgtagattgctgtgtgggcggccacattaatttctactaagtgtagatcgcaggcgcgcccggcggagttttttaagcttggcgtggatccgatatcaactagatcttgaga

SEQ ID NO: 5021 - DNA, 170 bp, Artificial sequence
  Map2k4.119_Cic.164
  crRNA array
cgatttcttggctttatatatcttgtggaaaggacgaaacaccgtaatttctactaagtgtagattgctgtgtgggcggccacattaatttctactaagtgtagatcgggccctgggccggcggctttttttaagcttggcgtggatccgatatcaactagatcttgaga

SEQ ID NO: 5022 - DNA, 170 bp, Artificial sequence
  Map2k4.119_Ctcf.229
  crRNA array
cgatttcttggctttatatatcttgtggaaaggacgaaacaccgtaatttctactaagtgtagattgctgtgtgggcggccacattaatttctactaagtgtagatggctggtggctgatagtctgttttttaagcttggcgtggatccgatatcaactagatcttgaga

SEQ ID NO: 5023 - DNA, 170 bp, Artificial sequence
  Map2k4.119_Ctcf.809
  crRNA array
cgatttcttggctttatatatcttgtggaaaggacgaaacaccgtaatttctactaagtgtagattgctgtgtgggcggccacattaatttctactaagtgtagataagcgctatcatgatcccaattttttaagcttggcgtggatccgatatcaactagatcttgaga

SEQ ID NO: 5024 - DNA, 170 bp, Artificial sequence
  Map2k4.119_Elf3.826
  crRNA array
cgatttcttggctttatatatcttgtggaaaggacgaaacaccgtaatttctactaagtgtagattgctgtgtgggcggccacattaatttctactaagtgtagattccgagacatcctaatccacttttttaagcttggcgtggatccgatatcaactagatcttgaga

SEQ ID NO: 5025 - DNA, 170 bp, Artificial sequence
  Map2k4.119_Elf3.983
  crRNA array
cgatttcttggctttatatatcttgtggaaaggacgaaacaccgtaatttctactaagtgtagattgctgtgtgggcggccacattaatttctactaagtgtagattaggccccctaactggaccattttttaagcttggcgtggatccgatatcaactagatcttgaga

SEQ ID NO: 5026 - DNA, 170 bp, Artificial sequence
  Map2k4.119_Ep300.310
  crRNA array
cgatttcttggctttatatatcttgtggaaaggacgaaacaccgtaatttctactaagtgtagattgctgtgtgggcggccacattaatttctactaagtgtagatatggtacgacagtgaggaagttttttaagcttggcgtggatccgatatcaactagatcttgaga

SEQ ID NO: 5027 - DNA, 170 bp, Artificial sequence
  Map2k4.119_Ep300.587
  crRNA array
cgatttcttggctttatatatcttgtggaaaggacgaaacaccgtaatttctactaagtgtagattgctgtgtgggcggccacattaatttctactaagtgtagatcgccccggggcccccaaccattttttaagcttggcgtggatccgatatcaactagatcttgaga

SEQ ID NO: 5028 - DNA, 170 bp, Artificial sequence
  Map2k4.119_Epha2.126
  crRNA array
cgatttcttggctttatatatcttgtggaaaggacgaaacaccgtaatttctactaagtgtagattgctgtgtgggcggccacattaatttctactaagtgtagatcctgtgccgccgcggccgccttttttaagcttggcgtggatccgatatcaactagatcttgaga

SEQ ID NO: 5029 - DNA, 170 bp, Artificial sequence
  Map2k4.119_Epha2.5
  crRNA array
cgatttcttggctttatatatcttgtggaaaggacgaaacaccgtaatttctactaagtgtagattgctgtgtgggcggccacattaatttctactaagtgtagatcatgagctggcgccacccggttttttaagcttggcgtggatccgatatcaactagatcttgaga

SEQ ID NO: 5030 - DNA, 170 bp, Artificial sequence
  Map2k4.119_Fat1.105
  crRNA array
cgatttcttggctttatatatcttgtggaaaggacgaaacaccgtaatttctactaagtgtagattgctgtgtgggcggccacattaatttctactaagtgtagataactcgaggtgacaacaagtttttttaagcttggcgtggatccgatatcaactagatcttgaga

SEQ ID NO: 5031 - DNA, 170 bp, Artificial sequence
  Map2k4.119_Fat1.122
  crRNA array
cgatttcttggctttatatatcttgtggaaaggacgaaacaccgtaatttctactaagtgtagattgctgtgtgggcggccacattaatttctactaagtgtagatccatcgacatggaaacgggattttttaagcttggcgtggatccgatatcaactagatcttgaga

SEQ ID NO: 5032 - DNA, 170 bp, Artificial sequence
  Map2k4.119_Fbxw7.21
  crRNA array
cgatttcttggctttatatatcttgtggaaaggacgaaacaccgtaatttctactaagtgtagattgctgtgtgggcggccacattaatttctactaagtgtagattaatgtgccgtagaaacccattttttaagcttggcgtggatccgatatcaactagatcttgaga

SEQ ID NO: 5033 - DNA, 170 bp, Artificial sequence
  Map2k4.119_Fbxw7.23
  crRNA array
cgatttcttggctttatatatcttgtggaaaggacgaaacaccgtaatttctactaagtgtagattgctgtgtgggcggccacattaatttctactaagtgtagatatgtgccgtagaaacccatattttttaagcttggcgtggatccgatatcaactagatcttgaga

SEQ ID NO: 5034 - DNA, 170 bp, Artificial sequence
  Map2k4.119_Gata3.34
  crRNA array
cgatttcttggctttatatatcttgtggaaaggacgaaacaccgtaatttctactaagtgtagattgctgtgtgggcggccacattaatttctactaagtgtagatctaaactatcccgcaaagatttttttaagcttggcgtggatccgatatcaactagatcttgaga

SEQ ID NO: 5035 - DNA, 170 bp, Artificial sequence
  Map2k4.119_Gata3.47
  crRNA array
cgatttcttggctttatatatcttgtggaaaggacgaaacaccgtaatttctactaagtgtagattgctgtgtgggcggccacattaatttctactaagtgtagatcgtagtaggacgggacgtggttttttaagcttggcgtggatccgatatcaactagatcttgaga

SEQ ID NO: 5036 - DNA, 170 bp, Artificial sequence
  Map2k4.119_H2-Q2.1
  crRNA array
cgatttcttggctttatatatcttgtggaaaggacgaaacaccgtaatttctactaagtgtagattgctgtgtgggcggccacattaatttctactaagtgtagatagggcggccaccaacagcagttttttaagcttggcgtggatccgatatcaactagatcttgaga

SEQ ID NO: 5037 - DNA, 170 bp, Artificial sequence
  Map2k4.119_H2-Q2.2
  crRNA array
cgatttcttggctttatatatcttgtggaaaggacgaaacaccgtaatttctactaagtgtagattgctgtgtgggcggccacattaatttctactaagtgtagattaacctgcgcccgctgctgattttttaagcttggcgtggatccgatatcaactagatcttgaga

SEQ ID NO: 5038 - DNA, 170 bp, Artificial sequence
  Map2k4.119_Kdm5c.1878
  crRNA array
cgatttcttggctttatatatcttgtggaaaggacgaaacaccgtaatttctactaagtgtagattgctgtgtgggcggccacattaatttctactaagtgtagatagagcacggcacccgcccccttttttaagcttggcgtggatccgatatcaactagatcttgaga

SEQ ID NO: 5039 - DNA, 170 bp, Artificial sequence
  Map2k4.119_Kdm5c.1879
  crRNA array
cgatttcttggctttatatatcttgtggaaaggacgaaacaccgtaatttctactaagtgtagattgctgtgtgggcggccacattaatttctactaagtgtagatgagcacggcacccgccccccttttttaagcttggcgtggatccgatatcaactagatcttgaga

SEQ ID NO: 5040 - DNA, 170 bp, Artificial sequence
  Map2k4.119_Kdm6a.56
  crRNA array
cgatttcttggctttatatatcttgtggaaaggacgaaacaccgtaatttctactaagtgtagattgctgtgtgggcggccacattaatttctactaagtgtagattcgctgccgcctctcgcggcttttttaagcttggcgtggatccgatatcaactagatcttgaga

SEQ ID NO: 5041 - DNA, 170 bp, Artificial sequence
  Map2k4.119_Kdm6a.57
  crRNA array
cgatttcttggctttatatatcttgtggaaaggacgaaacaccgtaatttctactaagtgtagattgctgtgtgggcggccacattaatttctactaagtgtagatcgctgccgcctctcgcggcattttttaagcttggcgtggatccgatatcaactagatcttgaga

SEQ ID NO: 5042 - DNA, 170 bp, Artificial sequence
  Map2k4.119_Kmt2b.265
  crRNA array
cgatttcttggctttatatatcttgtggaaaggacgaaacaccgtaatttctactaagtgtagattgctgtgtgggcggccacattaatttctactaagtgtagatccccaagtgaagcccacctgttttttaagcttggcgtggatccgatatcaactagatcttgaga

SEQ ID NO: 5043 - DNA, 170 bp, Artificial sequence
  Map2k4.119_Kmt2b.298
  crRNA array
cgatttcttggctttatatatcttgtggaaaggacgaaacaccgtaatttctactaagtgtagattgctgtgtgggcggccacattaatttctactaagtgtagattccggcagggaccggctggcttttttaagcttggcgtggatccgatatcaactagatcttgaga

SEQ ID NO: 5044 - DNA, 170 bp, Artificial sequence
  Map2k4.119_Kmt2c.1962
  crRNA array
cgatttcttggctttatatatcttgtggaaaggacgaaacaccgtaatttctactaagtgtagattgctgtgtgggcggccacattaatttctactaagtgtagatgtgacgatctgtgccacaagttttttaagcttggcgtggatccgatatcaactagatcttgaga

SEQ ID NO: 5045 - DNA, 170 bp, Artificial sequence
  Map2k4.119_Kmt2c.2236
  crRNA array
cgatttcttggctttatatatcttgtggaaaggacgaaacaccgtaatttctactaagtgtagattgctgtgtgggcggccacattaatttctactaagtgtagatactcgacctccacctccctattttttaagcttggcgtggatccgatatcaactagatcttgaga

SEQ ID NO: 5046 - DNA, 170 bp, Artificial sequence
  Map2k4.119_Kmt2d.316
  crRNA array
cgatttcttggctttatatatcttgtggaaaggacgaaacaccgtaatttctactaagtgtagattgctgtgtgggcggccacattaatttctactaagtgtagatactccaggccacccaggtggttttttaagcttggcgtggatccgatatcaactagatcttgaga

SEQ ID NO: 5047 - DNA, 170 bp, Artificial sequence
  Map2k4.119_Kmt2d.416
  crRNA array
cgatttcttggctttatatatcttgtggaaaggacgaaacaccgtaatttctactaagtgtagattgctgtgtgggcggccacattaatttctactaagtgtagattaaacccccgggggaagggtttttttaagcttggcgtggatccgatatcaactagatcttgaga

SEQ ID NO: 5048 - DNA, 170 bp, Artificial sequence
  Map2k4.119_Map3k1.235
  crRNA array
cgatttcttggctttatatatcttgtggaaaggacgaaacaccgtaatttctactaagtgtagattgctgtgtgggcggccacattaatttctactaagtgtagataaaacgctactgatcgatcgttttttaagcttggcgtggatccgatatcaactagatcttgaga

SEQ ID NO: 5049 - DNA, 170 bp, Artificial sequence
  Map2k4.119_Map3k1.3838
  crRNA array
cgatttcttggctttatatatcttgtggaaaggacgaaacaccgtaatttctactaagtgtagattgctgtgtgggcggccacattaatttctactaagtgtagatccaacaacagggccccactattttttaagcttggcgtggatccgatatcaactagatcttgaga

SEQ ID NO: 5050 - DNA, 170 bp, Artificial sequence
  Map2k4.119_Mga.1655
  crRNA array
cgatttcttggctttatatatcttgtggaaaggacgaaacaccgtaatttctactaagtgtagattgctgtgtgggcggccacattaatttctactaagtgtagatcgagaagtggagagcatattttttttaagcttggcgtggatccgatatcaactagatcttgaga

SEQ ID NO: 5051 - DNA, 170 bp, Artificial sequence
  Map2k4.119_Mga.93
  crRNA array
cgatttcttggctttatatatcttgtggaaaggacgaaacaccgtaatttctactaagtgtagattgctgtgtgggcggccacattaatttctactaagtgtagatgagaaggctccccataatgtttttttaagcttggcgtggatccgatatcaactagatcttgaga

SEQ ID NO: 5052 - DNA, 170 bp, Artificial sequence
  Map2k4.119_Nf1.746
  crRNA array
cgatttcttggctttatatatcttgtggaaaggacgaaacaccgtaatttctactaagtgtagattgctgtgtgggcggccacattaatttctactaagtgtagattaagcataatgatgatgccattttttaagcttggcgtggatccgatatcaactagatcttgaga

SEQ ID NO: 5053 - DNA, 170 bp, Artificial sequence
  Map2k4.119_Nf1.97
  crRNA array
cgatttcttggctttatatatcttgtggaaaggacgaaacaccgtaatttctactaagtgtagattgctgtgtgggcggccacattaatttctactaagtgtagatagcccgctacatgctgatgcttttttaagcttggcgtggatccgatatcaactagatcttgaga

SEQ ID NO: 5054 - DNA, 170 bp, Artificial sequence
  Map2k4.119_Nf2.356
  crRNA array
cgatttcttggctttatatatcttgtggaaaggacgaaacaccgtaatttctactaagtgtagattgctgtgtgggcggccacattaatttctactaagtgtagatcggagtcatctgatagagatttttttaagcttggcgtggatccgatatcaactagatcttgaga

SEQ ID NO: 5055 - DNA, 170 bp, Artificial sequence
  Map2k4.119_Nf2.768
  crRNA array
cgatttcttggctttatatatcttgtggaaaggacgaaacaccgtaatttctactaagtgtagattgctgtgtgggcggccacattaatttctactaagtgtagatccgaagccccagtgtccggcttttttaagcttggcgtggatccgatatcaactagatcttgaga

SEQ ID NO: 5056 - DNA, 170 bp, Artificial sequence
  Map2k4.119_Notch1.1849
  crRNA array
cgatttcttggctttatatatcttgtggaaaggacgaaacaccgtaatttctactaagtgtagattgctgtgtgggcggccacattaatttctactaagtgtagatctggcgggtgggcggcgctgttttttaagcttggcgtggatccgatatcaactagatcttgaga

SEQ ID NO: 5057 - DNA, 170 bp, Artificial sequence
  Map2k4.119_Notch1.649
  crRNA array
cgatttcttggctttatatatcttgtggaaaggacgaaacaccgtaatttctactaagtgtagattgctgtgtgggcggccacattaatttctactaagtgtagattgggccaacgatgccaggacttttttaagcttggcgtggatccgatatcaactagatcttgaga

SEQ ID NO: 5058 - DNA, 170 bp, Artificial sequence
  Map2k4.119_Nsd1.70
  crRNA array
cgatttcttggctttatatatcttgtggaaaggacgaaacaccgtaatttctactaagtgtagattgctgtgtgggcggccacattaatttctactaagtgtagatactggtgtggacgatgcagattttttaagcttggcgtggatccgatatcaactagatcttgaga

SEQ ID NO: 5059 - DNA, 170 bp, Artificial sequence
  Map2k4.119_Nsd1.90
  crRNA array
cgatttcttggctttatatatcttgtggaaaggacgaaacaccgtaatttctactaagtgtagattgctgtgtgggcggccacattaatttctactaagtgtagataggagctaacggcaagaatgttttttaagcttggcgtggatccgatatcaactagatcttgaga

SEQ ID NO: 5060 - DNA, 170 bp, Artificial sequence
  Map2k4.119_Pbrm1.1236
  crRNA array
cgatttcttggctttatatatcttgtggaaaggacgaaacaccgtaatttctactaagtgtagattgctgtgtgggcggccacattaatttctactaagtgtagatgccgataaaaccaacagccgttttttaagcttggcgtggatccgatatcaactagatcttgaga

SEQ ID NO: 5061 - DNA, 170 bp, Artificial sequence
  Map2k4.119_Pbrm1.969
  crRNA array
cgatttcttggctttatatatcttgtggaaaggacgaaacaccgtaatttctactaagtgtagattgctgtgtgggcggccacattaatttctactaagtgtagatgagccctaatgaacagctcattttttaagcttggcgtggatccgatatcaactagatcttgaga

SEQ ID NO: 5062 - DNA, 170 bp, Artificial sequence
  Map2k4.119_Pik3r1.76
  crRNA array
cgatttcttggctttatatatcttgtggaaaggacgaaacaccgtaatttctactaagtgtagattgctgtgtgggcggccacattaatttctactaagtgtagataaaacctatacggcccgcacttttttaagcttggcgtggatccgatatcaactagatcttgaga

SEQ ID NO: 5063 - DNA, 170 bp, Artificial sequence
  Map2k4.119_Pik3r1.77
  crRNA array
cgatttcttggctttatatatcttgtggaaaggacgaaacaccgtaatttctactaagtgtagattgctgtgtgggcggccacattaatttctactaagtgtagataaacctatacggcccgcactttttttaagcttggcgtggatccgatatcaactagatcttgaga

SEQ ID NO: 5064 - DNA, 170 bp, Artificial sequence
  Map2k4.119_Pten.240
  crRNA array
cgatttcttggctttatatatcttgtggaaaggacgaaacaccgtaatttctactaagtgtagattgctgtgtgggcggccacattaatttctactaagtgtagattgcatacgctatagctgcttttttttaagcttggcgtggatccgatatcaactagatcttgaga

SEQ ID NO: 5065 - DNA, 170 bp, Artificial sequence
  Map2k4.119_Pten.265
  crRNA array
cgatttcttggctttatatatcttgtggaaaggacgaaacaccgtaatttctactaagtgtagattgctgtgtgggcggccacattaatttctactaagtgtagataagcgtggtgcgtgacgcacttttttaagcttggcgtggatccgatatcaactagatcttgaga

SEQ ID NO: 5066 - DNA, 170 bp, Artificial sequence
  Map2k4.119_Rasa1.1478
  crRNA array
cgatttcttggctttatatatcttgtggaaaggacgaaacaccgtaatttctactaagtgtagattgctgtgtgggcggccacattaatttctactaagtgtagatcgataatggtctatgatgtcttttttaagcttggcgtggatccgatatcaactagatcttgaga

SEQ ID NO: 5067 - DNA, 170 bp, Artificial sequence
  Map2k4.119_Rasa1.223
  crRNA array
cgatttcttggctttatatatcttgtggaaaggacgaaacaccgtaatttctactaagtgtagattgctgtgtgggcggccacattaatttctactaagtgtagattccatggagtatcgtgctcgttttttaagcttggcgtggatccgatatcaactagatcttgaga

SEQ ID NO: 5068 - DNA, 170 bp, Artificial sequence
  Map2k4.119_Rb1.211
  crRNA array
cgatttcttggctttatatatcttgtggaaaggacgaaacaccgtaatttctactaagtgtagattgctgtgtgggcggccacattaatttctactaagtgtagattctgacatgatcgggtacctttttttaagcttggcgtggatccgatatcaactagatcttgaga

SEQ ID NO: 5069 - DNA, 170 bp, Artificial sequence
  Map2k4.119_Rb1.394
  crRNA array
cgatttcttggctttatatatcttgtggaaaggacgaaacaccgtaatttctactaagtgtagattgctgtgtgggcggccacattaatttctactaagtgtagatagaaatctcgaagcaggatcttttttaagcttggcgtggatccgatatcaactagatcttgaga

SEQ ID NO: 5070 - DNA, 170 bp, Artificial sequence
  Map2k4.119_Rbm10.5
  crRNA array
cgatttcttggctttatatatcttgtggaaaggacgaaacaccgtaatttctactaagtgtagattgctgtgtgggcggccacattaatttctactaagtgtagatacgaaacctgaacccacacattttttaagcttggcgtggatccgatatcaactagatcttgaga

SEQ ID NO: 5071 - DNA, 170 bp, Artificial sequence
  Map2k4.119_Rbm10.6
  crRNA array
cgatttcttggctttatatatcttgtggaaaggacgaaacaccgtaatttctactaagtgtagattgctgtgtgggcggccacattaatttctactaagtgtagatcgaaacctgaacccacacagttttttaagcttggcgtggatccgatatcaactagatcttgaga

SEQ ID NO: 5072 - DNA, 170 bp, Artificial sequence
  Map2k4.119_Rnf43.1920
  crRNA array
cgatttcttggctttatatatcttgtggaaaggacgaaacaccgtaatttctactaagtgtagattgctgtgtgggcggccacattaatttctactaagtgtagatatccccgtgccgtggactccttttttaagcttggcgtggatccgatatcaactagatcttgaga

SEQ ID NO: 5073 - DNA, 170 bp, Artificial sequence
  Map2k4.119_Rnf43.39
  crRNA array
cgatttcttggctttatatatcttgtggaaaggacgaaacaccgtaatttctactaagtgtagattgctgtgtgggcggccacattaatttctactaagtgtagatcaaggggatcactctgataattttttaagcttggcgtggatccgatatcaactagatcttgaga

SEQ ID NO: 5074 - DNA, 170 bp, Artificial sequence
  Map2k4.119_Runx1.204
  crRNA array
cgatttcttggctttatatatcttgtggaaaggacgaaacaccgtaatttctactaagtgtagattgctgtgtgggcggccacattaatttctactaagtgtagattaaataagtccagccgttttttttttaagcttggcgtggatccgatatcaactagatcttgaga

SEQ ID NO: 5075 - DNA, 170 bp, Artificial sequence
  Map2k4.119_Runx1.81
  crRNA array
cgatttcttggctttatatatcttgtggaaaggacgaaacaccgtaatttctactaagtgtagattgctgtgtgggcggccacattaatttctactaagtgtagataggacgcgtatgggaattttttttttaagcttggcgtggatccgatatcaactagatcttgaga

SEQ ID NO: 5076 - DNA, 170 bp, Artificial sequence
  Map2k4.119_Setd2.143
  crRNA array
cgatttcttggctttatatatcttgtggaaaggacgaaacaccgtaatttctactaagtgtagattgctgtgtgggcggccacattaatttctactaagtgtagatgcacaaccacaacagactggttttttaagcttggcgtggatccgatatcaactagatcttgaga

SEQ ID NO: 5077 - DNA, 170 bp, Artificial sequence
  Map2k4.119_Setd2.508
  crRNA array
cgatttcttggctttatatatcttgtggaaaggacgaaacaccgtaatttctactaagtgtagattgctgtgtgggcggccacattaatttctactaagtgtagattacgatcccgagcacccgacttttttaagcttggcgtggatccgatatcaactagatcttgaga

SEQ ID NO: 5078 - DNA, 170 bp, Artificial sequence
  Map2k4.119_Smad4.3038
  crRNA array
cgatttcttggctttatatatcttgtggaaaggacgaaacaccgtaatttctactaagtgtagattgctgtgtgggcggccacattaatttctactaagtgtagatatctgcggcagtgtcaccggttttttaagcttggcgtggatccgatatcaactagatcttgaga

SEQ ID NO: 5079 - DNA, 170 bp, Artificial sequence
  Map2k4.119_Smad4.39
  crRNA array
cgatttcttggctttatatatcttgtggaaaggacgaaacaccgtaatttctactaagtgtagattgctgtgtgggcggccacattaatttctactaagtgtagatagtcaaacgcatactgacaattttttaagcttggcgtggatccgatatcaactagatcttgaga

SEQ ID NO: 5080 - DNA, 170 bp, Artificial sequence
  Map2k4.119_Stag2.1409
  crRNA array
cgatttcttggctttatatatcttgtggaaaggacgaaacaccgtaatttctactaagtgtagattgctgtgtgggcggccacattaatttctactaagtgtagatgctaataactgcggaagggcttttttaagcttggcgtggatccgatatcaactagatcttgaga

SEQ ID NO: 5081 - DNA, 170 bp, Artificial sequence
  Map2k4.119_Stag2.4401
  crRNA array
cgatttcttggctttatatatcttgtggaaaggacgaaacaccgtaatttctactaagtgtagattgctgtgtgggcggccacattaatttctactaagtgtagattaatcgtccagtggtgtatattttttaagcttggcgtggatccgatatcaactagatcttgaga

SEQ ID NO: 5082 - DNA, 170 bp, Artificial sequence
  Map2k4.119_Tbl1xr1.1
  crRNA array
cgatttcttggctttatatatcttgtggaaaggacgaaacaccgtaatttctactaagtgtagattgctgtgtgggcggccacattaatttctactaagtgtagatggatgcgcatactggtgaagttttttaagcttggcgtggatccgatatcaactagatcttgaga

SEQ ID NO: 5083 - DNA, 170 bp, Artificial sequence
  Map2k4.119_Tbl1xr1.83
  crRNA array
cgatttcttggctttatatatcttgtggaaaggacgaaacaccgtaatttctactaagtgtagattgctgtgtgggcggccacattaatttctactaagtgtagatatggtcgacccatcgagtctttttttaagcttggcgtggatccgatatcaactagatcttgaga

SEQ ID NO: 5084 - DNA, 170 bp, Artificial sequence
  Map2k4.119_Tgfbr2.290
  crRNA array
cgatttcttggctttatatatcttgtggaaaggacgaaacaccgtaatttctactaagtgtagattgctgtgtgggcggccacattaatttctactaagtgtagatcctctcggcgcccgggtaaattttttaagcttggcgtggatccgatatcaactagatcttgaga

SEQ ID NO: 5085 - DNA, 170 bp, Artificial sequence
  Map2k4.119_Tgfbr2.292
  crRNA array
cgatttcttggctttatatatcttgtggaaaggacgaaacaccgtaatttctactaagtgtagattgctgtgtgggcggccacattaatttctactaagtgtagatcccgggcgccgagagggaaattttttaagcttggcgtggatccgatatcaactagatcttgaga

SEQ ID NO: 5086 - DNA, 170 bp, Artificial sequence
  Map2k4.119_Trp53.4
  crRNA array
cgatttcttggctttatatatcttgtggaaaggacgaaacaccgtaatttctactaagtgtagattgctgtgtgggcggccacattaatttctactaagtgtagatccctgaactgcccccagggattttttaagcttggcgtggatccgatatcaactagatcttgaga

SEQ ID NO: 5087 - DNA, 170 bp, Artificial sequence
  Map2k4.119_Trp53.528
  crRNA array
cgatttcttggctttatatatcttgtggaaaggacgaaacaccgtaatttctactaagtgtagattgctgtgtgggcggccacattaatttctactaagtgtagatgctgggccagcagagacctgttttttaagcttggcgtggatccgatatcaactagatcttgaga

SEQ ID NO: 5088 - DNA, 170 bp, Artificial sequence
  Map2k4.119_Vhl.1
  crRNA array
cgatttcttggctttatatatcttgtggaaaggacgaaacaccgtaatttctactaagtgtagattgctgtgtgggcggccacattaatttctactaagtgtagatagggctcccggcggccatttttttttaagcttggcgtggatccgatatcaactagatcttgaga

SEQ ID NO: 5089 - DNA, 170 bp, Artificial sequence
  Map2k4.119_Vhl.151
  crRNA array
cgatttcttggctttatatatcttgtggaaaggacgaaacaccgtaatttctactaagtgtagattgctgtgtgggcggccacattaatttctactaagtgtagattagagcactcacccgagggattttttaagcttggcgtggatccgatatcaactagatcttgaga

SEQ ID NO: 5090 - DNA, 170 bp, Artificial sequence
  Map2k4.119_Zc3h13.1387
  crRNA array
cgatttcttggctttatatatcttgtggaaaggacgaaacaccgtaatttctactaagtgtagattgctgtgtgggcggccacattaatttctactaagtgtagatgtgacgccggtcatgtgactttttttaagcttggcgtggatccgatatcaactagatcttgaga

SEQ ID NO: 5091 - DNA, 170 bp, Artificial sequence
  Map2k4.119_Zc3h13.1777
  crRNA array
cgatttcttggctttatatatcttgtggaaaggacgaaacaccgtaatttctactaagtgtagattgctgtgtgggcggccacattaatttctactaagtgtagatgatgctgccagtgtagcggcttttttaagcttggcgtggatccgatatcaactagatcttgaga

SEQ ID NO: 5092 - DNA, 170 bp, Artificial sequence
  Map2k4.1261_Acvr2a.155
  crRNA array
cgatttcttggctttatatatcttgtggaaaggacgaaacaccgtaatttctactaagtgtagatgatgtagtaatgcggagtagtaatttctactaagtgtagatggacctggctaatcaagtatttttttaagcttggcgtggatccgatatcaactagatcttgaga

SEQ ID NO: 5093 - DNA, 170 bp, Artificial sequence
  Map2k4.1261_Acvr2a.70
  crRNA array
cgatttcttggctttatatatcttgtggaaaggacgaaacaccgtaatttctactaagtgtagatgatgtagtaatgcggagtagtaatttctactaagtgtagatcccgaggcgccggagaagccttttttaagcttggcgtggatccgatatcaactagatcttgaga

SEQ ID NO: 5094 - DNA, 170 bp, Artificial sequence
  Map2k4.1261_Apc.21
  crRNA array
cgatttcttggctttatatatcttgtggaaaggacgaaacaccgtaatttctactaagtgtagatgatgtagtaatgcggagtagtaatttctactaagtgtagatgtgatccacacgtgtagctgttttttaagcttggcgtggatccgatatcaactagatcttgaga

SEQ ID NO: 5095 - DNA, 170 bp, Artificial sequence
  Map2k4.1261_Apc.867
  crRNA array
cgatttcttggctttatatatcttgtggaaaggacgaaacaccgtaatttctactaagtgtagatgatgtagtaatgcggagtagtaatttctactaagtgtagatcagtcccaggcggcggaagcttttttaagcttggcgtggatccgatatcaactagatcttgaga

SEQ ID NO: 5096 - DNA, 170 bp, Artificial sequence
  Map2k4.1261_Arid1a.2
  crRNA array
cgatttcttggctttatatatcttgtggaaaggacgaaacaccgtaatttctactaagtgtagatgatgtagtaatgcggagtagtaatttctactaagtgtagatcccgcgcccccgtcctggggttttttaagcttggcgtggatccgatatcaactagatcttgaga

SEQ ID NO: 5097 - DNA, 170 bp, Artificial sequence
  Map2k4.1261_Arid1a.5
  crRNA array
cgatttcttggctttatatatcttgtggaaaggacgaaacaccgtaatttctactaagtgtagatgatgtagtaatgcggagtagtaatttctactaagtgtagatcccgcgctcggccgctgccgttttttaagcttggcgtggatccgatatcaactagatcttgaga

SEQ ID NO: 5098 - DNA, 170 bp, Artificial sequence
  Map2k4.1261_Arid2.166
  crRNA array
cgatttcttggctttatatatcttgtggaaaggacgaaacaccgtaatttctactaagtgtagatgatgtagtaatgcggagtagtaatttctactaagtgtagataaccgcgatctgggttttttttttttaagcttggcgtggatccgatatcaactagatcttgaga

SEQ ID NO: 5099 - DNA, 170 bp, Artificial sequence
  Map2k4.1261_Arid2.172
  crRNA array
cgatttcttggctttatatatcttgtggaaaggacgaaacaccgtaatttctactaagtgtagatgatgtagtaatgcggagtagtaatttctactaagtgtagatctggacgagctgcggcagttttttttaagcttggcgtggatccgatatcaactagatcttgaga

SEQ ID NO: 5100 - DNA, 170 bp, Artificial sequence
  Map2k4.1261_Atm.120
  crRNA array
cgatttcttggctttatatatcttgtggaaaggacgaaacaccgtaatttctactaagtgtagatgatgtagtaatgcggagtagtaatttctactaagtgtagatgacaggtagtcggcagctaattttttaagcttggcgtggatccgatatcaactagatcttgaga

SEQ ID NO: 5101 - DNA, 170 bp, Artificial sequence
  Map2k4.1261_Atm.997
  crRNA array
cgatttcttggctttatatatcttgtggaaaggacgaaacaccgtaatttctactaagtgtagatgatgtagtaatgcggagtagtaatttctactaagtgtagatgagaaagtctccgaatcgttttttttaagcttggcgtggatccgatatcaactagatcttgaga

SEQ ID NO: 5102 - DNA, 170 bp, Artificial sequence
  Map2k4.1261_Atrx.249
  crRNA array
cgatttcttggctttatatatcttgtggaaaggacgaaacaccgtaatttctactaagtgtagatgatgtagtaatgcggagtagtaatttctactaagtgtagattagccagtcgctcatatctcttttttaagcttggcgtggatccgatatcaactagatcttgaga

SEQ ID NO: 5103 - DNA, 170 bp, Artificial sequence
  Map2k4.1261_Atrx.251
  crRNA array
cgatttcttggctttatatatcttgtggaaaggacgaaacaccgtaatttctactaagtgtagatgatgtagtaatgcggagtagtaatttctactaagtgtagatgccagtcgctcatatctctgttttttaagcttggcgtggatccgatatcaactagatcttgaga

SEQ ID NO: 5104 - DNA, 170 bp, Artificial sequence
  Map2k4.1261_Bcor.203
  crRNA array
cgatttcttggctttatatatcttgtggaaaggacgaaacaccgtaatttctactaagtgtagatgatgtagtaatgcggagtagtaatttctactaagtgtagatccccggagcggagtccaggcttttttaagcttggcgtggatccgatatcaactagatcttgaga

SEQ ID NO: 5105 - DNA, 170 bp, Artificial sequence
  Map2k4.1261_Bcor.475
  crRNA array
cgatttcttggctttatatatcttgtggaaaggacgaaacaccgtaatttctactaagtgtagatgatgtagtaatgcggagtagtaatttctactaagtgtagattgcaacccctctgtatgggattttttaagcttggcgtggatccgatatcaactagatcttgaga

SEQ ID NO: 5106 - DNA, 170 bp, Artificial sequence
  Map2k4.1261_Brca1.112
  crRNA array
cgatttcttggctttatatatcttgtggaaaggacgaaacaccgtaatttctactaagtgtagatgatgtagtaatgcggagtagtaatttctactaagtgtagatctagacgctctgtggagactttttttaagcttggcgtggatccgatatcaactagatcttgaga

SEQ ID NO: 5107 - DNA, 170 bp, Artificial sequence
  Map2k4.1261_Brca1.53
  crRNA array
cgatttcttggctttatatatcttgtggaaaggacgaaacaccgtaatttctactaagtgtagatgatgtagtaatgcggagtagtaatttctactaagtgtagataatgaggaggcgtcgatcatttttttaagcttggcgtggatccgatatcaactagatcttgaga

SEQ ID NO: 5108 - DNA, 170 bp, Artificial sequence
  Map2k4.1261_Casp8.45
  crRNA array
cgatttcttggctttatatatcttgtggaaaggacgaaacaccgtaatttctactaagtgtagatgatgtagtaatgcggagtagtaatttctactaagtgtagatctaccgagatcctgtgaatgttttttaagcttggcgtggatccgatatcaactagatcttgaga

SEQ ID NO: 5109 - DNA, 170 bp, Artificial sequence
  Map2k4.1261_Casp8.54
  crRNA array
cgatttcttggctttatatatcttgtggaaaggacgaaacaccgtaatttctactaagtgtagatgatgtagtaatgcggagtagtaatttctactaagtgtagatcagtgcagtcgtcgtaagatttttttaagcttggcgtggatccgatatcaactagatcttgaga

SEQ ID NO: 5110 - DNA, 170 bp, Artificial sequence
  Map2k4.1261_Cbwd1.84
  crRNA array
cgatttcttggctttatatatcttgtggaaaggacgaaacaccgtaatttctactaagtgtagatgatgtagtaatgcggagtagtaatttctactaagtgtagatcacagcaggtaacatgccgcttttttaagcttggcgtggatccgatatcaactagatcttgaga

SEQ ID NO: 5111 - DNA, 170 bp, Artificial sequence
  Map2k4.1261_Cbwd1.85
  crRNA array
cgatttcttggctttatatatcttgtggaaaggacgaaacaccgtaatttctactaagtgtagatgatgtagtaatgcggagtagtaatttctactaagtgtagatacagcaggtaacatgccgccttttttaagcttggcgtggatccgatatcaactagatcttgaga

SEQ ID NO: 5112 - DNA, 170 bp, Artificial sequence
  Map2k4.1261_Cdh1.387
  crRNA array
cgatttcttggctttatatatcttgtggaaaggacgaaacaccgtaatttctactaagtgtagatgatgtagtaatgcggagtagtaatttctactaagtgtagatctcggcgtctgccgggtccgttttttaagcttggcgtggatccgatatcaactagatcttgaga

SEQ ID NO: 5113 - DNA, 170 bp, Artificial sequence
  Map2k4.1261_Cdh1.58
  crRNA array
cgatttcttggctttatatatcttgtggaaaggacgaaacaccgtaatttctactaagtgtagatgatgtagtaatgcggagtagtaatttctactaagtgtagatctcgtccgcgcccgggactcttttttaagcttggcgtggatccgatatcaactagatcttgaga

SEQ ID NO: 5114 - DNA, 170 bp, Artificial sequence
  Map2k4.1261_Cdkn2a.647
  crRNA array
cgatttcttggctttatatatcttgtggaaaggacgaaacaccgtaatttctactaagtgtagatgatgtagtaatgcggagtagtaatttctactaagtgtagatgcaatcacgggagggagcagttttttaagcttggcgtggatccgatatcaactagatcttgaga

SEQ ID NO: 5115 - DNA, 170 bp, Artificial sequence
  Map2k4.1261_Cdkn2a.648
  crRNA array
cgatttcttggctttatatatcttgtggaaaggacgaaacaccgtaatttctactaagtgtagatgatgtagtaatgcggagtagtaatttctactaagtgtagatcaatcacgggagggagcagattttttaagcttggcgtggatccgatatcaactagatcttgaga

SEQ ID NO: 5116 - DNA, 170 bp, Artificial sequence
  Map2k4.1261_Cic.162
  crRNA array
cgatttcttggctttatatatcttgtggaaaggacgaaacaccgtaatttctactaagtgtagatgatgtagtaatgcggagtagtaatttctactaagtgtagatcgcaggcgcgcccggcggagttttttaagcttggcgtggatccgatatcaactagatcttgaga

SEQ ID NO: 5117 - DNA, 170 bp, Artificial sequence
  Map2k4.1261_Cic.164
  crRNA array
cgatttcttggctttatatatcttgtggaaaggacgaaacaccgtaatttctactaagtgtagatgatgtagtaatgcggagtagtaatttctactaagtgtagatcgggccctgggccggcggctttttttaagcttggcgtggatccgatatcaactagatcttgaga

SEQ ID NO: 5118 - DNA, 170 bp, Artificial sequence
  Map2k4.1261_Ctcf.229
  crRNA array
cgatttcttggctttatatatcttgtggaaaggacgaaacaccgtaatttctactaagtgtagatgatgtagtaatgcggagtagtaatttctactaagtgtagatggctggtggctgatagtctgttttttaagcttggcgtggatccgatatcaactagatcttgaga

SEQ ID NO: 5119 - DNA, 170 bp, Artificial sequence
  Map2k4.1261_Ctcf.809
  crRNA array
cgatttcttggctttatatatcttgtggaaaggacgaaacaccgtaatttctactaagtgtagatgatgtagtaatgcggagtagtaatttctactaagtgtagataagcgctatcatgatcccaattttttaagcttggcgtggatccgatatcaactagatcttgaga

SEQ ID NO: 5120 - DNA, 170 bp, Artificial sequence
  Map2k4.1261_Elf3.826
  crRNA array
cgatttcttggctttatatatcttgtggaaaggacgaaacaccgtaatttctactaagtgtagatgatgtagtaatgcggagtagtaatttctactaagtgtagattccgagacatcctaatccacttttttaagcttggcgtggatccgatatcaactagatcttgaga

SEQ ID NO: 5121 - DNA, 170 bp, Artificial sequence
  Map2k4.1261_Elf3.983
  crRNA array
cgatttcttggctttatatatcttgtggaaaggacgaaacaccgtaatttctactaagtgtagatgatgtagtaatgcggagtagtaatttctactaagtgtagattaggccccctaactggaccattttttaagcttggcgtggatccgatatcaactagatcttgaga

SEQ ID NO: 5122 - DNA, 170 bp, Artificial sequence
  Map2k4.1261_Ep300.310
  crRNA array
cgatttcttggctttatatatcttgtggaaaggacgaaacaccgtaatttctactaagtgtagatgatgtagtaatgcggagtagtaatttctactaagtgtagatatggtacgacagtgaggaagttttttaagcttggcgtggatccgatatcaactagatcttgaga

SEQ ID NO: 5123 - DNA, 170 bp, Artificial sequence
  Map2k4.1261_Ep300.587
  crRNA array
cgatttcttggctttatatatcttgtggaaaggacgaaacaccgtaatttctactaagtgtagatgatgtagtaatgcggagtagtaatttctactaagtgtagatcgccccggggcccccaaccattttttaagcttggcgtggatccgatatcaactagatcttgaga

SEQ ID NO: 5124 - DNA, 170 bp, Artificial sequence
  Map2k4.1261_Epha2.126
  crRNA array
cgatttcttggctttatatatcttgtggaaaggacgaaacaccgtaatttctactaagtgtagatgatgtagtaatgcggagtagtaatttctactaagtgtagatcctgtgccgccgcggccgccttttttaagcttggcgtggatccgatatcaactagatcttgaga

SEQ ID NO: 5125 - DNA, 170 bp, Artificial sequence
  Map2k4.1261_Epha2.5
  crRNA array
cgatttcttggctttatatatcttgtggaaaggacgaaacaccgtaatttctactaagtgtagatgatgtagtaatgcggagtagtaatttctactaagtgtagatcatgagctggcgccacccggttttttaagcttggcgtggatccgatatcaactagatcttgaga

SEQ ID NO: 5126 - DNA, 170 bp, Artificial sequence
  Map2k4.1261_Fat1.105
  crRNA array
cgatttcttggctttatatatcttgtggaaaggacgaaacaccgtaatttctactaagtgtagatgatgtagtaatgcggagtagtaatttctactaagtgtagataactcgaggtgacaacaagtttttttaagcttggcgtggatccgatatcaactagatcttgaga

SEQ ID NO: 5127 - DNA, 170 bp, Artificial sequence
  Map2k4.1261_Fat1.122
  crRNA array
cgatttcttggctttatatatcttgtggaaaggacgaaacaccgtaatttctactaagtgtagatgatgtagtaatgcggagtagtaatttctactaagtgtagatccatcgacatggaaacgggattttttaagcttggcgtggatccgatatcaactagatcttgaga

SEQ ID NO: 5128 - DNA, 170 bp, Artificial sequence
  Map2k4.1261_Fbxw7.21
  crRNA array
cgatttcttggctttatatatcttgtggaaaggacgaaacaccgtaatttctactaagtgtagatgatgtagtaatgcggagtagtaatttctactaagtgtagattaatgtgccgtagaaacccattttttaagcttggcgtggatccgatatcaactagatcttgaga

SEQ ID NO: 5129 - DNA, 170 bp, Artificial sequence
  Map2k4.1261_Fbxw7.23
  crRNA array
cgatttcttggctttatatatcttgtggaaaggacgaaacaccgtaatttctactaagtgtagatgatgtagtaatgcggagtagtaatttctactaagtgtagatatgtgccgtagaaacccatattttttaagcttggcgtggatccgatatcaactagatcttgaga

SEQ ID NO: 5130 - DNA, 170 bp, Artificial sequence
  Map2k4.1261_Gata3.34
  crRNA array
cgatttcttggctttatatatcttgtggaaaggacgaaacaccgtaatttctactaagtgtagatgatgtagtaatgcggagtagtaatttctactaagtgtagatctaaactatcccgcaaagatttttttaagcttggcgtggatccgatatcaactagatcttgaga

SEQ ID NO: 5131 - DNA, 170 bp, Artificial sequence
  Map2k4.1261_Gata3.47
  crRNA array
cgatttcttggctttatatatcttgtggaaaggacgaaacaccgtaatttctactaagtgtagatgatgtagtaatgcggagtagtaatttctactaagtgtagatcgtagtaggacgggacgtggttttttaagcttggcgtggatccgatatcaactagatcttgaga

SEQ ID NO: 5132 - DNA, 170 bp, Artificial sequence
  Map2k4.1261_H2-Q2.1
  crRNA array
cgatttcttggctttatatatcttgtggaaaggacgaaacaccgtaatttctactaagtgtagatgatgtagtaatgcggagtagtaatttctactaagtgtagatagggcggccaccaacagcagttttttaagcttggcgtggatccgatatcaactagatcttgaga

SEQ ID NO: 5133 - DNA, 170 bp, Artificial sequence
  Map2k4.1261_H2-Q2.2
  crRNA array
cgatttcttggctttatatatcttgtggaaaggacgaaacaccgtaatttctactaagtgtagatgatgtagtaatgcggagtagtaatttctactaagtgtagattaacctgcgcccgctgctgattttttaagcttggcgtggatccgatatcaactagatcttgaga

SEQ ID NO: 5134 - DNA, 170 bp, Artificial sequence
  Map2k4.1261_Kdm5c.1878
  crRNA array
cgatttcttggctttatatatcttgtggaaaggacgaaacaccgtaatttctactaagtgtagatgatgtagtaatgcggagtagtaatttctactaagtgtagatagagcacggcacccgcccccttttttaagcttggcgtggatccgatatcaactagatcttgaga

SEQ ID NO: 5135 - DNA, 170 bp, Artificial sequence
  Map2k4.1261_Kdm5c.1879
  crRNA array
cgatttcttggctttatatatcttgtggaaaggacgaaacaccgtaatttctactaagtgtagatgatgtagtaatgcggagtagtaatttctactaagtgtagatgagcacggcacccgccccccttttttaagcttggcgtggatccgatatcaactagatcttgaga

SEQ ID NO: 5136 - DNA, 170 bp, Artificial sequence
  Map2k4.1261_Kdm6a.56
  crRNA array
cgatttcttggctttatatatcttgtggaaaggacgaaacaccgtaatttctactaagtgtagatgatgtagtaatgcggagtagtaatttctactaagtgtagattcgctgccgcctctcgcggcttttttaagcttggcgtggatccgatatcaactagatcttgaga

SEQ ID NO: 5137 - DNA, 170 bp, Artificial sequence
  Map2k4.1261_Kdm6a.57
  crRNA array
cgatttcttggctttatatatcttgtggaaaggacgaaacaccgtaatttctactaagtgtagatgatgtagtaatgcggagtagtaatttctactaagtgtagatcgctgccgcctctcgcggcattttttaagcttggcgtggatccgatatcaactagatcttgaga

SEQ ID NO: 5138 - DNA, 170 bp, Artificial sequence
  Map2k4.1261_Kmt2b.265
  crRNA array
cgatttcttggctttatatatcttgtggaaaggacgaaacaccgtaatttctactaagtgtagatgatgtagtaatgcggagtagtaatttctactaagtgtagatccccaagtgaagcccacctgttttttaagcttggcgtggatccgatatcaactagatcttgaga

SEQ ID NO: 5139 - DNA, 170 bp, Artificial sequence
  Map2k4.1261_Kmt2b.298
  crRNA array
cgatttcttggctttatatatcttgtggaaaggacgaaacaccgtaatttctactaagtgtagatgatgtagtaatgcggagtagtaatttctactaagtgtagattccggcagggaccggctggcttttttaagcttggcgtggatccgatatcaactagatcttgaga

SEQ ID NO: 5140 - DNA, 170 bp, Artificial sequence
  Map2k4.1261_Kmt2c.1962
  crRNA array
cgatttcttggctttatatatcttgtggaaaggacgaaacaccgtaatttctactaagtgtagatgatgtagtaatgcggagtagtaatttctactaagtgtagatgtgacgatctgtgccacaagttttttaagcttggcgtggatccgatatcaactagatcttgaga

SEQ ID NO: 5141 - DNA, 170 bp, Artificial sequence
  Map2k4.1261_Kmt2c.2236
  crRNA array
cgatttcttggctttatatatcttgtggaaaggacgaaacaccgtaatttctactaagtgtagatgatgtagtaatgcggagtagtaatttctactaagtgtagatactcgacctccacctccctattttttaagcttggcgtggatccgatatcaactagatcttgaga

SEQ ID NO: 5142 - DNA, 170 bp, Artificial sequence
  Map2k4.1261_Kmt2d.316
  crRNA array
cgatttcttggctttatatatcttgtggaaaggacgaaacaccgtaatttctactaagtgtagatgatgtagtaatgcggagtagtaatttctactaagtgtagatactccaggccacccaggtggttttttaagcttggcgtggatccgatatcaactagatcttgaga

SEQ ID NO: 5143 - DNA, 170 bp, Artificial sequence
  Map2k4.1261_Kmt2d.416
  crRNA array
cgatttcttggctttatatatcttgtggaaaggacgaaacaccgtaatttctactaagtgtagatgatgtagtaatgcggagtagtaatttctactaagtgtagattaaacccccgggggaagggtttttttaagcttggcgtggatccgatatcaactagatcttgaga

SEQ ID NO: 5144 - DNA, 170 bp, Artificial sequence
  Map2k4.1261_Map3k1.235
  crRNA array
cgatttcttggctttatatatcttgtggaaaggacgaaacaccgtaatttctactaagtgtagatgatgtagtaatgcggagtagtaatttctactaagtgtagataaaacgctactgatcgatcgttttttaagcttggcgtggatccgatatcaactagatcttgaga

SEQ ID NO: 5145 - DNA, 170 bp, Artificial sequence
  Map2k4.1261_Map3k1.3838
  crRNA array
cgatttcttggctttatatatcttgtggaaaggacgaaacaccgtaatttctactaagtgtagatgatgtagtaatgcggagtagtaatttctactaagtgtagatccaacaacagggccccactattttttaagcttggcgtggatccgatatcaactagatcttgaga

SEQ ID NO: 5146 - DNA, 170 bp, Artificial sequence
  Map2k4.1261_Mga.1655
  crRNA array
cgatttcttggctttatatatcttgtggaaaggacgaaacaccgtaatttctactaagtgtagatgatgtagtaatgcggagtagtaatttctactaagtgtagatcgagaagtggagagcatattttttttaagcttggcgtggatccgatatcaactagatcttgaga

SEQ ID NO: 5147 - DNA, 170 bp, Artificial sequence
  Map2k4.1261_Mga.93
  crRNA array
cgatttcttggctttatatatcttgtggaaaggacgaaacaccgtaatttctactaagtgtagatgatgtagtaatgcggagtagtaatttctactaagtgtagatgagaaggctccccataatgtttttttaagcttggcgtggatccgatatcaactagatcttgaga

SEQ ID NO: 5148 - DNA, 170 bp, Artificial sequence
  Map2k4.1261_Nf1.746
  crRNA array
cgatttcttggctttatatatcttgtggaaaggacgaaacaccgtaatttctactaagtgtagatgatgtagtaatgcggagtagtaatttctactaagtgtagattaagcataatgatgatgccattttttaagcttggcgtggatccgatatcaactagatcttgaga

SEQ ID NO: 5149 - DNA, 170 bp, Artificial sequence
  Map2k4.1261_Nf1.97
  crRNA array
cgatttcttggctttatatatcttgtggaaaggacgaaacaccgtaatttctactaagtgtagatgatgtagtaatgcggagtagtaatttctactaagtgtagatagcccgctacatgctgatgcttttttaagcttggcgtggatccgatatcaactagatcttgaga

SEQ ID NO: 5150 - DNA, 170 bp, Artificial sequence
  Map2k4.1261_Nf2.356
  crRNA array
cgatttcttggctttatatatcttgtggaaaggacgaaacaccgtaatttctactaagtgtagatgatgtagtaatgcggagtagtaatttctactaagtgtagatcggagtcatctgatagagatttttttaagcttggcgtggatccgatatcaactagatcttgaga

SEQ ID NO: 5151 - DNA, 170 bp, Artificial sequence
  Map2k4.1261_Nf2.768
  crRNA array
cgatttcttggctttatatatcttgtggaaaggacgaaacaccgtaatttctactaagtgtagatgatgtagtaatgcggagtagtaatttctactaagtgtagatccgaagccccagtgtccggcttttttaagcttggcgtggatccgatatcaactagatcttgaga

SEQ ID NO: 5152 - DNA, 170 bp, Artificial sequence
  Map2k4.1261_Notch1.1849
  crRNA array
cgatttcttggctttatatatcttgtggaaaggacgaaacaccgtaatttctactaagtgtagatgatgtagtaatgcggagtagtaatttctactaagtgtagatctggcgggtgggcggcgctgttttttaagcttggcgtggatccgatatcaactagatcttgaga

SEQ ID NO: 5153 - DNA, 170 bp, Artificial sequence
  Map2k4.1261_Notch1.649
  crRNA array
cgatttcttggctttatatatcttgtggaaaggacgaaacaccgtaatttctactaagtgtagatgatgtagtaatgcggagtagtaatttctactaagtgtagattgggccaacgatgccaggacttttttaagcttggcgtggatccgatatcaactagatcttgaga

SEQ ID NO: 5154 - DNA, 170 bp, Artificial sequence
  Map2k4.1261_Nsd1.70
  crRNA array
cgatttcttggctttatatatcttgtggaaaggacgaaacaccgtaatttctactaagtgtagatgatgtagtaatgcggagtagtaatttctactaagtgtagatactggtgtggacgatgcagattttttaagcttggcgtggatccgatatcaactagatcttgaga

SEQ ID NO: 5155 - DNA, 170 bp, Artificial sequence
  Map2k4.1261_Nsd1.90
  crRNA array
cgatttcttggctttatatatcttgtggaaaggacgaaacaccgtaatttctactaagtgtagatgatgtagtaatgcggagtagtaatttctactaagtgtagataggagctaacggcaagaatgttttttaagcttggcgtggatccgatatcaactagatcttgaga

SEQ ID NO: 5156 - DNA, 170 bp, Artificial sequence
  Map2k4.1261_Pbrm1.1236
  crRNA array
cgatttcttggctttatatatcttgtggaaaggacgaaacaccgtaatttctactaagtgtagatgatgtagtaatgcggagtagtaatttctactaagtgtagatgccgataaaaccaacagccgttttttaagcttggcgtggatccgatatcaactagatcttgaga

SEQ ID NO: 5157 - DNA, 170 bp, Artificial sequence
  Map2k4.1261_Pbrm1.969
  crRNA array
cgatttcttggctttatatatcttgtggaaaggacgaaacaccgtaatttctactaagtgtagatgatgtagtaatgcggagtagtaatttctactaagtgtagatgagccctaatgaacagctcattttttaagcttggcgtggatccgatatcaactagatcttgaga

SEQ ID NO: 5158 - DNA, 170 bp, Artificial sequence
  Map2k4.1261_Pik3r1.76
  crRNA array
cgatttcttggctttatatatcttgtggaaaggacgaaacaccgtaatttctactaagtgtagatgatgtagtaatgcggagtagtaatttctactaagtgtagataaaacctatacggcccgcacttttttaagcttggcgtggatccgatatcaactagatcttgaga

SEQ ID NO: 5159 - DNA, 170 bp, Artificial sequence
  Map2k4.1261_Pik3r1.77
  crRNA array
cgatttcttggctttatatatcttgtggaaaggacgaaacaccgtaatttctactaagtgtagatgatgtagtaatgcggagtagtaatttctactaagtgtagataaacctatacggcccgcactttttttaagcttggcgtggatccgatatcaactagatcttgaga

SEQ ID NO: 5160 - DNA, 170 bp, Artificial sequence
  Map2k4.1261_Pten.240
  crRNA array
cgatttcttggctttatatatcttgtggaaaggacgaaacaccgtaatttctactaagtgtagatgatgtagtaatgcggagtagtaatttctactaagtgtagattgcatacgctatagctgcttttttttaagcttggcgtggatccgatatcaactagatcttgaga

SEQ ID NO: 5161 - DNA, 170 bp, Artificial sequence
  Map2k4.1261_Pten.265
  crRNA array
cgatttcttggctttatatatcttgtggaaaggacgaaacaccgtaatttctactaagtgtagatgatgtagtaatgcggagtagtaatttctactaagtgtagataagcgtggtgcgtgacgcacttttttaagcttggcgtggatccgatatcaactagatcttgaga

SEQ ID NO: 5162 - DNA, 170 bp, Artificial sequence
  Map2k4.1261_Rasa1.1478
  crRNA array
cgatttcttggctttatatatcttgtggaaaggacgaaacaccgtaatttctactaagtgtagatgatgtagtaatgcggagtagtaatttctactaagtgtagatcgataatggtctatgatgtcttttttaagcttggcgtggatccgatatcaactagatcttgaga

SEQ ID NO: 5163 - DNA, 170 bp, Artificial sequence
  Map2k4.1261_Rasa1.223
  crRNA array
cgatttcttggctttatatatcttgtggaaaggacgaaacaccgtaatttctactaagtgtagatgatgtagtaatgcggagtagtaatttctactaagtgtagattccatggagtatcgtgctcgttttttaagcttggcgtggatccgatatcaactagatcttgaga

SEQ ID NO: 5164 - DNA, 170 bp, Artificial sequence
  Map2k4.1261_Rb1.211
  crRNA array
cgatttcttggctttatatatcttgtggaaaggacgaaacaccgtaatttctactaagtgtagatgatgtagtaatgcggagtagtaatttctactaagtgtagattctgacatgatcgggtacctttttttaagcttggcgtggatccgatatcaactagatcttgaga

SEQ ID NO: 5165 - DNA, 170 bp, Artificial sequence
  Map2k4.1261_Rb1.394
  crRNA array
cgatttcttggctttatatatcttgtggaaaggacgaaacaccgtaatttctactaagtgtagatgatgtagtaatgcggagtagtaatttctactaagtgtagatagaaatctcgaagcaggatcttttttaagcttggcgtggatccgatatcaactagatcttgaga

SEQ ID NO: 5166 - DNA, 170 bp, Artificial sequence
  Map2k4.1261_Rbm10.5
  crRNA array
cgatttcttggctttatatatcttgtggaaaggacgaaacaccgtaatttctactaagtgtagatgatgtagtaatgcggagtagtaatttctactaagtgtagatacgaaacctgaacccacacattttttaagcttggcgtggatccgatatcaactagatcttgaga

SEQ ID NO: 5167 - DNA, 170 bp, Artificial sequence
  Map2k4.1261_Rbm10.6
  crRNA array
cgatttcttggctttatatatcttgtggaaaggacgaaacaccgtaatttctactaagtgtagatgatgtagtaatgcggagtagtaatttctactaagtgtagatcgaaacctgaacccacacagttttttaagcttggcgtggatccgatatcaactagatcttgaga

SEQ ID NO: 5168 - DNA, 170 bp, Artificial sequence
  Map2k4.1261_Rnf43.1920
  crRNA array
cgatttcttggctttatatatcttgtggaaaggacgaaacaccgtaatttctactaagtgtagatgatgtagtaatgcggagtagtaatttctactaagtgtagatatccccgtgccgtggactccttttttaagcttggcgtggatccgatatcaactagatcttgaga

SEQ ID NO: 5169 - DNA, 170 bp, Artificial sequence
  Map2k4.1261_Rnf43.39
  crRNA array
cgatttcttggctttatatatcttgtggaaaggacgaaacaccgtaatttctactaagtgtagatgatgtagtaatgcggagtagtaatttctactaagtgtagatcaaggggatcactctgataattttttaagcttggcgtggatccgatatcaactagatcttgaga

SEQ ID NO: 5170 - DNA, 170 bp, Artificial sequence
  Map2k4.1261_Runx1.204
  crRNA array
cgatttcttggctttatatatcttgtggaaaggacgaaacaccgtaatttctactaagtgtagatgatgtagtaatgcggagtagtaatttctactaagtgtagattaaataagtccagccgttttttttttaagcttggcgtggatccgatatcaactagatcttgaga

SEQ ID NO: 5171 - DNA, 170 bp, Artificial sequence
  Map2k4.1261_Runx1.81
  crRNA array
cgatttcttggctttatatatcttgtggaaaggacgaaacaccgtaatttctactaagtgtagatgatgtagtaatgcggagtagtaatttctactaagtgtagataggacgcgtatgggaattttttttttaagcttggcgtggatccgatatcaactagatcttgaga

SEQ ID NO: 5172 - DNA, 170 bp, Artificial sequence
  Map2k4.1261_Setd2.143
  crRNA array
cgatttcttggctttatatatcttgtggaaaggacgaaacaccgtaatttctactaagtgtagatgatgtagtaatgcggagtagtaatttctactaagtgtagatgcacaaccacaacagactggttttttaagcttggcgtggatccgatatcaactagatcttgaga

SEQ ID NO: 5173 - DNA, 170 bp, Artificial sequence
  Map2k4.1261_Setd2.508
  crRNA array
cgatttcttggctttatatatcttgtggaaaggacgaaacaccgtaatttctactaagtgtagatgatgtagtaatgcggagtagtaatttctactaagtgtagattacgatcccgagcacccgacttttttaagcttggcgtggatccgatatcaactagatcttgaga

SEQ ID NO: 5174 - DNA, 170 bp, Artificial sequence
  Map2k4.1261_Smad4.3038
  crRNA array
cgatttcttggctttatatatcttgtggaaaggacgaaacaccgtaatttctactaagtgtagatgatgtagtaatgcggagtagtaatttctactaagtgtagatatctgcggcagtgtcaccggttttttaagcttggcgtggatccgatatcaactagatcttgaga

SEQ ID NO: 5175 - DNA, 170 bp, Artificial sequence
  Map2k4.1261_Smad4.39
  crRNA array
cgatttcttggctttatatatcttgtggaaaggacgaaacaccgtaatttctactaagtgtagatgatgtagtaatgcggagtagtaatttctactaagtgtagatagtcaaacgcatactgacaattttttaagcttggcgtggatccgatatcaactagatcttgaga

SEQ ID NO: 5176 - DNA, 170 bp, Artificial sequence
  Map2k4.1261_Stag2.1409
  crRNA array
cgatttcttggctttatatatcttgtggaaaggacgaaacaccgtaatttctactaagtgtagatgatgtagtaatgcggagtagtaatttctactaagtgtagatgctaataactgcggaagggcttttttaagcttggcgtggatccgatatcaactagatcttgaga

SEQ ID NO: 5177 - DNA, 170 bp, Artificial sequence
  Map2k4.1261_Stag2.4401
  crRNA array
cgatttcttggctttatatatcttgtggaaaggacgaaacaccgtaatttctactaagtgtagatgatgtagtaatgcggagtagtaatttctactaagtgtagattaatcgtccagtggtgtatattttttaagcttggcgtggatccgatatcaactagatcttgaga

SEQ ID NO: 5178 - DNA, 170 bp, Artificial sequence
  Map2k4.1261_Tbl1xr1.1
  crRNA array
cgatttcttggctttatatatcttgtggaaaggacgaaacaccgtaatttctactaagtgtagatgatgtagtaatgcggagtagtaatttctactaagtgtagatggatgcgcatactggtgaagttttttaagcttggcgtggatccgatatcaactagatcttgaga

SEQ ID NO: 5179 - DNA, 170 bp, Artificial sequence
  Map2k4.1261_Tbl1xr1.83
  crRNA array
cgatttcttggctttatatatcttgtggaaaggacgaaacaccgtaatttctactaagtgtagatgatgtagtaatgcggagtagtaatttctactaagtgtagatatggtcgacccatcgagtctttttttaagcttggcgtggatccgatatcaactagatcttgaga

SEQ ID NO: 5180 - DNA, 170 bp, Artificial sequence
  Map2k4.1261_Tgfbr2.290
  crRNA array
cgatttcttggctttatatatcttgtggaaaggacgaaacaccgtaatttctactaagtgtagatgatgtagtaatgcggagtagtaatttctactaagtgtagatcctctcggcgcccgggtaaattttttaagcttggcgtggatccgatatcaactagatcttgaga

SEQ ID NO: 5181 - DNA, 170 bp, Artificial sequence
  Map2k4.1261_Tgfbr2.292
  crRNA array
cgatttcttggctttatatatcttgtggaaaggacgaaacaccgtaatttctactaagtgtagatgatgtagtaatgcggagtagtaatttctactaagtgtagatcccgggcgccgagagggaaattttttaagcttggcgtggatccgatatcaactagatcttgaga

SEQ ID NO: 5182 - DNA, 170 bp, Artificial sequence
  Map2k4.1261_Trp53.4
  crRNA array
cgatttcttggctttatatatcttgtggaaaggacgaaacaccgtaatttctactaagtgtagatgatgtagtaatgcggagtagtaatttctactaagtgtagatccctgaactgcccccagggattttttaagcttggcgtggatccgatatcaactagatcttgaga

SEQ ID NO: 5183 - DNA, 170 bp, Artificial sequence
  Map2k4.1261_Trp53.528
  crRNA array
cgatttcttggctttatatatcttgtggaaaggacgaaacaccgtaatttctactaagtgtagatgatgtagtaatgcggagtagtaatttctactaagtgtagatgctgggccagcagagacctgttttttaagcttggcgtggatccgatatcaactagatcttgaga

SEQ ID NO: 5184 - DNA, 170 bp, Artificial sequence
  Map2k4.1261_Vhl.1
  crRNA array
cgatttcttggctttatatatcttgtggaaaggacgaaacaccgtaatttctactaagtgtagatgatgtagtaatgcggagtagtaatttctactaagtgtagatagggctcccggcggccatttttttttaagcttggcgtggatccgatatcaactagatcttgaga

SEQ ID NO: 5185 - DNA, 170 bp, Artificial sequence
  Map2k4.1261_Vhl.151
  crRNA array
cgatttcttggctttatatatcttgtggaaaggacgaaacaccgtaatttctactaagtgtagatgatgtagtaatgcggagtagtaatttctactaagtgtagattagagcactcacccgagggattttttaagcttggcgtggatccgatatcaactagatcttgaga

SEQ ID NO: 5186 - DNA, 170 bp, Artificial sequence
  Map2k4.1261_Zc3h13.1387
  crRNA array
cgatttcttggctttatatatcttgtggaaaggacgaaacaccgtaatttctactaagtgtagatgatgtagtaatgcggagtagtaatttctactaagtgtagatgtgacgccggtcatgtgactttttttaagcttggcgtggatccgatatcaactagatcttgaga

SEQ ID NO: 5187 - DNA, 170 bp, Artificial sequence
  Map2k4.1261_Zc3h13.1777
  crRNA array
cgatttcttggctttatatatcttgtggaaaggacgaaacaccgtaatttctactaagtgtagatgatgtagtaatgcggagtagtaatttctactaagtgtagatgatgctgccagtgtagcggcttttttaagcttggcgtggatccgatatcaactagatcttgaga

SEQ ID NO: 5188 - DNA, 170 bp, Artificial sequence
  Map3k1.235_Acvr2a.155
  crRNA array
cgatttcttggctttatatatcttgtggaaaggacgaaacaccgtaatttctactaagtgtagataaaacgctactgatcgatcgtaatttctactaagtgtagatggacctggctaatcaagtatttttttaagcttggcgtggatccgatatcaactagatcttgaga

SEQ ID NO: 5189 - DNA, 170 bp, Artificial sequence
  Map3k1.235_Acvr2a.70
  crRNA array
cgatttcttggctttatatatcttgtggaaaggacgaaacaccgtaatttctactaagtgtagataaaacgctactgatcgatcgtaatttctactaagtgtagatcccgaggcgccggagaagccttttttaagcttggcgtggatccgatatcaactagatcttgaga

SEQ ID NO: 5190 - DNA, 170 bp, Artificial sequence
  Map3k1.235_Apc.21
  crRNA array
cgatttcttggctttatatatcttgtggaaaggacgaaacaccgtaatttctactaagtgtagataaaacgctactgatcgatcgtaatttctactaagtgtagatgtgatccacacgtgtagctgttttttaagcttggcgtggatccgatatcaactagatcttgaga

SEQ ID NO: 5191 - DNA, 170 bp, Artificial sequence
  Map3k1.235_Apc.867
  crRNA array
cgatttcttggctttatatatcttgtggaaaggacgaaacaccgtaatttctactaagtgtagataaaacgctactgatcgatcgtaatttctactaagtgtagatcagtcccaggcggcggaagcttttttaagcttggcgtggatccgatatcaactagatcttgaga

SEQ ID NO: 5192 - DNA, 170 bp, Artificial sequence
  Map3k1.235_Arid1a.2
  crRNA array
cgatttcttggctttatatatcttgtggaaaggacgaaacaccgtaatttctactaagtgtagataaaacgctactgatcgatcgtaatttctactaagtgtagatcccgcgcccccgtcctggggttttttaagcttggcgtggatccgatatcaactagatcttgaga

SEQ ID NO: 5193 - DNA, 170 bp, Artificial sequence
  Map3k1.235_Arid1a.5
  crRNA array
cgatttcttggctttatatatcttgtggaaaggacgaaacaccgtaatttctactaagtgtagataaaacgctactgatcgatcgtaatttctactaagtgtagatcccgcgctcggccgctgccgttttttaagcttggcgtggatccgatatcaactagatcttgaga

SEQ ID NO: 5194 - DNA, 170 bp, Artificial sequence
  Map3k1.235_Arid2.166
  crRNA array
cgatttcttggctttatatatcttgtggaaaggacgaaacaccgtaatttctactaagtgtagataaaacgctactgatcgatcgtaatttctactaagtgtagataaccgcgatctgggttttttttttttaagcttggcgtggatccgatatcaactagatcttgaga

SEQ ID NO: 5195 - DNA, 170 bp, Artificial sequence
  Map3k1.235_Arid2.172
  crRNA array
cgatttcttggctttatatatcttgtggaaaggacgaaacaccgtaatttctactaagtgtagataaaacgctactgatcgatcgtaatttctactaagtgtagatctggacgagctgcggcagttttttttaagcttggcgtggatccgatatcaactagatcttgaga

SEQ ID NO: 5196 - DNA, 170 bp, Artificial sequence
  Map3k1.235_Atm.120
  crRNA array
cgatttcttggctttatatatcttgtggaaaggacgaaacaccgtaatttctactaagtgtagataaaacgctactgatcgatcgtaatttctactaagtgtagatgacaggtagtcggcagctaattttttaagcttggcgtggatccgatatcaactagatcttgaga

SEQ ID NO: 5197 - DNA, 170 bp, Artificial sequence
  Map3k1.235_Atm.997
  crRNA array
cgatttcttggctttatatatcttgtggaaaggacgaaacaccgtaatttctactaagtgtagataaaacgctactgatcgatcgtaatttctactaagtgtagatgagaaagtctccgaatcgttttttttaagcttggcgtggatccgatatcaactagatcttgaga

SEQ ID NO: 5198 - DNA, 170 bp, Artificial sequence
  Map3k1.235_Atrx.249
  crRNA array
cgatttcttggctttatatatcttgtggaaaggacgaaacaccgtaatttctactaagtgtagataaaacgctactgatcgatcgtaatttctactaagtgtagattagccagtcgctcatatctcttttttaagcttggcgtggatccgatatcaactagatcttgaga

SEQ ID NO: 5199 - DNA, 170 bp, Artificial sequence
  Map3k1.235_Atrx.251
  crRNA array
cgatttcttggctttatatatcttgtggaaaggacgaaacaccgtaatttctactaagtgtagataaaacgctactgatcgatcgtaatttctactaagtgtagatgccagtcgctcatatctctgttttttaagcttggcgtggatccgatatcaactagatcttgaga

SEQ ID NO: 5200 - DNA, 170 bp, Artificial sequence
  Map3k1.235_Bcor.203
  crRNA array
cgatttcttggctttatatatcttgtggaaaggacgaaacaccgtaatttctactaagtgtagataaaacgctactgatcgatcgtaatttctactaagtgtagatccccggagcggagtccaggcttttttaagcttggcgtggatccgatatcaactagatcttgaga

SEQ ID NO: 5201 - DNA, 170 bp, Artificial sequence
  Map3k1.235_Bcor.475
  crRNA array
cgatttcttggctttatatatcttgtggaaaggacgaaacaccgtaatttctactaagtgtagataaaacgctactgatcgatcgtaatttctactaagtgtagattgcaacccctctgtatgggattttttaagcttggcgtggatccgatatcaactagatcttgaga

SEQ ID NO: 5202 - DNA, 170 bp, Artificial sequence
  Map3k1.235_Brca1.112
  crRNA array
cgatttcttggctttatatatcttgtggaaaggacgaaacaccgtaatttctactaagtgtagataaaacgctactgatcgatcgtaatttctactaagtgtagatctagacgctctgtggagactttttttaagcttggcgtggatccgatatcaactagatcttgaga

SEQ ID NO: 5203 - DNA, 170 bp, Artificial sequence
  Map3k1.235_Brca1.53
  crRNA array
cgatttcttggctttatatatcttgtggaaaggacgaaacaccgtaatttctactaagtgtagataaaacgctactgatcgatcgtaatttctactaagtgtagataatgaggaggcgtcgatcatttttttaagcttggcgtggatccgatatcaactagatcttgaga

SEQ ID NO: 5204 - DNA, 170 bp, Artificial sequence
  Map3k1.235_Casp8.45
  crRNA array
cgatttcttggctttatatatcttgtggaaaggacgaaacaccgtaatttctactaagtgtagataaaacgctactgatcgatcgtaatttctactaagtgtagatctaccgagatcctgtgaatgttttttaagcttggcgtggatccgatatcaactagatcttgaga

SEQ ID NO: 5205 - DNA, 170 bp, Artificial sequence
  Map3k1.235_Casp8.54
  crRNA array
cgatttcttggctttatatatcttgtggaaaggacgaaacaccgtaatttctactaagtgtagataaaacgctactgatcgatcgtaatttctactaagtgtagatcagtgcagtcgtcgtaagatttttttaagcttggcgtggatccgatatcaactagatcttgaga

SEQ ID NO: 5206 - DNA, 170 bp, Artificial sequence
  Map3k1.235_Cbwd1.84
  crRNA array
cgatttcttggctttatatatcttgtggaaaggacgaaacaccgtaatttctactaagtgtagataaaacgctactgatcgatcgtaatttctactaagtgtagatcacagcaggtaacatgccgcttttttaagcttggcgtggatccgatatcaactagatcttgaga

SEQ ID NO: 5207 - DNA, 170 bp, Artificial sequence
  Map3k1.235_Cbwd1.85
  crRNA array
cgatttcttggctttatatatcttgtggaaaggacgaaacaccgtaatttctactaagtgtagataaaacgctactgatcgatcgtaatttctactaagtgtagatacagcaggtaacatgccgccttttttaagcttggcgtggatccgatatcaactagatcttgaga

SEQ ID NO: 5208 - DNA, 170 bp, Artificial sequence
  Map3k1.235_Cdh1.387
  crRNA array
cgatttcttggctttatatatcttgtggaaaggacgaaacaccgtaatttctactaagtgtagataaaacgctactgatcgatcgtaatttctactaagtgtagatctcggcgtctgccgggtccgttttttaagcttggcgtggatccgatatcaactagatcttgaga

SEQ ID NO: 5209 - DNA, 170 bp, Artificial sequence
  Map3k1.235_Cdh1.58
  crRNA array
cgatttcttggctttatatatcttgtggaaaggacgaaacaccgtaatttctactaagtgtagataaaacgctactgatcgatcgtaatttctactaagtgtagatctcgtccgcgcccgggactcttttttaagcttggcgtggatccgatatcaactagatcttgaga

SEQ ID NO: 5210 - DNA, 170 bp, Artificial sequence
  Map3k1.235_Cdkn2a.647
  crRNA array
cgatttcttggctttatatatcttgtggaaaggacgaaacaccgtaatttctactaagtgtagataaaacgctactgatcgatcgtaatttctactaagtgtagatgcaatcacgggagggagcagttttttaagcttggcgtggatccgatatcaactagatcttgaga

SEQ ID NO: 5211 - DNA, 170 bp, Artificial sequence
  Map3k1.235_Cdkn2a.648
  crRNA array
cgatttcttggctttatatatcttgtggaaaggacgaaacaccgtaatttctactaagtgtagataaaacgctactgatcgatcgtaatttctactaagtgtagatcaatcacgggagggagcagattttttaagcttggcgtggatccgatatcaactagatcttgaga

SEQ ID NO: 5212 - DNA, 170 bp, Artificial sequence
  Map3k1.235_Cic.162
  crRNA array
cgatttcttggctttatatatcttgtggaaaggacgaaacaccgtaatttctactaagtgtagataaaacgctactgatcgatcgtaatttctactaagtgtagatcgcaggcgcgcccggcggagttttttaagcttggcgtggatccgatatcaactagatcttgaga

SEQ ID NO: 5213 - DNA, 170 bp, Artificial sequence
  Map3k1.235_Cic.164
  crRNA array
cgatttcttggctttatatatcttgtggaaaggacgaaacaccgtaatttctactaagtgtagataaaacgctactgatcgatcgtaatttctactaagtgtagatcgggccctgggccggcggctttttttaagcttggcgtggatccgatatcaactagatcttgaga

SEQ ID NO: 5214 - DNA, 170 bp, Artificial sequence
  Map3k1.235_Ctcf.229
  crRNA array
cgatttcttggctttatatatcttgtggaaaggacgaaacaccgtaatttctactaagtgtagataaaacgctactgatcgatcgtaatttctactaagtgtagatggctggtggctgatagtctgttttttaagcttggcgtggatccgatatcaactagatcttgaga

SEQ ID NO: 5215 - DNA, 170 bp, Artificial sequence
  Map3k1.235_Ctcf.809
  crRNA array
cgatttcttggctttatatatcttgtggaaaggacgaaacaccgtaatttctactaagtgtagataaaacgctactgatcgatcgtaatttctactaagtgtagataagcgctatcatgatcccaattttttaagcttggcgtggatccgatatcaactagatcttgaga

SEQ ID NO: 5216 - DNA, 170 bp, Artificial sequence
  Map3k1.235_Elf3.826
  crRNA array
cgatttcttggctttatatatcttgtggaaaggacgaaacaccgtaatttctactaagtgtagataaaacgctactgatcgatcgtaatttctactaagtgtagattccgagacatcctaatccacttttttaagcttggcgtggatccgatatcaactagatcttgaga

SEQ ID NO: 5217 - DNA, 170 bp, Artificial sequence
  Map3k1.235_Elf3.983
  crRNA array
cgatttcttggctttatatatcttgtggaaaggacgaaacaccgtaatttctactaagtgtagataaaacgctactgatcgatcgtaatttctactaagtgtagattaggccccctaactggaccattttttaagcttggcgtggatccgatatcaactagatcttgaga

SEQ ID NO: 5218 - DNA, 170 bp, Artificial sequence
  Map3k1.235_Ep300.310
  crRNA array
cgatttcttggctttatatatcttgtggaaaggacgaaacaccgtaatttctactaagtgtagataaaacgctactgatcgatcgtaatttctactaagtgtagatatggtacgacagtgaggaagttttttaagcttggcgtggatccgatatcaactagatcttgaga

SEQ ID NO: 5219 - DNA, 170 bp, Artificial sequence
  Map3k1.235_Ep300.587
  crRNA array
cgatttcttggctttatatatcttgtggaaaggacgaaacaccgtaatttctactaagtgtagataaaacgctactgatcgatcgtaatttctactaagtgtagatcgccccggggcccccaaccattttttaagcttggcgtggatccgatatcaactagatcttgaga

SEQ ID NO: 5220 - DNA, 170 bp, Artificial sequence
  Map3k1.235_Epha2.126
  crRNA array
cgatttcttggctttatatatcttgtggaaaggacgaaacaccgtaatttctactaagtgtagataaaacgctactgatcgatcgtaatttctactaagtgtagatcctgtgccgccgcggccgccttttttaagcttggcgtggatccgatatcaactagatcttgaga

SEQ ID NO: 5221 - DNA, 170 bp, Artificial sequence
  Map3k1.235_Epha2.5
  crRNA array
cgatttcttggctttatatatcttgtggaaaggacgaaacaccgtaatttctactaagtgtagataaaacgctactgatcgatcgtaatttctactaagtgtagatcatgagctggcgccacccggttttttaagcttggcgtggatccgatatcaactagatcttgaga

SEQ ID NO: 5222 - DNA, 170 bp, Artificial sequence
  Map3k1.235_Fat1.105
  crRNA array
cgatttcttggctttatatatcttgtggaaaggacgaaacaccgtaatttctactaagtgtagataaaacgctactgatcgatcgtaatttctactaagtgtagataactcgaggtgacaacaagtttttttaagcttggcgtggatccgatatcaactagatcttgaga

SEQ ID NO: 5223 - DNA, 170 bp, Artificial sequence
  Map3k1.235_Fat1.122
  crRNA array
cgatttcttggctttatatatcttgtggaaaggacgaaacaccgtaatttctactaagtgtagataaaacgctactgatcgatcgtaatttctactaagtgtagatccatcgacatggaaacgggattttttaagcttggcgtggatccgatatcaactagatcttgaga

SEQ ID NO: 5224 - DNA, 170 bp, Artificial sequence
  Map3k1.235_Fbxw7.21
  crRNA array
cgatttcttggctttatatatcttgtggaaaggacgaaacaccgtaatttctactaagtgtagataaaacgctactgatcgatcgtaatttctactaagtgtagattaatgtgccgtagaaacccattttttaagcttggcgtggatccgatatcaactagatcttgaga

SEQ ID NO: 5225 - DNA, 170 bp, Artificial sequence
  Map3k1.235_Fbxw7.23
  crRNA array
cgatttcttggctttatatatcttgtggaaaggacgaaacaccgtaatttctactaagtgtagataaaacgctactgatcgatcgtaatttctactaagtgtagatatgtgccgtagaaacccatattttttaagcttggcgtggatccgatatcaactagatcttgaga

SEQ ID NO: 5226 - DNA, 170 bp, Artificial sequence
  Map3k1.235_Gata3.34
  crRNA array
cgatttcttggctttatatatcttgtggaaaggacgaaacaccgtaatttctactaagtgtagataaaacgctactgatcgatcgtaatttctactaagtgtagatctaaactatcccgcaaagatttttttaagcttggcgtggatccgatatcaactagatcttgaga

SEQ ID NO: 5227 - DNA, 170 bp, Artificial sequence
  Map3k1.235_Gata3.47
  crRNA array
cgatttcttggctttatatatcttgtggaaaggacgaaacaccgtaatttctactaagtgtagataaaacgctactgatcgatcgtaatttctactaagtgtagatcgtagtaggacgggacgtggttttttaagcttggcgtggatccgatatcaactagatcttgaga

SEQ ID NO: 5228 - DNA, 170 bp, Artificial sequence
  Map3k1.235_H2-Q2.1
  crRNA array
cgatttcttggctttatatatcttgtggaaaggacgaaacaccgtaatttctactaagtgtagataaaacgctactgatcgatcgtaatttctactaagtgtagatagggcggccaccaacagcagttttttaagcttggcgtggatccgatatcaactagatcttgaga

SEQ ID NO: 5229 - DNA, 170 bp, Artificial sequence
  Map3k1.235_H2-Q2.2
  crRNA array
cgatttcttggctttatatatcttgtggaaaggacgaaacaccgtaatttctactaagtgtagataaaacgctactgatcgatcgtaatttctactaagtgtagattaacctgcgcccgctgctgattttttaagcttggcgtggatccgatatcaactagatcttgaga

SEQ ID NO: 5230 - DNA, 170 bp, Artificial sequence
  Map3k1.235_Kdm5c.1878
  crRNA array
cgatttcttggctttatatatcttgtggaaaggacgaaacaccgtaatttctactaagtgtagataaaacgctactgatcgatcgtaatttctactaagtgtagatagagcacggcacccgcccccttttttaagcttggcgtggatccgatatcaactagatcttgaga

SEQ ID NO: 5231 - DNA, 170 bp, Artificial sequence
  Map3k1.235_Kdm5c.1879
  crRNA array
cgatttcttggctttatatatcttgtggaaaggacgaaacaccgtaatttctactaagtgtagataaaacgctactgatcgatcgtaatttctactaagtgtagatgagcacggcacccgccccccttttttaagcttggcgtggatccgatatcaactagatcttgaga

SEQ ID NO: 5232 - DNA, 170 bp, Artificial sequence
  Map3k1.235_Kdm6a.56
  crRNA array
cgatttcttggctttatatatcttgtggaaaggacgaaacaccgtaatttctactaagtgtagataaaacgctactgatcgatcgtaatttctactaagtgtagattcgctgccgcctctcgcggcttttttaagcttggcgtggatccgatatcaactagatcttgaga

SEQ ID NO: 5233 - DNA, 170 bp, Artificial sequence
  Map3k1.235_Kdm6a.57
  crRNA array
cgatttcttggctttatatatcttgtggaaaggacgaaacaccgtaatttctactaagtgtagataaaacgctactgatcgatcgtaatttctactaagtgtagatcgctgccgcctctcgcggcattttttaagcttggcgtggatccgatatcaactagatcttgaga

SEQ ID NO: 5234 - DNA, 170 bp, Artificial sequence
  Map3k1.235_Kmt2b.265
  crRNA array
cgatttcttggctttatatatcttgtggaaaggacgaaacaccgtaatttctactaagtgtagataaaacgctactgatcgatcgtaatttctactaagtgtagatccccaagtgaagcccacctgttttttaagcttggcgtggatccgatatcaactagatcttgaga

SEQ ID NO: 5235 - DNA, 170 bp, Artificial sequence
  Map3k1.235_Kmt2b.298
  crRNA array
cgatttcttggctttatatatcttgtggaaaggacgaaacaccgtaatttctactaagtgtagataaaacgctactgatcgatcgtaatttctactaagtgtagattccggcagggaccggctggcttttttaagcttggcgtggatccgatatcaactagatcttgaga

SEQ ID NO: 5236 - DNA, 170 bp, Artificial sequence
  Map3k1.235_Kmt2c.1962
  crRNA array
cgatttcttggctttatatatcttgtggaaaggacgaaacaccgtaatttctactaagtgtagataaaacgctactgatcgatcgtaatttctactaagtgtagatgtgacgatctgtgccacaagttttttaagcttggcgtggatccgatatcaactagatcttgaga

SEQ ID NO: 5237 - DNA, 170 bp, Artificial sequence
  Map3k1.235_Kmt2c.2236
  crRNA array
cgatttcttggctttatatatcttgtggaaaggacgaaacaccgtaatttctactaagtgtagataaaacgctactgatcgatcgtaatttctactaagtgtagatactcgacctccacctccctattttttaagcttggcgtggatccgatatcaactagatcttgaga

SEQ ID NO: 5238 - DNA, 170 bp, Artificial sequence
  Map3k1.235_Kmt2d.316
  crRNA array
cgatttcttggctttatatatcttgtggaaaggacgaaacaccgtaatttctactaagtgtagataaaacgctactgatcgatcgtaatttctactaagtgtagatactccaggccacccaggtggttttttaagcttggcgtggatccgatatcaactagatcttgaga

SEQ ID NO: 5239 - DNA, 170 bp, Artificial sequence
  Map3k1.235_Kmt2d.416
  crRNA array
cgatttcttggctttatatatcttgtggaaaggacgaaacaccgtaatttctactaagtgtagataaaacgctactgatcgatcgtaatttctactaagtgtagattaaacccccgggggaagggtttttttaagcttggcgtggatccgatatcaactagatcttgaga

SEQ ID NO: 5240 - DNA, 170 bp, Artificial sequence
  Map3k1.235_Map2k4.119
  crRNA array
cgatttcttggctttatatatcttgtggaaaggacgaaacaccgtaatttctactaagtgtagataaaacgctactgatcgatcgtaatttctactaagtgtagattgctgtgtgggcggccacatttttttaagcttggcgtggatccgatatcaactagatcttgaga

SEQ ID NO: 5241 - DNA, 170 bp, Artificial sequence
  Map3k1.235_Map2k4.1261
  crRNA array
cgatttcttggctttatatatcttgtggaaaggacgaaacaccgtaatttctactaagtgtagataaaacgctactgatcgatcgtaatttctactaagtgtagatgatgtagtaatgcggagtagttttttaagcttggcgtggatccgatatcaactagatcttgaga

SEQ ID NO: 5242 - DNA, 170 bp, Artificial sequence
  Map3k1.235_Mga.1655
  crRNA array
cgatttcttggctttatatatcttgtggaaaggacgaaacaccgtaatttctactaagtgtagataaaacgctactgatcgatcgtaatttctactaagtgtagatcgagaagtggagagcatattttttttaagcttggcgtggatccgatatcaactagatcttgaga

SEQ ID NO: 5243 - DNA, 170 bp, Artificial sequence
  Map3k1.235_Mga.93
  crRNA array
cgatttcttggctttatatatcttgtggaaaggacgaaacaccgtaatttctactaagtgtagataaaacgctactgatcgatcgtaatttctactaagtgtagatgagaaggctccccataatgtttttttaagcttggcgtggatccgatatcaactagatcttgaga

SEQ ID NO: 5244 - DNA, 170 bp, Artificial sequence
  Map3k1.235_Nf1.746
  crRNA array
cgatttcttggctttatatatcttgtggaaaggacgaaacaccgtaatttctactaagtgtagataaaacgctactgatcgatcgtaatttctactaagtgtagattaagcataatgatgatgccattttttaagcttggcgtggatccgatatcaactagatcttgaga

SEQ ID NO: 5245 - DNA, 170 bp, Artificial sequence
  Map3k1.235_Nf1.97
  crRNA array
cgatttcttggctttatatatcttgtggaaaggacgaaacaccgtaatttctactaagtgtagataaaacgctactgatcgatcgtaatttctactaagtgtagatagcccgctacatgctgatgcttttttaagcttggcgtggatccgatatcaactagatcttgaga

SEQ ID NO: 5246 - DNA, 170 bp, Artificial sequence
  Map3k1.235_Nf2.356
  crRNA array
cgatttcttggctttatatatcttgtggaaaggacgaaacaccgtaatttctactaagtgtagataaaacgctactgatcgatcgtaatttctactaagtgtagatcggagtcatctgatagagatttttttaagcttggcgtggatccgatatcaactagatcttgaga

SEQ ID NO: 5247 - DNA, 170 bp, Artificial sequence
  Map3k1.235_Nf2.768
  crRNA array
cgatttcttggctttatatatcttgtggaaaggacgaaacaccgtaatttctactaagtgtagataaaacgctactgatcgatcgtaatttctactaagtgtagatccgaagccccagtgtccggcttttttaagcttggcgtggatccgatatcaactagatcttgaga

SEQ ID NO: 5248 - DNA, 170 bp, Artificial sequence
  Map3k1.235_Notch1.1849
  crRNA array
cgatttcttggctttatatatcttgtggaaaggacgaaacaccgtaatttctactaagtgtagataaaacgctactgatcgatcgtaatttctactaagtgtagatctggcgggtgggcggcgctgttttttaagcttggcgtggatccgatatcaactagatcttgaga

SEQ ID NO: 5249 - DNA, 170 bp, Artificial sequence
  Map3k1.235_Notch1.649
  crRNA array
cgatttcttggctttatatatcttgtggaaaggacgaaacaccgtaatttctactaagtgtagataaaacgctactgatcgatcgtaatttctactaagtgtagattgggccaacgatgccaggacttttttaagcttggcgtggatccgatatcaactagatcttgaga

SEQ ID NO: 5250 - DNA, 170 bp, Artificial sequence
  Map3k1.235_Nsd1.70
  crRNA array
cgatttcttggctttatatatcttgtggaaaggacgaaacaccgtaatttctactaagtgtagataaaacgctactgatcgatcgtaatttctactaagtgtagatactggtgtggacgatgcagattttttaagcttggcgtggatccgatatcaactagatcttgaga

SEQ ID NO: 5251 - DNA, 170 bp, Artificial sequence
  Map3k1.235_Nsd1.90
  crRNA array
cgatttcttggctttatatatcttgtggaaaggacgaaacaccgtaatttctactaagtgtagataaaacgctactgatcgatcgtaatttctactaagtgtagataggagctaacggcaagaatgttttttaagcttggcgtggatccgatatcaactagatcttgaga

SEQ ID NO: 5252 - DNA, 170 bp, Artificial sequence
  Map3k1.235_Pbrm1.1236
  crRNA array
cgatttcttggctttatatatcttgtggaaaggacgaaacaccgtaatttctactaagtgtagataaaacgctactgatcgatcgtaatttctactaagtgtagatgccgataaaaccaacagccgttttttaagcttggcgtggatccgatatcaactagatcttgaga

SEQ ID NO: 5253 - DNA, 170 bp, Artificial sequence
  Map3k1.235_Pbrm1.969
  crRNA array
cgatttcttggctttatatatcttgtggaaaggacgaaacaccgtaatttctactaagtgtagataaaacgctactgatcgatcgtaatttctactaagtgtagatgagccctaatgaacagctcattttttaagcttggcgtggatccgatatcaactagatcttgaga

SEQ ID NO: 5254 - DNA, 170 bp, Artificial sequence
  Map3k1.235_Pik3r1.76
  crRNA array
cgatttcttggctttatatatcttgtggaaaggacgaaacaccgtaatttctactaagtgtagataaaacgctactgatcgatcgtaatttctactaagtgtagataaaacctatacggcccgcacttttttaagcttggcgtggatccgatatcaactagatcttgaga

SEQ ID NO: 5255 - DNA, 170 bp, Artificial sequence
  Map3k1.235_Pik3r1.77
  crRNA array
cgatttcttggctttatatatcttgtggaaaggacgaaacaccgtaatttctactaagtgtagataaaacgctactgatcgatcgtaatttctactaagtgtagataaacctatacggcccgcactttttttaagcttggcgtggatccgatatcaactagatcttgaga

SEQ ID NO: 5256 - DNA, 170 bp, Artificial sequence
  Map3k1.235_Pten.240
  crRNA array
cgatttcttggctttatatatcttgtggaaaggacgaaacaccgtaatttctactaagtgtagataaaacgctactgatcgatcgtaatttctactaagtgtagattgcatacgctatagctgcttttttttaagcttggcgtggatccgatatcaactagatcttgaga

SEQ ID NO: 5257 - DNA, 170 bp, Artificial sequence
  Map3k1.235_Pten.265
  crRNA array
cgatttcttggctttatatatcttgtggaaaggacgaaacaccgtaatttctactaagtgtagataaaacgctactgatcgatcgtaatttctactaagtgtagataagcgtggtgcgtgacgcacttttttaagcttggcgtggatccgatatcaactagatcttgaga

SEQ ID NO: 5258 - DNA, 170 bp, Artificial sequence
  Map3k1.235_Rasa1.1478
  crRNA array
cgatttcttggctttatatatcttgtggaaaggacgaaacaccgtaatttctactaagtgtagataaaacgctactgatcgatcgtaatttctactaagtgtagatcgataatggtctatgatgtcttttttaagcttggcgtggatccgatatcaactagatcttgaga

SEQ ID NO: 5259 - DNA, 170 bp, Artificial sequence
  Map3k1.235_Rasa1.223
  crRNA array
cgatttcttggctttatatatcttgtggaaaggacgaaacaccgtaatttctactaagtgtagataaaacgctactgatcgatcgtaatttctactaagtgtagattccatggagtatcgtgctcgttttttaagcttggcgtggatccgatatcaactagatcttgaga

SEQ ID NO: 5260 - DNA, 170 bp, Artificial sequence
  Map3k1.235_Rb1.211
  crRNA array
cgatttcttggctttatatatcttgtggaaaggacgaaacaccgtaatttctactaagtgtagataaaacgctactgatcgatcgtaatttctactaagtgtagattctgacatgatcgggtacctttttttaagcttggcgtggatccgatatcaactagatcttgaga

SEQ ID NO: 5261 - DNA, 170 bp, Artificial sequence
  Map3k1.235_Rb1.394
  crRNA array
cgatttcttggctttatatatcttgtggaaaggacgaaacaccgtaatttctactaagtgtagataaaacgctactgatcgatcgtaatttctactaagtgtagatagaaatctcgaagcaggatcttttttaagcttggcgtggatccgatatcaactagatcttgaga

SEQ ID NO: 5262 - DNA, 170 bp, Artificial sequence
  Map3k1.235_Rbm10.5
  crRNA array
cgatttcttggctttatatatcttgtggaaaggacgaaacaccgtaatttctactaagtgtagataaaacgctactgatcgatcgtaatttctactaagtgtagatacgaaacctgaacccacacattttttaagcttggcgtggatccgatatcaactagatcttgaga

SEQ ID NO: 5263 - DNA, 170 bp, Artificial sequence
  Map3k1.235_Rbm10.6
  crRNA array
cgatttcttggctttatatatcttgtggaaaggacgaaacaccgtaatttctactaagtgtagataaaacgctactgatcgatcgtaatttctactaagtgtagatcgaaacctgaacccacacagttttttaagcttggcgtggatccgatatcaactagatcttgaga

SEQ ID NO: 5264 - DNA, 170 bp, Artificial sequence
  Map3k1.235_Rnf43.1920
  crRNA array
cgatttcttggctttatatatcttgtggaaaggacgaaacaccgtaatttctactaagtgtagataaaacgctactgatcgatcgtaatttctactaagtgtagatatccccgtgccgtggactccttttttaagcttggcgtggatccgatatcaactagatcttgaga

SEQ ID NO: 5265 - DNA, 170 bp, Artificial sequence
  Map3k1.235_Rnf43.39
  crRNA array
cgatttcttggctttatatatcttgtggaaaggacgaaacaccgtaatttctactaagtgtagataaaacgctactgatcgatcgtaatttctactaagtgtagatcaaggggatcactctgataattttttaagcttggcgtggatccgatatcaactagatcttgaga

SEQ ID NO: 5266 - DNA, 170 bp, Artificial sequence
  Map3k1.235_Runx1.204
  crRNA array
cgatttcttggctttatatatcttgtggaaaggacgaaacaccgtaatttctactaagtgtagataaaacgctactgatcgatcgtaatttctactaagtgtagattaaataagtccagccgttttttttttaagcttggcgtggatccgatatcaactagatcttgaga

SEQ ID NO: 5267 - DNA, 170 bp, Artificial sequence
  Map3k1.235_Runx1.81
  crRNA array
cgatttcttggctttatatatcttgtggaaaggacgaaacaccgtaatttctactaagtgtagataaaacgctactgatcgatcgtaatttctactaagtgtagataggacgcgtatgggaattttttttttaagcttggcgtggatccgatatcaactagatcttgaga

SEQ ID NO: 5268 - DNA, 170 bp, Artificial sequence
  Map3k1.235_Setd2.143
  crRNA array
cgatttcttggctttatatatcttgtggaaaggacgaaacaccgtaatttctactaagtgtagataaaacgctactgatcgatcgtaatttctactaagtgtagatgcacaaccacaacagactggttttttaagcttggcgtggatccgatatcaactagatcttgaga

SEQ ID NO: 5269 - DNA, 170 bp, Artificial sequence
  Map3k1.235_Setd2.508
  crRNA array
cgatttcttggctttatatatcttgtggaaaggacgaaacaccgtaatttctactaagtgtagataaaacgctactgatcgatcgtaatttctactaagtgtagattacgatcccgagcacccgacttttttaagcttggcgtggatccgatatcaactagatcttgaga

SEQ ID NO: 5270 - DNA, 170 bp, Artificial sequence
  Map3k1.235_Smad4.3038
  crRNA array
cgatttcttggctttatatatcttgtggaaaggacgaaacaccgtaatttctactaagtgtagataaaacgctactgatcgatcgtaatttctactaagtgtagatatctgcggcagtgtcaccggttttttaagcttggcgtggatccgatatcaactagatcttgaga

SEQ ID NO: 5271 - DNA, 170 bp, Artificial sequence
  Map3k1.235_Smad4.39
  crRNA array
cgatttcttggctttatatatcttgtggaaaggacgaaacaccgtaatttctactaagtgtagataaaacgctactgatcgatcgtaatttctactaagtgtagatagtcaaacgcatactgacaattttttaagcttggcgtggatccgatatcaactagatcttgaga

SEQ ID NO: 5272 - DNA, 170 bp, Artificial sequence
  Map3k1.235_Stag2.1409
  crRNA array
cgatttcttggctttatatatcttgtggaaaggacgaaacaccgtaatttctactaagtgtagataaaacgctactgatcgatcgtaatttctactaagtgtagatgctaataactgcggaagggcttttttaagcttggcgtggatccgatatcaactagatcttgaga

SEQ ID NO: 5273 - DNA, 170 bp, Artificial sequence
  Map3k1.235_Stag2.4401
  crRNA array
cgatttcttggctttatatatcttgtggaaaggacgaaacaccgtaatttctactaagtgtagataaaacgctactgatcgatcgtaatttctactaagtgtagattaatcgtccagtggtgtatattttttaagcttggcgtggatccgatatcaactagatcttgaga

SEQ ID NO: 5274 - DNA, 170 bp, Artificial sequence
  Map3k1.235_Tbl1xr1.1
  crRNA array
cgatttcttggctttatatatcttgtggaaaggacgaaacaccgtaatttctactaagtgtagataaaacgctactgatcgatcgtaatttctactaagtgtagatggatgcgcatactggtgaagttttttaagcttggcgtggatccgatatcaactagatcttgaga

SEQ ID NO: 5275 - DNA, 170 bp, Artificial sequence
  Map3k1.235_Tbl1xr1.83
  crRNA array
cgatttcttggctttatatatcttgtggaaaggacgaaacaccgtaatttctactaagtgtagataaaacgctactgatcgatcgtaatttctactaagtgtagatatggtcgacccatcgagtctttttttaagcttggcgtggatccgatatcaactagatcttgaga

SEQ ID NO: 5276 - DNA, 170 bp, Artificial sequence
  Map3k1.235_Tgfbr2.290
  crRNA array
cgatttcttggctttatatatcttgtggaaaggacgaaacaccgtaatttctactaagtgtagataaaacgctactgatcgatcgtaatttctactaagtgtagatcctctcggcgcccgggtaaattttttaagcttggcgtggatccgatatcaactagatcttgaga

SEQ ID NO: 5277 - DNA, 170 bp, Artificial sequence
  Map3k1.235_Tgfbr2.292
  crRNA array
cgatttcttggctttatatatcttgtggaaaggacgaaacaccgtaatttctactaagtgtagataaaacgctactgatcgatcgtaatttctactaagtgtagatcccgggcgccgagagggaaattttttaagcttggcgtggatccgatatcaactagatcttgaga

SEQ ID NO: 5278 - DNA, 170 bp, Artificial sequence
  Map3k1.235_Trp53.4
  crRNA array
cgatttcttggctttatatatcttgtggaaaggacgaaacaccgtaatttctactaagtgtagataaaacgctactgatcgatcgtaatttctactaagtgtagatccctgaactgcccccagggattttttaagcttggcgtggatccgatatcaactagatcttgaga

SEQ ID NO: 5279 - DNA, 170 bp, Artificial sequence
  Map3k1.235_Trp53.528
  crRNA array
cgatttcttggctttatatatcttgtggaaaggacgaaacaccgtaatttctactaagtgtagataaaacgctactgatcgatcgtaatttctactaagtgtagatgctgggccagcagagacctgttttttaagcttggcgtggatccgatatcaactagatcttgaga

SEQ ID NO: 5280 - DNA, 170 bp, Artificial sequence
  Map3k1.235_Vhl.1
  crRNA array
cgatttcttggctttatatatcttgtggaaaggacgaaacaccgtaatttctactaagtgtagataaaacgctactgatcgatcgtaatttctactaagtgtagatagggctcccggcggccatttttttttaagcttggcgtggatccgatatcaactagatcttgaga

SEQ ID NO: 5281 - DNA, 170 bp, Artificial sequence
  Map3k1.235_Vhl.151
  crRNA array
cgatttcttggctttatatatcttgtggaaaggacgaaacaccgtaatttctactaagtgtagataaaacgctactgatcgatcgtaatttctactaagtgtagattagagcactcacccgagggattttttaagcttggcgtggatccgatatcaactagatcttgaga

SEQ ID NO: 5282 - DNA, 170 bp, Artificial sequence
  Map3k1.235_Zc3h13.1387
  crRNA array
cgatttcttggctttatatatcttgtggaaaggacgaaacaccgtaatttctactaagtgtagataaaacgctactgatcgatcgtaatttctactaagtgtagatgtgacgccggtcatgtgactttttttaagcttggcgtggatccgatatcaactagatcttgaga

SEQ ID NO: 5283 - DNA, 170 bp, Artificial sequence
  Map3k1.235_Zc3h13.1777
  crRNA array
cgatttcttggctttatatatcttgtggaaaggacgaaacaccgtaatttctactaagtgtagataaaacgctactgatcgatcgtaatttctactaagtgtagatgatgctgccagtgtagcggcttttttaagcttggcgtggatccgatatcaactagatcttgaga

SEQ ID NO: 5284 - DNA, 170 bp, Artificial sequence
  Map3k1.3838_Acvr2a.155
  crRNA array
cgatttcttggctttatatatcttgtggaaaggacgaaacaccgtaatttctactaagtgtagatccaacaacagggccccactataatttctactaagtgtagatggacctggctaatcaagtatttttttaagcttggcgtggatccgatatcaactagatcttgaga

SEQ ID NO: 5285 - DNA, 170 bp, Artificial sequence
  Map3k1.3838_Acvr2a.70
  crRNA array
cgatttcttggctttatatatcttgtggaaaggacgaaacaccgtaatttctactaagtgtagatccaacaacagggccccactataatttctactaagtgtagatcccgaggcgccggagaagccttttttaagcttggcgtggatccgatatcaactagatcttgaga

SEQ ID NO: 5286 - DNA, 170 bp, Artificial sequence
  Map3k1.3838_Apc.21
  crRNA array
cgatttcttggctttatatatcttgtggaaaggacgaaacaccgtaatttctactaagtgtagatccaacaacagggccccactataatttctactaagtgtagatgtgatccacacgtgtagctgttttttaagcttggcgtggatccgatatcaactagatcttgaga

SEQ ID NO: 5287 - DNA, 170 bp, Artificial sequence
  Map3k1.3838_Apc.867
  crRNA array
cgatttcttggctttatatatcttgtggaaaggacgaaacaccgtaatttctactaagtgtagatccaacaacagggccccactataatttctactaagtgtagatcagtcccaggcggcggaagcttttttaagcttggcgtggatccgatatcaactagatcttgaga

SEQ ID NO: 5288 - DNA, 170 bp, Artificial sequence
  Map3k1.3838_Arid1a.2
  crRNA array
cgatttcttggctttatatatcttgtggaaaggacgaaacaccgtaatttctactaagtgtagatccaacaacagggccccactataatttctactaagtgtagatcccgcgcccccgtcctggggttttttaagcttggcgtggatccgatatcaactagatcttgaga

SEQ ID NO: 5289 - DNA, 170 bp, Artificial sequence
  Map3k1.3838_Arid1a.5
  crRNA array
cgatttcttggctttatatatcttgtggaaaggacgaaacaccgtaatttctactaagtgtagatccaacaacagggccccactataatttctactaagtgtagatcccgcgctcggccgctgccgttttttaagcttggcgtggatccgatatcaactagatcttgaga

SEQ ID NO: 5290 - DNA, 170 bp, Artificial sequence
  Map3k1.3838_Arid2.166
  crRNA array
cgatttcttggctttatatatcttgtggaaaggacgaaacaccgtaatttctactaagtgtagatccaacaacagggccccactataatttctactaagtgtagataaccgcgatctgggttttttttttttaagcttggcgtggatccgatatcaactagatcttgaga

SEQ ID NO: 5291 - DNA, 170 bp, Artificial sequence
  Map3k1.3838_Arid2.172
  crRNA array
cgatttcttggctttatatatcttgtggaaaggacgaaacaccgtaatttctactaagtgtagatccaacaacagggccccactataatttctactaagtgtagatctggacgagctgcggcagttttttttaagcttggcgtggatccgatatcaactagatcttgaga

SEQ ID NO: 5292 - DNA, 170 bp, Artificial sequence
  Map3k1.3838_Atm.120
  crRNA array
cgatttcttggctttatatatcttgtggaaaggacgaaacaccgtaatttctactaagtgtagatccaacaacagggccccactataatttctactaagtgtagatgacaggtagtcggcagctaattttttaagcttggcgtggatccgatatcaactagatcttgaga

SEQ ID NO: 5293 - DNA, 170 bp, Artificial sequence
  Map3k1.3838_Atm.997
  crRNA array
cgatttcttggctttatatatcttgtggaaaggacgaaacaccgtaatttctactaagtgtagatccaacaacagggccccactataatttctactaagtgtagatgagaaagtctccgaatcgttttttttaagcttggcgtggatccgatatcaactagatcttgaga

SEQ ID NO: 5294 - DNA, 170 bp, Artificial sequence
  Map3k1.3838_Atrx.249
  crRNA array
cgatttcttggctttatatatcttgtggaaaggacgaaacaccgtaatttctactaagtgtagatccaacaacagggccccactataatttctactaagtgtagattagccagtcgctcatatctcttttttaagcttggcgtggatccgatatcaactagatcttgaga

SEQ ID NO: 5295 - DNA, 170 bp, Artificial sequence
  Map3k1.3838_Atrx.251
  crRNA array
cgatttcttggctttatatatcttgtggaaaggacgaaacaccgtaatttctactaagtgtagatccaacaacagggccccactataatttctactaagtgtagatgccagtcgctcatatctctgttttttaagcttggcgtggatccgatatcaactagatcttgaga

SEQ ID NO: 5296 - DNA, 170 bp, Artificial sequence
  Map3k1.3838_Bcor.203
  crRNA array
cgatttcttggctttatatatcttgtggaaaggacgaaacaccgtaatttctactaagtgtagatccaacaacagggccccactataatttctactaagtgtagatccccggagcggagtccaggcttttttaagcttggcgtggatccgatatcaactagatcttgaga

SEQ ID NO: 5297 - DNA, 170 bp, Artificial sequence
  Map3k1.3838_Bcor.475
  crRNA array
cgatttcttggctttatatatcttgtggaaaggacgaaacaccgtaatttctactaagtgtagatccaacaacagggccccactataatttctactaagtgtagattgcaacccctctgtatgggattttttaagcttggcgtggatccgatatcaactagatcttgaga

SEQ ID NO: 5298 - DNA, 170 bp, Artificial sequence
  Map3k1.3838_Brca1.112
  crRNA array
cgatttcttggctttatatatcttgtggaaaggacgaaacaccgtaatttctactaagtgtagatccaacaacagggccccactataatttctactaagtgtagatctagacgctctgtggagactttttttaagcttggcgtggatccgatatcaactagatcttgaga

SEQ ID NO: 5299 - DNA, 170 bp, Artificial sequence
  Map3k1.3838_Brca1.53
  crRNA array
cgatttcttggctttatatatcttgtggaaaggacgaaacaccgtaatttctactaagtgtagatccaacaacagggccccactataatttctactaagtgtagataatgaggaggcgtcgatcatttttttaagcttggcgtggatccgatatcaactagatcttgaga

SEQ ID NO: 5300 - DNA, 170 bp, Artificial sequence
  Map3k1.3838_Casp8.45
  crRNA array
cgatttcttggctttatatatcttgtggaaaggacgaaacaccgtaatttctactaagtgtagatccaacaacagggccccactataatttctactaagtgtagatctaccgagatcctgtgaatgttttttaagcttggcgtggatccgatatcaactagatcttgaga

SEQ ID NO: 5301 - DNA, 170 bp, Artificial sequence
  Map3k1.3838_Casp8.54
  crRNA array
cgatttcttggctttatatatcttgtggaaaggacgaaacaccgtaatttctactaagtgtagatccaacaacagggccccactataatttctactaagtgtagatcagtgcagtcgtcgtaagatttttttaagcttggcgtggatccgatatcaactagatcttgaga

SEQ ID NO: 5302 - DNA, 170 bp, Artificial sequence
  Map3k1.3838_Cbwd1.84
  crRNA array
cgatttcttggctttatatatcttgtggaaaggacgaaacaccgtaatttctactaagtgtagatccaacaacagggccccactataatttctactaagtgtagatcacagcaggtaacatgccgcttttttaagcttggcgtggatccgatatcaactagatcttgaga

SEQ ID NO: 5303 - DNA, 170 bp, Artificial sequence
  Map3k1.3838_Cbwd1.85
  crRNA array
cgatttcttggctttatatatcttgtggaaaggacgaaacaccgtaatttctactaagtgtagatccaacaacagggccccactataatttctactaagtgtagatacagcaggtaacatgccgccttttttaagcttggcgtggatccgatatcaactagatcttgaga

SEQ ID NO: 5304 - DNA, 170 bp, Artificial sequence
  Map3k1.3838_Cdh1.387
  crRNA array
cgatttcttggctttatatatcttgtggaaaggacgaaacaccgtaatttctactaagtgtagatccaacaacagggccccactataatttctactaagtgtagatctcggcgtctgccgggtccgttttttaagcttggcgtggatccgatatcaactagatcttgaga

SEQ ID NO: 5305 - DNA, 170 bp, Artificial sequence
  Map3k1.3838_Cdh1.58
  crRNA array
cgatttcttggctttatatatcttgtggaaaggacgaaacaccgtaatttctactaagtgtagatccaacaacagggccccactataatttctactaagtgtagatctcgtccgcgcccgggactcttttttaagcttggcgtggatccgatatcaactagatcttgaga

SEQ ID NO: 5306 - DNA, 170 bp, Artificial sequence
  Map3k1.3838_Cdkn2a.647
  crRNA array
cgatttcttggctttatatatcttgtggaaaggacgaaacaccgtaatttctactaagtgtagatccaacaacagggccccactataatttctactaagtgtagatgcaatcacgggagggagcagttttttaagcttggcgtggatccgatatcaactagatcttgaga

SEQ ID NO: 5307 - DNA, 170 bp, Artificial sequence
  Map3k1.3838_Cdkn2a.648
  crRNA array
cgatttcttggctttatatatcttgtggaaaggacgaaacaccgtaatttctactaagtgtagatccaacaacagggccccactataatttctactaagtgtagatcaatcacgggagggagcagattttttaagcttggcgtggatccgatatcaactagatcttgaga

SEQ ID NO: 5308 - DNA, 170 bp, Artificial sequence
  Map3k1.3838_Cic.162
  crRNA array
cgatttcttggctttatatatcttgtggaaaggacgaaacaccgtaatttctactaagtgtagatccaacaacagggccccactataatttctactaagtgtagatcgcaggcgcgcccggcggagttttttaagcttggcgtggatccgatatcaactagatcttgaga

SEQ ID NO: 5309 - DNA, 170 bp, Artificial sequence
  Map3k1.3838_Cic.164
  crRNA array
cgatttcttggctttatatatcttgtggaaaggacgaaacaccgtaatttctactaagtgtagatccaacaacagggccccactataatttctactaagtgtagatcgggccctgggccggcggctttttttaagcttggcgtggatccgatatcaactagatcttgaga

SEQ ID NO: 5310 - DNA, 170 bp, Artificial sequence
  Map3k1.3838_Ctcf.229
  crRNA array
cgatttcttggctttatatatcttgtggaaaggacgaaacaccgtaatttctactaagtgtagatccaacaacagggccccactataatttctactaagtgtagatggctggtggctgatagtctgttttttaagcttggcgtggatccgatatcaactagatcttgaga

SEQ ID NO: 5311 - DNA, 170 bp, Artificial sequence
  Map3k1.3838_Ctcf.809
  crRNA array
cgatttcttggctttatatatcttgtggaaaggacgaaacaccgtaatttctactaagtgtagatccaacaacagggccccactataatttctactaagtgtagataagcgctatcatgatcccaattttttaagcttggcgtggatccgatatcaactagatcttgaga

SEQ ID NO: 5312 - DNA, 170 bp, Artificial sequence
  Map3k1.3838_Elf3.826
  crRNA array
cgatttcttggctttatatatcttgtggaaaggacgaaacaccgtaatttctactaagtgtagatccaacaacagggccccactataatttctactaagtgtagattccgagacatcctaatccacttttttaagcttggcgtggatccgatatcaactagatcttgaga

SEQ ID NO: 5313 - DNA, 170 bp, Artificial sequence
  Map3k1.3838_Elf3.983
  crRNA array
cgatttcttggctttatatatcttgtggaaaggacgaaacaccgtaatttctactaagtgtagatccaacaacagggccccactataatttctactaagtgtagattaggccccctaactggaccattttttaagcttggcgtggatccgatatcaactagatcttgaga

SEQ ID NO: 5314 - DNA, 170 bp, Artificial sequence
  Map3k1.3838_Ep300.310
  crRNA array
cgatttcttggctttatatatcttgtggaaaggacgaaacaccgtaatttctactaagtgtagatccaacaacagggccccactataatttctactaagtgtagatatggtacgacagtgaggaagttttttaagcttggcgtggatccgatatcaactagatcttgaga

SEQ ID NO: 5315 - DNA, 170 bp, Artificial sequence
  Map3k1.3838_Ep300.587
  crRNA array
cgatttcttggctttatatatcttgtggaaaggacgaaacaccgtaatttctactaagtgtagatccaacaacagggccccactataatttctactaagtgtagatcgccccggggcccccaaccattttttaagcttggcgtggatccgatatcaactagatcttgaga

SEQ ID NO: 5316 - DNA, 170 bp, Artificial sequence
  Map3k1.3838_Epha2.126
  crRNA array
cgatttcttggctttatatatcttgtggaaaggacgaaacaccgtaatttctactaagtgtagatccaacaacagggccccactataatttctactaagtgtagatcctgtgccgccgcggccgccttttttaagcttggcgtggatccgatatcaactagatcttgaga

SEQ ID NO: 5317 - DNA, 170 bp, Artificial sequence
  Map3k1.3838_Epha2.5
  crRNA array
cgatttcttggctttatatatcttgtggaaaggacgaaacaccgtaatttctactaagtgtagatccaacaacagggccccactataatttctactaagtgtagatcatgagctggcgccacccggttttttaagcttggcgtggatccgatatcaactagatcttgaga

SEQ ID NO: 5318 - DNA, 170 bp, Artificial sequence
  Map3k1.3838_Fat1.105
  crRNA array
cgatttcttggctttatatatcttgtggaaaggacgaaacaccgtaatttctactaagtgtagatccaacaacagggccccactataatttctactaagtgtagataactcgaggtgacaacaagtttttttaagcttggcgtggatccgatatcaactagatcttgaga

SEQ ID NO: 5319 - DNA, 170 bp, Artificial sequence
  Map3k1.3838_Fat1.122
  crRNA array
cgatttcttggctttatatatcttgtggaaaggacgaaacaccgtaatttctactaagtgtagatccaacaacagggccccactataatttctactaagtgtagatccatcgacatggaaacgggattttttaagcttggcgtggatccgatatcaactagatcttgaga

SEQ ID NO: 5320 - DNA, 170 bp, Artificial sequence
  Map3k1.3838_Fbxw7.21
  crRNA array
cgatttcttggctttatatatcttgtggaaaggacgaaacaccgtaatttctactaagtgtagatccaacaacagggccccactataatttctactaagtgtagattaatgtgccgtagaaacccattttttaagcttggcgtggatccgatatcaactagatcttgaga

SEQ ID NO: 5321 - DNA, 170 bp, Artificial sequence
  Map3k1.3838_Fbxw7.23
  crRNA array
cgatttcttggctttatatatcttgtggaaaggacgaaacaccgtaatttctactaagtgtagatccaacaacagggccccactataatttctactaagtgtagatatgtgccgtagaaacccatattttttaagcttggcgtggatccgatatcaactagatcttgaga

SEQ ID NO: 5322 - DNA, 170 bp, Artificial sequence
  Map3k1.3838_Gata3.34
  crRNA array
cgatttcttggctttatatatcttgtggaaaggacgaaacaccgtaatttctactaagtgtagatccaacaacagggccccactataatttctactaagtgtagatctaaactatcccgcaaagatttttttaagcttggcgtggatccgatatcaactagatcttgaga

SEQ ID NO: 5323 - DNA, 170 bp, Artificial sequence
  Map3k1.3838_Gata3.47
  crRNA array
cgatttcttggctttatatatcttgtggaaaggacgaaacaccgtaatttctactaagtgtagatccaacaacagggccccactataatttctactaagtgtagatcgtagtaggacgggacgtggttttttaagcttggcgtggatccgatatcaactagatcttgaga

SEQ ID NO: 5324 - DNA, 170 bp, Artificial sequence
  Map3k1.3838_H2-Q2.1
  crRNA array
cgatttcttggctttatatatcttgtggaaaggacgaaacaccgtaatttctactaagtgtagatccaacaacagggccccactataatttctactaagtgtagatagggcggccaccaacagcagttttttaagcttggcgtggatccgatatcaactagatcttgaga

SEQ ID NO: 5325 - DNA, 170 bp, Artificial sequence
  Map3k1.3838_H2-Q2.2
  crRNA array
cgatttcttggctttatatatcttgtggaaaggacgaaacaccgtaatttctactaagtgtagatccaacaacagggccccactataatttctactaagtgtagattaacctgcgcccgctgctgattttttaagcttggcgtggatccgatatcaactagatcttgaga

SEQ ID NO: 5326 - DNA, 170 bp, Artificial sequence
  Map3k1.3838_Kdm5c.1878
  crRNA array
cgatttcttggctttatatatcttgtggaaaggacgaaacaccgtaatttctactaagtgtagatccaacaacagggccccactataatttctactaagtgtagatagagcacggcacccgcccccttttttaagcttggcgtggatccgatatcaactagatcttgaga

SEQ ID NO: 5327 - DNA, 170 bp, Artificial sequence
  Map3k1.3838_Kdm5c.1879
  crRNA array
cgatttcttggctttatatatcttgtggaaaggacgaaacaccgtaatttctactaagtgtagatccaacaacagggccccactataatttctactaagtgtagatgagcacggcacccgccccccttttttaagcttggcgtggatccgatatcaactagatcttgaga

SEQ ID NO: 5328 - DNA, 170 bp, Artificial sequence
  Map3k1.3838_Kdm6a.56
  crRNA array
cgatttcttggctttatatatcttgtggaaaggacgaaacaccgtaatttctactaagtgtagatccaacaacagggccccactataatttctactaagtgtagattcgctgccgcctctcgcggcttttttaagcttggcgtggatccgatatcaactagatcttgaga

SEQ ID NO: 5329 - DNA, 170 bp, Artificial sequence
  Map3k1.3838_Kdm6a.57
  crRNA array
cgatttcttggctttatatatcttgtggaaaggacgaaacaccgtaatttctactaagtgtagatccaacaacagggccccactataatttctactaagtgtagatcgctgccgcctctcgcggcattttttaagcttggcgtggatccgatatcaactagatcttgaga

SEQ ID NO: 5330 - DNA, 170 bp, Artificial sequence
  Map3k1.3838_Kmt2b.265
  crRNA array
cgatttcttggctttatatatcttgtggaaaggacgaaacaccgtaatttctactaagtgtagatccaacaacagggccccactataatttctactaagtgtagatccccaagtgaagcccacctgttttttaagcttggcgtggatccgatatcaactagatcttgaga

SEQ ID NO: 5331 - DNA, 170 bp, Artificial sequence
  Map3k1.3838_Kmt2b.298
  crRNA array
cgatttcttggctttatatatcttgtggaaaggacgaaacaccgtaatttctactaagtgtagatccaacaacagggccccactataatttctactaagtgtagattccggcagggaccggctggcttttttaagcttggcgtggatccgatatcaactagatcttgaga

SEQ ID NO: 5332 - DNA, 170 bp, Artificial sequence
  Map3k1.3838_Kmt2c.1962
  crRNA array
cgatttcttggctttatatatcttgtggaaaggacgaaacaccgtaatttctactaagtgtagatccaacaacagggccccactataatttctactaagtgtagatgtgacgatctgtgccacaagttttttaagcttggcgtggatccgatatcaactagatcttgaga

SEQ ID NO: 5333 - DNA, 170 bp, Artificial sequence
  Map3k1.3838_Kmt2c.2236
  crRNA array
cgatttcttggctttatatatcttgtggaaaggacgaaacaccgtaatttctactaagtgtagatccaacaacagggccccactataatttctactaagtgtagatactcgacctccacctccctattttttaagcttggcgtggatccgatatcaactagatcttgaga

SEQ ID NO: 5334 - DNA, 170 bp, Artificial sequence
  Map3k1.3838_Kmt2d.316
  crRNA array
cgatttcttggctttatatatcttgtggaaaggacgaaacaccgtaatttctactaagtgtagatccaacaacagggccccactataatttctactaagtgtagatactccaggccacccaggtggttttttaagcttggcgtggatccgatatcaactagatcttgaga

SEQ ID NO: 5335 - DNA, 170 bp, Artificial sequence
  Map3k1.3838_Kmt2d.416
  crRNA array
cgatttcttggctttatatatcttgtggaaaggacgaaacaccgtaatttctactaagtgtagatccaacaacagggccccactataatttctactaagtgtagattaaacccccgggggaagggtttttttaagcttggcgtggatccgatatcaactagatcttgaga

SEQ ID NO: 5336 - DNA, 170 bp, Artificial sequence
  Map3k1.3838_Map2k4.119
  crRNA array
cgatttcttggctttatatatcttgtggaaaggacgaaacaccgtaatttctactaagtgtagatccaacaacagggccccactataatttctactaagtgtagattgctgtgtgggcggccacatttttttaagcttggcgtggatccgatatcaactagatcttgaga

SEQ ID NO: 5337 - DNA, 170 bp, Artificial sequence
  Map3k1.3838_Map2k4.1261
  crRNA array
cgatttcttggctttatatatcttgtggaaaggacgaaacaccgtaatttctactaagtgtagatccaacaacagggccccactataatttctactaagtgtagatgatgtagtaatgcggagtagttttttaagcttggcgtggatccgatatcaactagatcttgaga

SEQ ID NO: 5338 - DNA, 170 bp, Artificial sequence
  Map3k1.3838_Mga.1655
  crRNA array
cgatttcttggctttatatatcttgtggaaaggacgaaacaccgtaatttctactaagtgtagatccaacaacagggccccactataatttctactaagtgtagatcgagaagtggagagcatattttttttaagcttggcgtggatccgatatcaactagatcttgaga

SEQ ID NO: 5339 - DNA, 170 bp, Artificial sequence
  Map3k1.3838_Mga.93
  crRNA array
cgatttcttggctttatatatcttgtggaaaggacgaaacaccgtaatttctactaagtgtagatccaacaacagggccccactataatttctactaagtgtagatgagaaggctccccataatgtttttttaagcttggcgtggatccgatatcaactagatcttgaga

SEQ ID NO: 5340 - DNA, 170 bp, Artificial sequence
  Map3k1.3838_Nf1.746
  crRNA array
cgatttcttggctttatatatcttgtggaaaggacgaaacaccgtaatttctactaagtgtagatccaacaacagggccccactataatttctactaagtgtagattaagcataatgatgatgccattttttaagcttggcgtggatccgatatcaactagatcttgaga

SEQ ID NO: 5341 - DNA, 170 bp, Artificial sequence
  Map3k1.3838_Nf1.97
  crRNA array
cgatttcttggctttatatatcttgtggaaaggacgaaacaccgtaatttctactaagtgtagatccaacaacagggccccactataatttctactaagtgtagatagcccgctacatgctgatgcttttttaagcttggcgtggatccgatatcaactagatcttgaga

SEQ ID NO: 5342 - DNA, 170 bp, Artificial sequence
  Map3k1.3838_Nf2.356
  crRNA array
cgatttcttggctttatatatcttgtggaaaggacgaaacaccgtaatttctactaagtgtagatccaacaacagggccccactataatttctactaagtgtagatcggagtcatctgatagagatttttttaagcttggcgtggatccgatatcaactagatcttgaga

SEQ ID NO: 5343 - DNA, 170 bp, Artificial sequence
  Map3k1.3838_Nf2.768
  crRNA array
cgatttcttggctttatatatcttgtggaaaggacgaaacaccgtaatttctactaagtgtagatccaacaacagggccccactataatttctactaagtgtagatccgaagccccagtgtccggcttttttaagcttggcgtggatccgatatcaactagatcttgaga

SEQ ID NO: 5344 - DNA, 170 bp, Artificial sequence
  Map3k1.3838_Notch1.1849
  crRNA array
cgatttcttggctttatatatcttgtggaaaggacgaaacaccgtaatttctactaagtgtagatccaacaacagggccccactataatttctactaagtgtagatctggcgggtgggcggcgctgttttttaagcttggcgtggatccgatatcaactagatcttgaga

SEQ ID NO: 5345 - DNA, 170 bp, Artificial sequence
  Map3k1.3838_Notch1.649
  crRNA array
cgatttcttggctttatatatcttgtggaaaggacgaaacaccgtaatttctactaagtgtagatccaacaacagggccccactataatttctactaagtgtagattgggccaacgatgccaggacttttttaagcttggcgtggatccgatatcaactagatcttgaga

SEQ ID NO: 5346 - DNA, 170 bp, Artificial sequence
  Map3k1.3838_Nsd1.70
  crRNA array
cgatttcttggctttatatatcttgtggaaaggacgaaacaccgtaatttctactaagtgtagatccaacaacagggccccactataatttctactaagtgtagatactggtgtggacgatgcagattttttaagcttggcgtggatccgatatcaactagatcttgaga

SEQ ID NO: 5347 - DNA, 170 bp, Artificial sequence
  Map3k1.3838_Nsd1.90
  crRNA array
cgatttcttggctttatatatcttgtggaaaggacgaaacaccgtaatttctactaagtgtagatccaacaacagggccccactataatttctactaagtgtagataggagctaacggcaagaatgttttttaagcttggcgtggatccgatatcaactagatcttgaga

SEQ ID NO: 5348 - DNA, 170 bp, Artificial sequence
  Map3k1.3838_Pbrm1.1236
  crRNA array
cgatttcttggctttatatatcttgtggaaaggacgaaacaccgtaatttctactaagtgtagatccaacaacagggccccactataatttctactaagtgtagatgccgataaaaccaacagccgttttttaagcttggcgtggatccgatatcaactagatcttgaga

SEQ ID NO: 5349 - DNA, 170 bp, Artificial sequence
  Map3k1.3838_Pbrm1.969
  crRNA array
cgatttcttggctttatatatcttgtggaaaggacgaaacaccgtaatttctactaagtgtagatccaacaacagggccccactataatttctactaagtgtagatgagccctaatgaacagctcattttttaagcttggcgtggatccgatatcaactagatcttgaga

SEQ ID NO: 5350 - DNA, 170 bp, Artificial sequence
  Map3k1.3838_Pik3r1.76
  crRNA array
cgatttcttggctttatatatcttgtggaaaggacgaaacaccgtaatttctactaagtgtagatccaacaacagggccccactataatttctactaagtgtagataaaacctatacggcccgcacttttttaagcttggcgtggatccgatatcaactagatcttgaga

SEQ ID NO: 5351 - DNA, 170 bp, Artificial sequence
  Map3k1.3838_Pik3r1.77
  crRNA array
cgatttcttggctttatatatcttgtggaaaggacgaaacaccgtaatttctactaagtgtagatccaacaacagggccccactataatttctactaagtgtagataaacctatacggcccgcactttttttaagcttggcgtggatccgatatcaactagatcttgaga

SEQ ID NO: 5352 - DNA, 170 bp, Artificial sequence
  Map3k1.3838_Pten.240
  crRNA array
cgatttcttggctttatatatcttgtggaaaggacgaaacaccgtaatttctactaagtgtagatccaacaacagggccccactataatttctactaagtgtagattgcatacgctatagctgcttttttttaagcttggcgtggatccgatatcaactagatcttgaga

SEQ ID NO: 5353 - DNA, 170 bp, Artificial sequence
  Map3k1.3838_Pten.265
  crRNA array
cgatttcttggctttatatatcttgtggaaaggacgaaacaccgtaatttctactaagtgtagatccaacaacagggccccactataatttctactaagtgtagataagcgtggtgcgtgacgcacttttttaagcttggcgtggatccgatatcaactagatcttgaga

SEQ ID NO: 5354 - DNA, 170 bp, Artificial sequence
  Map3k1.3838_Rasa1.1478
  crRNA array
cgatttcttggctttatatatcttgtggaaaggacgaaacaccgtaatttctactaagtgtagatccaacaacagggccccactataatttctactaagtgtagatcgataatggtctatgatgtcttttttaagcttggcgtggatccgatatcaactagatcttgaga

SEQ ID NO: 5355 - DNA, 170 bp, Artificial sequence
  Map3k1.3838_Rasa1.223
  crRNA array
cgatttcttggctttatatatcttgtggaaaggacgaaacaccgtaatttctactaagtgtagatccaacaacagggccccactataatttctactaagtgtagattccatggagtatcgtgctcgttttttaagcttggcgtggatccgatatcaactagatcttgaga

SEQ ID NO: 5356 - DNA, 170 bp, Artificial sequence
  Map3k1.3838_Rb1.211
  crRNA array
cgatttcttggctttatatatcttgtggaaaggacgaaacaccgtaatttctactaagtgtagatccaacaacagggccccactataatttctactaagtgtagattctgacatgatcgggtacctttttttaagcttggcgtggatccgatatcaactagatcttgaga

SEQ ID NO: 5357 - DNA, 170 bp, Artificial sequence
  Map3k1.3838_Rb1.394
  crRNA array
cgatttcttggctttatatatcttgtggaaaggacgaaacaccgtaatttctactaagtgtagatccaacaacagggccccactataatttctactaagtgtagatagaaatctcgaagcaggatcttttttaagcttggcgtggatccgatatcaactagatcttgaga

SEQ ID NO: 5358 - DNA, 170 bp, Artificial sequence
  Map3k1.3838_Rbm10.5
  crRNA array
cgatttcttggctttatatatcttgtggaaaggacgaaacaccgtaatttctactaagtgtagatccaacaacagggccccactataatttctactaagtgtagatacgaaacctgaacccacacattttttaagcttggcgtggatccgatatcaactagatcttgaga

SEQ ID NO: 5359 - DNA, 170 bp, Artificial sequence
  Map3k1.3838_Rbm10.6
  crRNA array
cgatttcttggctttatatatcttgtggaaaggacgaaacaccgtaatttctactaagtgtagatccaacaacagggccccactataatttctactaagtgtagatcgaaacctgaacccacacagttttttaagcttggcgtggatccgatatcaactagatcttgaga

SEQ ID NO: 5360 - DNA, 170 bp, Artificial sequence
  Map3k1.3838_Rnf43.1920
  crRNA array
cgatttcttggctttatatatcttgtggaaaggacgaaacaccgtaatttctactaagtgtagatccaacaacagggccccactataatttctactaagtgtagatatccccgtgccgtggactccttttttaagcttggcgtggatccgatatcaactagatcttgaga

SEQ ID NO: 5361 - DNA, 170 bp, Artificial sequence
  Map3k1.3838_Rnf43.39
  crRNA array
cgatttcttggctttatatatcttgtggaaaggacgaaacaccgtaatttctactaagtgtagatccaacaacagggccccactataatttctactaagtgtagatcaaggggatcactctgataattttttaagcttggcgtggatccgatatcaactagatcttgaga

SEQ ID NO: 5362 - DNA, 170 bp, Artificial sequence
  Map3k1.3838_Runx1.204
  crRNA array
cgatttcttggctttatatatcttgtggaaaggacgaaacaccgtaatttctactaagtgtagatccaacaacagggccccactataatttctactaagtgtagattaaataagtccagccgttttttttttaagcttggcgtggatccgatatcaactagatcttgaga

SEQ ID NO: 5363 - DNA, 170 bp, Artificial sequence
  Map3k1.3838_Runx1.81
  crRNA array
cgatttcttggctttatatatcttgtggaaaggacgaaacaccgtaatttctactaagtgtagatccaacaacagggccccactataatttctactaagtgtagataggacgcgtatgggaattttttttttaagcttggcgtggatccgatatcaactagatcttgaga

SEQ ID NO: 5364 - DNA, 170 bp, Artificial sequence
  Map3k1.3838_Setd2.143
  crRNA array
cgatttcttggctttatatatcttgtggaaaggacgaaacaccgtaatttctactaagtgtagatccaacaacagggccccactataatttctactaagtgtagatgcacaaccacaacagactggttttttaagcttggcgtggatccgatatcaactagatcttgaga

SEQ ID NO: 5365 - DNA, 170 bp, Artificial sequence
  Map3k1.3838_Setd2.508
  crRNA array
cgatttcttggctttatatatcttgtggaaaggacgaaacaccgtaatttctactaagtgtagatccaacaacagggccccactataatttctactaagtgtagattacgatcccgagcacccgacttttttaagcttggcgtggatccgatatcaactagatcttgaga

SEQ ID NO: 5366 - DNA, 170 bp, Artificial sequence
  Map3k1.3838_Smad4.3038
  crRNA array
cgatttcttggctttatatatcttgtggaaaggacgaaacaccgtaatttctactaagtgtagatccaacaacagggccccactataatttctactaagtgtagatatctgcggcagtgtcaccggttttttaagcttggcgtggatccgatatcaactagatcttgaga

SEQ ID NO: 5367 - DNA, 170 bp, Artificial sequence
  Map3k1.3838_Smad4.39
  crRNA array
cgatttcttggctttatatatcttgtggaaaggacgaaacaccgtaatttctactaagtgtagatccaacaacagggccccactataatttctactaagtgtagatagtcaaacgcatactgacaattttttaagcttggcgtggatccgatatcaactagatcttgaga

SEQ ID NO: 5368 - DNA, 170 bp, Artificial sequence
  Map3k1.3838_Stag2.1409
  crRNA array
cgatttcttggctttatatatcttgtggaaaggacgaaacaccgtaatttctactaagtgtagatccaacaacagggccccactataatttctactaagtgtagatgctaataactgcggaagggcttttttaagcttggcgtggatccgatatcaactagatcttgaga

SEQ ID NO: 5369 - DNA, 170 bp, Artificial sequence
  Map3k1.3838_Stag2.4401
  crRNA array
cgatttcttggctttatatatcttgtggaaaggacgaaacaccgtaatttctactaagtgtagatccaacaacagggccccactataatttctactaagtgtagattaatcgtccagtggtgtatattttttaagcttggcgtggatccgatatcaactagatcttgaga

SEQ ID NO: 5370 - DNA, 170 bp, Artificial sequence
  Map3k1.3838_Tbl1xr1.1
  crRNA array
cgatttcttggctttatatatcttgtggaaaggacgaaacaccgtaatttctactaagtgtagatccaacaacagggccccactataatttctactaagtgtagatggatgcgcatactggtgaagttttttaagcttggcgtggatccgatatcaactagatcttgaga

SEQ ID NO: 5371 - DNA, 170 bp, Artificial sequence
  Map3k1.3838_Tbl1xr1.83
  crRNA array
cgatttcttggctttatatatcttgtggaaaggacgaaacaccgtaatttctactaagtgtagatccaacaacagggccccactataatttctactaagtgtagatatggtcgacccatcgagtctttttttaagcttggcgtggatccgatatcaactagatcttgaga

SEQ ID NO: 5372 - DNA, 170 bp, Artificial sequence
  Map3k1.3838_Tgfbr2.290
  crRNA array
cgatttcttggctttatatatcttgtggaaaggacgaaacaccgtaatttctactaagtgtagatccaacaacagggccccactataatttctactaagtgtagatcctctcggcgcccgggtaaattttttaagcttggcgtggatccgatatcaactagatcttgaga

SEQ ID NO: 5373 - DNA, 170 bp, Artificial sequence
  Map3k1.3838_Tgfbr2.292
  crRNA array
cgatttcttggctttatatatcttgtggaaaggacgaaacaccgtaatttctactaagtgtagatccaacaacagggccccactataatttctactaagtgtagatcccgggcgccgagagggaaattttttaagcttggcgtggatccgatatcaactagatcttgaga

SEQ ID NO: 5374 - DNA, 170 bp, Artificial sequence
  Map3k1.3838_Trp53.4
  crRNA array
cgatttcttggctttatatatcttgtggaaaggacgaaacaccgtaatttctactaagtgtagatccaacaacagggccccactataatttctactaagtgtagatccctgaactgcccccagggattttttaagcttggcgtggatccgatatcaactagatcttgaga

SEQ ID NO: 5375 - DNA, 170 bp, Artificial sequence
  Map3k1.3838_Trp53.528
  crRNA array
cgatttcttggctttatatatcttgtggaaaggacgaaacaccgtaatttctactaagtgtagatccaacaacagggccccactataatttctactaagtgtagatgctgggccagcagagacctgttttttaagcttggcgtggatccgatatcaactagatcttgaga

SEQ ID NO: 5376 - DNA, 170 bp, Artificial sequence
  Map3k1.3838_Vhl.1
  crRNA array
cgatttcttggctttatatatcttgtggaaaggacgaaacaccgtaatttctactaagtgtagatccaacaacagggccccactataatttctactaagtgtagatagggctcccggcggccatttttttttaagcttggcgtggatccgatatcaactagatcttgaga

SEQ ID NO: 5377 - DNA, 170 bp, Artificial sequence
  Map3k1.3838_Vhl.151
  crRNA array
cgatttcttggctttatatatcttgtggaaaggacgaaacaccgtaatttctactaagtgtagatccaacaacagggccccactataatttctactaagtgtagattagagcactcacccgagggattttttaagcttggcgtggatccgatatcaactagatcttgaga

SEQ ID NO: 5378 - DNA, 170 bp, Artificial sequence
  Map3k1.3838_Zc3h13.1387
  crRNA array
cgatttcttggctttatatatcttgtggaaaggacgaaacaccgtaatttctactaagtgtagatccaacaacagggccccactataatttctactaagtgtagatgtgacgccggtcatgtgactttttttaagcttggcgtggatccgatatcaactagatcttgaga

SEQ ID NO: 5379 - DNA, 170 bp, Artificial sequence
  Map3k1.3838_Zc3h13.1777
  crRNA array
cgatttcttggctttatatatcttgtggaaaggacgaaacaccgtaatttctactaagtgtagatccaacaacagggccccactataatttctactaagtgtagatgatgctgccagtgtagcggcttttttaagcttggcgtggatccgatatcaactagatcttgaga

SEQ ID NO: 5380 - DNA, 170 bp, Artificial sequence
  Mga.1655_Acvr2a.155
  crRNA array
cgatttcttggctttatatatcttgtggaaaggacgaaacaccgtaatttctactaagtgtagatcgagaagtggagagcatatttaatttctactaagtgtagatggacctggctaatcaagtatttttttaagcttggcgtggatccgatatcaactagatcttgaga

SEQ ID NO: 5381 - DNA, 170 bp, Artificial sequence
  Mga.1655_Acvr2a.70
  crRNA array
cgatttcttggctttatatatcttgtggaaaggacgaaacaccgtaatttctactaagtgtagatcgagaagtggagagcatatttaatttctactaagtgtagatcccgaggcgccggagaagccttttttaagcttggcgtggatccgatatcaactagatcttgaga

SEQ ID NO: 5382 - DNA, 170 bp, Artificial sequence
  Mga.1655_Apc.21
  crRNA array
cgatttcttggctttatatatcttgtggaaaggacgaaacaccgtaatttctactaagtgtagatcgagaagtggagagcatatttaatttctactaagtgtagatgtgatccacacgtgtagctgttttttaagcttggcgtggatccgatatcaactagatcttgaga

SEQ ID NO: 5383 - DNA, 170 bp, Artificial sequence
  Mga.1655_Apc.867
  crRNA array
cgatttcttggctttatatatcttgtggaaaggacgaaacaccgtaatttctactaagtgtagatcgagaagtggagagcatatttaatttctactaagtgtagatcagtcccaggcggcggaagcttttttaagcttggcgtggatccgatatcaactagatcttgaga

SEQ ID NO: 5384 - DNA, 170 bp, Artificial sequence
  Mga.1655_Arid1a.2
  crRNA array
cgatttcttggctttatatatcttgtggaaaggacgaaacaccgtaatttctactaagtgtagatcgagaagtggagagcatatttaatttctactaagtgtagatcccgcgcccccgtcctggggttttttaagcttggcgtggatccgatatcaactagatcttgaga

SEQ ID NO: 5385 - DNA, 170 bp, Artificial sequence
  Mga.1655_Arid1a.5
  crRNA array
cgatttcttggctttatatatcttgtggaaaggacgaaacaccgtaatttctactaagtgtagatcgagaagtggagagcatatttaatttctactaagtgtagatcccgcgctcggccgctgccgttttttaagcttggcgtggatccgatatcaactagatcttgaga

SEQ ID NO: 5386 - DNA, 170 bp, Artificial sequence
  Mga.1655_Arid2.166
  crRNA array
cgatttcttggctttatatatcttgtggaaaggacgaaacaccgtaatttctactaagtgtagatcgagaagtggagagcatatttaatttctactaagtgtagataaccgcgatctgggttttttttttttaagcttggcgtggatccgatatcaactagatcttgaga

SEQ ID NO: 5387 - DNA, 170 bp, Artificial sequence
  Mga.1655_Arid2.172
  crRNA array
cgatttcttggctttatatatcttgtggaaaggacgaaacaccgtaatttctactaagtgtagatcgagaagtggagagcatatttaatttctactaagtgtagatctggacgagctgcggcagttttttttaagcttggcgtggatccgatatcaactagatcttgaga

SEQ ID NO: 5388 - DNA, 170 bp, Artificial sequence
  Mga.1655_Atm.120
  crRNA array
cgatttcttggctttatatatcttgtggaaaggacgaaacaccgtaatttctactaagtgtagatcgagaagtggagagcatatttaatttctactaagtgtagatgacaggtagtcggcagctaattttttaagcttggcgtggatccgatatcaactagatcttgaga

SEQ ID NO: 5389 - DNA, 170 bp, Artificial sequence
  Mga.1655_Atm.997
  crRNA array
cgatttcttggctttatatatcttgtggaaaggacgaaacaccgtaatttctactaagtgtagatcgagaagtggagagcatatttaatttctactaagtgtagatgagaaagtctccgaatcgttttttttaagcttggcgtggatccgatatcaactagatcttgaga

SEQ ID NO: 5390 - DNA, 170 bp, Artificial sequence
  Mga.1655_Atrx.249
  crRNA array
cgatttcttggctttatatatcttgtggaaaggacgaaacaccgtaatttctactaagtgtagatcgagaagtggagagcatatttaatttctactaagtgtagattagccagtcgctcatatctcttttttaagcttggcgtggatccgatatcaactagatcttgaga

SEQ ID NO: 5391 - DNA, 170 bp, Artificial sequence
  Mga.1655_Atrx.251
  crRNA array
cgatttcttggctttatatatcttgtggaaaggacgaaacaccgtaatttctactaagtgtagatcgagaagtggagagcatatttaatttctactaagtgtagatgccagtcgctcatatctctgttttttaagcttggcgtggatccgatatcaactagatcttgaga

SEQ ID NO: 5392 - DNA, 170 bp, Artificial sequence
  Mga.1655_Bcor.203
  crRNA array
cgatttcttggctttatatatcttgtggaaaggacgaaacaccgtaatttctactaagtgtagatcgagaagtggagagcatatttaatttctactaagtgtagatccccggagcggagtccaggcttttttaagcttggcgtggatccgatatcaactagatcttgaga

SEQ ID NO: 5393 - DNA, 170 bp, Artificial sequence
  Mga.1655_Bcor.475
  crRNA array
cgatttcttggctttatatatcttgtggaaaggacgaaacaccgtaatttctactaagtgtagatcgagaagtggagagcatatttaatttctactaagtgtagattgcaacccctctgtatgggattttttaagcttggcgtggatccgatatcaactagatcttgaga

SEQ ID NO: 5394 - DNA, 170 bp, Artificial sequence
  Mga.1655_Brca1.112
  crRNA array
cgatttcttggctttatatatcttgtggaaaggacgaaacaccgtaatttctactaagtgtagatcgagaagtggagagcatatttaatttctactaagtgtagatctagacgctctgtggagactttttttaagcttggcgtggatccgatatcaactagatcttgaga

SEQ ID NO: 5395 - DNA, 170 bp, Artificial sequence
  Mga.1655_Brca1.53
  crRNA array
cgatttcttggctttatatatcttgtggaaaggacgaaacaccgtaatttctactaagtgtagatcgagaagtggagagcatatttaatttctactaagtgtagataatgaggaggcgtcgatcatttttttaagcttggcgtggatccgatatcaactagatcttgaga

SEQ ID NO: 5396 - DNA, 170 bp, Artificial sequence
  Mga.1655_Casp8.45
  crRNA array
cgatttcttggctttatatatcttgtggaaaggacgaaacaccgtaatttctactaagtgtagatcgagaagtggagagcatatttaatttctactaagtgtagatctaccgagatcctgtgaatgttttttaagcttggcgtggatccgatatcaactagatcttgaga

SEQ ID NO: 5397 - DNA, 170 bp, Artificial sequence
  Mga.1655_Casp8.54
  crRNA array
cgatttcttggctttatatatcttgtggaaaggacgaaacaccgtaatttctactaagtgtagatcgagaagtggagagcatatttaatttctactaagtgtagatcagtgcagtcgtcgtaagatttttttaagcttggcgtggatccgatatcaactagatcttgaga

SEQ ID NO: 5398 - DNA, 170 bp, Artificial sequence
  Mga.1655_Cbwd1.84
  crRNA array
cgatttcttggctttatatatcttgtggaaaggacgaaacaccgtaatttctactaagtgtagatcgagaagtggagagcatatttaatttctactaagtgtagatcacagcaggtaacatgccgcttttttaagcttggcgtggatccgatatcaactagatcttgaga

SEQ ID NO: 5399 - DNA, 170 bp, Artificial sequence
  Mga.1655_Cbwd1.85
  crRNA array
cgatttcttggctttatatatcttgtggaaaggacgaaacaccgtaatttctactaagtgtagatcgagaagtggagagcatatttaatttctactaagtgtagatacagcaggtaacatgccgccttttttaagcttggcgtggatccgatatcaactagatcttgaga

SEQ ID NO: 5400 - DNA, 170 bp, Artificial sequence
  Mga.1655_Cdh1.387
  crRNA array
cgatttcttggctttatatatcttgtggaaaggacgaaacaccgtaatttctactaagtgtagatcgagaagtggagagcatatttaatttctactaagtgtagatctcggcgtctgccgggtccgttttttaagcttggcgtggatccgatatcaactagatcttgaga

SEQ ID NO: 5401 - DNA, 170 bp, Artificial sequence
  Mga.1655_Cdh1.58
  crRNA array
cgatttcttggctttatatatcttgtggaaaggacgaaacaccgtaatttctactaagtgtagatcgagaagtggagagcatatttaatttctactaagtgtagatctcgtccgcgcccgggactcttttttaagcttggcgtggatccgatatcaactagatcttgaga

SEQ ID NO: 5402 - DNA, 170 bp, Artificial sequence
  Mga.1655_Cdkn2a.647
  crRNA array
cgatttcttggctttatatatcttgtggaaaggacgaaacaccgtaatttctactaagtgtagatcgagaagtggagagcatatttaatttctactaagtgtagatgcaatcacgggagggagcagttttttaagcttggcgtggatccgatatcaactagatcttgaga

SEQ ID NO: 5403 - DNA, 170 bp, Artificial sequence
  Mga.1655_Cdkn2a.648
  crRNA array
cgatttcttggctttatatatcttgtggaaaggacgaaacaccgtaatttctactaagtgtagatcgagaagtggagagcatatttaatttctactaagtgtagatcaatcacgggagggagcagattttttaagcttggcgtggatccgatatcaactagatcttgaga

SEQ ID NO: 5404 - DNA, 170 bp, Artificial sequence
  Mga.1655_Cic.162
  crRNA array
cgatttcttggctttatatatcttgtggaaaggacgaaacaccgtaatttctactaagtgtagatcgagaagtggagagcatatttaatttctactaagtgtagatcgcaggcgcgcccggcggagttttttaagcttggcgtggatccgatatcaactagatcttgaga

SEQ ID NO: 5405 - DNA, 170 bp, Artificial sequence
  Mga.1655_Cic.164
  crRNA array
cgatttcttggctttatatatcttgtggaaaggacgaaacaccgtaatttctactaagtgtagatcgagaagtggagagcatatttaatttctactaagtgtagatcgggccctgggccggcggctttttttaagcttggcgtggatccgatatcaactagatcttgaga

SEQ ID NO: 5406 - DNA, 170 bp, Artificial sequence
  Mga.1655_Ctcf.229
  crRNA array
cgatttcttggctttatatatcttgtggaaaggacgaaacaccgtaatttctactaagtgtagatcgagaagtggagagcatatttaatttctactaagtgtagatggctggtggctgatagtctgttttttaagcttggcgtggatccgatatcaactagatcttgaga

SEQ ID NO: 5407 - DNA, 170 bp, Artificial sequence
  Mga.1655_Ctcf.809
  crRNA array
cgatttcttggctttatatatcttgtggaaaggacgaaacaccgtaatttctactaagtgtagatcgagaagtggagagcatatttaatttctactaagtgtagataagcgctatcatgatcccaattttttaagcttggcgtggatccgatatcaactagatcttgaga

SEQ ID NO: 5408 - DNA, 170 bp, Artificial sequence
  Mga.1655_Elf3.826
  crRNA array
cgatttcttggctttatatatcttgtggaaaggacgaaacaccgtaatttctactaagtgtagatcgagaagtggagagcatatttaatttctactaagtgtagattccgagacatcctaatccacttttttaagcttggcgtggatccgatatcaactagatcttgaga

SEQ ID NO: 5409 - DNA, 170 bp, Artificial sequence
  Mga.1655_Elf3.983
  crRNA array
cgatttcttggctttatatatcttgtggaaaggacgaaacaccgtaatttctactaagtgtagatcgagaagtggagagcatatttaatttctactaagtgtagattaggccccctaactggaccattttttaagcttggcgtggatccgatatcaactagatcttgaga

SEQ ID NO: 5410 - DNA, 170 bp, Artificial sequence
  Mga.1655_Ep300.310
  crRNA array
cgatttcttggctttatatatcttgtggaaaggacgaaacaccgtaatttctactaagtgtagatcgagaagtggagagcatatttaatttctactaagtgtagatatggtacgacagtgaggaagttttttaagcttggcgtggatccgatatcaactagatcttgaga

SEQ ID NO: 5411 - DNA, 170 bp, Artificial sequence
  Mga.1655_Ep300.587
  crRNA array
cgatttcttggctttatatatcttgtggaaaggacgaaacaccgtaatttctactaagtgtagatcgagaagtggagagcatatttaatttctactaagtgtagatcgccccggggcccccaaccattttttaagcttggcgtggatccgatatcaactagatcttgaga

SEQ ID NO: 5412 - DNA, 170 bp, Artificial sequence
  Mga.1655_Epha2.126
  crRNA array
cgatttcttggctttatatatcttgtggaaaggacgaaacaccgtaatttctactaagtgtagatcgagaagtggagagcatatttaatttctactaagtgtagatcctgtgccgccgcggccgccttttttaagcttggcgtggatccgatatcaactagatcttgaga

SEQ ID NO: 5413 - DNA, 170 bp, Artificial sequence
  Mga.1655_Epha2.5
  crRNA array
cgatttcttggctttatatatcttgtggaaaggacgaaacaccgtaatttctactaagtgtagatcgagaagtggagagcatatttaatttctactaagtgtagatcatgagctggcgccacccggttttttaagcttggcgtggatccgatatcaactagatcttgaga

SEQ ID NO: 5414 - DNA, 170 bp, Artificial sequence
  Mga.1655_Fat1.105
  crRNA array
cgatttcttggctttatatatcttgtggaaaggacgaaacaccgtaatttctactaagtgtagatcgagaagtggagagcatatttaatttctactaagtgtagataactcgaggtgacaacaagtttttttaagcttggcgtggatccgatatcaactagatcttgaga

SEQ ID NO: 5415 - DNA, 170 bp, Artificial sequence
  Mga.1655_Fat1.122
  crRNA array
cgatttcttggctttatatatcttgtggaaaggacgaaacaccgtaatttctactaagtgtagatcgagaagtggagagcatatttaatttctactaagtgtagatccatcgacatggaaacgggattttttaagcttggcgtggatccgatatcaactagatcttgaga

SEQ ID NO: 5416 - DNA, 170 bp, Artificial sequence
  Mga.1655_Fbxw7.21
  crRNA array
cgatttcttggctttatatatcttgtggaaaggacgaaacaccgtaatttctactaagtgtagatcgagaagtggagagcatatttaatttctactaagtgtagattaatgtgccgtagaaacccattttttaagcttggcgtggatccgatatcaactagatcttgaga

SEQ ID NO: 5417 - DNA, 170 bp, Artificial sequence
  Mga.1655_Fbxw7.23
  crRNA array
cgatttcttggctttatatatcttgtggaaaggacgaaacaccgtaatttctactaagtgtagatcgagaagtggagagcatatttaatttctactaagtgtagatatgtgccgtagaaacccatattttttaagcttggcgtggatccgatatcaactagatcttgaga

SEQ ID NO: 5418 - DNA, 170 bp, Artificial sequence
  Mga.1655_Gata3.34
  crRNA array
cgatttcttggctttatatatcttgtggaaaggacgaaacaccgtaatttctactaagtgtagatcgagaagtggagagcatatttaatttctactaagtgtagatctaaactatcccgcaaagatttttttaagcttggcgtggatccgatatcaactagatcttgaga

SEQ ID NO: 5419 - DNA, 170 bp, Artificial sequence
  Mga.1655_Gata3.47
  crRNA array
cgatttcttggctttatatatcttgtggaaaggacgaaacaccgtaatttctactaagtgtagatcgagaagtggagagcatatttaatttctactaagtgtagatcgtagtaggacgggacgtggttttttaagcttggcgtggatccgatatcaactagatcttgaga

SEQ ID NO: 5420 - DNA, 170 bp, Artificial sequence
  Mga.1655_H2-Q2.1
  crRNA array
cgatttcttggctttatatatcttgtggaaaggacgaaacaccgtaatttctactaagtgtagatcgagaagtggagagcatatttaatttctactaagtgtagatagggcggccaccaacagcagttttttaagcttggcgtggatccgatatcaactagatcttgaga

SEQ ID NO: 5421 - DNA, 170 bp, Artificial sequence
  Mga.1655_H2-Q2.2
  crRNA array
cgatttcttggctttatatatcttgtggaaaggacgaaacaccgtaatttctactaagtgtagatcgagaagtggagagcatatttaatttctactaagtgtagattaacctgcgcccgctgctgattttttaagcttggcgtggatccgatatcaactagatcttgaga

SEQ ID NO: 5422 - DNA, 170 bp, Artificial sequence
  Mga.1655_Kdm5c.1878
  crRNA array
cgatttcttggctttatatatcttgtggaaaggacgaaacaccgtaatttctactaagtgtagatcgagaagtggagagcatatttaatttctactaagtgtagatagagcacggcacccgcccccttttttaagcttggcgtggatccgatatcaactagatcttgaga

SEQ ID NO: 5423 - DNA, 170 bp, Artificial sequence
  Mga.1655_Kdm5c.1879
  crRNA array
cgatttcttggctttatatatcttgtggaaaggacgaaacaccgtaatttctactaagtgtagatcgagaagtggagagcatatttaatttctactaagtgtagatgagcacggcacccgccccccttttttaagcttggcgtggatccgatatcaactagatcttgaga

SEQ ID NO: 5424 - DNA, 170 bp, Artificial sequence
  Mga.1655_Kdm6a.56
  crRNA array
cgatttcttggctttatatatcttgtggaaaggacgaaacaccgtaatttctactaagtgtagatcgagaagtggagagcatatttaatttctactaagtgtagattcgctgccgcctctcgcggcttttttaagcttggcgtggatccgatatcaactagatcttgaga

SEQ ID NO: 5425 - DNA, 170 bp, Artificial sequence
  Mga.1655_Kdm6a.57
  crRNA array
cgatttcttggctttatatatcttgtggaaaggacgaaacaccgtaatttctactaagtgtagatcgagaagtggagagcatatttaatttctactaagtgtagatcgctgccgcctctcgcggcattttttaagcttggcgtggatccgatatcaactagatcttgaga

SEQ ID NO: 5426 - DNA, 170 bp, Artificial sequence
  Mga.1655_Kmt2b.265
  crRNA array
cgatttcttggctttatatatcttgtggaaaggacgaaacaccgtaatttctactaagtgtagatcgagaagtggagagcatatttaatttctactaagtgtagatccccaagtgaagcccacctgttttttaagcttggcgtggatccgatatcaactagatcttgaga

SEQ ID NO: 5427 - DNA, 170 bp, Artificial sequence
  Mga.1655_Kmt2b.298
  crRNA array
cgatttcttggctttatatatcttgtggaaaggacgaaacaccgtaatttctactaagtgtagatcgagaagtggagagcatatttaatttctactaagtgtagattccggcagggaccggctggcttttttaagcttggcgtggatccgatatcaactagatcttgaga

SEQ ID NO: 5428 - DNA, 170 bp, Artificial sequence
  Mga.1655_Kmt2c.1962
  crRNA array
cgatttcttggctttatatatcttgtggaaaggacgaaacaccgtaatttctactaagtgtagatcgagaagtggagagcatatttaatttctactaagtgtagatgtgacgatctgtgccacaagttttttaagcttggcgtggatccgatatcaactagatcttgaga

SEQ ID NO: 5429 - DNA, 170 bp, Artificial sequence
  Mga.1655_Kmt2c.2236
  crRNA array
cgatttcttggctttatatatcttgtggaaaggacgaaacaccgtaatttctactaagtgtagatcgagaagtggagagcatatttaatttctactaagtgtagatactcgacctccacctccctattttttaagcttggcgtggatccgatatcaactagatcttgaga

SEQ ID NO: 5430 - DNA, 170 bp, Artificial sequence
  Mga.1655_Kmt2d.316
  crRNA array
cgatttcttggctttatatatcttgtggaaaggacgaaacaccgtaatttctactaagtgtagatcgagaagtggagagcatatttaatttctactaagtgtagatactccaggccacccaggtggttttttaagcttggcgtggatccgatatcaactagatcttgaga

SEQ ID NO: 5431 - DNA, 170 bp, Artificial sequence
  Mga.1655_Kmt2d.416
  crRNA array
cgatttcttggctttatatatcttgtggaaaggacgaaacaccgtaatttctactaagtgtagatcgagaagtggagagcatatttaatttctactaagtgtagattaaacccccgggggaagggtttttttaagcttggcgtggatccgatatcaactagatcttgaga

SEQ ID NO: 5432 - DNA, 170 bp, Artificial sequence
  Mga.1655_Map2k4.119
  crRNA array
cgatttcttggctttatatatcttgtggaaaggacgaaacaccgtaatttctactaagtgtagatcgagaagtggagagcatatttaatttctactaagtgtagattgctgtgtgggcggccacatttttttaagcttggcgtggatccgatatcaactagatcttgaga

SEQ ID NO: 5433 - DNA, 170 bp, Artificial sequence
  Mga.1655_Map2k4.1261
  crRNA array
cgatttcttggctttatatatcttgtggaaaggacgaaacaccgtaatttctactaagtgtagatcgagaagtggagagcatatttaatttctactaagtgtagatgatgtagtaatgcggagtagttttttaagcttggcgtggatccgatatcaactagatcttgaga

SEQ ID NO: 5434 - DNA, 170 bp, Artificial sequence
  Mga.1655_Map3k1.235
  crRNA array
cgatttcttggctttatatatcttgtggaaaggacgaaacaccgtaatttctactaagtgtagatcgagaagtggagagcatatttaatttctactaagtgtagataaaacgctactgatcgatcgttttttaagcttggcgtggatccgatatcaactagatcttgaga

SEQ ID NO: 5435 - DNA, 170 bp, Artificial sequence
  Mga.1655_Map3k1.3838
  crRNA array
cgatttcttggctttatatatcttgtggaaaggacgaaacaccgtaatttctactaagtgtagatcgagaagtggagagcatatttaatttctactaagtgtagatccaacaacagggccccactattttttaagcttggcgtggatccgatatcaactagatcttgaga

SEQ ID NO: 5436 - DNA, 170 bp, Artificial sequence
  Mga.1655_Nf1.746
  crRNA array
cgatttcttggctttatatatcttgtggaaaggacgaaacaccgtaatttctactaagtgtagatcgagaagtggagagcatatttaatttctactaagtgtagattaagcataatgatgatgccattttttaagcttggcgtggatccgatatcaactagatcttgaga

SEQ ID NO: 5437 - DNA, 170 bp, Artificial sequence
  Mga.1655_Nf1.97
  crRNA array
cgatttcttggctttatatatcttgtggaaaggacgaaacaccgtaatttctactaagtgtagatcgagaagtggagagcatatttaatttctactaagtgtagatagcccgctacatgctgatgcttttttaagcttggcgtggatccgatatcaactagatcttgaga

SEQ ID NO: 5438 - DNA, 170 bp, Artificial sequence
  Mga.1655_Nf2.356
  crRNA array
cgatttcttggctttatatatcttgtggaaaggacgaaacaccgtaatttctactaagtgtagatcgagaagtggagagcatatttaatttctactaagtgtagatcggagtcatctgatagagatttttttaagcttggcgtggatccgatatcaactagatcttgaga

SEQ ID NO: 5439 - DNA, 170 bp, Artificial sequence
  Mga.1655_Nf2.768
  crRNA array
cgatttcttggctttatatatcttgtggaaaggacgaaacaccgtaatttctactaagtgtagatcgagaagtggagagcatatttaatttctactaagtgtagatccgaagccccagtgtccggcttttttaagcttggcgtggatccgatatcaactagatcttgaga

SEQ ID NO: 5440 - DNA, 170 bp, Artificial sequence
  Mga.1655_Notch1.1849
  crRNA array
cgatttcttggctttatatatcttgtggaaaggacgaaacaccgtaatttctactaagtgtagatcgagaagtggagagcatatttaatttctactaagtgtagatctggcgggtgggcggcgctgttttttaagcttggcgtggatccgatatcaactagatcttgaga

SEQ ID NO: 5441 - DNA, 170 bp, Artificial sequence
  Mga.1655_Notch1.649
  crRNA array
cgatttcttggctttatatatcttgtggaaaggacgaaacaccgtaatttctactaagtgtagatcgagaagtggagagcatatttaatttctactaagtgtagattgggccaacgatgccaggacttttttaagcttggcgtggatccgatatcaactagatcttgaga

SEQ ID NO: 5442 - DNA, 170 bp, Artificial sequence
  Mga.1655_Nsd1.70
  crRNA array
cgatttcttggctttatatatcttgtggaaaggacgaaacaccgtaatttctactaagtgtagatcgagaagtggagagcatatttaatttctactaagtgtagatactggtgtggacgatgcagattttttaagcttggcgtggatccgatatcaactagatcttgaga

SEQ ID NO: 5443 - DNA, 170 bp, Artificial sequence
  Mga.1655_Nsd1.90
  crRNA array
cgatttcttggctttatatatcttgtggaaaggacgaaacaccgtaatttctactaagtgtagatcgagaagtggagagcatatttaatttctactaagtgtagataggagctaacggcaagaatgttttttaagcttggcgtggatccgatatcaactagatcttgaga

SEQ ID NO: 5444 - DNA, 170 bp, Artificial sequence
  Mga.1655_Pbrm1.1236
  crRNA array
cgatttcttggctttatatatcttgtggaaaggacgaaacaccgtaatttctactaagtgtagatcgagaagtggagagcatatttaatttctactaagtgtagatgccgataaaaccaacagccgttttttaagcttggcgtggatccgatatcaactagatcttgaga

SEQ ID NO: 5445 - DNA, 170 bp, Artificial sequence
  Mga.1655_Pbrm1.969
  crRNA array
cgatttcttggctttatatatcttgtggaaaggacgaaacaccgtaatttctactaagtgtagatcgagaagtggagagcatatttaatttctactaagtgtagatgagccctaatgaacagctcattttttaagcttggcgtggatccgatatcaactagatcttgaga

SEQ ID NO: 5446 - DNA, 170 bp, Artificial sequence
  Mga.1655_Pik3r1.76
  crRNA array
cgatttcttggctttatatatcttgtggaaaggacgaaacaccgtaatttctactaagtgtagatcgagaagtggagagcatatttaatttctactaagtgtagataaaacctatacggcccgcacttttttaagcttggcgtggatccgatatcaactagatcttgaga

SEQ ID NO: 5447 - DNA, 170 bp, Artificial sequence
  Mga.1655_Pik3r1.77
  crRNA array
cgatttcttggctttatatatcttgtggaaaggacgaaacaccgtaatttctactaagtgtagatcgagaagtggagagcatatttaatttctactaagtgtagataaacctatacggcccgcactttttttaagcttggcgtggatccgatatcaactagatcttgaga

SEQ ID NO: 5448 - DNA, 170 bp, Artificial sequence
  Mga.1655_Pten.240
  crRNA array
cgatttcttggctttatatatcttgtggaaaggacgaaacaccgtaatttctactaagtgtagatcgagaagtggagagcatatttaatttctactaagtgtagattgcatacgctatagctgcttttttttaagcttggcgtggatccgatatcaactagatcttgaga

SEQ ID NO: 5449 - DNA, 170 bp, Artificial sequence
  Mga.1655_Pten.265
  crRNA array
cgatttcttggctttatatatcttgtggaaaggacgaaacaccgtaatttctactaagtgtagatcgagaagtggagagcatatttaatttctactaagtgtagataagcgtggtgcgtgacgcacttttttaagcttggcgtggatccgatatcaactagatcttgaga

SEQ ID NO: 5450 - DNA, 170 bp, Artificial sequence
  Mga.1655_Rasa1.1478
  crRNA array
cgatttcttggctttatatatcttgtggaaaggacgaaacaccgtaatttctactaagtgtagatcgagaagtggagagcatatttaatttctactaagtgtagatcgataatggtctatgatgtcttttttaagcttggcgtggatccgatatcaactagatcttgaga

SEQ ID NO: 5451 - DNA, 170 bp, Artificial sequence
  Mga.1655_Rasa1.223
  crRNA array
cgatttcttggctttatatatcttgtggaaaggacgaaacaccgtaatttctactaagtgtagatcgagaagtggagagcatatttaatttctactaagtgtagattccatggagtatcgtgctcgttttttaagcttggcgtggatccgatatcaactagatcttgaga

SEQ ID NO: 5452 - DNA, 170 bp, Artificial sequence
  Mga.1655_Rb1.211
  crRNA array
cgatttcttggctttatatatcttgtggaaaggacgaaacaccgtaatttctactaagtgtagatcgagaagtggagagcatatttaatttctactaagtgtagattctgacatgatcgggtacctttttttaagcttggcgtggatccgatatcaactagatcttgaga

SEQ ID NO: 5453 - DNA, 170 bp, Artificial sequence
  Mga.1655_Rb1.394
  crRNA array
cgatttcttggctttatatatcttgtggaaaggacgaaacaccgtaatttctactaagtgtagatcgagaagtggagagcatatttaatttctactaagtgtagatagaaatctcgaagcaggatcttttttaagcttggcgtggatccgatatcaactagatcttgaga

SEQ ID NO: 5454 - DNA, 170 bp, Artificial sequence
  Mga.1655_Rbm10.5
  crRNA array
cgatttcttggctttatatatcttgtggaaaggacgaaacaccgtaatttctactaagtgtagatcgagaagtggagagcatatttaatttctactaagtgtagatacgaaacctgaacccacacattttttaagcttggcgtggatccgatatcaactagatcttgaga

SEQ ID NO: 5455 - DNA, 170 bp, Artificial sequence
  Mga.1655_Rbm10.6
  crRNA array
cgatttcttggctttatatatcttgtggaaaggacgaaacaccgtaatttctactaagtgtagatcgagaagtggagagcatatttaatttctactaagtgtagatcgaaacctgaacccacacagttttttaagcttggcgtggatccgatatcaactagatcttgaga

SEQ ID NO: 5456 - DNA, 170 bp, Artificial sequence
  Mga.1655_Rnf43.1920
  crRNA array
cgatttcttggctttatatatcttgtggaaaggacgaaacaccgtaatttctactaagtgtagatcgagaagtggagagcatatttaatttctactaagtgtagatatccccgtgccgtggactccttttttaagcttggcgtggatccgatatcaactagatcttgaga

SEQ ID NO: 5457 - DNA, 170 bp, Artificial sequence
  Mga.1655_Rnf43.39
  crRNA array
cgatttcttggctttatatatcttgtggaaaggacgaaacaccgtaatttctactaagtgtagatcgagaagtggagagcatatttaatttctactaagtgtagatcaaggggatcactctgataattttttaagcttggcgtggatccgatatcaactagatcttgaga

SEQ ID NO: 5458 - DNA, 170 bp, Artificial sequence
  Mga.1655_Runx1.204
  crRNA array
cgatttcttggctttatatatcttgtggaaaggacgaaacaccgtaatttctactaagtgtagatcgagaagtggagagcatatttaatttctactaagtgtagattaaataagtccagccgttttttttttaagcttggcgtggatccgatatcaactagatcttgaga

SEQ ID NO: 5459 - DNA, 170 bp, Artificial sequence
  Mga.1655_Runx1.81
  crRNA array
cgatttcttggctttatatatcttgtggaaaggacgaaacaccgtaatttctactaagtgtagatcgagaagtggagagcatatttaatttctactaagtgtagataggacgcgtatgggaattttttttttaagcttggcgtggatccgatatcaactagatcttgaga

SEQ ID NO: 5460 - DNA, 170 bp, Artificial sequence
  Mga.1655_Setd2.143
  crRNA array
cgatttcttggctttatatatcttgtggaaaggacgaaacaccgtaatttctactaagtgtagatcgagaagtggagagcatatttaatttctactaagtgtagatgcacaaccacaacagactggttttttaagcttggcgtggatccgatatcaactagatcttgaga

SEQ ID NO: 5461 - DNA, 170 bp, Artificial sequence
  Mga.1655_Setd2.508
  crRNA array
cgatttcttggctttatatatcttgtggaaaggacgaaacaccgtaatttctactaagtgtagatcgagaagtggagagcatatttaatttctactaagtgtagattacgatcccgagcacccgacttttttaagcttggcgtggatccgatatcaactagatcttgaga

SEQ ID NO: 5462 - DNA, 170 bp, Artificial sequence
  Mga.1655_Smad4.3038
  crRNA array
cgatttcttggctttatatatcttgtggaaaggacgaaacaccgtaatttctactaagtgtagatcgagaagtggagagcatatttaatttctactaagtgtagatatctgcggcagtgtcaccggttttttaagcttggcgtggatccgatatcaactagatcttgaga

SEQ ID NO: 5463 - DNA, 170 bp, Artificial sequence
  Mga.1655_Smad4.39
  crRNA array
cgatttcttggctttatatatcttgtggaaaggacgaaacaccgtaatttctactaagtgtagatcgagaagtggagagcatatttaatttctactaagtgtagatagtcaaacgcatactgacaattttttaagcttggcgtggatccgatatcaactagatcttgaga

SEQ ID NO: 5464 - DNA, 170 bp, Artificial sequence
  Mga.1655_Stag2.1409
  crRNA array
cgatttcttggctttatatatcttgtggaaaggacgaaacaccgtaatttctactaagtgtagatcgagaagtggagagcatatttaatttctactaagtgtagatgctaataactgcggaagggcttttttaagcttggcgtggatccgatatcaactagatcttgaga

SEQ ID NO: 5465 - DNA, 170 bp, Artificial sequence
  Mga.1655_Stag2.4401
  crRNA array
cgatttcttggctttatatatcttgtggaaaggacgaaacaccgtaatttctactaagtgtagatcgagaagtggagagcatatttaatttctactaagtgtagattaatcgtccagtggtgtatattttttaagcttggcgtggatccgatatcaactagatcttgaga

SEQ ID NO: 5466 - DNA, 170 bp, Artificial sequence
  Mga.1655_Tbl1xr1.1
  crRNA array
cgatttcttggctttatatatcttgtggaaaggacgaaacaccgtaatttctactaagtgtagatcgagaagtggagagcatatttaatttctactaagtgtagatggatgcgcatactggtgaagttttttaagcttggcgtggatccgatatcaactagatcttgaga

SEQ ID NO: 5467 - DNA, 170 bp, Artificial sequence
  Mga.1655_Tbl1xr1.83
  crRNA array
cgatttcttggctttatatatcttgtggaaaggacgaaacaccgtaatttctactaagtgtagatcgagaagtggagagcatatttaatttctactaagtgtagatatggtcgacccatcgagtctttttttaagcttggcgtggatccgatatcaactagatcttgaga

SEQ ID NO: 5468 - DNA, 170 bp, Artificial sequence
  Mga.1655_Tgfbr2.290
  crRNA array
cgatttcttggctttatatatcttgtggaaaggacgaaacaccgtaatttctactaagtgtagatcgagaagtggagagcatatttaatttctactaagtgtagatcctctcggcgcccgggtaaattttttaagcttggcgtggatccgatatcaactagatcttgaga

SEQ ID NO: 5469 - DNA, 170 bp, Artificial sequence
  Mga.1655_Tgfbr2.292
  crRNA array
cgatttcttggctttatatatcttgtggaaaggacgaaacaccgtaatttctactaagtgtagatcgagaagtggagagcatatttaatttctactaagtgtagatcccgggcgccgagagggaaattttttaagcttggcgtggatccgatatcaactagatcttgaga

SEQ ID NO: 5470 - DNA, 170 bp, Artificial sequence
  Mga.1655_Trp53.4
  crRNA array
cgatttcttggctttatatatcttgtggaaaggacgaaacaccgtaatttctactaagtgtagatcgagaagtggagagcatatttaatttctactaagtgtagatccctgaactgcccccagggattttttaagcttggcgtggatccgatatcaactagatcttgaga

SEQ ID NO: 5471 - DNA, 170 bp, Artificial sequence
  Mga.1655_Trp53.528
  crRNA array
cgatttcttggctttatatatcttgtggaaaggacgaaacaccgtaatttctactaagtgtagatcgagaagtggagagcatatttaatttctactaagtgtagatgctgggccagcagagacctgttttttaagcttggcgtggatccgatatcaactagatcttgaga

SEQ ID NO: 5472 - DNA, 170 bp, Artificial sequence
  Mga.1655_Vhl.1
  crRNA array
cgatttcttggctttatatatcttgtggaaaggacgaaacaccgtaatttctactaagtgtagatcgagaagtggagagcatatttaatttctactaagtgtagatagggctcccggcggccatttttttttaagcttggcgtggatccgatatcaactagatcttgaga

SEQ ID NO: 5473 - DNA, 170 bp, Artificial sequence
  Mga.1655_Vhl.151
  crRNA array
cgatttcttggctttatatatcttgtggaaaggacgaaacaccgtaatttctactaagtgtagatcgagaagtggagagcatatttaatttctactaagtgtagattagagcactcacccgagggattttttaagcttggcgtggatccgatatcaactagatcttgaga

SEQ ID NO: 5474 - DNA, 170 bp, Artificial sequence
  Mga.1655_Zc3h13.1387
  crRNA array
cgatttcttggctttatatatcttgtggaaaggacgaaacaccgtaatttctactaagtgtagatcgagaagtggagagcatatttaatttctactaagtgtagatgtgacgccggtcatgtgactttttttaagcttggcgtggatccgatatcaactagatcttgaga

SEQ ID NO: 5475 - DNA, 170 bp, Artificial sequence
  Mga.1655_Zc3h13.1777
  crRNA array
cgatttcttggctttatatatcttgtggaaaggacgaaacaccgtaatttctactaagtgtagatcgagaagtggagagcatatttaatttctactaagtgtagatgatgctgccagtgtagcggcttttttaagcttggcgtggatccgatatcaactagatcttgaga

SEQ ID NO: 5476 - DNA, 170 bp, Artificial sequence
  Mga.93_Acvr2a.155
  crRNA array
cgatttcttggctttatatatcttgtggaaaggacgaaacaccgtaatttctactaagtgtagatgagaaggctccccataatgttaatttctactaagtgtagatggacctggctaatcaagtatttttttaagcttggcgtggatccgatatcaactagatcttgaga

SEQ ID NO: 5477 - DNA, 170 bp, Artificial sequence
  Mga.93_Acvr2a.70
  crRNA array
cgatttcttggctttatatatcttgtggaaaggacgaaacaccgtaatttctactaagtgtagatgagaaggctccccataatgttaatttctactaagtgtagatcccgaggcgccggagaagccttttttaagcttggcgtggatccgatatcaactagatcttgaga

SEQ ID NO: 5478 - DNA, 170 bp, Artificial sequence
  Mga.93_Apc.21
  crRNA array
cgatttcttggctttatatatcttgtggaaaggacgaaacaccgtaatttctactaagtgtagatgagaaggctccccataatgttaatttctactaagtgtagatgtgatccacacgtgtagctgttttttaagcttggcgtggatccgatatcaactagatcttgaga

SEQ ID NO: 5479 - DNA, 170 bp, Artificial sequence
  Mga.93_Apc.867
  crRNA array
cgatttcttggctttatatatcttgtggaaaggacgaaacaccgtaatttctactaagtgtagatgagaaggctccccataatgttaatttctactaagtgtagatcagtcccaggcggcggaagcttttttaagcttggcgtggatccgatatcaactagatcttgaga

SEQ ID NO: 5480 - DNA, 170 bp, Artificial sequence
  Mga.93_Arid1a.2
  crRNA array
cgatttcttggctttatatatcttgtggaaaggacgaaacaccgtaatttctactaagtgtagatgagaaggctccccataatgttaatttctactaagtgtagatcccgcgcccccgtcctggggttttttaagcttggcgtggatccgatatcaactagatcttgaga

SEQ ID NO: 5481 - DNA, 170 bp, Artificial sequence
  Mga.93_Arid1a.5
  crRNA array
cgatttcttggctttatatatcttgtggaaaggacgaaacaccgtaatttctactaagtgtagatgagaaggctccccataatgttaatttctactaagtgtagatcccgcgctcggccgctgccgttttttaagcttggcgtggatccgatatcaactagatcttgaga

SEQ ID NO: 5482 - DNA, 170 bp, Artificial sequence
  Mga.93_Arid2.166
  crRNA array
cgatttcttggctttatatatcttgtggaaaggacgaaacaccgtaatttctactaagtgtagatgagaaggctccccataatgttaatttctactaagtgtagataaccgcgatctgggttttttttttttaagcttggcgtggatccgatatcaactagatcttgaga

SEQ ID NO: 5483 - DNA, 170 bp, Artificial sequence
  Mga.93_Arid2.172
  crRNA array
cgatttcttggctttatatatcttgtggaaaggacgaaacaccgtaatttctactaagtgtagatgagaaggctccccataatgttaatttctactaagtgtagatctggacgagctgcggcagttttttttaagcttggcgtggatccgatatcaactagatcttgaga

SEQ ID NO: 5484 - DNA, 170 bp, Artificial sequence
  Mga.93_Atm.120
  crRNA array
cgatttcttggctttatatatcttgtggaaaggacgaaacaccgtaatttctactaagtgtagatgagaaggctccccataatgttaatttctactaagtgtagatgacaggtagtcggcagctaattttttaagcttggcgtggatccgatatcaactagatcttgaga

SEQ ID NO: 5485 - DNA, 170 bp, Artificial sequence
  Mga.93_Atm.997
  crRNA array
cgatttcttggctttatatatcttgtggaaaggacgaaacaccgtaatttctactaagtgtagatgagaaggctccccataatgttaatttctactaagtgtagatgagaaagtctccgaatcgttttttttaagcttggcgtggatccgatatcaactagatcttgaga

SEQ ID NO: 5486 - DNA, 170 bp, Artificial sequence
  Mga.93_Atrx.249
  crRNA array
cgatttcttggctttatatatcttgtggaaaggacgaaacaccgtaatttctactaagtgtagatgagaaggctccccataatgttaatttctactaagtgtagattagccagtcgctcatatctcttttttaagcttggcgtggatccgatatcaactagatcttgaga

SEQ ID NO: 5487 - DNA, 170 bp, Artificial sequence
  Mga.93_Atrx.251
  crRNA array
cgatttcttggctttatatatcttgtggaaaggacgaaacaccgtaatttctactaagtgtagatgagaaggctccccataatgttaatttctactaagtgtagatgccagtcgctcatatctctgttttttaagcttggcgtggatccgatatcaactagatcttgaga

SEQ ID NO: 5488 - DNA, 170 bp, Artificial sequence
  Mga.93_Bcor.203
  crRNA array
cgatttcttggctttatatatcttgtggaaaggacgaaacaccgtaatttctactaagtgtagatgagaaggctccccataatgttaatttctactaagtgtagatccccggagcggagtccaggcttttttaagcttggcgtggatccgatatcaactagatcttgaga

SEQ ID NO: 5489 - DNA, 170 bp, Artificial sequence
  Mga.93_Bcor.475
  crRNA array
cgatttcttggctttatatatcttgtggaaaggacgaaacaccgtaatttctactaagtgtagatgagaaggctccccataatgttaatttctactaagtgtagattgcaacccctctgtatgggattttttaagcttggcgtggatccgatatcaactagatcttgaga

SEQ ID NO: 5490 - DNA, 170 bp, Artificial sequence
  Mga.93_Brca1.112
  crRNA array
cgatttcttggctttatatatcttgtggaaaggacgaaacaccgtaatttctactaagtgtagatgagaaggctccccataatgttaatttctactaagtgtagatctagacgctctgtggagactttttttaagcttggcgtggatccgatatcaactagatcttgaga

SEQ ID NO: 5491 - DNA, 170 bp, Artificial sequence
  Mga.93_Brca1.53
  crRNA array
cgatttcttggctttatatatcttgtggaaaggacgaaacaccgtaatttctactaagtgtagatgagaaggctccccataatgttaatttctactaagtgtagataatgaggaggcgtcgatcatttttttaagcttggcgtggatccgatatcaactagatcttgaga

SEQ ID NO: 5492 - DNA, 170 bp, Artificial sequence
  Mga.93_Casp8.45
  crRNA array
cgatttcttggctttatatatcttgtggaaaggacgaaacaccgtaatttctactaagtgtagatgagaaggctccccataatgttaatttctactaagtgtagatctaccgagatcctgtgaatgttttttaagcttggcgtggatccgatatcaactagatcttgaga

SEQ ID NO: 5493 - DNA, 170 bp, Artificial sequence
  Mga.93_Casp8.54
  crRNA array
cgatttcttggctttatatatcttgtggaaaggacgaaacaccgtaatttctactaagtgtagatgagaaggctccccataatgttaatttctactaagtgtagatcagtgcagtcgtcgtaagatttttttaagcttggcgtggatccgatatcaactagatcttgaga

SEQ ID NO: 5494 - DNA, 170 bp, Artificial sequence
  Mga.93_Cbwd1.84
  crRNA array
cgatttcttggctttatatatcttgtggaaaggacgaaacaccgtaatttctactaagtgtagatgagaaggctccccataatgttaatttctactaagtgtagatcacagcaggtaacatgccgcttttttaagcttggcgtggatccgatatcaactagatcttgaga

SEQ ID NO: 5495 - DNA, 170 bp, Artificial sequence
  Mga.93_Cbwd1.85
  crRNA array
cgatttcttggctttatatatcttgtggaaaggacgaaacaccgtaatttctactaagtgtagatgagaaggctccccataatgttaatttctactaagtgtagatacagcaggtaacatgccgccttttttaagcttggcgtggatccgatatcaactagatcttgaga

SEQ ID NO: 5496 - DNA, 170 bp, Artificial sequence
  Mga.93_Cdh1.387
  crRNA array
cgatttcttggctttatatatcttgtggaaaggacgaaacaccgtaatttctactaagtgtagatgagaaggctccccataatgttaatttctactaagtgtagatctcggcgtctgccgggtccgttttttaagcttggcgtggatccgatatcaactagatcttgaga

SEQ ID NO: 5497 - DNA, 170 bp, Artificial sequence
  Mga.93_Cdh1.58
  crRNA array
cgatttcttggctttatatatcttgtggaaaggacgaaacaccgtaatttctactaagtgtagatgagaaggctccccataatgttaatttctactaagtgtagatctcgtccgcgcccgggactcttttttaagcttggcgtggatccgatatcaactagatcttgaga

SEQ ID NO: 5498 - DNA, 170 bp, Artificial sequence
  Mga.93_Cdkn2a.647
  crRNA array
cgatttcttggctttatatatcttgtggaaaggacgaaacaccgtaatttctactaagtgtagatgagaaggctccccataatgttaatttctactaagtgtagatgcaatcacgggagggagcagttttttaagcttggcgtggatccgatatcaactagatcttgaga

SEQ ID NO: 5499 - DNA, 170 bp, Artificial sequence
  Mga.93_Cdkn2a.648
  crRNA array
cgatttcttggctttatatatcttgtggaaaggacgaaacaccgtaatttctactaagtgtagatgagaaggctccccataatgttaatttctactaagtgtagatcaatcacgggagggagcagattttttaagcttggcgtggatccgatatcaactagatcttgaga

SEQ ID NO: 5500 - DNA, 170 bp, Artificial sequence
  Mga.93_Cic.162
  crRNA array
cgatttcttggctttatatatcttgtggaaaggacgaaacaccgtaatttctactaagtgtagatgagaaggctccccataatgttaatttctactaagtgtagatcgcaggcgcgcccggcggagttttttaagcttggcgtggatccgatatcaactagatcttgaga

SEQ ID NO: 5501 - DNA, 170 bp, Artificial sequence
  Mga.93_Cic.164
  crRNA array
cgatttcttggctttatatatcttgtggaaaggacgaaacaccgtaatttctactaagtgtagatgagaaggctccccataatgttaatttctactaagtgtagatcgggccctgggccggcggctttttttaagcttggcgtggatccgatatcaactagatcttgaga

SEQ ID NO: 5502 - DNA, 170 bp, Artificial sequence
  Mga.93_Ctcf.229
  crRNA array
cgatttcttggctttatatatcttgtggaaaggacgaaacaccgtaatttctactaagtgtagatgagaaggctccccataatgttaatttctactaagtgtagatggctggtggctgatagtctgttttttaagcttggcgtggatccgatatcaactagatcttgaga

SEQ ID NO: 5503 - DNA, 170 bp, Artificial sequence
  Mga.93_Ctcf.809
  crRNA array
cgatttcttggctttatatatcttgtggaaaggacgaaacaccgtaatttctactaagtgtagatgagaaggctccccataatgttaatttctactaagtgtagataagcgctatcatgatcccaattttttaagcttggcgtggatccgatatcaactagatcttgaga

SEQ ID NO: 5504 - DNA, 170 bp, Artificial sequence
  Mga.93_Elf3.826
  crRNA array
cgatttcttggctttatatatcttgtggaaaggacgaaacaccgtaatttctactaagtgtagatgagaaggctccccataatgttaatttctactaagtgtagattccgagacatcctaatccacttttttaagcttggcgtggatccgatatcaactagatcttgaga

SEQ ID NO: 5505 - DNA, 170 bp, Artificial sequence
  Mga.93_Elf3.983
  crRNA array
cgatttcttggctttatatatcttgtggaaaggacgaaacaccgtaatttctactaagtgtagatgagaaggctccccataatgttaatttctactaagtgtagattaggccccctaactggaccattttttaagcttggcgtggatccgatatcaactagatcttgaga

SEQ ID NO: 5506 - DNA, 170 bp, Artificial sequence
  Mga.93_Ep300.310
  crRNA array
cgatttcttggctttatatatcttgtggaaaggacgaaacaccgtaatttctactaagtgtagatgagaaggctccccataatgttaatttctactaagtgtagatatggtacgacagtgaggaagttttttaagcttggcgtggatccgatatcaactagatcttgaga

SEQ ID NO: 5507 - DNA, 170 bp, Artificial sequence
  Mga.93_Ep300.587
  crRNA array
cgatttcttggctttatatatcttgtggaaaggacgaaacaccgtaatttctactaagtgtagatgagaaggctccccataatgttaatttctactaagtgtagatcgccccggggcccccaaccattttttaagcttggcgtggatccgatatcaactagatcttgaga

SEQ ID NO: 5508 - DNA, 170 bp, Artificial sequence
  Mga.93_Epha2.126
  crRNA array
cgatttcttggctttatatatcttgtggaaaggacgaaacaccgtaatttctactaagtgtagatgagaaggctccccataatgttaatttctactaagtgtagatcctgtgccgccgcggccgccttttttaagcttggcgtggatccgatatcaactagatcttgaga

SEQ ID NO: 5509 - DNA, 170 bp, Artificial sequence
  Mga.93_Epha2.5
  crRNA array
cgatttcttggctttatatatcttgtggaaaggacgaaacaccgtaatttctactaagtgtagatgagaaggctccccataatgttaatttctactaagtgtagatcatgagctggcgccacccggttttttaagcttggcgtggatccgatatcaactagatcttgaga

SEQ ID NO: 5510 - DNA, 170 bp, Artificial sequence
  Mga.93_Fat1.105
  crRNA array
cgatttcttggctttatatatcttgtggaaaggacgaaacaccgtaatttctactaagtgtagatgagaaggctccccataatgttaatttctactaagtgtagataactcgaggtgacaacaagtttttttaagcttggcgtggatccgatatcaactagatcttgaga

SEQ ID NO: 5511 - DNA, 170 bp, Artificial sequence
  Mga.93_Fat1.122
  crRNA array
cgatttcttggctttatatatcttgtggaaaggacgaaacaccgtaatttctactaagtgtagatgagaaggctccccataatgttaatttctactaagtgtagatccatcgacatggaaacgggattttttaagcttggcgtggatccgatatcaactagatcttgaga

SEQ ID NO: 5512 - DNA, 170 bp, Artificial sequence
  Mga.93_Fbxw7.21
  crRNA array
cgatttcttggctttatatatcttgtggaaaggacgaaacaccgtaatttctactaagtgtagatgagaaggctccccataatgttaatttctactaagtgtagattaatgtgccgtagaaacccattttttaagcttggcgtggatccgatatcaactagatcttgaga

SEQ ID NO: 5513 - DNA, 170 bp, Artificial sequence
  Mga.93_Fbxw7.23
  crRNA array
cgatttcttggctttatatatcttgtggaaaggacgaaacaccgtaatttctactaagtgtagatgagaaggctccccataatgttaatttctactaagtgtagatatgtgccgtagaaacccatattttttaagcttggcgtggatccgatatcaactagatcttgaga

SEQ ID NO: 5514 - DNA, 170 bp, Artificial sequence
  Mga.93_Gata3.34
  crRNA array
cgatttcttggctttatatatcttgtggaaaggacgaaacaccgtaatttctactaagtgtagatgagaaggctccccataatgttaatttctactaagtgtagatctaaactatcccgcaaagatttttttaagcttggcgtggatccgatatcaactagatcttgaga

SEQ ID NO: 5515 - DNA, 170 bp, Artificial sequence
  Mga.93_Gata3.47
  crRNA array
cgatttcttggctttatatatcttgtggaaaggacgaaacaccgtaatttctactaagtgtagatgagaaggctccccataatgttaatttctactaagtgtagatcgtagtaggacgggacgtggttttttaagcttggcgtggatccgatatcaactagatcttgaga

SEQ ID NO: 5516 - DNA, 170 bp, Artificial sequence
  Mga.93_H2-Q2.1
  crRNA array
cgatttcttggctttatatatcttgtggaaaggacgaaacaccgtaatttctactaagtgtagatgagaaggctccccataatgttaatttctactaagtgtagatagggcggccaccaacagcagttttttaagcttggcgtggatccgatatcaactagatcttgaga

SEQ ID NO: 5517 - DNA, 170 bp, Artificial sequence
  Mga.93_H2-Q2.2
  crRNA array
cgatttcttggctttatatatcttgtggaaaggacgaaacaccgtaatttctactaagtgtagatgagaaggctccccataatgttaatttctactaagtgtagattaacctgcgcccgctgctgattttttaagcttggcgtggatccgatatcaactagatcttgaga

SEQ ID NO: 5518 - DNA, 170 bp, Artificial sequence
  Mga.93_Kdm5c.1878
  crRNA array
cgatttcttggctttatatatcttgtggaaaggacgaaacaccgtaatttctactaagtgtagatgagaaggctccccataatgttaatttctactaagtgtagatagagcacggcacccgcccccttttttaagcttggcgtggatccgatatcaactagatcttgaga

SEQ ID NO: 5519 - DNA, 170 bp, Artificial sequence
  Mga.93_Kdm5c.1879
  crRNA array
cgatttcttggctttatatatcttgtggaaaggacgaaacaccgtaatttctactaagtgtagatgagaaggctccccataatgttaatttctactaagtgtagatgagcacggcacccgccccccttttttaagcttggcgtggatccgatatcaactagatcttgaga

SEQ ID NO: 5520 - DNA, 170 bp, Artificial sequence
  Mga.93_Kdm6a.56
  crRNA array
cgatttcttggctttatatatcttgtggaaaggacgaaacaccgtaatttctactaagtgtagatgagaaggctccccataatgttaatttctactaagtgtagattcgctgccgcctctcgcggcttttttaagcttggcgtggatccgatatcaactagatcttgaga

SEQ ID NO: 5521 - DNA, 170 bp, Artificial sequence
  Mga.93_Kdm6a.57
  crRNA array
cgatttcttggctttatatatcttgtggaaaggacgaaacaccgtaatttctactaagtgtagatgagaaggctccccataatgttaatttctactaagtgtagatcgctgccgcctctcgcggcattttttaagcttggcgtggatccgatatcaactagatcttgaga

SEQ ID NO: 5522 - DNA, 170 bp, Artificial sequence
  Mga.93_Kmt2b.265
  crRNA array
cgatttcttggctttatatatcttgtggaaaggacgaaacaccgtaatttctactaagtgtagatgagaaggctccccataatgttaatttctactaagtgtagatccccaagtgaagcccacctgttttttaagcttggcgtggatccgatatcaactagatcttgaga

SEQ ID NO: 5523 - DNA, 170 bp, Artificial sequence
  Mga.93_Kmt2b.298
  crRNA array
cgatttcttggctttatatatcttgtggaaaggacgaaacaccgtaatttctactaagtgtagatgagaaggctccccataatgttaatttctactaagtgtagattccggcagggaccggctggcttttttaagcttggcgtggatccgatatcaactagatcttgaga

SEQ ID NO: 5524 - DNA, 170 bp, Artificial sequence
  Mga.93_Kmt2c.1962
  crRNA array
cgatttcttggctttatatatcttgtggaaaggacgaaacaccgtaatttctactaagtgtagatgagaaggctccccataatgttaatttctactaagtgtagatgtgacgatctgtgccacaagttttttaagcttggcgtggatccgatatcaactagatcttgaga

SEQ ID NO: 5525 - DNA, 170 bp, Artificial sequence
  Mga.93_Kmt2c.2236
  crRNA array
cgatttcttggctttatatatcttgtggaaaggacgaaacaccgtaatttctactaagtgtagatgagaaggctccccataatgttaatttctactaagtgtagatactcgacctccacctccctattttttaagcttggcgtggatccgatatcaactagatcttgaga

SEQ ID NO: 5526 - DNA, 170 bp, Artificial sequence
  Mga.93_Kmt2d.316
  crRNA array
cgatttcttggctttatatatcttgtggaaaggacgaaacaccgtaatttctactaagtgtagatgagaaggctccccataatgttaatttctactaagtgtagatactccaggccacccaggtggttttttaagcttggcgtggatccgatatcaactagatcttgaga

SEQ ID NO: 5527 - DNA, 170 bp, Artificial sequence
  Mga.93_Kmt2d.416
  crRNA array
cgatttcttggctttatatatcttgtggaaaggacgaaacaccgtaatttctactaagtgtagatgagaaggctccccataatgttaatttctactaagtgtagattaaacccccgggggaagggtttttttaagcttggcgtggatccgatatcaactagatcttgaga

SEQ ID NO: 5528 - DNA, 170 bp, Artificial sequence
  Mga.93_Map2k4.119
  crRNA array
cgatttcttggctttatatatcttgtggaaaggacgaaacaccgtaatttctactaagtgtagatgagaaggctccccataatgttaatttctactaagtgtagattgctgtgtgggcggccacatttttttaagcttggcgtggatccgatatcaactagatcttgaga

SEQ ID NO: 5529 - DNA, 170 bp, Artificial sequence
  Mga.93_Map2k4.1261
  crRNA array
cgatttcttggctttatatatcttgtggaaaggacgaaacaccgtaatttctactaagtgtagatgagaaggctccccataatgttaatttctactaagtgtagatgatgtagtaatgcggagtagttttttaagcttggcgtggatccgatatcaactagatcttgaga

SEQ ID NO: 5530 - DNA, 170 bp, Artificial sequence
  Mga.93_Map3k1.235
  crRNA array
cgatttcttggctttatatatcttgtggaaaggacgaaacaccgtaatttctactaagtgtagatgagaaggctccccataatgttaatttctactaagtgtagataaaacgctactgatcgatcgttttttaagcttggcgtggatccgatatcaactagatcttgaga

SEQ ID NO: 5531 - DNA, 170 bp, Artificial sequence
  Mga.93_Map3k1.3838
  crRNA array
cgatttcttggctttatatatcttgtggaaaggacgaaacaccgtaatttctactaagtgtagatgagaaggctccccataatgttaatttctactaagtgtagatccaacaacagggccccactattttttaagcttggcgtggatccgatatcaactagatcttgaga

SEQ ID NO: 5532 - DNA, 170 bp, Artificial sequence
  Mga.93_Nf1.746
  crRNA array
cgatttcttggctttatatatcttgtggaaaggacgaaacaccgtaatttctactaagtgtagatgagaaggctccccataatgttaatttctactaagtgtagattaagcataatgatgatgccattttttaagcttggcgtggatccgatatcaactagatcttgaga

SEQ ID NO: 5533 - DNA, 170 bp, Artificial sequence
  Mga.93_Nf1.97
  crRNA array
cgatttcttggctttatatatcttgtggaaaggacgaaacaccgtaatttctactaagtgtagatgagaaggctccccataatgttaatttctactaagtgtagatagcccgctacatgctgatgcttttttaagcttggcgtggatccgatatcaactagatcttgaga

SEQ ID NO: 5534 - DNA, 170 bp, Artificial sequence
  Mga.93_Nf2.356
  crRNA array
cgatttcttggctttatatatcttgtggaaaggacgaaacaccgtaatttctactaagtgtagatgagaaggctccccataatgttaatttctactaagtgtagatcggagtcatctgatagagatttttttaagcttggcgtggatccgatatcaactagatcttgaga

SEQ ID NO: 5535 - DNA, 170 bp, Artificial sequence
  Mga.93_Nf2.768
  crRNA array
cgatttcttggctttatatatcttgtggaaaggacgaaacaccgtaatttctactaagtgtagatgagaaggctccccataatgttaatttctactaagtgtagatccgaagccccagtgtccggcttttttaagcttggcgtggatccgatatcaactagatcttgaga

SEQ ID NO: 5536 - DNA, 170 bp, Artificial sequence
  Mga.93_Notch1.1849
  crRNA array
cgatttcttggctttatatatcttgtggaaaggacgaaacaccgtaatttctactaagtgtagatgagaaggctccccataatgttaatttctactaagtgtagatctggcgggtgggcggcgctgttttttaagcttggcgtggatccgatatcaactagatcttgaga

SEQ ID NO: 5537 - DNA, 170 bp, Artificial sequence
  Mga.93_Notch1.649
  crRNA array
cgatttcttggctttatatatcttgtggaaaggacgaaacaccgtaatttctactaagtgtagatgagaaggctccccataatgttaatttctactaagtgtagattgggccaacgatgccaggacttttttaagcttggcgtggatccgatatcaactagatcttgaga

SEQ ID NO: 5538 - DNA, 170 bp, Artificial sequence
  Mga.93_Nsd1.70
  crRNA array
cgatttcttggctttatatatcttgtggaaaggacgaaacaccgtaatttctactaagtgtagatgagaaggctccccataatgttaatttctactaagtgtagatactggtgtggacgatgcagattttttaagcttggcgtggatccgatatcaactagatcttgaga

SEQ ID NO: 5539 - DNA, 170 bp, Artificial sequence
  Mga.93_Nsd1.90
  crRNA array
cgatttcttggctttatatatcttgtggaaaggacgaaacaccgtaatttctactaagtgtagatgagaaggctccccataatgttaatttctactaagtgtagataggagctaacggcaagaatgttttttaagcttggcgtggatccgatatcaactagatcttgaga

SEQ ID NO: 5540 - DNA, 170 bp, Artificial sequence
  Mga.93_Pbrm1.1236
  crRNA array
cgatttcttggctttatatatcttgtggaaaggacgaaacaccgtaatttctactaagtgtagatgagaaggctccccataatgttaatttctactaagtgtagatgccgataaaaccaacagccgttttttaagcttggcgtggatccgatatcaactagatcttgaga

SEQ ID NO: 5541 - DNA, 170 bp, Artificial sequence
  Mga.93_Pbrm1.969
  crRNA array
cgatttcttggctttatatatcttgtggaaaggacgaaacaccgtaatttctactaagtgtagatgagaaggctccccataatgttaatttctactaagtgtagatgagccctaatgaacagctcattttttaagcttggcgtggatccgatatcaactagatcttgaga

SEQ ID NO: 5542 - DNA, 170 bp, Artificial sequence
  Mga.93_Pik3r1.76
  crRNA array
cgatttcttggctttatatatcttgtggaaaggacgaaacaccgtaatttctactaagtgtagatgagaaggctccccataatgttaatttctactaagtgtagataaaacctatacggcccgcacttttttaagcttggcgtggatccgatatcaactagatcttgaga

SEQ ID NO: 5543 - DNA, 170 bp, Artificial sequence
  Mga.93_Pik3r1.77
  crRNA array
cgatttcttggctttatatatcttgtggaaaggacgaaacaccgtaatttctactaagtgtagatgagaaggctccccataatgttaatttctactaagtgtagataaacctatacggcccgcactttttttaagcttggcgtggatccgatatcaactagatcttgaga

SEQ ID NO: 5544 - DNA, 170 bp, Artificial sequence
  Mga.93_Pten.240
  crRNA array
cgatttcttggctttatatatcttgtggaaaggacgaaacaccgtaatttctactaagtgtagatgagaaggctccccataatgttaatttctactaagtgtagattgcatacgctatagctgcttttttttaagcttggcgtggatccgatatcaactagatcttgaga

SEQ ID NO: 5545 - DNA, 170 bp, Artificial sequence
  Mga.93_Pten.265
  crRNA array
cgatttcttggctttatatatcttgtggaaaggacgaaacaccgtaatttctactaagtgtagatgagaaggctccccataatgttaatttctactaagtgtagataagcgtggtgcgtgacgcacttttttaagcttggcgtggatccgatatcaactagatcttgaga

SEQ ID NO: 5546 - DNA, 170 bp, Artificial sequence
  Mga.93_Rasa1.1478
  crRNA array
cgatttcttggctttatatatcttgtggaaaggacgaaacaccgtaatttctactaagtgtagatgagaaggctccccataatgttaatttctactaagtgtagatcgataatggtctatgatgtcttttttaagcttggcgtggatccgatatcaactagatcttgaga

SEQ ID NO: 5547 - DNA, 170 bp, Artificial sequence
  Mga.93_Rasa1.223
  crRNA array
cgatttcttggctttatatatcttgtggaaaggacgaaacaccgtaatttctactaagtgtagatgagaaggctccccataatgttaatttctactaagtgtagattccatggagtatcgtgctcgttttttaagcttggcgtggatccgatatcaactagatcttgaga

SEQ ID NO: 5548 - DNA, 170 bp, Artificial sequence
  Mga.93_Rb1.211
  crRNA array
cgatttcttggctttatatatcttgtggaaaggacgaaacaccgtaatttctactaagtgtagatgagaaggctccccataatgttaatttctactaagtgtagattctgacatgatcgggtacctttttttaagcttggcgtggatccgatatcaactagatcttgaga

SEQ ID NO: 5549 - DNA, 170 bp, Artificial sequence
  Mga.93_Rb1.394
  crRNA array
cgatttcttggctttatatatcttgtggaaaggacgaaacaccgtaatttctactaagtgtagatgagaaggctccccataatgttaatttctactaagtgtagatagaaatctcgaagcaggatcttttttaagcttggcgtggatccgatatcaactagatcttgaga

SEQ ID NO: 5550 - DNA, 170 bp, Artificial sequence
  Mga.93_Rbm10.5
  crRNA array
cgatttcttggctttatatatcttgtggaaaggacgaaacaccgtaatttctactaagtgtagatgagaaggctccccataatgttaatttctactaagtgtagatacgaaacctgaacccacacattttttaagcttggcgtggatccgatatcaactagatcttgaga

SEQ ID NO: 5551 - DNA, 170 bp, Artificial sequence
  Mga.93_Rbm10.6
  crRNA array
cgatttcttggctttatatatcttgtggaaaggacgaaacaccgtaatttctactaagtgtagatgagaaggctccccataatgttaatttctactaagtgtagatcgaaacctgaacccacacagttttttaagcttggcgtggatccgatatcaactagatcttgaga

SEQ ID NO: 5552 - DNA, 170 bp, Artificial sequence
  Mga.93_Rnf43.1920
  crRNA array
cgatttcttggctttatatatcttgtggaaaggacgaaacaccgtaatttctactaagtgtagatgagaaggctccccataatgttaatttctactaagtgtagatatccccgtgccgtggactccttttttaagcttggcgtggatccgatatcaactagatcttgaga

SEQ ID NO: 5553 - DNA, 170 bp, Artificial sequence
  Mga.93_Rnf43.39
  crRNA array
cgatttcttggctttatatatcttgtggaaaggacgaaacaccgtaatttctactaagtgtagatgagaaggctccccataatgttaatttctactaagtgtagatcaaggggatcactctgataattttttaagcttggcgtggatccgatatcaactagatcttgaga

SEQ ID NO: 5554 - DNA, 170 bp, Artificial sequence
  Mga.93_Runx1.204
  crRNA array
cgatttcttggctttatatatcttgtggaaaggacgaaacaccgtaatttctactaagtgtagatgagaaggctccccataatgttaatttctactaagtgtagattaaataagtccagccgttttttttttaagcttggcgtggatccgatatcaactagatcttgaga

SEQ ID NO: 5555 - DNA, 170 bp, Artificial sequence
  Mga.93_Runx1.81
  crRNA array
cgatttcttggctttatatatcttgtggaaaggacgaaacaccgtaatttctactaagtgtagatgagaaggctccccataatgttaatttctactaagtgtagataggacgcgtatgggaattttttttttaagcttggcgtggatccgatatcaactagatcttgaga

SEQ ID NO: 5556 - DNA, 170 bp, Artificial sequence
  Mga.93_Setd2.143
  crRNA array
cgatttcttggctttatatatcttgtggaaaggacgaaacaccgtaatttctactaagtgtagatgagaaggctccccataatgttaatttctactaagtgtagatgcacaaccacaacagactggttttttaagcttggcgtggatccgatatcaactagatcttgaga

SEQ ID NO: 5557 - DNA, 170 bp, Artificial sequence
  Mga.93_Setd2.508
  crRNA array
cgatttcttggctttatatatcttgtggaaaggacgaaacaccgtaatttctactaagtgtagatgagaaggctccccataatgttaatttctactaagtgtagattacgatcccgagcacccgacttttttaagcttggcgtggatccgatatcaactagatcttgaga

SEQ ID NO: 5558 - DNA, 170 bp, Artificial sequence
  Mga.93_Smad4.3038
  crRNA array
cgatttcttggctttatatatcttgtggaaaggacgaaacaccgtaatttctactaagtgtagatgagaaggctccccataatgttaatttctactaagtgtagatatctgcggcagtgtcaccggttttttaagcttggcgtggatccgatatcaactagatcttgaga

SEQ ID NO: 5559 - DNA, 170 bp, Artificial sequence
  Mga.93_Smad4.39
  crRNA array
cgatttcttggctttatatatcttgtggaaaggacgaaacaccgtaatttctactaagtgtagatgagaaggctccccataatgttaatttctactaagtgtagatagtcaaacgcatactgacaattttttaagcttggcgtggatccgatatcaactagatcttgaga

SEQ ID NO: 5560 - DNA, 170 bp, Artificial sequence
  Mga.93_Stag2.1409
  crRNA array
cgatttcttggctttatatatcttgtggaaaggacgaaacaccgtaatttctactaagtgtagatgagaaggctccccataatgttaatttctactaagtgtagatgctaataactgcggaagggcttttttaagcttggcgtggatccgatatcaactagatcttgaga

SEQ ID NO: 5561 - DNA, 170 bp, Artificial sequence
  Mga.93_Stag2.4401
  crRNA array
cgatttcttggctttatatatcttgtggaaaggacgaaacaccgtaatttctactaagtgtagatgagaaggctccccataatgttaatttctactaagtgtagattaatcgtccagtggtgtatattttttaagcttggcgtggatccgatatcaactagatcttgaga

SEQ ID NO: 5562 - DNA, 170 bp, Artificial sequence
  Mga.93_Tbl1xr1.1
  crRNA array
cgatttcttggctttatatatcttgtggaaaggacgaaacaccgtaatttctactaagtgtagatgagaaggctccccataatgttaatttctactaagtgtagatggatgcgcatactggtgaagttttttaagcttggcgtggatccgatatcaactagatcttgaga

SEQ ID NO: 5563 - DNA, 170 bp, Artificial sequence
  Mga.93_Tbl1xr1.83
  crRNA array
cgatttcttggctttatatatcttgtggaaaggacgaaacaccgtaatttctactaagtgtagatgagaaggctccccataatgttaatttctactaagtgtagatatggtcgacccatcgagtctttttttaagcttggcgtggatccgatatcaactagatcttgaga

SEQ ID NO: 5564 - DNA, 170 bp, Artificial sequence
  Mga.93_Tgfbr2.290
  crRNA array
cgatttcttggctttatatatcttgtggaaaggacgaaacaccgtaatttctactaagtgtagatgagaaggctccccataatgttaatttctactaagtgtagatcctctcggcgcccgggtaaattttttaagcttggcgtggatccgatatcaactagatcttgaga

SEQ ID NO: 5565 - DNA, 170 bp, Artificial sequence
  Mga.93_Tgfbr2.292
  crRNA array
cgatttcttggctttatatatcttgtggaaaggacgaaacaccgtaatttctactaagtgtagatgagaaggctccccataatgttaatttctactaagtgtagatcccgggcgccgagagggaaattttttaagcttggcgtggatccgatatcaactagatcttgaga

SEQ ID NO: 5566 - DNA, 170 bp, Artificial sequence
  Mga.93_Trp53.4
  crRNA array
cgatttcttggctttatatatcttgtggaaaggacgaaacaccgtaatttctactaagtgtagatgagaaggctccccataatgttaatttctactaagtgtagatccctgaactgcccccagggattttttaagcttggcgtggatccgatatcaactagatcttgaga

SEQ ID NO: 5567 - DNA, 170 bp, Artificial sequence
  Mga.93_Trp53.528
  crRNA array
cgatttcttggctttatatatcttgtggaaaggacgaaacaccgtaatttctactaagtgtagatgagaaggctccccataatgttaatttctactaagtgtagatgctgggccagcagagacctgttttttaagcttggcgtggatccgatatcaactagatcttgaga

SEQ ID NO: 5568 - DNA, 170 bp, Artificial sequence
  Mga.93_Vhl.1
  crRNA array
cgatttcttggctttatatatcttgtggaaaggacgaaacaccgtaatttctactaagtgtagatgagaaggctccccataatgttaatttctactaagtgtagatagggctcccggcggccatttttttttaagcttggcgtggatccgatatcaactagatcttgaga

SEQ ID NO: 5569 - DNA, 170 bp, Artificial sequence
  Mga.93_Vhl.151
  crRNA array
cgatttcttggctttatatatcttgtggaaaggacgaaacaccgtaatttctactaagtgtagatgagaaggctccccataatgttaatttctactaagtgtagattagagcactcacccgagggattttttaagcttggcgtggatccgatatcaactagatcttgaga

SEQ ID NO: 5570 - DNA, 170 bp, Artificial sequence
  Mga.93_Zc3h13.1387
  crRNA array
cgatttcttggctttatatatcttgtggaaaggacgaaacaccgtaatttctactaagtgtagatgagaaggctccccataatgttaatttctactaagtgtagatgtgacgccggtcatgtgactttttttaagcttggcgtggatccgatatcaactagatcttgaga

SEQ ID NO: 5571 - DNA, 170 bp, Artificial sequence
  Mga.93_Zc3h13.1777
  crRNA array
cgatttcttggctttatatatcttgtggaaaggacgaaacaccgtaatttctactaagtgtagatgagaaggctccccataatgttaatttctactaagtgtagatgatgctgccagtgtagcggcttttttaagcttggcgtggatccgatatcaactagatcttgaga

SEQ ID NO: 5572 - DNA, 170 bp, Artificial sequence
  Nf1.746_Acvr2a.155
  crRNA array
cgatttcttggctttatatatcttgtggaaaggacgaaacaccgtaatttctactaagtgtagattaagcataatgatgatgccataatttctactaagtgtagatggacctggctaatcaagtatttttttaagcttggcgtggatccgatatcaactagatcttgaga

SEQ ID NO: 5573 - DNA, 170 bp, Artificial sequence
  Nf1.746_Acvr2a.70
  crRNA array
cgatttcttggctttatatatcttgtggaaaggacgaaacaccgtaatttctactaagtgtagattaagcataatgatgatgccataatttctactaagtgtagatcccgaggcgccggagaagccttttttaagcttggcgtggatccgatatcaactagatcttgaga

SEQ ID NO: 5574 - DNA, 170 bp, Artificial sequence
  Nf1.746_Apc.21
  crRNA array
cgatttcttggctttatatatcttgtggaaaggacgaaacaccgtaatttctactaagtgtagattaagcataatgatgatgccataatttctactaagtgtagatgtgatccacacgtgtagctgttttttaagcttggcgtggatccgatatcaactagatcttgaga

SEQ ID NO: 5575 - DNA, 170 bp, Artificial sequence
  Nf1.746_Apc.867
  crRNA array
cgatttcttggctttatatatcttgtggaaaggacgaaacaccgtaatttctactaagtgtagattaagcataatgatgatgccataatttctactaagtgtagatcagtcccaggcggcggaagcttttttaagcttggcgtggatccgatatcaactagatcttgaga

SEQ ID NO: 5576 - DNA, 170 bp, Artificial sequence
  Nf1.746_Arid1a.2
  crRNA array
cgatttcttggctttatatatcttgtggaaaggacgaaacaccgtaatttctactaagtgtagattaagcataatgatgatgccataatttctactaagtgtagatcccgcgcccccgtcctggggttttttaagcttggcgtggatccgatatcaactagatcttgaga

SEQ ID NO: 5577 - DNA, 170 bp, Artificial sequence
  Nf1.746_Arid1a.5
  crRNA array
cgatttcttggctttatatatcttgtggaaaggacgaaacaccgtaatttctactaagtgtagattaagcataatgatgatgccataatttctactaagtgtagatcccgcgctcggccgctgccgttttttaagcttggcgtggatccgatatcaactagatcttgaga

SEQ ID NO: 5578 - DNA, 170 bp, Artificial sequence
  Nf1.746_Arid2.166
  crRNA array
cgatttcttggctttatatatcttgtggaaaggacgaaacaccgtaatttctactaagtgtagattaagcataatgatgatgccataatttctactaagtgtagataaccgcgatctgggttttttttttttaagcttggcgtggatccgatatcaactagatcttgaga

SEQ ID NO: 5579 - DNA, 170 bp, Artificial sequence
  Nf1.746_Arid2.172
  crRNA array
cgatttcttggctttatatatcttgtggaaaggacgaaacaccgtaatttctactaagtgtagattaagcataatgatgatgccataatttctactaagtgtagatctggacgagctgcggcagttttttttaagcttggcgtggatccgatatcaactagatcttgaga

SEQ ID NO: 5580 - DNA, 170 bp, Artificial sequence
  Nf1.746_Atm.120
  crRNA array
cgatttcttggctttatatatcttgtggaaaggacgaaacaccgtaatttctactaagtgtagattaagcataatgatgatgccataatttctactaagtgtagatgacaggtagtcggcagctaattttttaagcttggcgtggatccgatatcaactagatcttgaga

SEQ ID NO: 5581 - DNA, 170 bp, Artificial sequence
  Nf1.746_Atm.997
  crRNA array
cgatttcttggctttatatatcttgtggaaaggacgaaacaccgtaatttctactaagtgtagattaagcataatgatgatgccataatttctactaagtgtagatgagaaagtctccgaatcgttttttttaagcttggcgtggatccgatatcaactagatcttgaga

SEQ ID NO: 5582 - DNA, 170 bp, Artificial sequence
  Nf1.746_Atrx.249
  crRNA array
cgatttcttggctttatatatcttgtggaaaggacgaaacaccgtaatttctactaagtgtagattaagcataatgatgatgccataatttctactaagtgtagattagccagtcgctcatatctcttttttaagcttggcgtggatccgatatcaactagatcttgaga

SEQ ID NO: 5583 - DNA, 170 bp, Artificial sequence
  Nf1.746_Atrx.251
  crRNA array
cgatttcttggctttatatatcttgtggaaaggacgaaacaccgtaatttctactaagtgtagattaagcataatgatgatgccataatttctactaagtgtagatgccagtcgctcatatctctgttttttaagcttggcgtggatccgatatcaactagatcttgaga

SEQ ID NO: 5584 - DNA, 170 bp, Artificial sequence
  Nf1.746_Bcor.203
  crRNA array
cgatttcttggctttatatatcttgtggaaaggacgaaacaccgtaatttctactaagtgtagattaagcataatgatgatgccataatttctactaagtgtagatccccggagcggagtccaggcttttttaagcttggcgtggatccgatatcaactagatcttgaga

SEQ ID NO: 5585 - DNA, 170 bp, Artificial sequence
  Nf1.746_Bcor.475
  crRNA array
cgatttcttggctttatatatcttgtggaaaggacgaaacaccgtaatttctactaagtgtagattaagcataatgatgatgccataatttctactaagtgtagattgcaacccctctgtatgggattttttaagcttggcgtggatccgatatcaactagatcttgaga

SEQ ID NO: 5586 - DNA, 170 bp, Artificial sequence
  Nf1.746_Brca1.112
  crRNA array
cgatttcttggctttatatatcttgtggaaaggacgaaacaccgtaatttctactaagtgtagattaagcataatgatgatgccataatttctactaagtgtagatctagacgctctgtggagactttttttaagcttggcgtggatccgatatcaactagatcttgaga

SEQ ID NO: 5587 - DNA, 170 bp, Artificial sequence
  Nf1.746_Brca1.53
  crRNA array
cgatttcttggctttatatatcttgtggaaaggacgaaacaccgtaatttctactaagtgtagattaagcataatgatgatgccataatttctactaagtgtagataatgaggaggcgtcgatcatttttttaagcttggcgtggatccgatatcaactagatcttgaga

SEQ ID NO: 5588 - DNA, 170 bp, Artificial sequence
  Nf1.746_Casp8.45
  crRNA array
cgatttcttggctttatatatcttgtggaaaggacgaaacaccgtaatttctactaagtgtagattaagcataatgatgatgccataatttctactaagtgtagatctaccgagatcctgtgaatgttttttaagcttggcgtggatccgatatcaactagatcttgaga

SEQ ID NO: 5589 - DNA, 170 bp, Artificial sequence
  Nf1.746_Casp8.54
  crRNA array
cgatttcttggctttatatatcttgtggaaaggacgaaacaccgtaatttctactaagtgtagattaagcataatgatgatgccataatttctactaagtgtagatcagtgcagtcgtcgtaagatttttttaagcttggcgtggatccgatatcaactagatcttgaga

SEQ ID NO: 5590 - DNA, 170 bp, Artificial sequence
  Nf1.746_Cbwd1.84
  crRNA array
cgatttcttggctttatatatcttgtggaaaggacgaaacaccgtaatttctactaagtgtagattaagcataatgatgatgccataatttctactaagtgtagatcacagcaggtaacatgccgcttttttaagcttggcgtggatccgatatcaactagatcttgaga

SEQ ID NO: 5591 - DNA, 170 bp, Artificial sequence
  Nf1.746_Cbwd1.85
  crRNA array
cgatttcttggctttatatatcttgtggaaaggacgaaacaccgtaatttctactaagtgtagattaagcataatgatgatgccataatttctactaagtgtagatacagcaggtaacatgccgccttttttaagcttggcgtggatccgatatcaactagatcttgaga

SEQ ID NO: 5592 - DNA, 170 bp, Artificial sequence
  Nf1.746_Cdh1.387
  crRNA array
cgatttcttggctttatatatcttgtggaaaggacgaaacaccgtaatttctactaagtgtagattaagcataatgatgatgccataatttctactaagtgtagatctcggcgtctgccgggtccgttttttaagcttggcgtggatccgatatcaactagatcttgaga

SEQ ID NO: 5593 - DNA, 170 bp, Artificial sequence
  Nf1.746_Cdh1.58
  crRNA array
cgatttcttggctttatatatcttgtggaaaggacgaaacaccgtaatttctactaagtgtagattaagcataatgatgatgccataatttctactaagtgtagatctcgtccgcgcccgggactcttttttaagcttggcgtggatccgatatcaactagatcttgaga

SEQ ID NO: 5594 - DNA, 170 bp, Artificial sequence
  Nf1.746_Cdkn2a.647
  crRNA array
cgatttcttggctttatatatcttgtggaaaggacgaaacaccgtaatttctactaagtgtagattaagcataatgatgatgccataatttctactaagtgtagatgcaatcacgggagggagcagttttttaagcttggcgtggatccgatatcaactagatcttgaga

SEQ ID NO: 5595 - DNA, 170 bp, Artificial sequence
  Nf1.746_Cdkn2a.648
  crRNA array
cgatttcttggctttatatatcttgtggaaaggacgaaacaccgtaatttctactaagtgtagattaagcataatgatgatgccataatttctactaagtgtagatcaatcacgggagggagcagattttttaagcttggcgtggatccgatatcaactagatcttgaga

SEQ ID NO: 5596 - DNA, 170 bp, Artificial sequence
  Nf1.746_Cic.162
  crRNA array
cgatttcttggctttatatatcttgtggaaaggacgaaacaccgtaatttctactaagtgtagattaagcataatgatgatgccataatttctactaagtgtagatcgcaggcgcgcccggcggagttttttaagcttggcgtggatccgatatcaactagatcttgaga

SEQ ID NO: 5597 - DNA, 170 bp, Artificial sequence
  Nf1.746_Cic.164
  crRNA array
cgatttcttggctttatatatcttgtggaaaggacgaaacaccgtaatttctactaagtgtagattaagcataatgatgatgccataatttctactaagtgtagatcgggccctgggccggcggctttttttaagcttggcgtggatccgatatcaactagatcttgaga

SEQ ID NO: 5598 - DNA, 170 bp, Artificial sequence
  Nf1.746_Ctcf.229
  crRNA array
cgatttcttggctttatatatcttgtggaaaggacgaaacaccgtaatttctactaagtgtagattaagcataatgatgatgccataatttctactaagtgtagatggctggtggctgatagtctgttttttaagcttggcgtggatccgatatcaactagatcttgaga

SEQ ID NO: 5599 - DNA, 170 bp, Artificial sequence
  Nf1.746_Ctcf.809
  crRNA array
cgatttcttggctttatatatcttgtggaaaggacgaaacaccgtaatttctactaagtgtagattaagcataatgatgatgccataatttctactaagtgtagataagcgctatcatgatcccaattttttaagcttggcgtggatccgatatcaactagatcttgaga

SEQ ID NO: 5600 - DNA, 170 bp, Artificial sequence
  Nf1.746_Elf3.826
  crRNA array
cgatttcttggctttatatatcttgtggaaaggacgaaacaccgtaatttctactaagtgtagattaagcataatgatgatgccataatttctactaagtgtagattccgagacatcctaatccacttttttaagcttggcgtggatccgatatcaactagatcttgaga

SEQ ID NO: 5601 - DNA, 170 bp, Artificial sequence
  Nf1.746_Elf3.983
  crRNA array
cgatttcttggctttatatatcttgtggaaaggacgaaacaccgtaatttctactaagtgtagattaagcataatgatgatgccataatttctactaagtgtagattaggccccctaactggaccattttttaagcttggcgtggatccgatatcaactagatcttgaga

SEQ ID NO: 5602 - DNA, 170 bp, Artificial sequence
  Nf1.746_Ep300.310
  crRNA array
cgatttcttggctttatatatcttgtggaaaggacgaaacaccgtaatttctactaagtgtagattaagcataatgatgatgccataatttctactaagtgtagatatggtacgacagtgaggaagttttttaagcttggcgtggatccgatatcaactagatcttgaga

SEQ ID NO: 5603 - DNA, 170 bp, Artificial sequence
  Nf1.746_Ep300.587
  crRNA array
cgatttcttggctttatatatcttgtggaaaggacgaaacaccgtaatttctactaagtgtagattaagcataatgatgatgccataatttctactaagtgtagatcgccccggggcccccaaccattttttaagcttggcgtggatccgatatcaactagatcttgaga

SEQ ID NO: 5604 - DNA, 170 bp, Artificial sequence
  Nf1.746_Epha2.126
  crRNA array
cgatttcttggctttatatatcttgtggaaaggacgaaacaccgtaatttctactaagtgtagattaagcataatgatgatgccataatttctactaagtgtagatcctgtgccgccgcggccgccttttttaagcttggcgtggatccgatatcaactagatcttgaga

SEQ ID NO: 5605 - DNA, 170 bp, Artificial sequence
  Nf1.746_Epha2.5
  crRNA array
cgatttcttggctttatatatcttgtggaaaggacgaaacaccgtaatttctactaagtgtagattaagcataatgatgatgccataatttctactaagtgtagatcatgagctggcgccacccggttttttaagcttggcgtggatccgatatcaactagatcttgaga

SEQ ID NO: 5606 - DNA, 170 bp, Artificial sequence
  Nf1.746_Fat1.105
  crRNA array
cgatttcttggctttatatatcttgtggaaaggacgaaacaccgtaatttctactaagtgtagattaagcataatgatgatgccataatttctactaagtgtagataactcgaggtgacaacaagtttttttaagcttggcgtggatccgatatcaactagatcttgaga

SEQ ID NO: 5607 - DNA, 170 bp, Artificial sequence
  Nf1.746_Fat1.122
  crRNA array
cgatttcttggctttatatatcttgtggaaaggacgaaacaccgtaatttctactaagtgtagattaagcataatgatgatgccataatttctactaagtgtagatccatcgacatggaaacgggattttttaagcttggcgtggatccgatatcaactagatcttgaga

SEQ ID NO: 5608 - DNA, 170 bp, Artificial sequence
  Nf1.746_Fbxw7.21
  crRNA array
cgatttcttggctttatatatcttgtggaaaggacgaaacaccgtaatttctactaagtgtagattaagcataatgatgatgccataatttctactaagtgtagattaatgtgccgtagaaacccattttttaagcttggcgtggatccgatatcaactagatcttgaga

SEQ ID NO: 5609 - DNA, 170 bp, Artificial sequence
  Nf1.746_Fbxw7.23
  crRNA array
cgatttcttggctttatatatcttgtggaaaggacgaaacaccgtaatttctactaagtgtagattaagcataatgatgatgccataatttctactaagtgtagatatgtgccgtagaaacccatattttttaagcttggcgtggatccgatatcaactagatcttgaga

SEQ ID NO: 5610 - DNA, 170 bp, Artificial sequence
  Nf1.746_Gata3.34
  crRNA array
cgatttcttggctttatatatcttgtggaaaggacgaaacaccgtaatttctactaagtgtagattaagcataatgatgatgccataatttctactaagtgtagatctaaactatcccgcaaagatttttttaagcttggcgtggatccgatatcaactagatcttgaga

SEQ ID NO: 5611 - DNA, 170 bp, Artificial sequence
  Nf1.746_Gata3.47
  crRNA array
cgatttcttggctttatatatcttgtggaaaggacgaaacaccgtaatttctactaagtgtagattaagcataatgatgatgccataatttctactaagtgtagatcgtagtaggacgggacgtggttttttaagcttggcgtggatccgatatcaactagatcttgaga

SEQ ID NO: 5612 - DNA, 170 bp, Artificial sequence
  Nf1.746_H2-Q2.1
  crRNA array
cgatttcttggctttatatatcttgtggaaaggacgaaacaccgtaatttctactaagtgtagattaagcataatgatgatgccataatttctactaagtgtagatagggcggccaccaacagcagttttttaagcttggcgtggatccgatatcaactagatcttgaga

SEQ ID NO: 5613 - DNA, 170 bp, Artificial sequence
  Nf1.746_H2-Q2.2
  crRNA array
cgatttcttggctttatatatcttgtggaaaggacgaaacaccgtaatttctactaagtgtagattaagcataatgatgatgccataatttctactaagtgtagattaacctgcgcccgctgctgattttttaagcttggcgtggatccgatatcaactagatcttgaga

SEQ ID NO: 5614 - DNA, 170 bp, Artificial sequence
  Nf1.746_Kdm5c.1878
  crRNA array
cgatttcttggctttatatatcttgtggaaaggacgaaacaccgtaatttctactaagtgtagattaagcataatgatgatgccataatttctactaagtgtagatagagcacggcacccgcccccttttttaagcttggcgtggatccgatatcaactagatcttgaga

SEQ ID NO: 5615 - DNA, 170 bp, Artificial sequence
  Nf1.746_Kdm5c.1879
  crRNA array
cgatttcttggctttatatatcttgtggaaaggacgaaacaccgtaatttctactaagtgtagattaagcataatgatgatgccataatttctactaagtgtagatgagcacggcacccgccccccttttttaagcttggcgtggatccgatatcaactagatcttgaga

SEQ ID NO: 5616 - DNA, 170 bp, Artificial sequence
  Nf1.746_Kdm6a.56
  crRNA array
cgatttcttggctttatatatcttgtggaaaggacgaaacaccgtaatttctactaagtgtagattaagcataatgatgatgccataatttctactaagtgtagattcgctgccgcctctcgcggcttttttaagcttggcgtggatccgatatcaactagatcttgaga

SEQ ID NO: 5617 - DNA, 170 bp, Artificial sequence
  Nf1.746_Kdm6a.57
  crRNA array
cgatttcttggctttatatatcttgtggaaaggacgaaacaccgtaatttctactaagtgtagattaagcataatgatgatgccataatttctactaagtgtagatcgctgccgcctctcgcggcattttttaagcttggcgtggatccgatatcaactagatcttgaga

SEQ ID NO: 5618 - DNA, 170 bp, Artificial sequence
  Nf1.746_Kmt2b.265
  crRNA array
cgatttcttggctttatatatcttgtggaaaggacgaaacaccgtaatttctactaagtgtagattaagcataatgatgatgccataatttctactaagtgtagatccccaagtgaagcccacctgttttttaagcttggcgtggatccgatatcaactagatcttgaga

SEQ ID NO: 5619 - DNA, 170 bp, Artificial sequence
  Nf1.746_Kmt2b.298
  crRNA array
cgatttcttggctttatatatcttgtggaaaggacgaaacaccgtaatttctactaagtgtagattaagcataatgatgatgccataatttctactaagtgtagattccggcagggaccggctggcttttttaagcttggcgtggatccgatatcaactagatcttgaga

SEQ ID NO: 5620 - DNA, 170 bp, Artificial sequence
  Nf1.746_Kmt2c.1962
  crRNA array
cgatttcttggctttatatatcttgtggaaaggacgaaacaccgtaatttctactaagtgtagattaagcataatgatgatgccataatttctactaagtgtagatgtgacgatctgtgccacaagttttttaagcttggcgtggatccgatatcaactagatcttgaga

SEQ ID NO: 5621 - DNA, 170 bp, Artificial sequence
  Nf1.746_Kmt2c.2236
  crRNA array
cgatttcttggctttatatatcttgtggaaaggacgaaacaccgtaatttctactaagtgtagattaagcataatgatgatgccataatttctactaagtgtagatactcgacctccacctccctattttttaagcttggcgtggatccgatatcaactagatcttgaga

SEQ ID NO: 5622 - DNA, 170 bp, Artificial sequence
  Nf1.746_Kmt2d.316
  crRNA array
cgatttcttggctttatatatcttgtggaaaggacgaaacaccgtaatttctactaagtgtagattaagcataatgatgatgccataatttctactaagtgtagatactccaggccacccaggtggttttttaagcttggcgtggatccgatatcaactagatcttgaga

SEQ ID NO: 5623 - DNA, 170 bp, Artificial sequence
  Nf1.746_Kmt2d.416
  crRNA array
cgatttcttggctttatatatcttgtggaaaggacgaaacaccgtaatttctactaagtgtagattaagcataatgatgatgccataatttctactaagtgtagattaaacccccgggggaagggtttttttaagcttggcgtggatccgatatcaactagatcttgaga

SEQ ID NO: 5624 - DNA, 170 bp, Artificial sequence
  Nf1.746_Map2k4.119
  crRNA array
cgatttcttggctttatatatcttgtggaaaggacgaaacaccgtaatttctactaagtgtagattaagcataatgatgatgccataatttctactaagtgtagattgctgtgtgggcggccacatttttttaagcttggcgtggatccgatatcaactagatcttgaga

SEQ ID NO: 5625 - DNA, 170 bp, Artificial sequence
  Nf1.746_Map2k4.1261
  crRNA array
cgatttcttggctttatatatcttgtggaaaggacgaaacaccgtaatttctactaagtgtagattaagcataatgatgatgccataatttctactaagtgtagatgatgtagtaatgcggagtagttttttaagcttggcgtggatccgatatcaactagatcttgaga

SEQ ID NO: 5626 - DNA, 170 bp, Artificial sequence
  Nf1.746_Map3k1.235
  crRNA array
cgatttcttggctttatatatcttgtggaaaggacgaaacaccgtaatttctactaagtgtagattaagcataatgatgatgccataatttctactaagtgtagataaaacgctactgatcgatcgttttttaagcttggcgtggatccgatatcaactagatcttgaga

SEQ ID NO: 5627 - DNA, 170 bp, Artificial sequence
  Nf1.746_Map3k1.3838
  crRNA array
cgatttcttggctttatatatcttgtggaaaggacgaaacaccgtaatttctactaagtgtagattaagcataatgatgatgccataatttctactaagtgtagatccaacaacagggccccactattttttaagcttggcgtggatccgatatcaactagatcttgaga

SEQ ID NO: 5628 - DNA, 170 bp, Artificial sequence
  Nf1.746_Mga.1655
  crRNA array
cgatttcttggctttatatatcttgtggaaaggacgaaacaccgtaatttctactaagtgtagattaagcataatgatgatgccataatttctactaagtgtagatcgagaagtggagagcatattttttttaagcttggcgtggatccgatatcaactagatcttgaga

SEQ ID NO: 5629 - DNA, 170 bp, Artificial sequence
  Nf1.746_Mga.93
  crRNA array
cgatttcttggctttatatatcttgtggaaaggacgaaacaccgtaatttctactaagtgtagattaagcataatgatgatgccataatttctactaagtgtagatgagaaggctccccataatgtttttttaagcttggcgtggatccgatatcaactagatcttgaga

SEQ ID NO: 5630 - DNA, 170 bp, Artificial sequence
  Nf1.746_Nf2.356
  crRNA array
cgatttcttggctttatatatcttgtggaaaggacgaaacaccgtaatttctactaagtgtagattaagcataatgatgatgccataatttctactaagtgtagatcggagtcatctgatagagatttttttaagcttggcgtggatccgatatcaactagatcttgaga

SEQ ID NO: 5631 - DNA, 170 bp, Artificial sequence
  Nf1.746_Nf2.768
  crRNA array
cgatttcttggctttatatatcttgtggaaaggacgaaacaccgtaatttctactaagtgtagattaagcataatgatgatgccataatttctactaagtgtagatccgaagccccagtgtccggcttttttaagcttggcgtggatccgatatcaactagatcttgaga

SEQ ID NO: 5632 - DNA, 170 bp, Artificial sequence
  Nf1.746_Notch1.1849
  crRNA array
cgatttcttggctttatatatcttgtggaaaggacgaaacaccgtaatttctactaagtgtagattaagcataatgatgatgccataatttctactaagtgtagatctggcgggtgggcggcgctgttttttaagcttggcgtggatccgatatcaactagatcttgaga

SEQ ID NO: 5633 - DNA, 170 bp, Artificial sequence
  Nf1.746_Notch1.649
  crRNA array
cgatttcttggctttatatatcttgtggaaaggacgaaacaccgtaatttctactaagtgtagattaagcataatgatgatgccataatttctactaagtgtagattgggccaacgatgccaggacttttttaagcttggcgtggatccgatatcaactagatcttgaga

SEQ ID NO: 5634 - DNA, 170 bp, Artificial sequence
  Nf1.746_Nsd1.70
  crRNA array
cgatttcttggctttatatatcttgtggaaaggacgaaacaccgtaatttctactaagtgtagattaagcataatgatgatgccataatttctactaagtgtagatactggtgtggacgatgcagattttttaagcttggcgtggatccgatatcaactagatcttgaga

SEQ ID NO: 5635 - DNA, 170 bp, Artificial sequence
  Nf1.746_Nsd1.90
  crRNA array
cgatttcttggctttatatatcttgtggaaaggacgaaacaccgtaatttctactaagtgtagattaagcataatgatgatgccataatttctactaagtgtagataggagctaacggcaagaatgttttttaagcttggcgtggatccgatatcaactagatcttgaga

SEQ ID NO: 5636 - DNA, 170 bp, Artificial sequence
  Nf1.746_Pbrm1.1236
  crRNA array
cgatttcttggctttatatatcttgtggaaaggacgaaacaccgtaatttctactaagtgtagattaagcataatgatgatgccataatttctactaagtgtagatgccgataaaaccaacagccgttttttaagcttggcgtggatccgatatcaactagatcttgaga

SEQ ID NO: 5637 - DNA, 170 bp, Artificial sequence
  Nf1.746_Pbrm1.969
  crRNA array
cgatttcttggctttatatatcttgtggaaaggacgaaacaccgtaatttctactaagtgtagattaagcataatgatgatgccataatttctactaagtgtagatgagccctaatgaacagctcattttttaagcttggcgtggatccgatatcaactagatcttgaga

SEQ ID NO: 5638 - DNA, 170 bp, Artificial sequence
  Nf1.746_Pik3r1.76
  crRNA array
cgatttcttggctttatatatcttgtggaaaggacgaaacaccgtaatttctactaagtgtagattaagcataatgatgatgccataatttctactaagtgtagataaaacctatacggcccgcacttttttaagcttggcgtggatccgatatcaactagatcttgaga

SEQ ID NO: 5639 - DNA, 170 bp, Artificial sequence
  Nf1.746_Pik3r1.77
  crRNA array
cgatttcttggctttatatatcttgtggaaaggacgaaacaccgtaatttctactaagtgtagattaagcataatgatgatgccataatttctactaagtgtagataaacctatacggcccgcactttttttaagcttggcgtggatccgatatcaactagatcttgaga

SEQ ID NO: 5640 - DNA, 170 bp, Artificial sequence
  Nf1.746_Pten.240
  crRNA array
cgatttcttggctttatatatcttgtggaaaggacgaaacaccgtaatttctactaagtgtagattaagcataatgatgatgccataatttctactaagtgtagattgcatacgctatagctgcttttttttaagcttggcgtggatccgatatcaactagatcttgaga

SEQ ID NO: 5641 - DNA, 170 bp, Artificial sequence
  Nf1.746_Pten.265
  crRNA array
cgatttcttggctttatatatcttgtggaaaggacgaaacaccgtaatttctactaagtgtagattaagcataatgatgatgccataatttctactaagtgtagataagcgtggtgcgtgacgcacttttttaagcttggcgtggatccgatatcaactagatcttgaga

SEQ ID NO: 5642 - DNA, 170 bp, Artificial sequence
  Nf1.746_Rasa1.1478
  crRNA array
cgatttcttggctttatatatcttgtggaaaggacgaaacaccgtaatttctactaagtgtagattaagcataatgatgatgccataatttctactaagtgtagatcgataatggtctatgatgtcttttttaagcttggcgtggatccgatatcaactagatcttgaga

SEQ ID NO: 5643 - DNA, 170 bp, Artificial sequence
  Nf1.746_Rasa1.223
  crRNA array
cgatttcttggctttatatatcttgtggaaaggacgaaacaccgtaatttctactaagtgtagattaagcataatgatgatgccataatttctactaagtgtagattccatggagtatcgtgctcgttttttaagcttggcgtggatccgatatcaactagatcttgaga

SEQ ID NO: 5644 - DNA, 170 bp, Artificial sequence
  Nf1.746_Rb1.211
  crRNA array
cgatttcttggctttatatatcttgtggaaaggacgaaacaccgtaatttctactaagtgtagattaagcataatgatgatgccataatttctactaagtgtagattctgacatgatcgggtacctttttttaagcttggcgtggatccgatatcaactagatcttgaga

SEQ ID NO: 5645 - DNA, 170 bp, Artificial sequence
  Nf1.746_Rb1.394
  crRNA array
cgatttcttggctttatatatcttgtggaaaggacgaaacaccgtaatttctactaagtgtagattaagcataatgatgatgccataatttctactaagtgtagatagaaatctcgaagcaggatcttttttaagcttggcgtggatccgatatcaactagatcttgaga

SEQ ID NO: 5646 - DNA, 170 bp, Artificial sequence
  Nf1.746_Rbm10.5
  crRNA array
cgatttcttggctttatatatcttgtggaaaggacgaaacaccgtaatttctactaagtgtagattaagcataatgatgatgccataatttctactaagtgtagatacgaaacctgaacccacacattttttaagcttggcgtggatccgatatcaactagatcttgaga

SEQ ID NO: 5647 - DNA, 170 bp, Artificial sequence
  Nf1.746_Rbm10.6
  crRNA array
cgatttcttggctttatatatcttgtggaaaggacgaaacaccgtaatttctactaagtgtagattaagcataatgatgatgccataatttctactaagtgtagatcgaaacctgaacccacacagttttttaagcttggcgtggatccgatatcaactagatcttgaga

SEQ ID NO: 5648 - DNA, 170 bp, Artificial sequence
  Nf1.746_Rnf43.1920
  crRNA array
cgatttcttggctttatatatcttgtggaaaggacgaaacaccgtaatttctactaagtgtagattaagcataatgatgatgccataatttctactaagtgtagatatccccgtgccgtggactccttttttaagcttggcgtggatccgatatcaactagatcttgaga

SEQ ID NO: 5649 - DNA, 170 bp, Artificial sequence
  Nf1.746_Rnf43.39
  crRNA array
cgatttcttggctttatatatcttgtggaaaggacgaaacaccgtaatttctactaagtgtagattaagcataatgatgatgccataatttctactaagtgtagatcaaggggatcactctgataattttttaagcttggcgtggatccgatatcaactagatcttgaga

SEQ ID NO: 5650 - DNA, 170 bp, Artificial sequence
  Nf1.746_Runx1.204
  crRNA array
cgatttcttggctttatatatcttgtggaaaggacgaaacaccgtaatttctactaagtgtagattaagcataatgatgatgccataatttctactaagtgtagattaaataagtccagccgttttttttttaagcttggcgtggatccgatatcaactagatcttgaga

SEQ ID NO: 5651 - DNA, 170 bp, Artificial sequence
  Nf1.746_Runx1.81
  crRNA array
cgatttcttggctttatatatcttgtggaaaggacgaaacaccgtaatttctactaagtgtagattaagcataatgatgatgccataatttctactaagtgtagataggacgcgtatgggaattttttttttaagcttggcgtggatccgatatcaactagatcttgaga

SEQ ID NO: 5652 - DNA, 170 bp, Artificial sequence
  Nf1.746_Setd2.143
  crRNA array
cgatttcttggctttatatatcttgtggaaaggacgaaacaccgtaatttctactaagtgtagattaagcataatgatgatgccataatttctactaagtgtagatgcacaaccacaacagactggttttttaagcttggcgtggatccgatatcaactagatcttgaga

SEQ ID NO: 5653 - DNA, 170 bp, Artificial sequence
  Nf1.746_Setd2.508
  crRNA array
cgatttcttggctttatatatcttgtggaaaggacgaaacaccgtaatttctactaagtgtagattaagcataatgatgatgccataatttctactaagtgtagattacgatcccgagcacccgacttttttaagcttggcgtggatccgatatcaactagatcttgaga

SEQ ID NO: 5654 - DNA, 170 bp, Artificial sequence
  Nf1.746_Smad4.3038
  crRNA array
cgatttcttggctttatatatcttgtggaaaggacgaaacaccgtaatttctactaagtgtagattaagcataatgatgatgccataatttctactaagtgtagatatctgcggcagtgtcaccggttttttaagcttggcgtggatccgatatcaactagatcttgaga

SEQ ID NO: 5655 - DNA, 170 bp, Artificial sequence
  Nf1.746_Smad4.39
  crRNA array
cgatttcttggctttatatatcttgtggaaaggacgaaacaccgtaatttctactaagtgtagattaagcataatgatgatgccataatttctactaagtgtagatagtcaaacgcatactgacaattttttaagcttggcgtggatccgatatcaactagatcttgaga

SEQ ID NO: 5656 - DNA, 170 bp, Artificial sequence
  Nf1.746_Stag2.1409
  crRNA array
cgatttcttggctttatatatcttgtggaaaggacgaaacaccgtaatttctactaagtgtagattaagcataatgatgatgccataatttctactaagtgtagatgctaataactgcggaagggcttttttaagcttggcgtggatccgatatcaactagatcttgaga

SEQ ID NO: 5657 - DNA, 170 bp, Artificial sequence
  Nf1.746_Stag2.4401
  crRNA array
cgatttcttggctttatatatcttgtggaaaggacgaaacaccgtaatttctactaagtgtagattaagcataatgatgatgccataatttctactaagtgtagattaatcgtccagtggtgtatattttttaagcttggcgtggatccgatatcaactagatcttgaga

SEQ ID NO: 5658 - DNA, 170 bp, Artificial sequence
  Nf1.746_Tbl1xr1.1
  crRNA array
cgatttcttggctttatatatcttgtggaaaggacgaaacaccgtaatttctactaagtgtagattaagcataatgatgatgccataatttctactaagtgtagatggatgcgcatactggtgaagttttttaagcttggcgtggatccgatatcaactagatcttgaga

SEQ ID NO: 5659 - DNA, 170 bp, Artificial sequence
  Nf1.746_Tbl1xr1.83
  crRNA array
cgatttcttggctttatatatcttgtggaaaggacgaaacaccgtaatttctactaagtgtagattaagcataatgatgatgccataatttctactaagtgtagatatggtcgacccatcgagtctttttttaagcttggcgtggatccgatatcaactagatcttgaga

SEQ ID NO: 5660 - DNA, 170 bp, Artificial sequence
  Nf1.746_Tgfbr2.290
  crRNA array
cgatttcttggctttatatatcttgtggaaaggacgaaacaccgtaatttctactaagtgtagattaagcataatgatgatgccataatttctactaagtgtagatcctctcggcgcccgggtaaattttttaagcttggcgtggatccgatatcaactagatcttgaga

SEQ ID NO: 5661 - DNA, 170 bp, Artificial sequence
  Nf1.746_Tgfbr2.292
  crRNA array
cgatttcttggctttatatatcttgtggaaaggacgaaacaccgtaatttctactaagtgtagattaagcataatgatgatgccataatttctactaagtgtagatcccgggcgccgagagggaaattttttaagcttggcgtggatccgatatcaactagatcttgaga

SEQ ID NO: 5662 - DNA, 170 bp, Artificial sequence
  Nf1.746_Trp53.4
  crRNA array
cgatttcttggctttatatatcttgtggaaaggacgaaacaccgtaatttctactaagtgtagattaagcataatgatgatgccataatttctactaagtgtagatccctgaactgcccccagggattttttaagcttggcgtggatccgatatcaactagatcttgaga

SEQ ID NO: 5663 - DNA, 170 bp, Artificial sequence
  Nf1.746_Trp53.528
  crRNA array
cgatttcttggctttatatatcttgtggaaaggacgaaacaccgtaatttctactaagtgtagattaagcataatgatgatgccataatttctactaagtgtagatgctgggccagcagagacctgttttttaagcttggcgtggatccgatatcaactagatcttgaga

SEQ ID NO: 5664 - DNA, 170 bp, Artificial sequence
  Nf1.746_Vhl.1
  crRNA array
cgatttcttggctttatatatcttgtggaaaggacgaaacaccgtaatttctactaagtgtagattaagcataatgatgatgccataatttctactaagtgtagatagggctcccggcggccatttttttttaagcttggcgtggatccgatatcaactagatcttgaga

SEQ ID NO: 5665 - DNA, 170 bp, Artificial sequence
  Nf1.746_Vhl.151
  crRNA array
cgatttcttggctttatatatcttgtggaaaggacgaaacaccgtaatttctactaagtgtagattaagcataatgatgatgccataatttctactaagtgtagattagagcactcacccgagggattttttaagcttggcgtggatccgatatcaactagatcttgaga

SEQ ID NO: 5666 - DNA, 170 bp, Artificial sequence
  Nf1.746_Zc3h13.1387
  crRNA array
cgatttcttggctttatatatcttgtggaaaggacgaaacaccgtaatttctactaagtgtagattaagcataatgatgatgccataatttctactaagtgtagatgtgacgccggtcatgtgactttttttaagcttggcgtggatccgatatcaactagatcttgaga

SEQ ID NO: 5667 - DNA, 170 bp, Artificial sequence
  Nf1.746_Zc3h13.1777
  crRNA array
cgatttcttggctttatatatcttgtggaaaggacgaaacaccgtaatttctactaagtgtagattaagcataatgatgatgccataatttctactaagtgtagatgatgctgccagtgtagcggcttttttaagcttggcgtggatccgatatcaactagatcttgaga

SEQ ID NO: 5668 - DNA, 170 bp, Artificial sequence
  Nf1.97_Acvr2a.155
  crRNA array
cgatttcttggctttatatatcttgtggaaaggacgaaacaccgtaatttctactaagtgtagatagcccgctacatgctgatgctaatttctactaagtgtagatggacctggctaatcaagtatttttttaagcttggcgtggatccgatatcaactagatcttgaga

SEQ ID NO: 5669 - DNA, 170 bp, Artificial sequence
  Nf1.97_Acvr2a.70
  crRNA array
cgatttcttggctttatatatcttgtggaaaggacgaaacaccgtaatttctactaagtgtagatagcccgctacatgctgatgctaatttctactaagtgtagatcccgaggcgccggagaagccttttttaagcttggcgtggatccgatatcaactagatcttgaga

SEQ ID NO: 5670 - DNA, 170 bp, Artificial sequence
  Nf1.97_Apc.21
  crRNA array
cgatttcttggctttatatatcttgtggaaaggacgaaacaccgtaatttctactaagtgtagatagcccgctacatgctgatgctaatttctactaagtgtagatgtgatccacacgtgtagctgttttttaagcttggcgtggatccgatatcaactagatcttgaga

SEQ ID NO: 5671 - DNA, 170 bp, Artificial sequence
  Nf1.97_Apc.867
  crRNA array
cgatttcttggctttatatatcttgtggaaaggacgaaacaccgtaatttctactaagtgtagatagcccgctacatgctgatgctaatttctactaagtgtagatcagtcccaggcggcggaagcttttttaagcttggcgtggatccgatatcaactagatcttgaga

SEQ ID NO: 5672 - DNA, 170 bp, Artificial sequence
  Nf1.97_Arid1a.2
  crRNA array
cgatttcttggctttatatatcttgtggaaaggacgaaacaccgtaatttctactaagtgtagatagcccgctacatgctgatgctaatttctactaagtgtagatcccgcgcccccgtcctggggttttttaagcttggcgtggatccgatatcaactagatcttgaga

SEQ ID NO: 5673 - DNA, 170 bp, Artificial sequence
  Nf1.97_Arid1a.5
  crRNA array
cgatttcttggctttatatatcttgtggaaaggacgaaacaccgtaatttctactaagtgtagatagcccgctacatgctgatgctaatttctactaagtgtagatcccgcgctcggccgctgccgttttttaagcttggcgtggatccgatatcaactagatcttgaga

SEQ ID NO: 5674 - DNA, 170 bp, Artificial sequence
  Nf1.97_Arid2.166
  crRNA array
cgatttcttggctttatatatcttgtggaaaggacgaaacaccgtaatttctactaagtgtagatagcccgctacatgctgatgctaatttctactaagtgtagataaccgcgatctgggttttttttttttaagcttggcgtggatccgatatcaactagatcttgaga

SEQ ID NO: 5675 - DNA, 170 bp, Artificial sequence
  Nf1.97_Arid2.172
  crRNA array
cgatttcttggctttatatatcttgtggaaaggacgaaacaccgtaatttctactaagtgtagatagcccgctacatgctgatgctaatttctactaagtgtagatctggacgagctgcggcagttttttttaagcttggcgtggatccgatatcaactagatcttgaga

SEQ ID NO: 5676 - DNA, 170 bp, Artificial sequence
  Nf1.97_Atm.120
  crRNA array
cgatttcttggctttatatatcttgtggaaaggacgaaacaccgtaatttctactaagtgtagatagcccgctacatgctgatgctaatttctactaagtgtagatgacaggtagtcggcagctaattttttaagcttggcgtggatccgatatcaactagatcttgaga

SEQ ID NO: 5677 - DNA, 170 bp, Artificial sequence
  Nf1.97_Atm.997
  crRNA array
cgatttcttggctttatatatcttgtggaaaggacgaaacaccgtaatttctactaagtgtagatagcccgctacatgctgatgctaatttctactaagtgtagatgagaaagtctccgaatcgttttttttaagcttggcgtggatccgatatcaactagatcttgaga

SEQ ID NO: 5678 - DNA, 170 bp, Artificial sequence
  Nf1.97_Atrx.249
  crRNA array
cgatttcttggctttatatatcttgtggaaaggacgaaacaccgtaatttctactaagtgtagatagcccgctacatgctgatgctaatttctactaagtgtagattagccagtcgctcatatctcttttttaagcttggcgtggatccgatatcaactagatcttgaga

SEQ ID NO: 5679 - DNA, 170 bp, Artificial sequence
  Nf1.97_Atrx.251
  crRNA array
cgatttcttggctttatatatcttgtggaaaggacgaaacaccgtaatttctactaagtgtagatagcccgctacatgctgatgctaatttctactaagtgtagatgccagtcgctcatatctctgttttttaagcttggcgtggatccgatatcaactagatcttgaga

SEQ ID NO: 5680 - DNA, 170 bp, Artificial sequence
  Nf1.97_Bcor.203
  crRNA array
cgatttcttggctttatatatcttgtggaaaggacgaaacaccgtaatttctactaagtgtagatagcccgctacatgctgatgctaatttctactaagtgtagatccccggagcggagtccaggcttttttaagcttggcgtggatccgatatcaactagatcttgaga

SEQ ID NO: 5681 - DNA, 170 bp, Artificial sequence
  Nf1.97_Bcor.475
  crRNA array
cgatttcttggctttatatatcttgtggaaaggacgaaacaccgtaatttctactaagtgtagatagcccgctacatgctgatgctaatttctactaagtgtagattgcaacccctctgtatgggattttttaagcttggcgtggatccgatatcaactagatcttgaga

SEQ ID NO: 5682 - DNA, 170 bp, Artificial sequence
  Nf1.97_Brca1.112
  crRNA array
cgatttcttggctttatatatcttgtggaaaggacgaaacaccgtaatttctactaagtgtagatagcccgctacatgctgatgctaatttctactaagtgtagatctagacgctctgtggagactttttttaagcttggcgtggatccgatatcaactagatcttgaga

SEQ ID NO: 5683 - DNA, 170 bp, Artificial sequence
  Nf1.97_Brca1.53
  crRNA array
cgatttcttggctttatatatcttgtggaaaggacgaaacaccgtaatttctactaagtgtagatagcccgctacatgctgatgctaatttctactaagtgtagataatgaggaggcgtcgatcatttttttaagcttggcgtggatccgatatcaactagatcttgaga

SEQ ID NO: 5684 - DNA, 170 bp, Artificial sequence
  Nf1.97_Casp8.45
  crRNA array
cgatttcttggctttatatatcttgtggaaaggacgaaacaccgtaatttctactaagtgtagatagcccgctacatgctgatgctaatttctactaagtgtagatctaccgagatcctgtgaatgttttttaagcttggcgtggatccgatatcaactagatcttgaga

SEQ ID NO: 5685 - DNA, 170 bp, Artificial sequence
  Nf1.97_Casp8.54
  crRNA array
cgatttcttggctttatatatcttgtggaaaggacgaaacaccgtaatttctactaagtgtagatagcccgctacatgctgatgctaatttctactaagtgtagatcagtgcagtcgtcgtaagatttttttaagcttggcgtggatccgatatcaactagatcttgaga

SEQ ID NO: 5686 - DNA, 170 bp, Artificial sequence
  Nf1.97_Cbwd1.84
  crRNA array
cgatttcttggctttatatatcttgtggaaaggacgaaacaccgtaatttctactaagtgtagatagcccgctacatgctgatgctaatttctactaagtgtagatcacagcaggtaacatgccgcttttttaagcttggcgtggatccgatatcaactagatcttgaga

SEQ ID NO: 5687 - DNA, 170 bp, Artificial sequence
  Nf1.97_Cbwd1.85
  crRNA array
cgatttcttggctttatatatcttgtggaaaggacgaaacaccgtaatttctactaagtgtagatagcccgctacatgctgatgctaatttctactaagtgtagatacagcaggtaacatgccgccttttttaagcttggcgtggatccgatatcaactagatcttgaga

SEQ ID NO: 5688 - DNA, 170 bp, Artificial sequence
  Nf1.97_Cdh1.387
  crRNA array
cgatttcttggctttatatatcttgtggaaaggacgaaacaccgtaatttctactaagtgtagatagcccgctacatgctgatgctaatttctactaagtgtagatctcggcgtctgccgggtccgttttttaagcttggcgtggatccgatatcaactagatcttgaga

SEQ ID NO: 5689 - DNA, 170 bp, Artificial sequence
  Nf1.97_Cdh1.58
  crRNA array
cgatttcttggctttatatatcttgtggaaaggacgaaacaccgtaatttctactaagtgtagatagcccgctacatgctgatgctaatttctactaagtgtagatctcgtccgcgcccgggactcttttttaagcttggcgtggatccgatatcaactagatcttgaga

SEQ ID NO: 5690 - DNA, 170 bp, Artificial sequence
  Nf1.97_Cdkn2a.647
  crRNA array
cgatttcttggctttatatatcttgtggaaaggacgaaacaccgtaatttctactaagtgtagatagcccgctacatgctgatgctaatttctactaagtgtagatgcaatcacgggagggagcagttttttaagcttggcgtggatccgatatcaactagatcttgaga

SEQ ID NO: 5691 - DNA, 170 bp, Artificial sequence
  Nf1.97_Cdkn2a.648
  crRNA array
cgatttcttggctttatatatcttgtggaaaggacgaaacaccgtaatttctactaagtgtagatagcccgctacatgctgatgctaatttctactaagtgtagatcaatcacgggagggagcagattttttaagcttggcgtggatccgatatcaactagatcttgaga

SEQ ID NO: 5692 - DNA, 170 bp, Artificial sequence
  Nf1.97_Cic.162
  crRNA array
cgatttcttggctttatatatcttgtggaaaggacgaaacaccgtaatttctactaagtgtagatagcccgctacatgctgatgctaatttctactaagtgtagatcgcaggcgcgcccggcggagttttttaagcttggcgtggatccgatatcaactagatcttgaga

SEQ ID NO: 5693 - DNA, 170 bp, Artificial sequence
  Nf1.97_Cic.164
  crRNA array
cgatttcttggctttatatatcttgtggaaaggacgaaacaccgtaatttctactaagtgtagatagcccgctacatgctgatgctaatttctactaagtgtagatcgggccctgggccggcggctttttttaagcttggcgtggatccgatatcaactagatcttgaga

SEQ ID NO: 5694 - DNA, 170 bp, Artificial sequence
  Nf1.97_Ctcf.229
  crRNA array
cgatttcttggctttatatatcttgtggaaaggacgaaacaccgtaatttctactaagtgtagatagcccgctacatgctgatgctaatttctactaagtgtagatggctggtggctgatagtctgttttttaagcttggcgtggatccgatatcaactagatcttgaga

SEQ ID NO: 5695 - DNA, 170 bp, Artificial sequence
  Nf1.97_Ctcf.809
  crRNA array
cgatttcttggctttatatatcttgtggaaaggacgaaacaccgtaatttctactaagtgtagatagcccgctacatgctgatgctaatttctactaagtgtagataagcgctatcatgatcccaattttttaagcttggcgtggatccgatatcaactagatcttgaga

SEQ ID NO: 5696 - DNA, 170 bp, Artificial sequence
  Nf1.97_Elf3.826
  crRNA array
cgatttcttggctttatatatcttgtggaaaggacgaaacaccgtaatttctactaagtgtagatagcccgctacatgctgatgctaatttctactaagtgtagattccgagacatcctaatccacttttttaagcttggcgtggatccgatatcaactagatcttgaga

SEQ ID NO: 5697 - DNA, 170 bp, Artificial sequence
  Nf1.97_Elf3.983
  crRNA array
cgatttcttggctttatatatcttgtggaaaggacgaaacaccgtaatttctactaagtgtagatagcccgctacatgctgatgctaatttctactaagtgtagattaggccccctaactggaccattttttaagcttggcgtggatccgatatcaactagatcttgaga

SEQ ID NO: 5698 - DNA, 170 bp, Artificial sequence
  Nf1.97_Ep300.310
  crRNA array
cgatttcttggctttatatatcttgtggaaaggacgaaacaccgtaatttctactaagtgtagatagcccgctacatgctgatgctaatttctactaagtgtagatatggtacgacagtgaggaagttttttaagcttggcgtggatccgatatcaactagatcttgaga

SEQ ID NO: 5699 - DNA, 170 bp, Artificial sequence
  Nf1.97_Ep300.587
  crRNA array
cgatttcttggctttatatatcttgtggaaaggacgaaacaccgtaatttctactaagtgtagatagcccgctacatgctgatgctaatttctactaagtgtagatcgccccggggcccccaaccattttttaagcttggcgtggatccgatatcaactagatcttgaga

SEQ ID NO: 5700 - DNA, 170 bp, Artificial sequence
  Nf1.97_Epha2.126
  crRNA array
cgatttcttggctttatatatcttgtggaaaggacgaaacaccgtaatttctactaagtgtagatagcccgctacatgctgatgctaatttctactaagtgtagatcctgtgccgccgcggccgccttttttaagcttggcgtggatccgatatcaactagatcttgaga

SEQ ID NO: 5701 - DNA, 170 bp, Artificial sequence
  Nf1.97_Epha2.5
  crRNA array
cgatttcttggctttatatatcttgtggaaaggacgaaacaccgtaatttctactaagtgtagatagcccgctacatgctgatgctaatttctactaagtgtagatcatgagctggcgccacccggttttttaagcttggcgtggatccgatatcaactagatcttgaga

SEQ ID NO: 5702 - DNA, 170 bp, Artificial sequence
  Nf1.97_Fat1.105
  crRNA array
cgatttcttggctttatatatcttgtggaaaggacgaaacaccgtaatttctactaagtgtagatagcccgctacatgctgatgctaatttctactaagtgtagataactcgaggtgacaacaagtttttttaagcttggcgtggatccgatatcaactagatcttgaga

SEQ ID NO: 5703 - DNA, 170 bp, Artificial sequence
  Nf1.97_Fat1.122
  crRNA array
cgatttcttggctttatatatcttgtggaaaggacgaaacaccgtaatttctactaagtgtagatagcccgctacatgctgatgctaatttctactaagtgtagatccatcgacatggaaacgggattttttaagcttggcgtggatccgatatcaactagatcttgaga

SEQ ID NO: 5704 - DNA, 170 bp, Artificial sequence
  Nf1.97_Fbxw7.21
  crRNA array
cgatttcttggctttatatatcttgtggaaaggacgaaacaccgtaatttctactaagtgtagatagcccgctacatgctgatgctaatttctactaagtgtagattaatgtgccgtagaaacccattttttaagcttggcgtggatccgatatcaactagatcttgaga

SEQ ID NO: 5705 - DNA, 170 bp, Artificial sequence
  Nf1.97_Fbxw7.23
  crRNA array
cgatttcttggctttatatatcttgtggaaaggacgaaacaccgtaatttctactaagtgtagatagcccgctacatgctgatgctaatttctactaagtgtagatatgtgccgtagaaacccatattttttaagcttggcgtggatccgatatcaactagatcttgaga

SEQ ID NO: 5706 - DNA, 170 bp, Artificial sequence
  Nf1.97_Gata3.34
  crRNA array
cgatttcttggctttatatatcttgtggaaaggacgaaacaccgtaatttctactaagtgtagatagcccgctacatgctgatgctaatttctactaagtgtagatctaaactatcccgcaaagatttttttaagcttggcgtggatccgatatcaactagatcttgaga

SEQ ID NO: 5707 - DNA, 170 bp, Artificial sequence
  Nf1.97_Gata3.47
  crRNA array
cgatttcttggctttatatatcttgtggaaaggacgaaacaccgtaatttctactaagtgtagatagcccgctacatgctgatgctaatttctactaagtgtagatcgtagtaggacgggacgtggttttttaagcttggcgtggatccgatatcaactagatcttgaga

SEQ ID NO: 5708 - DNA, 170 bp, Artificial sequence
  Nf1.97_H2-Q2.1
  crRNA array
cgatttcttggctttatatatcttgtggaaaggacgaaacaccgtaatttctactaagtgtagatagcccgctacatgctgatgctaatttctactaagtgtagatagggcggccaccaacagcagttttttaagcttggcgtggatccgatatcaactagatcttgaga

SEQ ID NO: 5709 - DNA, 170 bp, Artificial sequence
  Nf1.97_H2-Q2.2
  crRNA array
cgatttcttggctttatatatcttgtggaaaggacgaaacaccgtaatttctactaagtgtagatagcccgctacatgctgatgctaatttctactaagtgtagattaacctgcgcccgctgctgattttttaagcttggcgtggatccgatatcaactagatcttgaga

SEQ ID NO: 5710 - DNA, 170 bp, Artificial sequence
  Nf1.97_Kdm5c.1878
  crRNA array
cgatttcttggctttatatatcttgtggaaaggacgaaacaccgtaatttctactaagtgtagatagcccgctacatgctgatgctaatttctactaagtgtagatagagcacggcacccgcccccttttttaagcttggcgtggatccgatatcaactagatcttgaga

SEQ ID NO: 5711 - DNA, 170 bp, Artificial sequence
  Nf1.97_Kdm5c.1879
  crRNA array
cgatttcttggctttatatatcttgtggaaaggacgaaacaccgtaatttctactaagtgtagatagcccgctacatgctgatgctaatttctactaagtgtagatgagcacggcacccgccccccttttttaagcttggcgtggatccgatatcaactagatcttgaga

SEQ ID NO: 5712 - DNA, 170 bp, Artificial sequence
  Nf1.97_Kdm6a.56
  crRNA array
cgatttcttggctttatatatcttgtggaaaggacgaaacaccgtaatttctactaagtgtagatagcccgctacatgctgatgctaatttctactaagtgtagattcgctgccgcctctcgcggcttttttaagcttggcgtggatccgatatcaactagatcttgaga

SEQ ID NO: 5713 - DNA, 170 bp, Artificial sequence
  Nf1.97_Kdm6a.57
  crRNA array
cgatttcttggctttatatatcttgtggaaaggacgaaacaccgtaatttctactaagtgtagatagcccgctacatgctgatgctaatttctactaagtgtagatcgctgccgcctctcgcggcattttttaagcttggcgtggatccgatatcaactagatcttgaga

SEQ ID NO: 5714 - DNA, 170 bp, Artificial sequence
  Nf1.97_Kmt2b.265
  crRNA array
cgatttcttggctttatatatcttgtggaaaggacgaaacaccgtaatttctactaagtgtagatagcccgctacatgctgatgctaatttctactaagtgtagatccccaagtgaagcccacctgttttttaagcttggcgtggatccgatatcaactagatcttgaga

SEQ ID NO: 5715 - DNA, 170 bp, Artificial sequence
  Nf1.97_Kmt2b.298
  crRNA array
cgatttcttggctttatatatcttgtggaaaggacgaaacaccgtaatttctactaagtgtagatagcccgctacatgctgatgctaatttctactaagtgtagattccggcagggaccggctggcttttttaagcttggcgtggatccgatatcaactagatcttgaga

SEQ ID NO: 5716 - DNA, 170 bp, Artificial sequence
  Nf1.97_Kmt2c.1962
  crRNA array
cgatttcttggctttatatatcttgtggaaaggacgaaacaccgtaatttctactaagtgtagatagcccgctacatgctgatgctaatttctactaagtgtagatgtgacgatctgtgccacaagttttttaagcttggcgtggatccgatatcaactagatcttgaga

SEQ ID NO: 5717 - DNA, 170 bp, Artificial sequence
  Nf1.97_Kmt2c.2236
  crRNA array
cgatttcttggctttatatatcttgtggaaaggacgaaacaccgtaatttctactaagtgtagatagcccgctacatgctgatgctaatttctactaagtgtagatactcgacctccacctccctattttttaagcttggcgtggatccgatatcaactagatcttgaga

SEQ ID NO: 5718 - DNA, 170 bp, Artificial sequence
  Nf1.97_Kmt2d.316
  crRNA array
cgatttcttggctttatatatcttgtggaaaggacgaaacaccgtaatttctactaagtgtagatagcccgctacatgctgatgctaatttctactaagtgtagatactccaggccacccaggtggttttttaagcttggcgtggatccgatatcaactagatcttgaga

SEQ ID NO: 5719 - DNA, 170 bp, Artificial sequence
  Nf1.97_Kmt2d.416
  crRNA array
cgatttcttggctttatatatcttgtggaaaggacgaaacaccgtaatttctactaagtgtagatagcccgctacatgctgatgctaatttctactaagtgtagattaaacccccgggggaagggtttttttaagcttggcgtggatccgatatcaactagatcttgaga

SEQ ID NO: 5720 - DNA, 170 bp, Artificial sequence
  Nf1.97_Map2k4.119
  crRNA array
cgatttcttggctttatatatcttgtggaaaggacgaaacaccgtaatttctactaagtgtagatagcccgctacatgctgatgctaatttctactaagtgtagattgctgtgtgggcggccacatttttttaagcttggcgtggatccgatatcaactagatcttgaga

SEQ ID NO: 5721 - DNA, 170 bp, Artificial sequence
  Nf1.97_Map2k4.1261
  crRNA array
cgatttcttggctttatatatcttgtggaaaggacgaaacaccgtaatttctactaagtgtagatagcccgctacatgctgatgctaatttctactaagtgtagatgatgtagtaatgcggagtagttttttaagcttggcgtggatccgatatcaactagatcttgaga

SEQ ID NO: 5722 - DNA, 170 bp, Artificial sequence
  Nf1.97_Map3k1.235
  crRNA array
cgatttcttggctttatatatcttgtggaaaggacgaaacaccgtaatttctactaagtgtagatagcccgctacatgctgatgctaatttctactaagtgtagataaaacgctactgatcgatcgttttttaagcttggcgtggatccgatatcaactagatcttgaga

SEQ ID NO: 5723 - DNA, 170 bp, Artificial sequence
  Nf1.97_Map3k1.3838
  crRNA array
cgatttcttggctttatatatcttgtggaaaggacgaaacaccgtaatttctactaagtgtagatagcccgctacatgctgatgctaatttctactaagtgtagatccaacaacagggccccactattttttaagcttggcgtggatccgatatcaactagatcttgaga

SEQ ID NO: 5724 - DNA, 170 bp, Artificial sequence
  Nf1.97_Mga.1655
  crRNA array
cgatttcttggctttatatatcttgtggaaaggacgaaacaccgtaatttctactaagtgtagatagcccgctacatgctgatgctaatttctactaagtgtagatcgagaagtggagagcatattttttttaagcttggcgtggatccgatatcaactagatcttgaga

SEQ ID NO: 5725 - DNA, 170 bp, Artificial sequence
  Nf1.97_Mga.93
  crRNA array
cgatttcttggctttatatatcttgtggaaaggacgaaacaccgtaatttctactaagtgtagatagcccgctacatgctgatgctaatttctactaagtgtagatgagaaggctccccataatgtttttttaagcttggcgtggatccgatatcaactagatcttgaga

SEQ ID NO: 5726 - DNA, 170 bp, Artificial sequence
  Nf1.97_Nf2.356
  crRNA array
cgatttcttggctttatatatcttgtggaaaggacgaaacaccgtaatttctactaagtgtagatagcccgctacatgctgatgctaatttctactaagtgtagatcggagtcatctgatagagatttttttaagcttggcgtggatccgatatcaactagatcttgaga

SEQ ID NO: 5727 - DNA, 170 bp, Artificial sequence
  Nf1.97_Nf2.768
  crRNA array
cgatttcttggctttatatatcttgtggaaaggacgaaacaccgtaatttctactaagtgtagatagcccgctacatgctgatgctaatttctactaagtgtagatccgaagccccagtgtccggcttttttaagcttggcgtggatccgatatcaactagatcttgaga

SEQ ID NO: 5728 - DNA, 170 bp, Artificial sequence
  Nf1.97_Notch1.1849
  crRNA array
cgatttcttggctttatatatcttgtggaaaggacgaaacaccgtaatttctactaagtgtagatagcccgctacatgctgatgctaatttctactaagtgtagatctggcgggtgggcggcgctgttttttaagcttggcgtggatccgatatcaactagatcttgaga

SEQ ID NO: 5729 - DNA, 170 bp, Artificial sequence
  Nf1.97_Notch1.649
  crRNA array
cgatttcttggctttatatatcttgtggaaaggacgaaacaccgtaatttctactaagtgtagatagcccgctacatgctgatgctaatttctactaagtgtagattgggccaacgatgccaggacttttttaagcttggcgtggatccgatatcaactagatcttgaga

SEQ ID NO: 5730 - DNA, 170 bp, Artificial sequence
  Nf1.97_Nsd1.70
  crRNA array
cgatttcttggctttatatatcttgtggaaaggacgaaacaccgtaatttctactaagtgtagatagcccgctacatgctgatgctaatttctactaagtgtagatactggtgtggacgatgcagattttttaagcttggcgtggatccgatatcaactagatcttgaga

SEQ ID NO: 5731 - DNA, 170 bp, Artificial sequence
  Nf1.97_Nsd1.90
  crRNA array
cgatttcttggctttatatatcttgtggaaaggacgaaacaccgtaatttctactaagtgtagatagcccgctacatgctgatgctaatttctactaagtgtagataggagctaacggcaagaatgttttttaagcttggcgtggatccgatatcaactagatcttgaga

SEQ ID NO: 5732 - DNA, 170 bp, Artificial sequence
  Nf1.97_Pbrm1.1236
  crRNA array
cgatttcttggctttatatatcttgtggaaaggacgaaacaccgtaatttctactaagtgtagatagcccgctacatgctgatgctaatttctactaagtgtagatgccgataaaaccaacagccgttttttaagcttggcgtggatccgatatcaactagatcttgaga

SEQ ID NO: 5733 - DNA, 170 bp, Artificial sequence
  Nf1.97_Pbrm1.969
  crRNA array
cgatttcttggctttatatatcttgtggaaaggacgaaacaccgtaatttctactaagtgtagatagcccgctacatgctgatgctaatttctactaagtgtagatgagccctaatgaacagctcattttttaagcttggcgtggatccgatatcaactagatcttgaga

SEQ ID NO: 5734 - DNA, 170 bp, Artificial sequence
  Nf1.97_Pik3r1.76
  crRNA array
cgatttcttggctttatatatcttgtggaaaggacgaaacaccgtaatttctactaagtgtagatagcccgctacatgctgatgctaatttctactaagtgtagataaaacctatacggcccgcacttttttaagcttggcgtggatccgatatcaactagatcttgaga

SEQ ID NO: 5735 - DNA, 170 bp, Artificial sequence
  Nf1.97_Pik3r1.77
  crRNA array
cgatttcttggctttatatatcttgtggaaaggacgaaacaccgtaatttctactaagtgtagatagcccgctacatgctgatgctaatttctactaagtgtagataaacctatacggcccgcactttttttaagcttggcgtggatccgatatcaactagatcttgaga

SEQ ID NO: 5736 - DNA, 170 bp, Artificial sequence
  Nf1.97_Pten.240
  crRNA array
cgatttcttggctttatatatcttgtggaaaggacgaaacaccgtaatttctactaagtgtagatagcccgctacatgctgatgctaatttctactaagtgtagattgcatacgctatagctgcttttttttaagcttggcgtggatccgatatcaactagatcttgaga

SEQ ID NO: 5737 - DNA, 170 bp, Artificial sequence
  Nf1.97_Pten.265
  crRNA array
cgatttcttggctttatatatcttgtggaaaggacgaaacaccgtaatttctactaagtgtagatagcccgctacatgctgatgctaatttctactaagtgtagataagcgtggtgcgtgacgcacttttttaagcttggcgtggatccgatatcaactagatcttgaga

SEQ ID NO: 5738 - DNA, 170 bp, Artificial sequence
  Nf1.97_Rasa1.1478
  crRNA array
cgatttcttggctttatatatcttgtggaaaggacgaaacaccgtaatttctactaagtgtagatagcccgctacatgctgatgctaatttctactaagtgtagatcgataatggtctatgatgtcttttttaagcttggcgtggatccgatatcaactagatcttgaga

SEQ ID NO: 5739 - DNA, 170 bp, Artificial sequence
  Nf1.97_Rasa1.223
  crRNA array
cgatttcttggctttatatatcttgtggaaaggacgaaacaccgtaatttctactaagtgtagatagcccgctacatgctgatgctaatttctactaagtgtagattccatggagtatcgtgctcgttttttaagcttggcgtggatccgatatcaactagatcttgaga

SEQ ID NO: 5740 - DNA, 170 bp, Artificial sequence
  Nf1.97_Rb1.211
  crRNA array
cgatttcttggctttatatatcttgtggaaaggacgaaacaccgtaatttctactaagtgtagatagcccgctacatgctgatgctaatttctactaagtgtagattctgacatgatcgggtacctttttttaagcttggcgtggatccgatatcaactagatcttgaga

SEQ ID NO: 5741 - DNA, 170 bp, Artificial sequence
  Nf1.97_Rb1.394
  crRNA array
cgatttcttggctttatatatcttgtggaaaggacgaaacaccgtaatttctactaagtgtagatagcccgctacatgctgatgctaatttctactaagtgtagatagaaatctcgaagcaggatcttttttaagcttggcgtggatccgatatcaactagatcttgaga

SEQ ID NO: 5742 - DNA, 170 bp, Artificial sequence
  Nf1.97_Rbm10.5
  crRNA array
cgatttcttggctttatatatcttgtggaaaggacgaaacaccgtaatttctactaagtgtagatagcccgctacatgctgatgctaatttctactaagtgtagatacgaaacctgaacccacacattttttaagcttggcgtggatccgatatcaactagatcttgaga

SEQ ID NO: 5743 - DNA, 170 bp, Artificial sequence
  Nf1.97_Rbm10.6
  crRNA array
cgatttcttggctttatatatcttgtggaaaggacgaaacaccgtaatttctactaagtgtagatagcccgctacatgctgatgctaatttctactaagtgtagatcgaaacctgaacccacacagttttttaagcttggcgtggatccgatatcaactagatcttgaga

SEQ ID NO: 5744 - DNA, 170 bp, Artificial sequence
  Nf1.97_Rnf43.1920
  crRNA array
cgatttcttggctttatatatcttgtggaaaggacgaaacaccgtaatttctactaagtgtagatagcccgctacatgctgatgctaatttctactaagtgtagatatccccgtgccgtggactccttttttaagcttggcgtggatccgatatcaactagatcttgaga

SEQ ID NO: 5745 - DNA, 170 bp, Artificial sequence
  Nf1.97_Rnf43.39
  crRNA array
cgatttcttggctttatatatcttgtggaaaggacgaaacaccgtaatttctactaagtgtagatagcccgctacatgctgatgctaatttctactaagtgtagatcaaggggatcactctgataattttttaagcttggcgtggatccgatatcaactagatcttgaga

SEQ ID NO: 5746 - DNA, 170 bp, Artificial sequence
  Nf1.97_Runx1.204
  crRNA array
cgatttcttggctttatatatcttgtggaaaggacgaaacaccgtaatttctactaagtgtagatagcccgctacatgctgatgctaatttctactaagtgtagattaaataagtccagccgttttttttttaagcttggcgtggatccgatatcaactagatcttgaga

SEQ ID NO: 5747 - DNA, 170 bp, Artificial sequence
  Nf1.97_Runx1.81
  crRNA array
cgatttcttggctttatatatcttgtggaaaggacgaaacaccgtaatttctactaagtgtagatagcccgctacatgctgatgctaatttctactaagtgtagataggacgcgtatgggaattttttttttaagcttggcgtggatccgatatcaactagatcttgaga

SEQ ID NO: 5748 - DNA, 170 bp, Artificial sequence
  Nf1.97_Setd2.143
  crRNA array
cgatttcttggctttatatatcttgtggaaaggacgaaacaccgtaatttctactaagtgtagatagcccgctacatgctgatgctaatttctactaagtgtagatgcacaaccacaacagactggttttttaagcttggcgtggatccgatatcaactagatcttgaga

SEQ ID NO: 5749 - DNA, 170 bp, Artificial sequence
  Nf1.97_Setd2.508
  crRNA array
cgatttcttggctttatatatcttgtggaaaggacgaaacaccgtaatttctactaagtgtagatagcccgctacatgctgatgctaatttctactaagtgtagattacgatcccgagcacccgacttttttaagcttggcgtggatccgatatcaactagatcttgaga

SEQ ID NO: 5750 - DNA, 170 bp, Artificial sequence
  Nf1.97_Smad4.3038
  crRNA array
cgatttcttggctttatatatcttgtggaaaggacgaaacaccgtaatttctactaagtgtagatagcccgctacatgctgatgctaatttctactaagtgtagatatctgcggcagtgtcaccggttttttaagcttggcgtggatccgatatcaactagatcttgaga

SEQ ID NO: 5751 - DNA, 170 bp, Artificial sequence
  Nf1.97_Smad4.39
  crRNA array
cgatttcttggctttatatatcttgtggaaaggacgaaacaccgtaatttctactaagtgtagatagcccgctacatgctgatgctaatttctactaagtgtagatagtcaaacgcatactgacaattttttaagcttggcgtggatccgatatcaactagatcttgaga

SEQ ID NO: 5752 - DNA, 170 bp, Artificial sequence
  Nf1.97_Stag2.1409
  crRNA array
cgatttcttggctttatatatcttgtggaaaggacgaaacaccgtaatttctactaagtgtagatagcccgctacatgctgatgctaatttctactaagtgtagatgctaataactgcggaagggcttttttaagcttggcgtggatccgatatcaactagatcttgaga

SEQ ID NO: 5753 - DNA, 170 bp, Artificial sequence
  Nf1.97_Stag2.4401
  crRNA array
cgatttcttggctttatatatcttgtggaaaggacgaaacaccgtaatttctactaagtgtagatagcccgctacatgctgatgctaatttctactaagtgtagattaatcgtccagtggtgtatattttttaagcttggcgtggatccgatatcaactagatcttgaga

SEQ ID NO: 5754 - DNA, 170 bp, Artificial sequence
  Nf1.97_Tbl1xr1.1
  crRNA array
cgatttcttggctttatatatcttgtggaaaggacgaaacaccgtaatttctactaagtgtagatagcccgctacatgctgatgctaatttctactaagtgtagatggatgcgcatactggtgaagttttttaagcttggcgtggatccgatatcaactagatcttgaga

SEQ ID NO: 5755 - DNA, 170 bp, Artificial sequence
  Nf1.97_Tbl1xr1.83
  crRNA array
cgatttcttggctttatatatcttgtggaaaggacgaaacaccgtaatttctactaagtgtagatagcccgctacatgctgatgctaatttctactaagtgtagatatggtcgacccatcgagtctttttttaagcttggcgtggatccgatatcaactagatcttgaga

SEQ ID NO: 5756 - DNA, 170 bp, Artificial sequence
  Nf1.97_Tgfbr2.290
  crRNA array
cgatttcttggctttatatatcttgtggaaaggacgaaacaccgtaatttctactaagtgtagatagcccgctacatgctgatgctaatttctactaagtgtagatcctctcggcgcccgggtaaattttttaagcttggcgtggatccgatatcaactagatcttgaga

SEQ ID NO: 5757 - DNA, 170 bp, Artificial sequence
  Nf1.97_Tgfbr2.292
  crRNA array
cgatttcttggctttatatatcttgtggaaaggacgaaacaccgtaatttctactaagtgtagatagcccgctacatgctgatgctaatttctactaagtgtagatcccgggcgccgagagggaaattttttaagcttggcgtggatccgatatcaactagatcttgaga

SEQ ID NO: 5758 - DNA, 170 bp, Artificial sequence
  Nf1.97_Trp53.4
  crRNA array
cgatttcttggctttatatatcttgtggaaaggacgaaacaccgtaatttctactaagtgtagatagcccgctacatgctgatgctaatttctactaagtgtagatccctgaactgcccccagggattttttaagcttggcgtggatccgatatcaactagatcttgaga

SEQ ID NO: 5759 - DNA, 170 bp, Artificial sequence
  Nf1.97_Trp53.528
  crRNA array
cgatttcttggctttatatatcttgtggaaaggacgaaacaccgtaatttctactaagtgtagatagcccgctacatgctgatgctaatttctactaagtgtagatgctgggccagcagagacctgttttttaagcttggcgtggatccgatatcaactagatcttgaga

SEQ ID NO: 5760 - DNA, 170 bp, Artificial sequence
  Nf1.97_Vhl.1
  crRNA array
cgatttcttggctttatatatcttgtggaaaggacgaaacaccgtaatttctactaagtgtagatagcccgctacatgctgatgctaatttctactaagtgtagatagggctcccggcggccatttttttttaagcttggcgtggatccgatatcaactagatcttgaga

SEQ ID NO: 5761 - DNA, 170 bp, Artificial sequence
  Nf1.97_Vhl.151
  crRNA array
cgatttcttggctttatatatcttgtggaaaggacgaaacaccgtaatttctactaagtgtagatagcccgctacatgctgatgctaatttctactaagtgtagattagagcactcacccgagggattttttaagcttggcgtggatccgatatcaactagatcttgaga

SEQ ID NO: 5762 - DNA, 170 bp, Artificial sequence
  Nf1.97_Zc3h13.1387
  crRNA array
cgatttcttggctttatatatcttgtggaaaggacgaaacaccgtaatttctactaagtgtagatagcccgctacatgctgatgctaatttctactaagtgtagatgtgacgccggtcatgtgactttttttaagcttggcgtggatccgatatcaactagatcttgaga

SEQ ID NO: 5763 - DNA, 170 bp, Artificial sequence
  Nf1.97_Zc3h13.1777
  crRNA array
cgatttcttggctttatatatcttgtggaaaggacgaaacaccgtaatttctactaagtgtagatagcccgctacatgctgatgctaatttctactaagtgtagatgatgctgccagtgtagcggcttttttaagcttggcgtggatccgatatcaactagatcttgaga

SEQ ID NO: 5764 - DNA, 170 bp, Artificial sequence
  Nf2.356_Acvr2a.155
  crRNA array
cgatttcttggctttatatatcttgtggaaaggacgaaacaccgtaatttctactaagtgtagatcggagtcatctgatagagattaatttctactaagtgtagatggacctggctaatcaagtatttttttaagcttggcgtggatccgatatcaactagatcttgaga

SEQ ID NO: 5765 - DNA, 170 bp, Artificial sequence
  Nf2.356_Acvr2a.70
  crRNA array
cgatttcttggctttatatatcttgtggaaaggacgaaacaccgtaatttctactaagtgtagatcggagtcatctgatagagattaatttctactaagtgtagatcccgaggcgccggagaagccttttttaagcttggcgtggatccgatatcaactagatcttgaga

SEQ ID NO: 5766 - DNA, 170 bp, Artificial sequence
  Nf2.356_Apc.21
  crRNA array
cgatttcttggctttatatatcttgtggaaaggacgaaacaccgtaatttctactaagtgtagatcggagtcatctgatagagattaatttctactaagtgtagatgtgatccacacgtgtagctgttttttaagcttggcgtggatccgatatcaactagatcttgaga

SEQ ID NO: 5767 - DNA, 170 bp, Artificial sequence
  Nf2.356_Apc.867
  crRNA array
cgatttcttggctttatatatcttgtggaaaggacgaaacaccgtaatttctactaagtgtagatcggagtcatctgatagagattaatttctactaagtgtagatcagtcccaggcggcggaagcttttttaagcttggcgtggatccgatatcaactagatcttgaga

SEQ ID NO: 5768 - DNA, 170 bp, Artificial sequence
  Nf2.356_Arid1a.2
  crRNA array
cgatttcttggctttatatatcttgtggaaaggacgaaacaccgtaatttctactaagtgtagatcggagtcatctgatagagattaatttctactaagtgtagatcccgcgcccccgtcctggggttttttaagcttggcgtggatccgatatcaactagatcttgaga

SEQ ID NO: 5769 - DNA, 170 bp, Artificial sequence
  Nf2.356_Arid1a.5
  crRNA array
cgatttcttggctttatatatcttgtggaaaggacgaaacaccgtaatttctactaagtgtagatcggagtcatctgatagagattaatttctactaagtgtagatcccgcgctcggccgctgccgttttttaagcttggcgtggatccgatatcaactagatcttgaga

SEQ ID NO: 5770 - DNA, 170 bp, Artificial sequence
  Nf2.356_Arid2.166
  crRNA array
cgatttcttggctttatatatcttgtggaaaggacgaaacaccgtaatttctactaagtgtagatcggagtcatctgatagagattaatttctactaagtgtagataaccgcgatctgggttttttttttttaagcttggcgtggatccgatatcaactagatcttgaga

SEQ ID NO: 5771 - DNA, 170 bp, Artificial sequence
  Nf2.356_Arid2.172
  crRNA array
cgatttcttggctttatatatcttgtggaaaggacgaaacaccgtaatttctactaagtgtagatcggagtcatctgatagagattaatttctactaagtgtagatctggacgagctgcggcagttttttttaagcttggcgtggatccgatatcaactagatcttgaga

SEQ ID NO: 5772 - DNA, 170 bp, Artificial sequence
  Nf2.356_Atm.120
  crRNA array
cgatttcttggctttatatatcttgtggaaaggacgaaacaccgtaatttctactaagtgtagatcggagtcatctgatagagattaatttctactaagtgtagatgacaggtagtcggcagctaattttttaagcttggcgtggatccgatatcaactagatcttgaga

SEQ ID NO: 5773 - DNA, 170 bp, Artificial sequence
  Nf2.356_Atm.997
  crRNA array
cgatttcttggctttatatatcttgtggaaaggacgaaacaccgtaatttctactaagtgtagatcggagtcatctgatagagattaatttctactaagtgtagatgagaaagtctccgaatcgttttttttaagcttggcgtggatccgatatcaactagatcttgaga

SEQ ID NO: 5774 - DNA, 170 bp, Artificial sequence
  Nf2.356_Atrx.249
  crRNA array
cgatttcttggctttatatatcttgtggaaaggacgaaacaccgtaatttctactaagtgtagatcggagtcatctgatagagattaatttctactaagtgtagattagccagtcgctcatatctcttttttaagcttggcgtggatccgatatcaactagatcttgaga

SEQ ID NO: 5775 - DNA, 170 bp, Artificial sequence
  Nf2.356_Atrx.251
  crRNA array
cgatttcttggctttatatatcttgtggaaaggacgaaacaccgtaatttctactaagtgtagatcggagtcatctgatagagattaatttctactaagtgtagatgccagtcgctcatatctctgttttttaagcttggcgtggatccgatatcaactagatcttgaga

SEQ ID NO: 5776 - DNA, 170 bp, Artificial sequence
  Nf2.356_Bcor.203
  crRNA array
cgatttcttggctttatatatcttgtggaaaggacgaaacaccgtaatttctactaagtgtagatcggagtcatctgatagagattaatttctactaagtgtagatccccggagcggagtccaggcttttttaagcttggcgtggatccgatatcaactagatcttgaga

SEQ ID NO: 5777 - DNA, 170 bp, Artificial sequence
  Nf2.356_Bcor.475
  crRNA array
cgatttcttggctttatatatcttgtggaaaggacgaaacaccgtaatttctactaagtgtagatcggagtcatctgatagagattaatttctactaagtgtagattgcaacccctctgtatgggattttttaagcttggcgtggatccgatatcaactagatcttgaga

SEQ ID NO: 5778 - DNA, 170 bp, Artificial sequence
  Nf2.356_Brca1.112
  crRNA array
cgatttcttggctttatatatcttgtggaaaggacgaaacaccgtaatttctactaagtgtagatcggagtcatctgatagagattaatttctactaagtgtagatctagacgctctgtggagactttttttaagcttggcgtggatccgatatcaactagatcttgaga

SEQ ID NO: 5779 - DNA, 170 bp, Artificial sequence
  Nf2.356_Brca1.53
  crRNA array
cgatttcttggctttatatatcttgtggaaaggacgaaacaccgtaatttctactaagtgtagatcggagtcatctgatagagattaatttctactaagtgtagataatgaggaggcgtcgatcatttttttaagcttggcgtggatccgatatcaactagatcttgaga

SEQ ID NO: 5780 - DNA, 170 bp, Artificial sequence
  Nf2.356_Casp8.45
  crRNA array
cgatttcttggctttatatatcttgtggaaaggacgaaacaccgtaatttctactaagtgtagatcggagtcatctgatagagattaatttctactaagtgtagatctaccgagatcctgtgaatgttttttaagcttggcgtggatccgatatcaactagatcttgaga

SEQ ID NO: 5781 - DNA, 170 bp, Artificial sequence
  Nf2.356_Casp8.54
  crRNA array
cgatttcttggctttatatatcttgtggaaaggacgaaacaccgtaatttctactaagtgtagatcggagtcatctgatagagattaatttctactaagtgtagatcagtgcagtcgtcgtaagatttttttaagcttggcgtggatccgatatcaactagatcttgaga

SEQ ID NO: 5782 - DNA, 170 bp, Artificial sequence
  Nf2.356_Cbwd1.84
  crRNA array
cgatttcttggctttatatatcttgtggaaaggacgaaacaccgtaatttctactaagtgtagatcggagtcatctgatagagattaatttctactaagtgtagatcacagcaggtaacatgccgcttttttaagcttggcgtggatccgatatcaactagatcttgaga

SEQ ID NO: 5783 - DNA, 170 bp, Artificial sequence
  Nf2.356_Cbwd1.85
  crRNA array
cgatttcttggctttatatatcttgtggaaaggacgaaacaccgtaatttctactaagtgtagatcggagtcatctgatagagattaatttctactaagtgtagatacagcaggtaacatgccgccttttttaagcttggcgtggatccgatatcaactagatcttgaga

SEQ ID NO: 5784 - DNA, 170 bp, Artificial sequence
  Nf2.356_Cdh1.387
  crRNA array
cgatttcttggctttatatatcttgtggaaaggacgaaacaccgtaatttctactaagtgtagatcggagtcatctgatagagattaatttctactaagtgtagatctcggcgtctgccgggtccgttttttaagcttggcgtggatccgatatcaactagatcttgaga

SEQ ID NO: 5785 - DNA, 170 bp, Artificial sequence
  Nf2.356_Cdh1.58
  crRNA array
cgatttcttggctttatatatcttgtggaaaggacgaaacaccgtaatttctactaagtgtagatcggagtcatctgatagagattaatttctactaagtgtagatctcgtccgcgcccgggactcttttttaagcttggcgtggatccgatatcaactagatcttgaga

SEQ ID NO: 5786 - DNA, 170 bp, Artificial sequence
  Nf2.356_Cdkn2a.647
  crRNA array
cgatttcttggctttatatatcttgtggaaaggacgaaacaccgtaatttctactaagtgtagatcggagtcatctgatagagattaatttctactaagtgtagatgcaatcacgggagggagcagttttttaagcttggcgtggatccgatatcaactagatcttgaga

SEQ ID NO: 5787 - DNA, 170 bp, Artificial sequence
  Nf2.356_Cdkn2a.648
  crRNA array
cgatttcttggctttatatatcttgtggaaaggacgaaacaccgtaatttctactaagtgtagatcggagtcatctgatagagattaatttctactaagtgtagatcaatcacgggagggagcagattttttaagcttggcgtggatccgatatcaactagatcttgaga

SEQ ID NO: 5788 - DNA, 170 bp, Artificial sequence
  Nf2.356_Cic.162
  crRNA array
cgatttcttggctttatatatcttgtggaaaggacgaaacaccgtaatttctactaagtgtagatcggagtcatctgatagagattaatttctactaagtgtagatcgcaggcgcgcccggcggagttttttaagcttggcgtggatccgatatcaactagatcttgaga

SEQ ID NO: 5789 - DNA, 170 bp, Artificial sequence
  Nf2.356_Cic.164
  crRNA array
cgatttcttggctttatatatcttgtggaaaggacgaaacaccgtaatttctactaagtgtagatcggagtcatctgatagagattaatttctactaagtgtagatcgggccctgggccggcggctttttttaagcttggcgtggatccgatatcaactagatcttgaga

SEQ ID NO: 5790 - DNA, 170 bp, Artificial sequence
  Nf2.356_Ctcf.229
  crRNA array
cgatttcttggctttatatatcttgtggaaaggacgaaacaccgtaatttctactaagtgtagatcggagtcatctgatagagattaatttctactaagtgtagatggctggtggctgatagtctgttttttaagcttggcgtggatccgatatcaactagatcttgaga

SEQ ID NO: 5791 - DNA, 170 bp, Artificial sequence
  Nf2.356_Ctcf.809
  crRNA array
cgatttcttggctttatatatcttgtggaaaggacgaaacaccgtaatttctactaagtgtagatcggagtcatctgatagagattaatttctactaagtgtagataagcgctatcatgatcccaattttttaagcttggcgtggatccgatatcaactagatcttgaga

SEQ ID NO: 5792 - DNA, 170 bp, Artificial sequence
  Nf2.356_Elf3.826
  crRNA array
cgatttcttggctttatatatcttgtggaaaggacgaaacaccgtaatttctactaagtgtagatcggagtcatctgatagagattaatttctactaagtgtagattccgagacatcctaatccacttttttaagcttggcgtggatccgatatcaactagatcttgaga

SEQ ID NO: 5793 - DNA, 170 bp, Artificial sequence
  Nf2.356_Elf3.983
  crRNA array
cgatttcttggctttatatatcttgtggaaaggacgaaacaccgtaatttctactaagtgtagatcggagtcatctgatagagattaatttctactaagtgtagattaggccccctaactggaccattttttaagcttggcgtggatccgatatcaactagatcttgaga

SEQ ID NO: 5794 - DNA, 170 bp, Artificial sequence
  Nf2.356_Ep300.310
  crRNA array
cgatttcttggctttatatatcttgtggaaaggacgaaacaccgtaatttctactaagtgtagatcggagtcatctgatagagattaatttctactaagtgtagatatggtacgacagtgaggaagttttttaagcttggcgtggatccgatatcaactagatcttgaga

SEQ ID NO: 5795 - DNA, 170 bp, Artificial sequence
  Nf2.356_Ep300.587
  crRNA array
cgatttcttggctttatatatcttgtggaaaggacgaaacaccgtaatttctactaagtgtagatcggagtcatctgatagagattaatttctactaagtgtagatcgccccggggcccccaaccattttttaagcttggcgtggatccgatatcaactagatcttgaga

SEQ ID NO: 5796 - DNA, 170 bp, Artificial sequence
  Nf2.356_Epha2.126
  crRNA array
cgatttcttggctttatatatcttgtggaaaggacgaaacaccgtaatttctactaagtgtagatcggagtcatctgatagagattaatttctactaagtgtagatcctgtgccgccgcggccgccttttttaagcttggcgtggatccgatatcaactagatcttgaga

SEQ ID NO: 5797 - DNA, 170 bp, Artificial sequence
  Nf2.356_Epha2.5
  crRNA array
cgatttcttggctttatatatcttgtggaaaggacgaaacaccgtaatttctactaagtgtagatcggagtcatctgatagagattaatttctactaagtgtagatcatgagctggcgccacccggttttttaagcttggcgtggatccgatatcaactagatcttgaga

SEQ ID NO: 5798 - DNA, 170 bp, Artificial sequence
  Nf2.356_Fat1.105
  crRNA array
cgatttcttggctttatatatcttgtggaaaggacgaaacaccgtaatttctactaagtgtagatcggagtcatctgatagagattaatttctactaagtgtagataactcgaggtgacaacaagtttttttaagcttggcgtggatccgatatcaactagatcttgaga

SEQ ID NO: 5799 - DNA, 170 bp, Artificial sequence
  Nf2.356_Fat1.122
  crRNA array
cgatttcttggctttatatatcttgtggaaaggacgaaacaccgtaatttctactaagtgtagatcggagtcatctgatagagattaatttctactaagtgtagatccatcgacatggaaacgggattttttaagcttggcgtggatccgatatcaactagatcttgaga

SEQ ID NO: 5800 - DNA, 170 bp, Artificial sequence
  Nf2.356_Fbxw7.21
  crRNA array
cgatttcttggctttatatatcttgtggaaaggacgaaacaccgtaatttctactaagtgtagatcggagtcatctgatagagattaatttctactaagtgtagattaatgtgccgtagaaacccattttttaagcttggcgtggatccgatatcaactagatcttgaga

SEQ ID NO: 5801 - DNA, 170 bp, Artificial sequence
  Nf2.356_Fbxw7.23
  crRNA array
cgatttcttggctttatatatcttgtggaaaggacgaaacaccgtaatttctactaagtgtagatcggagtcatctgatagagattaatttctactaagtgtagatatgtgccgtagaaacccatattttttaagcttggcgtggatccgatatcaactagatcttgaga

SEQ ID NO: 5802 - DNA, 170 bp, Artificial sequence
  Nf2.356_Gata3.34
  crRNA array
cgatttcttggctttatatatcttgtggaaaggacgaaacaccgtaatttctactaagtgtagatcggagtcatctgatagagattaatttctactaagtgtagatctaaactatcccgcaaagatttttttaagcttggcgtggatccgatatcaactagatcttgaga

SEQ ID NO: 5803 - DNA, 170 bp, Artificial sequence
  Nf2.356_Gata3.47
  crRNA array
cgatttcttggctttatatatcttgtggaaaggacgaaacaccgtaatttctactaagtgtagatcggagtcatctgatagagattaatttctactaagtgtagatcgtagtaggacgggacgtggttttttaagcttggcgtggatccgatatcaactagatcttgaga

SEQ ID NO: 5804 - DNA, 170 bp, Artificial sequence
  Nf2.356_H2-Q2.1
  crRNA array
cgatttcttggctttatatatcttgtggaaaggacgaaacaccgtaatttctactaagtgtagatcggagtcatctgatagagattaatttctactaagtgtagatagggcggccaccaacagcagttttttaagcttggcgtggatccgatatcaactagatcttgaga

SEQ ID NO: 5805 - DNA, 170 bp, Artificial sequence
  Nf2.356_H2-Q2.2
  crRNA array
cgatttcttggctttatatatcttgtggaaaggacgaaacaccgtaatttctactaagtgtagatcggagtcatctgatagagattaatttctactaagtgtagattaacctgcgcccgctgctgattttttaagcttggcgtggatccgatatcaactagatcttgaga

SEQ ID NO: 5806 - DNA, 170 bp, Artificial sequence
  Nf2.356_Kdm5c.1878
  crRNA array
cgatttcttggctttatatatcttgtggaaaggacgaaacaccgtaatttctactaagtgtagatcggagtcatctgatagagattaatttctactaagtgtagatagagcacggcacccgcccccttttttaagcttggcgtggatccgatatcaactagatcttgaga

SEQ ID NO: 5807 - DNA, 170 bp, Artificial sequence
  Nf2.356_Kdm5c.1879
  crRNA array
cgatttcttggctttatatatcttgtggaaaggacgaaacaccgtaatttctactaagtgtagatcggagtcatctgatagagattaatttctactaagtgtagatgagcacggcacccgccccccttttttaagcttggcgtggatccgatatcaactagatcttgaga

SEQ ID NO: 5808 - DNA, 170 bp, Artificial sequence
  Nf2.356_Kdm6a.56
  crRNA array
cgatttcttggctttatatatcttgtggaaaggacgaaacaccgtaatttctactaagtgtagatcggagtcatctgatagagattaatttctactaagtgtagattcgctgccgcctctcgcggcttttttaagcttggcgtggatccgatatcaactagatcttgaga

SEQ ID NO: 5809 - DNA, 170 bp, Artificial sequence
  Nf2.356_Kdm6a.57
  crRNA array
cgatttcttggctttatatatcttgtggaaaggacgaaacaccgtaatttctactaagtgtagatcggagtcatctgatagagattaatttctactaagtgtagatcgctgccgcctctcgcggcattttttaagcttggcgtggatccgatatcaactagatcttgaga

SEQ ID NO: 5810 - DNA, 170 bp, Artificial sequence
  Nf2.356_Kmt2b.265
  crRNA array
cgatttcttggctttatatatcttgtggaaaggacgaaacaccgtaatttctactaagtgtagatcggagtcatctgatagagattaatttctactaagtgtagatccccaagtgaagcccacctgttttttaagcttggcgtggatccgatatcaactagatcttgaga

SEQ ID NO: 5811 - DNA, 170 bp, Artificial sequence
  Nf2.356_Kmt2b.298
  crRNA array
cgatttcttggctttatatatcttgtggaaaggacgaaacaccgtaatttctactaagtgtagatcggagtcatctgatagagattaatttctactaagtgtagattccggcagggaccggctggcttttttaagcttggcgtggatccgatatcaactagatcttgaga

SEQ ID NO: 5812 - DNA, 170 bp, Artificial sequence
  Nf2.356_Kmt2c.1962
  crRNA array
cgatttcttggctttatatatcttgtggaaaggacgaaacaccgtaatttctactaagtgtagatcggagtcatctgatagagattaatttctactaagtgtagatgtgacgatctgtgccacaagttttttaagcttggcgtggatccgatatcaactagatcttgaga

SEQ ID NO: 5813 - DNA, 170 bp, Artificial sequence
  Nf2.356_Kmt2c.2236
  crRNA array
cgatttcttggctttatatatcttgtggaaaggacgaaacaccgtaatttctactaagtgtagatcggagtcatctgatagagattaatttctactaagtgtagatactcgacctccacctccctattttttaagcttggcgtggatccgatatcaactagatcttgaga

SEQ ID NO: 5814 - DNA, 170 bp, Artificial sequence
  Nf2.356_Kmt2d.316
  crRNA array
cgatttcttggctttatatatcttgtggaaaggacgaaacaccgtaatttctactaagtgtagatcggagtcatctgatagagattaatttctactaagtgtagatactccaggccacccaggtggttttttaagcttggcgtggatccgatatcaactagatcttgaga

SEQ ID NO: 5815 - DNA, 170 bp, Artificial sequence
  Nf2.356_Kmt2d.416
  crRNA array
cgatttcttggctttatatatcttgtggaaaggacgaaacaccgtaatttctactaagtgtagatcggagtcatctgatagagattaatttctactaagtgtagattaaacccccgggggaagggtttttttaagcttggcgtggatccgatatcaactagatcttgaga

SEQ ID NO: 5816 - DNA, 170 bp, Artificial sequence
  Nf2.356_Map2k4.119
  crRNA array
cgatttcttggctttatatatcttgtggaaaggacgaaacaccgtaatttctactaagtgtagatcggagtcatctgatagagattaatttctactaagtgtagattgctgtgtgggcggccacatttttttaagcttggcgtggatccgatatcaactagatcttgaga

SEQ ID NO: 5817 - DNA, 170 bp, Artificial sequence
  Nf2.356_Map2k4.1261
  crRNA array
cgatttcttggctttatatatcttgtggaaaggacgaaacaccgtaatttctactaagtgtagatcggagtcatctgatagagattaatttctactaagtgtagatgatgtagtaatgcggagtagttttttaagcttggcgtggatccgatatcaactagatcttgaga

SEQ ID NO: 5818 - DNA, 170 bp, Artificial sequence
  Nf2.356_Map3k1.235
  crRNA array
cgatttcttggctttatatatcttgtggaaaggacgaaacaccgtaatttctactaagtgtagatcggagtcatctgatagagattaatttctactaagtgtagataaaacgctactgatcgatcgttttttaagcttggcgtggatccgatatcaactagatcttgaga

SEQ ID NO: 5819 - DNA, 170 bp, Artificial sequence
  Nf2.356_Map3k1.3838
  crRNA array
cgatttcttggctttatatatcttgtggaaaggacgaaacaccgtaatttctactaagtgtagatcggagtcatctgatagagattaatttctactaagtgtagatccaacaacagggccccactattttttaagcttggcgtggatccgatatcaactagatcttgaga

SEQ ID NO: 5820 - DNA, 170 bp, Artificial sequence
  Nf2.356_Mga.1655
  crRNA array
cgatttcttggctttatatatcttgtggaaaggacgaaacaccgtaatttctactaagtgtagatcggagtcatctgatagagattaatttctactaagtgtagatcgagaagtggagagcatattttttttaagcttggcgtggatccgatatcaactagatcttgaga

SEQ ID NO: 5821 - DNA, 170 bp, Artificial sequence
  Nf2.356_Mga.93
  crRNA array
cgatttcttggctttatatatcttgtggaaaggacgaaacaccgtaatttctactaagtgtagatcggagtcatctgatagagattaatttctactaagtgtagatgagaaggctccccataatgtttttttaagcttggcgtggatccgatatcaactagatcttgaga

SEQ ID NO: 5822 - DNA, 170 bp, Artificial sequence
  Nf2.356_Nf1.746
  crRNA array
cgatttcttggctttatatatcttgtggaaaggacgaaacaccgtaatttctactaagtgtagatcggagtcatctgatagagattaatttctactaagtgtagattaagcataatgatgatgccattttttaagcttggcgtggatccgatatcaactagatcttgaga

SEQ ID NO: 5823 - DNA, 170 bp, Artificial sequence
  Nf2.356_Nf1.97
  crRNA array
cgatttcttggctttatatatcttgtggaaaggacgaaacaccgtaatttctactaagtgtagatcggagtcatctgatagagattaatttctactaagtgtagatagcccgctacatgctgatgcttttttaagcttggcgtggatccgatatcaactagatcttgaga

SEQ ID NO: 5824 - DNA, 170 bp, Artificial sequence
  Nf2.356_Notch1.1849
  crRNA array
cgatttcttggctttatatatcttgtggaaaggacgaaacaccgtaatttctactaagtgtagatcggagtcatctgatagagattaatttctactaagtgtagatctggcgggtgggcggcgctgttttttaagcttggcgtggatccgatatcaactagatcttgaga

SEQ ID NO: 5825 - DNA, 170 bp, Artificial sequence
  Nf2.356_Notch1.649
  crRNA array
cgatttcttggctttatatatcttgtggaaaggacgaaacaccgtaatttctactaagtgtagatcggagtcatctgatagagattaatttctactaagtgtagattgggccaacgatgccaggacttttttaagcttggcgtggatccgatatcaactagatcttgaga

SEQ ID NO: 5826 - DNA, 170 bp, Artificial sequence
  Nf2.356_Nsd1.70
  crRNA array
cgatttcttggctttatatatcttgtggaaaggacgaaacaccgtaatttctactaagtgtagatcggagtcatctgatagagattaatttctactaagtgtagatactggtgtggacgatgcagattttttaagcttggcgtggatccgatatcaactagatcttgaga

SEQ ID NO: 5827 - DNA, 170 bp, Artificial sequence
  Nf2.356_Nsd1.90
  crRNA array
cgatttcttggctttatatatcttgtggaaaggacgaaacaccgtaatttctactaagtgtagatcggagtcatctgatagagattaatttctactaagtgtagataggagctaacggcaagaatgttttttaagcttggcgtggatccgatatcaactagatcttgaga

SEQ ID NO: 5828 - DNA, 170 bp, Artificial sequence
  Nf2.356_Pbrm1.1236
  crRNA array
cgatttcttggctttatatatcttgtggaaaggacgaaacaccgtaatttctactaagtgtagatcggagtcatctgatagagattaatttctactaagtgtagatgccgataaaaccaacagccgttttttaagcttggcgtggatccgatatcaactagatcttgaga

SEQ ID NO: 5829 - DNA, 170 bp, Artificial sequence
  Nf2.356_Pbrm1.969
  crRNA array
cgatttcttggctttatatatcttgtggaaaggacgaaacaccgtaatttctactaagtgtagatcggagtcatctgatagagattaatttctactaagtgtagatgagccctaatgaacagctcattttttaagcttggcgtggatccgatatcaactagatcttgaga

SEQ ID NO: 5830 - DNA, 170 bp, Artificial sequence
  Nf2.356_Pik3r1.76
  crRNA array
cgatttcttggctttatatatcttgtggaaaggacgaaacaccgtaatttctactaagtgtagatcggagtcatctgatagagattaatttctactaagtgtagataaaacctatacggcccgcacttttttaagcttggcgtggatccgatatcaactagatcttgaga

SEQ ID NO: 5831 - DNA, 170 bp, Artificial sequence
  Nf2.356_Pik3r1.77
  crRNA array
cgatttcttggctttatatatcttgtggaaaggacgaaacaccgtaatttctactaagtgtagatcggagtcatctgatagagattaatttctactaagtgtagataaacctatacggcccgcactttttttaagcttggcgtggatccgatatcaactagatcttgaga

SEQ ID NO: 5832 - DNA, 170 bp, Artificial sequence
  Nf2.356_Pten.240
  crRNA array
cgatttcttggctttatatatcttgtggaaaggacgaaacaccgtaatttctactaagtgtagatcggagtcatctgatagagattaatttctactaagtgtagattgcatacgctatagctgcttttttttaagcttggcgtggatccgatatcaactagatcttgaga

SEQ ID NO: 5833 - DNA, 170 bp, Artificial sequence
  Nf2.356_Pten.265
  crRNA array
cgatttcttggctttatatatcttgtggaaaggacgaaacaccgtaatttctactaagtgtagatcggagtcatctgatagagattaatttctactaagtgtagataagcgtggtgcgtgacgcacttttttaagcttggcgtggatccgatatcaactagatcttgaga

SEQ ID NO: 5834 - DNA, 170 bp, Artificial sequence
  Nf2.356_Rasa1.1478
  crRNA array
cgatttcttggctttatatatcttgtggaaaggacgaaacaccgtaatttctactaagtgtagatcggagtcatctgatagagattaatttctactaagtgtagatcgataatggtctatgatgtcttttttaagcttggcgtggatccgatatcaactagatcttgaga

SEQ ID NO: 5835 - DNA, 170 bp, Artificial sequence
  Nf2.356_Rasa1.223
  crRNA array
cgatttcttggctttatatatcttgtggaaaggacgaaacaccgtaatttctactaagtgtagatcggagtcatctgatagagattaatttctactaagtgtagattccatggagtatcgtgctcgttttttaagcttggcgtggatccgatatcaactagatcttgaga

SEQ ID NO: 5836 - DNA, 170 bp, Artificial sequence
  Nf2.356_Rb1.211
  crRNA array
cgatttcttggctttatatatcttgtggaaaggacgaaacaccgtaatttctactaagtgtagatcggagtcatctgatagagattaatttctactaagtgtagattctgacatgatcgggtacctttttttaagcttggcgtggatccgatatcaactagatcttgaga

SEQ ID NO: 5837 - DNA, 170 bp, Artificial sequence
  Nf2.356_Rb1.394
  crRNA array
cgatttcttggctttatatatcttgtggaaaggacgaaacaccgtaatttctactaagtgtagatcggagtcatctgatagagattaatttctactaagtgtagatagaaatctcgaagcaggatcttttttaagcttggcgtggatccgatatcaactagatcttgaga

SEQ ID NO: 5838 - DNA, 170 bp, Artificial sequence
  Nf2.356_Rbm10.5
  crRNA array
cgatttcttggctttatatatcttgtggaaaggacgaaacaccgtaatttctactaagtgtagatcggagtcatctgatagagattaatttctactaagtgtagatacgaaacctgaacccacacattttttaagcttggcgtggatccgatatcaactagatcttgaga

SEQ ID NO: 5839 - DNA, 170 bp, Artificial sequence
  Nf2.356_Rbm10.6
  crRNA array
cgatttcttggctttatatatcttgtggaaaggacgaaacaccgtaatttctactaagtgtagatcggagtcatctgatagagattaatttctactaagtgtagatcgaaacctgaacccacacagttttttaagcttggcgtggatccgatatcaactagatcttgaga

SEQ ID NO: 5840 - DNA, 170 bp, Artificial sequence
  Nf2.356_Rnf43.1920
  crRNA array
cgatttcttggctttatatatcttgtggaaaggacgaaacaccgtaatttctactaagtgtagatcggagtcatctgatagagattaatttctactaagtgtagatatccccgtgccgtggactccttttttaagcttggcgtggatccgatatcaactagatcttgaga

SEQ ID NO: 5841 - DNA, 170 bp, Artificial sequence
  Nf2.356_Rnf43.39
  crRNA array
cgatttcttggctttatatatcttgtggaaaggacgaaacaccgtaatttctactaagtgtagatcggagtcatctgatagagattaatttctactaagtgtagatcaaggggatcactctgataattttttaagcttggcgtggatccgatatcaactagatcttgaga

SEQ ID NO: 5842 - DNA, 170 bp, Artificial sequence
  Nf2.356_Runx1.204
  crRNA array
cgatttcttggctttatatatcttgtggaaaggacgaaacaccgtaatttctactaagtgtagatcggagtcatctgatagagattaatttctactaagtgtagattaaataagtccagccgttttttttttaagcttggcgtggatccgatatcaactagatcttgaga

SEQ ID NO: 5843 - DNA, 170 bp, Artificial sequence
  Nf2.356_Runx1.81
  crRNA array
cgatttcttggctttatatatcttgtggaaaggacgaaacaccgtaatttctactaagtgtagatcggagtcatctgatagagattaatttctactaagtgtagataggacgcgtatgggaattttttttttaagcttggcgtggatccgatatcaactagatcttgaga

SEQ ID NO: 5844 - DNA, 170 bp, Artificial sequence
  Nf2.356_Setd2.143
  crRNA array
cgatttcttggctttatatatcttgtggaaaggacgaaacaccgtaatttctactaagtgtagatcggagtcatctgatagagattaatttctactaagtgtagatgcacaaccacaacagactggttttttaagcttggcgtggatccgatatcaactagatcttgaga

SEQ ID NO: 5845 - DNA, 170 bp, Artificial sequence
  Nf2.356_Setd2.508
  crRNA array
cgatttcttggctttatatatcttgtggaaaggacgaaacaccgtaatttctactaagtgtagatcggagtcatctgatagagattaatttctactaagtgtagattacgatcccgagcacccgacttttttaagcttggcgtggatccgatatcaactagatcttgaga

SEQ ID NO: 5846 - DNA, 170 bp, Artificial sequence
  Nf2.356_Smad4.3038
  crRNA array
cgatttcttggctttatatatcttgtggaaaggacgaaacaccgtaatttctactaagtgtagatcggagtcatctgatagagattaatttctactaagtgtagatatctgcggcagtgtcaccggttttttaagcttggcgtggatccgatatcaactagatcttgaga

SEQ ID NO: 5847 - DNA, 170 bp, Artificial sequence
  Nf2.356_Smad4.39
  crRNA array
cgatttcttggctttatatatcttgtggaaaggacgaaacaccgtaatttctactaagtgtagatcggagtcatctgatagagattaatttctactaagtgtagatagtcaaacgcatactgacaattttttaagcttggcgtggatccgatatcaactagatcttgaga

SEQ ID NO: 5848 - DNA, 170 bp, Artificial sequence
  Nf2.356_Stag2.1409
  crRNA array
cgatttcttggctttatatatcttgtggaaaggacgaaacaccgtaatttctactaagtgtagatcggagtcatctgatagagattaatttctactaagtgtagatgctaataactgcggaagggcttttttaagcttggcgtggatccgatatcaactagatcttgaga

SEQ ID NO: 5849 - DNA, 170 bp, Artificial sequence
  Nf2.356_Stag2.4401
  crRNA array
cgatttcttggctttatatatcttgtggaaaggacgaaacaccgtaatttctactaagtgtagatcggagtcatctgatagagattaatttctactaagtgtagattaatcgtccagtggtgtatattttttaagcttggcgtggatccgatatcaactagatcttgaga

SEQ ID NO: 5850 - DNA, 170 bp, Artificial sequence
  Nf2.356_Tbl1xr1.1
  crRNA array
cgatttcttggctttatatatcttgtggaaaggacgaaacaccgtaatttctactaagtgtagatcggagtcatctgatagagattaatttctactaagtgtagatggatgcgcatactggtgaagttttttaagcttggcgtggatccgatatcaactagatcttgaga

SEQ ID NO: 5851 - DNA, 170 bp, Artificial sequence
  Nf2.356_Tbl1xr1.83
  crRNA array
cgatttcttggctttatatatcttgtggaaaggacgaaacaccgtaatttctactaagtgtagatcggagtcatctgatagagattaatttctactaagtgtagatatggtcgacccatcgagtctttttttaagcttggcgtggatccgatatcaactagatcttgaga

SEQ ID NO: 5852 - DNA, 170 bp, Artificial sequence
  Nf2.356_Tgfbr2.290
  crRNA array
cgatttcttggctttatatatcttgtggaaaggacgaaacaccgtaatttctactaagtgtagatcggagtcatctgatagagattaatttctactaagtgtagatcctctcggcgcccgggtaaattttttaagcttggcgtggatccgatatcaactagatcttgaga

SEQ ID NO: 5853 - DNA, 170 bp, Artificial sequence
  Nf2.356_Tgfbr2.292
  crRNA array
cgatttcttggctttatatatcttgtggaaaggacgaaacaccgtaatttctactaagtgtagatcggagtcatctgatagagattaatttctactaagtgtagatcccgggcgccgagagggaaattttttaagcttggcgtggatccgatatcaactagatcttgaga

SEQ ID NO: 5854 - DNA, 170 bp, Artificial sequence
  Nf2.356_Trp53.4
  crRNA array
cgatttcttggctttatatatcttgtggaaaggacgaaacaccgtaatttctactaagtgtagatcggagtcatctgatagagattaatttctactaagtgtagatccctgaactgcccccagggattttttaagcttggcgtggatccgatatcaactagatcttgaga

SEQ ID NO: 5855 - DNA, 170 bp, Artificial sequence
  Nf2.356_Trp53.528
  crRNA array
cgatttcttggctttatatatcttgtggaaaggacgaaacaccgtaatttctactaagtgtagatcggagtcatctgatagagattaatttctactaagtgtagatgctgggccagcagagacctgttttttaagcttggcgtggatccgatatcaactagatcttgaga

SEQ ID NO: 5856 - DNA, 170 bp, Artificial sequence
  Nf2.356_Vhl.1
  crRNA array
cgatttcttggctttatatatcttgtggaaaggacgaaacaccgtaatttctactaagtgtagatcggagtcatctgatagagattaatttctactaagtgtagatagggctcccggcggccatttttttttaagcttggcgtggatccgatatcaactagatcttgaga

SEQ ID NO: 5857 - DNA, 170 bp, Artificial sequence
  Nf2.356_Vhl.151
  crRNA array
cgatttcttggctttatatatcttgtggaaaggacgaaacaccgtaatttctactaagtgtagatcggagtcatctgatagagattaatttctactaagtgtagattagagcactcacccgagggattttttaagcttggcgtggatccgatatcaactagatcttgaga

SEQ ID NO: 5858 - DNA, 170 bp, Artificial sequence
  Nf2.356_Zc3h13.1387
  crRNA array
cgatttcttggctttatatatcttgtggaaaggacgaaacaccgtaatttctactaagtgtagatcggagtcatctgatagagattaatttctactaagtgtagatgtgacgccggtcatgtgactttttttaagcttggcgtggatccgatatcaactagatcttgaga

SEQ ID NO: 5859 - DNA, 170 bp, Artificial sequence
  Nf2.356_Zc3h13.1777
  crRNA array
cgatttcttggctttatatatcttgtggaaaggacgaaacaccgtaatttctactaagtgtagatcggagtcatctgatagagattaatttctactaagtgtagatgatgctgccagtgtagcggcttttttaagcttggcgtggatccgatatcaactagatcttgaga

SEQ ID NO: 5860 - DNA, 170 bp, Artificial sequence
  Nf2.768_Acvr2a.155
  crRNA array
cgatttcttggctttatatatcttgtggaaaggacgaaacaccgtaatttctactaagtgtagatccgaagccccagtgtccggctaatttctactaagtgtagatggacctggctaatcaagtatttttttaagcttggcgtggatccgatatcaactagatcttgaga

SEQ ID NO: 5861 - DNA, 170 bp, Artificial sequence
  Nf2.768_Acvr2a.70
  crRNA array
cgatttcttggctttatatatcttgtggaaaggacgaaacaccgtaatttctactaagtgtagatccgaagccccagtgtccggctaatttctactaagtgtagatcccgaggcgccggagaagccttttttaagcttggcgtggatccgatatcaactagatcttgaga

SEQ ID NO: 5862 - DNA, 170 bp, Artificial sequence
  Nf2.768_Apc.21
  crRNA array
cgatttcttggctttatatatcttgtggaaaggacgaaacaccgtaatttctactaagtgtagatccgaagccccagtgtccggctaatttctactaagtgtagatgtgatccacacgtgtagctgttttttaagcttggcgtggatccgatatcaactagatcttgaga

SEQ ID NO: 5863 - DNA, 170 bp, Artificial sequence
  Nf2.768_Apc.867
  crRNA array
cgatttcttggctttatatatcttgtggaaaggacgaaacaccgtaatttctactaagtgtagatccgaagccccagtgtccggctaatttctactaagtgtagatcagtcccaggcggcggaagcttttttaagcttggcgtggatccgatatcaactagatcttgaga

SEQ ID NO: 5864 - DNA, 170 bp, Artificial sequence
  Nf2.768_Arid1a.2
  crRNA array
cgatttcttggctttatatatcttgtggaaaggacgaaacaccgtaatttctactaagtgtagatccgaagccccagtgtccggctaatttctactaagtgtagatcccgcgcccccgtcctggggttttttaagcttggcgtggatccgatatcaactagatcttgaga

SEQ ID NO: 5865 - DNA, 170 bp, Artificial sequence
  Nf2.768_Arid1a.5
  crRNA array
cgatttcttggctttatatatcttgtggaaaggacgaaacaccgtaatttctactaagtgtagatccgaagccccagtgtccggctaatttctactaagtgtagatcccgcgctcggccgctgccgttttttaagcttggcgtggatccgatatcaactagatcttgaga

SEQ ID NO: 5866 - DNA, 170 bp, Artificial sequence
  Nf2.768_Arid2.166
  crRNA array
cgatttcttggctttatatatcttgtggaaaggacgaaacaccgtaatttctactaagtgtagatccgaagccccagtgtccggctaatttctactaagtgtagataaccgcgatctgggttttttttttttaagcttggcgtggatccgatatcaactagatcttgaga

SEQ ID NO: 5867 - DNA, 170 bp, Artificial sequence
  Nf2.768_Arid2.172
  crRNA array
cgatttcttggctttatatatcttgtggaaaggacgaaacaccgtaatttctactaagtgtagatccgaagccccagtgtccggctaatttctactaagtgtagatctggacgagctgcggcagttttttttaagcttggcgtggatccgatatcaactagatcttgaga

SEQ ID NO: 5868 - DNA, 170 bp, Artificial sequence
  Nf2.768_Atm.120
  crRNA array
cgatttcttggctttatatatcttgtggaaaggacgaaacaccgtaatttctactaagtgtagatccgaagccccagtgtccggctaatttctactaagtgtagatgacaggtagtcggcagctaattttttaagcttggcgtggatccgatatcaactagatcttgaga

SEQ ID NO: 5869 - DNA, 170 bp, Artificial sequence
  Nf2.768_Atm.997
  crRNA array
cgatttcttggctttatatatcttgtggaaaggacgaaacaccgtaatttctactaagtgtagatccgaagccccagtgtccggctaatttctactaagtgtagatgagaaagtctccgaatcgttttttttaagcttggcgtggatccgatatcaactagatcttgaga

SEQ ID NO: 5870 - DNA, 170 bp, Artificial sequence
  Nf2.768_Atrx.249
  crRNA array
cgatttcttggctttatatatcttgtggaaaggacgaaacaccgtaatttctactaagtgtagatccgaagccccagtgtccggctaatttctactaagtgtagattagccagtcgctcatatctcttttttaagcttggcgtggatccgatatcaactagatcttgaga

SEQ ID NO: 5871 - DNA, 170 bp, Artificial sequence
  Nf2.768_Atrx.251
  crRNA array
cgatttcttggctttatatatcttgtggaaaggacgaaacaccgtaatttctactaagtgtagatccgaagccccagtgtccggctaatttctactaagtgtagatgccagtcgctcatatctctgttttttaagcttggcgtggatccgatatcaactagatcttgaga

SEQ ID NO: 5872 - DNA, 170 bp, Artificial sequence
  Nf2.768_Bcor.203
  crRNA array
cgatttcttggctttatatatcttgtggaaaggacgaaacaccgtaatttctactaagtgtagatccgaagccccagtgtccggctaatttctactaagtgtagatccccggagcggagtccaggcttttttaagcttggcgtggatccgatatcaactagatcttgaga

SEQ ID NO: 5873 - DNA, 170 bp, Artificial sequence
  Nf2.768_Bcor.475
  crRNA array
cgatttcttggctttatatatcttgtggaaaggacgaaacaccgtaatttctactaagtgtagatccgaagccccagtgtccggctaatttctactaagtgtagattgcaacccctctgtatgggattttttaagcttggcgtggatccgatatcaactagatcttgaga

SEQ ID NO: 5874 - DNA, 170 bp, Artificial sequence
  Nf2.768_Brca1.112
  crRNA array
cgatttcttggctttatatatcttgtggaaaggacgaaacaccgtaatttctactaagtgtagatccgaagccccagtgtccggctaatttctactaagtgtagatctagacgctctgtggagactttttttaagcttggcgtggatccgatatcaactagatcttgaga

SEQ ID NO: 5875 - DNA, 170 bp, Artificial sequence
  Nf2.768_Brca1.53
  crRNA array
cgatttcttggctttatatatcttgtggaaaggacgaaacaccgtaatttctactaagtgtagatccgaagccccagtgtccggctaatttctactaagtgtagataatgaggaggcgtcgatcatttttttaagcttggcgtggatccgatatcaactagatcttgaga

SEQ ID NO: 5876 - DNA, 170 bp, Artificial sequence
  Nf2.768_Casp8.45
  crRNA array
cgatttcttggctttatatatcttgtggaaaggacgaaacaccgtaatttctactaagtgtagatccgaagccccagtgtccggctaatttctactaagtgtagatctaccgagatcctgtgaatgttttttaagcttggcgtggatccgatatcaactagatcttgaga

SEQ ID NO: 5877 - DNA, 170 bp, Artificial sequence
  Nf2.768_Casp8.54
  crRNA array
cgatttcttggctttatatatcttgtggaaaggacgaaacaccgtaatttctactaagtgtagatccgaagccccagtgtccggctaatttctactaagtgtagatcagtgcagtcgtcgtaagatttttttaagcttggcgtggatccgatatcaactagatcttgaga

SEQ ID NO: 5878 - DNA, 170 bp, Artificial sequence
  Nf2.768_Cbwd1.84
  crRNA array
cgatttcttggctttatatatcttgtggaaaggacgaaacaccgtaatttctactaagtgtagatccgaagccccagtgtccggctaatttctactaagtgtagatcacagcaggtaacatgccgcttttttaagcttggcgtggatccgatatcaactagatcttgaga

SEQ ID NO: 5879 - DNA, 170 bp, Artificial sequence
  Nf2.768_Cbwd1.85
  crRNA array
cgatttcttggctttatatatcttgtggaaaggacgaaacaccgtaatttctactaagtgtagatccgaagccccagtgtccggctaatttctactaagtgtagatacagcaggtaacatgccgccttttttaagcttggcgtggatccgatatcaactagatcttgaga

SEQ ID NO: 5880 - DNA, 170 bp, Artificial sequence
  Nf2.768_Cdh1.387
  crRNA array
cgatttcttggctttatatatcttgtggaaaggacgaaacaccgtaatttctactaagtgtagatccgaagccccagtgtccggctaatttctactaagtgtagatctcggcgtctgccgggtccgttttttaagcttggcgtggatccgatatcaactagatcttgaga

SEQ ID NO: 5881 - DNA, 170 bp, Artificial sequence
  Nf2.768_Cdh1.58
  crRNA array
cgatttcttggctttatatatcttgtggaaaggacgaaacaccgtaatttctactaagtgtagatccgaagccccagtgtccggctaatttctactaagtgtagatctcgtccgcgcccgggactcttttttaagcttggcgtggatccgatatcaactagatcttgaga

SEQ ID NO: 5882 - DNA, 170 bp, Artificial sequence
  Nf2.768_Cdkn2a.647
  crRNA array
cgatttcttggctttatatatcttgtggaaaggacgaaacaccgtaatttctactaagtgtagatccgaagccccagtgtccggctaatttctactaagtgtagatgcaatcacgggagggagcagttttttaagcttggcgtggatccgatatcaactagatcttgaga

SEQ ID NO: 5883 - DNA, 170 bp, Artificial sequence
  Nf2.768_Cdkn2a.648
  crRNA array
cgatttcttggctttatatatcttgtggaaaggacgaaacaccgtaatttctactaagtgtagatccgaagccccagtgtccggctaatttctactaagtgtagatcaatcacgggagggagcagattttttaagcttggcgtggatccgatatcaactagatcttgaga

SEQ ID NO: 5884 - DNA, 170 bp, Artificial sequence
  Nf2.768_Cic.162
  crRNA array
cgatttcttggctttatatatcttgtggaaaggacgaaacaccgtaatttctactaagtgtagatccgaagccccagtgtccggctaatttctactaagtgtagatcgcaggcgcgcccggcggagttttttaagcttggcgtggatccgatatcaactagatcttgaga

SEQ ID NO: 5885 - DNA, 170 bp, Artificial sequence
  Nf2.768_Cic.164
  crRNA array
cgatttcttggctttatatatcttgtggaaaggacgaaacaccgtaatttctactaagtgtagatccgaagccccagtgtccggctaatttctactaagtgtagatcgggccctgggccggcggctttttttaagcttggcgtggatccgatatcaactagatcttgaga

SEQ ID NO: 5886 - DNA, 170 bp, Artificial sequence
  Nf2.768_Ctcf.229
  crRNA array
cgatttcttggctttatatatcttgtggaaaggacgaaacaccgtaatttctactaagtgtagatccgaagccccagtgtccggctaatttctactaagtgtagatggctggtggctgatagtctgttttttaagcttggcgtggatccgatatcaactagatcttgaga

SEQ ID NO: 5887 - DNA, 170 bp, Artificial sequence
  Nf2.768_Ctcf.809
  crRNA array
cgatttcttggctttatatatcttgtggaaaggacgaaacaccgtaatttctactaagtgtagatccgaagccccagtgtccggctaatttctactaagtgtagataagcgctatcatgatcccaattttttaagcttggcgtggatccgatatcaactagatcttgaga

SEQ ID NO: 5888 - DNA, 170 bp, Artificial sequence
  Nf2.768_Elf3.826
  crRNA array
cgatttcttggctttatatatcttgtggaaaggacgaaacaccgtaatttctactaagtgtagatccgaagccccagtgtccggctaatttctactaagtgtagattccgagacatcctaatccacttttttaagcttggcgtggatccgatatcaactagatcttgaga

SEQ ID NO: 5889 - DNA, 170 bp, Artificial sequence
  Nf2.768_Elf3.983
  crRNA array
cgatttcttggctttatatatcttgtggaaaggacgaaacaccgtaatttctactaagtgtagatccgaagccccagtgtccggctaatttctactaagtgtagattaggccccctaactggaccattttttaagcttggcgtggatccgatatcaactagatcttgaga

SEQ ID NO: 5890 - DNA, 170 bp, Artificial sequence
  Nf2.768_Ep300.310
  crRNA array
cgatttcttggctttatatatcttgtggaaaggacgaaacaccgtaatttctactaagtgtagatccgaagccccagtgtccggctaatttctactaagtgtagatatggtacgacagtgaggaagttttttaagcttggcgtggatccgatatcaactagatcttgaga

SEQ ID NO: 5891 - DNA, 170 bp, Artificial sequence
  Nf2.768_Ep300.587
  crRNA array
cgatttcttggctttatatatcttgtggaaaggacgaaacaccgtaatttctactaagtgtagatccgaagccccagtgtccggctaatttctactaagtgtagatcgccccggggcccccaaccattttttaagcttggcgtggatccgatatcaactagatcttgaga

SEQ ID NO: 5892 - DNA, 170 bp, Artificial sequence
  Nf2.768_Epha2.126
  crRNA array
cgatttcttggctttatatatcttgtggaaaggacgaaacaccgtaatttctactaagtgtagatccgaagccccagtgtccggctaatttctactaagtgtagatcctgtgccgccgcggccgccttttttaagcttggcgtggatccgatatcaactagatcttgaga

SEQ ID NO: 5893 - DNA, 170 bp, Artificial sequence
  Nf2.768_Epha2.5
  crRNA array
cgatttcttggctttatatatcttgtggaaaggacgaaacaccgtaatttctactaagtgtagatccgaagccccagtgtccggctaatttctactaagtgtagatcatgagctggcgccacccggttttttaagcttggcgtggatccgatatcaactagatcttgaga

SEQ ID NO: 5894 - DNA, 170 bp, Artificial sequence
  Nf2.768_Fat1.105
  crRNA array
cgatttcttggctttatatatcttgtggaaaggacgaaacaccgtaatttctactaagtgtagatccgaagccccagtgtccggctaatttctactaagtgtagataactcgaggtgacaacaagtttttttaagcttggcgtggatccgatatcaactagatcttgaga

SEQ ID NO: 5895 - DNA, 170 bp, Artificial sequence
  Nf2.768_Fat1.122
  crRNA array
cgatttcttggctttatatatcttgtggaaaggacgaaacaccgtaatttctactaagtgtagatccgaagccccagtgtccggctaatttctactaagtgtagatccatcgacatggaaacgggattttttaagcttggcgtggatccgatatcaactagatcttgaga

SEQ ID NO: 5896 - DNA, 170 bp, Artificial sequence
  Nf2.768_Fbxw7.21
  crRNA array
cgatttcttggctttatatatcttgtggaaaggacgaaacaccgtaatttctactaagtgtagatccgaagccccagtgtccggctaatttctactaagtgtagattaatgtgccgtagaaacccattttttaagcttggcgtggatccgatatcaactagatcttgaga

SEQ ID NO: 5897 - DNA, 170 bp, Artificial sequence
  Nf2.768_Fbxw7.23
  crRNA array
cgatttcttggctttatatatcttgtggaaaggacgaaacaccgtaatttctactaagtgtagatccgaagccccagtgtccggctaatttctactaagtgtagatatgtgccgtagaaacccatattttttaagcttggcgtggatccgatatcaactagatcttgaga

SEQ ID NO: 5898 - DNA, 170 bp, Artificial sequence
  Nf2.768_Gata3.34
  crRNA array
cgatttcttggctttatatatcttgtggaaaggacgaaacaccgtaatttctactaagtgtagatccgaagccccagtgtccggctaatttctactaagtgtagatctaaactatcccgcaaagatttttttaagcttggcgtggatccgatatcaactagatcttgaga

SEQ ID NO: 5899 - DNA, 170 bp, Artificial sequence
  Nf2.768_Gata3.47
  crRNA array
cgatttcttggctttatatatcttgtggaaaggacgaaacaccgtaatttctactaagtgtagatccgaagccccagtgtccggctaatttctactaagtgtagatcgtagtaggacgggacgtggttttttaagcttggcgtggatccgatatcaactagatcttgaga

SEQ ID NO: 5900 - DNA, 170 bp, Artificial sequence
  Nf2.768_H2-Q2.1
  crRNA array
cgatttcttggctttatatatcttgtggaaaggacgaaacaccgtaatttctactaagtgtagatccgaagccccagtgtccggctaatttctactaagtgtagatagggcggccaccaacagcagttttttaagcttggcgtggatccgatatcaactagatcttgaga

SEQ ID NO: 5901 - DNA, 170 bp, Artificial sequence
  Nf2.768_H2-Q2.2
  crRNA array
cgatttcttggctttatatatcttgtggaaaggacgaaacaccgtaatttctactaagtgtagatccgaagccccagtgtccggctaatttctactaagtgtagattaacctgcgcccgctgctgattttttaagcttggcgtggatccgatatcaactagatcttgaga

SEQ ID NO: 5902 - DNA, 170 bp, Artificial sequence
  Nf2.768_Kdm5c.1878
  crRNA array
cgatttcttggctttatatatcttgtggaaaggacgaaacaccgtaatttctactaagtgtagatccgaagccccagtgtccggctaatttctactaagtgtagatagagcacggcacccgcccccttttttaagcttggcgtggatccgatatcaactagatcttgaga

SEQ ID NO: 5903 - DNA, 170 bp, Artificial sequence
  Nf2.768_Kdm5c.1879
  crRNA array
cgatttcttggctttatatatcttgtggaaaggacgaaacaccgtaatttctactaagtgtagatccgaagccccagtgtccggctaatttctactaagtgtagatgagcacggcacccgccccccttttttaagcttggcgtggatccgatatcaactagatcttgaga

SEQ ID NO: 5904 - DNA, 170 bp, Artificial sequence
  Nf2.768_Kdm6a.56
  crRNA array
cgatttcttggctttatatatcttgtggaaaggacgaaacaccgtaatttctactaagtgtagatccgaagccccagtgtccggctaatttctactaagtgtagattcgctgccgcctctcgcggcttttttaagcttggcgtggatccgatatcaactagatcttgaga

SEQ ID NO: 5905 - DNA, 170 bp, Artificial sequence
  Nf2.768_Kdm6a.57
  crRNA array
cgatttcttggctttatatatcttgtggaaaggacgaaacaccgtaatttctactaagtgtagatccgaagccccagtgtccggctaatttctactaagtgtagatcgctgccgcctctcgcggcattttttaagcttggcgtggatccgatatcaactagatcttgaga

SEQ ID NO: 5906 - DNA, 170 bp, Artificial sequence
  Nf2.768_Kmt2b.265
  crRNA array
cgatttcttggctttatatatcttgtggaaaggacgaaacaccgtaatttctactaagtgtagatccgaagccccagtgtccggctaatttctactaagtgtagatccccaagtgaagcccacctgttttttaagcttggcgtggatccgatatcaactagatcttgaga

SEQ ID NO: 5907 - DNA, 170 bp, Artificial sequence
  Nf2.768_Kmt2b.298
  crRNA array
cgatttcttggctttatatatcttgtggaaaggacgaaacaccgtaatttctactaagtgtagatccgaagccccagtgtccggctaatttctactaagtgtagattccggcagggaccggctggcttttttaagcttggcgtggatccgatatcaactagatcttgaga

SEQ ID NO: 5908 - DNA, 170 bp, Artificial sequence
  Nf2.768_Kmt2c.1962
  crRNA array
cgatttcttggctttatatatcttgtggaaaggacgaaacaccgtaatttctactaagtgtagatccgaagccccagtgtccggctaatttctactaagtgtagatgtgacgatctgtgccacaagttttttaagcttggcgtggatccgatatcaactagatcttgaga

SEQ ID NO: 5909 - DNA, 170 bp, Artificial sequence
  Nf2.768_Kmt2c.2236
  crRNA array
cgatttcttggctttatatatcttgtggaaaggacgaaacaccgtaatttctactaagtgtagatccgaagccccagtgtccggctaatttctactaagtgtagatactcgacctccacctccctattttttaagcttggcgtggatccgatatcaactagatcttgaga

SEQ ID NO: 5910 - DNA, 170 bp, Artificial sequence
  Nf2.768_Kmt2d.316
  crRNA array
cgatttcttggctttatatatcttgtggaaaggacgaaacaccgtaatttctactaagtgtagatccgaagccccagtgtccggctaatttctactaagtgtagatactccaggccacccaggtggttttttaagcttggcgtggatccgatatcaactagatcttgaga

SEQ ID NO: 5911 - DNA, 170 bp, Artificial sequence
  Nf2.768_Kmt2d.416
  crRNA array
cgatttcttggctttatatatcttgtggaaaggacgaaacaccgtaatttctactaagtgtagatccgaagccccagtgtccggctaatttctactaagtgtagattaaacccccgggggaagggtttttttaagcttggcgtggatccgatatcaactagatcttgaga

SEQ ID NO: 5912 - DNA, 170 bp, Artificial sequence
  Nf2.768_Map2k4.119
  crRNA array
cgatttcttggctttatatatcttgtggaaaggacgaaacaccgtaatttctactaagtgtagatccgaagccccagtgtccggctaatttctactaagtgtagattgctgtgtgggcggccacatttttttaagcttggcgtggatccgatatcaactagatcttgaga

SEQ ID NO: 5913 - DNA, 170 bp, Artificial sequence
  Nf2.768_Map2k4.1261
  crRNA array
cgatttcttggctttatatatcttgtggaaaggacgaaacaccgtaatttctactaagtgtagatccgaagccccagtgtccggctaatttctactaagtgtagatgatgtagtaatgcggagtagttttttaagcttggcgtggatccgatatcaactagatcttgaga

SEQ ID NO: 5914 - DNA, 170 bp, Artificial sequence
  Nf2.768_Map3k1.235
  crRNA array
cgatttcttggctttatatatcttgtggaaaggacgaaacaccgtaatttctactaagtgtagatccgaagccccagtgtccggctaatttctactaagtgtagataaaacgctactgatcgatcgttttttaagcttggcgtggatccgatatcaactagatcttgaga

SEQ ID NO: 5915 - DNA, 170 bp, Artificial sequence
  Nf2.768_Map3k1.3838
  crRNA array
cgatttcttggctttatatatcttgtggaaaggacgaaacaccgtaatttctactaagtgtagatccgaagccccagtgtccggctaatttctactaagtgtagatccaacaacagggccccactattttttaagcttggcgtggatccgatatcaactagatcttgaga

SEQ ID NO: 5916 - DNA, 170 bp, Artificial sequence
  Nf2.768_Mga.1655
  crRNA array
cgatttcttggctttatatatcttgtggaaaggacgaaacaccgtaatttctactaagtgtagatccgaagccccagtgtccggctaatttctactaagtgtagatcgagaagtggagagcatattttttttaagcttggcgtggatccgatatcaactagatcttgaga

SEQ ID NO: 5917 - DNA, 170 bp, Artificial sequence
  Nf2.768_Mga.93
  crRNA array
cgatttcttggctttatatatcttgtggaaaggacgaaacaccgtaatttctactaagtgtagatccgaagccccagtgtccggctaatttctactaagtgtagatgagaaggctccccataatgtttttttaagcttggcgtggatccgatatcaactagatcttgaga

SEQ ID NO: 5918 - DNA, 170 bp, Artificial sequence
  Nf2.768_Nf1.746
  crRNA array
cgatttcttggctttatatatcttgtggaaaggacgaaacaccgtaatttctactaagtgtagatccgaagccccagtgtccggctaatttctactaagtgtagattaagcataatgatgatgccattttttaagcttggcgtggatccgatatcaactagatcttgaga

SEQ ID NO: 5919 - DNA, 170 bp, Artificial sequence
  Nf2.768_Nf1.97
  crRNA array
cgatttcttggctttatatatcttgtggaaaggacgaaacaccgtaatttctactaagtgtagatccgaagccccagtgtccggctaatttctactaagtgtagatagcccgctacatgctgatgcttttttaagcttggcgtggatccgatatcaactagatcttgaga

SEQ ID NO: 5920 - DNA, 170 bp, Artificial sequence
  Nf2.768_Notch1.1849
  crRNA array
cgatttcttggctttatatatcttgtggaaaggacgaaacaccgtaatttctactaagtgtagatccgaagccccagtgtccggctaatttctactaagtgtagatctggcgggtgggcggcgctgttttttaagcttggcgtggatccgatatcaactagatcttgaga

SEQ ID NO: 5921 - DNA, 170 bp, Artificial sequence
  Nf2.768_Notch1.649
  crRNA array
cgatttcttggctttatatatcttgtggaaaggacgaaacaccgtaatttctactaagtgtagatccgaagccccagtgtccggctaatttctactaagtgtagattgggccaacgatgccaggacttttttaagcttggcgtggatccgatatcaactagatcttgaga

SEQ ID NO: 5922 - DNA, 170 bp, Artificial sequence
  Nf2.768_Nsd1.70
  crRNA array
cgatttcttggctttatatatcttgtggaaaggacgaaacaccgtaatttctactaagtgtagatccgaagccccagtgtccggctaatttctactaagtgtagatactggtgtggacgatgcagattttttaagcttggcgtggatccgatatcaactagatcttgaga

SEQ ID NO: 5923 - DNA, 170 bp, Artificial sequence
  Nf2.768_Nsd1.90
  crRNA array
cgatttcttggctttatatatcttgtggaaaggacgaaacaccgtaatttctactaagtgtagatccgaagccccagtgtccggctaatttctactaagtgtagataggagctaacggcaagaatgttttttaagcttggcgtggatccgatatcaactagatcttgaga

SEQ ID NO: 5924 - DNA, 170 bp, Artificial sequence
  Nf2.768_Pbrm1.1236
  crRNA array
cgatttcttggctttatatatcttgtggaaaggacgaaacaccgtaatttctactaagtgtagatccgaagccccagtgtccggctaatttctactaagtgtagatgccgataaaaccaacagccgttttttaagcttggcgtggatccgatatcaactagatcttgaga

SEQ ID NO: 5925 - DNA, 170 bp, Artificial sequence
  Nf2.768_Pbrm1.969
  crRNA array
cgatttcttggctttatatatcttgtggaaaggacgaaacaccgtaatttctactaagtgtagatccgaagccccagtgtccggctaatttctactaagtgtagatgagccctaatgaacagctcattttttaagcttggcgtggatccgatatcaactagatcttgaga

SEQ ID NO: 5926 - DNA, 170 bp, Artificial sequence
  Nf2.768_Pik3r1.76
  crRNA array
cgatttcttggctttatatatcttgtggaaaggacgaaacaccgtaatttctactaagtgtagatccgaagccccagtgtccggctaatttctactaagtgtagataaaacctatacggcccgcacttttttaagcttggcgtggatccgatatcaactagatcttgaga

SEQ ID NO: 5927 - DNA, 170 bp, Artificial sequence
  Nf2.768_Pik3r1.77
  crRNA array
cgatttcttggctttatatatcttgtggaaaggacgaaacaccgtaatttctactaagtgtagatccgaagccccagtgtccggctaatttctactaagtgtagataaacctatacggcccgcactttttttaagcttggcgtggatccgatatcaactagatcttgaga

SEQ ID NO: 5928 - DNA, 170 bp, Artificial sequence
  Nf2.768_Pten.240
  crRNA array
cgatttcttggctttatatatcttgtggaaaggacgaaacaccgtaatttctactaagtgtagatccgaagccccagtgtccggctaatttctactaagtgtagattgcatacgctatagctgcttttttttaagcttggcgtggatccgatatcaactagatcttgaga

SEQ ID NO: 5929 - DNA, 170 bp, Artificial sequence
  Nf2.768_Pten.265
  crRNA array
cgatttcttggctttatatatcttgtggaaaggacgaaacaccgtaatttctactaagtgtagatccgaagccccagtgtccggctaatttctactaagtgtagataagcgtggtgcgtgacgcacttttttaagcttggcgtggatccgatatcaactagatcttgaga

SEQ ID NO: 5930 - DNA, 170 bp, Artificial sequence
  Nf2.768_Rasa1.1478
  crRNA array
cgatttcttggctttatatatcttgtggaaaggacgaaacaccgtaatttctactaagtgtagatccgaagccccagtgtccggctaatttctactaagtgtagatcgataatggtctatgatgtcttttttaagcttggcgtggatccgatatcaactagatcttgaga

SEQ ID NO: 5931 - DNA, 170 bp, Artificial sequence
  Nf2.768_Rasa1.223
  crRNA array
cgatttcttggctttatatatcttgtggaaaggacgaaacaccgtaatttctactaagtgtagatccgaagccccagtgtccggctaatttctactaagtgtagattccatggagtatcgtgctcgttttttaagcttggcgtggatccgatatcaactagatcttgaga

SEQ ID NO: 5932 - DNA, 170 bp, Artificial sequence
  Nf2.768_Rb1.211
  crRNA array
cgatttcttggctttatatatcttgtggaaaggacgaaacaccgtaatttctactaagtgtagatccgaagccccagtgtccggctaatttctactaagtgtagattctgacatgatcgggtacctttttttaagcttggcgtggatccgatatcaactagatcttgaga

SEQ ID NO: 5933 - DNA, 170 bp, Artificial sequence
  Nf2.768_Rb1.394
  crRNA array
cgatttcttggctttatatatcttgtggaaaggacgaaacaccgtaatttctactaagtgtagatccgaagccccagtgtccggctaatttctactaagtgtagatagaaatctcgaagcaggatcttttttaagcttggcgtggatccgatatcaactagatcttgaga

SEQ ID NO: 5934 - DNA, 170 bp, Artificial sequence
  Nf2.768_Rbm10.5
  crRNA array
cgatttcttggctttatatatcttgtggaaaggacgaaacaccgtaatttctactaagtgtagatccgaagccccagtgtccggctaatttctactaagtgtagatacgaaacctgaacccacacattttttaagcttggcgtggatccgatatcaactagatcttgaga

SEQ ID NO: 5935 - DNA, 170 bp, Artificial sequence
  Nf2.768_Rbm10.6
  crRNA array
cgatttcttggctttatatatcttgtggaaaggacgaaacaccgtaatttctactaagtgtagatccgaagccccagtgtccggctaatttctactaagtgtagatcgaaacctgaacccacacagttttttaagcttggcgtggatccgatatcaactagatcttgaga

SEQ ID NO: 5936 - DNA, 170 bp, Artificial sequence
  Nf2.768_Rnf43.1920
  crRNA array
cgatttcttggctttatatatcttgtggaaaggacgaaacaccgtaatttctactaagtgtagatccgaagccccagtgtccggctaatttctactaagtgtagatatccccgtgccgtggactccttttttaagcttggcgtggatccgatatcaactagatcttgaga

SEQ ID NO: 5937 - DNA, 170 bp, Artificial sequence
  Nf2.768_Rnf43.39
  crRNA array
cgatttcttggctttatatatcttgtggaaaggacgaaacaccgtaatttctactaagtgtagatccgaagccccagtgtccggctaatttctactaagtgtagatcaaggggatcactctgataattttttaagcttggcgtggatccgatatcaactagatcttgaga

SEQ ID NO: 5938 - DNA, 170 bp, Artificial sequence
  Nf2.768_Runx1.204
  crRNA array
cgatttcttggctttatatatcttgtggaaaggacgaaacaccgtaatttctactaagtgtagatccgaagccccagtgtccggctaatttctactaagtgtagattaaataagtccagccgttttttttttaagcttggcgtggatccgatatcaactagatcttgaga

SEQ ID NO: 5939 - DNA, 170 bp, Artificial sequence
  Nf2.768_Runx1.81
  crRNA array
cgatttcttggctttatatatcttgtggaaaggacgaaacaccgtaatttctactaagtgtagatccgaagccccagtgtccggctaatttctactaagtgtagataggacgcgtatgggaattttttttttaagcttggcgtggatccgatatcaactagatcttgaga

SEQ ID NO: 5940 - DNA, 170 bp, Artificial sequence
  Nf2.768_Setd2.143
  crRNA array
cgatttcttggctttatatatcttgtggaaaggacgaaacaccgtaatttctactaagtgtagatccgaagccccagtgtccggctaatttctactaagtgtagatgcacaaccacaacagactggttttttaagcttggcgtggatccgatatcaactagatcttgaga

SEQ ID NO: 5941 - DNA, 170 bp, Artificial sequence
  Nf2.768_Setd2.508
  crRNA array
cgatttcttggctttatatatcttgtggaaaggacgaaacaccgtaatttctactaagtgtagatccgaagccccagtgtccggctaatttctactaagtgtagattacgatcccgagcacccgacttttttaagcttggcgtggatccgatatcaactagatcttgaga

SEQ ID NO: 5942 - DNA, 170 bp, Artificial sequence
  Nf2.768_Smad4.3038
  crRNA array
cgatttcttggctttatatatcttgtggaaaggacgaaacaccgtaatttctactaagtgtagatccgaagccccagtgtccggctaatttctactaagtgtagatatctgcggcagtgtcaccggttttttaagcttggcgtggatccgatatcaactagatcttgaga

SEQ ID NO: 5943 - DNA, 170 bp, Artificial sequence
  Nf2.768_Smad4.39
  crRNA array
cgatttcttggctttatatatcttgtggaaaggacgaaacaccgtaatttctactaagtgtagatccgaagccccagtgtccggctaatttctactaagtgtagatagtcaaacgcatactgacaattttttaagcttggcgtggatccgatatcaactagatcttgaga

SEQ ID NO: 5944 - DNA, 170 bp, Artificial sequence
  Nf2.768_Stag2.1409
  crRNA array
cgatttcttggctttatatatcttgtggaaaggacgaaacaccgtaatttctactaagtgtagatccgaagccccagtgtccggctaatttctactaagtgtagatgctaataactgcggaagggcttttttaagcttggcgtggatccgatatcaactagatcttgaga

SEQ ID NO: 5945 - DNA, 170 bp, Artificial sequence
  Nf2.768_Stag2.4401
  crRNA array
cgatttcttggctttatatatcttgtggaaaggacgaaacaccgtaatttctactaagtgtagatccgaagccccagtgtccggctaatttctactaagtgtagattaatcgtccagtggtgtatattttttaagcttggcgtggatccgatatcaactagatcttgaga

SEQ ID NO: 5946 - DNA, 170 bp, Artificial sequence
  Nf2.768_Tbl1xr1.1
  crRNA array
cgatttcttggctttatatatcttgtggaaaggacgaaacaccgtaatttctactaagtgtagatccgaagccccagtgtccggctaatttctactaagtgtagatggatgcgcatactggtgaagttttttaagcttggcgtggatccgatatcaactagatcttgaga

SEQ ID NO: 5947 - DNA, 170 bp, Artificial sequence
  Nf2.768_Tbl1xr1.83
  crRNA array
cgatttcttggctttatatatcttgtggaaaggacgaaacaccgtaatttctactaagtgtagatccgaagccccagtgtccggctaatttctactaagtgtagatatggtcgacccatcgagtctttttttaagcttggcgtggatccgatatcaactagatcttgaga

SEQ ID NO: 5948 - DNA, 170 bp, Artificial sequence
  Nf2.768_Tgfbr2.290
  crRNA array
cgatttcttggctttatatatcttgtggaaaggacgaaacaccgtaatttctactaagtgtagatccgaagccccagtgtccggctaatttctactaagtgtagatcctctcggcgcccgggtaaattttttaagcttggcgtggatccgatatcaactagatcttgaga

SEQ ID NO: 5949 - DNA, 170 bp, Artificial sequence
  Nf2.768_Tgfbr2.292
  crRNA array
cgatttcttggctttatatatcttgtggaaaggacgaaacaccgtaatttctactaagtgtagatccgaagccccagtgtccggctaatttctactaagtgtagatcccgggcgccgagagggaaattttttaagcttggcgtggatccgatatcaactagatcttgaga

SEQ ID NO: 5950 - DNA, 170 bp, Artificial sequence
  Nf2.768_Trp53.4
  crRNA array
cgatttcttggctttatatatcttgtggaaaggacgaaacaccgtaatttctactaagtgtagatccgaagccccagtgtccggctaatttctactaagtgtagatccctgaactgcccccagggattttttaagcttggcgtggatccgatatcaactagatcttgaga

SEQ ID NO: 5951 - DNA, 170 bp, Artificial sequence
  Nf2.768_Trp53.528
  crRNA array
cgatttcttggctttatatatcttgtggaaaggacgaaacaccgtaatttctactaagtgtagatccgaagccccagtgtccggctaatttctactaagtgtagatgctgggccagcagagacctgttttttaagcttggcgtggatccgatatcaactagatcttgaga

SEQ ID NO: 5952 - DNA, 170 bp, Artificial sequence
  Nf2.768_Vhl.1
  crRNA array
cgatttcttggctttatatatcttgtggaaaggacgaaacaccgtaatttctactaagtgtagatccgaagccccagtgtccggctaatttctactaagtgtagatagggctcccggcggccatttttttttaagcttggcgtggatccgatatcaactagatcttgaga

SEQ ID NO: 5953 - DNA, 170 bp, Artificial sequence
  Nf2.768_Vhl.151
  crRNA array
cgatttcttggctttatatatcttgtggaaaggacgaaacaccgtaatttctactaagtgtagatccgaagccccagtgtccggctaatttctactaagtgtagattagagcactcacccgagggattttttaagcttggcgtggatccgatatcaactagatcttgaga

SEQ ID NO: 5954 - DNA, 170 bp, Artificial sequence
  Nf2.768_Zc3h13.1387
  crRNA array
cgatttcttggctttatatatcttgtggaaaggacgaaacaccgtaatttctactaagtgtagatccgaagccccagtgtccggctaatttctactaagtgtagatgtgacgccggtcatgtgactttttttaagcttggcgtggatccgatatcaactagatcttgaga

SEQ ID NO: 5955 - DNA, 170 bp, Artificial sequence
  Nf2.768_Zc3h13.1777
  crRNA array
cgatttcttggctttatatatcttgtggaaaggacgaaacaccgtaatttctactaagtgtagatccgaagccccagtgtccggctaatttctactaagtgtagatgatgctgccagtgtagcggcttttttaagcttggcgtggatccgatatcaactagatcttgaga

SEQ ID NO: 5956 - DNA, 170 bp, Artificial sequence
  Notch1.1849_Acvr2a.155
  crRNA array
cgatttcttggctttatatatcttgtggaaaggacgaaacaccgtaatttctactaagtgtagatctggcgggtgggcggcgctgtaatttctactaagtgtagatggacctggctaatcaagtatttttttaagcttggcgtggatccgatatcaactagatcttgaga

SEQ ID NO: 5957 - DNA, 170 bp, Artificial sequence
  Notch1.1849_Acvr2a.70
  crRNA array
cgatttcttggctttatatatcttgtggaaaggacgaaacaccgtaatttctactaagtgtagatctggcgggtgggcggcgctgtaatttctactaagtgtagatcccgaggcgccggagaagccttttttaagcttggcgtggatccgatatcaactagatcttgaga

SEQ ID NO: 5958 - DNA, 170 bp, Artificial sequence
  Notch1.1849_Apc.21
  crRNA array
cgatttcttggctttatatatcttgtggaaaggacgaaacaccgtaatttctactaagtgtagatctggcgggtgggcggcgctgtaatttctactaagtgtagatgtgatccacacgtgtagctgttttttaagcttggcgtggatccgatatcaactagatcttgaga

SEQ ID NO: 5959 - DNA, 170 bp, Artificial sequence
  Notch1.1849_Apc.867
  crRNA array
cgatttcttggctttatatatcttgtggaaaggacgaaacaccgtaatttctactaagtgtagatctggcgggtgggcggcgctgtaatttctactaagtgtagatcagtcccaggcggcggaagcttttttaagcttggcgtggatccgatatcaactagatcttgaga

SEQ ID NO: 5960 - DNA, 170 bp, Artificial sequence
  Notch1.1849_Arid1a.2
  crRNA array
cgatttcttggctttatatatcttgtggaaaggacgaaacaccgtaatttctactaagtgtagatctggcgggtgggcggcgctgtaatttctactaagtgtagatcccgcgcccccgtcctggggttttttaagcttggcgtggatccgatatcaactagatcttgaga

SEQ ID NO: 5961 - DNA, 170 bp, Artificial sequence
  Notch1.1849_Arid1a.5
  crRNA array
cgatttcttggctttatatatcttgtggaaaggacgaaacaccgtaatttctactaagtgtagatctggcgggtgggcggcgctgtaatttctactaagtgtagatcccgcgctcggccgctgccgttttttaagcttggcgtggatccgatatcaactagatcttgaga

SEQ ID NO: 5962 - DNA, 170 bp, Artificial sequence
  Notch1.1849_Arid2.166
  crRNA array
cgatttcttggctttatatatcttgtggaaaggacgaaacaccgtaatttctactaagtgtagatctggcgggtgggcggcgctgtaatttctactaagtgtagataaccgcgatctgggttttttttttttaagcttggcgtggatccgatatcaactagatcttgaga

SEQ ID NO: 5963 - DNA, 170 bp, Artificial sequence
  Notch1.1849_Arid2.172
  crRNA array
cgatttcttggctttatatatcttgtggaaaggacgaaacaccgtaatttctactaagtgtagatctggcgggtgggcggcgctgtaatttctactaagtgtagatctggacgagctgcggcagttttttttaagcttggcgtggatccgatatcaactagatcttgaga

SEQ ID NO: 5964 - DNA, 170 bp, Artificial sequence
  Notch1.1849_Atm.120
  crRNA array
cgatttcttggctttatatatcttgtggaaaggacgaaacaccgtaatttctactaagtgtagatctggcgggtgggcggcgctgtaatttctactaagtgtagatgacaggtagtcggcagctaattttttaagcttggcgtggatccgatatcaactagatcttgaga

SEQ ID NO: 5965 - DNA, 170 bp, Artificial sequence
  Notch1.1849_Atm.997
  crRNA array
cgatttcttggctttatatatcttgtggaaaggacgaaacaccgtaatttctactaagtgtagatctggcgggtgggcggcgctgtaatttctactaagtgtagatgagaaagtctccgaatcgttttttttaagcttggcgtggatccgatatcaactagatcttgaga

SEQ ID NO: 5966 - DNA, 170 bp, Artificial sequence
  Notch1.1849_Atrx.249
  crRNA array
cgatttcttggctttatatatcttgtggaaaggacgaaacaccgtaatttctactaagtgtagatctggcgggtgggcggcgctgtaatttctactaagtgtagattagccagtcgctcatatctcttttttaagcttggcgtggatccgatatcaactagatcttgaga

SEQ ID NO: 5967 - DNA, 170 bp, Artificial sequence
  Notch1.1849_Atrx.251
  crRNA array
cgatttcttggctttatatatcttgtggaaaggacgaaacaccgtaatttctactaagtgtagatctggcgggtgggcggcgctgtaatttctactaagtgtagatgccagtcgctcatatctctgttttttaagcttggcgtggatccgatatcaactagatcttgaga

SEQ ID NO: 5968 - DNA, 170 bp, Artificial sequence
  Notch1.1849_Bcor.203
  crRNA array
cgatttcttggctttatatatcttgtggaaaggacgaaacaccgtaatttctactaagtgtagatctggcgggtgggcggcgctgtaatttctactaagtgtagatccccggagcggagtccaggcttttttaagcttggcgtggatccgatatcaactagatcttgaga

SEQ ID NO: 5969 - DNA, 170 bp, Artificial sequence
  Notch1.1849_Bcor.475
  crRNA array
cgatttcttggctttatatatcttgtggaaaggacgaaacaccgtaatttctactaagtgtagatctggcgggtgggcggcgctgtaatttctactaagtgtagattgcaacccctctgtatgggattttttaagcttggcgtggatccgatatcaactagatcttgaga

SEQ ID NO: 5970 - DNA, 170 bp, Artificial sequence
  Notch1.1849_Brca1.112
  crRNA array
cgatttcttggctttatatatcttgtggaaaggacgaaacaccgtaatttctactaagtgtagatctggcgggtgggcggcgctgtaatttctactaagtgtagatctagacgctctgtggagactttttttaagcttggcgtggatccgatatcaactagatcttgaga

SEQ ID NO: 5971 - DNA, 170 bp, Artificial sequence
  Notch1.1849_Brca1.53
  crRNA array
cgatttcttggctttatatatcttgtggaaaggacgaaacaccgtaatttctactaagtgtagatctggcgggtgggcggcgctgtaatttctactaagtgtagataatgaggaggcgtcgatcatttttttaagcttggcgtggatccgatatcaactagatcttgaga

SEQ ID NO: 5972 - DNA, 170 bp, Artificial sequence
  Notch1.1849_Casp8.45
  crRNA array
cgatttcttggctttatatatcttgtggaaaggacgaaacaccgtaatttctactaagtgtagatctggcgggtgggcggcgctgtaatttctactaagtgtagatctaccgagatcctgtgaatgttttttaagcttggcgtggatccgatatcaactagatcttgaga

SEQ ID NO: 5973 - DNA, 170 bp, Artificial sequence
  Notch1.1849_Casp8.54
  crRNA array
cgatttcttggctttatatatcttgtggaaaggacgaaacaccgtaatttctactaagtgtagatctggcgggtgggcggcgctgtaatttctactaagtgtagatcagtgcagtcgtcgtaagatttttttaagcttggcgtggatccgatatcaactagatcttgaga

SEQ ID NO: 5974 - DNA, 170 bp, Artificial sequence
  Notch1.1849_Cbwd1.84
  crRNA array
cgatttcttggctttatatatcttgtggaaaggacgaaacaccgtaatttctactaagtgtagatctggcgggtgggcggcgctgtaatttctactaagtgtagatcacagcaggtaacatgccgcttttttaagcttggcgtggatccgatatcaactagatcttgaga

SEQ ID NO: 5975 - DNA, 170 bp, Artificial sequence
  Notch1.1849_Cbwd1.85
  crRNA array
cgatttcttggctttatatatcttgtggaaaggacgaaacaccgtaatttctactaagtgtagatctggcgggtgggcggcgctgtaatttctactaagtgtagatacagcaggtaacatgccgccttttttaagcttggcgtggatccgatatcaactagatcttgaga

SEQ ID NO: 5976 - DNA, 170 bp, Artificial sequence
  Notch1.1849_Cdh1.387
  crRNA array
cgatttcttggctttatatatcttgtggaaaggacgaaacaccgtaatttctactaagtgtagatctggcgggtgggcggcgctgtaatttctactaagtgtagatctcggcgtctgccgggtccgttttttaagcttggcgtggatccgatatcaactagatcttgaga

SEQ ID NO: 5977 - DNA, 170 bp, Artificial sequence
  Notch1.1849_Cdh1.58
  crRNA array
cgatttcttggctttatatatcttgtggaaaggacgaaacaccgtaatttctactaagtgtagatctggcgggtgggcggcgctgtaatttctactaagtgtagatctcgtccgcgcccgggactcttttttaagcttggcgtggatccgatatcaactagatcttgaga

SEQ ID NO: 5978 - DNA, 170 bp, Artificial sequence
  Notch1.1849_Cdkn2a.647
  crRNA array
cgatttcttggctttatatatcttgtggaaaggacgaaacaccgtaatttctactaagtgtagatctggcgggtgggcggcgctgtaatttctactaagtgtagatgcaatcacgggagggagcagttttttaagcttggcgtggatccgatatcaactagatcttgaga

SEQ ID NO: 5979 - DNA, 170 bp, Artificial sequence
  Notch1.1849_Cdkn2a.648
  crRNA array
cgatttcttggctttatatatcttgtggaaaggacgaaacaccgtaatttctactaagtgtagatctggcgggtgggcggcgctgtaatttctactaagtgtagatcaatcacgggagggagcagattttttaagcttggcgtggatccgatatcaactagatcttgaga

SEQ ID NO: 5980 - DNA, 170 bp, Artificial sequence
  Notch1.1849_Cic.162
  crRNA array
cgatttcttggctttatatatcttgtggaaaggacgaaacaccgtaatttctactaagtgtagatctggcgggtgggcggcgctgtaatttctactaagtgtagatcgcaggcgcgcccggcggagttttttaagcttggcgtggatccgatatcaactagatcttgaga

SEQ ID NO: 5981 - DNA, 170 bp, Artificial sequence
  Notch1.1849_Cic.164
  crRNA array
cgatttcttggctttatatatcttgtggaaaggacgaaacaccgtaatttctactaagtgtagatctggcgggtgggcggcgctgtaatttctactaagtgtagatcgggccctgggccggcggctttttttaagcttggcgtggatccgatatcaactagatcttgaga

SEQ ID NO: 5982 - DNA, 170 bp, Artificial sequence
  Notch1.1849_Ctcf.229
  crRNA array
cgatttcttggctttatatatcttgtggaaaggacgaaacaccgtaatttctactaagtgtagatctggcgggtgggcggcgctgtaatttctactaagtgtagatggctggtggctgatagtctgttttttaagcttggcgtggatccgatatcaactagatcttgaga

SEQ ID NO: 5983 - DNA, 170 bp, Artificial sequence
  Notch1.1849_Ctcf.809
  crRNA array
cgatttcttggctttatatatcttgtggaaaggacgaaacaccgtaatttctactaagtgtagatctggcgggtgggcggcgctgtaatttctactaagtgtagataagcgctatcatgatcccaattttttaagcttggcgtggatccgatatcaactagatcttgaga

SEQ ID NO: 5984 - DNA, 170 bp, Artificial sequence
  Notch1.1849_Elf3.826
  crRNA array
cgatttcttggctttatatatcttgtggaaaggacgaaacaccgtaatttctactaagtgtagatctggcgggtgggcggcgctgtaatttctactaagtgtagattccgagacatcctaatccacttttttaagcttggcgtggatccgatatcaactagatcttgaga

SEQ ID NO: 5985 - DNA, 170 bp, Artificial sequence
  Notch1.1849_Elf3.983
  crRNA array
cgatttcttggctttatatatcttgtggaaaggacgaaacaccgtaatttctactaagtgtagatctggcgggtgggcggcgctgtaatttctactaagtgtagattaggccccctaactggaccattttttaagcttggcgtggatccgatatcaactagatcttgaga

SEQ ID NO: 5986 - DNA, 170 bp, Artificial sequence
  Notch1.1849_Ep300.310
  crRNA array
cgatttcttggctttatatatcttgtggaaaggacgaaacaccgtaatttctactaagtgtagatctggcgggtgggcggcgctgtaatttctactaagtgtagatatggtacgacagtgaggaagttttttaagcttggcgtggatccgatatcaactagatcttgaga

SEQ ID NO: 5987 - DNA, 170 bp, Artificial sequence
  Notch1.1849_Ep300.587
  crRNA array
cgatttcttggctttatatatcttgtggaaaggacgaaacaccgtaatttctactaagtgtagatctggcgggtgggcggcgctgtaatttctactaagtgtagatcgccccggggcccccaaccattttttaagcttggcgtggatccgatatcaactagatcttgaga

SEQ ID NO: 5988 - DNA, 170 bp, Artificial sequence
  Notch1.1849_Epha2.126
  crRNA array
cgatttcttggctttatatatcttgtggaaaggacgaaacaccgtaatttctactaagtgtagatctggcgggtgggcggcgctgtaatttctactaagtgtagatcctgtgccgccgcggccgccttttttaagcttggcgtggatccgatatcaactagatcttgaga

SEQ ID NO: 5989 - DNA, 170 bp, Artificial sequence
  Notch1.1849_Epha2.5
  crRNA array
cgatttcttggctttatatatcttgtggaaaggacgaaacaccgtaatttctactaagtgtagatctggcgggtgggcggcgctgtaatttctactaagtgtagatcatgagctggcgccacccggttttttaagcttggcgtggatccgatatcaactagatcttgaga

SEQ ID NO: 5990 - DNA, 170 bp, Artificial sequence
  Notch1.1849_Fat1.105
  crRNA array
cgatttcttggctttatatatcttgtggaaaggacgaaacaccgtaatttctactaagtgtagatctggcgggtgggcggcgctgtaatttctactaagtgtagataactcgaggtgacaacaagtttttttaagcttggcgtggatccgatatcaactagatcttgaga

SEQ ID NO: 5991 - DNA, 170 bp, Artificial sequence
  Notch1.1849_Fat1.122
  crRNA array
cgatttcttggctttatatatcttgtggaaaggacgaaacaccgtaatttctactaagtgtagatctggcgggtgggcggcgctgtaatttctactaagtgtagatccatcgacatggaaacgggattttttaagcttggcgtggatccgatatcaactagatcttgaga

SEQ ID NO: 5992 - DNA, 170 bp, Artificial sequence
  Notch1.1849_Fbxw7.21
  crRNA array
cgatttcttggctttatatatcttgtggaaaggacgaaacaccgtaatttctactaagtgtagatctggcgggtgggcggcgctgtaatttctactaagtgtagattaatgtgccgtagaaacccattttttaagcttggcgtggatccgatatcaactagatcttgaga

SEQ ID NO: 5993 - DNA, 170 bp, Artificial sequence
  Notch1.1849_Fbxw7.23
  crRNA array
cgatttcttggctttatatatcttgtggaaaggacgaaacaccgtaatttctactaagtgtagatctggcgggtgggcggcgctgtaatttctactaagtgtagatatgtgccgtagaaacccatattttttaagcttggcgtggatccgatatcaactagatcttgaga

SEQ ID NO: 5994 - DNA, 170 bp, Artificial sequence
  Notch1.1849_Gata3.34
  crRNA array
cgatttcttggctttatatatcttgtggaaaggacgaaacaccgtaatttctactaagtgtagatctggcgggtgggcggcgctgtaatttctactaagtgtagatctaaactatcccgcaaagatttttttaagcttggcgtggatccgatatcaactagatcttgaga

SEQ ID NO: 5995 - DNA, 170 bp, Artificial sequence
  Notch1.1849_Gata3.47
  crRNA array
cgatttcttggctttatatatcttgtggaaaggacgaaacaccgtaatttctactaagtgtagatctggcgggtgggcggcgctgtaatttctactaagtgtagatcgtagtaggacgggacgtggttttttaagcttggcgtggatccgatatcaactagatcttgaga

SEQ ID NO: 5996 - DNA, 170 bp, Artificial sequence
  Notch1.1849_H2-Q2.1
  crRNA array
cgatttcttggctttatatatcttgtggaaaggacgaaacaccgtaatttctactaagtgtagatctggcgggtgggcggcgctgtaatttctactaagtgtagatagggcggccaccaacagcagttttttaagcttggcgtggatccgatatcaactagatcttgaga

SEQ ID NO: 5997 - DNA, 170 bp, Artificial sequence
  Notch1.1849_H2-Q2.2
  crRNA array
cgatttcttggctttatatatcttgtggaaaggacgaaacaccgtaatttctactaagtgtagatctggcgggtgggcggcgctgtaatttctactaagtgtagattaacctgcgcccgctgctgattttttaagcttggcgtggatccgatatcaactagatcttgaga

SEQ ID NO: 5998 - DNA, 170 bp, Artificial sequence
  Notch1.1849_Kdm5c.1878
  crRNA array
cgatttcttggctttatatatcttgtggaaaggacgaaacaccgtaatttctactaagtgtagatctggcgggtgggcggcgctgtaatttctactaagtgtagatagagcacggcacccgcccccttttttaagcttggcgtggatccgatatcaactagatcttgaga

SEQ ID NO: 5999 - DNA, 170 bp, Artificial sequence
  Notch1.1849_Kdm5c.1879
  crRNA array
cgatttcttggctttatatatcttgtggaaaggacgaaacaccgtaatttctactaagtgtagatctggcgggtgggcggcgctgtaatttctactaagtgtagatgagcacggcacccgccccccttttttaagcttggcgtggatccgatatcaactagatcttgaga

SEQ ID NO: 6000 - DNA, 170 bp, Artificial sequence
  Notch1.1849_Kdm6a.56
  crRNA array
cgatttcttggctttatatatcttgtggaaaggacgaaacaccgtaatttctactaagtgtagatctggcgggtgggcggcgctgtaatttctactaagtgtagattcgctgccgcctctcgcggcttttttaagcttggcgtggatccgatatcaactagatcttgaga

SEQ ID NO: 6001 - DNA, 170 bp, Artificial sequence
  Notch1.1849_Kdm6a.57
  crRNA array
cgatttcttggctttatatatcttgtggaaaggacgaaacaccgtaatttctactaagtgtagatctggcgggtgggcggcgctgtaatttctactaagtgtagatcgctgccgcctctcgcggcattttttaagcttggcgtggatccgatatcaactagatcttgaga

SEQ ID NO: 6002 - DNA, 170 bp, Artificial sequence
  Notch1.1849_Kmt2b.265
  crRNA array
cgatttcttggctttatatatcttgtggaaaggacgaaacaccgtaatttctactaagtgtagatctggcgggtgggcggcgctgtaatttctactaagtgtagatccccaagtgaagcccacctgttttttaagcttggcgtggatccgatatcaactagatcttgaga

SEQ ID NO: 6003 - DNA, 170 bp, Artificial sequence
  Notch1.1849_Kmt2b.298
  crRNA array
cgatttcttggctttatatatcttgtggaaaggacgaaacaccgtaatttctactaagtgtagatctggcgggtgggcggcgctgtaatttctactaagtgtagattccggcagggaccggctggcttttttaagcttggcgtggatccgatatcaactagatcttgaga

SEQ ID NO: 6004 - DNA, 170 bp, Artificial sequence
  Notch1.1849_Kmt2c.1962
  crRNA array
cgatttcttggctttatatatcttgtggaaaggacgaaacaccgtaatttctactaagtgtagatctggcgggtgggcggcgctgtaatttctactaagtgtagatgtgacgatctgtgccacaagttttttaagcttggcgtggatccgatatcaactagatcttgaga

SEQ ID NO: 6005 - DNA, 170 bp, Artificial sequence
  Notch1.1849_Kmt2c.2236
  crRNA array
cgatttcttggctttatatatcttgtggaaaggacgaaacaccgtaatttctactaagtgtagatctggcgggtgggcggcgctgtaatttctactaagtgtagatactcgacctccacctccctattttttaagcttggcgtggatccgatatcaactagatcttgaga

SEQ ID NO: 6006 - DNA, 170 bp, Artificial sequence
  Notch1.1849_Kmt2d.316
  crRNA array
cgatttcttggctttatatatcttgtggaaaggacgaaacaccgtaatttctactaagtgtagatctggcgggtgggcggcgctgtaatttctactaagtgtagatactccaggccacccaggtggttttttaagcttggcgtggatccgatatcaactagatcttgaga

SEQ ID NO: 6007 - DNA, 170 bp, Artificial sequence
  Notch1.1849_Kmt2d.416
  crRNA array
cgatttcttggctttatatatcttgtggaaaggacgaaacaccgtaatttctactaagtgtagatctggcgggtgggcggcgctgtaatttctactaagtgtagattaaacccccgggggaagggtttttttaagcttggcgtggatccgatatcaactagatcttgaga

SEQ ID NO: 6008 - DNA, 170 bp, Artificial sequence
  Notch1.1849_Map2k4.119
  crRNA array
cgatttcttggctttatatatcttgtggaaaggacgaaacaccgtaatttctactaagtgtagatctggcgggtgggcggcgctgtaatttctactaagtgtagattgctgtgtgggcggccacatttttttaagcttggcgtggatccgatatcaactagatcttgaga

SEQ ID NO: 6009 - DNA, 170 bp, Artificial sequence
  Notch1.1849_Map2k4.1261
  crRNA array
cgatttcttggctttatatatcttgtggaaaggacgaaacaccgtaatttctactaagtgtagatctggcgggtgggcggcgctgtaatttctactaagtgtagatgatgtagtaatgcggagtagttttttaagcttggcgtggatccgatatcaactagatcttgaga

SEQ ID NO: 6010 - DNA, 170 bp, Artificial sequence
  Notch1.1849_Map3k1.235
  crRNA array
cgatttcttggctttatatatcttgtggaaaggacgaaacaccgtaatttctactaagtgtagatctggcgggtgggcggcgctgtaatttctactaagtgtagataaaacgctactgatcgatcgttttttaagcttggcgtggatccgatatcaactagatcttgaga

SEQ ID NO: 6011 - DNA, 170 bp, Artificial sequence
  Notch1.1849_Map3k1.3838
  crRNA array
cgatttcttggctttatatatcttgtggaaaggacgaaacaccgtaatttctactaagtgtagatctggcgggtgggcggcgctgtaatttctactaagtgtagatccaacaacagggccccactattttttaagcttggcgtggatccgatatcaactagatcttgaga

SEQ ID NO: 6012 - DNA, 170 bp, Artificial sequence
  Notch1.1849_Mga.1655
  crRNA array
cgatttcttggctttatatatcttgtggaaaggacgaaacaccgtaatttctactaagtgtagatctggcgggtgggcggcgctgtaatttctactaagtgtagatcgagaagtggagagcatattttttttaagcttggcgtggatccgatatcaactagatcttgaga

SEQ ID NO: 6013 - DNA, 170 bp, Artificial sequence
  Notch1.1849_Mga.93
  crRNA array
cgatttcttggctttatatatcttgtggaaaggacgaaacaccgtaatttctactaagtgtagatctggcgggtgggcggcgctgtaatttctactaagtgtagatgagaaggctccccataatgtttttttaagcttggcgtggatccgatatcaactagatcttgaga

SEQ ID NO: 6014 - DNA, 170 bp, Artificial sequence
  Notch1.1849_Nf1.746
  crRNA array
cgatttcttggctttatatatcttgtggaaaggacgaaacaccgtaatttctactaagtgtagatctggcgggtgggcggcgctgtaatttctactaagtgtagattaagcataatgatgatgccattttttaagcttggcgtggatccgatatcaactagatcttgaga

SEQ ID NO: 6015 - DNA, 170 bp, Artificial sequence
  Notch1.1849_Nf1.97
  crRNA array
cgatttcttggctttatatatcttgtggaaaggacgaaacaccgtaatttctactaagtgtagatctggcgggtgggcggcgctgtaatttctactaagtgtagatagcccgctacatgctgatgcttttttaagcttggcgtggatccgatatcaactagatcttgaga

SEQ ID NO: 6016 - DNA, 170 bp, Artificial sequence
  Notch1.1849_Nf2.356
  crRNA array
cgatttcttggctttatatatcttgtggaaaggacgaaacaccgtaatttctactaagtgtagatctggcgggtgggcggcgctgtaatttctactaagtgtagatcggagtcatctgatagagatttttttaagcttggcgtggatccgatatcaactagatcttgaga

SEQ ID NO: 6017 - DNA, 170 bp, Artificial sequence
  Notch1.1849_Nf2.768
  crRNA array
cgatttcttggctttatatatcttgtggaaaggacgaaacaccgtaatttctactaagtgtagatctggcgggtgggcggcgctgtaatttctactaagtgtagatccgaagccccagtgtccggcttttttaagcttggcgtggatccgatatcaactagatcttgaga

SEQ ID NO: 6018 - DNA, 170 bp, Artificial sequence
  Notch1.1849_Nsd1.70
  crRNA array
cgatttcttggctttatatatcttgtggaaaggacgaaacaccgtaatttctactaagtgtagatctggcgggtgggcggcgctgtaatttctactaagtgtagatactggtgtggacgatgcagattttttaagcttggcgtggatccgatatcaactagatcttgaga

SEQ ID NO: 6019 - DNA, 170 bp, Artificial sequence
  Notch1.1849_Nsd1.90
  crRNA array
cgatttcttggctttatatatcttgtggaaaggacgaaacaccgtaatttctactaagtgtagatctggcgggtgggcggcgctgtaatttctactaagtgtagataggagctaacggcaagaatgttttttaagcttggcgtggatccgatatcaactagatcttgaga

SEQ ID NO: 6020 - DNA, 170 bp, Artificial sequence
  Notch1.1849_Pbrm1.1236
  crRNA array
cgatttcttggctttatatatcttgtggaaaggacgaaacaccgtaatttctactaagtgtagatctggcgggtgggcggcgctgtaatttctactaagtgtagatgccgataaaaccaacagccgttttttaagcttggcgtggatccgatatcaactagatcttgaga

SEQ ID NO: 6021 - DNA, 170 bp, Artificial sequence
  Notch1.1849_Pbrm1.969
  crRNA array
cgatttcttggctttatatatcttgtggaaaggacgaaacaccgtaatttctactaagtgtagatctggcgggtgggcggcgctgtaatttctactaagtgtagatgagccctaatgaacagctcattttttaagcttggcgtggatccgatatcaactagatcttgaga

SEQ ID NO: 6022 - DNA, 170 bp, Artificial sequence
  Notch1.1849_Pik3r1.76
  crRNA array
cgatttcttggctttatatatcttgtggaaaggacgaaacaccgtaatttctactaagtgtagatctggcgggtgggcggcgctgtaatttctactaagtgtagataaaacctatacggcccgcacttttttaagcttggcgtggatccgatatcaactagatcttgaga

SEQ ID NO: 6023 - DNA, 170 bp, Artificial sequence
  Notch1.1849_Pik3r1.77
  crRNA array
cgatttcttggctttatatatcttgtggaaaggacgaaacaccgtaatttctactaagtgtagatctggcgggtgggcggcgctgtaatttctactaagtgtagataaacctatacggcccgcactttttttaagcttggcgtggatccgatatcaactagatcttgaga

SEQ ID NO: 6024 - DNA, 170 bp, Artificial sequence
  Notch1.1849_Pten.240
  crRNA array
cgatttcttggctttatatatcttgtggaaaggacgaaacaccgtaatttctactaagtgtagatctggcgggtgggcggcgctgtaatttctactaagtgtagattgcatacgctatagctgcttttttttaagcttggcgtggatccgatatcaactagatcttgaga

SEQ ID NO: 6025 - DNA, 170 bp, Artificial sequence
  Notch1.1849_Pten.265
  crRNA array
cgatttcttggctttatatatcttgtggaaaggacgaaacaccgtaatttctactaagtgtagatctggcgggtgggcggcgctgtaatttctactaagtgtagataagcgtggtgcgtgacgcacttttttaagcttggcgtggatccgatatcaactagatcttgaga

SEQ ID NO: 6026 - DNA, 170 bp, Artificial sequence
  Notch1.1849_Rasa1.1478
  crRNA array
cgatttcttggctttatatatcttgtggaaaggacgaaacaccgtaatttctactaagtgtagatctggcgggtgggcggcgctgtaatttctactaagtgtagatcgataatggtctatgatgtcttttttaagcttggcgtggatccgatatcaactagatcttgaga

SEQ ID NO: 6027 - DNA, 170 bp, Artificial sequence
  Notch1.1849_Rasa1.223
  crRNA array
cgatttcttggctttatatatcttgtggaaaggacgaaacaccgtaatttctactaagtgtagatctggcgggtgggcggcgctgtaatttctactaagtgtagattccatggagtatcgtgctcgttttttaagcttggcgtggatccgatatcaactagatcttgaga

SEQ ID NO: 6028 - DNA, 170 bp, Artificial sequence
  Notch1.1849_Rb1.211
  crRNA array
cgatttcttggctttatatatcttgtggaaaggacgaaacaccgtaatttctactaagtgtagatctggcgggtgggcggcgctgtaatttctactaagtgtagattctgacatgatcgggtacctttttttaagcttggcgtggatccgatatcaactagatcttgaga

SEQ ID NO: 6029 - DNA, 170 bp, Artificial sequence
  Notch1.1849_Rb1.394
  crRNA array
cgatttcttggctttatatatcttgtggaaaggacgaaacaccgtaatttctactaagtgtagatctggcgggtgggcggcgctgtaatttctactaagtgtagatagaaatctcgaagcaggatcttttttaagcttggcgtggatccgatatcaactagatcttgaga

SEQ ID NO: 6030 - DNA, 170 bp, Artificial sequence
  Notch1.1849_Rbm10.5
  crRNA array
cgatttcttggctttatatatcttgtggaaaggacgaaacaccgtaatttctactaagtgtagatctggcgggtgggcggcgctgtaatttctactaagtgtagatacgaaacctgaacccacacattttttaagcttggcgtggatccgatatcaactagatcttgaga

SEQ ID NO: 6031 - DNA, 170 bp, Artificial sequence
  Notch1.1849_Rbm10.6
  crRNA array
cgatttcttggctttatatatcttgtggaaaggacgaaacaccgtaatttctactaagtgtagatctggcgggtgggcggcgctgtaatttctactaagtgtagatcgaaacctgaacccacacagttttttaagcttggcgtggatccgatatcaactagatcttgaga

SEQ ID NO: 6032 - DNA, 170 bp, Artificial sequence
  Notch1.1849_Rnf43.1920
  crRNA array
cgatttcttggctttatatatcttgtggaaaggacgaaacaccgtaatttctactaagtgtagatctggcgggtgggcggcgctgtaatttctactaagtgtagatatccccgtgccgtggactccttttttaagcttggcgtggatccgatatcaactagatcttgaga

SEQ ID NO: 6033 - DNA, 170 bp, Artificial sequence
  Notch1.1849_Rnf43.39
  crRNA array
cgatttcttggctttatatatcttgtggaaaggacgaaacaccgtaatttctactaagtgtagatctggcgggtgggcggcgctgtaatttctactaagtgtagatcaaggggatcactctgataattttttaagcttggcgtggatccgatatcaactagatcttgaga

SEQ ID NO: 6034 - DNA, 170 bp, Artificial sequence
  Notch1.1849_Runx1.204
  crRNA array
cgatttcttggctttatatatcttgtggaaaggacgaaacaccgtaatttctactaagtgtagatctggcgggtgggcggcgctgtaatttctactaagtgtagattaaataagtccagccgttttttttttaagcttggcgtggatccgatatcaactagatcttgaga

SEQ ID NO: 6035 - DNA, 170 bp, Artificial sequence
  Notch1.1849_Runx1.81
  crRNA array
cgatttcttggctttatatatcttgtggaaaggacgaaacaccgtaatttctactaagtgtagatctggcgggtgggcggcgctgtaatttctactaagtgtagataggacgcgtatgggaattttttttttaagcttggcgtggatccgatatcaactagatcttgaga

SEQ ID NO: 6036 - DNA, 170 bp, Artificial sequence
  Notch1.1849_Setd2.143
  crRNA array
cgatttcttggctttatatatcttgtggaaaggacgaaacaccgtaatttctactaagtgtagatctggcgggtgggcggcgctgtaatttctactaagtgtagatgcacaaccacaacagactggttttttaagcttggcgtggatccgatatcaactagatcttgaga

SEQ ID NO: 6037 - DNA, 170 bp, Artificial sequence
  Notch1.1849_Setd2.508
  crRNA array
cgatttcttggctttatatatcttgtggaaaggacgaaacaccgtaatttctactaagtgtagatctggcgggtgggcggcgctgtaatttctactaagtgtagattacgatcccgagcacccgacttttttaagcttggcgtggatccgatatcaactagatcttgaga

SEQ ID NO: 6038 - DNA, 170 bp, Artificial sequence
  Notch1.1849_Smad4.3038
  crRNA array
cgatttcttggctttatatatcttgtggaaaggacgaaacaccgtaatttctactaagtgtagatctggcgggtgggcggcgctgtaatttctactaagtgtagatatctgcggcagtgtcaccggttttttaagcttggcgtggatccgatatcaactagatcttgaga

SEQ ID NO: 6039 - DNA, 170 bp, Artificial sequence
  Notch1.1849_Smad4.39
  crRNA array
cgatttcttggctttatatatcttgtggaaaggacgaaacaccgtaatttctactaagtgtagatctggcgggtgggcggcgctgtaatttctactaagtgtagatagtcaaacgcatactgacaattttttaagcttggcgtggatccgatatcaactagatcttgaga

SEQ ID NO: 6040 - DNA, 170 bp, Artificial sequence
  Notch1.1849_Stag2.1409
  crRNA array
cgatttcttggctttatatatcttgtggaaaggacgaaacaccgtaatttctactaagtgtagatctggcgggtgggcggcgctgtaatttctactaagtgtagatgctaataactgcggaagggcttttttaagcttggcgtggatccgatatcaactagatcttgaga

SEQ ID NO: 6041 - DNA, 170 bp, Artificial sequence
  Notch1.1849_Stag2.4401
  crRNA array
cgatttcttggctttatatatcttgtggaaaggacgaaacaccgtaatttctactaagtgtagatctggcgggtgggcggcgctgtaatttctactaagtgtagattaatcgtccagtggtgtatattttttaagcttggcgtggatccgatatcaactagatcttgaga

SEQ ID NO: 6042 - DNA, 170 bp, Artificial sequence
  Notch1.1849_Tbl1xr1.1
  crRNA array
cgatttcttggctttatatatcttgtggaaaggacgaaacaccgtaatttctactaagtgtagatctggcgggtgggcggcgctgtaatttctactaagtgtagatggatgcgcatactggtgaagttttttaagcttggcgtggatccgatatcaactagatcttgaga

SEQ ID NO: 6043 - DNA, 170 bp, Artificial sequence
  Notch1.1849_Tbl1xr1.83
  crRNA array
cgatttcttggctttatatatcttgtggaaaggacgaaacaccgtaatttctactaagtgtagatctggcgggtgggcggcgctgtaatttctactaagtgtagatatggtcgacccatcgagtctttttttaagcttggcgtggatccgatatcaactagatcttgaga

SEQ ID NO: 6044 - DNA, 170 bp, Artificial sequence
  Notch1.1849_Tgfbr2.290
  crRNA array
cgatttcttggctttatatatcttgtggaaaggacgaaacaccgtaatttctactaagtgtagatctggcgggtgggcggcgctgtaatttctactaagtgtagatcctctcggcgcccgggtaaattttttaagcttggcgtggatccgatatcaactagatcttgaga

SEQ ID NO: 6045 - DNA, 170 bp, Artificial sequence
  Notch1.1849_Tgfbr2.292
  crRNA array
cgatttcttggctttatatatcttgtggaaaggacgaaacaccgtaatttctactaagtgtagatctggcgggtgggcggcgctgtaatttctactaagtgtagatcccgggcgccgagagggaaattttttaagcttggcgtggatccgatatcaactagatcttgaga

SEQ ID NO: 6046 - DNA, 170 bp, Artificial sequence
  Notch1.1849_Trp53.4
  crRNA array
cgatttcttggctttatatatcttgtggaaaggacgaaacaccgtaatttctactaagtgtagatctggcgggtgggcggcgctgtaatttctactaagtgtagatccctgaactgcccccagggattttttaagcttggcgtggatccgatatcaactagatcttgaga

SEQ ID NO: 6047 - DNA, 170 bp, Artificial sequence
  Notch1.1849_Trp53.528
  crRNA array
cgatttcttggctttatatatcttgtggaaaggacgaaacaccgtaatttctactaagtgtagatctggcgggtgggcggcgctgtaatttctactaagtgtagatgctgggccagcagagacctgttttttaagcttggcgtggatccgatatcaactagatcttgaga

SEQ ID NO: 6048 - DNA, 170 bp, Artificial sequence
  Notch1.1849_Vhl.1
  crRNA array
cgatttcttggctttatatatcttgtggaaaggacgaaacaccgtaatttctactaagtgtagatctggcgggtgggcggcgctgtaatttctactaagtgtagatagggctcccggcggccatttttttttaagcttggcgtggatccgatatcaactagatcttgaga

SEQ ID NO: 6049 - DNA, 170 bp, Artificial sequence
  Notch1.1849_Vhl.151
  crRNA array
cgatttcttggctttatatatcttgtggaaaggacgaaacaccgtaatttctactaagtgtagatctggcgggtgggcggcgctgtaatttctactaagtgtagattagagcactcacccgagggattttttaagcttggcgtggatccgatatcaactagatcttgaga

SEQ ID NO: 6050 - DNA, 170 bp, Artificial sequence
  Notch1.1849_Zc3h13.1387
  crRNA array
cgatttcttggctttatatatcttgtggaaaggacgaaacaccgtaatttctactaagtgtagatctggcgggtgggcggcgctgtaatttctactaagtgtagatgtgacgccggtcatgtgactttttttaagcttggcgtggatccgatatcaactagatcttgaga

SEQ ID NO: 6051 - DNA, 170 bp, Artificial sequence
  Notch1.1849_Zc3h13.1777
  crRNA array
cgatttcttggctttatatatcttgtggaaaggacgaaacaccgtaatttctactaagtgtagatctggcgggtgggcggcgctgtaatttctactaagtgtagatgatgctgccagtgtagcggcttttttaagcttggcgtggatccgatatcaactagatcttgaga

SEQ ID NO: 6052 - DNA, 170 bp, Artificial sequence
  Notch1.649_Acvr2a.155
  crRNA array
cgatttcttggctttatatatcttgtggaaaggacgaaacaccgtaatttctactaagtgtagattgggccaacgatgccaggactaatttctactaagtgtagatggacctggctaatcaagtatttttttaagcttggcgtggatccgatatcaactagatcttgaga

SEQ ID NO: 6053 - DNA, 170 bp, Artificial sequence
  Notch1.649_Acvr2a.70
  crRNA array
cgatttcttggctttatatatcttgtggaaaggacgaaacaccgtaatttctactaagtgtagattgggccaacgatgccaggactaatttctactaagtgtagatcccgaggcgccggagaagccttttttaagcttggcgtggatccgatatcaactagatcttgaga

SEQ ID NO: 6054 - DNA, 170 bp, Artificial sequence
  Notch1.649_Apc.21
  crRNA array
cgatttcttggctttatatatcttgtggaaaggacgaaacaccgtaatttctactaagtgtagattgggccaacgatgccaggactaatttctactaagtgtagatgtgatccacacgtgtagctgttttttaagcttggcgtggatccgatatcaactagatcttgaga

SEQ ID NO: 6055 - DNA, 170 bp, Artificial sequence
  Notch1.649_Apc.867
  crRNA array
cgatttcttggctttatatatcttgtggaaaggacgaaacaccgtaatttctactaagtgtagattgggccaacgatgccaggactaatttctactaagtgtagatcagtcccaggcggcggaagcttttttaagcttggcgtggatccgatatcaactagatcttgaga

SEQ ID NO: 6056 - DNA, 170 bp, Artificial sequence
  Notch1.649_Arid1a.2
  crRNA array
cgatttcttggctttatatatcttgtggaaaggacgaaacaccgtaatttctactaagtgtagattgggccaacgatgccaggactaatttctactaagtgtagatcccgcgcccccgtcctggggttttttaagcttggcgtggatccgatatcaactagatcttgaga

SEQ ID NO: 6057 - DNA, 170 bp, Artificial sequence
  Notch1.649_Arid1a.5
  crRNA array
cgatttcttggctttatatatcttgtggaaaggacgaaacaccgtaatttctactaagtgtagattgggccaacgatgccaggactaatttctactaagtgtagatcccgcgctcggccgctgccgttttttaagcttggcgtggatccgatatcaactagatcttgaga

SEQ ID NO: 6058 - DNA, 170 bp, Artificial sequence
  Notch1.649_Arid2.166
  crRNA array
cgatttcttggctttatatatcttgtggaaaggacgaaacaccgtaatttctactaagtgtagattgggccaacgatgccaggactaatttctactaagtgtagataaccgcgatctgggttttttttttttaagcttggcgtggatccgatatcaactagatcttgaga

SEQ ID NO: 6059 - DNA, 170 bp, Artificial sequence
  Notch1.649_Arid2.172
  crRNA array
cgatttcttggctttatatatcttgtggaaaggacgaaacaccgtaatttctactaagtgtagattgggccaacgatgccaggactaatttctactaagtgtagatctggacgagctgcggcagttttttttaagcttggcgtggatccgatatcaactagatcttgaga

SEQ ID NO: 6060 - DNA, 170 bp, Artificial sequence
  Notch1.649_Atm.120
  crRNA array
cgatttcttggctttatatatcttgtggaaaggacgaaacaccgtaatttctactaagtgtagattgggccaacgatgccaggactaatttctactaagtgtagatgacaggtagtcggcagctaattttttaagcttggcgtggatccgatatcaactagatcttgaga

SEQ ID NO: 6061 - DNA, 170 bp, Artificial sequence
  Notch1.649_Atm.997
  crRNA array
cgatttcttggctttatatatcttgtggaaaggacgaaacaccgtaatttctactaagtgtagattgggccaacgatgccaggactaatttctactaagtgtagatgagaaagtctccgaatcgttttttttaagcttggcgtggatccgatatcaactagatcttgaga

SEQ ID NO: 6062 - DNA, 170 bp, Artificial sequence
  Notch1.649_Atrx.249
  crRNA array
cgatttcttggctttatatatcttgtggaaaggacgaaacaccgtaatttctactaagtgtagattgggccaacgatgccaggactaatttctactaagtgtagattagccagtcgctcatatctcttttttaagcttggcgtggatccgatatcaactagatcttgaga

SEQ ID NO: 6063 - DNA, 170 bp, Artificial sequence
  Notch1.649_Atrx.251
  crRNA array
cgatttcttggctttatatatcttgtggaaaggacgaaacaccgtaatttctactaagtgtagattgggccaacgatgccaggactaatttctactaagtgtagatgccagtcgctcatatctctgttttttaagcttggcgtggatccgatatcaactagatcttgaga

SEQ ID NO: 6064 - DNA, 170 bp, Artificial sequence
  Notch1.649_Bcor.203
  crRNA array
cgatttcttggctttatatatcttgtggaaaggacgaaacaccgtaatttctactaagtgtagattgggccaacgatgccaggactaatttctactaagtgtagatccccggagcggagtccaggcttttttaagcttggcgtggatccgatatcaactagatcttgaga

SEQ ID NO: 6065 - DNA, 170 bp, Artificial sequence
  Notch1.649_Bcor.475
  crRNA array
cgatttcttggctttatatatcttgtggaaaggacgaaacaccgtaatttctactaagtgtagattgggccaacgatgccaggactaatttctactaagtgtagattgcaacccctctgtatgggattttttaagcttggcgtggatccgatatcaactagatcttgaga

SEQ ID NO: 6066 - DNA, 170 bp, Artificial sequence
  Notch1.649_Brca1.112
  crRNA array
cgatttcttggctttatatatcttgtggaaaggacgaaacaccgtaatttctactaagtgtagattgggccaacgatgccaggactaatttctactaagtgtagatctagacgctctgtggagactttttttaagcttggcgtggatccgatatcaactagatcttgaga

SEQ ID NO: 6067 - DNA, 170 bp, Artificial sequence
  Notch1.649_Brca1.53
  crRNA array
cgatttcttggctttatatatcttgtggaaaggacgaaacaccgtaatttctactaagtgtagattgggccaacgatgccaggactaatttctactaagtgtagataatgaggaggcgtcgatcatttttttaagcttggcgtggatccgatatcaactagatcttgaga

SEQ ID NO: 6068 - DNA, 170 bp, Artificial sequence
  Notch1.649_Casp8.45
  crRNA array
cgatttcttggctttatatatcttgtggaaaggacgaaacaccgtaatttctactaagtgtagattgggccaacgatgccaggactaatttctactaagtgtagatctaccgagatcctgtgaatgttttttaagcttggcgtggatccgatatcaactagatcttgaga

SEQ ID NO: 6069 - DNA, 170 bp, Artificial sequence
  Notch1.649_Casp8.54
  crRNA array
cgatttcttggctttatatatcttgtggaaaggacgaaacaccgtaatttctactaagtgtagattgggccaacgatgccaggactaatttctactaagtgtagatcagtgcagtcgtcgtaagatttttttaagcttggcgtggatccgatatcaactagatcttgaga

SEQ ID NO: 6070 - DNA, 170 bp, Artificial sequence
  Notch1.649_Cbwd1.84
  crRNA array
cgatttcttggctttatatatcttgtggaaaggacgaaacaccgtaatttctactaagtgtagattgggccaacgatgccaggactaatttctactaagtgtagatcacagcaggtaacatgccgcttttttaagcttggcgtggatccgatatcaactagatcttgaga

SEQ ID NO: 6071 - DNA, 170 bp, Artificial sequence
  Notch1.649_Cbwd1.85
  crRNA array
cgatttcttggctttatatatcttgtggaaaggacgaaacaccgtaatttctactaagtgtagattgggccaacgatgccaggactaatttctactaagtgtagatacagcaggtaacatgccgccttttttaagcttggcgtggatccgatatcaactagatcttgaga

SEQ ID NO: 6072 - DNA, 170 bp, Artificial sequence
  Notch1.649_Cdh1.387
  crRNA array
cgatttcttggctttatatatcttgtggaaaggacgaaacaccgtaatttctactaagtgtagattgggccaacgatgccaggactaatttctactaagtgtagatctcggcgtctgccgggtccgttttttaagcttggcgtggatccgatatcaactagatcttgaga

SEQ ID NO: 6073 - DNA, 170 bp, Artificial sequence
  Notch1.649_Cdh1.58
  crRNA array
cgatttcttggctttatatatcttgtggaaaggacgaaacaccgtaatttctactaagtgtagattgggccaacgatgccaggactaatttctactaagtgtagatctcgtccgcgcccgggactcttttttaagcttggcgtggatccgatatcaactagatcttgaga

SEQ ID NO: 6074 - DNA, 170 bp, Artificial sequence
  Notch1.649_Cdkn2a.647
  crRNA array
cgatttcttggctttatatatcttgtggaaaggacgaaacaccgtaatttctactaagtgtagattgggccaacgatgccaggactaatttctactaagtgtagatgcaatcacgggagggagcagttttttaagcttggcgtggatccgatatcaactagatcttgaga

SEQ ID NO: 6075 - DNA, 170 bp, Artificial sequence
  Notch1.649_Cdkn2a.648
  crRNA array
cgatttcttggctttatatatcttgtggaaaggacgaaacaccgtaatttctactaagtgtagattgggccaacgatgccaggactaatttctactaagtgtagatcaatcacgggagggagcagattttttaagcttggcgtggatccgatatcaactagatcttgaga

SEQ ID NO: 6076 - DNA, 170 bp, Artificial sequence
  Notch1.649_Cic.162
  crRNA array
cgatttcttggctttatatatcttgtggaaaggacgaaacaccgtaatttctactaagtgtagattgggccaacgatgccaggactaatttctactaagtgtagatcgcaggcgcgcccggcggagttttttaagcttggcgtggatccgatatcaactagatcttgaga

SEQ ID NO: 6077 - DNA, 170 bp, Artificial sequence
  Notch1.649_Cic.164
  crRNA array
cgatttcttggctttatatatcttgtggaaaggacgaaacaccgtaatttctactaagtgtagattgggccaacgatgccaggactaatttctactaagtgtagatcgggccctgggccggcggctttttttaagcttggcgtggatccgatatcaactagatcttgaga

SEQ ID NO: 6078 - DNA, 170 bp, Artificial sequence
  Notch1.649_Ctcf.229
  crRNA array
cgatttcttggctttatatatcttgtggaaaggacgaaacaccgtaatttctactaagtgtagattgggccaacgatgccaggactaatttctactaagtgtagatggctggtggctgatagtctgttttttaagcttggcgtggatccgatatcaactagatcttgaga

SEQ ID NO: 6079 - DNA, 170 bp, Artificial sequence
  Notch1.649_Ctcf.809
  crRNA array
cgatttcttggctttatatatcttgtggaaaggacgaaacaccgtaatttctactaagtgtagattgggccaacgatgccaggactaatttctactaagtgtagataagcgctatcatgatcccaattttttaagcttggcgtggatccgatatcaactagatcttgaga

SEQ ID NO: 6080 - DNA, 170 bp, Artificial sequence
  Notch1.649_Elf3.826
  crRNA array
cgatttcttggctttatatatcttgtggaaaggacgaaacaccgtaatttctactaagtgtagattgggccaacgatgccaggactaatttctactaagtgtagattccgagacatcctaatccacttttttaagcttggcgtggatccgatatcaactagatcttgaga

SEQ ID NO: 6081 - DNA, 170 bp, Artificial sequence
  Notch1.649_Elf3.983
  crRNA array
cgatttcttggctttatatatcttgtggaaaggacgaaacaccgtaatttctactaagtgtagattgggccaacgatgccaggactaatttctactaagtgtagattaggccccctaactggaccattttttaagcttggcgtggatccgatatcaactagatcttgaga

SEQ ID NO: 6082 - DNA, 170 bp, Artificial sequence
  Notch1.649_Ep300.310
  crRNA array
cgatttcttggctttatatatcttgtggaaaggacgaaacaccgtaatttctactaagtgtagattgggccaacgatgccaggactaatttctactaagtgtagatatggtacgacagtgaggaagttttttaagcttggcgtggatccgatatcaactagatcttgaga

SEQ ID NO: 6083 - DNA, 170 bp, Artificial sequence
  Notch1.649_Ep300.587
  crRNA array
cgatttcttggctttatatatcttgtggaaaggacgaaacaccgtaatttctactaagtgtagattgggccaacgatgccaggactaatttctactaagtgtagatcgccccggggcccccaaccattttttaagcttggcgtggatccgatatcaactagatcttgaga

SEQ ID NO: 6084 - DNA, 170 bp, Artificial sequence
  Notch1.649_Epha2.126
  crRNA array
cgatttcttggctttatatatcttgtggaaaggacgaaacaccgtaatttctactaagtgtagattgggccaacgatgccaggactaatttctactaagtgtagatcctgtgccgccgcggccgccttttttaagcttggcgtggatccgatatcaactagatcttgaga

SEQ ID NO: 6085 - DNA, 170 bp, Artificial sequence
  Notch1.649_Epha2.5
  crRNA array
cgatttcttggctttatatatcttgtggaaaggacgaaacaccgtaatttctactaagtgtagattgggccaacgatgccaggactaatttctactaagtgtagatcatgagctggcgccacccggttttttaagcttggcgtggatccgatatcaactagatcttgaga

SEQ ID NO: 6086 - DNA, 170 bp, Artificial sequence
  Notch1.649_Fat1.105
  crRNA array
cgatttcttggctttatatatcttgtggaaaggacgaaacaccgtaatttctactaagtgtagattgggccaacgatgccaggactaatttctactaagtgtagataactcgaggtgacaacaagtttttttaagcttggcgtggatccgatatcaactagatcttgaga

SEQ ID NO: 6087 - DNA, 170 bp, Artificial sequence
  Notch1.649_Fat1.122
  crRNA array
cgatttcttggctttatatatcttgtggaaaggacgaaacaccgtaatttctactaagtgtagattgggccaacgatgccaggactaatttctactaagtgtagatccatcgacatggaaacgggattttttaagcttggcgtggatccgatatcaactagatcttgaga

SEQ ID NO: 6088 - DNA, 170 bp, Artificial sequence
  Notch1.649_Fbxw7.21
  crRNA array
cgatttcttggctttatatatcttgtggaaaggacgaaacaccgtaatttctactaagtgtagattgggccaacgatgccaggactaatttctactaagtgtagattaatgtgccgtagaaacccattttttaagcttggcgtggatccgatatcaactagatcttgaga

SEQ ID NO: 6089 - DNA, 170 bp, Artificial sequence
  Notch1.649_Fbxw7.23
  crRNA array
cgatttcttggctttatatatcttgtggaaaggacgaaacaccgtaatttctactaagtgtagattgggccaacgatgccaggactaatttctactaagtgtagatatgtgccgtagaaacccatattttttaagcttggcgtggatccgatatcaactagatcttgaga

SEQ ID NO: 6090 - DNA, 170 bp, Artificial sequence
  Notch1.649_Gata3.34
  crRNA array
cgatttcttggctttatatatcttgtggaaaggacgaaacaccgtaatttctactaagtgtagattgggccaacgatgccaggactaatttctactaagtgtagatctaaactatcccgcaaagatttttttaagcttggcgtggatccgatatcaactagatcttgaga

SEQ ID NO: 6091 - DNA, 170 bp, Artificial sequence
  Notch1.649_Gata3.47
  crRNA array
cgatttcttggctttatatatcttgtggaaaggacgaaacaccgtaatttctactaagtgtagattgggccaacgatgccaggactaatttctactaagtgtagatcgtagtaggacgggacgtggttttttaagcttggcgtggatccgatatcaactagatcttgaga

SEQ ID NO: 6092 - DNA, 170 bp, Artificial sequence
  Notch1.649_H2-Q2.1
  crRNA array
cgatttcttggctttatatatcttgtggaaaggacgaaacaccgtaatttctactaagtgtagattgggccaacgatgccaggactaatttctactaagtgtagatagggcggccaccaacagcagttttttaagcttggcgtggatccgatatcaactagatcttgaga

SEQ ID NO: 6093 - DNA, 170 bp, Artificial sequence
  Notch1.649_H2-Q2.2
  crRNA array
cgatttcttggctttatatatcttgtggaaaggacgaaacaccgtaatttctactaagtgtagattgggccaacgatgccaggactaatttctactaagtgtagattaacctgcgcccgctgctgattttttaagcttggcgtggatccgatatcaactagatcttgaga

SEQ ID NO: 6094 - DNA, 170 bp, Artificial sequence
  Notch1.649_Kdm5c.1878
  crRNA array
cgatttcttggctttatatatcttgtggaaaggacgaaacaccgtaatttctactaagtgtagattgggccaacgatgccaggactaatttctactaagtgtagatagagcacggcacccgcccccttttttaagcttggcgtggatccgatatcaactagatcttgaga

SEQ ID NO: 6095 - DNA, 170 bp, Artificial sequence
  Notch1.649_Kdm5c.1879
  crRNA array
cgatttcttggctttatatatcttgtggaaaggacgaaacaccgtaatttctactaagtgtagattgggccaacgatgccaggactaatttctactaagtgtagatgagcacggcacccgccccccttttttaagcttggcgtggatccgatatcaactagatcttgaga

SEQ ID NO: 6096 - DNA, 170 bp, Artificial sequence
  Notch1.649_Kdm6a.56
  crRNA array
cgatttcttggctttatatatcttgtggaaaggacgaaacaccgtaatttctactaagtgtagattgggccaacgatgccaggactaatttctactaagtgtagattcgctgccgcctctcgcggcttttttaagcttggcgtggatccgatatcaactagatcttgaga

SEQ ID NO: 6097 - DNA, 170 bp, Artificial sequence
  Notch1.649_Kdm6a.57
  crRNA array
cgatttcttggctttatatatcttgtggaaaggacgaaacaccgtaatttctactaagtgtagattgggccaacgatgccaggactaatttctactaagtgtagatcgctgccgcctctcgcggcattttttaagcttggcgtggatccgatatcaactagatcttgaga

SEQ ID NO: 6098 - DNA, 170 bp, Artificial sequence
  Notch1.649_Kmt2b.265
  crRNA array
cgatttcttggctttatatatcttgtggaaaggacgaaacaccgtaatttctactaagtgtagattgggccaacgatgccaggactaatttctactaagtgtagatccccaagtgaagcccacctgttttttaagcttggcgtggatccgatatcaactagatcttgaga

SEQ ID NO: 6099 - DNA, 170 bp, Artificial sequence
  Notch1.649_Kmt2b.298
  crRNA array
cgatttcttggctttatatatcttgtggaaaggacgaaacaccgtaatttctactaagtgtagattgggccaacgatgccaggactaatttctactaagtgtagattccggcagggaccggctggcttttttaagcttggcgtggatccgatatcaactagatcttgaga

SEQ ID NO: 6100 - DNA, 170 bp, Artificial sequence
  Notch1.649_Kmt2c.1962
  crRNA array
cgatttcttggctttatatatcttgtggaaaggacgaaacaccgtaatttctactaagtgtagattgggccaacgatgccaggactaatttctactaagtgtagatgtgacgatctgtgccacaagttttttaagcttggcgtggatccgatatcaactagatcttgaga

SEQ ID NO: 6101 - DNA, 170 bp, Artificial sequence
  Notch1.649_Kmt2c.2236
  crRNA array
cgatttcttggctttatatatcttgtggaaaggacgaaacaccgtaatttctactaagtgtagattgggccaacgatgccaggactaatttctactaagtgtagatactcgacctccacctccctattttttaagcttggcgtggatccgatatcaactagatcttgaga

SEQ ID NO: 6102 - DNA, 170 bp, Artificial sequence
  Notch1.649_Kmt2d.316
  crRNA array
cgatttcttggctttatatatcttgtggaaaggacgaaacaccgtaatttctactaagtgtagattgggccaacgatgccaggactaatttctactaagtgtagatactccaggccacccaggtggttttttaagcttggcgtggatccgatatcaactagatcttgaga

SEQ ID NO: 6103 - DNA, 170 bp, Artificial sequence
  Notch1.649_Kmt2d.416
  crRNA array
cgatttcttggctttatatatcttgtggaaaggacgaaacaccgtaatttctactaagtgtagattgggccaacgatgccaggactaatttctactaagtgtagattaaacccccgggggaagggtttttttaagcttggcgtggatccgatatcaactagatcttgaga

SEQ ID NO: 6104 - DNA, 170 bp, Artificial sequence
  Notch1.649_Map2k4.119
  crRNA array
cgatttcttggctttatatatcttgtggaaaggacgaaacaccgtaatttctactaagtgtagattgggccaacgatgccaggactaatttctactaagtgtagattgctgtgtgggcggccacatttttttaagcttggcgtggatccgatatcaactagatcttgaga

SEQ ID NO: 6105 - DNA, 170 bp, Artificial sequence
  Notch1.649_Map2k4.1261
  crRNA array
cgatttcttggctttatatatcttgtggaaaggacgaaacaccgtaatttctactaagtgtagattgggccaacgatgccaggactaatttctactaagtgtagatgatgtagtaatgcggagtagttttttaagcttggcgtggatccgatatcaactagatcttgaga

SEQ ID NO: 6106 - DNA, 170 bp, Artificial sequence
  Notch1.649_Map3k1.235
  crRNA array
cgatttcttggctttatatatcttgtggaaaggacgaaacaccgtaatttctactaagtgtagattgggccaacgatgccaggactaatttctactaagtgtagataaaacgctactgatcgatcgttttttaagcttggcgtggatccgatatcaactagatcttgaga

SEQ ID NO: 6107 - DNA, 170 bp, Artificial sequence
  Notch1.649_Map3k1.3838
  crRNA array
cgatttcttggctttatatatcttgtggaaaggacgaaacaccgtaatttctactaagtgtagattgggccaacgatgccaggactaatttctactaagtgtagatccaacaacagggccccactattttttaagcttggcgtggatccgatatcaactagatcttgaga

SEQ ID NO: 6108 - DNA, 170 bp, Artificial sequence
  Notch1.649_Mga.1655
  crRNA array
cgatttcttggctttatatatcttgtggaaaggacgaaacaccgtaatttctactaagtgtagattgggccaacgatgccaggactaatttctactaagtgtagatcgagaagtggagagcatattttttttaagcttggcgtggatccgatatcaactagatcttgaga

SEQ ID NO: 6109 - DNA, 170 bp, Artificial sequence
  Notch1.649_Mga.93
  crRNA array
cgatttcttggctttatatatcttgtggaaaggacgaaacaccgtaatttctactaagtgtagattgggccaacgatgccaggactaatttctactaagtgtagatgagaaggctccccataatgtttttttaagcttggcgtggatccgatatcaactagatcttgaga

SEQ ID NO: 6110 - DNA, 170 bp, Artificial sequence
  Notch1.649_Nf1.746
  crRNA array
cgatttcttggctttatatatcttgtggaaaggacgaaacaccgtaatttctactaagtgtagattgggccaacgatgccaggactaatttctactaagtgtagattaagcataatgatgatgccattttttaagcttggcgtggatccgatatcaactagatcttgaga

SEQ ID NO: 6111 - DNA, 170 bp, Artificial sequence
  Notch1.649_Nf1.97
  crRNA array
cgatttcttggctttatatatcttgtggaaaggacgaaacaccgtaatttctactaagtgtagattgggccaacgatgccaggactaatttctactaagtgtagatagcccgctacatgctgatgcttttttaagcttggcgtggatccgatatcaactagatcttgaga

SEQ ID NO: 6112 - DNA, 170 bp, Artificial sequence
  Notch1.649_Nf2.356
  crRNA array
cgatttcttggctttatatatcttgtggaaaggacgaaacaccgtaatttctactaagtgtagattgggccaacgatgccaggactaatttctactaagtgtagatcggagtcatctgatagagatttttttaagcttggcgtggatccgatatcaactagatcttgaga

SEQ ID NO: 6113 - DNA, 170 bp, Artificial sequence
  Notch1.649_Nf2.768
  crRNA array
cgatttcttggctttatatatcttgtggaaaggacgaaacaccgtaatttctactaagtgtagattgggccaacgatgccaggactaatttctactaagtgtagatccgaagccccagtgtccggcttttttaagcttggcgtggatccgatatcaactagatcttgaga

SEQ ID NO: 6114 - DNA, 170 bp, Artificial sequence
  Notch1.649_Nsd1.70
  crRNA array
cgatttcttggctttatatatcttgtggaaaggacgaaacaccgtaatttctactaagtgtagattgggccaacgatgccaggactaatttctactaagtgtagatactggtgtggacgatgcagattttttaagcttggcgtggatccgatatcaactagatcttgaga

SEQ ID NO: 6115 - DNA, 170 bp, Artificial sequence
  Notch1.649_Nsd1.90
  crRNA array
cgatttcttggctttatatatcttgtggaaaggacgaaacaccgtaatttctactaagtgtagattgggccaacgatgccaggactaatttctactaagtgtagataggagctaacggcaagaatgttttttaagcttggcgtggatccgatatcaactagatcttgaga

SEQ ID NO: 6116 - DNA, 170 bp, Artificial sequence
  Notch1.649_Pbrm1.1236
  crRNA array
cgatttcttggctttatatatcttgtggaaaggacgaaacaccgtaatttctactaagtgtagattgggccaacgatgccaggactaatttctactaagtgtagatgccgataaaaccaacagccgttttttaagcttggcgtggatccgatatcaactagatcttgaga

SEQ ID NO: 6117 - DNA, 170 bp, Artificial sequence
  Notch1.649_Pbrm1.969
  crRNA array
cgatttcttggctttatatatcttgtggaaaggacgaaacaccgtaatttctactaagtgtagattgggccaacgatgccaggactaatttctactaagtgtagatgagccctaatgaacagctcattttttaagcttggcgtggatccgatatcaactagatcttgaga

SEQ ID NO: 6118 - DNA, 170 bp, Artificial sequence
  Notch1.649_Pik3r1.76
  crRNA array
cgatttcttggctttatatatcttgtggaaaggacgaaacaccgtaatttctactaagtgtagattgggccaacgatgccaggactaatttctactaagtgtagataaaacctatacggcccgcacttttttaagcttggcgtggatccgatatcaactagatcttgaga

SEQ ID NO: 6119 - DNA, 170 bp, Artificial sequence
  Notch1.649_Pik3r1.77
  crRNA array
cgatttcttggctttatatatcttgtggaaaggacgaaacaccgtaatttctactaagtgtagattgggccaacgatgccaggactaatttctactaagtgtagataaacctatacggcccgcactttttttaagcttggcgtggatccgatatcaactagatcttgaga

SEQ ID NO: 6120 - DNA, 170 bp, Artificial sequence
  Notch1.649_Pten.240
  crRNA array
cgatttcttggctttatatatcttgtggaaaggacgaaacaccgtaatttctactaagtgtagattgggccaacgatgccaggactaatttctactaagtgtagattgcatacgctatagctgcttttttttaagcttggcgtggatccgatatcaactagatcttgaga

SEQ ID NO: 6121 - DNA, 170 bp, Artificial sequence
  Notch1.649_Pten.265
  crRNA array
cgatttcttggctttatatatcttgtggaaaggacgaaacaccgtaatttctactaagtgtagattgggccaacgatgccaggactaatttctactaagtgtagataagcgtggtgcgtgacgcacttttttaagcttggcgtggatccgatatcaactagatcttgaga

SEQ ID NO: 6122 - DNA, 170 bp, Artificial sequence
  Notch1.649_Rasa1.1478
  crRNA array
cgatttcttggctttatatatcttgtggaaaggacgaaacaccgtaatttctactaagtgtagattgggccaacgatgccaggactaatttctactaagtgtagatcgataatggtctatgatgtcttttttaagcttggcgtggatccgatatcaactagatcttgaga

SEQ ID NO: 6123 - DNA, 170 bp, Artificial sequence
  Notch1.649_Rasa1.223
  crRNA array
cgatttcttggctttatatatcttgtggaaaggacgaaacaccgtaatttctactaagtgtagattgggccaacgatgccaggactaatttctactaagtgtagattccatggagtatcgtgctcgttttttaagcttggcgtggatccgatatcaactagatcttgaga

SEQ ID NO: 6124 - DNA, 170 bp, Artificial sequence
  Notch1.649_Rb1.211
  crRNA array
cgatttcttggctttatatatcttgtggaaaggacgaaacaccgtaatttctactaagtgtagattgggccaacgatgccaggactaatttctactaagtgtagattctgacatgatcgggtacctttttttaagcttggcgtggatccgatatcaactagatcttgaga

SEQ ID NO: 6125 - DNA, 170 bp, Artificial sequence
  Notch1.649_Rb1.394
  crRNA array
cgatttcttggctttatatatcttgtggaaaggacgaaacaccgtaatttctactaagtgtagattgggccaacgatgccaggactaatttctactaagtgtagatagaaatctcgaagcaggatcttttttaagcttggcgtggatccgatatcaactagatcttgaga

SEQ ID NO: 6126 - DNA, 170 bp, Artificial sequence
  Notch1.649_Rbm10.5
  crRNA array
cgatttcttggctttatatatcttgtggaaaggacgaaacaccgtaatttctactaagtgtagattgggccaacgatgccaggactaatttctactaagtgtagatacgaaacctgaacccacacattttttaagcttggcgtggatccgatatcaactagatcttgaga

SEQ ID NO: 6127 - DNA, 170 bp, Artificial sequence
  Notch1.649_Rbm10.6
  crRNA array
cgatttcttggctttatatatcttgtggaaaggacgaaacaccgtaatttctactaagtgtagattgggccaacgatgccaggactaatttctactaagtgtagatcgaaacctgaacccacacagttttttaagcttggcgtggatccgatatcaactagatcttgaga

SEQ ID NO: 6128 - DNA, 170 bp, Artificial sequence
  Notch1.649_Rnf43.1920
  crRNA array
cgatttcttggctttatatatcttgtggaaaggacgaaacaccgtaatttctactaagtgtagattgggccaacgatgccaggactaatttctactaagtgtagatatccccgtgccgtggactccttttttaagcttggcgtggatccgatatcaactagatcttgaga

SEQ ID NO: 6129 - DNA, 170 bp, Artificial sequence
  Notch1.649_Rnf43.39
  crRNA array
cgatttcttggctttatatatcttgtggaaaggacgaaacaccgtaatttctactaagtgtagattgggccaacgatgccaggactaatttctactaagtgtagatcaaggggatcactctgataattttttaagcttggcgtggatccgatatcaactagatcttgaga

SEQ ID NO: 6130 - DNA, 170 bp, Artificial sequence
  Notch1.649_Runx1.204
  crRNA array
cgatttcttggctttatatatcttgtggaaaggacgaaacaccgtaatttctactaagtgtagattgggccaacgatgccaggactaatttctactaagtgtagattaaataagtccagccgttttttttttaagcttggcgtggatccgatatcaactagatcttgaga

SEQ ID NO: 6131 - DNA, 170 bp, Artificial sequence
  Notch1.649_Runx1.81
  crRNA array
cgatttcttggctttatatatcttgtggaaaggacgaaacaccgtaatttctactaagtgtagattgggccaacgatgccaggactaatttctactaagtgtagataggacgcgtatgggaattttttttttaagcttggcgtggatccgatatcaactagatcttgaga

SEQ ID NO: 6132 - DNA, 170 bp, Artificial sequence
  Notch1.649_Setd2.143
  crRNA array
cgatttcttggctttatatatcttgtggaaaggacgaaacaccgtaatttctactaagtgtagattgggccaacgatgccaggactaatttctactaagtgtagatgcacaaccacaacagactggttttttaagcttggcgtggatccgatatcaactagatcttgaga

SEQ ID NO: 6133 - DNA, 170 bp, Artificial sequence
  Notch1.649_Setd2.508
  crRNA array
cgatttcttggctttatatatcttgtggaaaggacgaaacaccgtaatttctactaagtgtagattgggccaacgatgccaggactaatttctactaagtgtagattacgatcccgagcacccgacttttttaagcttggcgtggatccgatatcaactagatcttgaga

SEQ ID NO: 6134 - DNA, 170 bp, Artificial sequence
  Notch1.649_Smad4.3038
  crRNA array
cgatttcttggctttatatatcttgtggaaaggacgaaacaccgtaatttctactaagtgtagattgggccaacgatgccaggactaatttctactaagtgtagatatctgcggcagtgtcaccggttttttaagcttggcgtggatccgatatcaactagatcttgaga

SEQ ID NO: 6135 - DNA, 170 bp, Artificial sequence
  Notch1.649_Smad4.39
  crRNA array
cgatttcttggctttatatatcttgtggaaaggacgaaacaccgtaatttctactaagtgtagattgggccaacgatgccaggactaatttctactaagtgtagatagtcaaacgcatactgacaattttttaagcttggcgtggatccgatatcaactagatcttgaga

SEQ ID NO: 6136 - DNA, 170 bp, Artificial sequence
  Notch1.649_Stag2.1409
  crRNA array
cgatttcttggctttatatatcttgtggaaaggacgaaacaccgtaatttctactaagtgtagattgggccaacgatgccaggactaatttctactaagtgtagatgctaataactgcggaagggcttttttaagcttggcgtggatccgatatcaactagatcttgaga

SEQ ID NO: 6137 - DNA, 170 bp, Artificial sequence
  Notch1.649_Stag2.4401
  crRNA array
cgatttcttggctttatatatcttgtggaaaggacgaaacaccgtaatttctactaagtgtagattgggccaacgatgccaggactaatttctactaagtgtagattaatcgtccagtggtgtatattttttaagcttggcgtggatccgatatcaactagatcttgaga

SEQ ID NO: 6138 - DNA, 170 bp, Artificial sequence
  Notch1.649_Tbl1xr1.1
  crRNA array
cgatttcttggctttatatatcttgtggaaaggacgaaacaccgtaatttctactaagtgtagattgggccaacgatgccaggactaatttctactaagtgtagatggatgcgcatactggtgaagttttttaagcttggcgtggatccgatatcaactagatcttgaga

SEQ ID NO: 6139 - DNA, 170 bp, Artificial sequence
  Notch1.649_Tbl1xr1.83
  crRNA array
cgatttcttggctttatatatcttgtggaaaggacgaaacaccgtaatttctactaagtgtagattgggccaacgatgccaggactaatttctactaagtgtagatatggtcgacccatcgagtctttttttaagcttggcgtggatccgatatcaactagatcttgaga

SEQ ID NO: 6140 - DNA, 170 bp, Artificial sequence
  Notch1.649_Tgfbr2.290
  crRNA array
cgatttcttggctttatatatcttgtggaaaggacgaaacaccgtaatttctactaagtgtagattgggccaacgatgccaggactaatttctactaagtgtagatcctctcggcgcccgggtaaattttttaagcttggcgtggatccgatatcaactagatcttgaga

SEQ ID NO: 6141 - DNA, 170 bp, Artificial sequence
  Notch1.649_Tgfbr2.292
  crRNA array
cgatttcttggctttatatatcttgtggaaaggacgaaacaccgtaatttctactaagtgtagattgggccaacgatgccaggactaatttctactaagtgtagatcccgggcgccgagagggaaattttttaagcttggcgtggatccgatatcaactagatcttgaga

SEQ ID NO: 6142 - DNA, 170 bp, Artificial sequence
  Notch1.649_Trp53.4
  crRNA array
cgatttcttggctttatatatcttgtggaaaggacgaaacaccgtaatttctactaagtgtagattgggccaacgatgccaggactaatttctactaagtgtagatccctgaactgcccccagggattttttaagcttggcgtggatccgatatcaactagatcttgaga

SEQ ID NO: 6143 - DNA, 170 bp, Artificial sequence
  Notch1.649_Trp53.528
  crRNA array
cgatttcttggctttatatatcttgtggaaaggacgaaacaccgtaatttctactaagtgtagattgggccaacgatgccaggactaatttctactaagtgtagatgctgggccagcagagacctgttttttaagcttggcgtggatccgatatcaactagatcttgaga

SEQ ID NO: 6144 - DNA, 170 bp, Artificial sequence
  Notch1.649_Vhl.1
  crRNA array
cgatttcttggctttatatatcttgtggaaaggacgaaacaccgtaatttctactaagtgtagattgggccaacgatgccaggactaatttctactaagtgtagatagggctcccggcggccatttttttttaagcttggcgtggatccgatatcaactagatcttgaga

SEQ ID NO: 6145 - DNA, 170 bp, Artificial sequence
  Notch1.649_Vhl.151
  crRNA array
cgatttcttggctttatatatcttgtggaaaggacgaaacaccgtaatttctactaagtgtagattgggccaacgatgccaggactaatttctactaagtgtagattagagcactcacccgagggattttttaagcttggcgtggatccgatatcaactagatcttgaga

SEQ ID NO: 6146 - DNA, 170 bp, Artificial sequence
  Notch1.649_Zc3h13.1387
  crRNA array
cgatttcttggctttatatatcttgtggaaaggacgaaacaccgtaatttctactaagtgtagattgggccaacgatgccaggactaatttctactaagtgtagatgtgacgccggtcatgtgactttttttaagcttggcgtggatccgatatcaactagatcttgaga

SEQ ID NO: 6147 - DNA, 170 bp, Artificial sequence
  Notch1.649_Zc3h13.1777
  crRNA array
cgatttcttggctttatatatcttgtggaaaggacgaaacaccgtaatttctactaagtgtagattgggccaacgatgccaggactaatttctactaagtgtagatgatgctgccagtgtagcggcttttttaagcttggcgtggatccgatatcaactagatcttgaga

SEQ ID NO: 6148 - DNA, 170 bp, Artificial sequence
  Nsd1.70_Acvr2a.155
  crRNA array
cgatttcttggctttatatatcttgtggaaaggacgaaacaccgtaatttctactaagtgtagatactggtgtggacgatgcagataatttctactaagtgtagatggacctggctaatcaagtatttttttaagcttggcgtggatccgatatcaactagatcttgaga

SEQ ID NO: 6149 - DNA, 170 bp, Artificial sequence
  Nsd1.70_Acvr2a.70
  crRNA array
cgatttcttggctttatatatcttgtggaaaggacgaaacaccgtaatttctactaagtgtagatactggtgtggacgatgcagataatttctactaagtgtagatcccgaggcgccggagaagccttttttaagcttggcgtggatccgatatcaactagatcttgaga

SEQ ID NO: 6150 - DNA, 170 bp, Artificial sequence
  Nsd1.70_Apc.21
  crRNA array
cgatttcttggctttatatatcttgtggaaaggacgaaacaccgtaatttctactaagtgtagatactggtgtggacgatgcagataatttctactaagtgtagatgtgatccacacgtgtagctgttttttaagcttggcgtggatccgatatcaactagatcttgaga

SEQ ID NO: 6151 - DNA, 170 bp, Artificial sequence
  Nsd1.70_Apc.867
  crRNA array
cgatttcttggctttatatatcttgtggaaaggacgaaacaccgtaatttctactaagtgtagatactggtgtggacgatgcagataatttctactaagtgtagatcagtcccaggcggcggaagcttttttaagcttggcgtggatccgatatcaactagatcttgaga

SEQ ID NO: 6152 - DNA, 170 bp, Artificial sequence
  Nsd1.70_Arid1a.2
  crRNA array
cgatttcttggctttatatatcttgtggaaaggacgaaacaccgtaatttctactaagtgtagatactggtgtggacgatgcagataatttctactaagtgtagatcccgcgcccccgtcctggggttttttaagcttggcgtggatccgatatcaactagatcttgaga

SEQ ID NO: 6153 - DNA, 170 bp, Artificial sequence
  Nsd1.70_Arid1a.5
  crRNA array
cgatttcttggctttatatatcttgtggaaaggacgaaacaccgtaatttctactaagtgtagatactggtgtggacgatgcagataatttctactaagtgtagatcccgcgctcggccgctgccgttttttaagcttggcgtggatccgatatcaactagatcttgaga

SEQ ID NO: 6154 - DNA, 170 bp, Artificial sequence
  Nsd1.70_Arid2.166
  crRNA array
cgatttcttggctttatatatcttgtggaaaggacgaaacaccgtaatttctactaagtgtagatactggtgtggacgatgcagataatttctactaagtgtagataaccgcgatctgggttttttttttttaagcttggcgtggatccgatatcaactagatcttgaga

SEQ ID NO: 6155 - DNA, 170 bp, Artificial sequence
  Nsd1.70_Arid2.172
  crRNA array
cgatttcttggctttatatatcttgtggaaaggacgaaacaccgtaatttctactaagtgtagatactggtgtggacgatgcagataatttctactaagtgtagatctggacgagctgcggcagttttttttaagcttggcgtggatccgatatcaactagatcttgaga

SEQ ID NO: 6156 - DNA, 170 bp, Artificial sequence
  Nsd1.70_Atm.120
  crRNA array
cgatttcttggctttatatatcttgtggaaaggacgaaacaccgtaatttctactaagtgtagatactggtgtggacgatgcagataatttctactaagtgtagatgacaggtagtcggcagctaattttttaagcttggcgtggatccgatatcaactagatcttgaga

SEQ ID NO: 6157 - DNA, 170 bp, Artificial sequence
  Nsd1.70_Atm.997
  crRNA array
cgatttcttggctttatatatcttgtggaaaggacgaaacaccgtaatttctactaagtgtagatactggtgtggacgatgcagataatttctactaagtgtagatgagaaagtctccgaatcgttttttttaagcttggcgtggatccgatatcaactagatcttgaga

SEQ ID NO: 6158 - DNA, 170 bp, Artificial sequence
  Nsd1.70_Atrx.249
  crRNA array
cgatttcttggctttatatatcttgtggaaaggacgaaacaccgtaatttctactaagtgtagatactggtgtggacgatgcagataatttctactaagtgtagattagccagtcgctcatatctcttttttaagcttggcgtggatccgatatcaactagatcttgaga

SEQ ID NO: 6159 - DNA, 170 bp, Artificial sequence
  Nsd1.70_Atrx.251
  crRNA array
cgatttcttggctttatatatcttgtggaaaggacgaaacaccgtaatttctactaagtgtagatactggtgtggacgatgcagataatttctactaagtgtagatgccagtcgctcatatctctgttttttaagcttggcgtggatccgatatcaactagatcttgaga

SEQ ID NO: 6160 - DNA, 170 bp, Artificial sequence
  Nsd1.70_Bcor.203
  crRNA array
cgatttcttggctttatatatcttgtggaaaggacgaaacaccgtaatttctactaagtgtagatactggtgtggacgatgcagataatttctactaagtgtagatccccggagcggagtccaggcttttttaagcttggcgtggatccgatatcaactagatcttgaga

SEQ ID NO: 6161 - DNA, 170 bp, Artificial sequence
  Nsd1.70_Bcor.475
  crRNA array
cgatttcttggctttatatatcttgtggaaaggacgaaacaccgtaatttctactaagtgtagatactggtgtggacgatgcagataatttctactaagtgtagattgcaacccctctgtatgggattttttaagcttggcgtggatccgatatcaactagatcttgaga

SEQ ID NO: 6162 - DNA, 170 bp, Artificial sequence
  Nsd1.70_Brca1.112
  crRNA array
cgatttcttggctttatatatcttgtggaaaggacgaaacaccgtaatttctactaagtgtagatactggtgtggacgatgcagataatttctactaagtgtagatctagacgctctgtggagactttttttaagcttggcgtggatccgatatcaactagatcttgaga

SEQ ID NO: 6163 - DNA, 170 bp, Artificial sequence
  Nsd1.70_Brca1.53
  crRNA array
cgatttcttggctttatatatcttgtggaaaggacgaaacaccgtaatttctactaagtgtagatactggtgtggacgatgcagataatttctactaagtgtagataatgaggaggcgtcgatcatttttttaagcttggcgtggatccgatatcaactagatcttgaga

SEQ ID NO: 6164 - DNA, 170 bp, Artificial sequence
  Nsd1.70_Casp8.45
  crRNA array
cgatttcttggctttatatatcttgtggaaaggacgaaacaccgtaatttctactaagtgtagatactggtgtggacgatgcagataatttctactaagtgtagatctaccgagatcctgtgaatgttttttaagcttggcgtggatccgatatcaactagatcttgaga

SEQ ID NO: 6165 - DNA, 170 bp, Artificial sequence
  Nsd1.70_Casp8.54
  crRNA array
cgatttcttggctttatatatcttgtggaaaggacgaaacaccgtaatttctactaagtgtagatactggtgtggacgatgcagataatttctactaagtgtagatcagtgcagtcgtcgtaagatttttttaagcttggcgtggatccgatatcaactagatcttgaga

SEQ ID NO: 6166 - DNA, 170 bp, Artificial sequence
  Nsd1.70_Cbwd1.84
  crRNA array
cgatttcttggctttatatatcttgtggaaaggacgaaacaccgtaatttctactaagtgtagatactggtgtggacgatgcagataatttctactaagtgtagatcacagcaggtaacatgccgcttttttaagcttggcgtggatccgatatcaactagatcttgaga

SEQ ID NO: 6167 - DNA, 170 bp, Artificial sequence
  Nsd1.70_Cbwd1.85
  crRNA array
cgatttcttggctttatatatcttgtggaaaggacgaaacaccgtaatttctactaagtgtagatactggtgtggacgatgcagataatttctactaagtgtagatacagcaggtaacatgccgccttttttaagcttggcgtggatccgatatcaactagatcttgaga

SEQ ID NO: 6168 - DNA, 170 bp, Artificial sequence
  Nsd1.70_Cdh1.387
  crRNA array
cgatttcttggctttatatatcttgtggaaaggacgaaacaccgtaatttctactaagtgtagatactggtgtggacgatgcagataatttctactaagtgtagatctcggcgtctgccgggtccgttttttaagcttggcgtggatccgatatcaactagatcttgaga

SEQ ID NO: 6169 - DNA, 170 bp, Artificial sequence
  Nsd1.70_Cdh1.58
  crRNA array
cgatttcttggctttatatatcttgtggaaaggacgaaacaccgtaatttctactaagtgtagatactggtgtggacgatgcagataatttctactaagtgtagatctcgtccgcgcccgggactcttttttaagcttggcgtggatccgatatcaactagatcttgaga

SEQ ID NO: 6170 - DNA, 170 bp, Artificial sequence
  Nsd1.70_Cdkn2a.647
  crRNA array
cgatttcttggctttatatatcttgtggaaaggacgaaacaccgtaatttctactaagtgtagatactggtgtggacgatgcagataatttctactaagtgtagatgcaatcacgggagggagcagttttttaagcttggcgtggatccgatatcaactagatcttgaga

SEQ ID NO: 6171 - DNA, 170 bp, Artificial sequence
  Nsd1.70_Cdkn2a.648
  crRNA array
cgatttcttggctttatatatcttgtggaaaggacgaaacaccgtaatttctactaagtgtagatactggtgtggacgatgcagataatttctactaagtgtagatcaatcacgggagggagcagattttttaagcttggcgtggatccgatatcaactagatcttgaga

SEQ ID NO: 6172 - DNA, 170 bp, Artificial sequence
  Nsd1.70_Cic.162
  crRNA array
cgatttcttggctttatatatcttgtggaaaggacgaaacaccgtaatttctactaagtgtagatactggtgtggacgatgcagataatttctactaagtgtagatcgcaggcgcgcccggcggagttttttaagcttggcgtggatccgatatcaactagatcttgaga

SEQ ID NO: 6173 - DNA, 170 bp, Artificial sequence
  Nsd1.70_Cic.164
  crRNA array
cgatttcttggctttatatatcttgtggaaaggacgaaacaccgtaatttctactaagtgtagatactggtgtggacgatgcagataatttctactaagtgtagatcgggccctgggccggcggctttttttaagcttggcgtggatccgatatcaactagatcttgaga

SEQ ID NO: 6174 - DNA, 170 bp, Artificial sequence
  Nsd1.70_Ctcf.229
  crRNA array
cgatttcttggctttatatatcttgtggaaaggacgaaacaccgtaatttctactaagtgtagatactggtgtggacgatgcagataatttctactaagtgtagatggctggtggctgatagtctgttttttaagcttggcgtggatccgatatcaactagatcttgaga

SEQ ID NO: 6175 - DNA, 170 bp, Artificial sequence
  Nsd1.70_Ctcf.809
  crRNA array
cgatttcttggctttatatatcttgtggaaaggacgaaacaccgtaatttctactaagtgtagatactggtgtggacgatgcagataatttctactaagtgtagataagcgctatcatgatcccaattttttaagcttggcgtggatccgatatcaactagatcttgaga

SEQ ID NO: 6176 - DNA, 170 bp, Artificial sequence
  Nsd1.70_Elf3.826
  crRNA array
cgatttcttggctttatatatcttgtggaaaggacgaaacaccgtaatttctactaagtgtagatactggtgtggacgatgcagataatttctactaagtgtagattccgagacatcctaatccacttttttaagcttggcgtggatccgatatcaactagatcttgaga

SEQ ID NO: 6177 - DNA, 170 bp, Artificial sequence
  Nsd1.70_Elf3.983
  crRNA array
cgatttcttggctttatatatcttgtggaaaggacgaaacaccgtaatttctactaagtgtagatactggtgtggacgatgcagataatttctactaagtgtagattaggccccctaactggaccattttttaagcttggcgtggatccgatatcaactagatcttgaga

SEQ ID NO: 6178 - DNA, 170 bp, Artificial sequence
  Nsd1.70_Ep300.310
  crRNA array
cgatttcttggctttatatatcttgtggaaaggacgaaacaccgtaatttctactaagtgtagatactggtgtggacgatgcagataatttctactaagtgtagatatggtacgacagtgaggaagttttttaagcttggcgtggatccgatatcaactagatcttgaga

SEQ ID NO: 6179 - DNA, 170 bp, Artificial sequence
  Nsd1.70_Ep300.587
  crRNA array
cgatttcttggctttatatatcttgtggaaaggacgaaacaccgtaatttctactaagtgtagatactggtgtggacgatgcagataatttctactaagtgtagatcgccccggggcccccaaccattttttaagcttggcgtggatccgatatcaactagatcttgaga

SEQ ID NO: 6180 - DNA, 170 bp, Artificial sequence
  Nsd1.70_Epha2.126
  crRNA array
cgatttcttggctttatatatcttgtggaaaggacgaaacaccgtaatttctactaagtgtagatactggtgtggacgatgcagataatttctactaagtgtagatcctgtgccgccgcggccgccttttttaagcttggcgtggatccgatatcaactagatcttgaga

SEQ ID NO: 6181 - DNA, 170 bp, Artificial sequence
  Nsd1.70_Epha2.5
  crRNA array
cgatttcttggctttatatatcttgtggaaaggacgaaacaccgtaatttctactaagtgtagatactggtgtggacgatgcagataatttctactaagtgtagatcatgagctggcgccacccggttttttaagcttggcgtggatccgatatcaactagatcttgaga

SEQ ID NO: 6182 - DNA, 170 bp, Artificial sequence
  Nsd1.70_Fat1.105
  crRNA array
cgatttcttggctttatatatcttgtggaaaggacgaaacaccgtaatttctactaagtgtagatactggtgtggacgatgcagataatttctactaagtgtagataactcgaggtgacaacaagtttttttaagcttggcgtggatccgatatcaactagatcttgaga

SEQ ID NO: 6183 - DNA, 170 bp, Artificial sequence
  Nsd1.70_Fat1.122
  crRNA array
cgatttcttggctttatatatcttgtggaaaggacgaaacaccgtaatttctactaagtgtagatactggtgtggacgatgcagataatttctactaagtgtagatccatcgacatggaaacgggattttttaagcttggcgtggatccgatatcaactagatcttgaga

SEQ ID NO: 6184 - DNA, 170 bp, Artificial sequence
  Nsd1.70_Fbxw7.21
  crRNA array
cgatttcttggctttatatatcttgtggaaaggacgaaacaccgtaatttctactaagtgtagatactggtgtggacgatgcagataatttctactaagtgtagattaatgtgccgtagaaacccattttttaagcttggcgtggatccgatatcaactagatcttgaga

SEQ ID NO: 6185 - DNA, 170 bp, Artificial sequence
  Nsd1.70_Fbxw7.23
  crRNA array
cgatttcttggctttatatatcttgtggaaaggacgaaacaccgtaatttctactaagtgtagatactggtgtggacgatgcagataatttctactaagtgtagatatgtgccgtagaaacccatattttttaagcttggcgtggatccgatatcaactagatcttgaga

SEQ ID NO: 6186 - DNA, 170 bp, Artificial sequence
  Nsd1.70_Gata3.34
  crRNA array
cgatttcttggctttatatatcttgtggaaaggacgaaacaccgtaatttctactaagtgtagatactggtgtggacgatgcagataatttctactaagtgtagatctaaactatcccgcaaagatttttttaagcttggcgtggatccgatatcaactagatcttgaga

SEQ ID NO: 6187 - DNA, 170 bp, Artificial sequence
  Nsd1.70_Gata3.47
  crRNA array
cgatttcttggctttatatatcttgtggaaaggacgaaacaccgtaatttctactaagtgtagatactggtgtggacgatgcagataatttctactaagtgtagatcgtagtaggacgggacgtggttttttaagcttggcgtggatccgatatcaactagatcttgaga

SEQ ID NO: 6188 - DNA, 170 bp, Artificial sequence
  Nsd1.70_H2-Q2.1
  crRNA array
cgatttcttggctttatatatcttgtggaaaggacgaaacaccgtaatttctactaagtgtagatactggtgtggacgatgcagataatttctactaagtgtagatagggcggccaccaacagcagttttttaagcttggcgtggatccgatatcaactagatcttgaga

SEQ ID NO: 6189 - DNA, 170 bp, Artificial sequence
  Nsd1.70_H2-Q2.2
  crRNA array
cgatttcttggctttatatatcttgtggaaaggacgaaacaccgtaatttctactaagtgtagatactggtgtggacgatgcagataatttctactaagtgtagattaacctgcgcccgctgctgattttttaagcttggcgtggatccgatatcaactagatcttgaga

SEQ ID NO: 6190 - DNA, 170 bp, Artificial sequence
  Nsd1.70_Kdm5c.1878
  crRNA array
cgatttcttggctttatatatcttgtggaaaggacgaaacaccgtaatttctactaagtgtagatactggtgtggacgatgcagataatttctactaagtgtagatagagcacggcacccgcccccttttttaagcttggcgtggatccgatatcaactagatcttgaga

SEQ ID NO: 6191 - DNA, 170 bp, Artificial sequence
  Nsd1.70_Kdm5c.1879
  crRNA array
cgatttcttggctttatatatcttgtggaaaggacgaaacaccgtaatttctactaagtgtagatactggtgtggacgatgcagataatttctactaagtgtagatgagcacggcacccgccccccttttttaagcttggcgtggatccgatatcaactagatcttgaga

SEQ ID NO: 6192 - DNA, 170 bp, Artificial sequence
  Nsd1.70_Kdm6a.56
  crRNA array
cgatttcttggctttatatatcttgtggaaaggacgaaacaccgtaatttctactaagtgtagatactggtgtggacgatgcagataatttctactaagtgtagattcgctgccgcctctcgcggcttttttaagcttggcgtggatccgatatcaactagatcttgaga

SEQ ID NO: 6193 - DNA, 170 bp, Artificial sequence
  Nsd1.70_Kdm6a.57
  crRNA array
cgatttcttggctttatatatcttgtggaaaggacgaaacaccgtaatttctactaagtgtagatactggtgtggacgatgcagataatttctactaagtgtagatcgctgccgcctctcgcggcattttttaagcttggcgtggatccgatatcaactagatcttgaga

SEQ ID NO: 6194 - DNA, 170 bp, Artificial sequence
  Nsd1.70_Kmt2b.265
  crRNA array
cgatttcttggctttatatatcttgtggaaaggacgaaacaccgtaatttctactaagtgtagatactggtgtggacgatgcagataatttctactaagtgtagatccccaagtgaagcccacctgttttttaagcttggcgtggatccgatatcaactagatcttgaga

SEQ ID NO: 6195 - DNA, 170 bp, Artificial sequence
  Nsd1.70_Kmt2b.298
  crRNA array
cgatttcttggctttatatatcttgtggaaaggacgaaacaccgtaatttctactaagtgtagatactggtgtggacgatgcagataatttctactaagtgtagattccggcagggaccggctggcttttttaagcttggcgtggatccgatatcaactagatcttgaga

SEQ ID NO: 6196 - DNA, 170 bp, Artificial sequence
  Nsd1.70_Kmt2c.1962
  crRNA array
cgatttcttggctttatatatcttgtggaaaggacgaaacaccgtaatttctactaagtgtagatactggtgtggacgatgcagataatttctactaagtgtagatgtgacgatctgtgccacaagttttttaagcttggcgtggatccgatatcaactagatcttgaga

SEQ ID NO: 6197 - DNA, 170 bp, Artificial sequence
  Nsd1.70_Kmt2c.2236
  crRNA array
cgatttcttggctttatatatcttgtggaaaggacgaaacaccgtaatttctactaagtgtagatactggtgtggacgatgcagataatttctactaagtgtagatactcgacctccacctccctattttttaagcttggcgtggatccgatatcaactagatcttgaga

SEQ ID NO: 6198 - DNA, 170 bp, Artificial sequence
  Nsd1.70_Kmt2d.316
  crRNA array
cgatttcttggctttatatatcttgtggaaaggacgaaacaccgtaatttctactaagtgtagatactggtgtggacgatgcagataatttctactaagtgtagatactccaggccacccaggtggttttttaagcttggcgtggatccgatatcaactagatcttgaga

SEQ ID NO: 6199 - DNA, 170 bp, Artificial sequence
  Nsd1.70_Kmt2d.416
  crRNA array
cgatttcttggctttatatatcttgtggaaaggacgaaacaccgtaatttctactaagtgtagatactggtgtggacgatgcagataatttctactaagtgtagattaaacccccgggggaagggtttttttaagcttggcgtggatccgatatcaactagatcttgaga

SEQ ID NO: 6200 - DNA, 170 bp, Artificial sequence
  Nsd1.70_Map2k4.119
  crRNA array
cgatttcttggctttatatatcttgtggaaaggacgaaacaccgtaatttctactaagtgtagatactggtgtggacgatgcagataatttctactaagtgtagattgctgtgtgggcggccacatttttttaagcttggcgtggatccgatatcaactagatcttgaga

SEQ ID NO: 6201 - DNA, 170 bp, Artificial sequence
  Nsd1.70_Map2k4.1261
  crRNA array
cgatttcttggctttatatatcttgtggaaaggacgaaacaccgtaatttctactaagtgtagatactggtgtggacgatgcagataatttctactaagtgtagatgatgtagtaatgcggagtagttttttaagcttggcgtggatccgatatcaactagatcttgaga

SEQ ID NO: 6202 - DNA, 170 bp, Artificial sequence
  Nsd1.70_Map3k1.235
  crRNA array
cgatttcttggctttatatatcttgtggaaaggacgaaacaccgtaatttctactaagtgtagatactggtgtggacgatgcagataatttctactaagtgtagataaaacgctactgatcgatcgttttttaagcttggcgtggatccgatatcaactagatcttgaga

SEQ ID NO: 6203 - DNA, 170 bp, Artificial sequence
  Nsd1.70_Map3k1.3838
  crRNA array
cgatttcttggctttatatatcttgtggaaaggacgaaacaccgtaatttctactaagtgtagatactggtgtggacgatgcagataatttctactaagtgtagatccaacaacagggccccactattttttaagcttggcgtggatccgatatcaactagatcttgaga

SEQ ID NO: 6204 - DNA, 170 bp, Artificial sequence
  Nsd1.70_Mga.1655
  crRNA array
cgatttcttggctttatatatcttgtggaaaggacgaaacaccgtaatttctactaagtgtagatactggtgtggacgatgcagataatttctactaagtgtagatcgagaagtggagagcatattttttttaagcttggcgtggatccgatatcaactagatcttgaga

SEQ ID NO: 6205 - DNA, 170 bp, Artificial sequence
  Nsd1.70_Mga.93
  crRNA array
cgatttcttggctttatatatcttgtggaaaggacgaaacaccgtaatttctactaagtgtagatactggtgtggacgatgcagataatttctactaagtgtagatgagaaggctccccataatgtttttttaagcttggcgtggatccgatatcaactagatcttgaga

SEQ ID NO: 6206 - DNA, 170 bp, Artificial sequence
  Nsd1.70_Nf1.746
  crRNA array
cgatttcttggctttatatatcttgtggaaaggacgaaacaccgtaatttctactaagtgtagatactggtgtggacgatgcagataatttctactaagtgtagattaagcataatgatgatgccattttttaagcttggcgtggatccgatatcaactagatcttgaga

SEQ ID NO: 6207 - DNA, 170 bp, Artificial sequence
  Nsd1.70_Nf1.97
  crRNA array
cgatttcttggctttatatatcttgtggaaaggacgaaacaccgtaatttctactaagtgtagatactggtgtggacgatgcagataatttctactaagtgtagatagcccgctacatgctgatgcttttttaagcttggcgtggatccgatatcaactagatcttgaga

SEQ ID NO: 6208 - DNA, 170 bp, Artificial sequence
  Nsd1.70_Nf2.356
  crRNA array
cgatttcttggctttatatatcttgtggaaaggacgaaacaccgtaatttctactaagtgtagatactggtgtggacgatgcagataatttctactaagtgtagatcggagtcatctgatagagatttttttaagcttggcgtggatccgatatcaactagatcttgaga

SEQ ID NO: 6209 - DNA, 170 bp, Artificial sequence
  Nsd1.70_Nf2.768
  crRNA array
cgatttcttggctttatatatcttgtggaaaggacgaaacaccgtaatttctactaagtgtagatactggtgtggacgatgcagataatttctactaagtgtagatccgaagccccagtgtccggcttttttaagcttggcgtggatccgatatcaactagatcttgaga

SEQ ID NO: 6210 - DNA, 170 bp, Artificial sequence
  Nsd1.70_Notch1.1849
  crRNA array
cgatttcttggctttatatatcttgtggaaaggacgaaacaccgtaatttctactaagtgtagatactggtgtggacgatgcagataatttctactaagtgtagatctggcgggtgggcggcgctgttttttaagcttggcgtggatccgatatcaactagatcttgaga

SEQ ID NO: 6211 - DNA, 170 bp, Artificial sequence
  Nsd1.70_Notch1.649
  crRNA array
cgatttcttggctttatatatcttgtggaaaggacgaaacaccgtaatttctactaagtgtagatactggtgtggacgatgcagataatttctactaagtgtagattgggccaacgatgccaggacttttttaagcttggcgtggatccgatatcaactagatcttgaga

SEQ ID NO: 6212 - DNA, 170 bp, Artificial sequence
  Nsd1.70_Pbrm1.1236
  crRNA array
cgatttcttggctttatatatcttgtggaaaggacgaaacaccgtaatttctactaagtgtagatactggtgtggacgatgcagataatttctactaagtgtagatgccgataaaaccaacagccgttttttaagcttggcgtggatccgatatcaactagatcttgaga

SEQ ID NO: 6213 - DNA, 170 bp, Artificial sequence
  Nsd1.70_Pbrm1.969
  crRNA array
cgatttcttggctttatatatcttgtggaaaggacgaaacaccgtaatttctactaagtgtagatactggtgtggacgatgcagataatttctactaagtgtagatgagccctaatgaacagctcattttttaagcttggcgtggatccgatatcaactagatcttgaga

SEQ ID NO: 6214 - DNA, 170 bp, Artificial sequence
  Nsd1.70_Pik3r1.76
  crRNA array
cgatttcttggctttatatatcttgtggaaaggacgaaacaccgtaatttctactaagtgtagatactggtgtggacgatgcagataatttctactaagtgtagataaaacctatacggcccgcacttttttaagcttggcgtggatccgatatcaactagatcttgaga

SEQ ID NO: 6215 - DNA, 170 bp, Artificial sequence
  Nsd1.70_Pik3r1.77
  crRNA array
cgatttcttggctttatatatcttgtggaaaggacgaaacaccgtaatttctactaagtgtagatactggtgtggacgatgcagataatttctactaagtgtagataaacctatacggcccgcactttttttaagcttggcgtggatccgatatcaactagatcttgaga

SEQ ID NO: 6216 - DNA, 170 bp, Artificial sequence
  Nsd1.70_Pten.240
  crRNA array
cgatttcttggctttatatatcttgtggaaaggacgaaacaccgtaatttctactaagtgtagatactggtgtggacgatgcagataatttctactaagtgtagattgcatacgctatagctgcttttttttaagcttggcgtggatccgatatcaactagatcttgaga

SEQ ID NO: 6217 - DNA, 170 bp, Artificial sequence
  Nsd1.70_Pten.265
  crRNA array
cgatttcttggctttatatatcttgtggaaaggacgaaacaccgtaatttctactaagtgtagatactggtgtggacgatgcagataatttctactaagtgtagataagcgtggtgcgtgacgcacttttttaagcttggcgtggatccgatatcaactagatcttgaga

SEQ ID NO: 6218 - DNA, 170 bp, Artificial sequence
  Nsd1.70_Rasa1.1478
  crRNA array
cgatttcttggctttatatatcttgtggaaaggacgaaacaccgtaatttctactaagtgtagatactggtgtggacgatgcagataatttctactaagtgtagatcgataatggtctatgatgtcttttttaagcttggcgtggatccgatatcaactagatcttgaga

SEQ ID NO: 6219 - DNA, 170 bp, Artificial sequence
  Nsd1.70_Rasa1.223
  crRNA array
cgatttcttggctttatatatcttgtggaaaggacgaaacaccgtaatttctactaagtgtagatactggtgtggacgatgcagataatttctactaagtgtagattccatggagtatcgtgctcgttttttaagcttggcgtggatccgatatcaactagatcttgaga

SEQ ID NO: 6220 - DNA, 170 bp, Artificial sequence
  Nsd1.70_Rb1.211
  crRNA array
cgatttcttggctttatatatcttgtggaaaggacgaaacaccgtaatttctactaagtgtagatactggtgtggacgatgcagataatttctactaagtgtagattctgacatgatcgggtacctttttttaagcttggcgtggatccgatatcaactagatcttgaga

SEQ ID NO: 6221 - DNA, 170 bp, Artificial sequence
  Nsd1.70_Rb1.394
  crRNA array
cgatttcttggctttatatatcttgtggaaaggacgaaacaccgtaatttctactaagtgtagatactggtgtggacgatgcagataatttctactaagtgtagatagaaatctcgaagcaggatcttttttaagcttggcgtggatccgatatcaactagatcttgaga

SEQ ID NO: 6222 - DNA, 170 bp, Artificial sequence
  Nsd1.70_Rbm10.5
  crRNA array
cgatttcttggctttatatatcttgtggaaaggacgaaacaccgtaatttctactaagtgtagatactggtgtggacgatgcagataatttctactaagtgtagatacgaaacctgaacccacacattttttaagcttggcgtggatccgatatcaactagatcttgaga

SEQ ID NO: 6223 - DNA, 170 bp, Artificial sequence
  Nsd1.70_Rbm10.6
  crRNA array
cgatttcttggctttatatatcttgtggaaaggacgaaacaccgtaatttctactaagtgtagatactggtgtggacgatgcagataatttctactaagtgtagatcgaaacctgaacccacacagttttttaagcttggcgtggatccgatatcaactagatcttgaga

SEQ ID NO: 6224 - DNA, 170 bp, Artificial sequence
  Nsd1.70_Rnf43.1920
  crRNA array
cgatttcttggctttatatatcttgtggaaaggacgaaacaccgtaatttctactaagtgtagatactggtgtggacgatgcagataatttctactaagtgtagatatccccgtgccgtggactccttttttaagcttggcgtggatccgatatcaactagatcttgaga

SEQ ID NO: 6225 - DNA, 170 bp, Artificial sequence
  Nsd1.70_Rnf43.39
  crRNA array
cgatttcttggctttatatatcttgtggaaaggacgaaacaccgtaatttctactaagtgtagatactggtgtggacgatgcagataatttctactaagtgtagatcaaggggatcactctgataattttttaagcttggcgtggatccgatatcaactagatcttgaga

SEQ ID NO: 6226 - DNA, 170 bp, Artificial sequence
  Nsd1.70_Runx1.204
  crRNA array
cgatttcttggctttatatatcttgtggaaaggacgaaacaccgtaatttctactaagtgtagatactggtgtggacgatgcagataatttctactaagtgtagattaaataagtccagccgttttttttttaagcttggcgtggatccgatatcaactagatcttgaga

SEQ ID NO: 6227 - DNA, 170 bp, Artificial sequence
  Nsd1.70_Runx1.81
  crRNA array
cgatttcttggctttatatatcttgtggaaaggacgaaacaccgtaatttctactaagtgtagatactggtgtggacgatgcagataatttctactaagtgtagataggacgcgtatgggaattttttttttaagcttggcgtggatccgatatcaactagatcttgaga

SEQ ID NO: 6228 - DNA, 170 bp, Artificial sequence
  Nsd1.70_Setd2.143
  crRNA array
cgatttcttggctttatatatcttgtggaaaggacgaaacaccgtaatttctactaagtgtagatactggtgtggacgatgcagataatttctactaagtgtagatgcacaaccacaacagactggttttttaagcttggcgtggatccgatatcaactagatcttgaga

SEQ ID NO: 6229 - DNA, 170 bp, Artificial sequence
  Nsd1.70_Setd2.508
  crRNA array
cgatttcttggctttatatatcttgtggaaaggacgaaacaccgtaatttctactaagtgtagatactggtgtggacgatgcagataatttctactaagtgtagattacgatcccgagcacccgacttttttaagcttggcgtggatccgatatcaactagatcttgaga

SEQ ID NO: 6230 - DNA, 170 bp, Artificial sequence
  Nsd1.70_Smad4.3038
  crRNA array
cgatttcttggctttatatatcttgtggaaaggacgaaacaccgtaatttctactaagtgtagatactggtgtggacgatgcagataatttctactaagtgtagatatctgcggcagtgtcaccggttttttaagcttggcgtggatccgatatcaactagatcttgaga

SEQ ID NO: 6231 - DNA, 170 bp, Artificial sequence
  Nsd1.70_Smad4.39
  crRNA array
cgatttcttggctttatatatcttgtggaaaggacgaaacaccgtaatttctactaagtgtagatactggtgtggacgatgcagataatttctactaagtgtagatagtcaaacgcatactgacaattttttaagcttggcgtggatccgatatcaactagatcttgaga

SEQ ID NO: 6232 - DNA, 170 bp, Artificial sequence
  Nsd1.70_Stag2.1409
  crRNA array
cgatttcttggctttatatatcttgtggaaaggacgaaacaccgtaatttctactaagtgtagatactggtgtggacgatgcagataatttctactaagtgtagatgctaataactgcggaagggcttttttaagcttggcgtggatccgatatcaactagatcttgaga

SEQ ID NO: 6233 - DNA, 170 bp, Artificial sequence
  Nsd1.70_Stag2.4401
  crRNA array
cgatttcttggctttatatatcttgtggaaaggacgaaacaccgtaatttctactaagtgtagatactggtgtggacgatgcagataatttctactaagtgtagattaatcgtccagtggtgtatattttttaagcttggcgtggatccgatatcaactagatcttgaga

SEQ ID NO: 6234 - DNA, 170 bp, Artificial sequence
  Nsd1.70_Tbl1xr1.1
  crRNA array
cgatttcttggctttatatatcttgtggaaaggacgaaacaccgtaatttctactaagtgtagatactggtgtggacgatgcagataatttctactaagtgtagatggatgcgcatactggtgaagttttttaagcttggcgtggatccgatatcaactagatcttgaga

SEQ ID NO: 6235 - DNA, 170 bp, Artificial sequence
  Nsd1.70_Tbl1xr1.83
  crRNA array
cgatttcttggctttatatatcttgtggaaaggacgaaacaccgtaatttctactaagtgtagatactggtgtggacgatgcagataatttctactaagtgtagatatggtcgacccatcgagtctttttttaagcttggcgtggatccgatatcaactagatcttgaga

SEQ ID NO: 6236 - DNA, 170 bp, Artificial sequence
  Nsd1.70_Tgfbr2.290
  crRNA array
cgatttcttggctttatatatcttgtggaaaggacgaaacaccgtaatttctactaagtgtagatactggtgtggacgatgcagataatttctactaagtgtagatcctctcggcgcccgggtaaattttttaagcttggcgtggatccgatatcaactagatcttgaga

SEQ ID NO: 6237 - DNA, 170 bp, Artificial sequence
  Nsd1.70_Tgfbr2.292
  crRNA array
cgatttcttggctttatatatcttgtggaaaggacgaaacaccgtaatttctactaagtgtagatactggtgtggacgatgcagataatttctactaagtgtagatcccgggcgccgagagggaaattttttaagcttggcgtggatccgatatcaactagatcttgaga

SEQ ID NO: 6238 - DNA, 170 bp, Artificial sequence
  Nsd1.70_Trp53.4
  crRNA array
cgatttcttggctttatatatcttgtggaaaggacgaaacaccgtaatttctactaagtgtagatactggtgtggacgatgcagataatttctactaagtgtagatccctgaactgcccccagggattttttaagcttggcgtggatccgatatcaactagatcttgaga

SEQ ID NO: 6239 - DNA, 170 bp, Artificial sequence
  Nsd1.70_Trp53.528
  crRNA array
cgatttcttggctttatatatcttgtggaaaggacgaaacaccgtaatttctactaagtgtagatactggtgtggacgatgcagataatttctactaagtgtagatgctgggccagcagagacctgttttttaagcttggcgtggatccgatatcaactagatcttgaga

SEQ ID NO: 6240 - DNA, 170 bp, Artificial sequence
  Nsd1.70_Vhl.1
  crRNA array
cgatttcttggctttatatatcttgtggaaaggacgaaacaccgtaatttctactaagtgtagatactggtgtggacgatgcagataatttctactaagtgtagatagggctcccggcggccatttttttttaagcttggcgtggatccgatatcaactagatcttgaga

SEQ ID NO: 6241 - DNA, 170 bp, Artificial sequence
  Nsd1.70_Vhl.151
  crRNA array
cgatttcttggctttatatatcttgtggaaaggacgaaacaccgtaatttctactaagtgtagatactggtgtggacgatgcagataatttctactaagtgtagattagagcactcacccgagggattttttaagcttggcgtggatccgatatcaactagatcttgaga

SEQ ID NO: 6242 - DNA, 170 bp, Artificial sequence
  Nsd1.70_Zc3h13.1387
  crRNA array
cgatttcttggctttatatatcttgtggaaaggacgaaacaccgtaatttctactaagtgtagatactggtgtggacgatgcagataatttctactaagtgtagatgtgacgccggtcatgtgactttttttaagcttggcgtggatccgatatcaactagatcttgaga

SEQ ID NO: 6243 - DNA, 170 bp, Artificial sequence
  Nsd1.70_Zc3h13.1777
  crRNA array
cgatttcttggctttatatatcttgtggaaaggacgaaacaccgtaatttctactaagtgtagatactggtgtggacgatgcagataatttctactaagtgtagatgatgctgccagtgtagcggcttttttaagcttggcgtggatccgatatcaactagatcttgaga

SEQ ID NO: 6244 - DNA, 170 bp, Artificial sequence
  Nsd1.90_Acvr2a.155
  crRNA array
cgatttcttggctttatatatcttgtggaaaggacgaaacaccgtaatttctactaagtgtagataggagctaacggcaagaatgtaatttctactaagtgtagatggacctggctaatcaagtatttttttaagcttggcgtggatccgatatcaactagatcttgaga

SEQ ID NO: 6245 - DNA, 170 bp, Artificial sequence
  Nsd1.90_Acvr2a.70
  crRNA array
cgatttcttggctttatatatcttgtggaaaggacgaaacaccgtaatttctactaagtgtagataggagctaacggcaagaatgtaatttctactaagtgtagatcccgaggcgccggagaagccttttttaagcttggcgtggatccgatatcaactagatcttgaga

SEQ ID NO: 6246 - DNA, 170 bp, Artificial sequence
  Nsd1.90_Apc.21
  crRNA array
cgatttcttggctttatatatcttgtggaaaggacgaaacaccgtaatttctactaagtgtagataggagctaacggcaagaatgtaatttctactaagtgtagatgtgatccacacgtgtagctgttttttaagcttggcgtggatccgatatcaactagatcttgaga

SEQ ID NO: 6247 - DNA, 170 bp, Artificial sequence
  Nsd1.90_Apc.867
  crRNA array
cgatttcttggctttatatatcttgtggaaaggacgaaacaccgtaatttctactaagtgtagataggagctaacggcaagaatgtaatttctactaagtgtagatcagtcccaggcggcggaagcttttttaagcttggcgtggatccgatatcaactagatcttgaga

SEQ ID NO: 6248 - DNA, 170 bp, Artificial sequence
  Nsd1.90_Arid1a.2
  crRNA array
cgatttcttggctttatatatcttgtggaaaggacgaaacaccgtaatttctactaagtgtagataggagctaacggcaagaatgtaatttctactaagtgtagatcccgcgcccccgtcctggggttttttaagcttggcgtggatccgatatcaactagatcttgaga

SEQ ID NO: 6249 - DNA, 170 bp, Artificial sequence
  Nsd1.90_Arid1a.5
  crRNA array
cgatttcttggctttatatatcttgtggaaaggacgaaacaccgtaatttctactaagtgtagataggagctaacggcaagaatgtaatttctactaagtgtagatcccgcgctcggccgctgccgttttttaagcttggcgtggatccgatatcaactagatcttgaga

SEQ ID NO: 6250 - DNA, 170 bp, Artificial sequence
  Nsd1.90_Arid2.166
  crRNA array
cgatttcttggctttatatatcttgtggaaaggacgaaacaccgtaatttctactaagtgtagataggagctaacggcaagaatgtaatttctactaagtgtagataaccgcgatctgggttttttttttttaagcttggcgtggatccgatatcaactagatcttgaga

SEQ ID NO: 6251 - DNA, 170 bp, Artificial sequence
  Nsd1.90_Arid2.172
  crRNA array
cgatttcttggctttatatatcttgtggaaaggacgaaacaccgtaatttctactaagtgtagataggagctaacggcaagaatgtaatttctactaagtgtagatctggacgagctgcggcagttttttttaagcttggcgtggatccgatatcaactagatcttgaga

SEQ ID NO: 6252 - DNA, 170 bp, Artificial sequence
  Nsd1.90_Atm.120
  crRNA array
cgatttcttggctttatatatcttgtggaaaggacgaaacaccgtaatttctactaagtgtagataggagctaacggcaagaatgtaatttctactaagtgtagatgacaggtagtcggcagctaattttttaagcttggcgtggatccgatatcaactagatcttgaga

SEQ ID NO: 6253 - DNA, 170 bp, Artificial sequence
  Nsd1.90_Atm.997
  crRNA array
cgatttcttggctttatatatcttgtggaaaggacgaaacaccgtaatttctactaagtgtagataggagctaacggcaagaatgtaatttctactaagtgtagatgagaaagtctccgaatcgttttttttaagcttggcgtggatccgatatcaactagatcttgaga

SEQ ID NO: 6254 - DNA, 170 bp, Artificial sequence
  Nsd1.90_Atrx.249
  crRNA array
cgatttcttggctttatatatcttgtggaaaggacgaaacaccgtaatttctactaagtgtagataggagctaacggcaagaatgtaatttctactaagtgtagattagccagtcgctcatatctcttttttaagcttggcgtggatccgatatcaactagatcttgaga

SEQ ID NO: 6255 - DNA, 170 bp, Artificial sequence
  Nsd1.90_Atrx.251
  crRNA array
cgatttcttggctttatatatcttgtggaaaggacgaaacaccgtaatttctactaagtgtagataggagctaacggcaagaatgtaatttctactaagtgtagatgccagtcgctcatatctctgttttttaagcttggcgtggatccgatatcaactagatcttgaga

SEQ ID NO: 6256 - DNA, 170 bp, Artificial sequence
  Nsd1.90_Bcor.203
  crRNA array
cgatttcttggctttatatatcttgtggaaaggacgaaacaccgtaatttctactaagtgtagataggagctaacggcaagaatgtaatttctactaagtgtagatccccggagcggagtccaggcttttttaagcttggcgtggatccgatatcaactagatcttgaga

SEQ ID NO: 6257 - DNA, 170 bp, Artificial sequence
  Nsd1.90_Bcor.475
  crRNA array
cgatttcttggctttatatatcttgtggaaaggacgaaacaccgtaatttctactaagtgtagataggagctaacggcaagaatgtaatttctactaagtgtagattgcaacccctctgtatgggattttttaagcttggcgtggatccgatatcaactagatcttgaga

SEQ ID NO: 6258 - DNA, 170 bp, Artificial sequence
  Nsd1.90_Brca1.112
  crRNA array
cgatttcttggctttatatatcttgtggaaaggacgaaacaccgtaatttctactaagtgtagataggagctaacggcaagaatgtaatttctactaagtgtagatctagacgctctgtggagactttttttaagcttggcgtggatccgatatcaactagatcttgaga

SEQ ID NO: 6259 - DNA, 170 bp, Artificial sequence
  Nsd1.90_Brca1.53
  crRNA array
cgatttcttggctttatatatcttgtggaaaggacgaaacaccgtaatttctactaagtgtagataggagctaacggcaagaatgtaatttctactaagtgtagataatgaggaggcgtcgatcatttttttaagcttggcgtggatccgatatcaactagatcttgaga

SEQ ID NO: 6260 - DNA, 170 bp, Artificial sequence
  Nsd1.90_Casp8.45
  crRNA array
cgatttcttggctttatatatcttgtggaaaggacgaaacaccgtaatttctactaagtgtagataggagctaacggcaagaatgtaatttctactaagtgtagatctaccgagatcctgtgaatgttttttaagcttggcgtggatccgatatcaactagatcttgaga

SEQ ID NO: 6261 - DNA, 170 bp, Artificial sequence
  Nsd1.90_Casp8.54
  crRNA array
cgatttcttggctttatatatcttgtggaaaggacgaaacaccgtaatttctactaagtgtagataggagctaacggcaagaatgtaatttctactaagtgtagatcagtgcagtcgtcgtaagatttttttaagcttggcgtggatccgatatcaactagatcttgaga

SEQ ID NO: 6262 - DNA, 170 bp, Artificial sequence
  Nsd1.90_Cbwd1.84
  crRNA array
cgatttcttggctttatatatcttgtggaaaggacgaaacaccgtaatttctactaagtgtagataggagctaacggcaagaatgtaatttctactaagtgtagatcacagcaggtaacatgccgcttttttaagcttggcgtggatccgatatcaactagatcttgaga

SEQ ID NO: 6263 - DNA, 170 bp, Artificial sequence
  Nsd1.90_Cbwd1.85
  crRNA array
cgatttcttggctttatatatcttgtggaaaggacgaaacaccgtaatttctactaagtgtagataggagctaacggcaagaatgtaatttctactaagtgtagatacagcaggtaacatgccgccttttttaagcttggcgtggatccgatatcaactagatcttgaga

SEQ ID NO: 6264 - DNA, 170 bp, Artificial sequence
  Nsd1.90_Cdh1.387
  crRNA array
cgatttcttggctttatatatcttgtggaaaggacgaaacaccgtaatttctactaagtgtagataggagctaacggcaagaatgtaatttctactaagtgtagatctcggcgtctgccgggtccgttttttaagcttggcgtggatccgatatcaactagatcttgaga

SEQ ID NO: 6265 - DNA, 170 bp, Artificial sequence
  Nsd1.90_Cdh1.58
  crRNA array
cgatttcttggctttatatatcttgtggaaaggacgaaacaccgtaatttctactaagtgtagataggagctaacggcaagaatgtaatttctactaagtgtagatctcgtccgcgcccgggactcttttttaagcttggcgtggatccgatatcaactagatcttgaga

SEQ ID NO: 6266 - DNA, 170 bp, Artificial sequence
  Nsd1.90_Cdkn2a.647
  crRNA array
cgatttcttggctttatatatcttgtggaaaggacgaaacaccgtaatttctactaagtgtagataggagctaacggcaagaatgtaatttctactaagtgtagatgcaatcacgggagggagcagttttttaagcttggcgtggatccgatatcaactagatcttgaga

SEQ ID NO: 6267 - DNA, 170 bp, Artificial sequence
  Nsd1.90_Cdkn2a.648
  crRNA array
cgatttcttggctttatatatcttgtggaaaggacgaaacaccgtaatttctactaagtgtagataggagctaacggcaagaatgtaatttctactaagtgtagatcaatcacgggagggagcagattttttaagcttggcgtggatccgatatcaactagatcttgaga

SEQ ID NO: 6268 - DNA, 170 bp, Artificial sequence
  Nsd1.90_Cic.162
  crRNA array
cgatttcttggctttatatatcttgtggaaaggacgaaacaccgtaatttctactaagtgtagataggagctaacggcaagaatgtaatttctactaagtgtagatcgcaggcgcgcccggcggagttttttaagcttggcgtggatccgatatcaactagatcttgaga

SEQ ID NO: 6269 - DNA, 170 bp, Artificial sequence
  Nsd1.90_Cic.164
  crRNA array
cgatttcttggctttatatatcttgtggaaaggacgaaacaccgtaatttctactaagtgtagataggagctaacggcaagaatgtaatttctactaagtgtagatcgggccctgggccggcggctttttttaagcttggcgtggatccgatatcaactagatcttgaga

SEQ ID NO: 6270 - DNA, 170 bp, Artificial sequence
  Nsd1.90_Ctcf.229
  crRNA array
cgatttcttggctttatatatcttgtggaaaggacgaaacaccgtaatttctactaagtgtagataggagctaacggcaagaatgtaatttctactaagtgtagatggctggtggctgatagtctgttttttaagcttggcgtggatccgatatcaactagatcttgaga

SEQ ID NO: 6271 - DNA, 170 bp, Artificial sequence
  Nsd1.90_Ctcf.809
  crRNA array
cgatttcttggctttatatatcttgtggaaaggacgaaacaccgtaatttctactaagtgtagataggagctaacggcaagaatgtaatttctactaagtgtagataagcgctatcatgatcccaattttttaagcttggcgtggatccgatatcaactagatcttgaga

SEQ ID NO: 6272 - DNA, 170 bp, Artificial sequence
  Nsd1.90_Elf3.826
  crRNA array
cgatttcttggctttatatatcttgtggaaaggacgaaacaccgtaatttctactaagtgtagataggagctaacggcaagaatgtaatttctactaagtgtagattccgagacatcctaatccacttttttaagcttggcgtggatccgatatcaactagatcttgaga

SEQ ID NO: 6273 - DNA, 170 bp, Artificial sequence
  Nsd1.90_Elf3.983
  crRNA array
cgatttcttggctttatatatcttgtggaaaggacgaaacaccgtaatttctactaagtgtagataggagctaacggcaagaatgtaatttctactaagtgtagattaggccccctaactggaccattttttaagcttggcgtggatccgatatcaactagatcttgaga

SEQ ID NO: 6274 - DNA, 170 bp, Artificial sequence
  Nsd1.90_Ep300.310
  crRNA array
cgatttcttggctttatatatcttgtggaaaggacgaaacaccgtaatttctactaagtgtagataggagctaacggcaagaatgtaatttctactaagtgtagatatggtacgacagtgaggaagttttttaagcttggcgtggatccgatatcaactagatcttgaga

SEQ ID NO: 6275 - DNA, 170 bp, Artificial sequence
  Nsd1.90_Ep300.587
  crRNA array
cgatttcttggctttatatatcttgtggaaaggacgaaacaccgtaatttctactaagtgtagataggagctaacggcaagaatgtaatttctactaagtgtagatcgccccggggcccccaaccattttttaagcttggcgtggatccgatatcaactagatcttgaga

SEQ ID NO: 6276 - DNA, 170 bp, Artificial sequence
  Nsd1.90_Epha2.126
  crRNA array
cgatttcttggctttatatatcttgtggaaaggacgaaacaccgtaatttctactaagtgtagataggagctaacggcaagaatgtaatttctactaagtgtagatcctgtgccgccgcggccgccttttttaagcttggcgtggatccgatatcaactagatcttgaga

SEQ ID NO: 6277 - DNA, 170 bp, Artificial sequence
  Nsd1.90_Epha2.5
  crRNA array
cgatttcttggctttatatatcttgtggaaaggacgaaacaccgtaatttctactaagtgtagataggagctaacggcaagaatgtaatttctactaagtgtagatcatgagctggcgccacccggttttttaagcttggcgtggatccgatatcaactagatcttgaga

SEQ ID NO: 6278 - DNA, 170 bp, Artificial sequence
  Nsd1.90_Fat1.105
  crRNA array
cgatttcttggctttatatatcttgtggaaaggacgaaacaccgtaatttctactaagtgtagataggagctaacggcaagaatgtaatttctactaagtgtagataactcgaggtgacaacaagtttttttaagcttggcgtggatccgatatcaactagatcttgaga

SEQ ID NO: 6279 - DNA, 170 bp, Artificial sequence
  Nsd1.90_Fat1.122
  crRNA array
cgatttcttggctttatatatcttgtggaaaggacgaaacaccgtaatttctactaagtgtagataggagctaacggcaagaatgtaatttctactaagtgtagatccatcgacatggaaacgggattttttaagcttggcgtggatccgatatcaactagatcttgaga

SEQ ID NO: 6280 - DNA, 170 bp, Artificial sequence
  Nsd1.90_Fbxw7.21
  crRNA array
cgatttcttggctttatatatcttgtggaaaggacgaaacaccgtaatttctactaagtgtagataggagctaacggcaagaatgtaatttctactaagtgtagattaatgtgccgtagaaacccattttttaagcttggcgtggatccgatatcaactagatcttgaga

SEQ ID NO: 6281 - DNA, 170 bp, Artificial sequence
  Nsd1.90_Fbxw7.23
  crRNA array
cgatttcttggctttatatatcttgtggaaaggacgaaacaccgtaatttctactaagtgtagataggagctaacggcaagaatgtaatttctactaagtgtagatatgtgccgtagaaacccatattttttaagcttggcgtggatccgatatcaactagatcttgaga

SEQ ID NO: 6282 - DNA, 170 bp, Artificial sequence
  Nsd1.90_Gata3.34
  crRNA array
cgatttcttggctttatatatcttgtggaaaggacgaaacaccgtaatttctactaagtgtagataggagctaacggcaagaatgtaatttctactaagtgtagatctaaactatcccgcaaagatttttttaagcttggcgtggatccgatatcaactagatcttgaga

SEQ ID NO: 6283 - DNA, 170 bp, Artificial sequence
  Nsd1.90_Gata3.47
  crRNA array
cgatttcttggctttatatatcttgtggaaaggacgaaacaccgtaatttctactaagtgtagataggagctaacggcaagaatgtaatttctactaagtgtagatcgtagtaggacgggacgtggttttttaagcttggcgtggatccgatatcaactagatcttgaga

SEQ ID NO: 6284 - DNA, 170 bp, Artificial sequence
  Nsd1.90_H2-Q2.1
  crRNA array
cgatttcttggctttatatatcttgtggaaaggacgaaacaccgtaatttctactaagtgtagataggagctaacggcaagaatgtaatttctactaagtgtagatagggcggccaccaacagcagttttttaagcttggcgtggatccgatatcaactagatcttgaga

SEQ ID NO: 6285 - DNA, 170 bp, Artificial sequence
  Nsd1.90_H2-Q2.2
  crRNA array
cgatttcttggctttatatatcttgtggaaaggacgaaacaccgtaatttctactaagtgtagataggagctaacggcaagaatgtaatttctactaagtgtagattaacctgcgcccgctgctgattttttaagcttggcgtggatccgatatcaactagatcttgaga

SEQ ID NO: 6286 - DNA, 170 bp, Artificial sequence
  Nsd1.90_Kdm5c.1878
  crRNA array
cgatttcttggctttatatatcttgtggaaaggacgaaacaccgtaatttctactaagtgtagataggagctaacggcaagaatgtaatttctactaagtgtagatagagcacggcacccgcccccttttttaagcttggcgtggatccgatatcaactagatcttgaga

SEQ ID NO: 6287 - DNA, 170 bp, Artificial sequence
  Nsd1.90_Kdm5c.1879
  crRNA array
cgatttcttggctttatatatcttgtggaaaggacgaaacaccgtaatttctactaagtgtagataggagctaacggcaagaatgtaatttctactaagtgtagatgagcacggcacccgccccccttttttaagcttggcgtggatccgatatcaactagatcttgaga

SEQ ID NO: 6288 - DNA, 170 bp, Artificial sequence
  Nsd1.90_Kdm6a.56
  crRNA array
cgatttcttggctttatatatcttgtggaaaggacgaaacaccgtaatttctactaagtgtagataggagctaacggcaagaatgtaatttctactaagtgtagattcgctgccgcctctcgcggcttttttaagcttggcgtggatccgatatcaactagatcttgaga

SEQ ID NO: 6289 - DNA, 170 bp, Artificial sequence
  Nsd1.90_Kdm6a.57
  crRNA array
cgatttcttggctttatatatcttgtggaaaggacgaaacaccgtaatttctactaagtgtagataggagctaacggcaagaatgtaatttctactaagtgtagatcgctgccgcctctcgcggcattttttaagcttggcgtggatccgatatcaactagatcttgaga

SEQ ID NO: 6290 - DNA, 170 bp, Artificial sequence
  Nsd1.90_Kmt2b.265
  crRNA array
cgatttcttggctttatatatcttgtggaaaggacgaaacaccgtaatttctactaagtgtagataggagctaacggcaagaatgtaatttctactaagtgtagatccccaagtgaagcccacctgttttttaagcttggcgtggatccgatatcaactagatcttgaga

SEQ ID NO: 6291 - DNA, 170 bp, Artificial sequence
  Nsd1.90_Kmt2b.298
  crRNA array
cgatttcttggctttatatatcttgtggaaaggacgaaacaccgtaatttctactaagtgtagataggagctaacggcaagaatgtaatttctactaagtgtagattccggcagggaccggctggcttttttaagcttggcgtggatccgatatcaactagatcttgaga

SEQ ID NO: 6292 - DNA, 170 bp, Artificial sequence
  Nsd1.90_Kmt2c.1962
  crRNA array
cgatttcttggctttatatatcttgtggaaaggacgaaacaccgtaatttctactaagtgtagataggagctaacggcaagaatgtaatttctactaagtgtagatgtgacgatctgtgccacaagttttttaagcttggcgtggatccgatatcaactagatcttgaga

SEQ ID NO: 6293 - DNA, 170 bp, Artificial sequence
  Nsd1.90_Kmt2c.2236
  crRNA array
cgatttcttggctttatatatcttgtggaaaggacgaaacaccgtaatttctactaagtgtagataggagctaacggcaagaatgtaatttctactaagtgtagatactcgacctccacctccctattttttaagcttggcgtggatccgatatcaactagatcttgaga

SEQ ID NO: 6294 - DNA, 170 bp, Artificial sequence
  Nsd1.90_Kmt2d.316
  crRNA array
cgatttcttggctttatatatcttgtggaaaggacgaaacaccgtaatttctactaagtgtagataggagctaacggcaagaatgtaatttctactaagtgtagatactccaggccacccaggtggttttttaagcttggcgtggatccgatatcaactagatcttgaga

SEQ ID NO: 6295 - DNA, 170 bp, Artificial sequence
  Nsd1.90_Kmt2d.416
  crRNA array
cgatttcttggctttatatatcttgtggaaaggacgaaacaccgtaatttctactaagtgtagataggagctaacggcaagaatgtaatttctactaagtgtagattaaacccccgggggaagggtttttttaagcttggcgtggatccgatatcaactagatcttgaga

SEQ ID NO: 6296 - DNA, 170 bp, Artificial sequence
  Nsd1.90_Map2k4.119
  crRNA array
cgatttcttggctttatatatcttgtggaaaggacgaaacaccgtaatttctactaagtgtagataggagctaacggcaagaatgtaatttctactaagtgtagattgctgtgtgggcggccacatttttttaagcttggcgtggatccgatatcaactagatcttgaga

SEQ ID NO: 6297 - DNA, 170 bp, Artificial sequence
  Nsd1.90_Map2k4.1261
  crRNA array
cgatttcttggctttatatatcttgtggaaaggacgaaacaccgtaatttctactaagtgtagataggagctaacggcaagaatgtaatttctactaagtgtagatgatgtagtaatgcggagtagttttttaagcttggcgtggatccgatatcaactagatcttgaga

SEQ ID NO: 6298 - DNA, 170 bp, Artificial sequence
  Nsd1.90_Map3k1.235
  crRNA array
cgatttcttggctttatatatcttgtggaaaggacgaaacaccgtaatttctactaagtgtagataggagctaacggcaagaatgtaatttctactaagtgtagataaaacgctactgatcgatcgttttttaagcttggcgtggatccgatatcaactagatcttgaga

SEQ ID NO: 6299 - DNA, 170 bp, Artificial sequence
  Nsd1.90_Map3k1.3838
  crRNA array
cgatttcttggctttatatatcttgtggaaaggacgaaacaccgtaatttctactaagtgtagataggagctaacggcaagaatgtaatttctactaagtgtagatccaacaacagggccccactattttttaagcttggcgtggatccgatatcaactagatcttgaga

SEQ ID NO: 6300 - DNA, 170 bp, Artificial sequence
  Nsd1.90_Mga.1655
  crRNA array
cgatttcttggctttatatatcttgtggaaaggacgaaacaccgtaatttctactaagtgtagataggagctaacggcaagaatgtaatttctactaagtgtagatcgagaagtggagagcatattttttttaagcttggcgtggatccgatatcaactagatcttgaga

SEQ ID NO: 6301 - DNA, 170 bp, Artificial sequence
  Nsd1.90_Mga.93
  crRNA array
cgatttcttggctttatatatcttgtggaaaggacgaaacaccgtaatttctactaagtgtagataggagctaacggcaagaatgtaatttctactaagtgtagatgagaaggctccccataatgtttttttaagcttggcgtggatccgatatcaactagatcttgaga

SEQ ID NO: 6302 - DNA, 170 bp, Artificial sequence
  Nsd1.90_Nf1.746
  crRNA array
cgatttcttggctttatatatcttgtggaaaggacgaaacaccgtaatttctactaagtgtagataggagctaacggcaagaatgtaatttctactaagtgtagattaagcataatgatgatgccattttttaagcttggcgtggatccgatatcaactagatcttgaga

SEQ ID NO: 6303 - DNA, 170 bp, Artificial sequence
  Nsd1.90_Nf1.97
  crRNA array
cgatttcttggctttatatatcttgtggaaaggacgaaacaccgtaatttctactaagtgtagataggagctaacggcaagaatgtaatttctactaagtgtagatagcccgctacatgctgatgcttttttaagcttggcgtggatccgatatcaactagatcttgaga

SEQ ID NO: 6304 - DNA, 170 bp, Artificial sequence
  Nsd1.90_Nf2.356
  crRNA array
cgatttcttggctttatatatcttgtggaaaggacgaaacaccgtaatttctactaagtgtagataggagctaacggcaagaatgtaatttctactaagtgtagatcggagtcatctgatagagatttttttaagcttggcgtggatccgatatcaactagatcttgaga

SEQ ID NO: 6305 - DNA, 170 bp, Artificial sequence
  Nsd1.90_Nf2.768
  crRNA array
cgatttcttggctttatatatcttgtggaaaggacgaaacaccgtaatttctactaagtgtagataggagctaacggcaagaatgtaatttctactaagtgtagatccgaagccccagtgtccggcttttttaagcttggcgtggatccgatatcaactagatcttgaga

SEQ ID NO: 6306 - DNA, 170 bp, Artificial sequence
  Nsd1.90_Notch1.1849
  crRNA array
cgatttcttggctttatatatcttgtggaaaggacgaaacaccgtaatttctactaagtgtagataggagctaacggcaagaatgtaatttctactaagtgtagatctggcgggtgggcggcgctgttttttaagcttggcgtggatccgatatcaactagatcttgaga

SEQ ID NO: 6307 - DNA, 170 bp, Artificial sequence
  Nsd1.90_Notch1.649
  crRNA array
cgatttcttggctttatatatcttgtggaaaggacgaaacaccgtaatttctactaagtgtagataggagctaacggcaagaatgtaatttctactaagtgtagattgggccaacgatgccaggacttttttaagcttggcgtggatccgatatcaactagatcttgaga

SEQ ID NO: 6308 - DNA, 170 bp, Artificial sequence
  Nsd1.90_Pbrm1.1236
  crRNA array
cgatttcttggctttatatatcttgtggaaaggacgaaacaccgtaatttctactaagtgtagataggagctaacggcaagaatgtaatttctactaagtgtagatgccgataaaaccaacagccgttttttaagcttggcgtggatccgatatcaactagatcttgaga

SEQ ID NO: 6309 - DNA, 170 bp, Artificial sequence
  Nsd1.90_Pbrm1.969
  crRNA array
cgatttcttggctttatatatcttgtggaaaggacgaaacaccgtaatttctactaagtgtagataggagctaacggcaagaatgtaatttctactaagtgtagatgagccctaatgaacagctcattttttaagcttggcgtggatccgatatcaactagatcttgaga

SEQ ID NO: 6310 - DNA, 170 bp, Artificial sequence
  Nsd1.90_Pik3r1.76
  crRNA array
cgatttcttggctttatatatcttgtggaaaggacgaaacaccgtaatttctactaagtgtagataggagctaacggcaagaatgtaatttctactaagtgtagataaaacctatacggcccgcacttttttaagcttggcgtggatccgatatcaactagatcttgaga

SEQ ID NO: 6311 - DNA, 170 bp, Artificial sequence
  Nsd1.90_Pik3r1.77
  crRNA array
cgatttcttggctttatatatcttgtggaaaggacgaaacaccgtaatttctactaagtgtagataggagctaacggcaagaatgtaatttctactaagtgtagataaacctatacggcccgcactttttttaagcttggcgtggatccgatatcaactagatcttgaga

SEQ ID NO: 6312 - DNA, 170 bp, Artificial sequence
  Nsd1.90_Pten.240
  crRNA array
cgatttcttggctttatatatcttgtggaaaggacgaaacaccgtaatttctactaagtgtagataggagctaacggcaagaatgtaatttctactaagtgtagattgcatacgctatagctgcttttttttaagcttggcgtggatccgatatcaactagatcttgaga

SEQ ID NO: 6313 - DNA, 170 bp, Artificial sequence
  Nsd1.90_Pten.265
  crRNA array
cgatttcttggctttatatatcttgtggaaaggacgaaacaccgtaatttctactaagtgtagataggagctaacggcaagaatgtaatttctactaagtgtagataagcgtggtgcgtgacgcacttttttaagcttggcgtggatccgatatcaactagatcttgaga

SEQ ID NO: 6314 - DNA, 170 bp, Artificial sequence
  Nsd1.90_Rasa1.1478
  crRNA array
cgatttcttggctttatatatcttgtggaaaggacgaaacaccgtaatttctactaagtgtagataggagctaacggcaagaatgtaatttctactaagtgtagatcgataatggtctatgatgtcttttttaagcttggcgtggatccgatatcaactagatcttgaga

SEQ ID NO: 6315 - DNA, 170 bp, Artificial sequence
  Nsd1.90_Rasa1.223
  crRNA array
cgatttcttggctttatatatcttgtggaaaggacgaaacaccgtaatttctactaagtgtagataggagctaacggcaagaatgtaatttctactaagtgtagattccatggagtatcgtgctcgttttttaagcttggcgtggatccgatatcaactagatcttgaga

SEQ ID NO: 6316 - DNA, 170 bp, Artificial sequence
  Nsd1.90_Rb1.211
  crRNA array
cgatttcttggctttatatatcttgtggaaaggacgaaacaccgtaatttctactaagtgtagataggagctaacggcaagaatgtaatttctactaagtgtagattctgacatgatcgggtacctttttttaagcttggcgtggatccgatatcaactagatcttgaga

SEQ ID NO: 6317 - DNA, 170 bp, Artificial sequence
  Nsd1.90_Rb1.394
  crRNA array
cgatttcttggctttatatatcttgtggaaaggacgaaacaccgtaatttctactaagtgtagataggagctaacggcaagaatgtaatttctactaagtgtagatagaaatctcgaagcaggatcttttttaagcttggcgtggatccgatatcaactagatcttgaga

SEQ ID NO: 6318 - DNA, 170 bp, Artificial sequence
  Nsd1.90_Rbm10.5
  crRNA array
cgatttcttggctttatatatcttgtggaaaggacgaaacaccgtaatttctactaagtgtagataggagctaacggcaagaatgtaatttctactaagtgtagatacgaaacctgaacccacacattttttaagcttggcgtggatccgatatcaactagatcttgaga

SEQ ID NO: 6319 - DNA, 170 bp, Artificial sequence
  Nsd1.90_Rbm10.6
  crRNA array
cgatttcttggctttatatatcttgtggaaaggacgaaacaccgtaatttctactaagtgtagataggagctaacggcaagaatgtaatttctactaagtgtagatcgaaacctgaacccacacagttttttaagcttggcgtggatccgatatcaactagatcttgaga

SEQ ID NO: 6320 - DNA, 170 bp, Artificial sequence
  Nsd1.90_Rnf43.1920
  crRNA array
cgatttcttggctttatatatcttgtggaaaggacgaaacaccgtaatttctactaagtgtagataggagctaacggcaagaatgtaatttctactaagtgtagatatccccgtgccgtggactccttttttaagcttggcgtggatccgatatcaactagatcttgaga

SEQ ID NO: 6321 - DNA, 170 bp, Artificial sequence
  Nsd1.90_Rnf43.39
  crRNA array
cgatttcttggctttatatatcttgtggaaaggacgaaacaccgtaatttctactaagtgtagataggagctaacggcaagaatgtaatttctactaagtgtagatcaaggggatcactctgataattttttaagcttggcgtggatccgatatcaactagatcttgaga

SEQ ID NO: 6322 - DNA, 170 bp, Artificial sequence
  Nsd1.90_Runx1.204
  crRNA array
cgatttcttggctttatatatcttgtggaaaggacgaaacaccgtaatttctactaagtgtagataggagctaacggcaagaatgtaatttctactaagtgtagattaaataagtccagccgttttttttttaagcttggcgtggatccgatatcaactagatcttgaga

SEQ ID NO: 6323 - DNA, 170 bp, Artificial sequence
  Nsd1.90_Runx1.81
  crRNA array
cgatttcttggctttatatatcttgtggaaaggacgaaacaccgtaatttctactaagtgtagataggagctaacggcaagaatgtaatttctactaagtgtagataggacgcgtatgggaattttttttttaagcttggcgtggatccgatatcaactagatcttgaga

SEQ ID NO: 6324 - DNA, 170 bp, Artificial sequence
  Nsd1.90_Setd2.143
  crRNA array
cgatttcttggctttatatatcttgtggaaaggacgaaacaccgtaatttctactaagtgtagataggagctaacggcaagaatgtaatttctactaagtgtagatgcacaaccacaacagactggttttttaagcttggcgtggatccgatatcaactagatcttgaga

SEQ ID NO: 6325 - DNA, 170 bp, Artificial sequence
  Nsd1.90_Setd2.508
  crRNA array
cgatttcttggctttatatatcttgtggaaaggacgaaacaccgtaatttctactaagtgtagataggagctaacggcaagaatgtaatttctactaagtgtagattacgatcccgagcacccgacttttttaagcttggcgtggatccgatatcaactagatcttgaga

SEQ ID NO: 6326 - DNA, 170 bp, Artificial sequence
  Nsd1.90_Smad4.3038
  crRNA array
cgatttcttggctttatatatcttgtggaaaggacgaaacaccgtaatttctactaagtgtagataggagctaacggcaagaatgtaatttctactaagtgtagatatctgcggcagtgtcaccggttttttaagcttggcgtggatccgatatcaactagatcttgaga

SEQ ID NO: 6327 - DNA, 170 bp, Artificial sequence
  Nsd1.90_Smad4.39
  crRNA array
cgatttcttggctttatatatcttgtggaaaggacgaaacaccgtaatttctactaagtgtagataggagctaacggcaagaatgtaatttctactaagtgtagatagtcaaacgcatactgacaattttttaagcttggcgtggatccgatatcaactagatcttgaga

SEQ ID NO: 6328 - DNA, 170 bp, Artificial sequence
  Nsd1.90_Stag2.1409
  crRNA array
cgatttcttggctttatatatcttgtggaaaggacgaaacaccgtaatttctactaagtgtagataggagctaacggcaagaatgtaatttctactaagtgtagatgctaataactgcggaagggcttttttaagcttggcgtggatccgatatcaactagatcttgaga

SEQ ID NO: 6329 - DNA, 170 bp, Artificial sequence
  Nsd1.90_Stag2.4401
  crRNA array
cgatttcttggctttatatatcttgtggaaaggacgaaacaccgtaatttctactaagtgtagataggagctaacggcaagaatgtaatttctactaagtgtagattaatcgtccagtggtgtatattttttaagcttggcgtggatccgatatcaactagatcttgaga

SEQ ID NO: 6330 - DNA, 170 bp, Artificial sequence
  Nsd1.90_Tbl1xr1.1
  crRNA array
cgatttcttggctttatatatcttgtggaaaggacgaaacaccgtaatttctactaagtgtagataggagctaacggcaagaatgtaatttctactaagtgtagatggatgcgcatactggtgaagttttttaagcttggcgtggatccgatatcaactagatcttgaga

SEQ ID NO: 6331 - DNA, 170 bp, Artificial sequence
  Nsd1.90_Tbl1xr1.83
  crRNA array
cgatttcttggctttatatatcttgtggaaaggacgaaacaccgtaatttctactaagtgtagataggagctaacggcaagaatgtaatttctactaagtgtagatatggtcgacccatcgagtctttttttaagcttggcgtggatccgatatcaactagatcttgaga

SEQ ID NO: 6332 - DNA, 170 bp, Artificial sequence
  Nsd1.90_Tgfbr2.290
  crRNA array
cgatttcttggctttatatatcttgtggaaaggacgaaacaccgtaatttctactaagtgtagataggagctaacggcaagaatgtaatttctactaagtgtagatcctctcggcgcccgggtaaattttttaagcttggcgtggatccgatatcaactagatcttgaga

SEQ ID NO: 6333 - DNA, 170 bp, Artificial sequence
  Nsd1.90_Tgfbr2.292
  crRNA array
cgatttcttggctttatatatcttgtggaaaggacgaaacaccgtaatttctactaagtgtagataggagctaacggcaagaatgtaatttctactaagtgtagatcccgggcgccgagagggaaattttttaagcttggcgtggatccgatatcaactagatcttgaga

SEQ ID NO: 6334 - DNA, 170 bp, Artificial sequence
  Nsd1.90_Trp53.4
  crRNA array
cgatttcttggctttatatatcttgtggaaaggacgaaacaccgtaatttctactaagtgtagataggagctaacggcaagaatgtaatttctactaagtgtagatccctgaactgcccccagggattttttaagcttggcgtggatccgatatcaactagatcttgaga

SEQ ID NO: 6335 - DNA, 170 bp, Artificial sequence
  Nsd1.90_Trp53.528
  crRNA array
cgatttcttggctttatatatcttgtggaaaggacgaaacaccgtaatttctactaagtgtagataggagctaacggcaagaatgtaatttctactaagtgtagatgctgggccagcagagacctgttttttaagcttggcgtggatccgatatcaactagatcttgaga

SEQ ID NO: 6336 - DNA, 170 bp, Artificial sequence
  Nsd1.90_Vhl.1
  crRNA array
cgatttcttggctttatatatcttgtggaaaggacgaaacaccgtaatttctactaagtgtagataggagctaacggcaagaatgtaatttctactaagtgtagatagggctcccggcggccatttttttttaagcttggcgtggatccgatatcaactagatcttgaga

SEQ ID NO: 6337 - DNA, 170 bp, Artificial sequence
  Nsd1.90_Vhl.151
  crRNA array
cgatttcttggctttatatatcttgtggaaaggacgaaacaccgtaatttctactaagtgtagataggagctaacggcaagaatgtaatttctactaagtgtagattagagcactcacccgagggattttttaagcttggcgtggatccgatatcaactagatcttgaga

SEQ ID NO: 6338 - DNA, 170 bp, Artificial sequence
  Nsd1.90_Zc3h13.1387
  crRNA array
cgatttcttggctttatatatcttgtggaaaggacgaaacaccgtaatttctactaagtgtagataggagctaacggcaagaatgtaatttctactaagtgtagatgtgacgccggtcatgtgactttttttaagcttggcgtggatccgatatcaactagatcttgaga

SEQ ID NO: 6339 - DNA, 170 bp, Artificial sequence
  Nsd1.90_Zc3h13.1777
  crRNA array
cgatttcttggctttatatatcttgtggaaaggacgaaacaccgtaatttctactaagtgtagataggagctaacggcaagaatgtaatttctactaagtgtagatgatgctgccagtgtagcggcttttttaagcttggcgtggatccgatatcaactagatcttgaga

SEQ ID NO: 6340 - DNA, 170 bp, Artificial sequence
  Pbrm1.1236_Acvr2a.155
  crRNA array
cgatttcttggctttatatatcttgtggaaaggacgaaacaccgtaatttctactaagtgtagatgccgataaaaccaacagccgtaatttctactaagtgtagatggacctggctaatcaagtatttttttaagcttggcgtggatccgatatcaactagatcttgaga

SEQ ID NO: 6341 - DNA, 170 bp, Artificial sequence
  Pbrm1.1236_Acvr2a.70
  crRNA array
cgatttcttggctttatatatcttgtggaaaggacgaaacaccgtaatttctactaagtgtagatgccgataaaaccaacagccgtaatttctactaagtgtagatcccgaggcgccggagaagccttttttaagcttggcgtggatccgatatcaactagatcttgaga

SEQ ID NO: 6342 - DNA, 170 bp, Artificial sequence
  Pbrm1.1236_Apc.21
  crRNA array
cgatttcttggctttatatatcttgtggaaaggacgaaacaccgtaatttctactaagtgtagatgccgataaaaccaacagccgtaatttctactaagtgtagatgtgatccacacgtgtagctgttttttaagcttggcgtggatccgatatcaactagatcttgaga

SEQ ID NO: 6343 - DNA, 170 bp, Artificial sequence
  Pbrm1.1236_Apc.867
  crRNA array
cgatttcttggctttatatatcttgtggaaaggacgaaacaccgtaatttctactaagtgtagatgccgataaaaccaacagccgtaatttctactaagtgtagatcagtcccaggcggcggaagcttttttaagcttggcgtggatccgatatcaactagatcttgaga

SEQ ID NO: 6344 - DNA, 170 bp, Artificial sequence
  Pbrm1.1236_Arid1a.2
  crRNA array
cgatttcttggctttatatatcttgtggaaaggacgaaacaccgtaatttctactaagtgtagatgccgataaaaccaacagccgtaatttctactaagtgtagatcccgcgcccccgtcctggggttttttaagcttggcgtggatccgatatcaactagatcttgaga

SEQ ID NO: 6345 - DNA, 170 bp, Artificial sequence
  Pbrm1.1236_Arid1a.5
  crRNA array
cgatttcttggctttatatatcttgtggaaaggacgaaacaccgtaatttctactaagtgtagatgccgataaaaccaacagccgtaatttctactaagtgtagatcccgcgctcggccgctgccgttttttaagcttggcgtggatccgatatcaactagatcttgaga

SEQ ID NO: 6346 - DNA, 170 bp, Artificial sequence
  Pbrm1.1236_Arid2.166
  crRNA array
cgatttcttggctttatatatcttgtggaaaggacgaaacaccgtaatttctactaagtgtagatgccgataaaaccaacagccgtaatttctactaagtgtagataaccgcgatctgggttttttttttttaagcttggcgtggatccgatatcaactagatcttgaga

SEQ ID NO: 6347 - DNA, 170 bp, Artificial sequence
  Pbrm1.1236_Arid2.172
  crRNA array
cgatttcttggctttatatatcttgtggaaaggacgaaacaccgtaatttctactaagtgtagatgccgataaaaccaacagccgtaatttctactaagtgtagatctggacgagctgcggcagttttttttaagcttggcgtggatccgatatcaactagatcttgaga

SEQ ID NO: 6348 - DNA, 170 bp, Artificial sequence
  Pbrm1.1236_Atm.120
  crRNA array
cgatttcttggctttatatatcttgtggaaaggacgaaacaccgtaatttctactaagtgtagatgccgataaaaccaacagccgtaatttctactaagtgtagatgacaggtagtcggcagctaattttttaagcttggcgtggatccgatatcaactagatcttgaga

SEQ ID NO: 6349 - DNA, 170 bp, Artificial sequence
  Pbrm1.1236_Atm.997
  crRNA array
cgatttcttggctttatatatcttgtggaaaggacgaaacaccgtaatttctactaagtgtagatgccgataaaaccaacagccgtaatttctactaagtgtagatgagaaagtctccgaatcgttttttttaagcttggcgtggatccgatatcaactagatcttgaga

SEQ ID NO: 6350 - DNA, 170 bp, Artificial sequence
  Pbrm1.1236_Atrx.249
  crRNA array
cgatttcttggctttatatatcttgtggaaaggacgaaacaccgtaatttctactaagtgtagatgccgataaaaccaacagccgtaatttctactaagtgtagattagccagtcgctcatatctcttttttaagcttggcgtggatccgatatcaactagatcttgaga

SEQ ID NO: 6351 - DNA, 170 bp, Artificial sequence
  Pbrm1.1236_Atrx.251
  crRNA array
cgatttcttggctttatatatcttgtggaaaggacgaaacaccgtaatttctactaagtgtagatgccgataaaaccaacagccgtaatttctactaagtgtagatgccagtcgctcatatctctgttttttaagcttggcgtggatccgatatcaactagatcttgaga

SEQ ID NO: 6352 - DNA, 170 bp, Artificial sequence
  Pbrm1.1236_Bcor.203
  crRNA array
cgatttcttggctttatatatcttgtggaaaggacgaaacaccgtaatttctactaagtgtagatgccgataaaaccaacagccgtaatttctactaagtgtagatccccggagcggagtccaggcttttttaagcttggcgtggatccgatatcaactagatcttgaga

SEQ ID NO: 6353 - DNA, 170 bp, Artificial sequence
  Pbrm1.1236_Bcor.475
  crRNA array
cgatttcttggctttatatatcttgtggaaaggacgaaacaccgtaatttctactaagtgtagatgccgataaaaccaacagccgtaatttctactaagtgtagattgcaacccctctgtatgggattttttaagcttggcgtggatccgatatcaactagatcttgaga

SEQ ID NO: 6354 - DNA, 170 bp, Artificial sequence
  Pbrm1.1236_Brca1.112
  crRNA array
cgatttcttggctttatatatcttgtggaaaggacgaaacaccgtaatttctactaagtgtagatgccgataaaaccaacagccgtaatttctactaagtgtagatctagacgctctgtggagactttttttaagcttggcgtggatccgatatcaactagatcttgaga

SEQ ID NO: 6355 - DNA, 170 bp, Artificial sequence
  Pbrm1.1236_Brca1.53
  crRNA array
cgatttcttggctttatatatcttgtggaaaggacgaaacaccgtaatttctactaagtgtagatgccgataaaaccaacagccgtaatttctactaagtgtagataatgaggaggcgtcgatcatttttttaagcttggcgtggatccgatatcaactagatcttgaga

SEQ ID NO: 6356 - DNA, 170 bp, Artificial sequence
  Pbrm1.1236_Casp8.45
  crRNA array
cgatttcttggctttatatatcttgtggaaaggacgaaacaccgtaatttctactaagtgtagatgccgataaaaccaacagccgtaatttctactaagtgtagatctaccgagatcctgtgaatgttttttaagcttggcgtggatccgatatcaactagatcttgaga

SEQ ID NO: 6357 - DNA, 170 bp, Artificial sequence
  Pbrm1.1236_Casp8.54
  crRNA array
cgatttcttggctttatatatcttgtggaaaggacgaaacaccgtaatttctactaagtgtagatgccgataaaaccaacagccgtaatttctactaagtgtagatcagtgcagtcgtcgtaagatttttttaagcttggcgtggatccgatatcaactagatcttgaga

SEQ ID NO: 6358 - DNA, 170 bp, Artificial sequence
  Pbrm1.1236_Cbwd1.84
  crRNA array
cgatttcttggctttatatatcttgtggaaaggacgaaacaccgtaatttctactaagtgtagatgccgataaaaccaacagccgtaatttctactaagtgtagatcacagcaggtaacatgccgcttttttaagcttggcgtggatccgatatcaactagatcttgaga

SEQ ID NO: 6359 - DNA, 170 bp, Artificial sequence
  Pbrm1.1236_Cbwd1.85
  crRNA array
cgatttcttggctttatatatcttgtggaaaggacgaaacaccgtaatttctactaagtgtagatgccgataaaaccaacagccgtaatttctactaagtgtagatacagcaggtaacatgccgccttttttaagcttggcgtggatccgatatcaactagatcttgaga

SEQ ID NO: 6360 - DNA, 170 bp, Artificial sequence
  Pbrm1.1236_Cdh1.387
  crRNA array
cgatttcttggctttatatatcttgtggaaaggacgaaacaccgtaatttctactaagtgtagatgccgataaaaccaacagccgtaatttctactaagtgtagatctcggcgtctgccgggtccgttttttaagcttggcgtggatccgatatcaactagatcttgaga

SEQ ID NO: 6361 - DNA, 170 bp, Artificial sequence
  Pbrm1.1236_Cdh1.58
  crRNA array
cgatttcttggctttatatatcttgtggaaaggacgaaacaccgtaatttctactaagtgtagatgccgataaaaccaacagccgtaatttctactaagtgtagatctcgtccgcgcccgggactcttttttaagcttggcgtggatccgatatcaactagatcttgaga

SEQ ID NO: 6362 - DNA, 170 bp, Artificial sequence
  Pbrm1.1236_Cdkn2a.647
  crRNA array
cgatttcttggctttatatatcttgtggaaaggacgaaacaccgtaatttctactaagtgtagatgccgataaaaccaacagccgtaatttctactaagtgtagatgcaatcacgggagggagcagttttttaagcttggcgtggatccgatatcaactagatcttgaga

SEQ ID NO: 6363 - DNA, 170 bp, Artificial sequence
  Pbrm1.1236_Cdkn2a.648
  crRNA array
cgatttcttggctttatatatcttgtggaaaggacgaaacaccgtaatttctactaagtgtagatgccgataaaaccaacagccgtaatttctactaagtgtagatcaatcacgggagggagcagattttttaagcttggcgtggatccgatatcaactagatcttgaga

SEQ ID NO: 6364 - DNA, 170 bp, Artificial sequence
  Pbrm1.1236_Cic.162
  crRNA array
cgatttcttggctttatatatcttgtggaaaggacgaaacaccgtaatttctactaagtgtagatgccgataaaaccaacagccgtaatttctactaagtgtagatcgcaggcgcgcccggcggagttttttaagcttggcgtggatccgatatcaactagatcttgaga

SEQ ID NO: 6365 - DNA, 170 bp, Artificial sequence
  Pbrm1.1236_Cic.164
  crRNA array
cgatttcttggctttatatatcttgtggaaaggacgaaacaccgtaatttctactaagtgtagatgccgataaaaccaacagccgtaatttctactaagtgtagatcgggccctgggccggcggctttttttaagcttggcgtggatccgatatcaactagatcttgaga

SEQ ID NO: 6366 - DNA, 170 bp, Artificial sequence
  Pbrm1.1236_Ctcf.229
  crRNA array
cgatttcttggctttatatatcttgtggaaaggacgaaacaccgtaatttctactaagtgtagatgccgataaaaccaacagccgtaatttctactaagtgtagatggctggtggctgatagtctgttttttaagcttggcgtggatccgatatcaactagatcttgaga

SEQ ID NO: 6367 - DNA, 170 bp, Artificial sequence
  Pbrm1.1236_Ctcf.809
  crRNA array
cgatttcttggctttatatatcttgtggaaaggacgaaacaccgtaatttctactaagtgtagatgccgataaaaccaacagccgtaatttctactaagtgtagataagcgctatcatgatcccaattttttaagcttggcgtggatccgatatcaactagatcttgaga

SEQ ID NO: 6368 - DNA, 170 bp, Artificial sequence
  Pbrm1.1236_Elf3.826
  crRNA array
cgatttcttggctttatatatcttgtggaaaggacgaaacaccgtaatttctactaagtgtagatgccgataaaaccaacagccgtaatttctactaagtgtagattccgagacatcctaatccacttttttaagcttggcgtggatccgatatcaactagatcttgaga

SEQ ID NO: 6369 - DNA, 170 bp, Artificial sequence
  Pbrm1.1236_Elf3.983
  crRNA array
cgatttcttggctttatatatcttgtggaaaggacgaaacaccgtaatttctactaagtgtagatgccgataaaaccaacagccgtaatttctactaagtgtagattaggccccctaactggaccattttttaagcttggcgtggatccgatatcaactagatcttgaga

SEQ ID NO: 6370 - DNA, 170 bp, Artificial sequence
  Pbrm1.1236_Ep300.310
  crRNA array
cgatttcttggctttatatatcttgtggaaaggacgaaacaccgtaatttctactaagtgtagatgccgataaaaccaacagccgtaatttctactaagtgtagatatggtacgacagtgaggaagttttttaagcttggcgtggatccgatatcaactagatcttgaga

SEQ ID NO: 6371 - DNA, 170 bp, Artificial sequence
  Pbrm1.1236_Ep300.587
  crRNA array
cgatttcttggctttatatatcttgtggaaaggacgaaacaccgtaatttctactaagtgtagatgccgataaaaccaacagccgtaatttctactaagtgtagatcgccccggggcccccaaccattttttaagcttggcgtggatccgatatcaactagatcttgaga

SEQ ID NO: 6372 - DNA, 170 bp, Artificial sequence
  Pbrm1.1236_Epha2.126
  crRNA array
cgatttcttggctttatatatcttgtggaaaggacgaaacaccgtaatttctactaagtgtagatgccgataaaaccaacagccgtaatttctactaagtgtagatcctgtgccgccgcggccgccttttttaagcttggcgtggatccgatatcaactagatcttgaga

SEQ ID NO: 6373 - DNA, 170 bp, Artificial sequence
  Pbrm1.1236_Epha2.5
  crRNA array
cgatttcttggctttatatatcttgtggaaaggacgaaacaccgtaatttctactaagtgtagatgccgataaaaccaacagccgtaatttctactaagtgtagatcatgagctggcgccacccggttttttaagcttggcgtggatccgatatcaactagatcttgaga

SEQ ID NO: 6374 - DNA, 170 bp, Artificial sequence
  Pbrm1.1236_Fat1.105
  crRNA array
cgatttcttggctttatatatcttgtggaaaggacgaaacaccgtaatttctactaagtgtagatgccgataaaaccaacagccgtaatttctactaagtgtagataactcgaggtgacaacaagtttttttaagcttggcgtggatccgatatcaactagatcttgaga

SEQ ID NO: 6375 - DNA, 170 bp, Artificial sequence
  Pbrm1.1236_Fat1.122
  crRNA array
cgatttcttggctttatatatcttgtggaaaggacgaaacaccgtaatttctactaagtgtagatgccgataaaaccaacagccgtaatttctactaagtgtagatccatcgacatggaaacgggattttttaagcttggcgtggatccgatatcaactagatcttgaga

SEQ ID NO: 6376 - DNA, 170 bp, Artificial sequence
  Pbrm1.1236_Fbxw7.21
  crRNA array
cgatttcttggctttatatatcttgtggaaaggacgaaacaccgtaatttctactaagtgtagatgccgataaaaccaacagccgtaatttctactaagtgtagattaatgtgccgtagaaacccattttttaagcttggcgtggatccgatatcaactagatcttgaga

SEQ ID NO: 6377 - DNA, 170 bp, Artificial sequence
  Pbrm1.1236_Fbxw7.23
  crRNA array
cgatttcttggctttatatatcttgtggaaaggacgaaacaccgtaatttctactaagtgtagatgccgataaaaccaacagccgtaatttctactaagtgtagatatgtgccgtagaaacccatattttttaagcttggcgtggatccgatatcaactagatcttgaga

SEQ ID NO: 6378 - DNA, 170 bp, Artificial sequence
  Pbrm1.1236_Gata3.34
  crRNA array
cgatttcttggctttatatatcttgtggaaaggacgaaacaccgtaatttctactaagtgtagatgccgataaaaccaacagccgtaatttctactaagtgtagatctaaactatcccgcaaagatttttttaagcttggcgtggatccgatatcaactagatcttgaga

SEQ ID NO: 6379 - DNA, 170 bp, Artificial sequence
  Pbrm1.1236_Gata3.47
  crRNA array
cgatttcttggctttatatatcttgtggaaaggacgaaacaccgtaatttctactaagtgtagatgccgataaaaccaacagccgtaatttctactaagtgtagatcgtagtaggacgggacgtggttttttaagcttggcgtggatccgatatcaactagatcttgaga

SEQ ID NO: 6380 - DNA, 170 bp, Artificial sequence
  Pbrm1.1236_H2-Q2.1
  crRNA array
cgatttcttggctttatatatcttgtggaaaggacgaaacaccgtaatttctactaagtgtagatgccgataaaaccaacagccgtaatttctactaagtgtagatagggcggccaccaacagcagttttttaagcttggcgtggatccgatatcaactagatcttgaga

SEQ ID NO: 6381 - DNA, 170 bp, Artificial sequence
  Pbrm1.1236_H2-Q2.2
  crRNA array
cgatttcttggctttatatatcttgtggaaaggacgaaacaccgtaatttctactaagtgtagatgccgataaaaccaacagccgtaatttctactaagtgtagattaacctgcgcccgctgctgattttttaagcttggcgtggatccgatatcaactagatcttgaga

SEQ ID NO: 6382 - DNA, 170 bp, Artificial sequence
  Pbrm1.1236_Kdm5c.1878
  crRNA array
cgatttcttggctttatatatcttgtggaaaggacgaaacaccgtaatttctactaagtgtagatgccgataaaaccaacagccgtaatttctactaagtgtagatagagcacggcacccgcccccttttttaagcttggcgtggatccgatatcaactagatcttgaga

SEQ ID NO: 6383 - DNA, 170 bp, Artificial sequence
  Pbrm1.1236_Kdm5c.1879
  crRNA array
cgatttcttggctttatatatcttgtggaaaggacgaaacaccgtaatttctactaagtgtagatgccgataaaaccaacagccgtaatttctactaagtgtagatgagcacggcacccgccccccttttttaagcttggcgtggatccgatatcaactagatcttgaga

SEQ ID NO: 6384 - DNA, 170 bp, Artificial sequence
  Pbrm1.1236_Kdm6a.56
  crRNA array
cgatttcttggctttatatatcttgtggaaaggacgaaacaccgtaatttctactaagtgtagatgccgataaaaccaacagccgtaatttctactaagtgtagattcgctgccgcctctcgcggcttttttaagcttggcgtggatccgatatcaactagatcttgaga

SEQ ID NO: 6385 - DNA, 170 bp, Artificial sequence
  Pbrm1.1236_Kdm6a.57
  crRNA array
cgatttcttggctttatatatcttgtggaaaggacgaaacaccgtaatttctactaagtgtagatgccgataaaaccaacagccgtaatttctactaagtgtagatcgctgccgcctctcgcggcattttttaagcttggcgtggatccgatatcaactagatcttgaga

SEQ ID NO: 6386 - DNA, 170 bp, Artificial sequence
  Pbrm1.1236_Kmt2b.265
  crRNA array
cgatttcttggctttatatatcttgtggaaaggacgaaacaccgtaatttctactaagtgtagatgccgataaaaccaacagccgtaatttctactaagtgtagatccccaagtgaagcccacctgttttttaagcttggcgtggatccgatatcaactagatcttgaga

SEQ ID NO: 6387 - DNA, 170 bp, Artificial sequence
  Pbrm1.1236_Kmt2b.298
  crRNA array
cgatttcttggctttatatatcttgtggaaaggacgaaacaccgtaatttctactaagtgtagatgccgataaaaccaacagccgtaatttctactaagtgtagattccggcagggaccggctggcttttttaagcttggcgtggatccgatatcaactagatcttgaga

SEQ ID NO: 6388 - DNA, 170 bp, Artificial sequence
  Pbrm1.1236_Kmt2c.1962
  crRNA array
cgatttcttggctttatatatcttgtggaaaggacgaaacaccgtaatttctactaagtgtagatgccgataaaaccaacagccgtaatttctactaagtgtagatgtgacgatctgtgccacaagttttttaagcttggcgtggatccgatatcaactagatcttgaga

SEQ ID NO: 6389 - DNA, 170 bp, Artificial sequence
  Pbrm1.1236_Kmt2c.2236
  crRNA array
cgatttcttggctttatatatcttgtggaaaggacgaaacaccgtaatttctactaagtgtagatgccgataaaaccaacagccgtaatttctactaagtgtagatactcgacctccacctccctattttttaagcttggcgtggatccgatatcaactagatcttgaga

SEQ ID NO: 6390 - DNA, 170 bp, Artificial sequence
  Pbrm1.1236_Kmt2d.316
  crRNA array
cgatttcttggctttatatatcttgtggaaaggacgaaacaccgtaatttctactaagtgtagatgccgataaaaccaacagccgtaatttctactaagtgtagatactccaggccacccaggtggttttttaagcttggcgtggatccgatatcaactagatcttgaga

SEQ ID NO: 6391 - DNA, 170 bp, Artificial sequence
  Pbrm1.1236_Kmt2d.416
  crRNA array
cgatttcttggctttatatatcttgtggaaaggacgaaacaccgtaatttctactaagtgtagatgccgataaaaccaacagccgtaatttctactaagtgtagattaaacccccgggggaagggtttttttaagcttggcgtggatccgatatcaactagatcttgaga

SEQ ID NO: 6392 - DNA, 170 bp, Artificial sequence
  Pbrm1.1236_Map2k4.119
  crRNA array
cgatttcttggctttatatatcttgtggaaaggacgaaacaccgtaatttctactaagtgtagatgccgataaaaccaacagccgtaatttctactaagtgtagattgctgtgtgggcggccacatttttttaagcttggcgtggatccgatatcaactagatcttgaga

SEQ ID NO: 6393 - DNA, 170 bp, Artificial sequence
  Pbrm1.1236_Map2k4.1261
  crRNA array
cgatttcttggctttatatatcttgtggaaaggacgaaacaccgtaatttctactaagtgtagatgccgataaaaccaacagccgtaatttctactaagtgtagatgatgtagtaatgcggagtagttttttaagcttggcgtggatccgatatcaactagatcttgaga

SEQ ID NO: 6394 - DNA, 170 bp, Artificial sequence
  Pbrm1.1236_Map3k1.235
  crRNA array
cgatttcttggctttatatatcttgtggaaaggacgaaacaccgtaatttctactaagtgtagatgccgataaaaccaacagccgtaatttctactaagtgtagataaaacgctactgatcgatcgttttttaagcttggcgtggatccgatatcaactagatcttgaga

SEQ ID NO: 6395 - DNA, 170 bp, Artificial sequence
  Pbrm1.1236_Map3k1.3838
  crRNA array
cgatttcttggctttatatatcttgtggaaaggacgaaacaccgtaatttctactaagtgtagatgccgataaaaccaacagccgtaatttctactaagtgtagatccaacaacagggccccactattttttaagcttggcgtggatccgatatcaactagatcttgaga

SEQ ID NO: 6396 - DNA, 170 bp, Artificial sequence
  Pbrm1.1236_Mga.1655
  crRNA array
cgatttcttggctttatatatcttgtggaaaggacgaaacaccgtaatttctactaagtgtagatgccgataaaaccaacagccgtaatttctactaagtgtagatcgagaagtggagagcatattttttttaagcttggcgtggatccgatatcaactagatcttgaga

SEQ ID NO: 6397 - DNA, 170 bp, Artificial sequence
  Pbrm1.1236_Mga.93
  crRNA array
cgatttcttggctttatatatcttgtggaaaggacgaaacaccgtaatttctactaagtgtagatgccgataaaaccaacagccgtaatttctactaagtgtagatgagaaggctccccataatgtttttttaagcttggcgtggatccgatatcaactagatcttgaga

SEQ ID NO: 6398 - DNA, 170 bp, Artificial sequence
  Pbrm1.1236_Nf1.746
  crRNA array
cgatttcttggctttatatatcttgtggaaaggacgaaacaccgtaatttctactaagtgtagatgccgataaaaccaacagccgtaatttctactaagtgtagattaagcataatgatgatgccattttttaagcttggcgtggatccgatatcaactagatcttgaga

SEQ ID NO: 6399 - DNA, 170 bp, Artificial sequence
  Pbrm1.1236_Nf1.97
  crRNA array
cgatttcttggctttatatatcttgtggaaaggacgaaacaccgtaatttctactaagtgtagatgccgataaaaccaacagccgtaatttctactaagtgtagatagcccgctacatgctgatgcttttttaagcttggcgtggatccgatatcaactagatcttgaga

SEQ ID NO: 6400 - DNA, 170 bp, Artificial sequence
  Pbrm1.1236_Nf2.356
  crRNA array
cgatttcttggctttatatatcttgtggaaaggacgaaacaccgtaatttctactaagtgtagatgccgataaaaccaacagccgtaatttctactaagtgtagatcggagtcatctgatagagatttttttaagcttggcgtggatccgatatcaactagatcttgaga

SEQ ID NO: 6401 - DNA, 170 bp, Artificial sequence
  Pbrm1.1236_Nf2.768
  crRNA array
cgatttcttggctttatatatcttgtggaaaggacgaaacaccgtaatttctactaagtgtagatgccgataaaaccaacagccgtaatttctactaagtgtagatccgaagccccagtgtccggcttttttaagcttggcgtggatccgatatcaactagatcttgaga

SEQ ID NO: 6402 - DNA, 170 bp, Artificial sequence
  Pbrm1.1236_Notch1.1849
  crRNA array
cgatttcttggctttatatatcttgtggaaaggacgaaacaccgtaatttctactaagtgtagatgccgataaaaccaacagccgtaatttctactaagtgtagatctggcgggtgggcggcgctgttttttaagcttggcgtggatccgatatcaactagatcttgaga

SEQ ID NO: 6403 - DNA, 170 bp, Artificial sequence
  Pbrm1.1236_Notch1.649
  crRNA array
cgatttcttggctttatatatcttgtggaaaggacgaaacaccgtaatttctactaagtgtagatgccgataaaaccaacagccgtaatttctactaagtgtagattgggccaacgatgccaggacttttttaagcttggcgtggatccgatatcaactagatcttgaga

SEQ ID NO: 6404 - DNA, 170 bp, Artificial sequence
  Pbrm1.1236_Nsd1.70
  crRNA array
cgatttcttggctttatatatcttgtggaaaggacgaaacaccgtaatttctactaagtgtagatgccgataaaaccaacagccgtaatttctactaagtgtagatactggtgtggacgatgcagattttttaagcttggcgtggatccgatatcaactagatcttgaga

SEQ ID NO: 6405 - DNA, 170 bp, Artificial sequence
  Pbrm1.1236_Nsd1.90
  crRNA array
cgatttcttggctttatatatcttgtggaaaggacgaaacaccgtaatttctactaagtgtagatgccgataaaaccaacagccgtaatttctactaagtgtagataggagctaacggcaagaatgttttttaagcttggcgtggatccgatatcaactagatcttgaga

SEQ ID NO: 6406 - DNA, 170 bp, Artificial sequence
  Pbrm1.1236_Pik3r1.76
  crRNA array
cgatttcttggctttatatatcttgtggaaaggacgaaacaccgtaatttctactaagtgtagatgccgataaaaccaacagccgtaatttctactaagtgtagataaaacctatacggcccgcacttttttaagcttggcgtggatccgatatcaactagatcttgaga

SEQ ID NO: 6407 - DNA, 170 bp, Artificial sequence
  Pbrm1.1236_Pik3r1.77
  crRNA array
cgatttcttggctttatatatcttgtggaaaggacgaaacaccgtaatttctactaagtgtagatgccgataaaaccaacagccgtaatttctactaagtgtagataaacctatacggcccgcactttttttaagcttggcgtggatccgatatcaactagatcttgaga

SEQ ID NO: 6408 - DNA, 170 bp, Artificial sequence
  Pbrm1.1236_Pten.240
  crRNA array
cgatttcttggctttatatatcttgtggaaaggacgaaacaccgtaatttctactaagtgtagatgccgataaaaccaacagccgtaatttctactaagtgtagattgcatacgctatagctgcttttttttaagcttggcgtggatccgatatcaactagatcttgaga

SEQ ID NO: 6409 - DNA, 170 bp, Artificial sequence
  Pbrm1.1236_Pten.265
  crRNA array
cgatttcttggctttatatatcttgtggaaaggacgaaacaccgtaatttctactaagtgtagatgccgataaaaccaacagccgtaatttctactaagtgtagataagcgtggtgcgtgacgcacttttttaagcttggcgtggatccgatatcaactagatcttgaga

SEQ ID NO: 6410 - DNA, 170 bp, Artificial sequence
  Pbrm1.1236_Rasa1.1478
  crRNA array
cgatttcttggctttatatatcttgtggaaaggacgaaacaccgtaatttctactaagtgtagatgccgataaaaccaacagccgtaatttctactaagtgtagatcgataatggtctatgatgtcttttttaagcttggcgtggatccgatatcaactagatcttgaga

SEQ ID NO: 6411 - DNA, 170 bp, Artificial sequence
  Pbrm1.1236_Rasa1.223
  crRNA array
cgatttcttggctttatatatcttgtggaaaggacgaaacaccgtaatttctactaagtgtagatgccgataaaaccaacagccgtaatttctactaagtgtagattccatggagtatcgtgctcgttttttaagcttggcgtggatccgatatcaactagatcttgaga

SEQ ID NO: 6412 - DNA, 170 bp, Artificial sequence
  Pbrm1.1236_Rb1.211
  crRNA array
cgatttcttggctttatatatcttgtggaaaggacgaaacaccgtaatttctactaagtgtagatgccgataaaaccaacagccgtaatttctactaagtgtagattctgacatgatcgggtacctttttttaagcttggcgtggatccgatatcaactagatcttgaga

SEQ ID NO: 6413 - DNA, 170 bp, Artificial sequence
  Pbrm1.1236_Rb1.394
  crRNA array
cgatttcttggctttatatatcttgtggaaaggacgaaacaccgtaatttctactaagtgtagatgccgataaaaccaacagccgtaatttctactaagtgtagatagaaatctcgaagcaggatcttttttaagcttggcgtggatccgatatcaactagatcttgaga

SEQ ID NO: 6414 - DNA, 170 bp, Artificial sequence
  Pbrm1.1236_Rbm10.5
  crRNA array
cgatttcttggctttatatatcttgtggaaaggacgaaacaccgtaatttctactaagtgtagatgccgataaaaccaacagccgtaatttctactaagtgtagatacgaaacctgaacccacacattttttaagcttggcgtggatccgatatcaactagatcttgaga

SEQ ID NO: 6415 - DNA, 170 bp, Artificial sequence
  Pbrm1.1236_Rbm10.6
  crRNA array
cgatttcttggctttatatatcttgtggaaaggacgaaacaccgtaatttctactaagtgtagatgccgataaaaccaacagccgtaatttctactaagtgtagatcgaaacctgaacccacacagttttttaagcttggcgtggatccgatatcaactagatcttgaga

SEQ ID NO: 6416 - DNA, 170 bp, Artificial sequence
  Pbrm1.1236_Rnf43.1920
  crRNA array
cgatttcttggctttatatatcttgtggaaaggacgaaacaccgtaatttctactaagtgtagatgccgataaaaccaacagccgtaatttctactaagtgtagatatccccgtgccgtggactccttttttaagcttggcgtggatccgatatcaactagatcttgaga

SEQ ID NO: 6417 - DNA, 170 bp, Artificial sequence
  Pbrm1.1236_Rnf43.39
  crRNA array
cgatttcttggctttatatatcttgtggaaaggacgaaacaccgtaatttctactaagtgtagatgccgataaaaccaacagccgtaatttctactaagtgtagatcaaggggatcactctgataattttttaagcttggcgtggatccgatatcaactagatcttgaga

SEQ ID NO: 6418 - DNA, 170 bp, Artificial sequence
  Pbrm1.1236_Runx1.204
  crRNA array
cgatttcttggctttatatatcttgtggaaaggacgaaacaccgtaatttctactaagtgtagatgccgataaaaccaacagccgtaatttctactaagtgtagattaaataagtccagccgttttttttttaagcttggcgtggatccgatatcaactagatcttgaga

SEQ ID NO: 6419 - DNA, 170 bp, Artificial sequence
  Pbrm1.1236_Runx1.81
  crRNA array
cgatttcttggctttatatatcttgtggaaaggacgaaacaccgtaatttctactaagtgtagatgccgataaaaccaacagccgtaatttctactaagtgtagataggacgcgtatgggaattttttttttaagcttggcgtggatccgatatcaactagatcttgaga

SEQ ID NO: 6420 - DNA, 170 bp, Artificial sequence
  Pbrm1.1236_Setd2.143
  crRNA array
cgatttcttggctttatatatcttgtggaaaggacgaaacaccgtaatttctactaagtgtagatgccgataaaaccaacagccgtaatttctactaagtgtagatgcacaaccacaacagactggttttttaagcttggcgtggatccgatatcaactagatcttgaga

SEQ ID NO: 6421 - DNA, 170 bp, Artificial sequence
  Pbrm1.1236_Setd2.508
  crRNA array
cgatttcttggctttatatatcttgtggaaaggacgaaacaccgtaatttctactaagtgtagatgccgataaaaccaacagccgtaatttctactaagtgtagattacgatcccgagcacccgacttttttaagcttggcgtggatccgatatcaactagatcttgaga

SEQ ID NO: 6422 - DNA, 170 bp, Artificial sequence
  Pbrm1.1236_Smad4.3038
  crRNA array
cgatttcttggctttatatatcttgtggaaaggacgaaacaccgtaatttctactaagtgtagatgccgataaaaccaacagccgtaatttctactaagtgtagatatctgcggcagtgtcaccggttttttaagcttggcgtggatccgatatcaactagatcttgaga

SEQ ID NO: 6423 - DNA, 170 bp, Artificial sequence
  Pbrm1.1236_Smad4.39
  crRNA array
cgatttcttggctttatatatcttgtggaaaggacgaaacaccgtaatttctactaagtgtagatgccgataaaaccaacagccgtaatttctactaagtgtagatagtcaaacgcatactgacaattttttaagcttggcgtggatccgatatcaactagatcttgaga

SEQ ID NO: 6424 - DNA, 170 bp, Artificial sequence
  Pbrm1.1236_Stag2.1409
  crRNA array
cgatttcttggctttatatatcttgtggaaaggacgaaacaccgtaatttctactaagtgtagatgccgataaaaccaacagccgtaatttctactaagtgtagatgctaataactgcggaagggcttttttaagcttggcgtggatccgatatcaactagatcttgaga

SEQ ID NO: 6425 - DNA, 170 bp, Artificial sequence
  Pbrm1.1236_Stag2.4401
  crRNA array
cgatttcttggctttatatatcttgtggaaaggacgaaacaccgtaatttctactaagtgtagatgccgataaaaccaacagccgtaatttctactaagtgtagattaatcgtccagtggtgtatattttttaagcttggcgtggatccgatatcaactagatcttgaga

SEQ ID NO: 6426 - DNA, 170 bp, Artificial sequence
  Pbrm1.1236_Tbl1xr1.1
  crRNA array
cgatttcttggctttatatatcttgtggaaaggacgaaacaccgtaatttctactaagtgtagatgccgataaaaccaacagccgtaatttctactaagtgtagatggatgcgcatactggtgaagttttttaagcttggcgtggatccgatatcaactagatcttgaga

SEQ ID NO: 6427 - DNA, 170 bp, Artificial sequence
  Pbrm1.1236_Tbl1xr1.83
  crRNA array
cgatttcttggctttatatatcttgtggaaaggacgaaacaccgtaatttctactaagtgtagatgccgataaaaccaacagccgtaatttctactaagtgtagatatggtcgacccatcgagtctttttttaagcttggcgtggatccgatatcaactagatcttgaga

SEQ ID NO: 6428 - DNA, 170 bp, Artificial sequence
  Pbrm1.1236_Tgfbr2.290
  crRNA array
cgatttcttggctttatatatcttgtggaaaggacgaaacaccgtaatttctactaagtgtagatgccgataaaaccaacagccgtaatttctactaagtgtagatcctctcggcgcccgggtaaattttttaagcttggcgtggatccgatatcaactagatcttgaga

SEQ ID NO: 6429 - DNA, 170 bp, Artificial sequence
  Pbrm1.1236_Tgfbr2.292
  crRNA array
cgatttcttggctttatatatcttgtggaaaggacgaaacaccgtaatttctactaagtgtagatgccgataaaaccaacagccgtaatttctactaagtgtagatcccgggcgccgagagggaaattttttaagcttggcgtggatccgatatcaactagatcttgaga

SEQ ID NO: 6430 - DNA, 170 bp, Artificial sequence
  Pbrm1.1236_Trp53.4
  crRNA array
cgatttcttggctttatatatcttgtggaaaggacgaaacaccgtaatttctactaagtgtagatgccgataaaaccaacagccgtaatttctactaagtgtagatccctgaactgcccccagggattttttaagcttggcgtggatccgatatcaactagatcttgaga

SEQ ID NO: 6431 - DNA, 170 bp, Artificial sequence
  Pbrm1.1236_Trp53.528
  crRNA array
cgatttcttggctttatatatcttgtggaaaggacgaaacaccgtaatttctactaagtgtagatgccgataaaaccaacagccgtaatttctactaagtgtagatgctgggccagcagagacctgttttttaagcttggcgtggatccgatatcaactagatcttgaga

SEQ ID NO: 6432 - DNA, 170 bp, Artificial sequence
  Pbrm1.1236_Vhl.1
  crRNA array
cgatttcttggctttatatatcttgtggaaaggacgaaacaccgtaatttctactaagtgtagatgccgataaaaccaacagccgtaatttctactaagtgtagatagggctcccggcggccatttttttttaagcttggcgtggatccgatatcaactagatcttgaga

SEQ ID NO: 6433 - DNA, 170 bp, Artificial sequence
  Pbrm1.1236_Vhl.151
  crRNA array
cgatttcttggctttatatatcttgtggaaaggacgaaacaccgtaatttctactaagtgtagatgccgataaaaccaacagccgtaatttctactaagtgtagattagagcactcacccgagggattttttaagcttggcgtggatccgatatcaactagatcttgaga

SEQ ID NO: 6434 - DNA, 170 bp, Artificial sequence
  Pbrm1.1236_Zc3h13.1387
  crRNA array
cgatttcttggctttatatatcttgtggaaaggacgaaacaccgtaatttctactaagtgtagatgccgataaaaccaacagccgtaatttctactaagtgtagatgtgacgccggtcatgtgactttttttaagcttggcgtggatccgatatcaactagatcttgaga

SEQ ID NO: 6435 - DNA, 170 bp, Artificial sequence
  Pbrm1.1236_Zc3h13.1777
  crRNA array
cgatttcttggctttatatatcttgtggaaaggacgaaacaccgtaatttctactaagtgtagatgccgataaaaccaacagccgtaatttctactaagtgtagatgatgctgccagtgtagcggcttttttaagcttggcgtggatccgatatcaactagatcttgaga

SEQ ID NO: 6436 - DNA, 170 bp, Artificial sequence
  Pbrm1.969_Acvr2a.155
  crRNA array
cgatttcttggctttatatatcttgtggaaaggacgaaacaccgtaatttctactaagtgtagatgagccctaatgaacagctcataatttctactaagtgtagatggacctggctaatcaagtatttttttaagcttggcgtggatccgatatcaactagatcttgaga

SEQ ID NO: 6437 - DNA, 170 bp, Artificial sequence
  Pbrm1.969_Acvr2a.70
  crRNA array
cgatttcttggctttatatatcttgtggaaaggacgaaacaccgtaatttctactaagtgtagatgagccctaatgaacagctcataatttctactaagtgtagatcccgaggcgccggagaagccttttttaagcttggcgtggatccgatatcaactagatcttgaga

SEQ ID NO: 6438 - DNA, 170 bp, Artificial sequence
  Pbrm1.969_Apc.21
  crRNA array
cgatttcttggctttatatatcttgtggaaaggacgaaacaccgtaatttctactaagtgtagatgagccctaatgaacagctcataatttctactaagtgtagatgtgatccacacgtgtagctgttttttaagcttggcgtggatccgatatcaactagatcttgaga

SEQ ID NO: 6439 - DNA, 170 bp, Artificial sequence
  Pbrm1.969_Apc.867
  crRNA array
cgatttcttggctttatatatcttgtggaaaggacgaaacaccgtaatttctactaagtgtagatgagccctaatgaacagctcataatttctactaagtgtagatcagtcccaggcggcggaagcttttttaagcttggcgtggatccgatatcaactagatcttgaga

SEQ ID NO: 6440 - DNA, 170 bp, Artificial sequence
  Pbrm1.969_Arid1a.2
  crRNA array
cgatttcttggctttatatatcttgtggaaaggacgaaacaccgtaatttctactaagtgtagatgagccctaatgaacagctcataatttctactaagtgtagatcccgcgcccccgtcctggggttttttaagcttggcgtggatccgatatcaactagatcttgaga

SEQ ID NO: 6441 - DNA, 170 bp, Artificial sequence
  Pbrm1.969_Arid1a.5
  crRNA array
cgatttcttggctttatatatcttgtggaaaggacgaaacaccgtaatttctactaagtgtagatgagccctaatgaacagctcataatttctactaagtgtagatcccgcgctcggccgctgccgttttttaagcttggcgtggatccgatatcaactagatcttgaga

SEQ ID NO: 6442 - DNA, 170 bp, Artificial sequence
  Pbrm1.969_Arid2.166
  crRNA array
cgatttcttggctttatatatcttgtggaaaggacgaaacaccgtaatttctactaagtgtagatgagccctaatgaacagctcataatttctactaagtgtagataaccgcgatctgggttttttttttttaagcttggcgtggatccgatatcaactagatcttgaga

SEQ ID NO: 6443 - DNA, 170 bp, Artificial sequence
  Pbrm1.969_Arid2.172
  crRNA array
cgatttcttggctttatatatcttgtggaaaggacgaaacaccgtaatttctactaagtgtagatgagccctaatgaacagctcataatttctactaagtgtagatctggacgagctgcggcagttttttttaagcttggcgtggatccgatatcaactagatcttgaga

SEQ ID NO: 6444 - DNA, 170 bp, Artificial sequence
  Pbrm1.969_Atm.120
  crRNA array
cgatttcttggctttatatatcttgtggaaaggacgaaacaccgtaatttctactaagtgtagatgagccctaatgaacagctcataatttctactaagtgtagatgacaggtagtcggcagctaattttttaagcttggcgtggatccgatatcaactagatcttgaga

SEQ ID NO: 6445 - DNA, 170 bp, Artificial sequence
  Pbrm1.969_Atm.997
  crRNA array
cgatttcttggctttatatatcttgtggaaaggacgaaacaccgtaatttctactaagtgtagatgagccctaatgaacagctcataatttctactaagtgtagatgagaaagtctccgaatcgttttttttaagcttggcgtggatccgatatcaactagatcttgaga

SEQ ID NO: 6446 - DNA, 170 bp, Artificial sequence
  Pbrm1.969_Atrx.249
  crRNA array
cgatttcttggctttatatatcttgtggaaaggacgaaacaccgtaatttctactaagtgtagatgagccctaatgaacagctcataatttctactaagtgtagattagccagtcgctcatatctcttttttaagcttggcgtggatccgatatcaactagatcttgaga

SEQ ID NO: 6447 - DNA, 170 bp, Artificial sequence
  Pbrm1.969_Atrx.251
  crRNA array
cgatttcttggctttatatatcttgtggaaaggacgaaacaccgtaatttctactaagtgtagatgagccctaatgaacagctcataatttctactaagtgtagatgccagtcgctcatatctctgttttttaagcttggcgtggatccgatatcaactagatcttgaga

SEQ ID NO: 6448 - DNA, 170 bp, Artificial sequence
  Pbrm1.969_Bcor.203
  crRNA array
cgatttcttggctttatatatcttgtggaaaggacgaaacaccgtaatttctactaagtgtagatgagccctaatgaacagctcataatttctactaagtgtagatccccggagcggagtccaggcttttttaagcttggcgtggatccgatatcaactagatcttgaga

SEQ ID NO: 6449 - DNA, 170 bp, Artificial sequence
  Pbrm1.969_Bcor.475
  crRNA array
cgatttcttggctttatatatcttgtggaaaggacgaaacaccgtaatttctactaagtgtagatgagccctaatgaacagctcataatttctactaagtgtagattgcaacccctctgtatgggattttttaagcttggcgtggatccgatatcaactagatcttgaga

SEQ ID NO: 6450 - DNA, 170 bp, Artificial sequence
  Pbrm1.969_Brca1.112
  crRNA array
cgatttcttggctttatatatcttgtggaaaggacgaaacaccgtaatttctactaagtgtagatgagccctaatgaacagctcataatttctactaagtgtagatctagacgctctgtggagactttttttaagcttggcgtggatccgatatcaactagatcttgaga

SEQ ID NO: 6451 - DNA, 170 bp, Artificial sequence
  Pbrm1.969_Brca1.53
  crRNA array
cgatttcttggctttatatatcttgtggaaaggacgaaacaccgtaatttctactaagtgtagatgagccctaatgaacagctcataatttctactaagtgtagataatgaggaggcgtcgatcatttttttaagcttggcgtggatccgatatcaactagatcttgaga

SEQ ID NO: 6452 - DNA, 170 bp, Artificial sequence
  Pbrm1.969_Casp8.45
  crRNA array
cgatttcttggctttatatatcttgtggaaaggacgaaacaccgtaatttctactaagtgtagatgagccctaatgaacagctcataatttctactaagtgtagatctaccgagatcctgtgaatgttttttaagcttggcgtggatccgatatcaactagatcttgaga

SEQ ID NO: 6453 - DNA, 170 bp, Artificial sequence
  Pbrm1.969_Casp8.54
  crRNA array
cgatttcttggctttatatatcttgtggaaaggacgaaacaccgtaatttctactaagtgtagatgagccctaatgaacagctcataatttctactaagtgtagatcagtgcagtcgtcgtaagatttttttaagcttggcgtggatccgatatcaactagatcttgaga

SEQ ID NO: 6454 - DNA, 170 bp, Artificial sequence
  Pbrm1.969_Cbwd1.84
  crRNA array
cgatttcttggctttatatatcttgtggaaaggacgaaacaccgtaatttctactaagtgtagatgagccctaatgaacagctcataatttctactaagtgtagatcacagcaggtaacatgccgcttttttaagcttggcgtggatccgatatcaactagatcttgaga

SEQ ID NO: 6455 - DNA, 170 bp, Artificial sequence
  Pbrm1.969_Cbwd1.85
  crRNA array
cgatttcttggctttatatatcttgtggaaaggacgaaacaccgtaatttctactaagtgtagatgagccctaatgaacagctcataatttctactaagtgtagatacagcaggtaacatgccgccttttttaagcttggcgtggatccgatatcaactagatcttgaga

SEQ ID NO: 6456 - DNA, 170 bp, Artificial sequence
  Pbrm1.969_Cdh1.387
  crRNA array
cgatttcttggctttatatatcttgtggaaaggacgaaacaccgtaatttctactaagtgtagatgagccctaatgaacagctcataatttctactaagtgtagatctcggcgtctgccgggtccgttttttaagcttggcgtggatccgatatcaactagatcttgaga

SEQ ID NO: 6457 - DNA, 170 bp, Artificial sequence
  Pbrm1.969_Cdh1.58
  crRNA array
cgatttcttggctttatatatcttgtggaaaggacgaaacaccgtaatttctactaagtgtagatgagccctaatgaacagctcataatttctactaagtgtagatctcgtccgcgcccgggactcttttttaagcttggcgtggatccgatatcaactagatcttgaga

SEQ ID NO: 6458 - DNA, 170 bp, Artificial sequence
  Pbrm1.969_Cdkn2a.647
  crRNA array
cgatttcttggctttatatatcttgtggaaaggacgaaacaccgtaatttctactaagtgtagatgagccctaatgaacagctcataatttctactaagtgtagatgcaatcacgggagggagcagttttttaagcttggcgtggatccgatatcaactagatcttgaga

SEQ ID NO: 6459 - DNA, 170 bp, Artificial sequence
  Pbrm1.969_Cdkn2a.648
  crRNA array
cgatttcttggctttatatatcttgtggaaaggacgaaacaccgtaatttctactaagtgtagatgagccctaatgaacagctcataatttctactaagtgtagatcaatcacgggagggagcagattttttaagcttggcgtggatccgatatcaactagatcttgaga

SEQ ID NO: 6460 - DNA, 170 bp, Artificial sequence
  Pbrm1.969_Cic.162
  crRNA array
cgatttcttggctttatatatcttgtggaaaggacgaaacaccgtaatttctactaagtgtagatgagccctaatgaacagctcataatttctactaagtgtagatcgcaggcgcgcccggcggagttttttaagcttggcgtggatccgatatcaactagatcttgaga

SEQ ID NO: 6461 - DNA, 170 bp, Artificial sequence
  Pbrm1.969_Cic.164
  crRNA array
cgatttcttggctttatatatcttgtggaaaggacgaaacaccgtaatttctactaagtgtagatgagccctaatgaacagctcataatttctactaagtgtagatcgggccctgggccggcggctttttttaagcttggcgtggatccgatatcaactagatcttgaga

SEQ ID NO: 6462 - DNA, 170 bp, Artificial sequence
  Pbrm1.969_Ctcf.229
  crRNA array
cgatttcttggctttatatatcttgtggaaaggacgaaacaccgtaatttctactaagtgtagatgagccctaatgaacagctcataatttctactaagtgtagatggctggtggctgatagtctgttttttaagcttggcgtggatccgatatcaactagatcttgaga

SEQ ID NO: 6463 - DNA, 170 bp, Artificial sequence
  Pbrm1.969_Ctcf.809
  crRNA array
cgatttcttggctttatatatcttgtggaaaggacgaaacaccgtaatttctactaagtgtagatgagccctaatgaacagctcataatttctactaagtgtagataagcgctatcatgatcccaattttttaagcttggcgtggatccgatatcaactagatcttgaga

SEQ ID NO: 6464 - DNA, 170 bp, Artificial sequence
  Pbrm1.969_Elf3.826
  crRNA array
cgatttcttggctttatatatcttgtggaaaggacgaaacaccgtaatttctactaagtgtagatgagccctaatgaacagctcataatttctactaagtgtagattccgagacatcctaatccacttttttaagcttggcgtggatccgatatcaactagatcttgaga

SEQ ID NO: 6465 - DNA, 170 bp, Artificial sequence
  Pbrm1.969_Elf3.983
  crRNA array
cgatttcttggctttatatatcttgtggaaaggacgaaacaccgtaatttctactaagtgtagatgagccctaatgaacagctcataatttctactaagtgtagattaggccccctaactggaccattttttaagcttggcgtggatccgatatcaactagatcttgaga

SEQ ID NO: 6466 - DNA, 170 bp, Artificial sequence
  Pbrm1.969_Ep300.310
  crRNA array
cgatttcttggctttatatatcttgtggaaaggacgaaacaccgtaatttctactaagtgtagatgagccctaatgaacagctcataatttctactaagtgtagatatggtacgacagtgaggaagttttttaagcttggcgtggatccgatatcaactagatcttgaga

SEQ ID NO: 6467 - DNA, 170 bp, Artificial sequence
  Pbrm1.969_Ep300.587
  crRNA array
cgatttcttggctttatatatcttgtggaaaggacgaaacaccgtaatttctactaagtgtagatgagccctaatgaacagctcataatttctactaagtgtagatcgccccggggcccccaaccattttttaagcttggcgtggatccgatatcaactagatcttgaga

SEQ ID NO: 6468 - DNA, 170 bp, Artificial sequence
  Pbrm1.969_Epha2.126
  crRNA array
cgatttcttggctttatatatcttgtggaaaggacgaaacaccgtaatttctactaagtgtagatgagccctaatgaacagctcataatttctactaagtgtagatcctgtgccgccgcggccgccttttttaagcttggcgtggatccgatatcaactagatcttgaga

SEQ ID NO: 6469 - DNA, 170 bp, Artificial sequence
  Pbrm1.969_Epha2.5
  crRNA array
cgatttcttggctttatatatcttgtggaaaggacgaaacaccgtaatttctactaagtgtagatgagccctaatgaacagctcataatttctactaagtgtagatcatgagctggcgccacccggttttttaagcttggcgtggatccgatatcaactagatcttgaga

SEQ ID NO: 6470 - DNA, 170 bp, Artificial sequence
  Pbrm1.969_Fat1.105
  crRNA array
cgatttcttggctttatatatcttgtggaaaggacgaaacaccgtaatttctactaagtgtagatgagccctaatgaacagctcataatttctactaagtgtagataactcgaggtgacaacaagtttttttaagcttggcgtggatccgatatcaactagatcttgaga

SEQ ID NO: 6471 - DNA, 170 bp, Artificial sequence
  Pbrm1.969_Fat1.122
  crRNA array
cgatttcttggctttatatatcttgtggaaaggacgaaacaccgtaatttctactaagtgtagatgagccctaatgaacagctcataatttctactaagtgtagatccatcgacatggaaacgggattttttaagcttggcgtggatccgatatcaactagatcttgaga

SEQ ID NO: 6472 - DNA, 170 bp, Artificial sequence
  Pbrm1.969_Fbxw7.21
  crRNA array
cgatttcttggctttatatatcttgtggaaaggacgaaacaccgtaatttctactaagtgtagatgagccctaatgaacagctcataatttctactaagtgtagattaatgtgccgtagaaacccattttttaagcttggcgtggatccgatatcaactagatcttgaga

SEQ ID NO: 6473 - DNA, 170 bp, Artificial sequence
  Pbrm1.969_Fbxw7.23
  crRNA array
cgatttcttggctttatatatcttgtggaaaggacgaaacaccgtaatttctactaagtgtagatgagccctaatgaacagctcataatttctactaagtgtagatatgtgccgtagaaacccatattttttaagcttggcgtggatccgatatcaactagatcttgaga

SEQ ID NO: 6474 - DNA, 170 bp, Artificial sequence
  Pbrm1.969_Gata3.34
  crRNA array
cgatttcttggctttatatatcttgtggaaaggacgaaacaccgtaatttctactaagtgtagatgagccctaatgaacagctcataatttctactaagtgtagatctaaactatcccgcaaagatttttttaagcttggcgtggatccgatatcaactagatcttgaga

SEQ ID NO: 6475 - DNA, 170 bp, Artificial sequence
  Pbrm1.969_Gata3.47
  crRNA array
cgatttcttggctttatatatcttgtggaaaggacgaaacaccgtaatttctactaagtgtagatgagccctaatgaacagctcataatttctactaagtgtagatcgtagtaggacgggacgtggttttttaagcttggcgtggatccgatatcaactagatcttgaga

SEQ ID NO: 6476 - DNA, 170 bp, Artificial sequence
  Pbrm1.969_H2-Q2.1
  crRNA array
cgatttcttggctttatatatcttgtggaaaggacgaaacaccgtaatttctactaagtgtagatgagccctaatgaacagctcataatttctactaagtgtagatagggcggccaccaacagcagttttttaagcttggcgtggatccgatatcaactagatcttgaga

SEQ ID NO: 6477 - DNA, 170 bp, Artificial sequence
  Pbrm1.969_H2-Q2.2
  crRNA array
cgatttcttggctttatatatcttgtggaaaggacgaaacaccgtaatttctactaagtgtagatgagccctaatgaacagctcataatttctactaagtgtagattaacctgcgcccgctgctgattttttaagcttggcgtggatccgatatcaactagatcttgaga

SEQ ID NO: 6478 - DNA, 170 bp, Artificial sequence
  Pbrm1.969_Kdm5c.1878
  crRNA array
cgatttcttggctttatatatcttgtggaaaggacgaaacaccgtaatttctactaagtgtagatgagccctaatgaacagctcataatttctactaagtgtagatagagcacggcacccgcccccttttttaagcttggcgtggatccgatatcaactagatcttgaga

SEQ ID NO: 6479 - DNA, 170 bp, Artificial sequence
  Pbrm1.969_Kdm5c.1879
  crRNA array
cgatttcttggctttatatatcttgtggaaaggacgaaacaccgtaatttctactaagtgtagatgagccctaatgaacagctcataatttctactaagtgtagatgagcacggcacccgccccccttttttaagcttggcgtggatccgatatcaactagatcttgaga

SEQ ID NO: 6480 - DNA, 170 bp, Artificial sequence
  Pbrm1.969_Kdm6a.56
  crRNA array
cgatttcttggctttatatatcttgtggaaaggacgaaacaccgtaatttctactaagtgtagatgagccctaatgaacagctcataatttctactaagtgtagattcgctgccgcctctcgcggcttttttaagcttggcgtggatccgatatcaactagatcttgaga

SEQ ID NO: 6481 - DNA, 170 bp, Artificial sequence
  Pbrm1.969_Kdm6a.57
  crRNA array
cgatttcttggctttatatatcttgtggaaaggacgaaacaccgtaatttctactaagtgtagatgagccctaatgaacagctcataatttctactaagtgtagatcgctgccgcctctcgcggcattttttaagcttggcgtggatccgatatcaactagatcttgaga

SEQ ID NO: 6482 - DNA, 170 bp, Artificial sequence
  Pbrm1.969_Kmt2b.265
  crRNA array
cgatttcttggctttatatatcttgtggaaaggacgaaacaccgtaatttctactaagtgtagatgagccctaatgaacagctcataatttctactaagtgtagatccccaagtgaagcccacctgttttttaagcttggcgtggatccgatatcaactagatcttgaga

SEQ ID NO: 6483 - DNA, 170 bp, Artificial sequence
  Pbrm1.969_Kmt2b.298
  crRNA array
cgatttcttggctttatatatcttgtggaaaggacgaaacaccgtaatttctactaagtgtagatgagccctaatgaacagctcataatttctactaagtgtagattccggcagggaccggctggcttttttaagcttggcgtggatccgatatcaactagatcttgaga

SEQ ID NO: 6484 - DNA, 170 bp, Artificial sequence
  Pbrm1.969_Kmt2c.1962
  crRNA array
cgatttcttggctttatatatcttgtggaaaggacgaaacaccgtaatttctactaagtgtagatgagccctaatgaacagctcataatttctactaagtgtagatgtgacgatctgtgccacaagttttttaagcttggcgtggatccgatatcaactagatcttgaga

SEQ ID NO: 6485 - DNA, 170 bp, Artificial sequence
  Pbrm1.969_Kmt2c.2236
  crRNA array
cgatttcttggctttatatatcttgtggaaaggacgaaacaccgtaatttctactaagtgtagatgagccctaatgaacagctcataatttctactaagtgtagatactcgacctccacctccctattttttaagcttggcgtggatccgatatcaactagatcttgaga

SEQ ID NO: 6486 - DNA, 170 bp, Artificial sequence
  Pbrm1.969_Kmt2d.316
  crRNA array
cgatttcttggctttatatatcttgtggaaaggacgaaacaccgtaatttctactaagtgtagatgagccctaatgaacagctcataatttctactaagtgtagatactccaggccacccaggtggttttttaagcttggcgtggatccgatatcaactagatcttgaga

SEQ ID NO: 6487 - DNA, 170 bp, Artificial sequence
  Pbrm1.969_Kmt2d.416
  crRNA array
cgatttcttggctttatatatcttgtggaaaggacgaaacaccgtaatttctactaagtgtagatgagccctaatgaacagctcataatttctactaagtgtagattaaacccccgggggaagggtttttttaagcttggcgtggatccgatatcaactagatcttgaga

SEQ ID NO: 6488 - DNA, 170 bp, Artificial sequence
  Pbrm1.969_Map2k4.119
  crRNA array
cgatttcttggctttatatatcttgtggaaaggacgaaacaccgtaatttctactaagtgtagatgagccctaatgaacagctcataatttctactaagtgtagattgctgtgtgggcggccacatttttttaagcttggcgtggatccgatatcaactagatcttgaga

SEQ ID NO: 6489 - DNA, 170 bp, Artificial sequence
  Pbrm1.969_Map2k4.1261
  crRNA array
cgatttcttggctttatatatcttgtggaaaggacgaaacaccgtaatttctactaagtgtagatgagccctaatgaacagctcataatttctactaagtgtagatgatgtagtaatgcggagtagttttttaagcttggcgtggatccgatatcaactagatcttgaga

SEQ ID NO: 6490 - DNA, 170 bp, Artificial sequence
  Pbrm1.969_Map3k1.235
  crRNA array
cgatttcttggctttatatatcttgtggaaaggacgaaacaccgtaatttctactaagtgtagatgagccctaatgaacagctcataatttctactaagtgtagataaaacgctactgatcgatcgttttttaagcttggcgtggatccgatatcaactagatcttgaga

SEQ ID NO: 6491 - DNA, 170 bp, Artificial sequence
  Pbrm1.969_Map3k1.3838
  crRNA array
cgatttcttggctttatatatcttgtggaaaggacgaaacaccgtaatttctactaagtgtagatgagccctaatgaacagctcataatttctactaagtgtagatccaacaacagggccccactattttttaagcttggcgtggatccgatatcaactagatcttgaga

SEQ ID NO: 6492 - DNA, 170 bp, Artificial sequence
  Pbrm1.969_Mga.1655
  crRNA array
cgatttcttggctttatatatcttgtggaaaggacgaaacaccgtaatttctactaagtgtagatgagccctaatgaacagctcataatttctactaagtgtagatcgagaagtggagagcatattttttttaagcttggcgtggatccgatatcaactagatcttgaga

SEQ ID NO: 6493 - DNA, 170 bp, Artificial sequence
  Pbrm1.969_Mga.93
  crRNA array
cgatttcttggctttatatatcttgtggaaaggacgaaacaccgtaatttctactaagtgtagatgagccctaatgaacagctcataatttctactaagtgtagatgagaaggctccccataatgtttttttaagcttggcgtggatccgatatcaactagatcttgaga

SEQ ID NO: 6494 - DNA, 170 bp, Artificial sequence
  Pbrm1.969_Nf1.746
  crRNA array
cgatttcttggctttatatatcttgtggaaaggacgaaacaccgtaatttctactaagtgtagatgagccctaatgaacagctcataatttctactaagtgtagattaagcataatgatgatgccattttttaagcttggcgtggatccgatatcaactagatcttgaga

SEQ ID NO: 6495 - DNA, 170 bp, Artificial sequence
  Pbrm1.969_Nf1.97
  crRNA array
cgatttcttggctttatatatcttgtggaaaggacgaaacaccgtaatttctactaagtgtagatgagccctaatgaacagctcataatttctactaagtgtagatagcccgctacatgctgatgcttttttaagcttggcgtggatccgatatcaactagatcttgaga

SEQ ID NO: 6496 - DNA, 170 bp, Artificial sequence
  Pbrm1.969_Nf2.356
  crRNA array
cgatttcttggctttatatatcttgtggaaaggacgaaacaccgtaatttctactaagtgtagatgagccctaatgaacagctcataatttctactaagtgtagatcggagtcatctgatagagatttttttaagcttggcgtggatccgatatcaactagatcttgaga

SEQ ID NO: 6497 - DNA, 170 bp, Artificial sequence
  Pbrm1.969_Nf2.768
  crRNA array
cgatttcttggctttatatatcttgtggaaaggacgaaacaccgtaatttctactaagtgtagatgagccctaatgaacagctcataatttctactaagtgtagatccgaagccccagtgtccggcttttttaagcttggcgtggatccgatatcaactagatcttgaga

SEQ ID NO: 6498 - DNA, 170 bp, Artificial sequence
  Pbrm1.969_Notch1.1849
  crRNA array
cgatttcttggctttatatatcttgtggaaaggacgaaacaccgtaatttctactaagtgtagatgagccctaatgaacagctcataatttctactaagtgtagatctggcgggtgggcggcgctgttttttaagcttggcgtggatccgatatcaactagatcttgaga

SEQ ID NO: 6499 - DNA, 170 bp, Artificial sequence
  Pbrm1.969_Notch1.649
  crRNA array
cgatttcttggctttatatatcttgtggaaaggacgaaacaccgtaatttctactaagtgtagatgagccctaatgaacagctcataatttctactaagtgtagattgggccaacgatgccaggacttttttaagcttggcgtggatccgatatcaactagatcttgaga

SEQ ID NO: 6500 - DNA, 170 bp, Artificial sequence
  Pbrm1.969_Nsd1.70
  crRNA array
cgatttcttggctttatatatcttgtggaaaggacgaaacaccgtaatttctactaagtgtagatgagccctaatgaacagctcataatttctactaagtgtagatactggtgtggacgatgcagattttttaagcttggcgtggatccgatatcaactagatcttgaga

SEQ ID NO: 6501 - DNA, 170 bp, Artificial sequence
  Pbrm1.969_Nsd1.90
  crRNA array
cgatttcttggctttatatatcttgtggaaaggacgaaacaccgtaatttctactaagtgtagatgagccctaatgaacagctcataatttctactaagtgtagataggagctaacggcaagaatgttttttaagcttggcgtggatccgatatcaactagatcttgaga

SEQ ID NO: 6502 - DNA, 170 bp, Artificial sequence
  Pbrm1.969_Pik3r1.76
  crRNA array
cgatttcttggctttatatatcttgtggaaaggacgaaacaccgtaatttctactaagtgtagatgagccctaatgaacagctcataatttctactaagtgtagataaaacctatacggcccgcacttttttaagcttggcgtggatccgatatcaactagatcttgaga

SEQ ID NO: 6503 - DNA, 170 bp, Artificial sequence
  Pbrm1.969_Pik3r1.77
  crRNA array
cgatttcttggctttatatatcttgtggaaaggacgaaacaccgtaatttctactaagtgtagatgagccctaatgaacagctcataatttctactaagtgtagataaacctatacggcccgcactttttttaagcttggcgtggatccgatatcaactagatcttgaga

SEQ ID NO: 6504 - DNA, 170 bp, Artificial sequence
  Pbrm1.969_Pten.240
  crRNA array
cgatttcttggctttatatatcttgtggaaaggacgaaacaccgtaatttctactaagtgtagatgagccctaatgaacagctcataatttctactaagtgtagattgcatacgctatagctgcttttttttaagcttggcgtggatccgatatcaactagatcttgaga

SEQ ID NO: 6505 - DNA, 170 bp, Artificial sequence
  Pbrm1.969_Pten.265
  crRNA array
cgatttcttggctttatatatcttgtggaaaggacgaaacaccgtaatttctactaagtgtagatgagccctaatgaacagctcataatttctactaagtgtagataagcgtggtgcgtgacgcacttttttaagcttggcgtggatccgatatcaactagatcttgaga

SEQ ID NO: 6506 - DNA, 170 bp, Artificial sequence
  Pbrm1.969_Rasa1.1478
  crRNA array
cgatttcttggctttatatatcttgtggaaaggacgaaacaccgtaatttctactaagtgtagatgagccctaatgaacagctcataatttctactaagtgtagatcgataatggtctatgatgtcttttttaagcttggcgtggatccgatatcaactagatcttgaga

SEQ ID NO: 6507 - DNA, 170 bp, Artificial sequence
  Pbrm1.969_Rasa1.223
  crRNA array
cgatttcttggctttatatatcttgtggaaaggacgaaacaccgtaatttctactaagtgtagatgagccctaatgaacagctcataatttctactaagtgtagattccatggagtatcgtgctcgttttttaagcttggcgtggatccgatatcaactagatcttgaga

SEQ ID NO: 6508 - DNA, 170 bp, Artificial sequence
  Pbrm1.969_Rb1.211
  crRNA array
cgatttcttggctttatatatcttgtggaaaggacgaaacaccgtaatttctactaagtgtagatgagccctaatgaacagctcataatttctactaagtgtagattctgacatgatcgggtacctttttttaagcttggcgtggatccgatatcaactagatcttgaga

SEQ ID NO: 6509 - DNA, 170 bp, Artificial sequence
  Pbrm1.969_Rb1.394
  crRNA array
cgatttcttggctttatatatcttgtggaaaggacgaaacaccgtaatttctactaagtgtagatgagccctaatgaacagctcataatttctactaagtgtagatagaaatctcgaagcaggatcttttttaagcttggcgtggatccgatatcaactagatcttgaga

SEQ ID NO: 6510 - DNA, 170 bp, Artificial sequence
  Pbrm1.969_Rbm10.5
  crRNA array
cgatttcttggctttatatatcttgtggaaaggacgaaacaccgtaatttctactaagtgtagatgagccctaatgaacagctcataatttctactaagtgtagatacgaaacctgaacccacacattttttaagcttggcgtggatccgatatcaactagatcttgaga

SEQ ID NO: 6511 - DNA, 170 bp, Artificial sequence
  Pbrm1.969_Rbm10.6
  crRNA array
cgatttcttggctttatatatcttgtggaaaggacgaaacaccgtaatttctactaagtgtagatgagccctaatgaacagctcataatttctactaagtgtagatcgaaacctgaacccacacagttttttaagcttggcgtggatccgatatcaactagatcttgaga

SEQ ID NO: 6512 - DNA, 170 bp, Artificial sequence
  Pbrm1.969_Rnf43.1920
  crRNA array
cgatttcttggctttatatatcttgtggaaaggacgaaacaccgtaatttctactaagtgtagatgagccctaatgaacagctcataatttctactaagtgtagatatccccgtgccgtggactccttttttaagcttggcgtggatccgatatcaactagatcttgaga

SEQ ID NO: 6513 - DNA, 170 bp, Artificial sequence
  Pbrm1.969_Rnf43.39
  crRNA array
cgatttcttggctttatatatcttgtggaaaggacgaaacaccgtaatttctactaagtgtagatgagccctaatgaacagctcataatttctactaagtgtagatcaaggggatcactctgataattttttaagcttggcgtggatccgatatcaactagatcttgaga

SEQ ID NO: 6514 - DNA, 170 bp, Artificial sequence
  Pbrm1.969_Runx1.204
  crRNA array
cgatttcttggctttatatatcttgtggaaaggacgaaacaccgtaatttctactaagtgtagatgagccctaatgaacagctcataatttctactaagtgtagattaaataagtccagccgttttttttttaagcttggcgtggatccgatatcaactagatcttgaga

SEQ ID NO: 6515 - DNA, 170 bp, Artificial sequence
  Pbrm1.969_Runx1.81
  crRNA array
cgatttcttggctttatatatcttgtggaaaggacgaaacaccgtaatttctactaagtgtagatgagccctaatgaacagctcataatttctactaagtgtagataggacgcgtatgggaattttttttttaagcttggcgtggatccgatatcaactagatcttgaga

SEQ ID NO: 6516 - DNA, 170 bp, Artificial sequence
  Pbrm1.969_Setd2.143
  crRNA array
cgatttcttggctttatatatcttgtggaaaggacgaaacaccgtaatttctactaagtgtagatgagccctaatgaacagctcataatttctactaagtgtagatgcacaaccacaacagactggttttttaagcttggcgtggatccgatatcaactagatcttgaga

SEQ ID NO: 6517 - DNA, 170 bp, Artificial sequence
  Pbrm1.969_Setd2.508
  crRNA array
cgatttcttggctttatatatcttgtggaaaggacgaaacaccgtaatttctactaagtgtagatgagccctaatgaacagctcataatttctactaagtgtagattacgatcccgagcacccgacttttttaagcttggcgtggatccgatatcaactagatcttgaga

SEQ ID NO: 6518 - DNA, 170 bp, Artificial sequence
  Pbrm1.969_Smad4.3038
  crRNA array
cgatttcttggctttatatatcttgtggaaaggacgaaacaccgtaatttctactaagtgtagatgagccctaatgaacagctcataatttctactaagtgtagatatctgcggcagtgtcaccggttttttaagcttggcgtggatccgatatcaactagatcttgaga

SEQ ID NO: 6519 - DNA, 170 bp, Artificial sequence
  Pbrm1.969_Smad4.39
  crRNA array
cgatttcttggctttatatatcttgtggaaaggacgaaacaccgtaatttctactaagtgtagatgagccctaatgaacagctcataatttctactaagtgtagatagtcaaacgcatactgacaattttttaagcttggcgtggatccgatatcaactagatcttgaga

SEQ ID NO: 6520 - DNA, 170 bp, Artificial sequence
  Pbrm1.969_Stag2.1409
  crRNA array
cgatttcttggctttatatatcttgtggaaaggacgaaacaccgtaatttctactaagtgtagatgagccctaatgaacagctcataatttctactaagtgtagatgctaataactgcggaagggcttttttaagcttggcgtggatccgatatcaactagatcttgaga

SEQ ID NO: 6521 - DNA, 170 bp, Artificial sequence
  Pbrm1.969_Stag2.4401
  crRNA array
cgatttcttggctttatatatcttgtggaaaggacgaaacaccgtaatttctactaagtgtagatgagccctaatgaacagctcataatttctactaagtgtagattaatcgtccagtggtgtatattttttaagcttggcgtggatccgatatcaactagatcttgaga

SEQ ID NO: 6522 - DNA, 170 bp, Artificial sequence
  Pbrm1.969_Tbl1xr1.1
  crRNA array
cgatttcttggctttatatatcttgtggaaaggacgaaacaccgtaatttctactaagtgtagatgagccctaatgaacagctcataatttctactaagtgtagatggatgcgcatactggtgaagttttttaagcttggcgtggatccgatatcaactagatcttgaga

SEQ ID NO: 6523 - DNA, 170 bp, Artificial sequence
  Pbrm1.969_Tbl1xr1.83
  crRNA array
cgatttcttggctttatatatcttgtggaaaggacgaaacaccgtaatttctactaagtgtagatgagccctaatgaacagctcataatttctactaagtgtagatatggtcgacccatcgagtctttttttaagcttggcgtggatccgatatcaactagatcttgaga

SEQ ID NO: 6524 - DNA, 170 bp, Artificial sequence
  Pbrm1.969_Tgfbr2.290
  crRNA array
cgatttcttggctttatatatcttgtggaaaggacgaaacaccgtaatttctactaagtgtagatgagccctaatgaacagctcataatttctactaagtgtagatcctctcggcgcccgggtaaattttttaagcttggcgtggatccgatatcaactagatcttgaga

SEQ ID NO: 6525 - DNA, 170 bp, Artificial sequence
  Pbrm1.969_Tgfbr2.292
  crRNA array
cgatttcttggctttatatatcttgtggaaaggacgaaacaccgtaatttctactaagtgtagatgagccctaatgaacagctcataatttctactaagtgtagatcccgggcgccgagagggaaattttttaagcttggcgtggatccgatatcaactagatcttgaga

SEQ ID NO: 6526 - DNA, 170 bp, Artificial sequence
  Pbrm1.969_Trp53.4
  crRNA array
cgatttcttggctttatatatcttgtggaaaggacgaaacaccgtaatttctactaagtgtagatgagccctaatgaacagctcataatttctactaagtgtagatccctgaactgcccccagggattttttaagcttggcgtggatccgatatcaactagatcttgaga

SEQ ID NO: 6527 - DNA, 170 bp, Artificial sequence
  Pbrm1.969_Trp53.528
  crRNA array
cgatttcttggctttatatatcttgtggaaaggacgaaacaccgtaatttctactaagtgtagatgagccctaatgaacagctcataatttctactaagtgtagatgctgggccagcagagacctgttttttaagcttggcgtggatccgatatcaactagatcttgaga

SEQ ID NO: 6528 - DNA, 170 bp, Artificial sequence
  Pbrm1.969_Vhl.1
  crRNA array
cgatttcttggctttatatatcttgtggaaaggacgaaacaccgtaatttctactaagtgtagatgagccctaatgaacagctcataatttctactaagtgtagatagggctcccggcggccatttttttttaagcttggcgtggatccgatatcaactagatcttgaga

SEQ ID NO: 6529 - DNA, 170 bp, Artificial sequence
  Pbrm1.969_Vhl.151
  crRNA array
cgatttcttggctttatatatcttgtggaaaggacgaaacaccgtaatttctactaagtgtagatgagccctaatgaacagctcataatttctactaagtgtagattagagcactcacccgagggattttttaagcttggcgtggatccgatatcaactagatcttgaga

SEQ ID NO: 6530 - DNA, 170 bp, Artificial sequence
  Pbrm1.969_Zc3h13.1387
  crRNA array
cgatttcttggctttatatatcttgtggaaaggacgaaacaccgtaatttctactaagtgtagatgagccctaatgaacagctcataatttctactaagtgtagatgtgacgccggtcatgtgactttttttaagcttggcgtggatccgatatcaactagatcttgaga

SEQ ID NO: 6531 - DNA, 170 bp, Artificial sequence
  Pbrm1.969_Zc3h13.1777
  crRNA array
cgatttcttggctttatatatcttgtggaaaggacgaaacaccgtaatttctactaagtgtagatgagccctaatgaacagctcataatttctactaagtgtagatgatgctgccagtgtagcggcttttttaagcttggcgtggatccgatatcaactagatcttgaga

SEQ ID NO: 6532 - DNA, 170 bp, Artificial sequence
  Pik3r1.76_Acvr2a.155
  crRNA array
cgatttcttggctttatatatcttgtggaaaggacgaaacaccgtaatttctactaagtgtagataaaacctatacggcccgcactaatttctactaagtgtagatggacctggctaatcaagtatttttttaagcttggcgtggatccgatatcaactagatcttgaga

SEQ ID NO: 6533 - DNA, 170 bp, Artificial sequence
  Pik3r1.76_Acvr2a.70
  crRNA array
cgatttcttggctttatatatcttgtggaaaggacgaaacaccgtaatttctactaagtgtagataaaacctatacggcccgcactaatttctactaagtgtagatcccgaggcgccggagaagccttttttaagcttggcgtggatccgatatcaactagatcttgaga

SEQ ID NO: 6534 - DNA, 170 bp, Artificial sequence
  Pik3r1.76_Apc.21
  crRNA array
cgatttcttggctttatatatcttgtggaaaggacgaaacaccgtaatttctactaagtgtagataaaacctatacggcccgcactaatttctactaagtgtagatgtgatccacacgtgtagctgttttttaagcttggcgtggatccgatatcaactagatcttgaga

SEQ ID NO: 6535 - DNA, 170 bp, Artificial sequence
  Pik3r1.76_Apc.867
  crRNA array
cgatttcttggctttatatatcttgtggaaaggacgaaacaccgtaatttctactaagtgtagataaaacctatacggcccgcactaatttctactaagtgtagatcagtcccaggcggcggaagcttttttaagcttggcgtggatccgatatcaactagatcttgaga

SEQ ID NO: 6536 - DNA, 170 bp, Artificial sequence
  Pik3r1.76_Arid1a.2
  crRNA array
cgatttcttggctttatatatcttgtggaaaggacgaaacaccgtaatttctactaagtgtagataaaacctatacggcccgcactaatttctactaagtgtagatcccgcgcccccgtcctggggttttttaagcttggcgtggatccgatatcaactagatcttgaga

SEQ ID NO: 6537 - DNA, 170 bp, Artificial sequence
  Pik3r1.76_Arid1a.5
  crRNA array
cgatttcttggctttatatatcttgtggaaaggacgaaacaccgtaatttctactaagtgtagataaaacctatacggcccgcactaatttctactaagtgtagatcccgcgctcggccgctgccgttttttaagcttggcgtggatccgatatcaactagatcttgaga

SEQ ID NO: 6538 - DNA, 170 bp, Artificial sequence
  Pik3r1.76_Arid2.166
  crRNA array
cgatttcttggctttatatatcttgtggaaaggacgaaacaccgtaatttctactaagtgtagataaaacctatacggcccgcactaatttctactaagtgtagataaccgcgatctgggttttttttttttaagcttggcgtggatccgatatcaactagatcttgaga

SEQ ID NO: 6539 - DNA, 170 bp, Artificial sequence
  Pik3r1.76_Arid2.172
  crRNA array
cgatttcttggctttatatatcttgtggaaaggacgaaacaccgtaatttctactaagtgtagataaaacctatacggcccgcactaatttctactaagtgtagatctggacgagctgcggcagttttttttaagcttggcgtggatccgatatcaactagatcttgaga

SEQ ID NO: 6540 - DNA, 170 bp, Artificial sequence
  Pik3r1.76_Atm.120
  crRNA array
cgatttcttggctttatatatcttgtggaaaggacgaaacaccgtaatttctactaagtgtagataaaacctatacggcccgcactaatttctactaagtgtagatgacaggtagtcggcagctaattttttaagcttggcgtggatccgatatcaactagatcttgaga

SEQ ID NO: 6541 - DNA, 170 bp, Artificial sequence
  Pik3r1.76_Atm.997
  crRNA array
cgatttcttggctttatatatcttgtggaaaggacgaaacaccgtaatttctactaagtgtagataaaacctatacggcccgcactaatttctactaagtgtagatgagaaagtctccgaatcgttttttttaagcttggcgtggatccgatatcaactagatcttgaga

SEQ ID NO: 6542 - DNA, 170 bp, Artificial sequence
  Pik3r1.76_Atrx.249
  crRNA array
cgatttcttggctttatatatcttgtggaaaggacgaaacaccgtaatttctactaagtgtagataaaacctatacggcccgcactaatttctactaagtgtagattagccagtcgctcatatctcttttttaagcttggcgtggatccgatatcaactagatcttgaga

SEQ ID NO: 6543 - DNA, 170 bp, Artificial sequence
  Pik3r1.76_Atrx.251
  crRNA array
cgatttcttggctttatatatcttgtggaaaggacgaaacaccgtaatttctactaagtgtagataaaacctatacggcccgcactaatttctactaagtgtagatgccagtcgctcatatctctgttttttaagcttggcgtggatccgatatcaactagatcttgaga

SEQ ID NO: 6544 - DNA, 170 bp, Artificial sequence
  Pik3r1.76_Bcor.203
  crRNA array
cgatttcttggctttatatatcttgtggaaaggacgaaacaccgtaatttctactaagtgtagataaaacctatacggcccgcactaatttctactaagtgtagatccccggagcggagtccaggcttttttaagcttggcgtggatccgatatcaactagatcttgaga

SEQ ID NO: 6545 - DNA, 170 bp, Artificial sequence
  Pik3r1.76_Bcor.475
  crRNA array
cgatttcttggctttatatatcttgtggaaaggacgaaacaccgtaatttctactaagtgtagataaaacctatacggcccgcactaatttctactaagtgtagattgcaacccctctgtatgggattttttaagcttggcgtggatccgatatcaactagatcttgaga

SEQ ID NO: 6546 - DNA, 170 bp, Artificial sequence
  Pik3r1.76_Brca1.112
  crRNA array
cgatttcttggctttatatatcttgtggaaaggacgaaacaccgtaatttctactaagtgtagataaaacctatacggcccgcactaatttctactaagtgtagatctagacgctctgtggagactttttttaagcttggcgtggatccgatatcaactagatcttgaga

SEQ ID NO: 6547 - DNA, 170 bp, Artificial sequence
  Pik3r1.76_Brca1.53
  crRNA array
cgatttcttggctttatatatcttgtggaaaggacgaaacaccgtaatttctactaagtgtagataaaacctatacggcccgcactaatttctactaagtgtagataatgaggaggcgtcgatcatttttttaagcttggcgtggatccgatatcaactagatcttgaga

SEQ ID NO: 6548 - DNA, 170 bp, Artificial sequence
  Pik3r1.76_Casp8.45
  crRNA array
cgatttcttggctttatatatcttgtggaaaggacgaaacaccgtaatttctactaagtgtagataaaacctatacggcccgcactaatttctactaagtgtagatctaccgagatcctgtgaatgttttttaagcttggcgtggatccgatatcaactagatcttgaga

SEQ ID NO: 6549 - DNA, 170 bp, Artificial sequence
  Pik3r1.76_Casp8.54
  crRNA array
cgatttcttggctttatatatcttgtggaaaggacgaaacaccgtaatttctactaagtgtagataaaacctatacggcccgcactaatttctactaagtgtagatcagtgcagtcgtcgtaagatttttttaagcttggcgtggatccgatatcaactagatcttgaga

SEQ ID NO: 6550 - DNA, 170 bp, Artificial sequence
  Pik3r1.76_Cbwd1.84
  crRNA array
cgatttcttggctttatatatcttgtggaaaggacgaaacaccgtaatttctactaagtgtagataaaacctatacggcccgcactaatttctactaagtgtagatcacagcaggtaacatgccgcttttttaagcttggcgtggatccgatatcaactagatcttgaga

SEQ ID NO: 6551 - DNA, 170 bp, Artificial sequence
  Pik3r1.76_Cbwd1.85
  crRNA array
cgatttcttggctttatatatcttgtggaaaggacgaaacaccgtaatttctactaagtgtagataaaacctatacggcccgcactaatttctactaagtgtagatacagcaggtaacatgccgccttttttaagcttggcgtggatccgatatcaactagatcttgaga

SEQ ID NO: 6552 - DNA, 170 bp, Artificial sequence
  Pik3r1.76_Cdh1.387
  crRNA array
cgatttcttggctttatatatcttgtggaaaggacgaaacaccgtaatttctactaagtgtagataaaacctatacggcccgcactaatttctactaagtgtagatctcggcgtctgccgggtccgttttttaagcttggcgtggatccgatatcaactagatcttgaga

SEQ ID NO: 6553 - DNA, 170 bp, Artificial sequence
  Pik3r1.76_Cdh1.58
  crRNA array
cgatttcttggctttatatatcttgtggaaaggacgaaacaccgtaatttctactaagtgtagataaaacctatacggcccgcactaatttctactaagtgtagatctcgtccgcgcccgggactcttttttaagcttggcgtggatccgatatcaactagatcttgaga

SEQ ID NO: 6554 - DNA, 170 bp, Artificial sequence
  Pik3r1.76_Cdkn2a.647
  crRNA array
cgatttcttggctttatatatcttgtggaaaggacgaaacaccgtaatttctactaagtgtagataaaacctatacggcccgcactaatttctactaagtgtagatgcaatcacgggagggagcagttttttaagcttggcgtggatccgatatcaactagatcttgaga

SEQ ID NO: 6555 - DNA, 170 bp, Artificial sequence
  Pik3r1.76_Cdkn2a.648
  crRNA array
cgatttcttggctttatatatcttgtggaaaggacgaaacaccgtaatttctactaagtgtagataaaacctatacggcccgcactaatttctactaagtgtagatcaatcacgggagggagcagattttttaagcttggcgtggatccgatatcaactagatcttgaga

SEQ ID NO: 6556 - DNA, 170 bp, Artificial sequence
  Pik3r1.76_Cic.162
  crRNA array
cgatttcttggctttatatatcttgtggaaaggacgaaacaccgtaatttctactaagtgtagataaaacctatacggcccgcactaatttctactaagtgtagatcgcaggcgcgcccggcggagttttttaagcttggcgtggatccgatatcaactagatcttgaga

SEQ ID NO: 6557 - DNA, 170 bp, Artificial sequence
  Pik3r1.76_Cic.164
  crRNA array
cgatttcttggctttatatatcttgtggaaaggacgaaacaccgtaatttctactaagtgtagataaaacctatacggcccgcactaatttctactaagtgtagatcgggccctgggccggcggctttttttaagcttggcgtggatccgatatcaactagatcttgaga

SEQ ID NO: 6558 - DNA, 170 bp, Artificial sequence
  Pik3r1.76_Ctcf.229
  crRNA array
cgatttcttggctttatatatcttgtggaaaggacgaaacaccgtaatttctactaagtgtagataaaacctatacggcccgcactaatttctactaagtgtagatggctggtggctgatagtctgttttttaagcttggcgtggatccgatatcaactagatcttgaga

SEQ ID NO: 6559 - DNA, 170 bp, Artificial sequence
  Pik3r1.76_Ctcf.809
  crRNA array
cgatttcttggctttatatatcttgtggaaaggacgaaacaccgtaatttctactaagtgtagataaaacctatacggcccgcactaatttctactaagtgtagataagcgctatcatgatcccaattttttaagcttggcgtggatccgatatcaactagatcttgaga

SEQ ID NO: 6560 - DNA, 170 bp, Artificial sequence
  Pik3r1.76_Elf3.826
  crRNA array
cgatttcttggctttatatatcttgtggaaaggacgaaacaccgtaatttctactaagtgtagataaaacctatacggcccgcactaatttctactaagtgtagattccgagacatcctaatccacttttttaagcttggcgtggatccgatatcaactagatcttgaga

SEQ ID NO: 6561 - DNA, 170 bp, Artificial sequence
  Pik3r1.76_Elf3.983
  crRNA array
cgatttcttggctttatatatcttgtggaaaggacgaaacaccgtaatttctactaagtgtagataaaacctatacggcccgcactaatttctactaagtgtagattaggccccctaactggaccattttttaagcttggcgtggatccgatatcaactagatcttgaga

SEQ ID NO: 6562 - DNA, 170 bp, Artificial sequence
  Pik3r1.76_Ep300.310
  crRNA array
cgatttcttggctttatatatcttgtggaaaggacgaaacaccgtaatttctactaagtgtagataaaacctatacggcccgcactaatttctactaagtgtagatatggtacgacagtgaggaagttttttaagcttggcgtggatccgatatcaactagatcttgaga

SEQ ID NO: 6563 - DNA, 170 bp, Artificial sequence
  Pik3r1.76_Ep300.587
  crRNA array
cgatttcttggctttatatatcttgtggaaaggacgaaacaccgtaatttctactaagtgtagataaaacctatacggcccgcactaatttctactaagtgtagatcgccccggggcccccaaccattttttaagcttggcgtggatccgatatcaactagatcttgaga

SEQ ID NO: 6564 - DNA, 170 bp, Artificial sequence
  Pik3r1.76_Epha2.126
  crRNA array
cgatttcttggctttatatatcttgtggaaaggacgaaacaccgtaatttctactaagtgtagataaaacctatacggcccgcactaatttctactaagtgtagatcctgtgccgccgcggccgccttttttaagcttggcgtggatccgatatcaactagatcttgaga

SEQ ID NO: 6565 - DNA, 170 bp, Artificial sequence
  Pik3r1.76_Epha2.5
  crRNA array
cgatttcttggctttatatatcttgtggaaaggacgaaacaccgtaatttctactaagtgtagataaaacctatacggcccgcactaatttctactaagtgtagatcatgagctggcgccacccggttttttaagcttggcgtggatccgatatcaactagatcttgaga

SEQ ID NO: 6566 - DNA, 170 bp, Artificial sequence
  Pik3r1.76_Fat1.105
  crRNA array
cgatttcttggctttatatatcttgtggaaaggacgaaacaccgtaatttctactaagtgtagataaaacctatacggcccgcactaatttctactaagtgtagataactcgaggtgacaacaagtttttttaagcttggcgtggatccgatatcaactagatcttgaga

SEQ ID NO: 6567 - DNA, 170 bp, Artificial sequence
  Pik3r1.76_Fat1.122
  crRNA array
cgatttcttggctttatatatcttgtggaaaggacgaaacaccgtaatttctactaagtgtagataaaacctatacggcccgcactaatttctactaagtgtagatccatcgacatggaaacgggattttttaagcttggcgtggatccgatatcaactagatcttgaga

SEQ ID NO: 6568 - DNA, 170 bp, Artificial sequence
  Pik3r1.76_Fbxw7.21
  crRNA array
cgatttcttggctttatatatcttgtggaaaggacgaaacaccgtaatttctactaagtgtagataaaacctatacggcccgcactaatttctactaagtgtagattaatgtgccgtagaaacccattttttaagcttggcgtggatccgatatcaactagatcttgaga

SEQ ID NO: 6569 - DNA, 170 bp, Artificial sequence
  Pik3r1.76_Fbxw7.23
  crRNA array
cgatttcttggctttatatatcttgtggaaaggacgaaacaccgtaatttctactaagtgtagataaaacctatacggcccgcactaatttctactaagtgtagatatgtgccgtagaaacccatattttttaagcttggcgtggatccgatatcaactagatcttgaga

SEQ ID NO: 6570 - DNA, 170 bp, Artificial sequence
  Pik3r1.76_Gata3.34
  crRNA array
cgatttcttggctttatatatcttgtggaaaggacgaaacaccgtaatttctactaagtgtagataaaacctatacggcccgcactaatttctactaagtgtagatctaaactatcccgcaaagatttttttaagcttggcgtggatccgatatcaactagatcttgaga

SEQ ID NO: 6571 - DNA, 170 bp, Artificial sequence
  Pik3r1.76_Gata3.47
  crRNA array
cgatttcttggctttatatatcttgtggaaaggacgaaacaccgtaatttctactaagtgtagataaaacctatacggcccgcactaatttctactaagtgtagatcgtagtaggacgggacgtggttttttaagcttggcgtggatccgatatcaactagatcttgaga

SEQ ID NO: 6572 - DNA, 170 bp, Artificial sequence
  Pik3r1.76_H2-Q2.1
  crRNA array
cgatttcttggctttatatatcttgtggaaaggacgaaacaccgtaatttctactaagtgtagataaaacctatacggcccgcactaatttctactaagtgtagatagggcggccaccaacagcagttttttaagcttggcgtggatccgatatcaactagatcttgaga

SEQ ID NO: 6573 - DNA, 170 bp, Artificial sequence
  Pik3r1.76_H2-Q2.2
  crRNA array
cgatttcttggctttatatatcttgtggaaaggacgaaacaccgtaatttctactaagtgtagataaaacctatacggcccgcactaatttctactaagtgtagattaacctgcgcccgctgctgattttttaagcttggcgtggatccgatatcaactagatcttgaga

SEQ ID NO: 6574 - DNA, 170 bp, Artificial sequence
  Pik3r1.76_Kdm5c.1878
  crRNA array
cgatttcttggctttatatatcttgtggaaaggacgaaacaccgtaatttctactaagtgtagataaaacctatacggcccgcactaatttctactaagtgtagatagagcacggcacccgcccccttttttaagcttggcgtggatccgatatcaactagatcttgaga

SEQ ID NO: 6575 - DNA, 170 bp, Artificial sequence
  Pik3r1.76_Kdm5c.1879
  crRNA array
cgatttcttggctttatatatcttgtggaaaggacgaaacaccgtaatttctactaagtgtagataaaacctatacggcccgcactaatttctactaagtgtagatgagcacggcacccgccccccttttttaagcttggcgtggatccgatatcaactagatcttgaga

SEQ ID NO: 6576 - DNA, 170 bp, Artificial sequence
  Pik3r1.76_Kdm6a.56
  crRNA array
cgatttcttggctttatatatcttgtggaaaggacgaaacaccgtaatttctactaagtgtagataaaacctatacggcccgcactaatttctactaagtgtagattcgctgccgcctctcgcggcttttttaagcttggcgtggatccgatatcaactagatcttgaga

SEQ ID NO: 6577 - DNA, 170 bp, Artificial sequence
  Pik3r1.76_Kdm6a.57
  crRNA array
cgatttcttggctttatatatcttgtggaaaggacgaaacaccgtaatttctactaagtgtagataaaacctatacggcccgcactaatttctactaagtgtagatcgctgccgcctctcgcggcattttttaagcttggcgtggatccgatatcaactagatcttgaga

SEQ ID NO: 6578 - DNA, 170 bp, Artificial sequence
  Pik3r1.76_Kmt2b.265
  crRNA array
cgatttcttggctttatatatcttgtggaaaggacgaaacaccgtaatttctactaagtgtagataaaacctatacggcccgcactaatttctactaagtgtagatccccaagtgaagcccacctgttttttaagcttggcgtggatccgatatcaactagatcttgaga

SEQ ID NO: 6579 - DNA, 170 bp, Artificial sequence
  Pik3r1.76_Kmt2b.298
  crRNA array
cgatttcttggctttatatatcttgtggaaaggacgaaacaccgtaatttctactaagtgtagataaaacctatacggcccgcactaatttctactaagtgtagattccggcagggaccggctggcttttttaagcttggcgtggatccgatatcaactagatcttgaga

SEQ ID NO: 6580 - DNA, 170 bp, Artificial sequence
  Pik3r1.76_Kmt2c.1962
  crRNA array
cgatttcttggctttatatatcttgtggaaaggacgaaacaccgtaatttctactaagtgtagataaaacctatacggcccgcactaatttctactaagtgtagatgtgacgatctgtgccacaagttttttaagcttggcgtggatccgatatcaactagatcttgaga

SEQ ID NO: 6581 - DNA, 170 bp, Artificial sequence
  Pik3r1.76_Kmt2c.2236
  crRNA array
cgatttcttggctttatatatcttgtggaaaggacgaaacaccgtaatttctactaagtgtagataaaacctatacggcccgcactaatttctactaagtgtagatactcgacctccacctccctattttttaagcttggcgtggatccgatatcaactagatcttgaga

SEQ ID NO: 6582 - DNA, 170 bp, Artificial sequence
  Pik3r1.76_Kmt2d.316
  crRNA array
cgatttcttggctttatatatcttgtggaaaggacgaaacaccgtaatttctactaagtgtagataaaacctatacggcccgcactaatttctactaagtgtagatactccaggccacccaggtggttttttaagcttggcgtggatccgatatcaactagatcttgaga

SEQ ID NO: 6583 - DNA, 170 bp, Artificial sequence
  Pik3r1.76_Kmt2d.416
  crRNA array
cgatttcttggctttatatatcttgtggaaaggacgaaacaccgtaatttctactaagtgtagataaaacctatacggcccgcactaatttctactaagtgtagattaaacccccgggggaagggtttttttaagcttggcgtggatccgatatcaactagatcttgaga

SEQ ID NO: 6584 - DNA, 170 bp, Artificial sequence
  Pik3r1.76_Map2k4.119
  crRNA array
cgatttcttggctttatatatcttgtggaaaggacgaaacaccgtaatttctactaagtgtagataaaacctatacggcccgcactaatttctactaagtgtagattgctgtgtgggcggccacatttttttaagcttggcgtggatccgatatcaactagatcttgaga

SEQ ID NO: 6585 - DNA, 170 bp, Artificial sequence
  Pik3r1.76_Map2k4.1261
  crRNA array
cgatttcttggctttatatatcttgtggaaaggacgaaacaccgtaatttctactaagtgtagataaaacctatacggcccgcactaatttctactaagtgtagatgatgtagtaatgcggagtagttttttaagcttggcgtggatccgatatcaactagatcttgaga

SEQ ID NO: 6586 - DNA, 170 bp, Artificial sequence
  Pik3r1.76_Map3k1.235
  crRNA array
cgatttcttggctttatatatcttgtggaaaggacgaaacaccgtaatttctactaagtgtagataaaacctatacggcccgcactaatttctactaagtgtagataaaacgctactgatcgatcgttttttaagcttggcgtggatccgatatcaactagatcttgaga

SEQ ID NO: 6587 - DNA, 170 bp, Artificial sequence
  Pik3r1.76_Map3k1.3838
  crRNA array
cgatttcttggctttatatatcttgtggaaaggacgaaacaccgtaatttctactaagtgtagataaaacctatacggcccgcactaatttctactaagtgtagatccaacaacagggccccactattttttaagcttggcgtggatccgatatcaactagatcttgaga

SEQ ID NO: 6588 - DNA, 170 bp, Artificial sequence
  Pik3r1.76_Mga.1655
  crRNA array
cgatttcttggctttatatatcttgtggaaaggacgaaacaccgtaatttctactaagtgtagataaaacctatacggcccgcactaatttctactaagtgtagatcgagaagtggagagcatattttttttaagcttggcgtggatccgatatcaactagatcttgaga

SEQ ID NO: 6589 - DNA, 170 bp, Artificial sequence
  Pik3r1.76_Mga.93
  crRNA array
cgatttcttggctttatatatcttgtggaaaggacgaaacaccgtaatttctactaagtgtagataaaacctatacggcccgcactaatttctactaagtgtagatgagaaggctccccataatgtttttttaagcttggcgtggatccgatatcaactagatcttgaga

SEQ ID NO: 6590 - DNA, 170 bp, Artificial sequence
  Pik3r1.76_Nf1.746
  crRNA array
cgatttcttggctttatatatcttgtggaaaggacgaaacaccgtaatttctactaagtgtagataaaacctatacggcccgcactaatttctactaagtgtagattaagcataatgatgatgccattttttaagcttggcgtggatccgatatcaactagatcttgaga

SEQ ID NO: 6591 - DNA, 170 bp, Artificial sequence
  Pik3r1.76_Nf1.97
  crRNA array
cgatttcttggctttatatatcttgtggaaaggacgaaacaccgtaatttctactaagtgtagataaaacctatacggcccgcactaatttctactaagtgtagatagcccgctacatgctgatgcttttttaagcttggcgtggatccgatatcaactagatcttgaga

SEQ ID NO: 6592 - DNA, 170 bp, Artificial sequence
  Pik3r1.76_Nf2.356
  crRNA array
cgatttcttggctttatatatcttgtggaaaggacgaaacaccgtaatttctactaagtgtagataaaacctatacggcccgcactaatttctactaagtgtagatcggagtcatctgatagagatttttttaagcttggcgtggatccgatatcaactagatcttgaga

SEQ ID NO: 6593 - DNA, 170 bp, Artificial sequence
  Pik3r1.76_Nf2.768
  crRNA array
cgatttcttggctttatatatcttgtggaaaggacgaaacaccgtaatttctactaagtgtagataaaacctatacggcccgcactaatttctactaagtgtagatccgaagccccagtgtccggcttttttaagcttggcgtggatccgatatcaactagatcttgaga

SEQ ID NO: 6594 - DNA, 170 bp, Artificial sequence
  Pik3r1.76_Notch1.1849
  crRNA array
cgatttcttggctttatatatcttgtggaaaggacgaaacaccgtaatttctactaagtgtagataaaacctatacggcccgcactaatttctactaagtgtagatctggcgggtgggcggcgctgttttttaagcttggcgtggatccgatatcaactagatcttgaga

SEQ ID NO: 6595 - DNA, 170 bp, Artificial sequence
  Pik3r1.76_Notch1.649
  crRNA array
cgatttcttggctttatatatcttgtggaaaggacgaaacaccgtaatttctactaagtgtagataaaacctatacggcccgcactaatttctactaagtgtagattgggccaacgatgccaggacttttttaagcttggcgtggatccgatatcaactagatcttgaga

SEQ ID NO: 6596 - DNA, 170 bp, Artificial sequence
  Pik3r1.76_Nsd1.70
  crRNA array
cgatttcttggctttatatatcttgtggaaaggacgaaacaccgtaatttctactaagtgtagataaaacctatacggcccgcactaatttctactaagtgtagatactggtgtggacgatgcagattttttaagcttggcgtggatccgatatcaactagatcttgaga

SEQ ID NO: 6597 - DNA, 170 bp, Artificial sequence
  Pik3r1.76_Nsd1.90
  crRNA array
cgatttcttggctttatatatcttgtggaaaggacgaaacaccgtaatttctactaagtgtagataaaacctatacggcccgcactaatttctactaagtgtagataggagctaacggcaagaatgttttttaagcttggcgtggatccgatatcaactagatcttgaga

SEQ ID NO: 6598 - DNA, 170 bp, Artificial sequence
  Pik3r1.76_Pbrm1.1236
  crRNA array
cgatttcttggctttatatatcttgtggaaaggacgaaacaccgtaatttctactaagtgtagataaaacctatacggcccgcactaatttctactaagtgtagatgccgataaaaccaacagccgttttttaagcttggcgtggatccgatatcaactagatcttgaga

SEQ ID NO: 6599 - DNA, 170 bp, Artificial sequence
  Pik3r1.76_Pbrm1.969
  crRNA array
cgatttcttggctttatatatcttgtggaaaggacgaaacaccgtaatttctactaagtgtagataaaacctatacggcccgcactaatttctactaagtgtagatgagccctaatgaacagctcattttttaagcttggcgtggatccgatatcaactagatcttgaga

SEQ ID NO: 6600 - DNA, 170 bp, Artificial sequence
  Pik3r1.76_Pten.240
  crRNA array
cgatttcttggctttatatatcttgtggaaaggacgaaacaccgtaatttctactaagtgtagataaaacctatacggcccgcactaatttctactaagtgtagattgcatacgctatagctgcttttttttaagcttggcgtggatccgatatcaactagatcttgaga

SEQ ID NO: 6601 - DNA, 170 bp, Artificial sequence
  Pik3r1.76_Pten.265
  crRNA array
cgatttcttggctttatatatcttgtggaaaggacgaaacaccgtaatttctactaagtgtagataaaacctatacggcccgcactaatttctactaagtgtagataagcgtggtgcgtgacgcacttttttaagcttggcgtggatccgatatcaactagatcttgaga

SEQ ID NO: 6602 - DNA, 170 bp, Artificial sequence
  Pik3r1.76_Rasa1.1478
  crRNA array
cgatttcttggctttatatatcttgtggaaaggacgaaacaccgtaatttctactaagtgtagataaaacctatacggcccgcactaatttctactaagtgtagatcgataatggtctatgatgtcttttttaagcttggcgtggatccgatatcaactagatcttgaga

SEQ ID NO: 6603 - DNA, 170 bp, Artificial sequence
  Pik3r1.76_Rasa1.223
  crRNA array
cgatttcttggctttatatatcttgtggaaaggacgaaacaccgtaatttctactaagtgtagataaaacctatacggcccgcactaatttctactaagtgtagattccatggagtatcgtgctcgttttttaagcttggcgtggatccgatatcaactagatcttgaga

SEQ ID NO: 6604 - DNA, 170 bp, Artificial sequence
  Pik3r1.76_Rb1.211
  crRNA array
cgatttcttggctttatatatcttgtggaaaggacgaaacaccgtaatttctactaagtgtagataaaacctatacggcccgcactaatttctactaagtgtagattctgacatgatcgggtacctttttttaagcttggcgtggatccgatatcaactagatcttgaga

SEQ ID NO: 6605 - DNA, 170 bp, Artificial sequence
  Pik3r1.76_Rb1.394
  crRNA array
cgatttcttggctttatatatcttgtggaaaggacgaaacaccgtaatttctactaagtgtagataaaacctatacggcccgcactaatttctactaagtgtagatagaaatctcgaagcaggatcttttttaagcttggcgtggatccgatatcaactagatcttgaga

SEQ ID NO: 6606 - DNA, 170 bp, Artificial sequence
  Pik3r1.76_Rbm10.5
  crRNA array
cgatttcttggctttatatatcttgtggaaaggacgaaacaccgtaatttctactaagtgtagataaaacctatacggcccgcactaatttctactaagtgtagatacgaaacctgaacccacacattttttaagcttggcgtggatccgatatcaactagatcttgaga

SEQ ID NO: 6607 - DNA, 170 bp, Artificial sequence
  Pik3r1.76_Rbm10.6
  crRNA array
cgatttcttggctttatatatcttgtggaaaggacgaaacaccgtaatttctactaagtgtagataaaacctatacggcccgcactaatttctactaagtgtagatcgaaacctgaacccacacagttttttaagcttggcgtggatccgatatcaactagatcttgaga

SEQ ID NO: 6608 - DNA, 170 bp, Artificial sequence
  Pik3r1.76_Rnf43.1920
  crRNA array
cgatttcttggctttatatatcttgtggaaaggacgaaacaccgtaatttctactaagtgtagataaaacctatacggcccgcactaatttctactaagtgtagatatccccgtgccgtggactccttttttaagcttggcgtggatccgatatcaactagatcttgaga

SEQ ID NO: 6609 - DNA, 170 bp, Artificial sequence
  Pik3r1.76_Rnf43.39
  crRNA array
cgatttcttggctttatatatcttgtggaaaggacgaaacaccgtaatttctactaagtgtagataaaacctatacggcccgcactaatttctactaagtgtagatcaaggggatcactctgataattttttaagcttggcgtggatccgatatcaactagatcttgaga

SEQ ID NO: 6610 - DNA, 170 bp, Artificial sequence
  Pik3r1.76_Runx1.204
  crRNA array
cgatttcttggctttatatatcttgtggaaaggacgaaacaccgtaatttctactaagtgtagataaaacctatacggcccgcactaatttctactaagtgtagattaaataagtccagccgttttttttttaagcttggcgtggatccgatatcaactagatcttgaga

SEQ ID NO: 6611 - DNA, 170 bp, Artificial sequence
  Pik3r1.76_Runx1.81
  crRNA array
cgatttcttggctttatatatcttgtggaaaggacgaaacaccgtaatttctactaagtgtagataaaacctatacggcccgcactaatttctactaagtgtagataggacgcgtatgggaattttttttttaagcttggcgtggatccgatatcaactagatcttgaga

SEQ ID NO: 6612 - DNA, 170 bp, Artificial sequence
  Pik3r1.76_Setd2.143
  crRNA array
cgatttcttggctttatatatcttgtggaaaggacgaaacaccgtaatttctactaagtgtagataaaacctatacggcccgcactaatttctactaagtgtagatgcacaaccacaacagactggttttttaagcttggcgtggatccgatatcaactagatcttgaga

SEQ ID NO: 6613 - DNA, 170 bp, Artificial sequence
  Pik3r1.76_Setd2.508
  crRNA array
cgatttcttggctttatatatcttgtggaaaggacgaaacaccgtaatttctactaagtgtagataaaacctatacggcccgcactaatttctactaagtgtagattacgatcccgagcacccgacttttttaagcttggcgtggatccgatatcaactagatcttgaga

SEQ ID NO: 6614 - DNA, 170 bp, Artificial sequence
  Pik3r1.76_Smad4.3038
  crRNA array
cgatttcttggctttatatatcttgtggaaaggacgaaacaccgtaatttctactaagtgtagataaaacctatacggcccgcactaatttctactaagtgtagatatctgcggcagtgtcaccggttttttaagcttggcgtggatccgatatcaactagatcttgaga

SEQ ID NO: 6615 - DNA, 170 bp, Artificial sequence
  Pik3r1.76_Smad4.39
  crRNA array
cgatttcttggctttatatatcttgtggaaaggacgaaacaccgtaatttctactaagtgtagataaaacctatacggcccgcactaatttctactaagtgtagatagtcaaacgcatactgacaattttttaagcttggcgtggatccgatatcaactagatcttgaga

SEQ ID NO: 6616 - DNA, 170 bp, Artificial sequence
  Pik3r1.76_Stag2.1409
  crRNA array
cgatttcttggctttatatatcttgtggaaaggacgaaacaccgtaatttctactaagtgtagataaaacctatacggcccgcactaatttctactaagtgtagatgctaataactgcggaagggcttttttaagcttggcgtggatccgatatcaactagatcttgaga

SEQ ID NO: 6617 - DNA, 170 bp, Artificial sequence
  Pik3r1.76_Stag2.4401
  crRNA array
cgatttcttggctttatatatcttgtggaaaggacgaaacaccgtaatttctactaagtgtagataaaacctatacggcccgcactaatttctactaagtgtagattaatcgtccagtggtgtatattttttaagcttggcgtggatccgatatcaactagatcttgaga

SEQ ID NO: 6618 - DNA, 170 bp, Artificial sequence
  Pik3r1.76_Tbl1xr1.1
  crRNA array
cgatttcttggctttatatatcttgtggaaaggacgaaacaccgtaatttctactaagtgtagataaaacctatacggcccgcactaatttctactaagtgtagatggatgcgcatactggtgaagttttttaagcttggcgtggatccgatatcaactagatcttgaga

SEQ ID NO: 6619 - DNA, 170 bp, Artificial sequence
  Pik3r1.76_Tbl1xr1.83
  crRNA array
cgatttcttggctttatatatcttgtggaaaggacgaaacaccgtaatttctactaagtgtagataaaacctatacggcccgcactaatttctactaagtgtagatatggtcgacccatcgagtctttttttaagcttggcgtggatccgatatcaactagatcttgaga

SEQ ID NO: 6620 - DNA, 170 bp, Artificial sequence
  Pik3r1.76_Tgfbr2.290
  crRNA array
cgatttcttggctttatatatcttgtggaaaggacgaaacaccgtaatttctactaagtgtagataaaacctatacggcccgcactaatttctactaagtgtagatcctctcggcgcccgggtaaattttttaagcttggcgtggatccgatatcaactagatcttgaga

SEQ ID NO: 6621 - DNA, 170 bp, Artificial sequence
  Pik3r1.76_Tgfbr2.292
  crRNA array
cgatttcttggctttatatatcttgtggaaaggacgaaacaccgtaatttctactaagtgtagataaaacctatacggcccgcactaatttctactaagtgtagatcccgggcgccgagagggaaattttttaagcttggcgtggatccgatatcaactagatcttgaga

SEQ ID NO: 6622 - DNA, 170 bp, Artificial sequence
  Pik3r1.76_Trp53.4
  crRNA array
cgatttcttggctttatatatcttgtggaaaggacgaaacaccgtaatttctactaagtgtagataaaacctatacggcccgcactaatttctactaagtgtagatccctgaactgcccccagggattttttaagcttggcgtggatccgatatcaactagatcttgaga

SEQ ID NO: 6623 - DNA, 170 bp, Artificial sequence
  Pik3r1.76_Trp53.528
  crRNA array
cgatttcttggctttatatatcttgtggaaaggacgaaacaccgtaatttctactaagtgtagataaaacctatacggcccgcactaatttctactaagtgtagatgctgggccagcagagacctgttttttaagcttggcgtggatccgatatcaactagatcttgaga

SEQ ID NO: 6624 - DNA, 170 bp, Artificial sequence
  Pik3r1.76_Vhl.1
  crRNA array
cgatttcttggctttatatatcttgtggaaaggacgaaacaccgtaatttctactaagtgtagataaaacctatacggcccgcactaatttctactaagtgtagatagggctcccggcggccatttttttttaagcttggcgtggatccgatatcaactagatcttgaga

SEQ ID NO: 6625 - DNA, 170 bp, Artificial sequence
  Pik3r1.76_Vhl.151
  crRNA array
cgatttcttggctttatatatcttgtggaaaggacgaaacaccgtaatttctactaagtgtagataaaacctatacggcccgcactaatttctactaagtgtagattagagcactcacccgagggattttttaagcttggcgtggatccgatatcaactagatcttgaga

SEQ ID NO: 6626 - DNA, 170 bp, Artificial sequence
  Pik3r1.76_Zc3h13.1387
  crRNA array
cgatttcttggctttatatatcttgtggaaaggacgaaacaccgtaatttctactaagtgtagataaaacctatacggcccgcactaatttctactaagtgtagatgtgacgccggtcatgtgactttttttaagcttggcgtggatccgatatcaactagatcttgaga

SEQ ID NO: 6627 - DNA, 170 bp, Artificial sequence
  Pik3r1.76_Zc3h13.1777
  crRNA array
cgatttcttggctttatatatcttgtggaaaggacgaaacaccgtaatttctactaagtgtagataaaacctatacggcccgcactaatttctactaagtgtagatgatgctgccagtgtagcggcttttttaagcttggcgtggatccgatatcaactagatcttgaga

SEQ ID NO: 6628 - DNA, 170 bp, Artificial sequence
  Pik3r1.77_Acvr2a.155
  crRNA array
cgatttcttggctttatatatcttgtggaaaggacgaaacaccgtaatttctactaagtgtagataaacctatacggcccgcacttaatttctactaagtgtagatggacctggctaatcaagtatttttttaagcttggcgtggatccgatatcaactagatcttgaga

SEQ ID NO: 6629 - DNA, 170 bp, Artificial sequence
  Pik3r1.77_Acvr2a.70
  crRNA array
cgatttcttggctttatatatcttgtggaaaggacgaaacaccgtaatttctactaagtgtagataaacctatacggcccgcacttaatttctactaagtgtagatcccgaggcgccggagaagccttttttaagcttggcgtggatccgatatcaactagatcttgaga

SEQ ID NO: 6630 - DNA, 170 bp, Artificial sequence
  Pik3r1.77_Apc.21
  crRNA array
cgatttcttggctttatatatcttgtggaaaggacgaaacaccgtaatttctactaagtgtagataaacctatacggcccgcacttaatttctactaagtgtagatgtgatccacacgtgtagctgttttttaagcttggcgtggatccgatatcaactagatcttgaga

SEQ ID NO: 6631 - DNA, 170 bp, Artificial sequence
  Pik3r1.77_Apc.867
  crRNA array
cgatttcttggctttatatatcttgtggaaaggacgaaacaccgtaatttctactaagtgtagataaacctatacggcccgcacttaatttctactaagtgtagatcagtcccaggcggcggaagcttttttaagcttggcgtggatccgatatcaactagatcttgaga

SEQ ID NO: 6632 - DNA, 170 bp, Artificial sequence
  Pik3r1.77_Arid1a.2
  crRNA array
cgatttcttggctttatatatcttgtggaaaggacgaaacaccgtaatttctactaagtgtagataaacctatacggcccgcacttaatttctactaagtgtagatcccgcgcccccgtcctggggttttttaagcttggcgtggatccgatatcaactagatcttgaga

SEQ ID NO: 6633 - DNA, 170 bp, Artificial sequence
  Pik3r1.77_Arid1a.5
  crRNA array
cgatttcttggctttatatatcttgtggaaaggacgaaacaccgtaatttctactaagtgtagataaacctatacggcccgcacttaatttctactaagtgtagatcccgcgctcggccgctgccgttttttaagcttggcgtggatccgatatcaactagatcttgaga

SEQ ID NO: 6634 - DNA, 170 bp, Artificial sequence
  Pik3r1.77_Arid2.166
  crRNA array
cgatttcttggctttatatatcttgtggaaaggacgaaacaccgtaatttctactaagtgtagataaacctatacggcccgcacttaatttctactaagtgtagataaccgcgatctgggttttttttttttaagcttggcgtggatccgatatcaactagatcttgaga

SEQ ID NO: 6635 - DNA, 170 bp, Artificial sequence
  Pik3r1.77_Arid2.172
  crRNA array
cgatttcttggctttatatatcttgtggaaaggacgaaacaccgtaatttctactaagtgtagataaacctatacggcccgcacttaatttctactaagtgtagatctggacgagctgcggcagttttttttaagcttggcgtggatccgatatcaactagatcttgaga

SEQ ID NO: 6636 - DNA, 170 bp, Artificial sequence
  Pik3r1.77_Atm.120
  crRNA array
cgatttcttggctttatatatcttgtggaaaggacgaaacaccgtaatttctactaagtgtagataaacctatacggcccgcacttaatttctactaagtgtagatgacaggtagtcggcagctaattttttaagcttggcgtggatccgatatcaactagatcttgaga

SEQ ID NO: 6637 - DNA, 170 bp, Artificial sequence
  Pik3r1.77_Atm.997
  crRNA array
cgatttcttggctttatatatcttgtggaaaggacgaaacaccgtaatttctactaagtgtagataaacctatacggcccgcacttaatttctactaagtgtagatgagaaagtctccgaatcgttttttttaagcttggcgtggatccgatatcaactagatcttgaga

SEQ ID NO: 6638 - DNA, 170 bp, Artificial sequence
  Pik3r1.77_Atrx.249
  crRNA array
cgatttcttggctttatatatcttgtggaaaggacgaaacaccgtaatttctactaagtgtagataaacctatacggcccgcacttaatttctactaagtgtagattagccagtcgctcatatctcttttttaagcttggcgtggatccgatatcaactagatcttgaga

SEQ ID NO: 6639 - DNA, 170 bp, Artificial sequence
  Pik3r1.77_Atrx.251
  crRNA array
cgatttcttggctttatatatcttgtggaaaggacgaaacaccgtaatttctactaagtgtagataaacctatacggcccgcacttaatttctactaagtgtagatgccagtcgctcatatctctgttttttaagcttggcgtggatccgatatcaactagatcttgaga

SEQ ID NO: 6640 - DNA, 170 bp, Artificial sequence
  Pik3r1.77_Bcor.203
  crRNA array
cgatttcttggctttatatatcttgtggaaaggacgaaacaccgtaatttctactaagtgtagataaacctatacggcccgcacttaatttctactaagtgtagatccccggagcggagtccaggcttttttaagcttggcgtggatccgatatcaactagatcttgaga

SEQ ID NO: 6641 - DNA, 170 bp, Artificial sequence
  Pik3r1.77_Bcor.475
  crRNA array
cgatttcttggctttatatatcttgtggaaaggacgaaacaccgtaatttctactaagtgtagataaacctatacggcccgcacttaatttctactaagtgtagattgcaacccctctgtatgggattttttaagcttggcgtggatccgatatcaactagatcttgaga

SEQ ID NO: 6642 - DNA, 170 bp, Artificial sequence
  Pik3r1.77_Brca1.112
  crRNA array
cgatttcttggctttatatatcttgtggaaaggacgaaacaccgtaatttctactaagtgtagataaacctatacggcccgcacttaatttctactaagtgtagatctagacgctctgtggagactttttttaagcttggcgtggatccgatatcaactagatcttgaga

SEQ ID NO: 6643 - DNA, 170 bp, Artificial sequence
  Pik3r1.77_Brca1.53
  crRNA array
cgatttcttggctttatatatcttgtggaaaggacgaaacaccgtaatttctactaagtgtagataaacctatacggcccgcacttaatttctactaagtgtagataatgaggaggcgtcgatcatttttttaagcttggcgtggatccgatatcaactagatcttgaga

SEQ ID NO: 6644 - DNA, 170 bp, Artificial sequence
  Pik3r1.77_Casp8.45
  crRNA array
cgatttcttggctttatatatcttgtggaaaggacgaaacaccgtaatttctactaagtgtagataaacctatacggcccgcacttaatttctactaagtgtagatctaccgagatcctgtgaatgttttttaagcttggcgtggatccgatatcaactagatcttgaga

SEQ ID NO: 6645 - DNA, 170 bp, Artificial sequence
  Pik3r1.77_Casp8.54
  crRNA array
cgatttcttggctttatatatcttgtggaaaggacgaaacaccgtaatttctactaagtgtagataaacctatacggcccgcacttaatttctactaagtgtagatcagtgcagtcgtcgtaagatttttttaagcttggcgtggatccgatatcaactagatcttgaga

SEQ ID NO: 6646 - DNA, 170 bp, Artificial sequence
  Pik3r1.77_Cbwd1.84
  crRNA array
cgatttcttggctttatatatcttgtggaaaggacgaaacaccgtaatttctactaagtgtagataaacctatacggcccgcacttaatttctactaagtgtagatcacagcaggtaacatgccgcttttttaagcttggcgtggatccgatatcaactagatcttgaga

SEQ ID NO: 6647 - DNA, 170 bp, Artificial sequence
  Pik3r1.77_Cbwd1.85
  crRNA array
cgatttcttggctttatatatcttgtggaaaggacgaaacaccgtaatttctactaagtgtagataaacctatacggcccgcacttaatttctactaagtgtagatacagcaggtaacatgccgccttttttaagcttggcgtggatccgatatcaactagatcttgaga

SEQ ID NO: 6648 - DNA, 170 bp, Artificial sequence
  Pik3r1.77_Cdh1.387
  crRNA array
cgatttcttggctttatatatcttgtggaaaggacgaaacaccgtaatttctactaagtgtagataaacctatacggcccgcacttaatttctactaagtgtagatctcggcgtctgccgggtccgttttttaagcttggcgtggatccgatatcaactagatcttgaga

SEQ ID NO: 6649 - DNA, 170 bp, Artificial sequence
  Pik3r1.77_Cdh1.58
  crRNA array
cgatttcttggctttatatatcttgtggaaaggacgaaacaccgtaatttctactaagtgtagataaacctatacggcccgcacttaatttctactaagtgtagatctcgtccgcgcccgggactcttttttaagcttggcgtggatccgatatcaactagatcttgaga

SEQ ID NO: 6650 - DNA, 170 bp, Artificial sequence
  Pik3r1.77_Cdkn2a.647
  crRNA array
cgatttcttggctttatatatcttgtggaaaggacgaaacaccgtaatttctactaagtgtagataaacctatacggcccgcacttaatttctactaagtgtagatgcaatcacgggagggagcagttttttaagcttggcgtggatccgatatcaactagatcttgaga

SEQ ID NO: 6651 - DNA, 170 bp, Artificial sequence
  Pik3r1.77_Cdkn2a.648
  crRNA array
cgatttcttggctttatatatcttgtggaaaggacgaaacaccgtaatttctactaagtgtagataaacctatacggcccgcacttaatttctactaagtgtagatcaatcacgggagggagcagattttttaagcttggcgtggatccgatatcaactagatcttgaga

SEQ ID NO: 6652 - DNA, 170 bp, Artificial sequence
  Pik3r1.77_Cic.162
  crRNA array
cgatttcttggctttatatatcttgtggaaaggacgaaacaccgtaatttctactaagtgtagataaacctatacggcccgcacttaatttctactaagtgtagatcgcaggcgcgcccggcggagttttttaagcttggcgtggatccgatatcaactagatcttgaga

SEQ ID NO: 6653 - DNA, 170 bp, Artificial sequence
  Pik3r1.77_Cic.164
  crRNA array
cgatttcttggctttatatatcttgtggaaaggacgaaacaccgtaatttctactaagtgtagataaacctatacggcccgcacttaatttctactaagtgtagatcgggccctgggccggcggctttttttaagcttggcgtggatccgatatcaactagatcttgaga

SEQ ID NO: 6654 - DNA, 170 bp, Artificial sequence
  Pik3r1.77_Ctcf.229
  crRNA array
cgatttcttggctttatatatcttgtggaaaggacgaaacaccgtaatttctactaagtgtagataaacctatacggcccgcacttaatttctactaagtgtagatggctggtggctgatagtctgttttttaagcttggcgtggatccgatatcaactagatcttgaga

SEQ ID NO: 6655 - DNA, 170 bp, Artificial sequence
  Pik3r1.77_Ctcf.809
  crRNA array
cgatttcttggctttatatatcttgtggaaaggacgaaacaccgtaatttctactaagtgtagataaacctatacggcccgcacttaatttctactaagtgtagataagcgctatcatgatcccaattttttaagcttggcgtggatccgatatcaactagatcttgaga

SEQ ID NO: 6656 - DNA, 170 bp, Artificial sequence
  Pik3r1.77_Elf3.826
  crRNA array
cgatttcttggctttatatatcttgtggaaaggacgaaacaccgtaatttctactaagtgtagataaacctatacggcccgcacttaatttctactaagtgtagattccgagacatcctaatccacttttttaagcttggcgtggatccgatatcaactagatcttgaga

SEQ ID NO: 6657 - DNA, 170 bp, Artificial sequence
  Pik3r1.77_Elf3.983
  crRNA array
cgatttcttggctttatatatcttgtggaaaggacgaaacaccgtaatttctactaagtgtagataaacctatacggcccgcacttaatttctactaagtgtagattaggccccctaactggaccattttttaagcttggcgtggatccgatatcaactagatcttgaga

SEQ ID NO: 6658 - DNA, 170 bp, Artificial sequence
  Pik3r1.77_Ep300.310
  crRNA array
cgatttcttggctttatatatcttgtggaaaggacgaaacaccgtaatttctactaagtgtagataaacctatacggcccgcacttaatttctactaagtgtagatatggtacgacagtgaggaagttttttaagcttggcgtggatccgatatcaactagatcttgaga

SEQ ID NO: 6659 - DNA, 170 bp, Artificial sequence
  Pik3r1.77_Ep300.587
  crRNA array
cgatttcttggctttatatatcttgtggaaaggacgaaacaccgtaatttctactaagtgtagataaacctatacggcccgcacttaatttctactaagtgtagatcgccccggggcccccaaccattttttaagcttggcgtggatccgatatcaactagatcttgaga

SEQ ID NO: 6660 - DNA, 170 bp, Artificial sequence
  Pik3r1.77_Epha2.126
  crRNA array
cgatttcttggctttatatatcttgtggaaaggacgaaacaccgtaatttctactaagtgtagataaacctatacggcccgcacttaatttctactaagtgtagatcctgtgccgccgcggccgccttttttaagcttggcgtggatccgatatcaactagatcttgaga

SEQ ID NO: 6661 - DNA, 170 bp, Artificial sequence
  Pik3r1.77_Epha2.5
  crRNA array
cgatttcttggctttatatatcttgtggaaaggacgaaacaccgtaatttctactaagtgtagataaacctatacggcccgcacttaatttctactaagtgtagatcatgagctggcgccacccggttttttaagcttggcgtggatccgatatcaactagatcttgaga

SEQ ID NO: 6662 - DNA, 170 bp, Artificial sequence
  Pik3r1.77_Fat1.105
  crRNA array
cgatttcttggctttatatatcttgtggaaaggacgaaacaccgtaatttctactaagtgtagataaacctatacggcccgcacttaatttctactaagtgtagataactcgaggtgacaacaagtttttttaagcttggcgtggatccgatatcaactagatcttgaga

SEQ ID NO: 6663 - DNA, 170 bp, Artificial sequence
  Pik3r1.77_Fat1.122
  crRNA array
cgatttcttggctttatatatcttgtggaaaggacgaaacaccgtaatttctactaagtgtagataaacctatacggcccgcacttaatttctactaagtgtagatccatcgacatggaaacgggattttttaagcttggcgtggatccgatatcaactagatcttgaga

SEQ ID NO: 6664 - DNA, 170 bp, Artificial sequence
  Pik3r1.77_Fbxw7.21
  crRNA array
cgatttcttggctttatatatcttgtggaaaggacgaaacaccgtaatttctactaagtgtagataaacctatacggcccgcacttaatttctactaagtgtagattaatgtgccgtagaaacccattttttaagcttggcgtggatccgatatcaactagatcttgaga

SEQ ID NO: 6665 - DNA, 170 bp, Artificial sequence
  Pik3r1.77_Fbxw7.23
  crRNA array
cgatttcttggctttatatatcttgtggaaaggacgaaacaccgtaatttctactaagtgtagataaacctatacggcccgcacttaatttctactaagtgtagatatgtgccgtagaaacccatattttttaagcttggcgtggatccgatatcaactagatcttgaga

SEQ ID NO: 6666 - DNA, 170 bp, Artificial sequence
  Pik3r1.77_Gata3.34
  crRNA array
cgatttcttggctttatatatcttgtggaaaggacgaaacaccgtaatttctactaagtgtagataaacctatacggcccgcacttaatttctactaagtgtagatctaaactatcccgcaaagatttttttaagcttggcgtggatccgatatcaactagatcttgaga

SEQ ID NO: 6667 - DNA, 170 bp, Artificial sequence
  Pik3r1.77_Gata3.47
  crRNA array
cgatttcttggctttatatatcttgtggaaaggacgaaacaccgtaatttctactaagtgtagataaacctatacggcccgcacttaatttctactaagtgtagatcgtagtaggacgggacgtggttttttaagcttggcgtggatccgatatcaactagatcttgaga

SEQ ID NO: 6668 - DNA, 170 bp, Artificial sequence
  Pik3r1.77_H2-Q2.1
  crRNA array
cgatttcttggctttatatatcttgtggaaaggacgaaacaccgtaatttctactaagtgtagataaacctatacggcccgcacttaatttctactaagtgtagatagggcggccaccaacagcagttttttaagcttggcgtggatccgatatcaactagatcttgaga

SEQ ID NO: 6669 - DNA, 170 bp, Artificial sequence
  Pik3r1.77_H2-Q2.2
  crRNA array
cgatttcttggctttatatatcttgtggaaaggacgaaacaccgtaatttctactaagtgtagataaacctatacggcccgcacttaatttctactaagtgtagattaacctgcgcccgctgctgattttttaagcttggcgtggatccgatatcaactagatcttgaga

SEQ ID NO: 6670 - DNA, 170 bp, Artificial sequence
  Pik3r1.77_Kdm5c.1878
  crRNA array
cgatttcttggctttatatatcttgtggaaaggacgaaacaccgtaatttctactaagtgtagataaacctatacggcccgcacttaatttctactaagtgtagatagagcacggcacccgcccccttttttaagcttggcgtggatccgatatcaactagatcttgaga

SEQ ID NO: 6671 - DNA, 170 bp, Artificial sequence
  Pik3r1.77_Kdm5c.1879
  crRNA array
cgatttcttggctttatatatcttgtggaaaggacgaaacaccgtaatttctactaagtgtagataaacctatacggcccgcacttaatttctactaagtgtagatgagcacggcacccgccccccttttttaagcttggcgtggatccgatatcaactagatcttgaga

SEQ ID NO: 6672 - DNA, 170 bp, Artificial sequence
  Pik3r1.77_Kdm6a.56
  crRNA array
cgatttcttggctttatatatcttgtggaaaggacgaaacaccgtaatttctactaagtgtagataaacctatacggcccgcacttaatttctactaagtgtagattcgctgccgcctctcgcggcttttttaagcttggcgtggatccgatatcaactagatcttgaga

SEQ ID NO: 6673 - DNA, 170 bp, Artificial sequence
  Pik3r1.77_Kdm6a.57
  crRNA array
cgatttcttggctttatatatcttgtggaaaggacgaaacaccgtaatttctactaagtgtagataaacctatacggcccgcacttaatttctactaagtgtagatcgctgccgcctctcgcggcattttttaagcttggcgtggatccgatatcaactagatcttgaga

SEQ ID NO: 6674 - DNA, 170 bp, Artificial sequence
  Pik3r1.77_Kmt2b.265
  crRNA array
cgatttcttggctttatatatcttgtggaaaggacgaaacaccgtaatttctactaagtgtagataaacctatacggcccgcacttaatttctactaagtgtagatccccaagtgaagcccacctgttttttaagcttggcgtggatccgatatcaactagatcttgaga

SEQ ID NO: 6675 - DNA, 170 bp, Artificial sequence
  Pik3r1.77_Kmt2b.298
  crRNA array
cgatttcttggctttatatatcttgtggaaaggacgaaacaccgtaatttctactaagtgtagataaacctatacggcccgcacttaatttctactaagtgtagattccggcagggaccggctggcttttttaagcttggcgtggatccgatatcaactagatcttgaga

SEQ ID NO: 6676 - DNA, 170 bp, Artificial sequence
  Pik3r1.77_Kmt2c.1962
  crRNA array
cgatttcttggctttatatatcttgtggaaaggacgaaacaccgtaatttctactaagtgtagataaacctatacggcccgcacttaatttctactaagtgtagatgtgacgatctgtgccacaagttttttaagcttggcgtggatccgatatcaactagatcttgaga

SEQ ID NO: 6677 - DNA, 170 bp, Artificial sequence
  Pik3r1.77_Kmt2c.2236
  crRNA array
cgatttcttggctttatatatcttgtggaaaggacgaaacaccgtaatttctactaagtgtagataaacctatacggcccgcacttaatttctactaagtgtagatactcgacctccacctccctattttttaagcttggcgtggatccgatatcaactagatcttgaga

SEQ ID NO: 6678 - DNA, 170 bp, Artificial sequence
  Pik3r1.77_Kmt2d.316
  crRNA array
cgatttcttggctttatatatcttgtggaaaggacgaaacaccgtaatttctactaagtgtagataaacctatacggcccgcacttaatttctactaagtgtagatactccaggccacccaggtggttttttaagcttggcgtggatccgatatcaactagatcttgaga

SEQ ID NO: 6679 - DNA, 170 bp, Artificial sequence
  Pik3r1.77_Kmt2d.416
  crRNA array
cgatttcttggctttatatatcttgtggaaaggacgaaacaccgtaatttctactaagtgtagataaacctatacggcccgcacttaatttctactaagtgtagattaaacccccgggggaagggtttttttaagcttggcgtggatccgatatcaactagatcttgaga

SEQ ID NO: 6680 - DNA, 170 bp, Artificial sequence
  Pik3r1.77_Map2k4.119
  crRNA array
cgatttcttggctttatatatcttgtggaaaggacgaaacaccgtaatttctactaagtgtagataaacctatacggcccgcacttaatttctactaagtgtagattgctgtgtgggcggccacatttttttaagcttggcgtggatccgatatcaactagatcttgaga

SEQ ID NO: 6681 - DNA, 170 bp, Artificial sequence
  Pik3r1.77_Map2k4.1261
  crRNA array
cgatttcttggctttatatatcttgtggaaaggacgaaacaccgtaatttctactaagtgtagataaacctatacggcccgcacttaatttctactaagtgtagatgatgtagtaatgcggagtagttttttaagcttggcgtggatccgatatcaactagatcttgaga

SEQ ID NO: 6682 - DNA, 170 bp, Artificial sequence
  Pik3r1.77_Map3k1.235
  crRNA array
cgatttcttggctttatatatcttgtggaaaggacgaaacaccgtaatttctactaagtgtagataaacctatacggcccgcacttaatttctactaagtgtagataaaacgctactgatcgatcgttttttaagcttggcgtggatccgatatcaactagatcttgaga

SEQ ID NO: 6683 - DNA, 170 bp, Artificial sequence
  Pik3r1.77_Map3k1.3838
  crRNA array
cgatttcttggctttatatatcttgtggaaaggacgaaacaccgtaatttctactaagtgtagataaacctatacggcccgcacttaatttctactaagtgtagatccaacaacagggccccactattttttaagcttggcgtggatccgatatcaactagatcttgaga

SEQ ID NO: 6684 - DNA, 170 bp, Artificial sequence
  Pik3r1.77_Mga.1655
  crRNA array
cgatttcttggctttatatatcttgtggaaaggacgaaacaccgtaatttctactaagtgtagataaacctatacggcccgcacttaatttctactaagtgtagatcgagaagtggagagcatattttttttaagcttggcgtggatccgatatcaactagatcttgaga

SEQ ID NO: 6685 - DNA, 170 bp, Artificial sequence
  Pik3r1.77_Mga.93
  crRNA array
cgatttcttggctttatatatcttgtggaaaggacgaaacaccgtaatttctactaagtgtagataaacctatacggcccgcacttaatttctactaagtgtagatgagaaggctccccataatgtttttttaagcttggcgtggatccgatatcaactagatcttgaga

SEQ ID NO: 6686 - DNA, 170 bp, Artificial sequence
  Pik3r1.77_Nf1.746
  crRNA array
cgatttcttggctttatatatcttgtggaaaggacgaaacaccgtaatttctactaagtgtagataaacctatacggcccgcacttaatttctactaagtgtagattaagcataatgatgatgccattttttaagcttggcgtggatccgatatcaactagatcttgaga

SEQ ID NO: 6687 - DNA, 170 bp, Artificial sequence
  Pik3r1.77_Nf1.97
  crRNA array
cgatttcttggctttatatatcttgtggaaaggacgaaacaccgtaatttctactaagtgtagataaacctatacggcccgcacttaatttctactaagtgtagatagcccgctacatgctgatgcttttttaagcttggcgtggatccgatatcaactagatcttgaga

SEQ ID NO: 6688 - DNA, 170 bp, Artificial sequence
  Pik3r1.77_Nf2.356
  crRNA array
cgatttcttggctttatatatcttgtggaaaggacgaaacaccgtaatttctactaagtgtagataaacctatacggcccgcacttaatttctactaagtgtagatcggagtcatctgatagagatttttttaagcttggcgtggatccgatatcaactagatcttgaga

SEQ ID NO: 6689 - DNA, 170 bp, Artificial sequence
  Pik3r1.77_Nf2.768
  crRNA array
cgatttcttggctttatatatcttgtggaaaggacgaaacaccgtaatttctactaagtgtagataaacctatacggcccgcacttaatttctactaagtgtagatccgaagccccagtgtccggcttttttaagcttggcgtggatccgatatcaactagatcttgaga

SEQ ID NO: 6690 - DNA, 170 bp, Artificial sequence
  Pik3r1.77_Notch1.1849
  crRNA array
cgatttcttggctttatatatcttgtggaaaggacgaaacaccgtaatttctactaagtgtagataaacctatacggcccgcacttaatttctactaagtgtagatctggcgggtgggcggcgctgttttttaagcttggcgtggatccgatatcaactagatcttgaga

SEQ ID NO: 6691 - DNA, 170 bp, Artificial sequence
  Pik3r1.77_Notch1.649
  crRNA array
cgatttcttggctttatatatcttgtggaaaggacgaaacaccgtaatttctactaagtgtagataaacctatacggcccgcacttaatttctactaagtgtagattgggccaacgatgccaggacttttttaagcttggcgtggatccgatatcaactagatcttgaga

SEQ ID NO: 6692 - DNA, 170 bp, Artificial sequence
  Pik3r1.77_Nsd1.70
  crRNA array
cgatttcttggctttatatatcttgtggaaaggacgaaacaccgtaatttctactaagtgtagataaacctatacggcccgcacttaatttctactaagtgtagatactggtgtggacgatgcagattttttaagcttggcgtggatccgatatcaactagatcttgaga

SEQ ID NO: 6693 - DNA, 170 bp, Artificial sequence
  Pik3r1.77_Nsd1.90
  crRNA array
cgatttcttggctttatatatcttgtggaaaggacgaaacaccgtaatttctactaagtgtagataaacctatacggcccgcacttaatttctactaagtgtagataggagctaacggcaagaatgttttttaagcttggcgtggatccgatatcaactagatcttgaga

SEQ ID NO: 6694 - DNA, 170 bp, Artificial sequence
  Pik3r1.77_Pbrm1.1236
  crRNA array
cgatttcttggctttatatatcttgtggaaaggacgaaacaccgtaatttctactaagtgtagataaacctatacggcccgcacttaatttctactaagtgtagatgccgataaaaccaacagccgttttttaagcttggcgtggatccgatatcaactagatcttgaga

SEQ ID NO: 6695 - DNA, 170 bp, Artificial sequence
  Pik3r1.77_Pbrm1.969
  crRNA array
cgatttcttggctttatatatcttgtggaaaggacgaaacaccgtaatttctactaagtgtagataaacctatacggcccgcacttaatttctactaagtgtagatgagccctaatgaacagctcattttttaagcttggcgtggatccgatatcaactagatcttgaga

SEQ ID NO: 6696 - DNA, 170 bp, Artificial sequence
  Pik3r1.77_Pten.240
  crRNA array
cgatttcttggctttatatatcttgtggaaaggacgaaacaccgtaatttctactaagtgtagataaacctatacggcccgcacttaatttctactaagtgtagattgcatacgctatagctgcttttttttaagcttggcgtggatccgatatcaactagatcttgaga

SEQ ID NO: 6697 - DNA, 170 bp, Artificial sequence
  Pik3r1.77_Pten.265
  crRNA array
cgatttcttggctttatatatcttgtggaaaggacgaaacaccgtaatttctactaagtgtagataaacctatacggcccgcacttaatttctactaagtgtagataagcgtggtgcgtgacgcacttttttaagcttggcgtggatccgatatcaactagatcttgaga

SEQ ID NO: 6698 - DNA, 170 bp, Artificial sequence
  Pik3r1.77_Rasa1.1478
  crRNA array
cgatttcttggctttatatatcttgtggaaaggacgaaacaccgtaatttctactaagtgtagataaacctatacggcccgcacttaatttctactaagtgtagatcgataatggtctatgatgtcttttttaagcttggcgtggatccgatatcaactagatcttgaga

SEQ ID NO: 6699 - DNA, 170 bp, Artificial sequence
  Pik3r1.77_Rasa1.223
  crRNA array
cgatttcttggctttatatatcttgtggaaaggacgaaacaccgtaatttctactaagtgtagataaacctatacggcccgcacttaatttctactaagtgtagattccatggagtatcgtgctcgttttttaagcttggcgtggatccgatatcaactagatcttgaga

SEQ ID NO: 6700 - DNA, 170 bp, Artificial sequence
  Pik3r1.77_Rb1.211
  crRNA array
cgatttcttggctttatatatcttgtggaaaggacgaaacaccgtaatttctactaagtgtagataaacctatacggcccgcacttaatttctactaagtgtagattctgacatgatcgggtacctttttttaagcttggcgtggatccgatatcaactagatcttgaga

SEQ ID NO: 6701 - DNA, 170 bp, Artificial sequence
  Pik3r1.77_Rb1.394
  crRNA array
cgatttcttggctttatatatcttgtggaaaggacgaaacaccgtaatttctactaagtgtagataaacctatacggcccgcacttaatttctactaagtgtagatagaaatctcgaagcaggatcttttttaagcttggcgtggatccgatatcaactagatcttgaga

SEQ ID NO: 6702 - DNA, 170 bp, Artificial sequence
  Pik3r1.77_Rbm10.5
  crRNA array
cgatttcttggctttatatatcttgtggaaaggacgaaacaccgtaatttctactaagtgtagataaacctatacggcccgcacttaatttctactaagtgtagatacgaaacctgaacccacacattttttaagcttggcgtggatccgatatcaactagatcttgaga

SEQ ID NO: 6703 - DNA, 170 bp, Artificial sequence
  Pik3r1.77_Rbm10.6
  crRNA array
cgatttcttggctttatatatcttgtggaaaggacgaaacaccgtaatttctactaagtgtagataaacctatacggcccgcacttaatttctactaagtgtagatcgaaacctgaacccacacagttttttaagcttggcgtggatccgatatcaactagatcttgaga

SEQ ID NO: 6704 - DNA, 170 bp, Artificial sequence
  Pik3r1.77_Rnf43.1920
  crRNA array
cgatttcttggctttatatatcttgtggaaaggacgaaacaccgtaatttctactaagtgtagataaacctatacggcccgcacttaatttctactaagtgtagatatccccgtgccgtggactccttttttaagcttggcgtggatccgatatcaactagatcttgaga

SEQ ID NO: 6705 - DNA, 170 bp, Artificial sequence
  Pik3r1.77_Rnf43.39
  crRNA array
cgatttcttggctttatatatcttgtggaaaggacgaaacaccgtaatttctactaagtgtagataaacctatacggcccgcacttaatttctactaagtgtagatcaaggggatcactctgataattttttaagcttggcgtggatccgatatcaactagatcttgaga

SEQ ID NO: 6706 - DNA, 170 bp, Artificial sequence
  Pik3r1.77_Runx1.204
  crRNA array
cgatttcttggctttatatatcttgtggaaaggacgaaacaccgtaatttctactaagtgtagataaacctatacggcccgcacttaatttctactaagtgtagattaaataagtccagccgttttttttttaagcttggcgtggatccgatatcaactagatcttgaga

SEQ ID NO: 6707 - DNA, 170 bp, Artificial sequence
  Pik3r1.77_Runx1.81
  crRNA array
cgatttcttggctttatatatcttgtggaaaggacgaaacaccgtaatttctactaagtgtagataaacctatacggcccgcacttaatttctactaagtgtagataggacgcgtatgggaattttttttttaagcttggcgtggatccgatatcaactagatcttgaga

SEQ ID NO: 6708 - DNA, 170 bp, Artificial sequence
  Pik3r1.77_Setd2.143
  crRNA array
cgatttcttggctttatatatcttgtggaaaggacgaaacaccgtaatttctactaagtgtagataaacctatacggcccgcacttaatttctactaagtgtagatgcacaaccacaacagactggttttttaagcttggcgtggatccgatatcaactagatcttgaga

SEQ ID NO: 6709 - DNA, 170 bp, Artificial sequence
  Pik3r1.77_Setd2.508
  crRNA array
cgatttcttggctttatatatcttgtggaaaggacgaaacaccgtaatttctactaagtgtagataaacctatacggcccgcacttaatttctactaagtgtagattacgatcccgagcacccgacttttttaagcttggcgtggatccgatatcaactagatcttgaga

SEQ ID NO: 6710 - DNA, 170 bp, Artificial sequence
  Pik3r1.77_Smad4.3038
  crRNA array
cgatttcttggctttatatatcttgtggaaaggacgaaacaccgtaatttctactaagtgtagataaacctatacggcccgcacttaatttctactaagtgtagatatctgcggcagtgtcaccggttttttaagcttggcgtggatccgatatcaactagatcttgaga

SEQ ID NO: 6711 - DNA, 170 bp, Artificial sequence
  Pik3r1.77_Smad4.39
  crRNA array
cgatttcttggctttatatatcttgtggaaaggacgaaacaccgtaatttctactaagtgtagataaacctatacggcccgcacttaatttctactaagtgtagatagtcaaacgcatactgacaattttttaagcttggcgtggatccgatatcaactagatcttgaga

SEQ ID NO: 6712 - DNA, 170 bp, Artificial sequence
  Pik3r1.77_Stag2.1409
  crRNA array
cgatttcttggctttatatatcttgtggaaaggacgaaacaccgtaatttctactaagtgtagataaacctatacggcccgcacttaatttctactaagtgtagatgctaataactgcggaagggcttttttaagcttggcgtggatccgatatcaactagatcttgaga

SEQ ID NO: 6713 - DNA, 170 bp, Artificial sequence
  Pik3r1.77_Stag2.4401
  crRNA array
cgatttcttggctttatatatcttgtggaaaggacgaaacaccgtaatttctactaagtgtagataaacctatacggcccgcacttaatttctactaagtgtagattaatcgtccagtggtgtatattttttaagcttggcgtggatccgatatcaactagatcttgaga

SEQ ID NO: 6714 - DNA, 170 bp, Artificial sequence
  Pik3r1.77_Tbl1xr1.1
  crRNA array
cgatttcttggctttatatatcttgtggaaaggacgaaacaccgtaatttctactaagtgtagataaacctatacggcccgcacttaatttctactaagtgtagatggatgcgcatactggtgaagttttttaagcttggcgtggatccgatatcaactagatcttgaga

SEQ ID NO: 6715 - DNA, 170 bp, Artificial sequence
  Pik3r1.77_Tbl1xr1.83
  crRNA array
cgatttcttggctttatatatcttgtggaaaggacgaaacaccgtaatttctactaagtgtagataaacctatacggcccgcacttaatttctactaagtgtagatatggtcgacccatcgagtctttttttaagcttggcgtggatccgatatcaactagatcttgaga

SEQ ID NO: 6716 - DNA, 170 bp, Artificial sequence
  Pik3r1.77_Tgfbr2.290
  crRNA array
cgatttcttggctttatatatcttgtggaaaggacgaaacaccgtaatttctactaagtgtagataaacctatacggcccgcacttaatttctactaagtgtagatcctctcggcgcccgggtaaattttttaagcttggcgtggatccgatatcaactagatcttgaga

SEQ ID NO: 6717 - DNA, 170 bp, Artificial sequence
  Pik3r1.77_Tgfbr2.292
  crRNA array
cgatttcttggctttatatatcttgtggaaaggacgaaacaccgtaatttctactaagtgtagataaacctatacggcccgcacttaatttctactaagtgtagatcccgggcgccgagagggaaattttttaagcttggcgtggatccgatatcaactagatcttgaga

SEQ ID NO: 6718 - DNA, 170 bp, Artificial sequence
  Pik3r1.77_Trp53.4
  crRNA array
cgatttcttggctttatatatcttgtggaaaggacgaaacaccgtaatttctactaagtgtagataaacctatacggcccgcacttaatttctactaagtgtagatccctgaactgcccccagggattttttaagcttggcgtggatccgatatcaactagatcttgaga

SEQ ID NO: 6719 - DNA, 170 bp, Artificial sequence
  Pik3r1.77_Trp53.528
  crRNA array
cgatttcttggctttatatatcttgtggaaaggacgaaacaccgtaatttctactaagtgtagataaacctatacggcccgcacttaatttctactaagtgtagatgctgggccagcagagacctgttttttaagcttggcgtggatccgatatcaactagatcttgaga

SEQ ID NO: 6720 - DNA, 170 bp, Artificial sequence
  Pik3r1.77_Vhl.1
  crRNA array
cgatttcttggctttatatatcttgtggaaaggacgaaacaccgtaatttctactaagtgtagataaacctatacggcccgcacttaatttctactaagtgtagatagggctcccggcggccatttttttttaagcttggcgtggatccgatatcaactagatcttgaga

SEQ ID NO: 6721 - DNA, 170 bp, Artificial sequence
  Pik3r1.77_Vhl.151
  crRNA array
cgatttcttggctttatatatcttgtggaaaggacgaaacaccgtaatttctactaagtgtagataaacctatacggcccgcacttaatttctactaagtgtagattagagcactcacccgagggattttttaagcttggcgtggatccgatatcaactagatcttgaga

SEQ ID NO: 6722 - DNA, 170 bp, Artificial sequence
  Pik3r1.77_Zc3h13.1387
  crRNA array
cgatttcttggctttatatatcttgtggaaaggacgaaacaccgtaatttctactaagtgtagataaacctatacggcccgcacttaatttctactaagtgtagatgtgacgccggtcatgtgactttttttaagcttggcgtggatccgatatcaactagatcttgaga

SEQ ID NO: 6723 - DNA, 170 bp, Artificial sequence
  Pik3r1.77_Zc3h13.1777
  crRNA array
cgatttcttggctttatatatcttgtggaaaggacgaaacaccgtaatttctactaagtgtagataaacctatacggcccgcacttaatttctactaagtgtagatgatgctgccagtgtagcggcttttttaagcttggcgtggatccgatatcaactagatcttgaga

SEQ ID NO: 6724 - DNA, 170 bp, Artificial sequence
  Pten.240_Acvr2a.155
  crRNA array
cgatttcttggctttatatatcttgtggaaaggacgaaacaccgtaatttctactaagtgtagattgcatacgctatagctgctttaatttctactaagtgtagatggacctggctaatcaagtatttttttaagcttggcgtggatccgatatcaactagatcttgaga

SEQ ID NO: 6725 - DNA, 170 bp, Artificial sequence
  Pten.240_Acvr2a.70
  crRNA array
cgatttcttggctttatatatcttgtggaaaggacgaaacaccgtaatttctactaagtgtagattgcatacgctatagctgctttaatttctactaagtgtagatcccgaggcgccggagaagccttttttaagcttggcgtggatccgatatcaactagatcttgaga

SEQ ID NO: 6726 - DNA, 170 bp, Artificial sequence
  Pten.240_Apc.21
  crRNA array
cgatttcttggctttatatatcttgtggaaaggacgaaacaccgtaatttctactaagtgtagattgcatacgctatagctgctttaatttctactaagtgtagatgtgatccacacgtgtagctgttttttaagcttggcgtggatccgatatcaactagatcttgaga

SEQ ID NO: 6727 - DNA, 170 bp, Artificial sequence
  Pten.240_Apc.867
  crRNA array
cgatttcttggctttatatatcttgtggaaaggacgaaacaccgtaatttctactaagtgtagattgcatacgctatagctgctttaatttctactaagtgtagatcagtcccaggcggcggaagcttttttaagcttggcgtggatccgatatcaactagatcttgaga

SEQ ID NO: 6728 - DNA, 170 bp, Artificial sequence
  Pten.240_Arid1a.2
  crRNA array
cgatttcttggctttatatatcttgtggaaaggacgaaacaccgtaatttctactaagtgtagattgcatacgctatagctgctttaatttctactaagtgtagatcccgcgcccccgtcctggggttttttaagcttggcgtggatccgatatcaactagatcttgaga

SEQ ID NO: 6729 - DNA, 170 bp, Artificial sequence
  Pten.240_Arid1a.5
  crRNA array
cgatttcttggctttatatatcttgtggaaaggacgaaacaccgtaatttctactaagtgtagattgcatacgctatagctgctttaatttctactaagtgtagatcccgcgctcggccgctgccgttttttaagcttggcgtggatccgatatcaactagatcttgaga

SEQ ID NO: 6730 - DNA, 170 bp, Artificial sequence
  Pten.240_Arid2.166
  crRNA array
cgatttcttggctttatatatcttgtggaaaggacgaaacaccgtaatttctactaagtgtagattgcatacgctatagctgctttaatttctactaagtgtagataaccgcgatctgggttttttttttttaagcttggcgtggatccgatatcaactagatcttgaga

SEQ ID NO: 6731 - DNA, 170 bp, Artificial sequence
  Pten.240_Arid2.172
  crRNA array
cgatttcttggctttatatatcttgtggaaaggacgaaacaccgtaatttctactaagtgtagattgcatacgctatagctgctttaatttctactaagtgtagatctggacgagctgcggcagttttttttaagcttggcgtggatccgatatcaactagatcttgaga

SEQ ID NO: 6732 - DNA, 170 bp, Artificial sequence
  Pten.240_Atm.120
  crRNA array
cgatttcttggctttatatatcttgtggaaaggacgaaacaccgtaatttctactaagtgtagattgcatacgctatagctgctttaatttctactaagtgtagatgacaggtagtcggcagctaattttttaagcttggcgtggatccgatatcaactagatcttgaga

SEQ ID NO: 6733 - DNA, 170 bp, Artificial sequence
  Pten.240_Atm.997
  crRNA array
cgatttcttggctttatatatcttgtggaaaggacgaaacaccgtaatttctactaagtgtagattgcatacgctatagctgctttaatttctactaagtgtagatgagaaagtctccgaatcgttttttttaagcttggcgtggatccgatatcaactagatcttgaga

SEQ ID NO: 6734 - DNA, 170 bp, Artificial sequence
  Pten.240_Atrx.249
  crRNA array
cgatttcttggctttatatatcttgtggaaaggacgaaacaccgtaatttctactaagtgtagattgcatacgctatagctgctttaatttctactaagtgtagattagccagtcgctcatatctcttttttaagcttggcgtggatccgatatcaactagatcttgaga

SEQ ID NO: 6735 - DNA, 170 bp, Artificial sequence
  Pten.240_Atrx.251
  crRNA array
cgatttcttggctttatatatcttgtggaaaggacgaaacaccgtaatttctactaagtgtagattgcatacgctatagctgctttaatttctactaagtgtagatgccagtcgctcatatctctgttttttaagcttggcgtggatccgatatcaactagatcttgaga

SEQ ID NO: 6736 - DNA, 170 bp, Artificial sequence
  Pten.240_Bcor.203
  crRNA array
cgatttcttggctttatatatcttgtggaaaggacgaaacaccgtaatttctactaagtgtagattgcatacgctatagctgctttaatttctactaagtgtagatccccggagcggagtccaggcttttttaagcttggcgtggatccgatatcaactagatcttgaga

SEQ ID NO: 6737 - DNA, 170 bp, Artificial sequence
  Pten.240_Bcor.475
  crRNA array
cgatttcttggctttatatatcttgtggaaaggacgaaacaccgtaatttctactaagtgtagattgcatacgctatagctgctttaatttctactaagtgtagattgcaacccctctgtatgggattttttaagcttggcgtggatccgatatcaactagatcttgaga

SEQ ID NO: 6738 - DNA, 170 bp, Artificial sequence
  Pten.240_Brca1.112
  crRNA array
cgatttcttggctttatatatcttgtggaaaggacgaaacaccgtaatttctactaagtgtagattgcatacgctatagctgctttaatttctactaagtgtagatctagacgctctgtggagactttttttaagcttggcgtggatccgatatcaactagatcttgaga

SEQ ID NO: 6739 - DNA, 170 bp, Artificial sequence
  Pten.240_Brca1.53
  crRNA array
cgatttcttggctttatatatcttgtggaaaggacgaaacaccgtaatttctactaagtgtagattgcatacgctatagctgctttaatttctactaagtgtagataatgaggaggcgtcgatcatttttttaagcttggcgtggatccgatatcaactagatcttgaga

SEQ ID NO: 6740 - DNA, 170 bp, Artificial sequence
  Pten.240_Casp8.45
  crRNA array
cgatttcttggctttatatatcttgtggaaaggacgaaacaccgtaatttctactaagtgtagattgcatacgctatagctgctttaatttctactaagtgtagatctaccgagatcctgtgaatgttttttaagcttggcgtggatccgatatcaactagatcttgaga

SEQ ID NO: 6741 - DNA, 170 bp, Artificial sequence
  Pten.240_Casp8.54
  crRNA array
cgatttcttggctttatatatcttgtggaaaggacgaaacaccgtaatttctactaagtgtagattgcatacgctatagctgctttaatttctactaagtgtagatcagtgcagtcgtcgtaagatttttttaagcttggcgtggatccgatatcaactagatcttgaga

SEQ ID NO: 6742 - DNA, 170 bp, Artificial sequence
  Pten.240_Cbwd1.84
  crRNA array
cgatttcttggctttatatatcttgtggaaaggacgaaacaccgtaatttctactaagtgtagattgcatacgctatagctgctttaatttctactaagtgtagatcacagcaggtaacatgccgcttttttaagcttggcgtggatccgatatcaactagatcttgaga

SEQ ID NO: 6743 - DNA, 170 bp, Artificial sequence
  Pten.240_Cbwd1.85
  crRNA array
cgatttcttggctttatatatcttgtggaaaggacgaaacaccgtaatttctactaagtgtagattgcatacgctatagctgctttaatttctactaagtgtagatacagcaggtaacatgccgccttttttaagcttggcgtggatccgatatcaactagatcttgaga

SEQ ID NO: 6744 - DNA, 170 bp, Artificial sequence
  Pten.240_Cdh1.387
  crRNA array
cgatttcttggctttatatatcttgtggaaaggacgaaacaccgtaatttctactaagtgtagattgcatacgctatagctgctttaatttctactaagtgtagatctcggcgtctgccgggtccgttttttaagcttggcgtggatccgatatcaactagatcttgaga

SEQ ID NO: 6745 - DNA, 170 bp, Artificial sequence
  Pten.240_Cdh1.58
  crRNA array
cgatttcttggctttatatatcttgtggaaaggacgaaacaccgtaatttctactaagtgtagattgcatacgctatagctgctttaatttctactaagtgtagatctcgtccgcgcccgggactcttttttaagcttggcgtggatccgatatcaactagatcttgaga

SEQ ID NO: 6746 - DNA, 170 bp, Artificial sequence
  Pten.240_Cdkn2a.647
  crRNA array
cgatttcttggctttatatatcttgtggaaaggacgaaacaccgtaatttctactaagtgtagattgcatacgctatagctgctttaatttctactaagtgtagatgcaatcacgggagggagcagttttttaagcttggcgtggatccgatatcaactagatcttgaga

SEQ ID NO: 6747 - DNA, 170 bp, Artificial sequence
  Pten.240_Cdkn2a.648
  crRNA array
cgatttcttggctttatatatcttgtggaaaggacgaaacaccgtaatttctactaagtgtagattgcatacgctatagctgctttaatttctactaagtgtagatcaatcacgggagggagcagattttttaagcttggcgtggatccgatatcaactagatcttgaga

SEQ ID NO: 6748 - DNA, 170 bp, Artificial sequence
  Pten.240_Cic.162
  crRNA array
cgatttcttggctttatatatcttgtggaaaggacgaaacaccgtaatttctactaagtgtagattgcatacgctatagctgctttaatttctactaagtgtagatcgcaggcgcgcccggcggagttttttaagcttggcgtggatccgatatcaactagatcttgaga

SEQ ID NO: 6749 - DNA, 170 bp, Artificial sequence
  Pten.240_Cic.164
  crRNA array
cgatttcttggctttatatatcttgtggaaaggacgaaacaccgtaatttctactaagtgtagattgcatacgctatagctgctttaatttctactaagtgtagatcgggccctgggccggcggctttttttaagcttggcgtggatccgatatcaactagatcttgaga

SEQ ID NO: 6750 - DNA, 170 bp, Artificial sequence
  Pten.240_Ctcf.229
  crRNA array
cgatttcttggctttatatatcttgtggaaaggacgaaacaccgtaatttctactaagtgtagattgcatacgctatagctgctttaatttctactaagtgtagatggctggtggctgatagtctgttttttaagcttggcgtggatccgatatcaactagatcttgaga

SEQ ID NO: 6751 - DNA, 170 bp, Artificial sequence
  Pten.240_Ctcf.809
  crRNA array
cgatttcttggctttatatatcttgtggaaaggacgaaacaccgtaatttctactaagtgtagattgcatacgctatagctgctttaatttctactaagtgtagataagcgctatcatgatcccaattttttaagcttggcgtggatccgatatcaactagatcttgaga

SEQ ID NO: 6752 - DNA, 170 bp, Artificial sequence
  Pten.240_Elf3.826
  crRNA array
cgatttcttggctttatatatcttgtggaaaggacgaaacaccgtaatttctactaagtgtagattgcatacgctatagctgctttaatttctactaagtgtagattccgagacatcctaatccacttttttaagcttggcgtggatccgatatcaactagatcttgaga

SEQ ID NO: 6753 - DNA, 170 bp, Artificial sequence
  Pten.240_Elf3.983
  crRNA array
cgatttcttggctttatatatcttgtggaaaggacgaaacaccgtaatttctactaagtgtagattgcatacgctatagctgctttaatttctactaagtgtagattaggccccctaactggaccattttttaagcttggcgtggatccgatatcaactagatcttgaga

SEQ ID NO: 6754 - DNA, 170 bp, Artificial sequence
  Pten.240_Ep300.310
  crRNA array
cgatttcttggctttatatatcttgtggaaaggacgaaacaccgtaatttctactaagtgtagattgcatacgctatagctgctttaatttctactaagtgtagatatggtacgacagtgaggaagttttttaagcttggcgtggatccgatatcaactagatcttgaga

SEQ ID NO: 6755 - DNA, 170 bp, Artificial sequence
  Pten.240_Ep300.587
  crRNA array
cgatttcttggctttatatatcttgtggaaaggacgaaacaccgtaatttctactaagtgtagattgcatacgctatagctgctttaatttctactaagtgtagatcgccccggggcccccaaccattttttaagcttggcgtggatccgatatcaactagatcttgaga

SEQ ID NO: 6756 - DNA, 170 bp, Artificial sequence
  Pten.240_Epha2.126
  crRNA array
cgatttcttggctttatatatcttgtggaaaggacgaaacaccgtaatttctactaagtgtagattgcatacgctatagctgctttaatttctactaagtgtagatcctgtgccgccgcggccgccttttttaagcttggcgtggatccgatatcaactagatcttgaga

SEQ ID NO: 6757 - DNA, 170 bp, Artificial sequence
  Pten.240_Epha2.5
  crRNA array
cgatttcttggctttatatatcttgtggaaaggacgaaacaccgtaatttctactaagtgtagattgcatacgctatagctgctttaatttctactaagtgtagatcatgagctggcgccacccggttttttaagcttggcgtggatccgatatcaactagatcttgaga

SEQ ID NO: 6758 - DNA, 170 bp, Artificial sequence
  Pten.240_Fat1.105
  crRNA array
cgatttcttggctttatatatcttgtggaaaggacgaaacaccgtaatttctactaagtgtagattgcatacgctatagctgctttaatttctactaagtgtagataactcgaggtgacaacaagtttttttaagcttggcgtggatccgatatcaactagatcttgaga

SEQ ID NO: 6759 - DNA, 170 bp, Artificial sequence
  Pten.240_Fat1.122
  crRNA array
cgatttcttggctttatatatcttgtggaaaggacgaaacaccgtaatttctactaagtgtagattgcatacgctatagctgctttaatttctactaagtgtagatccatcgacatggaaacgggattttttaagcttggcgtggatccgatatcaactagatcttgaga

SEQ ID NO: 6760 - DNA, 170 bp, Artificial sequence
  Pten.240_Fbxw7.21
  crRNA array
cgatttcttggctttatatatcttgtggaaaggacgaaacaccgtaatttctactaagtgtagattgcatacgctatagctgctttaatttctactaagtgtagattaatgtgccgtagaaacccattttttaagcttggcgtggatccgatatcaactagatcttgaga

SEQ ID NO: 6761 - DNA, 170 bp, Artificial sequence
  Pten.240_Fbxw7.23
  crRNA array
cgatttcttggctttatatatcttgtggaaaggacgaaacaccgtaatttctactaagtgtagattgcatacgctatagctgctttaatttctactaagtgtagatatgtgccgtagaaacccatattttttaagcttggcgtggatccgatatcaactagatcttgaga

SEQ ID NO: 6762 - DNA, 170 bp, Artificial sequence
  Pten.240_Gata3.34
  crRNA array
cgatttcttggctttatatatcttgtggaaaggacgaaacaccgtaatttctactaagtgtagattgcatacgctatagctgctttaatttctactaagtgtagatctaaactatcccgcaaagatttttttaagcttggcgtggatccgatatcaactagatcttgaga

SEQ ID NO: 6763 - DNA, 170 bp, Artificial sequence
  Pten.240_Gata3.47
  crRNA array
cgatttcttggctttatatatcttgtggaaaggacgaaacaccgtaatttctactaagtgtagattgcatacgctatagctgctttaatttctactaagtgtagatcgtagtaggacgggacgtggttttttaagcttggcgtggatccgatatcaactagatcttgaga

SEQ ID NO: 6764 - DNA, 170 bp, Artificial sequence
  Pten.240_H2-Q2.1
  crRNA array
cgatttcttggctttatatatcttgtggaaaggacgaaacaccgtaatttctactaagtgtagattgcatacgctatagctgctttaatttctactaagtgtagatagggcggccaccaacagcagttttttaagcttggcgtggatccgatatcaactagatcttgaga

SEQ ID NO: 6765 - DNA, 170 bp, Artificial sequence
  Pten.240_H2-Q2.2
  crRNA array
cgatttcttggctttatatatcttgtggaaaggacgaaacaccgtaatttctactaagtgtagattgcatacgctatagctgctttaatttctactaagtgtagattaacctgcgcccgctgctgattttttaagcttggcgtggatccgatatcaactagatcttgaga

SEQ ID NO: 6766 - DNA, 170 bp, Artificial sequence
  Pten.240_Kdm5c.1878
  crRNA array
cgatttcttggctttatatatcttgtggaaaggacgaaacaccgtaatttctactaagtgtagattgcatacgctatagctgctttaatttctactaagtgtagatagagcacggcacccgcccccttttttaagcttggcgtggatccgatatcaactagatcttgaga

SEQ ID NO: 6767 - DNA, 170 bp, Artificial sequence
  Pten.240_Kdm5c.1879
  crRNA array
cgatttcttggctttatatatcttgtggaaaggacgaaacaccgtaatttctactaagtgtagattgcatacgctatagctgctttaatttctactaagtgtagatgagcacggcacccgccccccttttttaagcttggcgtggatccgatatcaactagatcttgaga

SEQ ID NO: 6768 - DNA, 170 bp, Artificial sequence
  Pten.240_Kdm6a.56
  crRNA array
cgatttcttggctttatatatcttgtggaaaggacgaaacaccgtaatttctactaagtgtagattgcatacgctatagctgctttaatttctactaagtgtagattcgctgccgcctctcgcggcttttttaagcttggcgtggatccgatatcaactagatcttgaga

SEQ ID NO: 6769 - DNA, 170 bp, Artificial sequence
  Pten.240_Kdm6a.57
  crRNA array
cgatttcttggctttatatatcttgtggaaaggacgaaacaccgtaatttctactaagtgtagattgcatacgctatagctgctttaatttctactaagtgtagatcgctgccgcctctcgcggcattttttaagcttggcgtggatccgatatcaactagatcttgaga

SEQ ID NO: 6770 - DNA, 170 bp, Artificial sequence
  Pten.240_Kmt2b.265
  crRNA array
cgatttcttggctttatatatcttgtggaaaggacgaaacaccgtaatttctactaagtgtagattgcatacgctatagctgctttaatttctactaagtgtagatccccaagtgaagcccacctgttttttaagcttggcgtggatccgatatcaactagatcttgaga

SEQ ID NO: 6771 - DNA, 170 bp, Artificial sequence
  Pten.240_Kmt2b.298
  crRNA array
cgatttcttggctttatatatcttgtggaaaggacgaaacaccgtaatttctactaagtgtagattgcatacgctatagctgctttaatttctactaagtgtagattccggcagggaccggctggcttttttaagcttggcgtggatccgatatcaactagatcttgaga

SEQ ID NO: 6772 - DNA, 170 bp, Artificial sequence
  Pten.240_Kmt2c.1962
  crRNA array
cgatttcttggctttatatatcttgtggaaaggacgaaacaccgtaatttctactaagtgtagattgcatacgctatagctgctttaatttctactaagtgtagatgtgacgatctgtgccacaagttttttaagcttggcgtggatccgatatcaactagatcttgaga

SEQ ID NO: 6773 - DNA, 170 bp, Artificial sequence
  Pten.240_Kmt2c.2236
  crRNA array
cgatttcttggctttatatatcttgtggaaaggacgaaacaccgtaatttctactaagtgtagattgcatacgctatagctgctttaatttctactaagtgtagatactcgacctccacctccctattttttaagcttggcgtggatccgatatcaactagatcttgaga

SEQ ID NO: 6774 - DNA, 170 bp, Artificial sequence
  Pten.240_Kmt2d.316
  crRNA array
cgatttcttggctttatatatcttgtggaaaggacgaaacaccgtaatttctactaagtgtagattgcatacgctatagctgctttaatttctactaagtgtagatactccaggccacccaggtggttttttaagcttggcgtggatccgatatcaactagatcttgaga

SEQ ID NO: 6775 - DNA, 170 bp, Artificial sequence
  Pten.240_Kmt2d.416
  crRNA array
cgatttcttggctttatatatcttgtggaaaggacgaaacaccgtaatttctactaagtgtagattgcatacgctatagctgctttaatttctactaagtgtagattaaacccccgggggaagggtttttttaagcttggcgtggatccgatatcaactagatcttgaga

SEQ ID NO: 6776 - DNA, 170 bp, Artificial sequence
  Pten.240_Map2k4.119
  crRNA array
cgatttcttggctttatatatcttgtggaaaggacgaaacaccgtaatttctactaagtgtagattgcatacgctatagctgctttaatttctactaagtgtagattgctgtgtgggcggccacatttttttaagcttggcgtggatccgatatcaactagatcttgaga

SEQ ID NO: 6777 - DNA, 170 bp, Artificial sequence
  Pten.240_Map2k4.1261
  crRNA array
cgatttcttggctttatatatcttgtggaaaggacgaaacaccgtaatttctactaagtgtagattgcatacgctatagctgctttaatttctactaagtgtagatgatgtagtaatgcggagtagttttttaagcttggcgtggatccgatatcaactagatcttgaga

SEQ ID NO: 6778 - DNA, 170 bp, Artificial sequence
  Pten.240_Map3k1.235
  crRNA array
cgatttcttggctttatatatcttgtggaaaggacgaaacaccgtaatttctactaagtgtagattgcatacgctatagctgctttaatttctactaagtgtagataaaacgctactgatcgatcgttttttaagcttggcgtggatccgatatcaactagatcttgaga

SEQ ID NO: 6779 - DNA, 170 bp, Artificial sequence
  Pten.240_Map3k1.3838
  crRNA array
cgatttcttggctttatatatcttgtggaaaggacgaaacaccgtaatttctactaagtgtagattgcatacgctatagctgctttaatttctactaagtgtagatccaacaacagggccccactattttttaagcttggcgtggatccgatatcaactagatcttgaga

SEQ ID NO: 6780 - DNA, 170 bp, Artificial sequence
  Pten.240_Mga.1655
  crRNA array
cgatttcttggctttatatatcttgtggaaaggacgaaacaccgtaatttctactaagtgtagattgcatacgctatagctgctttaatttctactaagtgtagatcgagaagtggagagcatattttttttaagcttggcgtggatccgatatcaactagatcttgaga

SEQ ID NO: 6781 - DNA, 170 bp, Artificial sequence
  Pten.240_Mga.93
  crRNA array
cgatttcttggctttatatatcttgtggaaaggacgaaacaccgtaatttctactaagtgtagattgcatacgctatagctgctttaatttctactaagtgtagatgagaaggctccccataatgtttttttaagcttggcgtggatccgatatcaactagatcttgaga

SEQ ID NO: 6782 - DNA, 170 bp, Artificial sequence
  Pten.240_Nf1.746
  crRNA array
cgatttcttggctttatatatcttgtggaaaggacgaaacaccgtaatttctactaagtgtagattgcatacgctatagctgctttaatttctactaagtgtagattaagcataatgatgatgccattttttaagcttggcgtggatccgatatcaactagatcttgaga

SEQ ID NO: 6783 - DNA, 170 bp, Artificial sequence
  Pten.240_Nf1.97
  crRNA array
cgatttcttggctttatatatcttgtggaaaggacgaaacaccgtaatttctactaagtgtagattgcatacgctatagctgctttaatttctactaagtgtagatagcccgctacatgctgatgcttttttaagcttggcgtggatccgatatcaactagatcttgaga

SEQ ID NO: 6784 - DNA, 170 bp, Artificial sequence
  Pten.240_Nf2.356
  crRNA array
cgatttcttggctttatatatcttgtggaaaggacgaaacaccgtaatttctactaagtgtagattgcatacgctatagctgctttaatttctactaagtgtagatcggagtcatctgatagagatttttttaagcttggcgtggatccgatatcaactagatcttgaga

SEQ ID NO: 6785 - DNA, 170 bp, Artificial sequence
  Pten.240_Nf2.768
  crRNA array
cgatttcttggctttatatatcttgtggaaaggacgaaacaccgtaatttctactaagtgtagattgcatacgctatagctgctttaatttctactaagtgtagatccgaagccccagtgtccggcttttttaagcttggcgtggatccgatatcaactagatcttgaga

SEQ ID NO: 6786 - DNA, 170 bp, Artificial sequence
  Pten.240_Notch1.1849
  crRNA array
cgatttcttggctttatatatcttgtggaaaggacgaaacaccgtaatttctactaagtgtagattgcatacgctatagctgctttaatttctactaagtgtagatctggcgggtgggcggcgctgttttttaagcttggcgtggatccgatatcaactagatcttgaga

SEQ ID NO: 6787 - DNA, 170 bp, Artificial sequence
  Pten.240_Notch1.649
  crRNA array
cgatttcttggctttatatatcttgtggaaaggacgaaacaccgtaatttctactaagtgtagattgcatacgctatagctgctttaatttctactaagtgtagattgggccaacgatgccaggacttttttaagcttggcgtggatccgatatcaactagatcttgaga

SEQ ID NO: 6788 - DNA, 170 bp, Artificial sequence
  Pten.240_Nsd1.70
  crRNA array
cgatttcttggctttatatatcttgtggaaaggacgaaacaccgtaatttctactaagtgtagattgcatacgctatagctgctttaatttctactaagtgtagatactggtgtggacgatgcagattttttaagcttggcgtggatccgatatcaactagatcttgaga

SEQ ID NO: 6789 - DNA, 170 bp, Artificial sequence
  Pten.240_Nsd1.90
  crRNA array
cgatttcttggctttatatatcttgtggaaaggacgaaacaccgtaatttctactaagtgtagattgcatacgctatagctgctttaatttctactaagtgtagataggagctaacggcaagaatgttttttaagcttggcgtggatccgatatcaactagatcttgaga

SEQ ID NO: 6790 - DNA, 170 bp, Artificial sequence
  Pten.240_Pbrm1.1236
  crRNA array
cgatttcttggctttatatatcttgtggaaaggacgaaacaccgtaatttctactaagtgtagattgcatacgctatagctgctttaatttctactaagtgtagatgccgataaaaccaacagccgttttttaagcttggcgtggatccgatatcaactagatcttgaga

SEQ ID NO: 6791 - DNA, 170 bp, Artificial sequence
  Pten.240_Pbrm1.969
  crRNA array
cgatttcttggctttatatatcttgtggaaaggacgaaacaccgtaatttctactaagtgtagattgcatacgctatagctgctttaatttctactaagtgtagatgagccctaatgaacagctcattttttaagcttggcgtggatccgatatcaactagatcttgaga

SEQ ID NO: 6792 - DNA, 170 bp, Artificial sequence
  Pten.240_Pik3r1.76
  crRNA array
cgatttcttggctttatatatcttgtggaaaggacgaaacaccgtaatttctactaagtgtagattgcatacgctatagctgctttaatttctactaagtgtagataaaacctatacggcccgcacttttttaagcttggcgtggatccgatatcaactagatcttgaga

SEQ ID NO: 6793 - DNA, 170 bp, Artificial sequence
  Pten.240_Pik3r1.77
  crRNA array
cgatttcttggctttatatatcttgtggaaaggacgaaacaccgtaatttctactaagtgtagattgcatacgctatagctgctttaatttctactaagtgtagataaacctatacggcccgcactttttttaagcttggcgtggatccgatatcaactagatcttgaga

SEQ ID NO: 6794 - DNA, 170 bp, Artificial sequence
  Pten.240_Rasa1.1478
  crRNA array
cgatttcttggctttatatatcttgtggaaaggacgaaacaccgtaatttctactaagtgtagattgcatacgctatagctgctttaatttctactaagtgtagatcgataatggtctatgatgtcttttttaagcttggcgtggatccgatatcaactagatcttgaga

SEQ ID NO: 6795 - DNA, 170 bp, Artificial sequence
  Pten.240_Rasa1.223
  crRNA array
cgatttcttggctttatatatcttgtggaaaggacgaaacaccgtaatttctactaagtgtagattgcatacgctatagctgctttaatttctactaagtgtagattccatggagtatcgtgctcgttttttaagcttggcgtggatccgatatcaactagatcttgaga

SEQ ID NO: 6796 - DNA, 170 bp, Artificial sequence
  Pten.240_Rb1.211
  crRNA array
cgatttcttggctttatatatcttgtggaaaggacgaaacaccgtaatttctactaagtgtagattgcatacgctatagctgctttaatttctactaagtgtagattctgacatgatcgggtacctttttttaagcttggcgtggatccgatatcaactagatcttgaga

SEQ ID NO: 6797 - DNA, 170 bp, Artificial sequence
  Pten.240_Rb1.394
  crRNA array
cgatttcttggctttatatatcttgtggaaaggacgaaacaccgtaatttctactaagtgtagattgcatacgctatagctgctttaatttctactaagtgtagatagaaatctcgaagcaggatcttttttaagcttggcgtggatccgatatcaactagatcttgaga

SEQ ID NO: 6798 - DNA, 170 bp, Artificial sequence
  Pten.240_Rbm10.5
  crRNA array
cgatttcttggctttatatatcttgtggaaaggacgaaacaccgtaatttctactaagtgtagattgcatacgctatagctgctttaatttctactaagtgtagatacgaaacctgaacccacacattttttaagcttggcgtggatccgatatcaactagatcttgaga

SEQ ID NO: 6799 - DNA, 170 bp, Artificial sequence
  Pten.240_Rbm10.6
  crRNA array
cgatttcttggctttatatatcttgtggaaaggacgaaacaccgtaatttctactaagtgtagattgcatacgctatagctgctttaatttctactaagtgtagatcgaaacctgaacccacacagttttttaagcttggcgtggatccgatatcaactagatcttgaga

SEQ ID NO: 6800 - DNA, 170 bp, Artificial sequence
  Pten.240_Rnf43.1920
  crRNA array
cgatttcttggctttatatatcttgtggaaaggacgaaacaccgtaatttctactaagtgtagattgcatacgctatagctgctttaatttctactaagtgtagatatccccgtgccgtggactccttttttaagcttggcgtggatccgatatcaactagatcttgaga

SEQ ID NO: 6801 - DNA, 170 bp, Artificial sequence
  Pten.240_Rnf43.39
  crRNA array
cgatttcttggctttatatatcttgtggaaaggacgaaacaccgtaatttctactaagtgtagattgcatacgctatagctgctttaatttctactaagtgtagatcaaggggatcactctgataattttttaagcttggcgtggatccgatatcaactagatcttgaga

SEQ ID NO: 6802 - DNA, 170 bp, Artificial sequence
  Pten.240_Runx1.204
  crRNA array
cgatttcttggctttatatatcttgtggaaaggacgaaacaccgtaatttctactaagtgtagattgcatacgctatagctgctttaatttctactaagtgtagattaaataagtccagccgttttttttttaagcttggcgtggatccgatatcaactagatcttgaga

SEQ ID NO: 6803 - DNA, 170 bp, Artificial sequence
  Pten.240_Runx1.81
  crRNA array
cgatttcttggctttatatatcttgtggaaaggacgaaacaccgtaatttctactaagtgtagattgcatacgctatagctgctttaatttctactaagtgtagataggacgcgtatgggaattttttttttaagcttggcgtggatccgatatcaactagatcttgaga

SEQ ID NO: 6804 - DNA, 170 bp, Artificial sequence
  Pten.240_Setd2.143
  crRNA array
cgatttcttggctttatatatcttgtggaaaggacgaaacaccgtaatttctactaagtgtagattgcatacgctatagctgctttaatttctactaagtgtagatgcacaaccacaacagactggttttttaagcttggcgtggatccgatatcaactagatcttgaga

SEQ ID NO: 6805 - DNA, 170 bp, Artificial sequence
  Pten.240_Setd2.508
  crRNA array
cgatttcttggctttatatatcttgtggaaaggacgaaacaccgtaatttctactaagtgtagattgcatacgctatagctgctttaatttctactaagtgtagattacgatcccgagcacccgacttttttaagcttggcgtggatccgatatcaactagatcttgaga

SEQ ID NO: 6806 - DNA, 170 bp, Artificial sequence
  Pten.240_Smad4.3038
  crRNA array
cgatttcttggctttatatatcttgtggaaaggacgaaacaccgtaatttctactaagtgtagattgcatacgctatagctgctttaatttctactaagtgtagatatctgcggcagtgtcaccggttttttaagcttggcgtggatccgatatcaactagatcttgaga

SEQ ID NO: 6807 - DNA, 170 bp, Artificial sequence
  Pten.240_Smad4.39
  crRNA array
cgatttcttggctttatatatcttgtggaaaggacgaaacaccgtaatttctactaagtgtagattgcatacgctatagctgctttaatttctactaagtgtagatagtcaaacgcatactgacaattttttaagcttggcgtggatccgatatcaactagatcttgaga

SEQ ID NO: 6808 - DNA, 170 bp, Artificial sequence
  Pten.240_Stag2.1409
  crRNA array
cgatttcttggctttatatatcttgtggaaaggacgaaacaccgtaatttctactaagtgtagattgcatacgctatagctgctttaatttctactaagtgtagatgctaataactgcggaagggcttttttaagcttggcgtggatccgatatcaactagatcttgaga

SEQ ID NO: 6809 - DNA, 170 bp, Artificial sequence
  Pten.240_Stag2.4401
  crRNA array
cgatttcttggctttatatatcttgtggaaaggacgaaacaccgtaatttctactaagtgtagattgcatacgctatagctgctttaatttctactaagtgtagattaatcgtccagtggtgtatattttttaagcttggcgtggatccgatatcaactagatcttgaga

SEQ ID NO: 6810 - DNA, 170 bp, Artificial sequence
  Pten.240_Tbl1xr1.1
  crRNA array
cgatttcttggctttatatatcttgtggaaaggacgaaacaccgtaatttctactaagtgtagattgcatacgctatagctgctttaatttctactaagtgtagatggatgcgcatactggtgaagttttttaagcttggcgtggatccgatatcaactagatcttgaga

SEQ ID NO: 6811 - DNA, 170 bp, Artificial sequence
  Pten.240_Tbl1xr1.83
  crRNA array
cgatttcttggctttatatatcttgtggaaaggacgaaacaccgtaatttctactaagtgtagattgcatacgctatagctgctttaatttctactaagtgtagatatggtcgacccatcgagtctttttttaagcttggcgtggatccgatatcaactagatcttgaga

SEQ ID NO: 6812 - DNA, 170 bp, Artificial sequence
  Pten.240_Tgfbr2.290
  crRNA array
cgatttcttggctttatatatcttgtggaaaggacgaaacaccgtaatttctactaagtgtagattgcatacgctatagctgctttaatttctactaagtgtagatcctctcggcgcccgggtaaattttttaagcttggcgtggatccgatatcaactagatcttgaga

SEQ ID NO: 6813 - DNA, 170 bp, Artificial sequence
  Pten.240_Tgfbr2.292
  crRNA array
cgatttcttggctttatatatcttgtggaaaggacgaaacaccgtaatttctactaagtgtagattgcatacgctatagctgctttaatttctactaagtgtagatcccgggcgccgagagggaaattttttaagcttggcgtggatccgatatcaactagatcttgaga

SEQ ID NO: 6814 - DNA, 170 bp, Artificial sequence
  Pten.240_Trp53.4
  crRNA array
cgatttcttggctttatatatcttgtggaaaggacgaaacaccgtaatttctactaagtgtagattgcatacgctatagctgctttaatttctactaagtgtagatccctgaactgcccccagggattttttaagcttggcgtggatccgatatcaactagatcttgaga

SEQ ID NO: 6815 - DNA, 170 bp, Artificial sequence
  Pten.240_Trp53.528
  crRNA array
cgatttcttggctttatatatcttgtggaaaggacgaaacaccgtaatttctactaagtgtagattgcatacgctatagctgctttaatttctactaagtgtagatgctgggccagcagagacctgttttttaagcttggcgtggatccgatatcaactagatcttgaga

SEQ ID NO: 6816 - DNA, 170 bp, Artificial sequence
  Pten.240_Vhl.1
  crRNA array
cgatttcttggctttatatatcttgtggaaaggacgaaacaccgtaatttctactaagtgtagattgcatacgctatagctgctttaatttctactaagtgtagatagggctcccggcggccatttttttttaagcttggcgtggatccgatatcaactagatcttgaga

SEQ ID NO: 6817 - DNA, 170 bp, Artificial sequence
  Pten.240_Vhl.151
  crRNA array
cgatttcttggctttatatatcttgtggaaaggacgaaacaccgtaatttctactaagtgtagattgcatacgctatagctgctttaatttctactaagtgtagattagagcactcacccgagggattttttaagcttggcgtggatccgatatcaactagatcttgaga

SEQ ID NO: 6818 - DNA, 170 bp, Artificial sequence
  Pten.240_Zc3h13.1387
  crRNA array
cgatttcttggctttatatatcttgtggaaaggacgaaacaccgtaatttctactaagtgtagattgcatacgctatagctgctttaatttctactaagtgtagatgtgacgccggtcatgtgactttttttaagcttggcgtggatccgatatcaactagatcttgaga

SEQ ID NO: 6819 - DNA, 170 bp, Artificial sequence
  Pten.240_Zc3h13.1777
  crRNA array
cgatttcttggctttatatatcttgtggaaaggacgaaacaccgtaatttctactaagtgtagattgcatacgctatagctgctttaatttctactaagtgtagatgatgctgccagtgtagcggcttttttaagcttggcgtggatccgatatcaactagatcttgaga

SEQ ID NO: 6820 - DNA, 170 bp, Artificial sequence
  Pten.265_Acvr2a.155
  crRNA array
cgatttcttggctttatatatcttgtggaaaggacgaaacaccgtaatttctactaagtgtagataagcgtggtgcgtgacgcactaatttctactaagtgtagatggacctggctaatcaagtatttttttaagcttggcgtggatccgatatcaactagatcttgaga

SEQ ID NO: 6821 - DNA, 170 bp, Artificial sequence
  Pten.265_Acvr2a.70
  crRNA array
cgatttcttggctttatatatcttgtggaaaggacgaaacaccgtaatttctactaagtgtagataagcgtggtgcgtgacgcactaatttctactaagtgtagatcccgaggcgccggagaagccttttttaagcttggcgtggatccgatatcaactagatcttgaga

SEQ ID NO: 6822 - DNA, 170 bp, Artificial sequence
  Pten.265_Apc.21
  crRNA array
cgatttcttggctttatatatcttgtggaaaggacgaaacaccgtaatttctactaagtgtagataagcgtggtgcgtgacgcactaatttctactaagtgtagatgtgatccacacgtgtagctgttttttaagcttggcgtggatccgatatcaactagatcttgaga

SEQ ID NO: 6823 - DNA, 170 bp, Artificial sequence
  Pten.265_Apc.867
  crRNA array
cgatttcttggctttatatatcttgtggaaaggacgaaacaccgtaatttctactaagtgtagataagcgtggtgcgtgacgcactaatttctactaagtgtagatcagtcccaggcggcggaagcttttttaagcttggcgtggatccgatatcaactagatcttgaga

SEQ ID NO: 6824 - DNA, 170 bp, Artificial sequence
  Pten.265_Arid1a.2
  crRNA array
cgatttcttggctttatatatcttgtggaaaggacgaaacaccgtaatttctactaagtgtagataagcgtggtgcgtgacgcactaatttctactaagtgtagatcccgcgcccccgtcctggggttttttaagcttggcgtggatccgatatcaactagatcttgaga

SEQ ID NO: 6825 - DNA, 170 bp, Artificial sequence
  Pten.265_Arid1a.5
  crRNA array
cgatttcttggctttatatatcttgtggaaaggacgaaacaccgtaatttctactaagtgtagataagcgtggtgcgtgacgcactaatttctactaagtgtagatcccgcgctcggccgctgccgttttttaagcttggcgtggatccgatatcaactagatcttgaga

SEQ ID NO: 6826 - DNA, 170 bp, Artificial sequence
  Pten.265_Arid2.166
  crRNA array
cgatttcttggctttatatatcttgtggaaaggacgaaacaccgtaatttctactaagtgtagataagcgtggtgcgtgacgcactaatttctactaagtgtagataaccgcgatctgggttttttttttttaagcttggcgtggatccgatatcaactagatcttgaga

SEQ ID NO: 6827 - DNA, 170 bp, Artificial sequence
  Pten.265_Arid2.172
  crRNA array
cgatttcttggctttatatatcttgtggaaaggacgaaacaccgtaatttctactaagtgtagataagcgtggtgcgtgacgcactaatttctactaagtgtagatctggacgagctgcggcagttttttttaagcttggcgtggatccgatatcaactagatcttgaga

SEQ ID NO: 6828 - DNA, 170 bp, Artificial sequence
  Pten.265_Atm.120
  crRNA array
cgatttcttggctttatatatcttgtggaaaggacgaaacaccgtaatttctactaagtgtagataagcgtggtgcgtgacgcactaatttctactaagtgtagatgacaggtagtcggcagctaattttttaagcttggcgtggatccgatatcaactagatcttgaga

SEQ ID NO: 6829 - DNA, 170 bp, Artificial sequence
  Pten.265_Atm.997
  crRNA array
cgatttcttggctttatatatcttgtggaaaggacgaaacaccgtaatttctactaagtgtagataagcgtggtgcgtgacgcactaatttctactaagtgtagatgagaaagtctccgaatcgttttttttaagcttggcgtggatccgatatcaactagatcttgaga

SEQ ID NO: 6830 - DNA, 170 bp, Artificial sequence
  Pten.265_Atrx.249
  crRNA array
cgatttcttggctttatatatcttgtggaaaggacgaaacaccgtaatttctactaagtgtagataagcgtggtgcgtgacgcactaatttctactaagtgtagattagccagtcgctcatatctcttttttaagcttggcgtggatccgatatcaactagatcttgaga

SEQ ID NO: 6831 - DNA, 170 bp, Artificial sequence
  Pten.265_Atrx.251
  crRNA array
cgatttcttggctttatatatcttgtggaaaggacgaaacaccgtaatttctactaagtgtagataagcgtggtgcgtgacgcactaatttctactaagtgtagatgccagtcgctcatatctctgttttttaagcttggcgtggatccgatatcaactagatcttgaga

SEQ ID NO: 6832 - DNA, 170 bp, Artificial sequence
  Pten.265_Bcor.203
  crRNA array
cgatttcttggctttatatatcttgtggaaaggacgaaacaccgtaatttctactaagtgtagataagcgtggtgcgtgacgcactaatttctactaagtgtagatccccggagcggagtccaggcttttttaagcttggcgtggatccgatatcaactagatcttgaga

SEQ ID NO: 6833 - DNA, 170 bp, Artificial sequence
  Pten.265_Bcor.475
  crRNA array
cgatttcttggctttatatatcttgtggaaaggacgaaacaccgtaatttctactaagtgtagataagcgtggtgcgtgacgcactaatttctactaagtgtagattgcaacccctctgtatgggattttttaagcttggcgtggatccgatatcaactagatcttgaga

SEQ ID NO: 6834 - DNA, 170 bp, Artificial sequence
  Pten.265_Brca1.112
  crRNA array
cgatttcttggctttatatatcttgtggaaaggacgaaacaccgtaatttctactaagtgtagataagcgtggtgcgtgacgcactaatttctactaagtgtagatctagacgctctgtggagactttttttaagcttggcgtggatccgatatcaactagatcttgaga

SEQ ID NO: 6835 - DNA, 170 bp, Artificial sequence
  Pten.265_Brca1.53
  crRNA array
cgatttcttggctttatatatcttgtggaaaggacgaaacaccgtaatttctactaagtgtagataagcgtggtgcgtgacgcactaatttctactaagtgtagataatgaggaggcgtcgatcatttttttaagcttggcgtggatccgatatcaactagatcttgaga

SEQ ID NO: 6836 - DNA, 170 bp, Artificial sequence
  Pten.265_Casp8.45
  crRNA array
cgatttcttggctttatatatcttgtggaaaggacgaaacaccgtaatttctactaagtgtagataagcgtggtgcgtgacgcactaatttctactaagtgtagatctaccgagatcctgtgaatgttttttaagcttggcgtggatccgatatcaactagatcttgaga

SEQ ID NO: 6837 - DNA, 170 bp, Artificial sequence
  Pten.265_Casp8.54
  crRNA array
cgatttcttggctttatatatcttgtggaaaggacgaaacaccgtaatttctactaagtgtagataagcgtggtgcgtgacgcactaatttctactaagtgtagatcagtgcagtcgtcgtaagatttttttaagcttggcgtggatccgatatcaactagatcttgaga

SEQ ID NO: 6838 - DNA, 170 bp, Artificial sequence
  Pten.265_Cbwd1.84
  crRNA array
cgatttcttggctttatatatcttgtggaaaggacgaaacaccgtaatttctactaagtgtagataagcgtggtgcgtgacgcactaatttctactaagtgtagatcacagcaggtaacatgccgcttttttaagcttggcgtggatccgatatcaactagatcttgaga

SEQ ID NO: 6839 - DNA, 170 bp, Artificial sequence
  Pten.265_Cbwd1.85
  crRNA array
cgatttcttggctttatatatcttgtggaaaggacgaaacaccgtaatttctactaagtgtagataagcgtggtgcgtgacgcactaatttctactaagtgtagatacagcaggtaacatgccgccttttttaagcttggcgtggatccgatatcaactagatcttgaga

SEQ ID NO: 6840 - DNA, 170 bp, Artificial sequence
  Pten.265_Cdh1.387
  crRNA array
cgatttcttggctttatatatcttgtggaaaggacgaaacaccgtaatttctactaagtgtagataagcgtggtgcgtgacgcactaatttctactaagtgtagatctcggcgtctgccgggtccgttttttaagcttggcgtggatccgatatcaactagatcttgaga

SEQ ID NO: 6841 - DNA, 170 bp, Artificial sequence
  Pten.265_Cdh1.58
  crRNA array
cgatttcttggctttatatatcttgtggaaaggacgaaacaccgtaatttctactaagtgtagataagcgtggtgcgtgacgcactaatttctactaagtgtagatctcgtccgcgcccgggactcttttttaagcttggcgtggatccgatatcaactagatcttgaga

SEQ ID NO: 6842 - DNA, 170 bp, Artificial sequence
  Pten.265_Cdkn2a.647
  crRNA array
cgatttcttggctttatatatcttgtggaaaggacgaaacaccgtaatttctactaagtgtagataagcgtggtgcgtgacgcactaatttctactaagtgtagatgcaatcacgggagggagcagttttttaagcttggcgtggatccgatatcaactagatcttgaga

SEQ ID NO: 6843 - DNA, 170 bp, Artificial sequence
  Pten.265_Cdkn2a.648
  crRNA array
cgatttcttggctttatatatcttgtggaaaggacgaaacaccgtaatttctactaagtgtagataagcgtggtgcgtgacgcactaatttctactaagtgtagatcaatcacgggagggagcagattttttaagcttggcgtggatccgatatcaactagatcttgaga

SEQ ID NO: 6844 - DNA, 170 bp, Artificial sequence
  Pten.265_Cic.162
  crRNA array
cgatttcttggctttatatatcttgtggaaaggacgaaacaccgtaatttctactaagtgtagataagcgtggtgcgtgacgcactaatttctactaagtgtagatcgcaggcgcgcccggcggagttttttaagcttggcgtggatccgatatcaactagatcttgaga

SEQ ID NO: 6845 - DNA, 170 bp, Artificial sequence
  Pten.265_Cic.164
  crRNA array
cgatttcttggctttatatatcttgtggaaaggacgaaacaccgtaatttctactaagtgtagataagcgtggtgcgtgacgcactaatttctactaagtgtagatcgggccctgggccggcggctttttttaagcttggcgtggatccgatatcaactagatcttgaga

SEQ ID NO: 6846 - DNA, 170 bp, Artificial sequence
  Pten.265_Ctcf.229
  crRNA array
cgatttcttggctttatatatcttgtggaaaggacgaaacaccgtaatttctactaagtgtagataagcgtggtgcgtgacgcactaatttctactaagtgtagatggctggtggctgatagtctgttttttaagcttggcgtggatccgatatcaactagatcttgaga

SEQ ID NO: 6847 - DNA, 170 bp, Artificial sequence
  Pten.265_Ctcf.809
  crRNA array
cgatttcttggctttatatatcttgtggaaaggacgaaacaccgtaatttctactaagtgtagataagcgtggtgcgtgacgcactaatttctactaagtgtagataagcgctatcatgatcccaattttttaagcttggcgtggatccgatatcaactagatcttgaga

SEQ ID NO: 6848 - DNA, 170 bp, Artificial sequence
  Pten.265_Elf3.826
  crRNA array
cgatttcttggctttatatatcttgtggaaaggacgaaacaccgtaatttctactaagtgtagataagcgtggtgcgtgacgcactaatttctactaagtgtagattccgagacatcctaatccacttttttaagcttggcgtggatccgatatcaactagatcttgaga

SEQ ID NO: 6849 - DNA, 170 bp, Artificial sequence
  Pten.265_Elf3.983
  crRNA array
cgatttcttggctttatatatcttgtggaaaggacgaaacaccgtaatttctactaagtgtagataagcgtggtgcgtgacgcactaatttctactaagtgtagattaggccccctaactggaccattttttaagcttggcgtggatccgatatcaactagatcttgaga

SEQ ID NO: 6850 - DNA, 170 bp, Artificial sequence
  Pten.265_Ep300.310
  crRNA array
cgatttcttggctttatatatcttgtggaaaggacgaaacaccgtaatttctactaagtgtagataagcgtggtgcgtgacgcactaatttctactaagtgtagatatggtacgacagtgaggaagttttttaagcttggcgtggatccgatatcaactagatcttgaga

SEQ ID NO: 6851 - DNA, 170 bp, Artificial sequence
  Pten.265_Ep300.587
  crRNA array
cgatttcttggctttatatatcttgtggaaaggacgaaacaccgtaatttctactaagtgtagataagcgtggtgcgtgacgcactaatttctactaagtgtagatcgccccggggcccccaaccattttttaagcttggcgtggatccgatatcaactagatcttgaga

SEQ ID NO: 6852 - DNA, 170 bp, Artificial sequence
  Pten.265_Epha2.126
  crRNA array
cgatttcttggctttatatatcttgtggaaaggacgaaacaccgtaatttctactaagtgtagataagcgtggtgcgtgacgcactaatttctactaagtgtagatcctgtgccgccgcggccgccttttttaagcttggcgtggatccgatatcaactagatcttgaga

SEQ ID NO: 6853 - DNA, 170 bp, Artificial sequence
  Pten.265_Epha2.5
  crRNA array
cgatttcttggctttatatatcttgtggaaaggacgaaacaccgtaatttctactaagtgtagataagcgtggtgcgtgacgcactaatttctactaagtgtagatcatgagctggcgccacccggttttttaagcttggcgtggatccgatatcaactagatcttgaga

SEQ ID NO: 6854 - DNA, 170 bp, Artificial sequence
  Pten.265_Fat1.105
  crRNA array
cgatttcttggctttatatatcttgtggaaaggacgaaacaccgtaatttctactaagtgtagataagcgtggtgcgtgacgcactaatttctactaagtgtagataactcgaggtgacaacaagtttttttaagcttggcgtggatccgatatcaactagatcttgaga

SEQ ID NO: 6855 - DNA, 170 bp, Artificial sequence
  Pten.265_Fat1.122
  crRNA array
cgatttcttggctttatatatcttgtggaaaggacgaaacaccgtaatttctactaagtgtagataagcgtggtgcgtgacgcactaatttctactaagtgtagatccatcgacatggaaacgggattttttaagcttggcgtggatccgatatcaactagatcttgaga

SEQ ID NO: 6856 - DNA, 170 bp, Artificial sequence
  Pten.265_Fbxw7.21
  crRNA array
cgatttcttggctttatatatcttgtggaaaggacgaaacaccgtaatttctactaagtgtagataagcgtggtgcgtgacgcactaatttctactaagtgtagattaatgtgccgtagaaacccattttttaagcttggcgtggatccgatatcaactagatcttgaga

SEQ ID NO: 6857 - DNA, 170 bp, Artificial sequence
  Pten.265_Fbxw7.23
  crRNA array
cgatttcttggctttatatatcttgtggaaaggacgaaacaccgtaatttctactaagtgtagataagcgtggtgcgtgacgcactaatttctactaagtgtagatatgtgccgtagaaacccatattttttaagcttggcgtggatccgatatcaactagatcttgaga

SEQ ID NO: 6858 - DNA, 170 bp, Artificial sequence
  Pten.265_Gata3.34
  crRNA array
cgatttcttggctttatatatcttgtggaaaggacgaaacaccgtaatttctactaagtgtagataagcgtggtgcgtgacgcactaatttctactaagtgtagatctaaactatcccgcaaagatttttttaagcttggcgtggatccgatatcaactagatcttgaga

SEQ ID NO: 6859 - DNA, 170 bp, Artificial sequence
  Pten.265_Gata3.47
  crRNA array
cgatttcttggctttatatatcttgtggaaaggacgaaacaccgtaatttctactaagtgtagataagcgtggtgcgtgacgcactaatttctactaagtgtagatcgtagtaggacgggacgtggttttttaagcttggcgtggatccgatatcaactagatcttgaga

SEQ ID NO: 6860 - DNA, 170 bp, Artificial sequence
  Pten.265_H2-Q2.1
  crRNA array
cgatttcttggctttatatatcttgtggaaaggacgaaacaccgtaatttctactaagtgtagataagcgtggtgcgtgacgcactaatttctactaagtgtagatagggcggccaccaacagcagttttttaagcttggcgtggatccgatatcaactagatcttgaga

SEQ ID NO: 6861 - DNA, 170 bp, Artificial sequence
  Pten.265_H2-Q2.2
  crRNA array
cgatttcttggctttatatatcttgtggaaaggacgaaacaccgtaatttctactaagtgtagataagcgtggtgcgtgacgcactaatttctactaagtgtagattaacctgcgcccgctgctgattttttaagcttggcgtggatccgatatcaactagatcttgaga

SEQ ID NO: 6862 - DNA, 170 bp, Artificial sequence
  Pten.265_Kdm5c.1878
  crRNA array
cgatttcttggctttatatatcttgtggaaaggacgaaacaccgtaatttctactaagtgtagataagcgtggtgcgtgacgcactaatttctactaagtgtagatagagcacggcacccgcccccttttttaagcttggcgtggatccgatatcaactagatcttgaga

SEQ ID NO: 6863 - DNA, 170 bp, Artificial sequence
  Pten.265_Kdm5c.1879
  crRNA array
cgatttcttggctttatatatcttgtggaaaggacgaaacaccgtaatttctactaagtgtagataagcgtggtgcgtgacgcactaatttctactaagtgtagatgagcacggcacccgccccccttttttaagcttggcgtggatccgatatcaactagatcttgaga

SEQ ID NO: 6864 - DNA, 170 bp, Artificial sequence
  Pten.265_Kdm6a.56
  crRNA array
cgatttcttggctttatatatcttgtggaaaggacgaaacaccgtaatttctactaagtgtagataagcgtggtgcgtgacgcactaatttctactaagtgtagattcgctgccgcctctcgcggcttttttaagcttggcgtggatccgatatcaactagatcttgaga

SEQ ID NO: 6865 - DNA, 170 bp, Artificial sequence
  Pten.265_Kdm6a.57
  crRNA array
cgatttcttggctttatatatcttgtggaaaggacgaaacaccgtaatttctactaagtgtagataagcgtggtgcgtgacgcactaatttctactaagtgtagatcgctgccgcctctcgcggcattttttaagcttggcgtggatccgatatcaactagatcttgaga

SEQ ID NO: 6866 - DNA, 170 bp, Artificial sequence
  Pten.265_Kmt2b.265
  crRNA array
cgatttcttggctttatatatcttgtggaaaggacgaaacaccgtaatttctactaagtgtagataagcgtggtgcgtgacgcactaatttctactaagtgtagatccccaagtgaagcccacctgttttttaagcttggcgtggatccgatatcaactagatcttgaga

SEQ ID NO: 6867 - DNA, 170 bp, Artificial sequence
  Pten.265_Kmt2b.298
  crRNA array
cgatttcttggctttatatatcttgtggaaaggacgaaacaccgtaatttctactaagtgtagataagcgtggtgcgtgacgcactaatttctactaagtgtagattccggcagggaccggctggcttttttaagcttggcgtggatccgatatcaactagatcttgaga

SEQ ID NO: 6868 - DNA, 170 bp, Artificial sequence
  Pten.265_Kmt2c.1962
  crRNA array
cgatttcttggctttatatatcttgtggaaaggacgaaacaccgtaatttctactaagtgtagataagcgtggtgcgtgacgcactaatttctactaagtgtagatgtgacgatctgtgccacaagttttttaagcttggcgtggatccgatatcaactagatcttgaga

SEQ ID NO: 6869 - DNA, 170 bp, Artificial sequence
  Pten.265_Kmt2c.2236
  crRNA array
cgatttcttggctttatatatcttgtggaaaggacgaaacaccgtaatttctactaagtgtagataagcgtggtgcgtgacgcactaatttctactaagtgtagatactcgacctccacctccctattttttaagcttggcgtggatccgatatcaactagatcttgaga

SEQ ID NO: 6870 - DNA, 170 bp, Artificial sequence
  Pten.265_Kmt2d.316
  crRNA array
cgatttcttggctttatatatcttgtggaaaggacgaaacaccgtaatttctactaagtgtagataagcgtggtgcgtgacgcactaatttctactaagtgtagatactccaggccacccaggtggttttttaagcttggcgtggatccgatatcaactagatcttgaga

SEQ ID NO: 6871 - DNA, 170 bp, Artificial sequence
  Pten.265_Kmt2d.416
  crRNA array
cgatttcttggctttatatatcttgtggaaaggacgaaacaccgtaatttctactaagtgtagataagcgtggtgcgtgacgcactaatttctactaagtgtagattaaacccccgggggaagggtttttttaagcttggcgtggatccgatatcaactagatcttgaga

SEQ ID NO: 6872 - DNA, 170 bp, Artificial sequence
  Pten.265_Map2k4.119
  crRNA array
cgatttcttggctttatatatcttgtggaaaggacgaaacaccgtaatttctactaagtgtagataagcgtggtgcgtgacgcactaatttctactaagtgtagattgctgtgtgggcggccacatttttttaagcttggcgtggatccgatatcaactagatcttgaga

SEQ ID NO: 6873 - DNA, 170 bp, Artificial sequence
  Pten.265_Map2k4.1261
  crRNA array
cgatttcttggctttatatatcttgtggaaaggacgaaacaccgtaatttctactaagtgtagataagcgtggtgcgtgacgcactaatttctactaagtgtagatgatgtagtaatgcggagtagttttttaagcttggcgtggatccgatatcaactagatcttgaga

SEQ ID NO: 6874 - DNA, 170 bp, Artificial sequence
  Pten.265_Map3k1.235
  crRNA array
cgatttcttggctttatatatcttgtggaaaggacgaaacaccgtaatttctactaagtgtagataagcgtggtgcgtgacgcactaatttctactaagtgtagataaaacgctactgatcgatcgttttttaagcttggcgtggatccgatatcaactagatcttgaga

SEQ ID NO: 6875 - DNA, 170 bp, Artificial sequence
  Pten.265_Map3k1.3838
  crRNA array
cgatttcttggctttatatatcttgtggaaaggacgaaacaccgtaatttctactaagtgtagataagcgtggtgcgtgacgcactaatttctactaagtgtagatccaacaacagggccccactattttttaagcttggcgtggatccgatatcaactagatcttgaga

SEQ ID NO: 6876 - DNA, 170 bp, Artificial sequence
  Pten.265_Mga.1655
  crRNA array
cgatttcttggctttatatatcttgtggaaaggacgaaacaccgtaatttctactaagtgtagataagcgtggtgcgtgacgcactaatttctactaagtgtagatcgagaagtggagagcatattttttttaagcttggcgtggatccgatatcaactagatcttgaga

SEQ ID NO: 6877 - DNA, 170 bp, Artificial sequence
  Pten.265_Mga.93
  crRNA array
cgatttcttggctttatatatcttgtggaaaggacgaaacaccgtaatttctactaagtgtagataagcgtggtgcgtgacgcactaatttctactaagtgtagatgagaaggctccccataatgtttttttaagcttggcgtggatccgatatcaactagatcttgaga

SEQ ID NO: 6878 - DNA, 170 bp, Artificial sequence
  Pten.265_Nf1.746
  crRNA array
cgatttcttggctttatatatcttgtggaaaggacgaaacaccgtaatttctactaagtgtagataagcgtggtgcgtgacgcactaatttctactaagtgtagattaagcataatgatgatgccattttttaagcttggcgtggatccgatatcaactagatcttgaga

SEQ ID NO: 6879 - DNA, 170 bp, Artificial sequence
  Pten.265_Nf1.97
  crRNA array
cgatttcttggctttatatatcttgtggaaaggacgaaacaccgtaatttctactaagtgtagataagcgtggtgcgtgacgcactaatttctactaagtgtagatagcccgctacatgctgatgcttttttaagcttggcgtggatccgatatcaactagatcttgaga

SEQ ID NO: 6880 - DNA, 170 bp, Artificial sequence
  Pten.265_Nf2.356
  crRNA array
cgatttcttggctttatatatcttgtggaaaggacgaaacaccgtaatttctactaagtgtagataagcgtggtgcgtgacgcactaatttctactaagtgtagatcggagtcatctgatagagatttttttaagcttggcgtggatccgatatcaactagatcttgaga

SEQ ID NO: 6881 - DNA, 170 bp, Artificial sequence
  Pten.265_Nf2.768
  crRNA array
cgatttcttggctttatatatcttgtggaaaggacgaaacaccgtaatttctactaagtgtagataagcgtggtgcgtgacgcactaatttctactaagtgtagatccgaagccccagtgtccggcttttttaagcttggcgtggatccgatatcaactagatcttgaga

SEQ ID NO: 6882 - DNA, 170 bp, Artificial sequence
  Pten.265_Notch1.1849
  crRNA array
cgatttcttggctttatatatcttgtggaaaggacgaaacaccgtaatttctactaagtgtagataagcgtggtgcgtgacgcactaatttctactaagtgtagatctggcgggtgggcggcgctgttttttaagcttggcgtggatccgatatcaactagatcttgaga

SEQ ID NO: 6883 - DNA, 170 bp, Artificial sequence
  Pten.265_Notch1.649
  crRNA array
cgatttcttggctttatatatcttgtggaaaggacgaaacaccgtaatttctactaagtgtagataagcgtggtgcgtgacgcactaatttctactaagtgtagattgggccaacgatgccaggacttttttaagcttggcgtggatccgatatcaactagatcttgaga

SEQ ID NO: 6884 - DNA, 170 bp, Artificial sequence
  Pten.265_Nsd1.70
  crRNA array
cgatttcttggctttatatatcttgtggaaaggacgaaacaccgtaatttctactaagtgtagataagcgtggtgcgtgacgcactaatttctactaagtgtagatactggtgtggacgatgcagattttttaagcttggcgtggatccgatatcaactagatcttgaga

SEQ ID NO: 6885 - DNA, 170 bp, Artificial sequence
  Pten.265_Nsd1.90
  crRNA array
cgatttcttggctttatatatcttgtggaaaggacgaaacaccgtaatttctactaagtgtagataagcgtggtgcgtgacgcactaatttctactaagtgtagataggagctaacggcaagaatgttttttaagcttggcgtggatccgatatcaactagatcttgaga

SEQ ID NO: 6886 - DNA, 170 bp, Artificial sequence
  Pten.265_Pbrm1.1236
  crRNA array
cgatttcttggctttatatatcttgtggaaaggacgaaacaccgtaatttctactaagtgtagataagcgtggtgcgtgacgcactaatttctactaagtgtagatgccgataaaaccaacagccgttttttaagcttggcgtggatccgatatcaactagatcttgaga

SEQ ID NO: 6887 - DNA, 170 bp, Artificial sequence
  Pten.265_Pbrm1.969
  crRNA array
cgatttcttggctttatatatcttgtggaaaggacgaaacaccgtaatttctactaagtgtagataagcgtggtgcgtgacgcactaatttctactaagtgtagatgagccctaatgaacagctcattttttaagcttggcgtggatccgatatcaactagatcttgaga

SEQ ID NO: 6888 - DNA, 170 bp, Artificial sequence
  Pten.265_Pik3r1.76
  crRNA array
cgatttcttggctttatatatcttgtggaaaggacgaaacaccgtaatttctactaagtgtagataagcgtggtgcgtgacgcactaatttctactaagtgtagataaaacctatacggcccgcacttttttaagcttggcgtggatccgatatcaactagatcttgaga

SEQ ID NO: 6889 - DNA, 170 bp, Artificial sequence
  Pten.265_Pik3r1.77
  crRNA array
cgatttcttggctttatatatcttgtggaaaggacgaaacaccgtaatttctactaagtgtagataagcgtggtgcgtgacgcactaatttctactaagtgtagataaacctatacggcccgcactttttttaagcttggcgtggatccgatatcaactagatcttgaga

SEQ ID NO: 6890 - DNA, 170 bp, Artificial sequence
  Pten.265_Rasa1.1478
  crRNA array
cgatttcttggctttatatatcttgtggaaaggacgaaacaccgtaatttctactaagtgtagataagcgtggtgcgtgacgcactaatttctactaagtgtagatcgataatggtctatgatgtcttttttaagcttggcgtggatccgatatcaactagatcttgaga

SEQ ID NO: 6891 - DNA, 170 bp, Artificial sequence
  Pten.265_Rasa1.223
  crRNA array
cgatttcttggctttatatatcttgtggaaaggacgaaacaccgtaatttctactaagtgtagataagcgtggtgcgtgacgcactaatttctactaagtgtagattccatggagtatcgtgctcgttttttaagcttggcgtggatccgatatcaactagatcttgaga

SEQ ID NO: 6892 - DNA, 170 bp, Artificial sequence
  Pten.265_Rb1.211
  crRNA array
cgatttcttggctttatatatcttgtggaaaggacgaaacaccgtaatttctactaagtgtagataagcgtggtgcgtgacgcactaatttctactaagtgtagattctgacatgatcgggtacctttttttaagcttggcgtggatccgatatcaactagatcttgaga

SEQ ID NO: 6893 - DNA, 170 bp, Artificial sequence
  Pten.265_Rb1.394
  crRNA array
cgatttcttggctttatatatcttgtggaaaggacgaaacaccgtaatttctactaagtgtagataagcgtggtgcgtgacgcactaatttctactaagtgtagatagaaatctcgaagcaggatcttttttaagcttggcgtggatccgatatcaactagatcttgaga

SEQ ID NO: 6894 - DNA, 170 bp, Artificial sequence
  Pten.265_Rbm10.5
  crRNA array
cgatttcttggctttatatatcttgtggaaaggacgaaacaccgtaatttctactaagtgtagataagcgtggtgcgtgacgcactaatttctactaagtgtagatacgaaacctgaacccacacattttttaagcttggcgtggatccgatatcaactagatcttgaga

SEQ ID NO: 6895 - DNA, 170 bp, Artificial sequence
  Pten.265_Rbm10.6
  crRNA array
cgatttcttggctttatatatcttgtggaaaggacgaaacaccgtaatttctactaagtgtagataagcgtggtgcgtgacgcactaatttctactaagtgtagatcgaaacctgaacccacacagttttttaagcttggcgtggatccgatatcaactagatcttgaga

SEQ ID NO: 6896 - DNA, 170 bp, Artificial sequence
  Pten.265_Rnf43.1920
  crRNA array
cgatttcttggctttatatatcttgtggaaaggacgaaacaccgtaatttctactaagtgtagataagcgtggtgcgtgacgcactaatttctactaagtgtagatatccccgtgccgtggactccttttttaagcttggcgtggatccgatatcaactagatcttgaga

SEQ ID NO: 6897 - DNA, 170 bp, Artificial sequence
  Pten.265_Rnf43.39
  crRNA array
cgatttcttggctttatatatcttgtggaaaggacgaaacaccgtaatttctactaagtgtagataagcgtggtgcgtgacgcactaatttctactaagtgtagatcaaggggatcactctgataattttttaagcttggcgtggatccgatatcaactagatcttgaga

SEQ ID NO: 6898 - DNA, 170 bp, Artificial sequence
  Pten.265_Runx1.204
  crRNA array
cgatttcttggctttatatatcttgtggaaaggacgaaacaccgtaatttctactaagtgtagataagcgtggtgcgtgacgcactaatttctactaagtgtagattaaataagtccagccgttttttttttaagcttggcgtggatccgatatcaactagatcttgaga

SEQ ID NO: 6899 - DNA, 170 bp, Artificial sequence
  Pten.265_Runx1.81
  crRNA array
cgatttcttggctttatatatcttgtggaaaggacgaaacaccgtaatttctactaagtgtagataagcgtggtgcgtgacgcactaatttctactaagtgtagataggacgcgtatgggaattttttttttaagcttggcgtggatccgatatcaactagatcttgaga

SEQ ID NO: 6900 - DNA, 170 bp, Artificial sequence
  Pten.265_Setd2.143
  crRNA array
cgatttcttggctttatatatcttgtggaaaggacgaaacaccgtaatttctactaagtgtagataagcgtggtgcgtgacgcactaatttctactaagtgtagatgcacaaccacaacagactggttttttaagcttggcgtggatccgatatcaactagatcttgaga

SEQ ID NO: 6901 - DNA, 170 bp, Artificial sequence
  Pten.265_Setd2.508
  crRNA array
cgatttcttggctttatatatcttgtggaaaggacgaaacaccgtaatttctactaagtgtagataagcgtggtgcgtgacgcactaatttctactaagtgtagattacgatcccgagcacccgacttttttaagcttggcgtggatccgatatcaactagatcttgaga

SEQ ID NO: 6902 - DNA, 170 bp, Artificial sequence
  Pten.265_Smad4.3038
  crRNA array
cgatttcttggctttatatatcttgtggaaaggacgaaacaccgtaatttctactaagtgtagataagcgtggtgcgtgacgcactaatttctactaagtgtagatatctgcggcagtgtcaccggttttttaagcttggcgtggatccgatatcaactagatcttgaga

SEQ ID NO: 6903 - DNA, 170 bp, Artificial sequence
  Pten.265_Smad4.39
  crRNA array
cgatttcttggctttatatatcttgtggaaaggacgaaacaccgtaatttctactaagtgtagataagcgtggtgcgtgacgcactaatttctactaagtgtagatagtcaaacgcatactgacaattttttaagcttggcgtggatccgatatcaactagatcttgaga

SEQ ID NO: 6904 - DNA, 170 bp, Artificial sequence
  Pten.265_Stag2.1409
  crRNA array
cgatttcttggctttatatatcttgtggaaaggacgaaacaccgtaatttctactaagtgtagataagcgtggtgcgtgacgcactaatttctactaagtgtagatgctaataactgcggaagggcttttttaagcttggcgtggatccgatatcaactagatcttgaga

SEQ ID NO: 6905 - DNA, 170 bp, Artificial sequence
  Pten.265_Stag2.4401
  crRNA array
cgatttcttggctttatatatcttgtggaaaggacgaaacaccgtaatttctactaagtgtagataagcgtggtgcgtgacgcactaatttctactaagtgtagattaatcgtccagtggtgtatattttttaagcttggcgtggatccgatatcaactagatcttgaga

SEQ ID NO: 6906 - DNA, 170 bp, Artificial sequence
  Pten.265_Tbl1xr1.1
  crRNA array
cgatttcttggctttatatatcttgtggaaaggacgaaacaccgtaatttctactaagtgtagataagcgtggtgcgtgacgcactaatttctactaagtgtagatggatgcgcatactggtgaagttttttaagcttggcgtggatccgatatcaactagatcttgaga

SEQ ID NO: 6907 - DNA, 170 bp, Artificial sequence
  Pten.265_Tbl1xr1.83
  crRNA array
cgatttcttggctttatatatcttgtggaaaggacgaaacaccgtaatttctactaagtgtagataagcgtggtgcgtgacgcactaatttctactaagtgtagatatggtcgacccatcgagtctttttttaagcttggcgtggatccgatatcaactagatcttgaga

SEQ ID NO: 6908 - DNA, 170 bp, Artificial sequence
  Pten.265_Tgfbr2.290
  crRNA array
cgatttcttggctttatatatcttgtggaaaggacgaaacaccgtaatttctactaagtgtagataagcgtggtgcgtgacgcactaatttctactaagtgtagatcctctcggcgcccgggtaaattttttaagcttggcgtggatccgatatcaactagatcttgaga

SEQ ID NO: 6909 - DNA, 170 bp, Artificial sequence
  Pten.265_Tgfbr2.292
  crRNA array
cgatttcttggctttatatatcttgtggaaaggacgaaacaccgtaatttctactaagtgtagataagcgtggtgcgtgacgcactaatttctactaagtgtagatcccgggcgccgagagggaaattttttaagcttggcgtggatccgatatcaactagatcttgaga

SEQ ID NO: 6910 - DNA, 170 bp, Artificial sequence
  Pten.265_Trp53.4
  crRNA array
cgatttcttggctttatatatcttgtggaaaggacgaaacaccgtaatttctactaagtgtagataagcgtggtgcgtgacgcactaatttctactaagtgtagatccctgaactgcccccagggattttttaagcttggcgtggatccgatatcaactagatcttgaga

SEQ ID NO: 6911 - DNA, 170 bp, Artificial sequence
  Pten.265_Trp53.528
  crRNA array
cgatttcttggctttatatatcttgtggaaaggacgaaacaccgtaatttctactaagtgtagataagcgtggtgcgtgacgcactaatttctactaagtgtagatgctgggccagcagagacctgttttttaagcttggcgtggatccgatatcaactagatcttgaga

SEQ ID NO: 6912 - DNA, 170 bp, Artificial sequence
  Pten.265_Vhl.1
  crRNA array
cgatttcttggctttatatatcttgtggaaaggacgaaacaccgtaatttctactaagtgtagataagcgtggtgcgtgacgcactaatttctactaagtgtagatagggctcccggcggccatttttttttaagcttggcgtggatccgatatcaactagatcttgaga

SEQ ID NO: 6913 - DNA, 170 bp, Artificial sequence
  Pten.265_Vhl.151
  crRNA array
cgatttcttggctttatatatcttgtggaaaggacgaaacaccgtaatttctactaagtgtagataagcgtggtgcgtgacgcactaatttctactaagtgtagattagagcactcacccgagggattttttaagcttggcgtggatccgatatcaactagatcttgaga

SEQ ID NO: 6914 - DNA, 170 bp, Artificial sequence
  Pten.265_Zc3h13.1387
  crRNA array
cgatttcttggctttatatatcttgtggaaaggacgaaacaccgtaatttctactaagtgtagataagcgtggtgcgtgacgcactaatttctactaagtgtagatgtgacgccggtcatgtgactttttttaagcttggcgtggatccgatatcaactagatcttgaga

SEQ ID NO: 6915 - DNA, 170 bp, Artificial sequence
  Pten.265_Zc3h13.1777
  crRNA array
cgatttcttggctttatatatcttgtggaaaggacgaaacaccgtaatttctactaagtgtagataagcgtggtgcgtgacgcactaatttctactaagtgtagatgatgctgccagtgtagcggcttttttaagcttggcgtggatccgatatcaactagatcttgaga

SEQ ID NO: 6916 - DNA, 170 bp, Artificial sequence
  Rasa1.1478_Acvr2a.155
  crRNA array
cgatttcttggctttatatatcttgtggaaaggacgaaacaccgtaatttctactaagtgtagatcgataatggtctatgatgtctaatttctactaagtgtagatggacctggctaatcaagtatttttttaagcttggcgtggatccgatatcaactagatcttgaga

SEQ ID NO: 6917 - DNA, 170 bp, Artificial sequence
  Rasa1.1478_Acvr2a.70
  crRNA array
cgatttcttggctttatatatcttgtggaaaggacgaaacaccgtaatttctactaagtgtagatcgataatggtctatgatgtctaatttctactaagtgtagatcccgaggcgccggagaagccttttttaagcttggcgtggatccgatatcaactagatcttgaga

SEQ ID NO: 6918 - DNA, 170 bp, Artificial sequence
  Rasa1.1478_Apc.21
  crRNA array
cgatttcttggctttatatatcttgtggaaaggacgaaacaccgtaatttctactaagtgtagatcgataatggtctatgatgtctaatttctactaagtgtagatgtgatccacacgtgtagctgttttttaagcttggcgtggatccgatatcaactagatcttgaga

SEQ ID NO: 6919 - DNA, 170 bp, Artificial sequence
  Rasa1.1478_Apc.867
  crRNA array
cgatttcttggctttatatatcttgtggaaaggacgaaacaccgtaatttctactaagtgtagatcgataatggtctatgatgtctaatttctactaagtgtagatcagtcccaggcggcggaagcttttttaagcttggcgtggatccgatatcaactagatcttgaga

SEQ ID NO: 6920 - DNA, 170 bp, Artificial sequence
  Rasa1.1478_Arid1a.2
  crRNA array
cgatttcttggctttatatatcttgtggaaaggacgaaacaccgtaatttctactaagtgtagatcgataatggtctatgatgtctaatttctactaagtgtagatcccgcgcccccgtcctggggttttttaagcttggcgtggatccgatatcaactagatcttgaga

SEQ ID NO: 6921 - DNA, 170 bp, Artificial sequence
  Rasa1.1478_Arid1a.5
  crRNA array
cgatttcttggctttatatatcttgtggaaaggacgaaacaccgtaatttctactaagtgtagatcgataatggtctatgatgtctaatttctactaagtgtagatcccgcgctcggccgctgccgttttttaagcttggcgtggatccgatatcaactagatcttgaga

SEQ ID NO: 6922 - DNA, 170 bp, Artificial sequence
  Rasa1.1478_Arid2.166
  crRNA array
cgatttcttggctttatatatcttgtggaaaggacgaaacaccgtaatttctactaagtgtagatcgataatggtctatgatgtctaatttctactaagtgtagataaccgcgatctgggttttttttttttaagcttggcgtggatccgatatcaactagatcttgaga

SEQ ID NO: 6923 - DNA, 170 bp, Artificial sequence
  Rasa1.1478_Arid2.172
  crRNA array
cgatttcttggctttatatatcttgtggaaaggacgaaacaccgtaatttctactaagtgtagatcgataatggtctatgatgtctaatttctactaagtgtagatctggacgagctgcggcagttttttttaagcttggcgtggatccgatatcaactagatcttgaga

SEQ ID NO: 6924 - DNA, 170 bp, Artificial sequence
  Rasa1.1478_Atm.120
  crRNA array
cgatttcttggctttatatatcttgtggaaaggacgaaacaccgtaatttctactaagtgtagatcgataatggtctatgatgtctaatttctactaagtgtagatgacaggtagtcggcagctaattttttaagcttggcgtggatccgatatcaactagatcttgaga

SEQ ID NO: 6925 - DNA, 170 bp, Artificial sequence
  Rasa1.1478_Atm.997
  crRNA array
cgatttcttggctttatatatcttgtggaaaggacgaaacaccgtaatttctactaagtgtagatcgataatggtctatgatgtctaatttctactaagtgtagatgagaaagtctccgaatcgttttttttaagcttggcgtggatccgatatcaactagatcttgaga

SEQ ID NO: 6926 - DNA, 170 bp, Artificial sequence
  Rasa1.1478_Atrx.249
  crRNA array
cgatttcttggctttatatatcttgtggaaaggacgaaacaccgtaatttctactaagtgtagatcgataatggtctatgatgtctaatttctactaagtgtagattagccagtcgctcatatctcttttttaagcttggcgtggatccgatatcaactagatcttgaga

SEQ ID NO: 6927 - DNA, 170 bp, Artificial sequence
  Rasa1.1478_Atrx.251
  crRNA array
cgatttcttggctttatatatcttgtggaaaggacgaaacaccgtaatttctactaagtgtagatcgataatggtctatgatgtctaatttctactaagtgtagatgccagtcgctcatatctctgttttttaagcttggcgtggatccgatatcaactagatcttgaga

SEQ ID NO: 6928 - DNA, 170 bp, Artificial sequence
  Rasa1.1478_Bcor.203
  crRNA array
cgatttcttggctttatatatcttgtggaaaggacgaaacaccgtaatttctactaagtgtagatcgataatggtctatgatgtctaatttctactaagtgtagatccccggagcggagtccaggcttttttaagcttggcgtggatccgatatcaactagatcttgaga

SEQ ID NO: 6929 - DNA, 170 bp, Artificial sequence
  Rasa1.1478_Bcor.475
  crRNA array
cgatttcttggctttatatatcttgtggaaaggacgaaacaccgtaatttctactaagtgtagatcgataatggtctatgatgtctaatttctactaagtgtagattgcaacccctctgtatgggattttttaagcttggcgtggatccgatatcaactagatcttgaga

SEQ ID NO: 6930 - DNA, 170 bp, Artificial sequence
  Rasa1.1478_Brca1.112
  crRNA array
cgatttcttggctttatatatcttgtggaaaggacgaaacaccgtaatttctactaagtgtagatcgataatggtctatgatgtctaatttctactaagtgtagatctagacgctctgtggagactttttttaagcttggcgtggatccgatatcaactagatcttgaga

SEQ ID NO: 6931 - DNA, 170 bp, Artificial sequence
  Rasa1.1478_Brca1.53
  crRNA array
cgatttcttggctttatatatcttgtggaaaggacgaaacaccgtaatttctactaagtgtagatcgataatggtctatgatgtctaatttctactaagtgtagataatgaggaggcgtcgatcatttttttaagcttggcgtggatccgatatcaactagatcttgaga

SEQ ID NO: 6932 - DNA, 170 bp, Artificial sequence
  Rasa1.1478_Casp8.45
  crRNA array
cgatttcttggctttatatatcttgtggaaaggacgaaacaccgtaatttctactaagtgtagatcgataatggtctatgatgtctaatttctactaagtgtagatctaccgagatcctgtgaatgttttttaagcttggcgtggatccgatatcaactagatcttgaga

SEQ ID NO: 6933 - DNA, 170 bp, Artificial sequence
  Rasa1.1478_Casp8.54
  crRNA array
cgatttcttggctttatatatcttgtggaaaggacgaaacaccgtaatttctactaagtgtagatcgataatggtctatgatgtctaatttctactaagtgtagatcagtgcagtcgtcgtaagatttttttaagcttggcgtggatccgatatcaactagatcttgaga

SEQ ID NO: 6934 - DNA, 170 bp, Artificial sequence
  Rasa1.1478_Cbwd1.84
  crRNA array
cgatttcttggctttatatatcttgtggaaaggacgaaacaccgtaatttctactaagtgtagatcgataatggtctatgatgtctaatttctactaagtgtagatcacagcaggtaacatgccgcttttttaagcttggcgtggatccgatatcaactagatcttgaga

SEQ ID NO: 6935 - DNA, 170 bp, Artificial sequence
  Rasa1.1478_Cbwd1.85
  crRNA array
cgatttcttggctttatatatcttgtggaaaggacgaaacaccgtaatttctactaagtgtagatcgataatggtctatgatgtctaatttctactaagtgtagatacagcaggtaacatgccgccttttttaagcttggcgtggatccgatatcaactagatcttgaga

SEQ ID NO: 6936 - DNA, 170 bp, Artificial sequence
  Rasa1.1478_Cdh1.387
  crRNA array
cgatttcttggctttatatatcttgtggaaaggacgaaacaccgtaatttctactaagtgtagatcgataatggtctatgatgtctaatttctactaagtgtagatctcggcgtctgccgggtccgttttttaagcttggcgtggatccgatatcaactagatcttgaga

SEQ ID NO: 6937 - DNA, 170 bp, Artificial sequence
  Rasa1.1478_Cdh1.58
  crRNA array
cgatttcttggctttatatatcttgtggaaaggacgaaacaccgtaatttctactaagtgtagatcgataatggtctatgatgtctaatttctactaagtgtagatctcgtccgcgcccgggactcttttttaagcttggcgtggatccgatatcaactagatcttgaga

SEQ ID NO: 6938 - DNA, 170 bp, Artificial sequence
  Rasa1.1478_Cdkn2a.647
  crRNA array
cgatttcttggctttatatatcttgtggaaaggacgaaacaccgtaatttctactaagtgtagatcgataatggtctatgatgtctaatttctactaagtgtagatgcaatcacgggagggagcagttttttaagcttggcgtggatccgatatcaactagatcttgaga

SEQ ID NO: 6939 - DNA, 170 bp, Artificial sequence
  Rasa1.1478_Cdkn2a.648
  crRNA array
cgatttcttggctttatatatcttgtggaaaggacgaaacaccgtaatttctactaagtgtagatcgataatggtctatgatgtctaatttctactaagtgtagatcaatcacgggagggagcagattttttaagcttggcgtggatccgatatcaactagatcttgaga

SEQ ID NO: 6940 - DNA, 170 bp, Artificial sequence
  Rasa1.1478_Cic.162
  crRNA array
cgatttcttggctttatatatcttgtggaaaggacgaaacaccgtaatttctactaagtgtagatcgataatggtctatgatgtctaatttctactaagtgtagatcgcaggcgcgcccggcggagttttttaagcttggcgtggatccgatatcaactagatcttgaga

SEQ ID NO: 6941 - DNA, 170 bp, Artificial sequence
  Rasa1.1478_Cic.164
  crRNA array
cgatttcttggctttatatatcttgtggaaaggacgaaacaccgtaatttctactaagtgtagatcgataatggtctatgatgtctaatttctactaagtgtagatcgggccctgggccggcggctttttttaagcttggcgtggatccgatatcaactagatcttgaga

SEQ ID NO: 6942 - DNA, 170 bp, Artificial sequence
  Rasa1.1478_Ctcf.229
  crRNA array
cgatttcttggctttatatatcttgtggaaaggacgaaacaccgtaatttctactaagtgtagatcgataatggtctatgatgtctaatttctactaagtgtagatggctggtggctgatagtctgttttttaagcttggcgtggatccgatatcaactagatcttgaga

SEQ ID NO: 6943 - DNA, 170 bp, Artificial sequence
  Rasa1.1478_Ctcf.809
  crRNA array
cgatttcttggctttatatatcttgtggaaaggacgaaacaccgtaatttctactaagtgtagatcgataatggtctatgatgtctaatttctactaagtgtagataagcgctatcatgatcccaattttttaagcttggcgtggatccgatatcaactagatcttgaga

SEQ ID NO: 6944 - DNA, 170 bp, Artificial sequence
  Rasa1.1478_Elf3.826
  crRNA array
cgatttcttggctttatatatcttgtggaaaggacgaaacaccgtaatttctactaagtgtagatcgataatggtctatgatgtctaatttctactaagtgtagattccgagacatcctaatccacttttttaagcttggcgtggatccgatatcaactagatcttgaga

SEQ ID NO: 6945 - DNA, 170 bp, Artificial sequence
  Rasa1.1478_Elf3.983
  crRNA array
cgatttcttggctttatatatcttgtggaaaggacgaaacaccgtaatttctactaagtgtagatcgataatggtctatgatgtctaatttctactaagtgtagattaggccccctaactggaccattttttaagcttggcgtggatccgatatcaactagatcttgaga

SEQ ID NO: 6946 - DNA, 170 bp, Artificial sequence
  Rasa1.1478_Ep300.310
  crRNA array
cgatttcttggctttatatatcttgtggaaaggacgaaacaccgtaatttctactaagtgtagatcgataatggtctatgatgtctaatttctactaagtgtagatatggtacgacagtgaggaagttttttaagcttggcgtggatccgatatcaactagatcttgaga

SEQ ID NO: 6947 - DNA, 170 bp, Artificial sequence
  Rasa1.1478_Ep300.587
  crRNA array
cgatttcttggctttatatatcttgtggaaaggacgaaacaccgtaatttctactaagtgtagatcgataatggtctatgatgtctaatttctactaagtgtagatcgccccggggcccccaaccattttttaagcttggcgtggatccgatatcaactagatcttgaga

SEQ ID NO: 6948 - DNA, 170 bp, Artificial sequence
  Rasa1.1478_Epha2.126
  crRNA array
cgatttcttggctttatatatcttgtggaaaggacgaaacaccgtaatttctactaagtgtagatcgataatggtctatgatgtctaatttctactaagtgtagatcctgtgccgccgcggccgccttttttaagcttggcgtggatccgatatcaactagatcttgaga

SEQ ID NO: 6949 - DNA, 170 bp, Artificial sequence
  Rasa1.1478_Epha2.5
  crRNA array
cgatttcttggctttatatatcttgtggaaaggacgaaacaccgtaatttctactaagtgtagatcgataatggtctatgatgtctaatttctactaagtgtagatcatgagctggcgccacccggttttttaagcttggcgtggatccgatatcaactagatcttgaga

SEQ ID NO: 6950 - DNA, 170 bp, Artificial sequence
  Rasa1.1478_Fat1.105
  crRNA array
cgatttcttggctttatatatcttgtggaaaggacgaaacaccgtaatttctactaagtgtagatcgataatggtctatgatgtctaatttctactaagtgtagataactcgaggtgacaacaagtttttttaagcttggcgtggatccgatatcaactagatcttgaga

SEQ ID NO: 6951 - DNA, 170 bp, Artificial sequence
  Rasa1.1478_Fat1.122
  crRNA array
cgatttcttggctttatatatcttgtggaaaggacgaaacaccgtaatttctactaagtgtagatcgataatggtctatgatgtctaatttctactaagtgtagatccatcgacatggaaacgggattttttaagcttggcgtggatccgatatcaactagatcttgaga

SEQ ID NO: 6952 - DNA, 170 bp, Artificial sequence
  Rasa1.1478_Fbxw7.21
  crRNA array
cgatttcttggctttatatatcttgtggaaaggacgaaacaccgtaatttctactaagtgtagatcgataatggtctatgatgtctaatttctactaagtgtagattaatgtgccgtagaaacccattttttaagcttggcgtggatccgatatcaactagatcttgaga

SEQ ID NO: 6953 - DNA, 170 bp, Artificial sequence
  Rasa1.1478_Fbxw7.23
  crRNA array
cgatttcttggctttatatatcttgtggaaaggacgaaacaccgtaatttctactaagtgtagatcgataatggtctatgatgtctaatttctactaagtgtagatatgtgccgtagaaacccatattttttaagcttggcgtggatccgatatcaactagatcttgaga

SEQ ID NO: 6954 - DNA, 170 bp, Artificial sequence
  Rasa1.1478_Gata3.34
  crRNA array
cgatttcttggctttatatatcttgtggaaaggacgaaacaccgtaatttctactaagtgtagatcgataatggtctatgatgtctaatttctactaagtgtagatctaaactatcccgcaaagatttttttaagcttggcgtggatccgatatcaactagatcttgaga

SEQ ID NO: 6955 - DNA, 170 bp, Artificial sequence
  Rasa1.1478_Gata3.47
  crRNA array
cgatttcttggctttatatatcttgtggaaaggacgaaacaccgtaatttctactaagtgtagatcgataatggtctatgatgtctaatttctactaagtgtagatcgtagtaggacgggacgtggttttttaagcttggcgtggatccgatatcaactagatcttgaga

SEQ ID NO: 6956 - DNA, 170 bp, Artificial sequence
  Rasa1.1478_H2-Q2.1
  crRNA array
cgatttcttggctttatatatcttgtggaaaggacgaaacaccgtaatttctactaagtgtagatcgataatggtctatgatgtctaatttctactaagtgtagatagggcggccaccaacagcagttttttaagcttggcgtggatccgatatcaactagatcttgaga

SEQ ID NO: 6957 - DNA, 170 bp, Artificial sequence
  Rasa1.1478_H2-Q2.2
  crRNA array
cgatttcttggctttatatatcttgtggaaaggacgaaacaccgtaatttctactaagtgtagatcgataatggtctatgatgtctaatttctactaagtgtagattaacctgcgcccgctgctgattttttaagcttggcgtggatccgatatcaactagatcttgaga

SEQ ID NO: 6958 - DNA, 170 bp, Artificial sequence
  Rasa1.1478_Kdm5c.1878
  crRNA array
cgatttcttggctttatatatcttgtggaaaggacgaaacaccgtaatttctactaagtgtagatcgataatggtctatgatgtctaatttctactaagtgtagatagagcacggcacccgcccccttttttaagcttggcgtggatccgatatcaactagatcttgaga

SEQ ID NO: 6959 - DNA, 170 bp, Artificial sequence
  Rasa1.1478_Kdm5c.1879
  crRNA array
cgatttcttggctttatatatcttgtggaaaggacgaaacaccgtaatttctactaagtgtagatcgataatggtctatgatgtctaatttctactaagtgtagatgagcacggcacccgccccccttttttaagcttggcgtggatccgatatcaactagatcttgaga

SEQ ID NO: 6960 - DNA, 170 bp, Artificial sequence
  Rasa1.1478_Kdm6a.56
  crRNA array
cgatttcttggctttatatatcttgtggaaaggacgaaacaccgtaatttctactaagtgtagatcgataatggtctatgatgtctaatttctactaagtgtagattcgctgccgcctctcgcggcttttttaagcttggcgtggatccgatatcaactagatcttgaga

SEQ ID NO: 6961 - DNA, 170 bp, Artificial sequence
  Rasa1.1478_Kdm6a.57
  crRNA array
cgatttcttggctttatatatcttgtggaaaggacgaaacaccgtaatttctactaagtgtagatcgataatggtctatgatgtctaatttctactaagtgtagatcgctgccgcctctcgcggcattttttaagcttggcgtggatccgatatcaactagatcttgaga

SEQ ID NO: 6962 - DNA, 170 bp, Artificial sequence
  Rasa1.1478_Kmt2b.265
  crRNA array
cgatttcttggctttatatatcttgtggaaaggacgaaacaccgtaatttctactaagtgtagatcgataatggtctatgatgtctaatttctactaagtgtagatccccaagtgaagcccacctgttttttaagcttggcgtggatccgatatcaactagatcttgaga

SEQ ID NO: 6963 - DNA, 170 bp, Artificial sequence
  Rasa1.1478_Kmt2b.298
  crRNA array
cgatttcttggctttatatatcttgtggaaaggacgaaacaccgtaatttctactaagtgtagatcgataatggtctatgatgtctaatttctactaagtgtagattccggcagggaccggctggcttttttaagcttggcgtggatccgatatcaactagatcttgaga

SEQ ID NO: 6964 - DNA, 170 bp, Artificial sequence
  Rasa1.1478_Kmt2c.1962
  crRNA array
cgatttcttggctttatatatcttgtggaaaggacgaaacaccgtaatttctactaagtgtagatcgataatggtctatgatgtctaatttctactaagtgtagatgtgacgatctgtgccacaagttttttaagcttggcgtggatccgatatcaactagatcttgaga

SEQ ID NO: 6965 - DNA, 170 bp, Artificial sequence
  Rasa1.1478_Kmt2c.2236
  crRNA array
cgatttcttggctttatatatcttgtggaaaggacgaaacaccgtaatttctactaagtgtagatcgataatggtctatgatgtctaatttctactaagtgtagatactcgacctccacctccctattttttaagcttggcgtggatccgatatcaactagatcttgaga

SEQ ID NO: 6966 - DNA, 170 bp, Artificial sequence
  Rasa1.1478_Kmt2d.316
  crRNA array
cgatttcttggctttatatatcttgtggaaaggacgaaacaccgtaatttctactaagtgtagatcgataatggtctatgatgtctaatttctactaagtgtagatactccaggccacccaggtggttttttaagcttggcgtggatccgatatcaactagatcttgaga

SEQ ID NO: 6967 - DNA, 170 bp, Artificial sequence
  Rasa1.1478_Kmt2d.416
  crRNA array
cgatttcttggctttatatatcttgtggaaaggacgaaacaccgtaatttctactaagtgtagatcgataatggtctatgatgtctaatttctactaagtgtagattaaacccccgggggaagggtttttttaagcttggcgtggatccgatatcaactagatcttgaga

SEQ ID NO: 6968 - DNA, 170 bp, Artificial sequence
  Rasa1.1478_Map2k4.119
  crRNA array
cgatttcttggctttatatatcttgtggaaaggacgaaacaccgtaatttctactaagtgtagatcgataatggtctatgatgtctaatttctactaagtgtagattgctgtgtgggcggccacatttttttaagcttggcgtggatccgatatcaactagatcttgaga

SEQ ID NO: 6969 - DNA, 170 bp, Artificial sequence
  Rasa1.1478_Map2k4.1261
  crRNA array
cgatttcttggctttatatatcttgtggaaaggacgaaacaccgtaatttctactaagtgtagatcgataatggtctatgatgtctaatttctactaagtgtagatgatgtagtaatgcggagtagttttttaagcttggcgtggatccgatatcaactagatcttgaga

SEQ ID NO: 6970 - DNA, 170 bp, Artificial sequence
  Rasa1.1478_Map3k1.235
  crRNA array
cgatttcttggctttatatatcttgtggaaaggacgaaacaccgtaatttctactaagtgtagatcgataatggtctatgatgtctaatttctactaagtgtagataaaacgctactgatcgatcgttttttaagcttggcgtggatccgatatcaactagatcttgaga

SEQ ID NO: 6971 - DNA, 170 bp, Artificial sequence
  Rasa1.1478_Map3k1.3838
  crRNA array
cgatttcttggctttatatatcttgtggaaaggacgaaacaccgtaatttctactaagtgtagatcgataatggtctatgatgtctaatttctactaagtgtagatccaacaacagggccccactattttttaagcttggcgtggatccgatatcaactagatcttgaga

SEQ ID NO: 6972 - DNA, 170 bp, Artificial sequence
  Rasa1.1478_Mga.1655
  crRNA array
cgatttcttggctttatatatcttgtggaaaggacgaaacaccgtaatttctactaagtgtagatcgataatggtctatgatgtctaatttctactaagtgtagatcgagaagtggagagcatattttttttaagcttggcgtggatccgatatcaactagatcttgaga

SEQ ID NO: 6973 - DNA, 170 bp, Artificial sequence
  Rasa1.1478_Mga.93
  crRNA array
cgatttcttggctttatatatcttgtggaaaggacgaaacaccgtaatttctactaagtgtagatcgataatggtctatgatgtctaatttctactaagtgtagatgagaaggctccccataatgtttttttaagcttggcgtggatccgatatcaactagatcttgaga

SEQ ID NO: 6974 - DNA, 170 bp, Artificial sequence
  Rasa1.1478_Nf1.746
  crRNA array
cgatttcttggctttatatatcttgtggaaaggacgaaacaccgtaatttctactaagtgtagatcgataatggtctatgatgtctaatttctactaagtgtagattaagcataatgatgatgccattttttaagcttggcgtggatccgatatcaactagatcttgaga

SEQ ID NO: 6975 - DNA, 170 bp, Artificial sequence
  Rasa1.1478_Nf1.97
  crRNA array
cgatttcttggctttatatatcttgtggaaaggacgaaacaccgtaatttctactaagtgtagatcgataatggtctatgatgtctaatttctactaagtgtagatagcccgctacatgctgatgcttttttaagcttggcgtggatccgatatcaactagatcttgaga

SEQ ID NO: 6976 - DNA, 170 bp, Artificial sequence
  Rasa1.1478_Nf2.356
  crRNA array
cgatttcttggctttatatatcttgtggaaaggacgaaacaccgtaatttctactaagtgtagatcgataatggtctatgatgtctaatttctactaagtgtagatcggagtcatctgatagagatttttttaagcttggcgtggatccgatatcaactagatcttgaga

SEQ ID NO: 6977 - DNA, 170 bp, Artificial sequence
  Rasa1.1478_Nf2.768
  crRNA array
cgatttcttggctttatatatcttgtggaaaggacgaaacaccgtaatttctactaagtgtagatcgataatggtctatgatgtctaatttctactaagtgtagatccgaagccccagtgtccggcttttttaagcttggcgtggatccgatatcaactagatcttgaga

SEQ ID NO: 6978 - DNA, 170 bp, Artificial sequence
  Rasa1.1478_Notch1.1849
  crRNA array
cgatttcttggctttatatatcttgtggaaaggacgaaacaccgtaatttctactaagtgtagatcgataatggtctatgatgtctaatttctactaagtgtagatctggcgggtgggcggcgctgttttttaagcttggcgtggatccgatatcaactagatcttgaga

SEQ ID NO: 6979 - DNA, 170 bp, Artificial sequence
  Rasa1.1478_Notch1.649
  crRNA array
cgatttcttggctttatatatcttgtggaaaggacgaaacaccgtaatttctactaagtgtagatcgataatggtctatgatgtctaatttctactaagtgtagattgggccaacgatgccaggacttttttaagcttggcgtggatccgatatcaactagatcttgaga

SEQ ID NO: 6980 - DNA, 170 bp, Artificial sequence
  Rasa1.1478_Nsd1.70
  crRNA array
cgatttcttggctttatatatcttgtggaaaggacgaaacaccgtaatttctactaagtgtagatcgataatggtctatgatgtctaatttctactaagtgtagatactggtgtggacgatgcagattttttaagcttggcgtggatccgatatcaactagatcttgaga

SEQ ID NO: 6981 - DNA, 170 bp, Artificial sequence
  Rasa1.1478_Nsd1.90
  crRNA array
cgatttcttggctttatatatcttgtggaaaggacgaaacaccgtaatttctactaagtgtagatcgataatggtctatgatgtctaatttctactaagtgtagataggagctaacggcaagaatgttttttaagcttggcgtggatccgatatcaactagatcttgaga

SEQ ID NO: 6982 - DNA, 170 bp, Artificial sequence
  Rasa1.1478_Pbrm1.1236
  crRNA array
cgatttcttggctttatatatcttgtggaaaggacgaaacaccgtaatttctactaagtgtagatcgataatggtctatgatgtctaatttctactaagtgtagatgccgataaaaccaacagccgttttttaagcttggcgtggatccgatatcaactagatcttgaga

SEQ ID NO: 6983 - DNA, 170 bp, Artificial sequence
  Rasa1.1478_Pbrm1.969
  crRNA array
cgatttcttggctttatatatcttgtggaaaggacgaaacaccgtaatttctactaagtgtagatcgataatggtctatgatgtctaatttctactaagtgtagatgagccctaatgaacagctcattttttaagcttggcgtggatccgatatcaactagatcttgaga

SEQ ID NO: 6984 - DNA, 170 bp, Artificial sequence
  Rasa1.1478_Pik3r1.76
  crRNA array
cgatttcttggctttatatatcttgtggaaaggacgaaacaccgtaatttctactaagtgtagatcgataatggtctatgatgtctaatttctactaagtgtagataaaacctatacggcccgcacttttttaagcttggcgtggatccgatatcaactagatcttgaga

SEQ ID NO: 6985 - DNA, 170 bp, Artificial sequence
  Rasa1.1478_Pik3r1.77
  crRNA array
cgatttcttggctttatatatcttgtggaaaggacgaaacaccgtaatttctactaagtgtagatcgataatggtctatgatgtctaatttctactaagtgtagataaacctatacggcccgcactttttttaagcttggcgtggatccgatatcaactagatcttgaga

SEQ ID NO: 6986 - DNA, 170 bp, Artificial sequence
  Rasa1.1478_Pten.240
  crRNA array
cgatttcttggctttatatatcttgtggaaaggacgaaacaccgtaatttctactaagtgtagatcgataatggtctatgatgtctaatttctactaagtgtagattgcatacgctatagctgcttttttttaagcttggcgtggatccgatatcaactagatcttgaga

SEQ ID NO: 6987 - DNA, 170 bp, Artificial sequence
  Rasa1.1478_Pten.265
  crRNA array
cgatttcttggctttatatatcttgtggaaaggacgaaacaccgtaatttctactaagtgtagatcgataatggtctatgatgtctaatttctactaagtgtagataagcgtggtgcgtgacgcacttttttaagcttggcgtggatccgatatcaactagatcttgaga

SEQ ID NO: 6988 - DNA, 170 bp, Artificial sequence
  Rasa1.1478_Rb1.211
  crRNA array
cgatttcttggctttatatatcttgtggaaaggacgaaacaccgtaatttctactaagtgtagatcgataatggtctatgatgtctaatttctactaagtgtagattctgacatgatcgggtacctttttttaagcttggcgtggatccgatatcaactagatcttgaga

SEQ ID NO: 6989 - DNA, 170 bp, Artificial sequence
  Rasa1.1478_Rb1.394
  crRNA array
cgatttcttggctttatatatcttgtggaaaggacgaaacaccgtaatttctactaagtgtagatcgataatggtctatgatgtctaatttctactaagtgtagatagaaatctcgaagcaggatcttttttaagcttggcgtggatccgatatcaactagatcttgaga

SEQ ID NO: 6990 - DNA, 170 bp, Artificial sequence
  Rasa1.1478_Rbm10.5
  crRNA array
cgatttcttggctttatatatcttgtggaaaggacgaaacaccgtaatttctactaagtgtagatcgataatggtctatgatgtctaatttctactaagtgtagatacgaaacctgaacccacacattttttaagcttggcgtggatccgatatcaactagatcttgaga

SEQ ID NO: 6991 - DNA, 170 bp, Artificial sequence
  Rasa1.1478_Rbm10.6
  crRNA array
cgatttcttggctttatatatcttgtggaaaggacgaaacaccgtaatttctactaagtgtagatcgataatggtctatgatgtctaatttctactaagtgtagatcgaaacctgaacccacacagttttttaagcttggcgtggatccgatatcaactagatcttgaga

SEQ ID NO: 6992 - DNA, 170 bp, Artificial sequence
  Rasa1.1478_Rnf43.1920
  crRNA array
cgatttcttggctttatatatcttgtggaaaggacgaaacaccgtaatttctactaagtgtagatcgataatggtctatgatgtctaatttctactaagtgtagatatccccgtgccgtggactccttttttaagcttggcgtggatccgatatcaactagatcttgaga

SEQ ID NO: 6993 - DNA, 170 bp, Artificial sequence
  Rasa1.1478_Rnf43.39
  crRNA array
cgatttcttggctttatatatcttgtggaaaggacgaaacaccgtaatttctactaagtgtagatcgataatggtctatgatgtctaatttctactaagtgtagatcaaggggatcactctgataattttttaagcttggcgtggatccgatatcaactagatcttgaga

SEQ ID NO: 6994 - DNA, 170 bp, Artificial sequence
  Rasa1.1478_Runx1.204
  crRNA array
cgatttcttggctttatatatcttgtggaaaggacgaaacaccgtaatttctactaagtgtagatcgataatggtctatgatgtctaatttctactaagtgtagattaaataagtccagccgttttttttttaagcttggcgtggatccgatatcaactagatcttgaga

SEQ ID NO: 6995 - DNA, 170 bp, Artificial sequence
  Rasa1.1478_Runx1.81
  crRNA array
cgatttcttggctttatatatcttgtggaaaggacgaaacaccgtaatttctactaagtgtagatcgataatggtctatgatgtctaatttctactaagtgtagataggacgcgtatgggaattttttttttaagcttggcgtggatccgatatcaactagatcttgaga

SEQ ID NO: 6996 - DNA, 170 bp, Artificial sequence
  Rasa1.1478_Setd2.143
  crRNA array
cgatttcttggctttatatatcttgtggaaaggacgaaacaccgtaatttctactaagtgtagatcgataatggtctatgatgtctaatttctactaagtgtagatgcacaaccacaacagactggttttttaagcttggcgtggatccgatatcaactagatcttgaga

SEQ ID NO: 6997 - DNA, 170 bp, Artificial sequence
  Rasa1.1478_Setd2.508
  crRNA array
cgatttcttggctttatatatcttgtggaaaggacgaaacaccgtaatttctactaagtgtagatcgataatggtctatgatgtctaatttctactaagtgtagattacgatcccgagcacccgacttttttaagcttggcgtggatccgatatcaactagatcttgaga

SEQ ID NO: 6998 - DNA, 170 bp, Artificial sequence
  Rasa1.1478_Smad4.3038
  crRNA array
cgatttcttggctttatatatcttgtggaaaggacgaaacaccgtaatttctactaagtgtagatcgataatggtctatgatgtctaatttctactaagtgtagatatctgcggcagtgtcaccggttttttaagcttggcgtggatccgatatcaactagatcttgaga

SEQ ID NO: 6999 - DNA, 170 bp, Artificial sequence
  Rasa1.1478_Smad4.39
  crRNA array
cgatttcttggctttatatatcttgtggaaaggacgaaacaccgtaatttctactaagtgtagatcgataatggtctatgatgtctaatttctactaagtgtagatagtcaaacgcatactgacaattttttaagcttggcgtggatccgatatcaactagatcttgaga

SEQ ID NO: 7000 - DNA, 170 bp, Artificial sequence
  Rasa1.1478_Stag2.1409
  crRNA array
cgatttcttggctttatatatcttgtggaaaggacgaaacaccgtaatttctactaagtgtagatcgataatggtctatgatgtctaatttctactaagtgtagatgctaataactgcggaagggcttttttaagcttggcgtggatccgatatcaactagatcttgaga

SEQ ID NO: 7001 - DNA, 170 bp, Artificial sequence
  Rasa1.1478_Stag2.4401
  crRNA array
cgatttcttggctttatatatcttgtggaaaggacgaaacaccgtaatttctactaagtgtagatcgataatggtctatgatgtctaatttctactaagtgtagattaatcgtccagtggtgtatattttttaagcttggcgtggatccgatatcaactagatcttgaga

SEQ ID NO: 7002 - DNA, 170 bp, Artificial sequence
  Rasa1.1478_Tbl1xr1.1
  crRNA array
cgatttcttggctttatatatcttgtggaaaggacgaaacaccgtaatttctactaagtgtagatcgataatggtctatgatgtctaatttctactaagtgtagatggatgcgcatactggtgaagttttttaagcttggcgtggatccgatatcaactagatcttgaga

SEQ ID NO: 7003 - DNA, 170 bp, Artificial sequence
  Rasa1.1478_Tbl1xr1.83
  crRNA array
cgatttcttggctttatatatcttgtggaaaggacgaaacaccgtaatttctactaagtgtagatcgataatggtctatgatgtctaatttctactaagtgtagatatggtcgacccatcgagtctttttttaagcttggcgtggatccgatatcaactagatcttgaga

SEQ ID NO: 7004 - DNA, 170 bp, Artificial sequence
  Rasa1.1478_Tgfbr2.290
  crRNA array
cgatttcttggctttatatatcttgtggaaaggacgaaacaccgtaatttctactaagtgtagatcgataatggtctatgatgtctaatttctactaagtgtagatcctctcggcgcccgggtaaattttttaagcttggcgtggatccgatatcaactagatcttgaga

SEQ ID NO: 7005 - DNA, 170 bp, Artificial sequence
  Rasa1.1478_Tgfbr2.292
  crRNA array
cgatttcttggctttatatatcttgtggaaaggacgaaacaccgtaatttctactaagtgtagatcgataatggtctatgatgtctaatttctactaagtgtagatcccgggcgccgagagggaaattttttaagcttggcgtggatccgatatcaactagatcttgaga

SEQ ID NO: 7006 - DNA, 170 bp, Artificial sequence
  Rasa1.1478_Trp53.4
  crRNA array
cgatttcttggctttatatatcttgtggaaaggacgaaacaccgtaatttctactaagtgtagatcgataatggtctatgatgtctaatttctactaagtgtagatccctgaactgcccccagggattttttaagcttggcgtggatccgatatcaactagatcttgaga

SEQ ID NO: 7007 - DNA, 170 bp, Artificial sequence
  Rasa1.1478_Trp53.528
  crRNA array
cgatttcttggctttatatatcttgtggaaaggacgaaacaccgtaatttctactaagtgtagatcgataatggtctatgatgtctaatttctactaagtgtagatgctgggccagcagagacctgttttttaagcttggcgtggatccgatatcaactagatcttgaga

SEQ ID NO: 7008 - DNA, 170 bp, Artificial sequence
  Rasa1.1478_Vhl.1
  crRNA array
cgatttcttggctttatatatcttgtggaaaggacgaaacaccgtaatttctactaagtgtagatcgataatggtctatgatgtctaatttctactaagtgtagatagggctcccggcggccatttttttttaagcttggcgtggatccgatatcaactagatcttgaga

SEQ ID NO: 7009 - DNA, 170 bp, Artificial sequence
  Rasa1.1478_Vhl.151
  crRNA array
cgatttcttggctttatatatcttgtggaaaggacgaaacaccgtaatttctactaagtgtagatcgataatggtctatgatgtctaatttctactaagtgtagattagagcactcacccgagggattttttaagcttggcgtggatccgatatcaactagatcttgaga

SEQ ID NO: 7010 - DNA, 170 bp, Artificial sequence
  Rasa1.1478_Zc3h13.1387
  crRNA array
cgatttcttggctttatatatcttgtggaaaggacgaaacaccgtaatttctactaagtgtagatcgataatggtctatgatgtctaatttctactaagtgtagatgtgacgccggtcatgtgactttttttaagcttggcgtggatccgatatcaactagatcttgaga

SEQ ID NO: 7011 - DNA, 170 bp, Artificial sequence
  Rasa1.1478_Zc3h13.1777
  crRNA array
cgatttcttggctttatatatcttgtggaaaggacgaaacaccgtaatttctactaagtgtagatcgataatggtctatgatgtctaatttctactaagtgtagatgatgctgccagtgtagcggcttttttaagcttggcgtggatccgatatcaactagatcttgaga

SEQ ID NO: 7012 - DNA, 170 bp, Artificial sequence
  Rasa1.223_Acvr2a.155
  crRNA array
cgatttcttggctttatatatcttgtggaaaggacgaaacaccgtaatttctactaagtgtagattccatggagtatcgtgctcgtaatttctactaagtgtagatggacctggctaatcaagtatttttttaagcttggcgtggatccgatatcaactagatcttgaga

SEQ ID NO: 7013 - DNA, 170 bp, Artificial sequence
  Rasa1.223_Acvr2a.70
  crRNA array
cgatttcttggctttatatatcttgtggaaaggacgaaacaccgtaatttctactaagtgtagattccatggagtatcgtgctcgtaatttctactaagtgtagatcccgaggcgccggagaagccttttttaagcttggcgtggatccgatatcaactagatcttgaga

SEQ ID NO: 7014 - DNA, 170 bp, Artificial sequence
  Rasa1.223_Apc.21
  crRNA array
cgatttcttggctttatatatcttgtggaaaggacgaaacaccgtaatttctactaagtgtagattccatggagtatcgtgctcgtaatttctactaagtgtagatgtgatccacacgtgtagctgttttttaagcttggcgtggatccgatatcaactagatcttgaga

SEQ ID NO: 7015 - DNA, 170 bp, Artificial sequence
  Rasa1.223_Apc.867
  crRNA array
cgatttcttggctttatatatcttgtggaaaggacgaaacaccgtaatttctactaagtgtagattccatggagtatcgtgctcgtaatttctactaagtgtagatcagtcccaggcggcggaagcttttttaagcttggcgtggatccgatatcaactagatcttgaga

SEQ ID NO: 7016 - DNA, 170 bp, Artificial sequence
  Rasa1.223_Arid1a.2
  crRNA array
cgatttcttggctttatatatcttgtggaaaggacgaaacaccgtaatttctactaagtgtagattccatggagtatcgtgctcgtaatttctactaagtgtagatcccgcgcccccgtcctggggttttttaagcttggcgtggatccgatatcaactagatcttgaga

SEQ ID NO: 7017 - DNA, 170 bp, Artificial sequence
  Rasa1.223_Arid1a.5
  crRNA array
cgatttcttggctttatatatcttgtggaaaggacgaaacaccgtaatttctactaagtgtagattccatggagtatcgtgctcgtaatttctactaagtgtagatcccgcgctcggccgctgccgttttttaagcttggcgtggatccgatatcaactagatcttgaga

SEQ ID NO: 7018 - DNA, 170 bp, Artificial sequence
  Rasa1.223_Arid2.166
  crRNA array
cgatttcttggctttatatatcttgtggaaaggacgaaacaccgtaatttctactaagtgtagattccatggagtatcgtgctcgtaatttctactaagtgtagataaccgcgatctgggttttttttttttaagcttggcgtggatccgatatcaactagatcttgaga

SEQ ID NO: 7019 - DNA, 170 bp, Artificial sequence
  Rasa1.223_Arid2.172
  crRNA array
cgatttcttggctttatatatcttgtggaaaggacgaaacaccgtaatttctactaagtgtagattccatggagtatcgtgctcgtaatttctactaagtgtagatctggacgagctgcggcagttttttttaagcttggcgtggatccgatatcaactagatcttgaga

SEQ ID NO: 7020 - DNA, 170 bp, Artificial sequence
  Rasa1.223_Atm.120
  crRNA array
cgatttcttggctttatatatcttgtggaaaggacgaaacaccgtaatttctactaagtgtagattccatggagtatcgtgctcgtaatttctactaagtgtagatgacaggtagtcggcagctaattttttaagcttggcgtggatccgatatcaactagatcttgaga

SEQ ID NO: 7021 - DNA, 170 bp, Artificial sequence
  Rasa1.223_Atm.997
  crRNA array
cgatttcttggctttatatatcttgtggaaaggacgaaacaccgtaatttctactaagtgtagattccatggagtatcgtgctcgtaatttctactaagtgtagatgagaaagtctccgaatcgttttttttaagcttggcgtggatccgatatcaactagatcttgaga

SEQ ID NO: 7022 - DNA, 170 bp, Artificial sequence
  Rasa1.223_Atrx.249
  crRNA array
cgatttcttggctttatatatcttgtggaaaggacgaaacaccgtaatttctactaagtgtagattccatggagtatcgtgctcgtaatttctactaagtgtagattagccagtcgctcatatctcttttttaagcttggcgtggatccgatatcaactagatcttgaga

SEQ ID NO: 7023 - DNA, 170 bp, Artificial sequence
  Rasa1.223_Atrx.251
  crRNA array
cgatttcttggctttatatatcttgtggaaaggacgaaacaccgtaatttctactaagtgtagattccatggagtatcgtgctcgtaatttctactaagtgtagatgccagtcgctcatatctctgttttttaagcttggcgtggatccgatatcaactagatcttgaga

SEQ ID NO: 7024 - DNA, 170 bp, Artificial sequence
  Rasa1.223_Bcor.203
  crRNA array
cgatttcttggctttatatatcttgtggaaaggacgaaacaccgtaatttctactaagtgtagattccatggagtatcgtgctcgtaatttctactaagtgtagatccccggagcggagtccaggcttttttaagcttggcgtggatccgatatcaactagatcttgaga

SEQ ID NO: 7025 - DNA, 170 bp, Artificial sequence
  Rasa1.223_Bcor.475
  crRNA array
cgatttcttggctttatatatcttgtggaaaggacgaaacaccgtaatttctactaagtgtagattccatggagtatcgtgctcgtaatttctactaagtgtagattgcaacccctctgtatgggattttttaagcttggcgtggatccgatatcaactagatcttgaga

SEQ ID NO: 7026 - DNA, 170 bp, Artificial sequence
  Rasa1.223_Brca1.112
  crRNA array
cgatttcttggctttatatatcttgtggaaaggacgaaacaccgtaatttctactaagtgtagattccatggagtatcgtgctcgtaatttctactaagtgtagatctagacgctctgtggagactttttttaagcttggcgtggatccgatatcaactagatcttgaga

SEQ ID NO: 7027 - DNA, 170 bp, Artificial sequence
  Rasa1.223_Brca1.53
  crRNA array
cgatttcttggctttatatatcttgtggaaaggacgaaacaccgtaatttctactaagtgtagattccatggagtatcgtgctcgtaatttctactaagtgtagataatgaggaggcgtcgatcatttttttaagcttggcgtggatccgatatcaactagatcttgaga

SEQ ID NO: 7028 - DNA, 170 bp, Artificial sequence
  Rasa1.223_Casp8.45
  crRNA array
cgatttcttggctttatatatcttgtggaaaggacgaaacaccgtaatttctactaagtgtagattccatggagtatcgtgctcgtaatttctactaagtgtagatctaccgagatcctgtgaatgttttttaagcttggcgtggatccgatatcaactagatcttgaga

SEQ ID NO: 7029 - DNA, 170 bp, Artificial sequence
  Rasa1.223_Casp8.54
  crRNA array
cgatttcttggctttatatatcttgtggaaaggacgaaacaccgtaatttctactaagtgtagattccatggagtatcgtgctcgtaatttctactaagtgtagatcagtgcagtcgtcgtaagatttttttaagcttggcgtggatccgatatcaactagatcttgaga

SEQ ID NO: 7030 - DNA, 170 bp, Artificial sequence
  Rasa1.223_Cbwd1.84
  crRNA array
cgatttcttggctttatatatcttgtggaaaggacgaaacaccgtaatttctactaagtgtagattccatggagtatcgtgctcgtaatttctactaagtgtagatcacagcaggtaacatgccgcttttttaagcttggcgtggatccgatatcaactagatcttgaga

SEQ ID NO: 7031 - DNA, 170 bp, Artificial sequence
  Rasa1.223_Cbwd1.85
  crRNA array
cgatttcttggctttatatatcttgtggaaaggacgaaacaccgtaatttctactaagtgtagattccatggagtatcgtgctcgtaatttctactaagtgtagatacagcaggtaacatgccgccttttttaagcttggcgtggatccgatatcaactagatcttgaga

SEQ ID NO: 7032 - DNA, 170 bp, Artificial sequence
  Rasa1.223_Cdh1.387
  crRNA array
cgatttcttggctttatatatcttgtggaaaggacgaaacaccgtaatttctactaagtgtagattccatggagtatcgtgctcgtaatttctactaagtgtagatctcggcgtctgccgggtccgttttttaagcttggcgtggatccgatatcaactagatcttgaga

SEQ ID NO: 7033 - DNA, 170 bp, Artificial sequence
  Rasa1.223_Cdh1.58
  crRNA array
cgatttcttggctttatatatcttgtggaaaggacgaaacaccgtaatttctactaagtgtagattccatggagtatcgtgctcgtaatttctactaagtgtagatctcgtccgcgcccgggactcttttttaagcttggcgtggatccgatatcaactagatcttgaga

SEQ ID NO: 7034 - DNA, 170 bp, Artificial sequence
  Rasa1.223_Cdkn2a.647
  crRNA array
cgatttcttggctttatatatcttgtggaaaggacgaaacaccgtaatttctactaagtgtagattccatggagtatcgtgctcgtaatttctactaagtgtagatgcaatcacgggagggagcagttttttaagcttggcgtggatccgatatcaactagatcttgaga

SEQ ID NO: 7035 - DNA, 170 bp, Artificial sequence
  Rasa1.223_Cdkn2a.648
  crRNA array
cgatttcttggctttatatatcttgtggaaaggacgaaacaccgtaatttctactaagtgtagattccatggagtatcgtgctcgtaatttctactaagtgtagatcaatcacgggagggagcagattttttaagcttggcgtggatccgatatcaactagatcttgaga

SEQ ID NO: 7036 - DNA, 170 bp, Artificial sequence
  Rasa1.223_Cic.162
  crRNA array
cgatttcttggctttatatatcttgtggaaaggacgaaacaccgtaatttctactaagtgtagattccatggagtatcgtgctcgtaatttctactaagtgtagatcgcaggcgcgcccggcggagttttttaagcttggcgtggatccgatatcaactagatcttgaga

SEQ ID NO: 7037 - DNA, 170 bp, Artificial sequence
  Rasa1.223_Cic.164
  crRNA array
cgatttcttggctttatatatcttgtggaaaggacgaaacaccgtaatttctactaagtgtagattccatggagtatcgtgctcgtaatttctactaagtgtagatcgggccctgggccggcggctttttttaagcttggcgtggatccgatatcaactagatcttgaga

SEQ ID NO: 7038 - DNA, 170 bp, Artificial sequence
  Rasa1.223_Ctcf.229
  crRNA array
cgatttcttggctttatatatcttgtggaaaggacgaaacaccgtaatttctactaagtgtagattccatggagtatcgtgctcgtaatttctactaagtgtagatggctggtggctgatagtctgttttttaagcttggcgtggatccgatatcaactagatcttgaga

SEQ ID NO: 7039 - DNA, 170 bp, Artificial sequence
  Rasa1.223_Ctcf.809
  crRNA array
cgatttcttggctttatatatcttgtggaaaggacgaaacaccgtaatttctactaagtgtagattccatggagtatcgtgctcgtaatttctactaagtgtagataagcgctatcatgatcccaattttttaagcttggcgtggatccgatatcaactagatcttgaga

SEQ ID NO: 7040 - DNA, 170 bp, Artificial sequence
  Rasa1.223_Elf3.826
  crRNA array
cgatttcttggctttatatatcttgtggaaaggacgaaacaccgtaatttctactaagtgtagattccatggagtatcgtgctcgtaatttctactaagtgtagattccgagacatcctaatccacttttttaagcttggcgtggatccgatatcaactagatcttgaga

SEQ ID NO: 7041 - DNA, 170 bp, Artificial sequence
  Rasa1.223_Elf3.983
  crRNA array
cgatttcttggctttatatatcttgtggaaaggacgaaacaccgtaatttctactaagtgtagattccatggagtatcgtgctcgtaatttctactaagtgtagattaggccccctaactggaccattttttaagcttggcgtggatccgatatcaactagatcttgaga

SEQ ID NO: 7042 - DNA, 170 bp, Artificial sequence
  Rasa1.223_Ep300.310
  crRNA array
cgatttcttggctttatatatcttgtggaaaggacgaaacaccgtaatttctactaagtgtagattccatggagtatcgtgctcgtaatttctactaagtgtagatatggtacgacagtgaggaagttttttaagcttggcgtggatccgatatcaactagatcttgaga

SEQ ID NO: 7043 - DNA, 170 bp, Artificial sequence
  Rasa1.223_Ep300.587
  crRNA array
cgatttcttggctttatatatcttgtggaaaggacgaaacaccgtaatttctactaagtgtagattccatggagtatcgtgctcgtaatttctactaagtgtagatcgccccggggcccccaaccattttttaagcttggcgtggatccgatatcaactagatcttgaga

SEQ ID NO: 7044 - DNA, 170 bp, Artificial sequence
  Rasa1.223_Epha2.126
  crRNA array
cgatttcttggctttatatatcttgtggaaaggacgaaacaccgtaatttctactaagtgtagattccatggagtatcgtgctcgtaatttctactaagtgtagatcctgtgccgccgcggccgccttttttaagcttggcgtggatccgatatcaactagatcttgaga

SEQ ID NO: 7045 - DNA, 170 bp, Artificial sequence
  Rasa1.223_Epha2.5
  crRNA array
cgatttcttggctttatatatcttgtggaaaggacgaaacaccgtaatttctactaagtgtagattccatggagtatcgtgctcgtaatttctactaagtgtagatcatgagctggcgccacccggttttttaagcttggcgtggatccgatatcaactagatcttgaga

SEQ ID NO: 7046 - DNA, 170 bp, Artificial sequence
  Rasa1.223_Fat1.105
  crRNA array
cgatttcttggctttatatatcttgtggaaaggacgaaacaccgtaatttctactaagtgtagattccatggagtatcgtgctcgtaatttctactaagtgtagataactcgaggtgacaacaagtttttttaagcttggcgtggatccgatatcaactagatcttgaga

SEQ ID NO: 7047 - DNA, 170 bp, Artificial sequence
  Rasa1.223_Fat1.122
  crRNA array
cgatttcttggctttatatatcttgtggaaaggacgaaacaccgtaatttctactaagtgtagattccatggagtatcgtgctcgtaatttctactaagtgtagatccatcgacatggaaacgggattttttaagcttggcgtggatccgatatcaactagatcttgaga

SEQ ID NO: 7048 - DNA, 170 bp, Artificial sequence
  Rasa1.223_Fbxw7.21
  crRNA array
cgatttcttggctttatatatcttgtggaaaggacgaaacaccgtaatttctactaagtgtagattccatggagtatcgtgctcgtaatttctactaagtgtagattaatgtgccgtagaaacccattttttaagcttggcgtggatccgatatcaactagatcttgaga

SEQ ID NO: 7049 - DNA, 170 bp, Artificial sequence
  Rasa1.223_Fbxw7.23
  crRNA array
cgatttcttggctttatatatcttgtggaaaggacgaaacaccgtaatttctactaagtgtagattccatggagtatcgtgctcgtaatttctactaagtgtagatatgtgccgtagaaacccatattttttaagcttggcgtggatccgatatcaactagatcttgaga

SEQ ID NO: 7050 - DNA, 170 bp, Artificial sequence
  Rasa1.223_Gata3.34
  crRNA array
cgatttcttggctttatatatcttgtggaaaggacgaaacaccgtaatttctactaagtgtagattccatggagtatcgtgctcgtaatttctactaagtgtagatctaaactatcccgcaaagatttttttaagcttggcgtggatccgatatcaactagatcttgaga

SEQ ID NO: 7051 - DNA, 170 bp, Artificial sequence
  Rasa1.223_Gata3.47
  crRNA array
cgatttcttggctttatatatcttgtggaaaggacgaaacaccgtaatttctactaagtgtagattccatggagtatcgtgctcgtaatttctactaagtgtagatcgtagtaggacgggacgtggttttttaagcttggcgtggatccgatatcaactagatcttgaga

SEQ ID NO: 7052 - DNA, 170 bp, Artificial sequence
  Rasa1.223_H2-Q2.1
  crRNA array
cgatttcttggctttatatatcttgtggaaaggacgaaacaccgtaatttctactaagtgtagattccatggagtatcgtgctcgtaatttctactaagtgtagatagggcggccaccaacagcagttttttaagcttggcgtggatccgatatcaactagatcttgaga

SEQ ID NO: 7053 - DNA, 170 bp, Artificial sequence
  Rasa1.223_H2-Q2.2
  crRNA array
cgatttcttggctttatatatcttgtggaaaggacgaaacaccgtaatttctactaagtgtagattccatggagtatcgtgctcgtaatttctactaagtgtagattaacctgcgcccgctgctgattttttaagcttggcgtggatccgatatcaactagatcttgaga

SEQ ID NO: 7054 - DNA, 170 bp, Artificial sequence
  Rasa1.223_Kdm5c.1878
  crRNA array
cgatttcttggctttatatatcttgtggaaaggacgaaacaccgtaatttctactaagtgtagattccatggagtatcgtgctcgtaatttctactaagtgtagatagagcacggcacccgcccccttttttaagcttggcgtggatccgatatcaactagatcttgaga

SEQ ID NO: 7055 - DNA, 170 bp, Artificial sequence
  Rasa1.223_Kdm5c.1879
  crRNA array
cgatttcttggctttatatatcttgtggaaaggacgaaacaccgtaatttctactaagtgtagattccatggagtatcgtgctcgtaatttctactaagtgtagatgagcacggcacccgccccccttttttaagcttggcgtggatccgatatcaactagatcttgaga

SEQ ID NO: 7056 - DNA, 170 bp, Artificial sequence
  Rasa1.223_Kdm6a.56
  crRNA array
cgatttcttggctttatatatcttgtggaaaggacgaaacaccgtaatttctactaagtgtagattccatggagtatcgtgctcgtaatttctactaagtgtagattcgctgccgcctctcgcggcttttttaagcttggcgtggatccgatatcaactagatcttgaga

SEQ ID NO: 7057 - DNA, 170 bp, Artificial sequence
  Rasa1.223_Kdm6a.57
  crRNA array
cgatttcttggctttatatatcttgtggaaaggacgaaacaccgtaatttctactaagtgtagattccatggagtatcgtgctcgtaatttctactaagtgtagatcgctgccgcctctcgcggcattttttaagcttggcgtggatccgatatcaactagatcttgaga

SEQ ID NO: 7058 - DNA, 170 bp, Artificial sequence
  Rasa1.223_Kmt2b.265
  crRNA array
cgatttcttggctttatatatcttgtggaaaggacgaaacaccgtaatttctactaagtgtagattccatggagtatcgtgctcgtaatttctactaagtgtagatccccaagtgaagcccacctgttttttaagcttggcgtggatccgatatcaactagatcttgaga

SEQ ID NO: 7059 - DNA, 170 bp, Artificial sequence
  Rasa1.223_Kmt2b.298
  crRNA array
cgatttcttggctttatatatcttgtggaaaggacgaaacaccgtaatttctactaagtgtagattccatggagtatcgtgctcgtaatttctactaagtgtagattccggcagggaccggctggcttttttaagcttggcgtggatccgatatcaactagatcttgaga

SEQ ID NO: 7060 - DNA, 170 bp, Artificial sequence
  Rasa1.223_Kmt2c.1962
  crRNA array
cgatttcttggctttatatatcttgtggaaaggacgaaacaccgtaatttctactaagtgtagattccatggagtatcgtgctcgtaatttctactaagtgtagatgtgacgatctgtgccacaagttttttaagcttggcgtggatccgatatcaactagatcttgaga

SEQ ID NO: 7061 - DNA, 170 bp, Artificial sequence
  Rasa1.223_Kmt2c.2236
  crRNA array
cgatttcttggctttatatatcttgtggaaaggacgaaacaccgtaatttctactaagtgtagattccatggagtatcgtgctcgtaatttctactaagtgtagatactcgacctccacctccctattttttaagcttggcgtggatccgatatcaactagatcttgaga

SEQ ID NO: 7062 - DNA, 170 bp, Artificial sequence
  Rasa1.223_Kmt2d.316
  crRNA array
cgatttcttggctttatatatcttgtggaaaggacgaaacaccgtaatttctactaagtgtagattccatggagtatcgtgctcgtaatttctactaagtgtagatactccaggccacccaggtggttttttaagcttggcgtggatccgatatcaactagatcttgaga

SEQ ID NO: 7063 - DNA, 170 bp, Artificial sequence
  Rasa1.223_Kmt2d.416
  crRNA array
cgatttcttggctttatatatcttgtggaaaggacgaaacaccgtaatttctactaagtgtagattccatggagtatcgtgctcgtaatttctactaagtgtagattaaacccccgggggaagggtttttttaagcttggcgtggatccgatatcaactagatcttgaga

SEQ ID NO: 7064 - DNA, 170 bp, Artificial sequence
  Rasa1.223_Map2k4.119
  crRNA array
cgatttcttggctttatatatcttgtggaaaggacgaaacaccgtaatttctactaagtgtagattccatggagtatcgtgctcgtaatttctactaagtgtagattgctgtgtgggcggccacatttttttaagcttggcgtggatccgatatcaactagatcttgaga

SEQ ID NO: 7065 - DNA, 170 bp, Artificial sequence
  Rasa1.223_Map2k4.1261
  crRNA array
cgatttcttggctttatatatcttgtggaaaggacgaaacaccgtaatttctactaagtgtagattccatggagtatcgtgctcgtaatttctactaagtgtagatgatgtagtaatgcggagtagttttttaagcttggcgtggatccgatatcaactagatcttgaga

SEQ ID NO: 7066 - DNA, 170 bp, Artificial sequence
  Rasa1.223_Map3k1.235
  crRNA array
cgatttcttggctttatatatcttgtggaaaggacgaaacaccgtaatttctactaagtgtagattccatggagtatcgtgctcgtaatttctactaagtgtagataaaacgctactgatcgatcgttttttaagcttggcgtggatccgatatcaactagatcttgaga

SEQ ID NO: 7067 - DNA, 170 bp, Artificial sequence
  Rasa1.223_Map3k1.3838
  crRNA array
cgatttcttggctttatatatcttgtggaaaggacgaaacaccgtaatttctactaagtgtagattccatggagtatcgtgctcgtaatttctactaagtgtagatccaacaacagggccccactattttttaagcttggcgtggatccgatatcaactagatcttgaga

SEQ ID NO: 7068 - DNA, 170 bp, Artificial sequence
  Rasa1.223_Mga.1655
  crRNA array
cgatttcttggctttatatatcttgtggaaaggacgaaacaccgtaatttctactaagtgtagattccatggagtatcgtgctcgtaatttctactaagtgtagatcgagaagtggagagcatattttttttaagcttggcgtggatccgatatcaactagatcttgaga

SEQ ID NO: 7069 - DNA, 170 bp, Artificial sequence
  Rasa1.223_Mga.93
  crRNA array
cgatttcttggctttatatatcttgtggaaaggacgaaacaccgtaatttctactaagtgtagattccatggagtatcgtgctcgtaatttctactaagtgtagatgagaaggctccccataatgtttttttaagcttggcgtggatccgatatcaactagatcttgaga

SEQ ID NO: 7070 - DNA, 170 bp, Artificial sequence
  Rasa1.223_Nf1.746
  crRNA array
cgatttcttggctttatatatcttgtggaaaggacgaaacaccgtaatttctactaagtgtagattccatggagtatcgtgctcgtaatttctactaagtgtagattaagcataatgatgatgccattttttaagcttggcgtggatccgatatcaactagatcttgaga

SEQ ID NO: 7071 - DNA, 170 bp, Artificial sequence
  Rasa1.223_Nf1.97
  crRNA array
cgatttcttggctttatatatcttgtggaaaggacgaaacaccgtaatttctactaagtgtagattccatggagtatcgtgctcgtaatttctactaagtgtagatagcccgctacatgctgatgcttttttaagcttggcgtggatccgatatcaactagatcttgaga

SEQ ID NO: 7072 - DNA, 170 bp, Artificial sequence
  Rasa1.223_Nf2.356
  crRNA array
cgatttcttggctttatatatcttgtggaaaggacgaaacaccgtaatttctactaagtgtagattccatggagtatcgtgctcgtaatttctactaagtgtagatcggagtcatctgatagagatttttttaagcttggcgtggatccgatatcaactagatcttgaga

SEQ ID NO: 7073 - DNA, 170 bp, Artificial sequence
  Rasa1.223_Nf2.768
  crRNA array
cgatttcttggctttatatatcttgtggaaaggacgaaacaccgtaatttctactaagtgtagattccatggagtatcgtgctcgtaatttctactaagtgtagatccgaagccccagtgtccggcttttttaagcttggcgtggatccgatatcaactagatcttgaga

SEQ ID NO: 7074 - DNA, 170 bp, Artificial sequence
  Rasa1.223_Notch1.1849
  crRNA array
cgatttcttggctttatatatcttgtggaaaggacgaaacaccgtaatttctactaagtgtagattccatggagtatcgtgctcgtaatttctactaagtgtagatctggcgggtgggcggcgctgttttttaagcttggcgtggatccgatatcaactagatcttgaga

SEQ ID NO: 7075 - DNA, 170 bp, Artificial sequence
  Rasa1.223_Notch1.649
  crRNA array
cgatttcttggctttatatatcttgtggaaaggacgaaacaccgtaatttctactaagtgtagattccatggagtatcgtgctcgtaatttctactaagtgtagattgggccaacgatgccaggacttttttaagcttggcgtggatccgatatcaactagatcttgaga

SEQ ID NO: 7076 - DNA, 170 bp, Artificial sequence
  Rasa1.223_Nsd1.70
  crRNA array
cgatttcttggctttatatatcttgtggaaaggacgaaacaccgtaatttctactaagtgtagattccatggagtatcgtgctcgtaatttctactaagtgtagatactggtgtggacgatgcagattttttaagcttggcgtggatccgatatcaactagatcttgaga

SEQ ID NO: 7077 - DNA, 170 bp, Artificial sequence
  Rasa1.223_Nsd1.90
  crRNA array
cgatttcttggctttatatatcttgtggaaaggacgaaacaccgtaatttctactaagtgtagattccatggagtatcgtgctcgtaatttctactaagtgtagataggagctaacggcaagaatgttttttaagcttggcgtggatccgatatcaactagatcttgaga

SEQ ID NO: 7078 - DNA, 170 bp, Artificial sequence
  Rasa1.223_Pbrm1.1236
  crRNA array
cgatttcttggctttatatatcttgtggaaaggacgaaacaccgtaatttctactaagtgtagattccatggagtatcgtgctcgtaatttctactaagtgtagatgccgataaaaccaacagccgttttttaagcttggcgtggatccgatatcaactagatcttgaga

SEQ ID NO: 7079 - DNA, 170 bp, Artificial sequence
  Rasa1.223_Pbrm1.969
  crRNA array
cgatttcttggctttatatatcttgtggaaaggacgaaacaccgtaatttctactaagtgtagattccatggagtatcgtgctcgtaatttctactaagtgtagatgagccctaatgaacagctcattttttaagcttggcgtggatccgatatcaactagatcttgaga

SEQ ID NO: 7080 - DNA, 170 bp, Artificial sequence
  Rasa1.223_Pik3r1.76
  crRNA array
cgatttcttggctttatatatcttgtggaaaggacgaaacaccgtaatttctactaagtgtagattccatggagtatcgtgctcgtaatttctactaagtgtagataaaacctatacggcccgcacttttttaagcttggcgtggatccgatatcaactagatcttgaga

SEQ ID NO: 7081 - DNA, 170 bp, Artificial sequence
  Rasa1.223_Pik3r1.77
  crRNA array
cgatttcttggctttatatatcttgtggaaaggacgaaacaccgtaatttctactaagtgtagattccatggagtatcgtgctcgtaatttctactaagtgtagataaacctatacggcccgcactttttttaagcttggcgtggatccgatatcaactagatcttgaga

SEQ ID NO: 7082 - DNA, 170 bp, Artificial sequence
  Rasa1.223_Pten.240
  crRNA array
cgatttcttggctttatatatcttgtggaaaggacgaaacaccgtaatttctactaagtgtagattccatggagtatcgtgctcgtaatttctactaagtgtagattgcatacgctatagctgcttttttttaagcttggcgtggatccgatatcaactagatcttgaga

SEQ ID NO: 7083 - DNA, 170 bp, Artificial sequence
  Rasa1.223_Pten.265
  crRNA array
cgatttcttggctttatatatcttgtggaaaggacgaaacaccgtaatttctactaagtgtagattccatggagtatcgtgctcgtaatttctactaagtgtagataagcgtggtgcgtgacgcacttttttaagcttggcgtggatccgatatcaactagatcttgaga

SEQ ID NO: 7084 - DNA, 170 bp, Artificial sequence
  Rasa1.223_Rb1.211
  crRNA array
cgatttcttggctttatatatcttgtggaaaggacgaaacaccgtaatttctactaagtgtagattccatggagtatcgtgctcgtaatttctactaagtgtagattctgacatgatcgggtacctttttttaagcttggcgtggatccgatatcaactagatcttgaga

SEQ ID NO: 7085 - DNA, 170 bp, Artificial sequence
  Rasa1.223_Rb1.394
  crRNA array
cgatttcttggctttatatatcttgtggaaaggacgaaacaccgtaatttctactaagtgtagattccatggagtatcgtgctcgtaatttctactaagtgtagatagaaatctcgaagcaggatcttttttaagcttggcgtggatccgatatcaactagatcttgaga

SEQ ID NO: 7086 - DNA, 170 bp, Artificial sequence
  Rasa1.223_Rbm10.5
  crRNA array
cgatttcttggctttatatatcttgtggaaaggacgaaacaccgtaatttctactaagtgtagattccatggagtatcgtgctcgtaatttctactaagtgtagatacgaaacctgaacccacacattttttaagcttggcgtggatccgatatcaactagatcttgaga

SEQ ID NO: 7087 - DNA, 170 bp, Artificial sequence
  Rasa1.223_Rbm10.6
  crRNA array
cgatttcttggctttatatatcttgtggaaaggacgaaacaccgtaatttctactaagtgtagattccatggagtatcgtgctcgtaatttctactaagtgtagatcgaaacctgaacccacacagttttttaagcttggcgtggatccgatatcaactagatcttgaga

SEQ ID NO: 7088 - DNA, 170 bp, Artificial sequence
  Rasa1.223_Rnf43.1920
  crRNA array
cgatttcttggctttatatatcttgtggaaaggacgaaacaccgtaatttctactaagtgtagattccatggagtatcgtgctcgtaatttctactaagtgtagatatccccgtgccgtggactccttttttaagcttggcgtggatccgatatcaactagatcttgaga

SEQ ID NO: 7089 - DNA, 170 bp, Artificial sequence
  Rasa1.223_Rnf43.39
  crRNA array
cgatttcttggctttatatatcttgtggaaaggacgaaacaccgtaatttctactaagtgtagattccatggagtatcgtgctcgtaatttctactaagtgtagatcaaggggatcactctgataattttttaagcttggcgtggatccgatatcaactagatcttgaga

SEQ ID NO: 7090 - DNA, 170 bp, Artificial sequence
  Rasa1.223_Runx1.204
  crRNA array
cgatttcttggctttatatatcttgtggaaaggacgaaacaccgtaatttctactaagtgtagattccatggagtatcgtgctcgtaatttctactaagtgtagattaaataagtccagccgttttttttttaagcttggcgtggatccgatatcaactagatcttgaga

SEQ ID NO: 7091 - DNA, 170 bp, Artificial sequence
  Rasa1.223_Runx1.81
  crRNA array
cgatttcttggctttatatatcttgtggaaaggacgaaacaccgtaatttctactaagtgtagattccatggagtatcgtgctcgtaatttctactaagtgtagataggacgcgtatgggaattttttttttaagcttggcgtggatccgatatcaactagatcttgaga

SEQ ID NO: 7092 - DNA, 170 bp, Artificial sequence
  Rasa1.223_Setd2.143
  crRNA array
cgatttcttggctttatatatcttgtggaaaggacgaaacaccgtaatttctactaagtgtagattccatggagtatcgtgctcgtaatttctactaagtgtagatgcacaaccacaacagactggttttttaagcttggcgtggatccgatatcaactagatcttgaga

SEQ ID NO: 7093 - DNA, 170 bp, Artificial sequence
  Rasa1.223_Setd2.508
  crRNA array
cgatttcttggctttatatatcttgtggaaaggacgaaacaccgtaatttctactaagtgtagattccatggagtatcgtgctcgtaatttctactaagtgtagattacgatcccgagcacccgacttttttaagcttggcgtggatccgatatcaactagatcttgaga

SEQ ID NO: 7094 - DNA, 170 bp, Artificial sequence
  Rasa1.223_Smad4.3038
  crRNA array
cgatttcttggctttatatatcttgtggaaaggacgaaacaccgtaatttctactaagtgtagattccatggagtatcgtgctcgtaatttctactaagtgtagatatctgcggcagtgtcaccggttttttaagcttggcgtggatccgatatcaactagatcttgaga

SEQ ID NO: 7095 - DNA, 170 bp, Artificial sequence
  Rasa1.223_Smad4.39
  crRNA array
cgatttcttggctttatatatcttgtggaaaggacgaaacaccgtaatttctactaagtgtagattccatggagtatcgtgctcgtaatttctactaagtgtagatagtcaaacgcatactgacaattttttaagcttggcgtggatccgatatcaactagatcttgaga

SEQ ID NO: 7096 - DNA, 170 bp, Artificial sequence
  Rasa1.223_Stag2.1409
  crRNA array
cgatttcttggctttatatatcttgtggaaaggacgaaacaccgtaatttctactaagtgtagattccatggagtatcgtgctcgtaatttctactaagtgtagatgctaataactgcggaagggcttttttaagcttggcgtggatccgatatcaactagatcttgaga

SEQ ID NO: 7097 - DNA, 170 bp, Artificial sequence
  Rasa1.223_Stag2.4401
  crRNA array
cgatttcttggctttatatatcttgtggaaaggacgaaacaccgtaatttctactaagtgtagattccatggagtatcgtgctcgtaatttctactaagtgtagattaatcgtccagtggtgtatattttttaagcttggcgtggatccgatatcaactagatcttgaga

SEQ ID NO: 7098 - DNA, 170 bp, Artificial sequence
  Rasa1.223_Tbl1xr1.1
  crRNA array
cgatttcttggctttatatatcttgtggaaaggacgaaacaccgtaatttctactaagtgtagattccatggagtatcgtgctcgtaatttctactaagtgtagatggatgcgcatactggtgaagttttttaagcttggcgtggatccgatatcaactagatcttgaga

SEQ ID NO: 7099 - DNA, 170 bp, Artificial sequence
  Rasa1.223_Tbl1xr1.83
  crRNA array
cgatttcttggctttatatatcttgtggaaaggacgaaacaccgtaatttctactaagtgtagattccatggagtatcgtgctcgtaatttctactaagtgtagatatggtcgacccatcgagtctttttttaagcttggcgtggatccgatatcaactagatcttgaga

SEQ ID NO: 7100 - DNA, 170 bp, Artificial sequence
  Rasa1.223_Tgfbr2.290
  crRNA array
cgatttcttggctttatatatcttgtggaaaggacgaaacaccgtaatttctactaagtgtagattccatggagtatcgtgctcgtaatttctactaagtgtagatcctctcggcgcccgggtaaattttttaagcttggcgtggatccgatatcaactagatcttgaga

SEQ ID NO: 7101 - DNA, 170 bp, Artificial sequence
  Rasa1.223_Tgfbr2.292
  crRNA array
cgatttcttggctttatatatcttgtggaaaggacgaaacaccgtaatttctactaagtgtagattccatggagtatcgtgctcgtaatttctactaagtgtagatcccgggcgccgagagggaaattttttaagcttggcgtggatccgatatcaactagatcttgaga

SEQ ID NO: 7102 - DNA, 170 bp, Artificial sequence
  Rasa1.223_Trp53.4
  crRNA array
cgatttcttggctttatatatcttgtggaaaggacgaaacaccgtaatttctactaagtgtagattccatggagtatcgtgctcgtaatttctactaagtgtagatccctgaactgcccccagggattttttaagcttggcgtggatccgatatcaactagatcttgaga

SEQ ID NO: 7103 - DNA, 170 bp, Artificial sequence
  Rasa1.223_Trp53.528
  crRNA array
cgatttcttggctttatatatcttgtggaaaggacgaaacaccgtaatttctactaagtgtagattccatggagtatcgtgctcgtaatttctactaagtgtagatgctgggccagcagagacctgttttttaagcttggcgtggatccgatatcaactagatcttgaga

SEQ ID NO: 7104 - DNA, 170 bp, Artificial sequence
  Rasa1.223_Vhl.1
  crRNA array
cgatttcttggctttatatatcttgtggaaaggacgaaacaccgtaatttctactaagtgtagattccatggagtatcgtgctcgtaatttctactaagtgtagatagggctcccggcggccatttttttttaagcttggcgtggatccgatatcaactagatcttgaga

SEQ ID NO: 7105 - DNA, 170 bp, Artificial sequence
  Rasa1.223_Vhl.151
  crRNA array
cgatttcttggctttatatatcttgtggaaaggacgaaacaccgtaatttctactaagtgtagattccatggagtatcgtgctcgtaatttctactaagtgtagattagagcactcacccgagggattttttaagcttggcgtggatccgatatcaactagatcttgaga

SEQ ID NO: 7106 - DNA, 170 bp, Artificial sequence
  Rasa1.223_Zc3h13.1387
  crRNA array
cgatttcttggctttatatatcttgtggaaaggacgaaacaccgtaatttctactaagtgtagattccatggagtatcgtgctcgtaatttctactaagtgtagatgtgacgccggtcatgtgactttttttaagcttggcgtggatccgatatcaactagatcttgaga

SEQ ID NO: 7107 - DNA, 170 bp, Artificial sequence
  Rasa1.223_Zc3h13.1777
  crRNA array
cgatttcttggctttatatatcttgtggaaaggacgaaacaccgtaatttctactaagtgtagattccatggagtatcgtgctcgtaatttctactaagtgtagatgatgctgccagtgtagcggcttttttaagcttggcgtggatccgatatcaactagatcttgaga

SEQ ID NO: 7108 - DNA, 170 bp, Artificial sequence
  Rb1.211_Acvr2a.155
  crRNA array
cgatttcttggctttatatatcttgtggaaaggacgaaacaccgtaatttctactaagtgtagattctgacatgatcgggtaccttaatttctactaagtgtagatggacctggctaatcaagtatttttttaagcttggcgtggatccgatatcaactagatcttgaga

SEQ ID NO: 7109 - DNA, 170 bp, Artificial sequence
  Rb1.211_Acvr2a.70
  crRNA array
cgatttcttggctttatatatcttgtggaaaggacgaaacaccgtaatttctactaagtgtagattctgacatgatcgggtaccttaatttctactaagtgtagatcccgaggcgccggagaagccttttttaagcttggcgtggatccgatatcaactagatcttgaga

SEQ ID NO: 7110 - DNA, 170 bp, Artificial sequence
  Rb1.211_Apc.21
  crRNA array
cgatttcttggctttatatatcttgtggaaaggacgaaacaccgtaatttctactaagtgtagattctgacatgatcgggtaccttaatttctactaagtgtagatgtgatccacacgtgtagctgttttttaagcttggcgtggatccgatatcaactagatcttgaga

SEQ ID NO: 7111 - DNA, 170 bp, Artificial sequence
  Rb1.211_Apc.867
  crRNA array
cgatttcttggctttatatatcttgtggaaaggacgaaacaccgtaatttctactaagtgtagattctgacatgatcgggtaccttaatttctactaagtgtagatcagtcccaggcggcggaagcttttttaagcttggcgtggatccgatatcaactagatcttgaga

SEQ ID NO: 7112 - DNA, 170 bp, Artificial sequence
  Rb1.211_Arid1a.2
  crRNA array
cgatttcttggctttatatatcttgtggaaaggacgaaacaccgtaatttctactaagtgtagattctgacatgatcgggtaccttaatttctactaagtgtagatcccgcgcccccgtcctggggttttttaagcttggcgtggatccgatatcaactagatcttgaga

SEQ ID NO: 7113 - DNA, 170 bp, Artificial sequence
  Rb1.211_Arid1a.5
  crRNA array
cgatttcttggctttatatatcttgtggaaaggacgaaacaccgtaatttctactaagtgtagattctgacatgatcgggtaccttaatttctactaagtgtagatcccgcgctcggccgctgccgttttttaagcttggcgtggatccgatatcaactagatcttgaga

SEQ ID NO: 7114 - DNA, 170 bp, Artificial sequence
  Rb1.211_Arid2.166
  crRNA array
cgatttcttggctttatatatcttgtggaaaggacgaaacaccgtaatttctactaagtgtagattctgacatgatcgggtaccttaatttctactaagtgtagataaccgcgatctgggttttttttttttaagcttggcgtggatccgatatcaactagatcttgaga

SEQ ID NO: 7115 - DNA, 170 bp, Artificial sequence
  Rb1.211_Arid2.172
  crRNA array
cgatttcttggctttatatatcttgtggaaaggacgaaacaccgtaatttctactaagtgtagattctgacatgatcgggtaccttaatttctactaagtgtagatctggacgagctgcggcagttttttttaagcttggcgtggatccgatatcaactagatcttgaga

SEQ ID NO: 7116 - DNA, 170 bp, Artificial sequence
  Rb1.211_Atm.120
  crRNA array
cgatttcttggctttatatatcttgtggaaaggacgaaacaccgtaatttctactaagtgtagattctgacatgatcgggtaccttaatttctactaagtgtagatgacaggtagtcggcagctaattttttaagcttggcgtggatccgatatcaactagatcttgaga

SEQ ID NO: 7117 - DNA, 170 bp, Artificial sequence
  Rb1.211_Atm.997
  crRNA array
cgatttcttggctttatatatcttgtggaaaggacgaaacaccgtaatttctactaagtgtagattctgacatgatcgggtaccttaatttctactaagtgtagatgagaaagtctccgaatcgttttttttaagcttggcgtggatccgatatcaactagatcttgaga

SEQ ID NO: 7118 - DNA, 170 bp, Artificial sequence
  Rb1.211_Atrx.249
  crRNA array
cgatttcttggctttatatatcttgtggaaaggacgaaacaccgtaatttctactaagtgtagattctgacatgatcgggtaccttaatttctactaagtgtagattagccagtcgctcatatctcttttttaagcttggcgtggatccgatatcaactagatcttgaga

SEQ ID NO: 7119 - DNA, 170 bp, Artificial sequence
  Rb1.211_Atrx.251
  crRNA array
cgatttcttggctttatatatcttgtggaaaggacgaaacaccgtaatttctactaagtgtagattctgacatgatcgggtaccttaatttctactaagtgtagatgccagtcgctcatatctctgttttttaagcttggcgtggatccgatatcaactagatcttgaga

SEQ ID NO: 7120 - DNA, 170 bp, Artificial sequence
  Rb1.211_Bcor.203
  crRNA array
cgatttcttggctttatatatcttgtggaaaggacgaaacaccgtaatttctactaagtgtagattctgacatgatcgggtaccttaatttctactaagtgtagatccccggagcggagtccaggcttttttaagcttggcgtggatccgatatcaactagatcttgaga

SEQ ID NO: 7121 - DNA, 170 bp, Artificial sequence
  Rb1.211_Bcor.475
  crRNA array
cgatttcttggctttatatatcttgtggaaaggacgaaacaccgtaatttctactaagtgtagattctgacatgatcgggtaccttaatttctactaagtgtagattgcaacccctctgtatgggattttttaagcttggcgtggatccgatatcaactagatcttgaga

SEQ ID NO: 7122 - DNA, 170 bp, Artificial sequence
  Rb1.211_Brca1.112
  crRNA array
cgatttcttggctttatatatcttgtggaaaggacgaaacaccgtaatttctactaagtgtagattctgacatgatcgggtaccttaatttctactaagtgtagatctagacgctctgtggagactttttttaagcttggcgtggatccgatatcaactagatcttgaga

SEQ ID NO: 7123 - DNA, 170 bp, Artificial sequence
  Rb1.211_Brca1.53
  crRNA array
cgatttcttggctttatatatcttgtggaaaggacgaaacaccgtaatttctactaagtgtagattctgacatgatcgggtaccttaatttctactaagtgtagataatgaggaggcgtcgatcatttttttaagcttggcgtggatccgatatcaactagatcttgaga

SEQ ID NO: 7124 - DNA, 170 bp, Artificial sequence
  Rb1.211_Casp8.45
  crRNA array
cgatttcttggctttatatatcttgtggaaaggacgaaacaccgtaatttctactaagtgtagattctgacatgatcgggtaccttaatttctactaagtgtagatctaccgagatcctgtgaatgttttttaagcttggcgtggatccgatatcaactagatcttgaga

SEQ ID NO: 7125 - DNA, 170 bp, Artificial sequence
  Rb1.211_Casp8.54
  crRNA array
cgatttcttggctttatatatcttgtggaaaggacgaaacaccgtaatttctactaagtgtagattctgacatgatcgggtaccttaatttctactaagtgtagatcagtgcagtcgtcgtaagatttttttaagcttggcgtggatccgatatcaactagatcttgaga

SEQ ID NO: 7126 - DNA, 170 bp, Artificial sequence
  Rb1.211_Cbwd1.84
  crRNA array
cgatttcttggctttatatatcttgtggaaaggacgaaacaccgtaatttctactaagtgtagattctgacatgatcgggtaccttaatttctactaagtgtagatcacagcaggtaacatgccgcttttttaagcttggcgtggatccgatatcaactagatcttgaga

SEQ ID NO: 7127 - DNA, 170 bp, Artificial sequence
  Rb1.211_Cbwd1.85
  crRNA array
cgatttcttggctttatatatcttgtggaaaggacgaaacaccgtaatttctactaagtgtagattctgacatgatcgggtaccttaatttctactaagtgtagatacagcaggtaacatgccgccttttttaagcttggcgtggatccgatatcaactagatcttgaga

SEQ ID NO: 7128 - DNA, 170 bp, Artificial sequence
  Rb1.211_Cdh1.387
  crRNA array
cgatttcttggctttatatatcttgtggaaaggacgaaacaccgtaatttctactaagtgtagattctgacatgatcgggtaccttaatttctactaagtgtagatctcggcgtctgccgggtccgttttttaagcttggcgtggatccgatatcaactagatcttgaga

SEQ ID NO: 7129 - DNA, 170 bp, Artificial sequence
  Rb1.211_Cdh1.58
  crRNA array
cgatttcttggctttatatatcttgtggaaaggacgaaacaccgtaatttctactaagtgtagattctgacatgatcgggtaccttaatttctactaagtgtagatctcgtccgcgcccgggactcttttttaagcttggcgtggatccgatatcaactagatcttgaga

SEQ ID NO: 7130 - DNA, 170 bp, Artificial sequence
  Rb1.211_Cdkn2a.647
  crRNA array
cgatttcttggctttatatatcttgtggaaaggacgaaacaccgtaatttctactaagtgtagattctgacatgatcgggtaccttaatttctactaagtgtagatgcaatcacgggagggagcagttttttaagcttggcgtggatccgatatcaactagatcttgaga

SEQ ID NO: 7131 - DNA, 170 bp, Artificial sequence
  Rb1.211_Cdkn2a.648
  crRNA array
cgatttcttggctttatatatcttgtggaaaggacgaaacaccgtaatttctactaagtgtagattctgacatgatcgggtaccttaatttctactaagtgtagatcaatcacgggagggagcagattttttaagcttggcgtggatccgatatcaactagatcttgaga

SEQ ID NO: 7132 - DNA, 170 bp, Artificial sequence
  Rb1.211_Cic.162
  crRNA array
cgatttcttggctttatatatcttgtggaaaggacgaaacaccgtaatttctactaagtgtagattctgacatgatcgggtaccttaatttctactaagtgtagatcgcaggcgcgcccggcggagttttttaagcttggcgtggatccgatatcaactagatcttgaga

SEQ ID NO: 7133 - DNA, 170 bp, Artificial sequence
  Rb1.211_Cic.164
  crRNA array
cgatttcttggctttatatatcttgtggaaaggacgaaacaccgtaatttctactaagtgtagattctgacatgatcgggtaccttaatttctactaagtgtagatcgggccctgggccggcggctttttttaagcttggcgtggatccgatatcaactagatcttgaga

SEQ ID NO: 7134 - DNA, 170 bp, Artificial sequence
  Rb1.211_Ctcf.229
  crRNA array
cgatttcttggctttatatatcttgtggaaaggacgaaacaccgtaatttctactaagtgtagattctgacatgatcgggtaccttaatttctactaagtgtagatggctggtggctgatagtctgttttttaagcttggcgtggatccgatatcaactagatcttgaga

SEQ ID NO: 7135 - DNA, 170 bp, Artificial sequence
  Rb1.211_Ctcf.809
  crRNA array
cgatttcttggctttatatatcttgtggaaaggacgaaacaccgtaatttctactaagtgtagattctgacatgatcgggtaccttaatttctactaagtgtagataagcgctatcatgatcccaattttttaagcttggcgtggatccgatatcaactagatcttgaga

SEQ ID NO: 7136 - DNA, 170 bp, Artificial sequence
  Rb1.211_Elf3.826
  crRNA array
cgatttcttggctttatatatcttgtggaaaggacgaaacaccgtaatttctactaagtgtagattctgacatgatcgggtaccttaatttctactaagtgtagattccgagacatcctaatccacttttttaagcttggcgtggatccgatatcaactagatcttgaga

SEQ ID NO: 7137 - DNA, 170 bp, Artificial sequence
  Rb1.211_Elf3.983
  crRNA array
cgatttcttggctttatatatcttgtggaaaggacgaaacaccgtaatttctactaagtgtagattctgacatgatcgggtaccttaatttctactaagtgtagattaggccccctaactggaccattttttaagcttggcgtggatccgatatcaactagatcttgaga

SEQ ID NO: 7138 - DNA, 170 bp, Artificial sequence
  Rb1.211_Ep300.310
  crRNA array
cgatttcttggctttatatatcttgtggaaaggacgaaacaccgtaatttctactaagtgtagattctgacatgatcgggtaccttaatttctactaagtgtagatatggtacgacagtgaggaagttttttaagcttggcgtggatccgatatcaactagatcttgaga

SEQ ID NO: 7139 - DNA, 170 bp, Artificial sequence
  Rb1.211_Ep300.587
  crRNA array
cgatttcttggctttatatatcttgtggaaaggacgaaacaccgtaatttctactaagtgtagattctgacatgatcgggtaccttaatttctactaagtgtagatcgccccggggcccccaaccattttttaagcttggcgtggatccgatatcaactagatcttgaga

SEQ ID NO: 7140 - DNA, 170 bp, Artificial sequence
  Rb1.211_Epha2.126
  crRNA array
cgatttcttggctttatatatcttgtggaaaggacgaaacaccgtaatttctactaagtgtagattctgacatgatcgggtaccttaatttctactaagtgtagatcctgtgccgccgcggccgccttttttaagcttggcgtggatccgatatcaactagatcttgaga

SEQ ID NO: 7141 - DNA, 170 bp, Artificial sequence
  Rb1.211_Epha2.5
  crRNA array
cgatttcttggctttatatatcttgtggaaaggacgaaacaccgtaatttctactaagtgtagattctgacatgatcgggtaccttaatttctactaagtgtagatcatgagctggcgccacccggttttttaagcttggcgtggatccgatatcaactagatcttgaga

SEQ ID NO: 7142 - DNA, 170 bp, Artificial sequence
  Rb1.211_Fat1.105
  crRNA array
cgatttcttggctttatatatcttgtggaaaggacgaaacaccgtaatttctactaagtgtagattctgacatgatcgggtaccttaatttctactaagtgtagataactcgaggtgacaacaagtttttttaagcttggcgtggatccgatatcaactagatcttgaga

SEQ ID NO: 7143 - DNA, 170 bp, Artificial sequence
  Rb1.211_Fat1.122
  crRNA array
cgatttcttggctttatatatcttgtggaaaggacgaaacaccgtaatttctactaagtgtagattctgacatgatcgggtaccttaatttctactaagtgtagatccatcgacatggaaacgggattttttaagcttggcgtggatccgatatcaactagatcttgaga

SEQ ID NO: 7144 - DNA, 170 bp, Artificial sequence
  Rb1.211_Fbxw7.21
  crRNA array
cgatttcttggctttatatatcttgtggaaaggacgaaacaccgtaatttctactaagtgtagattctgacatgatcgggtaccttaatttctactaagtgtagattaatgtgccgtagaaacccattttttaagcttggcgtggatccgatatcaactagatcttgaga

SEQ ID NO: 7145 - DNA, 170 bp, Artificial sequence
  Rb1.211_Fbxw7.23
  crRNA array
cgatttcttggctttatatatcttgtggaaaggacgaaacaccgtaatttctactaagtgtagattctgacatgatcgggtaccttaatttctactaagtgtagatatgtgccgtagaaacccatattttttaagcttggcgtggatccgatatcaactagatcttgaga

SEQ ID NO: 7146 - DNA, 170 bp, Artificial sequence
  Rb1.211_Gata3.34
  crRNA array
cgatttcttggctttatatatcttgtggaaaggacgaaacaccgtaatttctactaagtgtagattctgacatgatcgggtaccttaatttctactaagtgtagatctaaactatcccgcaaagatttttttaagcttggcgtggatccgatatcaactagatcttgaga

SEQ ID NO: 7147 - DNA, 170 bp, Artificial sequence
  Rb1.211_Gata3.47
  crRNA array
cgatttcttggctttatatatcttgtggaaaggacgaaacaccgtaatttctactaagtgtagattctgacatgatcgggtaccttaatttctactaagtgtagatcgtagtaggacgggacgtggttttttaagcttggcgtggatccgatatcaactagatcttgaga

SEQ ID NO: 7148 - DNA, 170 bp, Artificial sequence
  Rb1.211_H2-Q2.1
  crRNA array
cgatttcttggctttatatatcttgtggaaaggacgaaacaccgtaatttctactaagtgtagattctgacatgatcgggtaccttaatttctactaagtgtagatagggcggccaccaacagcagttttttaagcttggcgtggatccgatatcaactagatcttgaga

SEQ ID NO: 7149 - DNA, 170 bp, Artificial sequence
  Rb1.211_H2-Q2.2
  crRNA array
cgatttcttggctttatatatcttgtggaaaggacgaaacaccgtaatttctactaagtgtagattctgacatgatcgggtaccttaatttctactaagtgtagattaacctgcgcccgctgctgattttttaagcttggcgtggatccgatatcaactagatcttgaga

SEQ ID NO: 7150 - DNA, 170 bp, Artificial sequence
  Rb1.211_Kdm5c.1878
  crRNA array
cgatttcttggctttatatatcttgtggaaaggacgaaacaccgtaatttctactaagtgtagattctgacatgatcgggtaccttaatttctactaagtgtagatagagcacggcacccgcccccttttttaagcttggcgtggatccgatatcaactagatcttgaga

SEQ ID NO: 7151 - DNA, 170 bp, Artificial sequence
  Rb1.211_Kdm5c.1879
  crRNA array
cgatttcttggctttatatatcttgtggaaaggacgaaacaccgtaatttctactaagtgtagattctgacatgatcgggtaccttaatttctactaagtgtagatgagcacggcacccgccccccttttttaagcttggcgtggatccgatatcaactagatcttgaga

SEQ ID NO: 7152 - DNA, 170 bp, Artificial sequence
  Rb1.211_Kdm6a.56
  crRNA array
cgatttcttggctttatatatcttgtggaaaggacgaaacaccgtaatttctactaagtgtagattctgacatgatcgggtaccttaatttctactaagtgtagattcgctgccgcctctcgcggcttttttaagcttggcgtggatccgatatcaactagatcttgaga

SEQ ID NO: 7153 - DNA, 170 bp, Artificial sequence
  Rb1.211_Kdm6a.57
  crRNA array
cgatttcttggctttatatatcttgtggaaaggacgaaacaccgtaatttctactaagtgtagattctgacatgatcgggtaccttaatttctactaagtgtagatcgctgccgcctctcgcggcattttttaagcttggcgtggatccgatatcaactagatcttgaga

SEQ ID NO: 7154 - DNA, 170 bp, Artificial sequence
  Rb1.211_Kmt2b.265
  crRNA array
cgatttcttggctttatatatcttgtggaaaggacgaaacaccgtaatttctactaagtgtagattctgacatgatcgggtaccttaatttctactaagtgtagatccccaagtgaagcccacctgttttttaagcttggcgtggatccgatatcaactagatcttgaga

SEQ ID NO: 7155 - DNA, 170 bp, Artificial sequence
  Rb1.211_Kmt2b.298
  crRNA array
cgatttcttggctttatatatcttgtggaaaggacgaaacaccgtaatttctactaagtgtagattctgacatgatcgggtaccttaatttctactaagtgtagattccggcagggaccggctggcttttttaagcttggcgtggatccgatatcaactagatcttgaga

SEQ ID NO: 7156 - DNA, 170 bp, Artificial sequence
  Rb1.211_Kmt2c.1962
  crRNA array
cgatttcttggctttatatatcttgtggaaaggacgaaacaccgtaatttctactaagtgtagattctgacatgatcgggtaccttaatttctactaagtgtagatgtgacgatctgtgccacaagttttttaagcttggcgtggatccgatatcaactagatcttgaga

SEQ ID NO: 7157 - DNA, 170 bp, Artificial sequence
  Rb1.211_Kmt2c.2236
  crRNA array
cgatttcttggctttatatatcttgtggaaaggacgaaacaccgtaatttctactaagtgtagattctgacatgatcgggtaccttaatttctactaagtgtagatactcgacctccacctccctattttttaagcttggcgtggatccgatatcaactagatcttgaga

SEQ ID NO: 7158 - DNA, 170 bp, Artificial sequence
  Rb1.211_Kmt2d.316
  crRNA array
cgatttcttggctttatatatcttgtggaaaggacgaaacaccgtaatttctactaagtgtagattctgacatgatcgggtaccttaatttctactaagtgtagatactccaggccacccaggtggttttttaagcttggcgtggatccgatatcaactagatcttgaga

SEQ ID NO: 7159 - DNA, 170 bp, Artificial sequence
  Rb1.211_Kmt2d.416
  crRNA array
cgatttcttggctttatatatcttgtggaaaggacgaaacaccgtaatttctactaagtgtagattctgacatgatcgggtaccttaatttctactaagtgtagattaaacccccgggggaagggtttttttaagcttggcgtggatccgatatcaactagatcttgaga

SEQ ID NO: 7160 - DNA, 170 bp, Artificial sequence
  Rb1.211_Map2k4.119
  crRNA array
cgatttcttggctttatatatcttgtggaaaggacgaaacaccgtaatttctactaagtgtagattctgacatgatcgggtaccttaatttctactaagtgtagattgctgtgtgggcggccacatttttttaagcttggcgtggatccgatatcaactagatcttgaga

SEQ ID NO: 7161 - DNA, 170 bp, Artificial sequence
  Rb1.211_Map2k4.1261
  crRNA array
cgatttcttggctttatatatcttgtggaaaggacgaaacaccgtaatttctactaagtgtagattctgacatgatcgggtaccttaatttctactaagtgtagatgatgtagtaatgcggagtagttttttaagcttggcgtggatccgatatcaactagatcttgaga

SEQ ID NO: 7162 - DNA, 170 bp, Artificial sequence
  Rb1.211_Map3k1.235
  crRNA array
cgatttcttggctttatatatcttgtggaaaggacgaaacaccgtaatttctactaagtgtagattctgacatgatcgggtaccttaatttctactaagtgtagataaaacgctactgatcgatcgttttttaagcttggcgtggatccgatatcaactagatcttgaga

SEQ ID NO: 7163 - DNA, 170 bp, Artificial sequence
  Rb1.211_Map3k1.3838
  crRNA array
cgatttcttggctttatatatcttgtggaaaggacgaaacaccgtaatttctactaagtgtagattctgacatgatcgggtaccttaatttctactaagtgtagatccaacaacagggccccactattttttaagcttggcgtggatccgatatcaactagatcttgaga

SEQ ID NO: 7164 - DNA, 170 bp, Artificial sequence
  Rb1.211_Mga.1655
  crRNA array
cgatttcttggctttatatatcttgtggaaaggacgaaacaccgtaatttctactaagtgtagattctgacatgatcgggtaccttaatttctactaagtgtagatcgagaagtggagagcatattttttttaagcttggcgtggatccgatatcaactagatcttgaga

SEQ ID NO: 7165 - DNA, 170 bp, Artificial sequence
  Rb1.211_Mga.93
  crRNA array
cgatttcttggctttatatatcttgtggaaaggacgaaacaccgtaatttctactaagtgtagattctgacatgatcgggtaccttaatttctactaagtgtagatgagaaggctccccataatgtttttttaagcttggcgtggatccgatatcaactagatcttgaga

SEQ ID NO: 7166 - DNA, 170 bp, Artificial sequence
  Rb1.211_Nf1.746
  crRNA array
cgatttcttggctttatatatcttgtggaaaggacgaaacaccgtaatttctactaagtgtagattctgacatgatcgggtaccttaatttctactaagtgtagattaagcataatgatgatgccattttttaagcttggcgtggatccgatatcaactagatcttgaga

SEQ ID NO: 7167 - DNA, 170 bp, Artificial sequence
  Rb1.211_Nf1.97
  crRNA array
cgatttcttggctttatatatcttgtggaaaggacgaaacaccgtaatttctactaagtgtagattctgacatgatcgggtaccttaatttctactaagtgtagatagcccgctacatgctgatgcttttttaagcttggcgtggatccgatatcaactagatcttgaga

SEQ ID NO: 7168 - DNA, 170 bp, Artificial sequence
  Rb1.211_Nf2.356
  crRNA array
cgatttcttggctttatatatcttgtggaaaggacgaaacaccgtaatttctactaagtgtagattctgacatgatcgggtaccttaatttctactaagtgtagatcggagtcatctgatagagatttttttaagcttggcgtggatccgatatcaactagatcttgaga

SEQ ID NO: 7169 - DNA, 170 bp, Artificial sequence
  Rb1.211_Nf2.768
  crRNA array
cgatttcttggctttatatatcttgtggaaaggacgaaacaccgtaatttctactaagtgtagattctgacatgatcgggtaccttaatttctactaagtgtagatccgaagccccagtgtccggcttttttaagcttggcgtggatccgatatcaactagatcttgaga

SEQ ID NO: 7170 - DNA, 170 bp, Artificial sequence
  Rb1.211_Notch1.1849
  crRNA array
cgatttcttggctttatatatcttgtggaaaggacgaaacaccgtaatttctactaagtgtagattctgacatgatcgggtaccttaatttctactaagtgtagatctggcgggtgggcggcgctgttttttaagcttggcgtggatccgatatcaactagatcttgaga

SEQ ID NO: 7171 - DNA, 170 bp, Artificial sequence
  Rb1.211_Notch1.649
  crRNA array
cgatttcttggctttatatatcttgtggaaaggacgaaacaccgtaatttctactaagtgtagattctgacatgatcgggtaccttaatttctactaagtgtagattgggccaacgatgccaggacttttttaagcttggcgtggatccgatatcaactagatcttgaga

SEQ ID NO: 7172 - DNA, 170 bp, Artificial sequence
  Rb1.211_Nsd1.70
  crRNA array
cgatttcttggctttatatatcttgtggaaaggacgaaacaccgtaatttctactaagtgtagattctgacatgatcgggtaccttaatttctactaagtgtagatactggtgtggacgatgcagattttttaagcttggcgtggatccgatatcaactagatcttgaga

SEQ ID NO: 7173 - DNA, 170 bp, Artificial sequence
  Rb1.211_Nsd1.90
  crRNA array
cgatttcttggctttatatatcttgtggaaaggacgaaacaccgtaatttctactaagtgtagattctgacatgatcgggtaccttaatttctactaagtgtagataggagctaacggcaagaatgttttttaagcttggcgtggatccgatatcaactagatcttgaga

SEQ ID NO: 7174 - DNA, 170 bp, Artificial sequence
  Rb1.211_Pbrm1.1236
  crRNA array
cgatttcttggctttatatatcttgtggaaaggacgaaacaccgtaatttctactaagtgtagattctgacatgatcgggtaccttaatttctactaagtgtagatgccgataaaaccaacagccgttttttaagcttggcgtggatccgatatcaactagatcttgaga

SEQ ID NO: 7175 - DNA, 170 bp, Artificial sequence
  Rb1.211_Pbrm1.969
  crRNA array
cgatttcttggctttatatatcttgtggaaaggacgaaacaccgtaatttctactaagtgtagattctgacatgatcgggtaccttaatttctactaagtgtagatgagccctaatgaacagctcattttttaagcttggcgtggatccgatatcaactagatcttgaga

SEQ ID NO: 7176 - DNA, 170 bp, Artificial sequence
  Rb1.211_Pik3r1.76
  crRNA array
cgatttcttggctttatatatcttgtggaaaggacgaaacaccgtaatttctactaagtgtagattctgacatgatcgggtaccttaatttctactaagtgtagataaaacctatacggcccgcacttttttaagcttggcgtggatccgatatcaactagatcttgaga

SEQ ID NO: 7177 - DNA, 170 bp, Artificial sequence
  Rb1.211_Pik3r1.77
  crRNA array
cgatttcttggctttatatatcttgtggaaaggacgaaacaccgtaatttctactaagtgtagattctgacatgatcgggtaccttaatttctactaagtgtagataaacctatacggcccgcactttttttaagcttggcgtggatccgatatcaactagatcttgaga

SEQ ID NO: 7178 - DNA, 170 bp, Artificial sequence
  Rb1.211_Pten.240
  crRNA array
cgatttcttggctttatatatcttgtggaaaggacgaaacaccgtaatttctactaagtgtagattctgacatgatcgggtaccttaatttctactaagtgtagattgcatacgctatagctgcttttttttaagcttggcgtggatccgatatcaactagatcttgaga

SEQ ID NO: 7179 - DNA, 170 bp, Artificial sequence
  Rb1.211_Pten.265
  crRNA array
cgatttcttggctttatatatcttgtggaaaggacgaaacaccgtaatttctactaagtgtagattctgacatgatcgggtaccttaatttctactaagtgtagataagcgtggtgcgtgacgcacttttttaagcttggcgtggatccgatatcaactagatcttgaga

SEQ ID NO: 7180 - DNA, 170 bp, Artificial sequence
  Rb1.211_Rasa1.1478
  crRNA array
cgatttcttggctttatatatcttgtggaaaggacgaaacaccgtaatttctactaagtgtagattctgacatgatcgggtaccttaatttctactaagtgtagatcgataatggtctatgatgtcttttttaagcttggcgtggatccgatatcaactagatcttgaga

SEQ ID NO: 7181 - DNA, 170 bp, Artificial sequence
  Rb1.211_Rasa1.223
  crRNA array
cgatttcttggctttatatatcttgtggaaaggacgaaacaccgtaatttctactaagtgtagattctgacatgatcgggtaccttaatttctactaagtgtagattccatggagtatcgtgctcgttttttaagcttggcgtggatccgatatcaactagatcttgaga

SEQ ID NO: 7182 - DNA, 170 bp, Artificial sequence
  Rb1.211_Rbm10.5
  crRNA array
cgatttcttggctttatatatcttgtggaaaggacgaaacaccgtaatttctactaagtgtagattctgacatgatcgggtaccttaatttctactaagtgtagatacgaaacctgaacccacacattttttaagcttggcgtggatccgatatcaactagatcttgaga

SEQ ID NO: 7183 - DNA, 170 bp, Artificial sequence
  Rb1.211_Rbm10.6
  crRNA array
cgatttcttggctttatatatcttgtggaaaggacgaaacaccgtaatttctactaagtgtagattctgacatgatcgggtaccttaatttctactaagtgtagatcgaaacctgaacccacacagttttttaagcttggcgtggatccgatatcaactagatcttgaga

SEQ ID NO: 7184 - DNA, 170 bp, Artificial sequence
  Rb1.211_Rnf43.1920
  crRNA array
cgatttcttggctttatatatcttgtggaaaggacgaaacaccgtaatttctactaagtgtagattctgacatgatcgggtaccttaatttctactaagtgtagatatccccgtgccgtggactccttttttaagcttggcgtggatccgatatcaactagatcttgaga

SEQ ID NO: 7185 - DNA, 170 bp, Artificial sequence
  Rb1.211_Rnf43.39
  crRNA array
cgatttcttggctttatatatcttgtggaaaggacgaaacaccgtaatttctactaagtgtagattctgacatgatcgggtaccttaatttctactaagtgtagatcaaggggatcactctgataattttttaagcttggcgtggatccgatatcaactagatcttgaga

SEQ ID NO: 7186 - DNA, 170 bp, Artificial sequence
  Rb1.211_Runx1.204
  crRNA array
cgatttcttggctttatatatcttgtggaaaggacgaaacaccgtaatttctactaagtgtagattctgacatgatcgggtaccttaatttctactaagtgtagattaaataagtccagccgttttttttttaagcttggcgtggatccgatatcaactagatcttgaga

SEQ ID NO: 7187 - DNA, 170 bp, Artificial sequence
  Rb1.211_Runx1.81
  crRNA array
cgatttcttggctttatatatcttgtggaaaggacgaaacaccgtaatttctactaagtgtagattctgacatgatcgggtaccttaatttctactaagtgtagataggacgcgtatgggaattttttttttaagcttggcgtggatccgatatcaactagatcttgaga

SEQ ID NO: 7188 - DNA, 170 bp, Artificial sequence
  Rb1.211_Setd2.143
  crRNA array
cgatttcttggctttatatatcttgtggaaaggacgaaacaccgtaatttctactaagtgtagattctgacatgatcgggtaccttaatttctactaagtgtagatgcacaaccacaacagactggttttttaagcttggcgtggatccgatatcaactagatcttgaga

SEQ ID NO: 7189 - DNA, 170 bp, Artificial sequence
  Rb1.211_Setd2.508
  crRNA array
cgatttcttggctttatatatcttgtggaaaggacgaaacaccgtaatttctactaagtgtagattctgacatgatcgggtaccttaatttctactaagtgtagattacgatcccgagcacccgacttttttaagcttggcgtggatccgatatcaactagatcttgaga

SEQ ID NO: 7190 - DNA, 170 bp, Artificial sequence
  Rb1.211_Smad4.3038
  crRNA array
cgatttcttggctttatatatcttgtggaaaggacgaaacaccgtaatttctactaagtgtagattctgacatgatcgggtaccttaatttctactaagtgtagatatctgcggcagtgtcaccggttttttaagcttggcgtggatccgatatcaactagatcttgaga

SEQ ID NO: 7191 - DNA, 170 bp, Artificial sequence
  Rb1.211_Smad4.39
  crRNA array
cgatttcttggctttatatatcttgtggaaaggacgaaacaccgtaatttctactaagtgtagattctgacatgatcgggtaccttaatttctactaagtgtagatagtcaaacgcatactgacaattttttaagcttggcgtggatccgatatcaactagatcttgaga

SEQ ID NO: 7192 - DNA, 170 bp, Artificial sequence
  Rb1.211_Stag2.1409
  crRNA array
cgatttcttggctttatatatcttgtggaaaggacgaaacaccgtaatttctactaagtgtagattctgacatgatcgggtaccttaatttctactaagtgtagatgctaataactgcggaagggcttttttaagcttggcgtggatccgatatcaactagatcttgaga

SEQ ID NO: 7193 - DNA, 170 bp, Artificial sequence
  Rb1.211_Stag2.4401
  crRNA array
cgatttcttggctttatatatcttgtggaaaggacgaaacaccgtaatttctactaagtgtagattctgacatgatcgggtaccttaatttctactaagtgtagattaatcgtccagtggtgtatattttttaagcttggcgtggatccgatatcaactagatcttgaga

SEQ ID NO: 7194 - DNA, 170 bp, Artificial sequence
  Rb1.211_Tbl1xr1.1
  crRNA array
cgatttcttggctttatatatcttgtggaaaggacgaaacaccgtaatttctactaagtgtagattctgacatgatcgggtaccttaatttctactaagtgtagatggatgcgcatactggtgaagttttttaagcttggcgtggatccgatatcaactagatcttgaga

SEQ ID NO: 7195 - DNA, 170 bp, Artificial sequence
  Rb1.211_Tbl1xr1.83
  crRNA array
cgatttcttggctttatatatcttgtggaaaggacgaaacaccgtaatttctactaagtgtagattctgacatgatcgggtaccttaatttctactaagtgtagatatggtcgacccatcgagtctttttttaagcttggcgtggatccgatatcaactagatcttgaga

SEQ ID NO: 7196 - DNA, 170 bp, Artificial sequence
  Rb1.211_Tgfbr2.290
  crRNA array
cgatttcttggctttatatatcttgtggaaaggacgaaacaccgtaatttctactaagtgtagattctgacatgatcgggtaccttaatttctactaagtgtagatcctctcggcgcccgggtaaattttttaagcttggcgtggatccgatatcaactagatcttgaga

SEQ ID NO: 7197 - DNA, 170 bp, Artificial sequence
  Rb1.211_Tgfbr2.292
  crRNA array
cgatttcttggctttatatatcttgtggaaaggacgaaacaccgtaatttctactaagtgtagattctgacatgatcgggtaccttaatttctactaagtgtagatcccgggcgccgagagggaaattttttaagcttggcgtggatccgatatcaactagatcttgaga

SEQ ID NO: 7198 - DNA, 170 bp, Artificial sequence
  Rb1.211_Trp53.4
  crRNA array
cgatttcttggctttatatatcttgtggaaaggacgaaacaccgtaatttctactaagtgtagattctgacatgatcgggtaccttaatttctactaagtgtagatccctgaactgcccccagggattttttaagcttggcgtggatccgatatcaactagatcttgaga

SEQ ID NO: 7199 - DNA, 170 bp, Artificial sequence
  Rb1.211_Trp53.528
  crRNA array
cgatttcttggctttatatatcttgtggaaaggacgaaacaccgtaatttctactaagtgtagattctgacatgatcgggtaccttaatttctactaagtgtagatgctgggccagcagagacctgttttttaagcttggcgtggatccgatatcaactagatcttgaga

SEQ ID NO: 7200 - DNA, 170 bp, Artificial sequence
  Rb1.211_Vhl.1
  crRNA array
cgatttcttggctttatatatcttgtggaaaggacgaaacaccgtaatttctactaagtgtagattctgacatgatcgggtaccttaatttctactaagtgtagatagggctcccggcggccatttttttttaagcttggcgtggatccgatatcaactagatcttgaga

SEQ ID NO: 7201 - DNA, 170 bp, Artificial sequence
  Rb1.211_Vhl.151
  crRNA array
cgatttcttggctttatatatcttgtggaaaggacgaaacaccgtaatttctactaagtgtagattctgacatgatcgggtaccttaatttctactaagtgtagattagagcactcacccgagggattttttaagcttggcgtggatccgatatcaactagatcttgaga

SEQ ID NO: 7202 - DNA, 170 bp, Artificial sequence
  Rb1.211_Zc3h13.1387
  crRNA array
cgatttcttggctttatatatcttgtggaaaggacgaaacaccgtaatttctactaagtgtagattctgacatgatcgggtaccttaatttctactaagtgtagatgtgacgccggtcatgtgactttttttaagcttggcgtggatccgatatcaactagatcttgaga

SEQ ID NO: 7203 - DNA, 170 bp, Artificial sequence
  Rb1.211_Zc3h13.1777
  crRNA array
cgatttcttggctttatatatcttgtggaaaggacgaaacaccgtaatttctactaagtgtagattctgacatgatcgggtaccttaatttctactaagtgtagatgatgctgccagtgtagcggcttttttaagcttggcgtggatccgatatcaactagatcttgaga

SEQ ID NO: 7204 - DNA, 170 bp, Artificial sequence
  Rb1.394_Acvr2a.155
  crRNA array
cgatttcttggctttatatatcttgtggaaaggacgaaacaccgtaatttctactaagtgtagatagaaatctcgaagcaggatctaatttctactaagtgtagatggacctggctaatcaagtatttttttaagcttggcgtggatccgatatcaactagatcttgaga

SEQ ID NO: 7205 - DNA, 170 bp, Artificial sequence
  Rb1.394_Acvr2a.70
  crRNA array
cgatttcttggctttatatatcttgtggaaaggacgaaacaccgtaatttctactaagtgtagatagaaatctcgaagcaggatctaatttctactaagtgtagatcccgaggcgccggagaagccttttttaagcttggcgtggatccgatatcaactagatcttgaga

SEQ ID NO: 7206 - DNA, 170 bp, Artificial sequence
  Rb1.394_Apc.21
  crRNA array
cgatttcttggctttatatatcttgtggaaaggacgaaacaccgtaatttctactaagtgtagatagaaatctcgaagcaggatctaatttctactaagtgtagatgtgatccacacgtgtagctgttttttaagcttggcgtggatccgatatcaactagatcttgaga

SEQ ID NO: 7207 - DNA, 170 bp, Artificial sequence
  Rb1.394_Apc.867
  crRNA array
cgatttcttggctttatatatcttgtggaaaggacgaaacaccgtaatttctactaagtgtagatagaaatctcgaagcaggatctaatttctactaagtgtagatcagtcccaggcggcggaagcttttttaagcttggcgtggatccgatatcaactagatcttgaga

SEQ ID NO: 7208 - DNA, 170 bp, Artificial sequence
  Rb1.394_Arid1a.2
  crRNA array
cgatttcttggctttatatatcttgtggaaaggacgaaacaccgtaatttctactaagtgtagatagaaatctcgaagcaggatctaatttctactaagtgtagatcccgcgcccccgtcctggggttttttaagcttggcgtggatccgatatcaactagatcttgaga

SEQ ID NO: 7209 - DNA, 170 bp, Artificial sequence
  Rb1.394_Arid1a.5
  crRNA array
cgatttcttggctttatatatcttgtggaaaggacgaaacaccgtaatttctactaagtgtagatagaaatctcgaagcaggatctaatttctactaagtgtagatcccgcgctcggccgctgccgttttttaagcttggcgtggatccgatatcaactagatcttgaga

SEQ ID NO: 7210 - DNA, 170 bp, Artificial sequence
  Rb1.394_Arid2.166
  crRNA array
cgatttcttggctttatatatcttgtggaaaggacgaaacaccgtaatttctactaagtgtagatagaaatctcgaagcaggatctaatttctactaagtgtagataaccgcgatctgggttttttttttttaagcttggcgtggatccgatatcaactagatcttgaga

SEQ ID NO: 7211 - DNA, 170 bp, Artificial sequence
  Rb1.394_Arid2.172
  crRNA array
cgatttcttggctttatatatcttgtggaaaggacgaaacaccgtaatttctactaagtgtagatagaaatctcgaagcaggatctaatttctactaagtgtagatctggacgagctgcggcagttttttttaagcttggcgtggatccgatatcaactagatcttgaga

SEQ ID NO: 7212 - DNA, 170 bp, Artificial sequence
  Rb1.394_Atm.120
  crRNA array
cgatttcttggctttatatatcttgtggaaaggacgaaacaccgtaatttctactaagtgtagatagaaatctcgaagcaggatctaatttctactaagtgtagatgacaggtagtcggcagctaattttttaagcttggcgtggatccgatatcaactagatcttgaga

SEQ ID NO: 7213 - DNA, 170 bp, Artificial sequence
  Rb1.394_Atm.997
  crRNA array
cgatttcttggctttatatatcttgtggaaaggacgaaacaccgtaatttctactaagtgtagatagaaatctcgaagcaggatctaatttctactaagtgtagatgagaaagtctccgaatcgttttttttaagcttggcgtggatccgatatcaactagatcttgaga

SEQ ID NO: 7214 - DNA, 170 bp, Artificial sequence
  Rb1.394_Atrx.249
  crRNA array
cgatttcttggctttatatatcttgtggaaaggacgaaacaccgtaatttctactaagtgtagatagaaatctcgaagcaggatctaatttctactaagtgtagattagccagtcgctcatatctcttttttaagcttggcgtggatccgatatcaactagatcttgaga

SEQ ID NO: 7215 - DNA, 170 bp, Artificial sequence
  Rb1.394_Atrx.251
  crRNA array
cgatttcttggctttatatatcttgtggaaaggacgaaacaccgtaatttctactaagtgtagatagaaatctcgaagcaggatctaatttctactaagtgtagatgccagtcgctcatatctctgttttttaagcttggcgtggatccgatatcaactagatcttgaga

SEQ ID NO: 7216 - DNA, 170 bp, Artificial sequence
  Rb1.394_Bcor.203
  crRNA array
cgatttcttggctttatatatcttgtggaaaggacgaaacaccgtaatttctactaagtgtagatagaaatctcgaagcaggatctaatttctactaagtgtagatccccggagcggagtccaggcttttttaagcttggcgtggatccgatatcaactagatcttgaga

SEQ ID NO: 7217 - DNA, 170 bp, Artificial sequence
  Rb1.394_Bcor.475
  crRNA array
cgatttcttggctttatatatcttgtggaaaggacgaaacaccgtaatttctactaagtgtagatagaaatctcgaagcaggatctaatttctactaagtgtagattgcaacccctctgtatgggattttttaagcttggcgtggatccgatatcaactagatcttgaga

SEQ ID NO: 7218 - DNA, 170 bp, Artificial sequence
  Rb1.394_Brca1.112
  crRNA array
cgatttcttggctttatatatcttgtggaaaggacgaaacaccgtaatttctactaagtgtagatagaaatctcgaagcaggatctaatttctactaagtgtagatctagacgctctgtggagactttttttaagcttggcgtggatccgatatcaactagatcttgaga

SEQ ID NO: 7219 - DNA, 170 bp, Artificial sequence
  Rb1.394_Brca1.53
  crRNA array
cgatttcttggctttatatatcttgtggaaaggacgaaacaccgtaatttctactaagtgtagatagaaatctcgaagcaggatctaatttctactaagtgtagataatgaggaggcgtcgatcatttttttaagcttggcgtggatccgatatcaactagatcttgaga

SEQ ID NO: 7220 - DNA, 170 bp, Artificial sequence
  Rb1.394_Casp8.45
  crRNA array
cgatttcttggctttatatatcttgtggaaaggacgaaacaccgtaatttctactaagtgtagatagaaatctcgaagcaggatctaatttctactaagtgtagatctaccgagatcctgtgaatgttttttaagcttggcgtggatccgatatcaactagatcttgaga

SEQ ID NO: 7221 - DNA, 170 bp, Artificial sequence
  Rb1.394_Casp8.54
  crRNA array
cgatttcttggctttatatatcttgtggaaaggacgaaacaccgtaatttctactaagtgtagatagaaatctcgaagcaggatctaatttctactaagtgtagatcagtgcagtcgtcgtaagatttttttaagcttggcgtggatccgatatcaactagatcttgaga

SEQ ID NO: 7222 - DNA, 170 bp, Artificial sequence
  Rb1.394_Cbwd1.84
  crRNA array
cgatttcttggctttatatatcttgtggaaaggacgaaacaccgtaatttctactaagtgtagatagaaatctcgaagcaggatctaatttctactaagtgtagatcacagcaggtaacatgccgcttttttaagcttggcgtggatccgatatcaactagatcttgaga

SEQ ID NO: 7223 - DNA, 170 bp, Artificial sequence
  Rb1.394_Cbwd1.85
  crRNA array
cgatttcttggctttatatatcttgtggaaaggacgaaacaccgtaatttctactaagtgtagatagaaatctcgaagcaggatctaatttctactaagtgtagatacagcaggtaacatgccgccttttttaagcttggcgtggatccgatatcaactagatcttgaga

SEQ ID NO: 7224 - DNA, 170 bp, Artificial sequence
  Rb1.394_Cdh1.387
  crRNA array
cgatttcttggctttatatatcttgtggaaaggacgaaacaccgtaatttctactaagtgtagatagaaatctcgaagcaggatctaatttctactaagtgtagatctcggcgtctgccgggtccgttttttaagcttggcgtggatccgatatcaactagatcttgaga

SEQ ID NO: 7225 - DNA, 170 bp, Artificial sequence
  Rb1.394_Cdh1.58
  crRNA array
cgatttcttggctttatatatcttgtggaaaggacgaaacaccgtaatttctactaagtgtagatagaaatctcgaagcaggatctaatttctactaagtgtagatctcgtccgcgcccgggactcttttttaagcttggcgtggatccgatatcaactagatcttgaga

SEQ ID NO: 7226 - DNA, 170 bp, Artificial sequence
  Rb1.394_Cdkn2a.647
  crRNA array
cgatttcttggctttatatatcttgtggaaaggacgaaacaccgtaatttctactaagtgtagatagaaatctcgaagcaggatctaatttctactaagtgtagatgcaatcacgggagggagcagttttttaagcttggcgtggatccgatatcaactagatcttgaga

SEQ ID NO: 7227 - DNA, 170 bp, Artificial sequence
  Rb1.394_Cdkn2a.648
  crRNA array
cgatttcttggctttatatatcttgtggaaaggacgaaacaccgtaatttctactaagtgtagatagaaatctcgaagcaggatctaatttctactaagtgtagatcaatcacgggagggagcagattttttaagcttggcgtggatccgatatcaactagatcttgaga

SEQ ID NO: 7228 - DNA, 170 bp, Artificial sequence
  Rb1.394_Cic.162
  crRNA array
cgatttcttggctttatatatcttgtggaaaggacgaaacaccgtaatttctactaagtgtagatagaaatctcgaagcaggatctaatttctactaagtgtagatcgcaggcgcgcccggcggagttttttaagcttggcgtggatccgatatcaactagatcttgaga

SEQ ID NO: 7229 - DNA, 170 bp, Artificial sequence
  Rb1.394_Cic.164
  crRNA array
cgatttcttggctttatatatcttgtggaaaggacgaaacaccgtaatttctactaagtgtagatagaaatctcgaagcaggatctaatttctactaagtgtagatcgggccctgggccggcggctttttttaagcttggcgtggatccgatatcaactagatcttgaga

SEQ ID NO: 7230 - DNA, 170 bp, Artificial sequence
  Rb1.394_Ctcf.229
  crRNA array
cgatttcttggctttatatatcttgtggaaaggacgaaacaccgtaatttctactaagtgtagatagaaatctcgaagcaggatctaatttctactaagtgtagatggctggtggctgatagtctgttttttaagcttggcgtggatccgatatcaactagatcttgaga

SEQ ID NO: 7231 - DNA, 170 bp, Artificial sequence
  Rb1.394_Ctcf.809
  crRNA array
cgatttcttggctttatatatcttgtggaaaggacgaaacaccgtaatttctactaagtgtagatagaaatctcgaagcaggatctaatttctactaagtgtagataagcgctatcatgatcccaattttttaagcttggcgtggatccgatatcaactagatcttgaga

SEQ ID NO: 7232 - DNA, 170 bp, Artificial sequence
  Rb1.394_Elf3.826
  crRNA array
cgatttcttggctttatatatcttgtggaaaggacgaaacaccgtaatttctactaagtgtagatagaaatctcgaagcaggatctaatttctactaagtgtagattccgagacatcctaatccacttttttaagcttggcgtggatccgatatcaactagatcttgaga

SEQ ID NO: 7233 - DNA, 170 bp, Artificial sequence
  Rb1.394_Elf3.983
  crRNA array
cgatttcttggctttatatatcttgtggaaaggacgaaacaccgtaatttctactaagtgtagatagaaatctcgaagcaggatctaatttctactaagtgtagattaggccccctaactggaccattttttaagcttggcgtggatccgatatcaactagatcttgaga

SEQ ID NO: 7234 - DNA, 170 bp, Artificial sequence
  Rb1.394_Ep300.310
  crRNA array
cgatttcttggctttatatatcttgtggaaaggacgaaacaccgtaatttctactaagtgtagatagaaatctcgaagcaggatctaatttctactaagtgtagatatggtacgacagtgaggaagttttttaagcttggcgtggatccgatatcaactagatcttgaga

SEQ ID NO: 7235 - DNA, 170 bp, Artificial sequence
  Rb1.394_Ep300.587
  crRNA array
cgatttcttggctttatatatcttgtggaaaggacgaaacaccgtaatttctactaagtgtagatagaaatctcgaagcaggatctaatttctactaagtgtagatcgccccggggcccccaaccattttttaagcttggcgtggatccgatatcaactagatcttgaga

SEQ ID NO: 7236 - DNA, 170 bp, Artificial sequence
  Rb1.394_Epha2.126
  crRNA array
cgatttcttggctttatatatcttgtggaaaggacgaaacaccgtaatttctactaagtgtagatagaaatctcgaagcaggatctaatttctactaagtgtagatcctgtgccgccgcggccgccttttttaagcttggcgtggatccgatatcaactagatcttgaga

SEQ ID NO: 7237 - DNA, 170 bp, Artificial sequence
  Rb1.394_Epha2.5
  crRNA array
cgatttcttggctttatatatcttgtggaaaggacgaaacaccgtaatttctactaagtgtagatagaaatctcgaagcaggatctaatttctactaagtgtagatcatgagctggcgccacccggttttttaagcttggcgtggatccgatatcaactagatcttgaga

SEQ ID NO: 7238 - DNA, 170 bp, Artificial sequence
  Rb1.394_Fat1.105
  crRNA array
cgatttcttggctttatatatcttgtggaaaggacgaaacaccgtaatttctactaagtgtagatagaaatctcgaagcaggatctaatttctactaagtgtagataactcgaggtgacaacaagtttttttaagcttggcgtggatccgatatcaactagatcttgaga

SEQ ID NO: 7239 - DNA, 170 bp, Artificial sequence
  Rb1.394_Fat1.122
  crRNA array
cgatttcttggctttatatatcttgtggaaaggacgaaacaccgtaatttctactaagtgtagatagaaatctcgaagcaggatctaatttctactaagtgtagatccatcgacatggaaacgggattttttaagcttggcgtggatccgatatcaactagatcttgaga

SEQ ID NO: 7240 - DNA, 170 bp, Artificial sequence
  Rb1.394_Fbxw7.21
  crRNA array
cgatttcttggctttatatatcttgtggaaaggacgaaacaccgtaatttctactaagtgtagatagaaatctcgaagcaggatctaatttctactaagtgtagattaatgtgccgtagaaacccattttttaagcttggcgtggatccgatatcaactagatcttgaga

SEQ ID NO: 7241 - DNA, 170 bp, Artificial sequence
  Rb1.394_Fbxw7.23
  crRNA array
cgatttcttggctttatatatcttgtggaaaggacgaaacaccgtaatttctactaagtgtagatagaaatctcgaagcaggatctaatttctactaagtgtagatatgtgccgtagaaacccatattttttaagcttggcgtggatccgatatcaactagatcttgaga

SEQ ID NO: 7242 - DNA, 170 bp, Artificial sequence
  Rb1.394_Gata3.34
  crRNA array
cgatttcttggctttatatatcttgtggaaaggacgaaacaccgtaatttctactaagtgtagatagaaatctcgaagcaggatctaatttctactaagtgtagatctaaactatcccgcaaagatttttttaagcttggcgtggatccgatatcaactagatcttgaga

SEQ ID NO: 7243 - DNA, 170 bp, Artificial sequence
  Rb1.394_Gata3.47
  crRNA array
cgatttcttggctttatatatcttgtggaaaggacgaaacaccgtaatttctactaagtgtagatagaaatctcgaagcaggatctaatttctactaagtgtagatcgtagtaggacgggacgtggttttttaagcttggcgtggatccgatatcaactagatcttgaga

SEQ ID NO: 7244 - DNA, 170 bp, Artificial sequence
  Rb1.394_H2-Q2.1
  crRNA array
cgatttcttggctttatatatcttgtggaaaggacgaaacaccgtaatttctactaagtgtagatagaaatctcgaagcaggatctaatttctactaagtgtagatagggcggccaccaacagcagttttttaagcttggcgtggatccgatatcaactagatcttgaga

SEQ ID NO: 7245 - DNA, 170 bp, Artificial sequence
  Rb1.394_H2-Q2.2
  crRNA array
cgatttcttggctttatatatcttgtggaaaggacgaaacaccgtaatttctactaagtgtagatagaaatctcgaagcaggatctaatttctactaagtgtagattaacctgcgcccgctgctgattttttaagcttggcgtggatccgatatcaactagatcttgaga

SEQ ID NO: 7246 - DNA, 170 bp, Artificial sequence
  Rb1.394_Kdm5c.1878
  crRNA array
cgatttcttggctttatatatcttgtggaaaggacgaaacaccgtaatttctactaagtgtagatagaaatctcgaagcaggatctaatttctactaagtgtagatagagcacggcacccgcccccttttttaagcttggcgtggatccgatatcaactagatcttgaga

SEQ ID NO: 7247 - DNA, 170 bp, Artificial sequence
  Rb1.394_Kdm5c.1879
  crRNA array
cgatttcttggctttatatatcttgtggaaaggacgaaacaccgtaatttctactaagtgtagatagaaatctcgaagcaggatctaatttctactaagtgtagatgagcacggcacccgccccccttttttaagcttggcgtggatccgatatcaactagatcttgaga

SEQ ID NO: 7248 - DNA, 170 bp, Artificial sequence
  Rb1.394_Kdm6a.56
  crRNA array
cgatttcttggctttatatatcttgtggaaaggacgaaacaccgtaatttctactaagtgtagatagaaatctcgaagcaggatctaatttctactaagtgtagattcgctgccgcctctcgcggcttttttaagcttggcgtggatccgatatcaactagatcttgaga

SEQ ID NO: 7249 - DNA, 170 bp, Artificial sequence
  Rb1.394_Kdm6a.57
  crRNA array
cgatttcttggctttatatatcttgtggaaaggacgaaacaccgtaatttctactaagtgtagatagaaatctcgaagcaggatctaatttctactaagtgtagatcgctgccgcctctcgcggcattttttaagcttggcgtggatccgatatcaactagatcttgaga

SEQ ID NO: 7250 - DNA, 170 bp, Artificial sequence
  Rb1.394_Kmt2b.265
  crRNA array
cgatttcttggctttatatatcttgtggaaaggacgaaacaccgtaatttctactaagtgtagatagaaatctcgaagcaggatctaatttctactaagtgtagatccccaagtgaagcccacctgttttttaagcttggcgtggatccgatatcaactagatcttgaga

SEQ ID NO: 7251 - DNA, 170 bp, Artificial sequence
  Rb1.394_Kmt2b.298
  crRNA array
cgatttcttggctttatatatcttgtggaaaggacgaaacaccgtaatttctactaagtgtagatagaaatctcgaagcaggatctaatttctactaagtgtagattccggcagggaccggctggcttttttaagcttggcgtggatccgatatcaactagatcttgaga

SEQ ID NO: 7252 - DNA, 170 bp, Artificial sequence
  Rb1.394_Kmt2c.1962
  crRNA array
cgatttcttggctttatatatcttgtggaaaggacgaaacaccgtaatttctactaagtgtagatagaaatctcgaagcaggatctaatttctactaagtgtagatgtgacgatctgtgccacaagttttttaagcttggcgtggatccgatatcaactagatcttgaga

SEQ ID NO: 7253 - DNA, 170 bp, Artificial sequence
  Rb1.394_Kmt2c.2236
  crRNA array
cgatttcttggctttatatatcttgtggaaaggacgaaacaccgtaatttctactaagtgtagatagaaatctcgaagcaggatctaatttctactaagtgtagatactcgacctccacctccctattttttaagcttggcgtggatccgatatcaactagatcttgaga

SEQ ID NO: 7254 - DNA, 170 bp, Artificial sequence
  Rb1.394_Kmt2d.316
  crRNA array
cgatttcttggctttatatatcttgtggaaaggacgaaacaccgtaatttctactaagtgtagatagaaatctcgaagcaggatctaatttctactaagtgtagatactccaggccacccaggtggttttttaagcttggcgtggatccgatatcaactagatcttgaga

SEQ ID NO: 7255 - DNA, 170 bp, Artificial sequence
  Rb1.394_Kmt2d.416
  crRNA array
cgatttcttggctttatatatcttgtggaaaggacgaaacaccgtaatttctactaagtgtagatagaaatctcgaagcaggatctaatttctactaagtgtagattaaacccccgggggaagggtttttttaagcttggcgtggatccgatatcaactagatcttgaga

SEQ ID NO: 7256 - DNA, 170 bp, Artificial sequence
  Rb1.394_Map2k4.119
  crRNA array
cgatttcttggctttatatatcttgtggaaaggacgaaacaccgtaatttctactaagtgtagatagaaatctcgaagcaggatctaatttctactaagtgtagattgctgtgtgggcggccacatttttttaagcttggcgtggatccgatatcaactagatcttgaga

SEQ ID NO: 7257 - DNA, 170 bp, Artificial sequence
  Rb1.394_Map2k4.1261
  crRNA array
cgatttcttggctttatatatcttgtggaaaggacgaaacaccgtaatttctactaagtgtagatagaaatctcgaagcaggatctaatttctactaagtgtagatgatgtagtaatgcggagtagttttttaagcttggcgtggatccgatatcaactagatcttgaga

SEQ ID NO: 7258 - DNA, 170 bp, Artificial sequence
  Rb1.394_Map3k1.235
  crRNA array
cgatttcttggctttatatatcttgtggaaaggacgaaacaccgtaatttctactaagtgtagatagaaatctcgaagcaggatctaatttctactaagtgtagataaaacgctactgatcgatcgttttttaagcttggcgtggatccgatatcaactagatcttgaga

SEQ ID NO: 7259 - DNA, 170 bp, Artificial sequence
  Rb1.394_Map3k1.3838
  crRNA array
cgatttcttggctttatatatcttgtggaaaggacgaaacaccgtaatttctactaagtgtagatagaaatctcgaagcaggatctaatttctactaagtgtagatccaacaacagggccccactattttttaagcttggcgtggatccgatatcaactagatcttgaga

SEQ ID NO: 7260 - DNA, 170 bp, Artificial sequence
  Rb1.394_Mga.1655
  crRNA array
cgatttcttggctttatatatcttgtggaaaggacgaaacaccgtaatttctactaagtgtagatagaaatctcgaagcaggatctaatttctactaagtgtagatcgagaagtggagagcatattttttttaagcttggcgtggatccgatatcaactagatcttgaga

SEQ ID NO: 7261 - DNA, 170 bp, Artificial sequence
  Rb1.394_Mga.93
  crRNA array
cgatttcttggctttatatatcttgtggaaaggacgaaacaccgtaatttctactaagtgtagatagaaatctcgaagcaggatctaatttctactaagtgtagatgagaaggctccccataatgtttttttaagcttggcgtggatccgatatcaactagatcttgaga

SEQ ID NO: 7262 - DNA, 170 bp, Artificial sequence
  Rb1.394_Nf1.746
  crRNA array
cgatttcttggctttatatatcttgtggaaaggacgaaacaccgtaatttctactaagtgtagatagaaatctcgaagcaggatctaatttctactaagtgtagattaagcataatgatgatgccattttttaagcttggcgtggatccgatatcaactagatcttgaga

SEQ ID NO: 7263 - DNA, 170 bp, Artificial sequence
  Rb1.394_Nf1.97
  crRNA array
cgatttcttggctttatatatcttgtggaaaggacgaaacaccgtaatttctactaagtgtagatagaaatctcgaagcaggatctaatttctactaagtgtagatagcccgctacatgctgatgcttttttaagcttggcgtggatccgatatcaactagatcttgaga

SEQ ID NO: 7264 - DNA, 170 bp, Artificial sequence
  Rb1.394_Nf2.356
  crRNA array
cgatttcttggctttatatatcttgtggaaaggacgaaacaccgtaatttctactaagtgtagatagaaatctcgaagcaggatctaatttctactaagtgtagatcggagtcatctgatagagatttttttaagcttggcgtggatccgatatcaactagatcttgaga

SEQ ID NO: 7265 - DNA, 170 bp, Artificial sequence
  Rb1.394_Nf2.768
  crRNA array
cgatttcttggctttatatatcttgtggaaaggacgaaacaccgtaatttctactaagtgtagatagaaatctcgaagcaggatctaatttctactaagtgtagatccgaagccccagtgtccggcttttttaagcttggcgtggatccgatatcaactagatcttgaga

SEQ ID NO: 7266 - DNA, 170 bp, Artificial sequence
  Rb1.394_Notch1.1849
  crRNA array
cgatttcttggctttatatatcttgtggaaaggacgaaacaccgtaatttctactaagtgtagatagaaatctcgaagcaggatctaatttctactaagtgtagatctggcgggtgggcggcgctgttttttaagcttggcgtggatccgatatcaactagatcttgaga

SEQ ID NO: 7267 - DNA, 170 bp, Artificial sequence
  Rb1.394_Notch1.649
  crRNA array
cgatttcttggctttatatatcttgtggaaaggacgaaacaccgtaatttctactaagtgtagatagaaatctcgaagcaggatctaatttctactaagtgtagattgggccaacgatgccaggacttttttaagcttggcgtggatccgatatcaactagatcttgaga

SEQ ID NO: 7268 - DNA, 170 bp, Artificial sequence
  Rb1.394_Nsd1.70
  crRNA array
cgatttcttggctttatatatcttgtggaaaggacgaaacaccgtaatttctactaagtgtagatagaaatctcgaagcaggatctaatttctactaagtgtagatactggtgtggacgatgcagattttttaagcttggcgtggatccgatatcaactagatcttgaga

SEQ ID NO: 7269 - DNA, 170 bp, Artificial sequence
  Rb1.394_Nsd1.90
  crRNA array
cgatttcttggctttatatatcttgtggaaaggacgaaacaccgtaatttctactaagtgtagatagaaatctcgaagcaggatctaatttctactaagtgtagataggagctaacggcaagaatgttttttaagcttggcgtggatccgatatcaactagatcttgaga

SEQ ID NO: 7270 - DNA, 170 bp, Artificial sequence
  Rb1.394_Pbrm1.1236
  crRNA array
cgatttcttggctttatatatcttgtggaaaggacgaaacaccgtaatttctactaagtgtagatagaaatctcgaagcaggatctaatttctactaagtgtagatgccgataaaaccaacagccgttttttaagcttggcgtggatccgatatcaactagatcttgaga

SEQ ID NO: 7271 - DNA, 170 bp, Artificial sequence
  Rb1.394_Pbrm1.969
  crRNA array
cgatttcttggctttatatatcttgtggaaaggacgaaacaccgtaatttctactaagtgtagatagaaatctcgaagcaggatctaatttctactaagtgtagatgagccctaatgaacagctcattttttaagcttggcgtggatccgatatcaactagatcttgaga

SEQ ID NO: 7272 - DNA, 170 bp, Artificial sequence
  Rb1.394_Pik3r1.76
  crRNA array
cgatttcttggctttatatatcttgtggaaaggacgaaacaccgtaatttctactaagtgtagatagaaatctcgaagcaggatctaatttctactaagtgtagataaaacctatacggcccgcacttttttaagcttggcgtggatccgatatcaactagatcttgaga

SEQ ID NO: 7273 - DNA, 170 bp, Artificial sequence
  Rb1.394_Pik3r1.77
  crRNA array
cgatttcttggctttatatatcttgtggaaaggacgaaacaccgtaatttctactaagtgtagatagaaatctcgaagcaggatctaatttctactaagtgtagataaacctatacggcccgcactttttttaagcttggcgtggatccgatatcaactagatcttgaga

SEQ ID NO: 7274 - DNA, 170 bp, Artificial sequence
  Rb1.394_Pten.240
  crRNA array
cgatttcttggctttatatatcttgtggaaaggacgaaacaccgtaatttctactaagtgtagatagaaatctcgaagcaggatctaatttctactaagtgtagattgcatacgctatagctgcttttttttaagcttggcgtggatccgatatcaactagatcttgaga

SEQ ID NO: 7275 - DNA, 170 bp, Artificial sequence
  Rb1.394_Pten.265
  crRNA array
cgatttcttggctttatatatcttgtggaaaggacgaaacaccgtaatttctactaagtgtagatagaaatctcgaagcaggatctaatttctactaagtgtagataagcgtggtgcgtgacgcacttttttaagcttggcgtggatccgatatcaactagatcttgaga

SEQ ID NO: 7276 - DNA, 170 bp, Artificial sequence
  Rb1.394_Rasa1.1478
  crRNA array
cgatttcttggctttatatatcttgtggaaaggacgaaacaccgtaatttctactaagtgtagatagaaatctcgaagcaggatctaatttctactaagtgtagatcgataatggtctatgatgtcttttttaagcttggcgtggatccgatatcaactagatcttgaga

SEQ ID NO: 7277 - DNA, 170 bp, Artificial sequence
  Rb1.394_Rasa1.223
  crRNA array
cgatttcttggctttatatatcttgtggaaaggacgaaacaccgtaatttctactaagtgtagatagaaatctcgaagcaggatctaatttctactaagtgtagattccatggagtatcgtgctcgttttttaagcttggcgtggatccgatatcaactagatcttgaga

SEQ ID NO: 7278 - DNA, 170 bp, Artificial sequence
  Rb1.394_Rbm10.5
  crRNA array
cgatttcttggctttatatatcttgtggaaaggacgaaacaccgtaatttctactaagtgtagatagaaatctcgaagcaggatctaatttctactaagtgtagatacgaaacctgaacccacacattttttaagcttggcgtggatccgatatcaactagatcttgaga

SEQ ID NO: 7279 - DNA, 170 bp, Artificial sequence
  Rb1.394_Rbm10.6
  crRNA array
cgatttcttggctttatatatcttgtggaaaggacgaaacaccgtaatttctactaagtgtagatagaaatctcgaagcaggatctaatttctactaagtgtagatcgaaacctgaacccacacagttttttaagcttggcgtggatccgatatcaactagatcttgaga

SEQ ID NO: 7280 - DNA, 170 bp, Artificial sequence
  Rb1.394_Rnf43.1920
  crRNA array
cgatttcttggctttatatatcttgtggaaaggacgaaacaccgtaatttctactaagtgtagatagaaatctcgaagcaggatctaatttctactaagtgtagatatccccgtgccgtggactccttttttaagcttggcgtggatccgatatcaactagatcttgaga

SEQ ID NO: 7281 - DNA, 170 bp, Artificial sequence
  Rb1.394_Rnf43.39
  crRNA array
cgatttcttggctttatatatcttgtggaaaggacgaaacaccgtaatttctactaagtgtagatagaaatctcgaagcaggatctaatttctactaagtgtagatcaaggggatcactctgataattttttaagcttggcgtggatccgatatcaactagatcttgaga

SEQ ID NO: 7282 - DNA, 170 bp, Artificial sequence
  Rb1.394_Runx1.204
  crRNA array
cgatttcttggctttatatatcttgtggaaaggacgaaacaccgtaatttctactaagtgtagatagaaatctcgaagcaggatctaatttctactaagtgtagattaaataagtccagccgttttttttttaagcttggcgtggatccgatatcaactagatcttgaga

SEQ ID NO: 7283 - DNA, 170 bp, Artificial sequence
  Rb1.394_Runx1.81
  crRNA array
cgatttcttggctttatatatcttgtggaaaggacgaaacaccgtaatttctactaagtgtagatagaaatctcgaagcaggatctaatttctactaagtgtagataggacgcgtatgggaattttttttttaagcttggcgtggatccgatatcaactagatcttgaga

SEQ ID NO: 7284 - DNA, 170 bp, Artificial sequence
  Rb1.394_Setd2.143
  crRNA array
cgatttcttggctttatatatcttgtggaaaggacgaaacaccgtaatttctactaagtgtagatagaaatctcgaagcaggatctaatttctactaagtgtagatgcacaaccacaacagactggttttttaagcttggcgtggatccgatatcaactagatcttgaga

SEQ ID NO: 7285 - DNA, 170 bp, Artificial sequence
  Rb1.394_Setd2.508
  crRNA array
cgatttcttggctttatatatcttgtggaaaggacgaaacaccgtaatttctactaagtgtagatagaaatctcgaagcaggatctaatttctactaagtgtagattacgatcccgagcacccgacttttttaagcttggcgtggatccgatatcaactagatcttgaga

SEQ ID NO: 7286 - DNA, 170 bp, Artificial sequence
  Rb1.394_Smad4.3038
  crRNA array
cgatttcttggctttatatatcttgtggaaaggacgaaacaccgtaatttctactaagtgtagatagaaatctcgaagcaggatctaatttctactaagtgtagatatctgcggcagtgtcaccggttttttaagcttggcgtggatccgatatcaactagatcttgaga

SEQ ID NO: 7287 - DNA, 170 bp, Artificial sequence
  Rb1.394_Smad4.39
  crRNA array
cgatttcttggctttatatatcttgtggaaaggacgaaacaccgtaatttctactaagtgtagatagaaatctcgaagcaggatctaatttctactaagtgtagatagtcaaacgcatactgacaattttttaagcttggcgtggatccgatatcaactagatcttgaga

SEQ ID NO: 7288 - DNA, 170 bp, Artificial sequence
  Rb1.394_Stag2.1409
  crRNA array
cgatttcttggctttatatatcttgtggaaaggacgaaacaccgtaatttctactaagtgtagatagaaatctcgaagcaggatctaatttctactaagtgtagatgctaataactgcggaagggcttttttaagcttggcgtggatccgatatcaactagatcttgaga

SEQ ID NO: 7289 - DNA, 170 bp, Artificial sequence
  Rb1.394_Stag2.4401
  crRNA array
cgatttcttggctttatatatcttgtggaaaggacgaaacaccgtaatttctactaagtgtagatagaaatctcgaagcaggatctaatttctactaagtgtagattaatcgtccagtggtgtatattttttaagcttggcgtggatccgatatcaactagatcttgaga

SEQ ID NO: 7290 - DNA, 170 bp, Artificial sequence
  Rb1.394_Tbl1xr1.1
  crRNA array
cgatttcttggctttatatatcttgtggaaaggacgaaacaccgtaatttctactaagtgtagatagaaatctcgaagcaggatctaatttctactaagtgtagatggatgcgcatactggtgaagttttttaagcttggcgtggatccgatatcaactagatcttgaga

SEQ ID NO: 7291 - DNA, 170 bp, Artificial sequence
  Rb1.394_Tbl1xr1.83
  crRNA array
cgatttcttggctttatatatcttgtggaaaggacgaaacaccgtaatttctactaagtgtagatagaaatctcgaagcaggatctaatttctactaagtgtagatatggtcgacccatcgagtctttttttaagcttggcgtggatccgatatcaactagatcttgaga

SEQ ID NO: 7292 - DNA, 170 bp, Artificial sequence
  Rb1.394_Tgfbr2.290
  crRNA array
cgatttcttggctttatatatcttgtggaaaggacgaaacaccgtaatttctactaagtgtagatagaaatctcgaagcaggatctaatttctactaagtgtagatcctctcggcgcccgggtaaattttttaagcttggcgtggatccgatatcaactagatcttgaga

SEQ ID NO: 7293 - DNA, 170 bp, Artificial sequence
  Rb1.394_Tgfbr2.292
  crRNA array
cgatttcttggctttatatatcttgtggaaaggacgaaacaccgtaatttctactaagtgtagatagaaatctcgaagcaggatctaatttctactaagtgtagatcccgggcgccgagagggaaattttttaagcttggcgtggatccgatatcaactagatcttgaga

SEQ ID NO: 7294 - DNA, 170 bp, Artificial sequence
  Rb1.394_Trp53.4
  crRNA array
cgatttcttggctttatatatcttgtggaaaggacgaaacaccgtaatttctactaagtgtagatagaaatctcgaagcaggatctaatttctactaagtgtagatccctgaactgcccccagggattttttaagcttggcgtggatccgatatcaactagatcttgaga

SEQ ID NO: 7295 - DNA, 170 bp, Artificial sequence
  Rb1.394_Trp53.528
  crRNA array
cgatttcttggctttatatatcttgtggaaaggacgaaacaccgtaatttctactaagtgtagatagaaatctcgaagcaggatctaatttctactaagtgtagatgctgggccagcagagacctgttttttaagcttggcgtggatccgatatcaactagatcttgaga

SEQ ID NO: 7296 - DNA, 170 bp, Artificial sequence
  Rb1.394_Vhl.1
  crRNA array
cgatttcttggctttatatatcttgtggaaaggacgaaacaccgtaatttctactaagtgtagatagaaatctcgaagcaggatctaatttctactaagtgtagatagggctcccggcggccatttttttttaagcttggcgtggatccgatatcaactagatcttgaga

SEQ ID NO: 7297 - DNA, 170 bp, Artificial sequence
  Rb1.394_Vhl.151
  crRNA array
cgatttcttggctttatatatcttgtggaaaggacgaaacaccgtaatttctactaagtgtagatagaaatctcgaagcaggatctaatttctactaagtgtagattagagcactcacccgagggattttttaagcttggcgtggatccgatatcaactagatcttgaga

SEQ ID NO: 7298 - DNA, 170 bp, Artificial sequence
  Rb1.394_Zc3h13.1387
  crRNA array
cgatttcttggctttatatatcttgtggaaaggacgaaacaccgtaatttctactaagtgtagatagaaatctcgaagcaggatctaatttctactaagtgtagatgtgacgccggtcatgtgactttttttaagcttggcgtggatccgatatcaactagatcttgaga

SEQ ID NO: 7299 - DNA, 170 bp, Artificial sequence
  Rb1.394_Zc3h13.1777
  crRNA array
cgatttcttggctttatatatcttgtggaaaggacgaaacaccgtaatttctactaagtgtagatagaaatctcgaagcaggatctaatttctactaagtgtagatgatgctgccagtgtagcggcttttttaagcttggcgtggatccgatatcaactagatcttgaga

SEQ ID NO: 7300 - DNA, 170 bp, Artificial sequence
  Rbm10.5_Acvr2a.155
  crRNA array
cgatttcttggctttatatatcttgtggaaaggacgaaacaccgtaatttctactaagtgtagatacgaaacctgaacccacacataatttctactaagtgtagatggacctggctaatcaagtatttttttaagcttggcgtggatccgatatcaactagatcttgaga

SEQ ID NO: 7301 - DNA, 170 bp, Artificial sequence
  Rbm10.5_Acvr2a.70
  crRNA array
cgatttcttggctttatatatcttgtggaaaggacgaaacaccgtaatttctactaagtgtagatacgaaacctgaacccacacataatttctactaagtgtagatcccgaggcgccggagaagccttttttaagcttggcgtggatccgatatcaactagatcttgaga

SEQ ID NO: 7302 - DNA, 170 bp, Artificial sequence
  Rbm10.5_Apc.21
  crRNA array
cgatttcttggctttatatatcttgtggaaaggacgaaacaccgtaatttctactaagtgtagatacgaaacctgaacccacacataatttctactaagtgtagatgtgatccacacgtgtagctgttttttaagcttggcgtggatccgatatcaactagatcttgaga

SEQ ID NO: 7303 - DNA, 170 bp, Artificial sequence
  Rbm10.5_Apc.867
  crRNA array
cgatttcttggctttatatatcttgtggaaaggacgaaacaccgtaatttctactaagtgtagatacgaaacctgaacccacacataatttctactaagtgtagatcagtcccaggcggcggaagcttttttaagcttggcgtggatccgatatcaactagatcttgaga

SEQ ID NO: 7304 - DNA, 170 bp, Artificial sequence
  Rbm10.5_Arid1a.2
  crRNA array
cgatttcttggctttatatatcttgtggaaaggacgaaacaccgtaatttctactaagtgtagatacgaaacctgaacccacacataatttctactaagtgtagatcccgcgcccccgtcctggggttttttaagcttggcgtggatccgatatcaactagatcttgaga

SEQ ID NO: 7305 - DNA, 170 bp, Artificial sequence
  Rbm10.5_Arid1a.5
  crRNA array
cgatttcttggctttatatatcttgtggaaaggacgaaacaccgtaatttctactaagtgtagatacgaaacctgaacccacacataatttctactaagtgtagatcccgcgctcggccgctgccgttttttaagcttggcgtggatccgatatcaactagatcttgaga

SEQ ID NO: 7306 - DNA, 170 bp, Artificial sequence
  Rbm10.5_Arid2.166
  crRNA array
cgatttcttggctttatatatcttgtggaaaggacgaaacaccgtaatttctactaagtgtagatacgaaacctgaacccacacataatttctactaagtgtagataaccgcgatctgggttttttttttttaagcttggcgtggatccgatatcaactagatcttgaga

SEQ ID NO: 7307 - DNA, 170 bp, Artificial sequence
  Rbm10.5_Arid2.172
  crRNA array
cgatttcttggctttatatatcttgtggaaaggacgaaacaccgtaatttctactaagtgtagatacgaaacctgaacccacacataatttctactaagtgtagatctggacgagctgcggcagttttttttaagcttggcgtggatccgatatcaactagatcttgaga

SEQ ID NO: 7308 - DNA, 170 bp, Artificial sequence
  Rbm10.5_Atm.120
  crRNA array
cgatttcttggctttatatatcttgtggaaaggacgaaacaccgtaatttctactaagtgtagatacgaaacctgaacccacacataatttctactaagtgtagatgacaggtagtcggcagctaattttttaagcttggcgtggatccgatatcaactagatcttgaga

SEQ ID NO: 7309 - DNA, 170 bp, Artificial sequence
  Rbm10.5_Atm.997
  crRNA array
cgatttcttggctttatatatcttgtggaaaggacgaaacaccgtaatttctactaagtgtagatacgaaacctgaacccacacataatttctactaagtgtagatgagaaagtctccgaatcgttttttttaagcttggcgtggatccgatatcaactagatcttgaga

SEQ ID NO: 7310 - DNA, 170 bp, Artificial sequence
  Rbm10.5_Atrx.249
  crRNA array
cgatttcttggctttatatatcttgtggaaaggacgaaacaccgtaatttctactaagtgtagatacgaaacctgaacccacacataatttctactaagtgtagattagccagtcgctcatatctcttttttaagcttggcgtggatccgatatcaactagatcttgaga

SEQ ID NO: 7311 - DNA, 170 bp, Artificial sequence
  Rbm10.5_Atrx.251
  crRNA array
cgatttcttggctttatatatcttgtggaaaggacgaaacaccgtaatttctactaagtgtagatacgaaacctgaacccacacataatttctactaagtgtagatgccagtcgctcatatctctgttttttaagcttggcgtggatccgatatcaactagatcttgaga

SEQ ID NO: 7312 - DNA, 170 bp, Artificial sequence
  Rbm10.5_Bcor.203
  crRNA array
cgatttcttggctttatatatcttgtggaaaggacgaaacaccgtaatttctactaagtgtagatacgaaacctgaacccacacataatttctactaagtgtagatccccggagcggagtccaggcttttttaagcttggcgtggatccgatatcaactagatcttgaga

SEQ ID NO: 7313 - DNA, 170 bp, Artificial sequence
  Rbm10.5_Bcor.475
  crRNA array
cgatttcttggctttatatatcttgtggaaaggacgaaacaccgtaatttctactaagtgtagatacgaaacctgaacccacacataatttctactaagtgtagattgcaacccctctgtatgggattttttaagcttggcgtggatccgatatcaactagatcttgaga

SEQ ID NO: 7314 - DNA, 170 bp, Artificial sequence
  Rbm10.5_Brca1.112
  crRNA array
cgatttcttggctttatatatcttgtggaaaggacgaaacaccgtaatttctactaagtgtagatacgaaacctgaacccacacataatttctactaagtgtagatctagacgctctgtggagactttttttaagcttggcgtggatccgatatcaactagatcttgaga

SEQ ID NO: 7315 - DNA, 170 bp, Artificial sequence
  Rbm10.5_Brca1.53
  crRNA array
cgatttcttggctttatatatcttgtggaaaggacgaaacaccgtaatttctactaagtgtagatacgaaacctgaacccacacataatttctactaagtgtagataatgaggaggcgtcgatcatttttttaagcttggcgtggatccgatatcaactagatcttgaga

SEQ ID NO: 7316 - DNA, 170 bp, Artificial sequence
  Rbm10.5_Casp8.45
  crRNA array
cgatttcttggctttatatatcttgtggaaaggacgaaacaccgtaatttctactaagtgtagatacgaaacctgaacccacacataatttctactaagtgtagatctaccgagatcctgtgaatgttttttaagcttggcgtggatccgatatcaactagatcttgaga

SEQ ID NO: 7317 - DNA, 170 bp, Artificial sequence
  Rbm10.5_Casp8.54
  crRNA array
cgatttcttggctttatatatcttgtggaaaggacgaaacaccgtaatttctactaagtgtagatacgaaacctgaacccacacataatttctactaagtgtagatcagtgcagtcgtcgtaagatttttttaagcttggcgtggatccgatatcaactagatcttgaga

SEQ ID NO: 7318 - DNA, 170 bp, Artificial sequence
  Rbm10.5_Cbwd1.84
  crRNA array
cgatttcttggctttatatatcttgtggaaaggacgaaacaccgtaatttctactaagtgtagatacgaaacctgaacccacacataatttctactaagtgtagatcacagcaggtaacatgccgcttttttaagcttggcgtggatccgatatcaactagatcttgaga

SEQ ID NO: 7319 - DNA, 170 bp, Artificial sequence
  Rbm10.5_Cbwd1.85
  crRNA array
cgatttcttggctttatatatcttgtggaaaggacgaaacaccgtaatttctactaagtgtagatacgaaacctgaacccacacataatttctactaagtgtagatacagcaggtaacatgccgccttttttaagcttggcgtggatccgatatcaactagatcttgaga

SEQ ID NO: 7320 - DNA, 170 bp, Artificial sequence
  Rbm10.5_Cdh1.387
  crRNA array
cgatttcttggctttatatatcttgtggaaaggacgaaacaccgtaatttctactaagtgtagatacgaaacctgaacccacacataatttctactaagtgtagatctcggcgtctgccgggtccgttttttaagcttggcgtggatccgatatcaactagatcttgaga

SEQ ID NO: 7321 - DNA, 170 bp, Artificial sequence
  Rbm10.5_Cdh1.58
  crRNA array
cgatttcttggctttatatatcttgtggaaaggacgaaacaccgtaatttctactaagtgtagatacgaaacctgaacccacacataatttctactaagtgtagatctcgtccgcgcccgggactcttttttaagcttggcgtggatccgatatcaactagatcttgaga

SEQ ID NO: 7322 - DNA, 170 bp, Artificial sequence
  Rbm10.5_Cdkn2a.647
  crRNA array
cgatttcttggctttatatatcttgtggaaaggacgaaacaccgtaatttctactaagtgtagatacgaaacctgaacccacacataatttctactaagtgtagatgcaatcacgggagggagcagttttttaagcttggcgtggatccgatatcaactagatcttgaga

SEQ ID NO: 7323 - DNA, 170 bp, Artificial sequence
  Rbm10.5_Cdkn2a.648
  crRNA array
cgatttcttggctttatatatcttgtggaaaggacgaaacaccgtaatttctactaagtgtagatacgaaacctgaacccacacataatttctactaagtgtagatcaatcacgggagggagcagattttttaagcttggcgtggatccgatatcaactagatcttgaga

SEQ ID NO: 7324 - DNA, 170 bp, Artificial sequence
  Rbm10.5_Cic.162
  crRNA array
cgatttcttggctttatatatcttgtggaaaggacgaaacaccgtaatttctactaagtgtagatacgaaacctgaacccacacataatttctactaagtgtagatcgcaggcgcgcccggcggagttttttaagcttggcgtggatccgatatcaactagatcttgaga

SEQ ID NO: 7325 - DNA, 170 bp, Artificial sequence
  Rbm10.5_Cic.164
  crRNA array
cgatttcttggctttatatatcttgtggaaaggacgaaacaccgtaatttctactaagtgtagatacgaaacctgaacccacacataatttctactaagtgtagatcgggccctgggccggcggctttttttaagcttggcgtggatccgatatcaactagatcttgaga

SEQ ID NO: 7326 - DNA, 170 bp, Artificial sequence
  Rbm10.5_Ctcf.229
  crRNA array
cgatttcttggctttatatatcttgtggaaaggacgaaacaccgtaatttctactaagtgtagatacgaaacctgaacccacacataatttctactaagtgtagatggctggtggctgatagtctgttttttaagcttggcgtggatccgatatcaactagatcttgaga

SEQ ID NO: 7327 - DNA, 170 bp, Artificial sequence
  Rbm10.5_Ctcf.809
  crRNA array
cgatttcttggctttatatatcttgtggaaaggacgaaacaccgtaatttctactaagtgtagatacgaaacctgaacccacacataatttctactaagtgtagataagcgctatcatgatcccaattttttaagcttggcgtggatccgatatcaactagatcttgaga

SEQ ID NO: 7328 - DNA, 170 bp, Artificial sequence
  Rbm10.5_Elf3.826
  crRNA array
cgatttcttggctttatatatcttgtggaaaggacgaaacaccgtaatttctactaagtgtagatacgaaacctgaacccacacataatttctactaagtgtagattccgagacatcctaatccacttttttaagcttggcgtggatccgatatcaactagatcttgaga

SEQ ID NO: 7329 - DNA, 170 bp, Artificial sequence
  Rbm10.5_Elf3.983
  crRNA array
cgatttcttggctttatatatcttgtggaaaggacgaaacaccgtaatttctactaagtgtagatacgaaacctgaacccacacataatttctactaagtgtagattaggccccctaactggaccattttttaagcttggcgtggatccgatatcaactagatcttgaga

SEQ ID NO: 7330 - DNA, 170 bp, Artificial sequence
  Rbm10.5_Ep300.310
  crRNA array
cgatttcttggctttatatatcttgtggaaaggacgaaacaccgtaatttctactaagtgtagatacgaaacctgaacccacacataatttctactaagtgtagatatggtacgacagtgaggaagttttttaagcttggcgtggatccgatatcaactagatcttgaga

SEQ ID NO: 7331 - DNA, 170 bp, Artificial sequence
  Rbm10.5_Ep300.587
  crRNA array
cgatttcttggctttatatatcttgtggaaaggacgaaacaccgtaatttctactaagtgtagatacgaaacctgaacccacacataatttctactaagtgtagatcgccccggggcccccaaccattttttaagcttggcgtggatccgatatcaactagatcttgaga

SEQ ID NO: 7332 - DNA, 170 bp, Artificial sequence
  Rbm10.5_Epha2.126
  crRNA array
cgatttcttggctttatatatcttgtggaaaggacgaaacaccgtaatttctactaagtgtagatacgaaacctgaacccacacataatttctactaagtgtagatcctgtgccgccgcggccgccttttttaagcttggcgtggatccgatatcaactagatcttgaga

SEQ ID NO: 7333 - DNA, 170 bp, Artificial sequence
  Rbm10.5_Epha2.5
  crRNA array
cgatttcttggctttatatatcttgtggaaaggacgaaacaccgtaatttctactaagtgtagatacgaaacctgaacccacacataatttctactaagtgtagatcatgagctggcgccacccggttttttaagcttggcgtggatccgatatcaactagatcttgaga

SEQ ID NO: 7334 - DNA, 170 bp, Artificial sequence
  Rbm10.5_Fat1.105
  crRNA array
cgatttcttggctttatatatcttgtggaaaggacgaaacaccgtaatttctactaagtgtagatacgaaacctgaacccacacataatttctactaagtgtagataactcgaggtgacaacaagtttttttaagcttggcgtggatccgatatcaactagatcttgaga

SEQ ID NO: 7335 - DNA, 170 bp, Artificial sequence
  Rbm10.5_Fat1.122
  crRNA array
cgatttcttggctttatatatcttgtggaaaggacgaaacaccgtaatttctactaagtgtagatacgaaacctgaacccacacataatttctactaagtgtagatccatcgacatggaaacgggattttttaagcttggcgtggatccgatatcaactagatcttgaga

SEQ ID NO: 7336 - DNA, 170 bp, Artificial sequence
  Rbm10.5_Fbxw7.21
  crRNA array
cgatttcttggctttatatatcttgtggaaaggacgaaacaccgtaatttctactaagtgtagatacgaaacctgaacccacacataatttctactaagtgtagattaatgtgccgtagaaacccattttttaagcttggcgtggatccgatatcaactagatcttgaga

SEQ ID NO: 7337 - DNA, 170 bp, Artificial sequence
  Rbm10.5_Fbxw7.23
  crRNA array
cgatttcttggctttatatatcttgtggaaaggacgaaacaccgtaatttctactaagtgtagatacgaaacctgaacccacacataatttctactaagtgtagatatgtgccgtagaaacccatattttttaagcttggcgtggatccgatatcaactagatcttgaga

SEQ ID NO: 7338 - DNA, 170 bp, Artificial sequence
  Rbm10.5_Gata3.34
  crRNA array
cgatttcttggctttatatatcttgtggaaaggacgaaacaccgtaatttctactaagtgtagatacgaaacctgaacccacacataatttctactaagtgtagatctaaactatcccgcaaagatttttttaagcttggcgtggatccgatatcaactagatcttgaga

SEQ ID NO: 7339 - DNA, 170 bp, Artificial sequence
  Rbm10.5_Gata3.47
  crRNA array
cgatttcttggctttatatatcttgtggaaaggacgaaacaccgtaatttctactaagtgtagatacgaaacctgaacccacacataatttctactaagtgtagatcgtagtaggacgggacgtggttttttaagcttggcgtggatccgatatcaactagatcttgaga

SEQ ID NO: 7340 - DNA, 170 bp, Artificial sequence
  Rbm10.5_H2-Q2.1
  crRNA array
cgatttcttggctttatatatcttgtggaaaggacgaaacaccgtaatttctactaagtgtagatacgaaacctgaacccacacataatttctactaagtgtagatagggcggccaccaacagcagttttttaagcttggcgtggatccgatatcaactagatcttgaga

SEQ ID NO: 7341 - DNA, 170 bp, Artificial sequence
  Rbm10.5_H2-Q2.2
  crRNA array
cgatttcttggctttatatatcttgtggaaaggacgaaacaccgtaatttctactaagtgtagatacgaaacctgaacccacacataatttctactaagtgtagattaacctgcgcccgctgctgattttttaagcttggcgtggatccgatatcaactagatcttgaga

SEQ ID NO: 7342 - DNA, 170 bp, Artificial sequence
  Rbm10.5_Kdm5c.1878
  crRNA array
cgatttcttggctttatatatcttgtggaaaggacgaaacaccgtaatttctactaagtgtagatacgaaacctgaacccacacataatttctactaagtgtagatagagcacggcacccgcccccttttttaagcttggcgtggatccgatatcaactagatcttgaga

SEQ ID NO: 7343 - DNA, 170 bp, Artificial sequence
  Rbm10.5_Kdm5c.1879
  crRNA array
cgatttcttggctttatatatcttgtggaaaggacgaaacaccgtaatttctactaagtgtagatacgaaacctgaacccacacataatttctactaagtgtagatgagcacggcacccgccccccttttttaagcttggcgtggatccgatatcaactagatcttgaga

SEQ ID NO: 7344 - DNA, 170 bp, Artificial sequence
  Rbm10.5_Kdm6a.56
  crRNA array
cgatttcttggctttatatatcttgtggaaaggacgaaacaccgtaatttctactaagtgtagatacgaaacctgaacccacacataatttctactaagtgtagattcgctgccgcctctcgcggcttttttaagcttggcgtggatccgatatcaactagatcttgaga

SEQ ID NO: 7345 - DNA, 170 bp, Artificial sequence
  Rbm10.5_Kdm6a.57
  crRNA array
cgatttcttggctttatatatcttgtggaaaggacgaaacaccgtaatttctactaagtgtagatacgaaacctgaacccacacataatttctactaagtgtagatcgctgccgcctctcgcggcattttttaagcttggcgtggatccgatatcaactagatcttgaga

SEQ ID NO: 7346 - DNA, 170 bp, Artificial sequence
  Rbm10.5_Kmt2b.265
  crRNA array
cgatttcttggctttatatatcttgtggaaaggacgaaacaccgtaatttctactaagtgtagatacgaaacctgaacccacacataatttctactaagtgtagatccccaagtgaagcccacctgttttttaagcttggcgtggatccgatatcaactagatcttgaga

SEQ ID NO: 7347 - DNA, 170 bp, Artificial sequence
  Rbm10.5_Kmt2b.298
  crRNA array
cgatttcttggctttatatatcttgtggaaaggacgaaacaccgtaatttctactaagtgtagatacgaaacctgaacccacacataatttctactaagtgtagattccggcagggaccggctggcttttttaagcttggcgtggatccgatatcaactagatcttgaga

SEQ ID NO: 7348 - DNA, 170 bp, Artificial sequence
  Rbm10.5_Kmt2c.1962
  crRNA array
cgatttcttggctttatatatcttgtggaaaggacgaaacaccgtaatttctactaagtgtagatacgaaacctgaacccacacataatttctactaagtgtagatgtgacgatctgtgccacaagttttttaagcttggcgtggatccgatatcaactagatcttgaga

SEQ ID NO: 7349 - DNA, 170 bp, Artificial sequence
  Rbm10.5_Kmt2c.2236
  crRNA array
cgatttcttggctttatatatcttgtggaaaggacgaaacaccgtaatttctactaagtgtagatacgaaacctgaacccacacataatttctactaagtgtagatactcgacctccacctccctattttttaagcttggcgtggatccgatatcaactagatcttgaga

SEQ ID NO: 7350 - DNA, 170 bp, Artificial sequence
  Rbm10.5_Kmt2d.316
  crRNA array
cgatttcttggctttatatatcttgtggaaaggacgaaacaccgtaatttctactaagtgtagatacgaaacctgaacccacacataatttctactaagtgtagatactccaggccacccaggtggttttttaagcttggcgtggatccgatatcaactagatcttgaga

SEQ ID NO: 7351 - DNA, 170 bp, Artificial sequence
  Rbm10.5_Kmt2d.416
  crRNA array
cgatttcttggctttatatatcttgtggaaaggacgaaacaccgtaatttctactaagtgtagatacgaaacctgaacccacacataatttctactaagtgtagattaaacccccgggggaagggtttttttaagcttggcgtggatccgatatcaactagatcttgaga

SEQ ID NO: 7352 - DNA, 170 bp, Artificial sequence
  Rbm10.5_Map2k4.119
  crRNA array
cgatttcttggctttatatatcttgtggaaaggacgaaacaccgtaatttctactaagtgtagatacgaaacctgaacccacacataatttctactaagtgtagattgctgtgtgggcggccacatttttttaagcttggcgtggatccgatatcaactagatcttgaga

SEQ ID NO: 7353 - DNA, 170 bp, Artificial sequence
  Rbm10.5_Map2k4.1261
  crRNA array
cgatttcttggctttatatatcttgtggaaaggacgaaacaccgtaatttctactaagtgtagatacgaaacctgaacccacacataatttctactaagtgtagatgatgtagtaatgcggagtagttttttaagcttggcgtggatccgatatcaactagatcttgaga

SEQ ID NO: 7354 - DNA, 170 bp, Artificial sequence
  Rbm10.5_Map3k1.235
  crRNA array
cgatttcttggctttatatatcttgtggaaaggacgaaacaccgtaatttctactaagtgtagatacgaaacctgaacccacacataatttctactaagtgtagataaaacgctactgatcgatcgttttttaagcttggcgtggatccgatatcaactagatcttgaga

SEQ ID NO: 7355 - DNA, 170 bp, Artificial sequence
  Rbm10.5_Map3k1.3838
  crRNA array
cgatttcttggctttatatatcttgtggaaaggacgaaacaccgtaatttctactaagtgtagatacgaaacctgaacccacacataatttctactaagtgtagatccaacaacagggccccactattttttaagcttggcgtggatccgatatcaactagatcttgaga

SEQ ID NO: 7356 - DNA, 170 bp, Artificial sequence
  Rbm10.5_Mga.1655
  crRNA array
cgatttcttggctttatatatcttgtggaaaggacgaaacaccgtaatttctactaagtgtagatacgaaacctgaacccacacataatttctactaagtgtagatcgagaagtggagagcatattttttttaagcttggcgtggatccgatatcaactagatcttgaga

SEQ ID NO: 7357 - DNA, 170 bp, Artificial sequence
  Rbm10.5_Mga.93
  crRNA array
cgatttcttggctttatatatcttgtggaaaggacgaaacaccgtaatttctactaagtgtagatacgaaacctgaacccacacataatttctactaagtgtagatgagaaggctccccataatgtttttttaagcttggcgtggatccgatatcaactagatcttgaga

SEQ ID NO: 7358 - DNA, 170 bp, Artificial sequence
  Rbm10.5_Nf1.746
  crRNA array
cgatttcttggctttatatatcttgtggaaaggacgaaacaccgtaatttctactaagtgtagatacgaaacctgaacccacacataatttctactaagtgtagattaagcataatgatgatgccattttttaagcttggcgtggatccgatatcaactagatcttgaga

SEQ ID NO: 7359 - DNA, 170 bp, Artificial sequence
  Rbm10.5_Nf1.97
  crRNA array
cgatttcttggctttatatatcttgtggaaaggacgaaacaccgtaatttctactaagtgtagatacgaaacctgaacccacacataatttctactaagtgtagatagcccgctacatgctgatgcttttttaagcttggcgtggatccgatatcaactagatcttgaga

SEQ ID NO: 7360 - DNA, 170 bp, Artificial sequence
  Rbm10.5_Nf2.356
  crRNA array
cgatttcttggctttatatatcttgtggaaaggacgaaacaccgtaatttctactaagtgtagatacgaaacctgaacccacacataatttctactaagtgtagatcggagtcatctgatagagatttttttaagcttggcgtggatccgatatcaactagatcttgaga

SEQ ID NO: 7361 - DNA, 170 bp, Artificial sequence
  Rbm10.5_Nf2.768
  crRNA array
cgatttcttggctttatatatcttgtggaaaggacgaaacaccgtaatttctactaagtgtagatacgaaacctgaacccacacataatttctactaagtgtagatccgaagccccagtgtccggcttttttaagcttggcgtggatccgatatcaactagatcttgaga

SEQ ID NO: 7362 - DNA, 170 bp, Artificial sequence
  Rbm10.5_Notch1.1849
  crRNA array
cgatttcttggctttatatatcttgtggaaaggacgaaacaccgtaatttctactaagtgtagatacgaaacctgaacccacacataatttctactaagtgtagatctggcgggtgggcggcgctgttttttaagcttggcgtggatccgatatcaactagatcttgaga

SEQ ID NO: 7363 - DNA, 170 bp, Artificial sequence
  Rbm10.5_Notch1.649
  crRNA array
cgatttcttggctttatatatcttgtggaaaggacgaaacaccgtaatttctactaagtgtagatacgaaacctgaacccacacataatttctactaagtgtagattgggccaacgatgccaggacttttttaagcttggcgtggatccgatatcaactagatcttgaga

SEQ ID NO: 7364 - DNA, 170 bp, Artificial sequence
  Rbm10.5_Nsd1.70
  crRNA array
cgatttcttggctttatatatcttgtggaaaggacgaaacaccgtaatttctactaagtgtagatacgaaacctgaacccacacataatttctactaagtgtagatactggtgtggacgatgcagattttttaagcttggcgtggatccgatatcaactagatcttgaga

SEQ ID NO: 7365 - DNA, 170 bp, Artificial sequence
  Rbm10.5_Nsd1.90
  crRNA array
cgatttcttggctttatatatcttgtggaaaggacgaaacaccgtaatttctactaagtgtagatacgaaacctgaacccacacataatttctactaagtgtagataggagctaacggcaagaatgttttttaagcttggcgtggatccgatatcaactagatcttgaga

SEQ ID NO: 7366 - DNA, 170 bp, Artificial sequence
  Rbm10.5_Pbrm1.1236
  crRNA array
cgatttcttggctttatatatcttgtggaaaggacgaaacaccgtaatttctactaagtgtagatacgaaacctgaacccacacataatttctactaagtgtagatgccgataaaaccaacagccgttttttaagcttggcgtggatccgatatcaactagatcttgaga

SEQ ID NO: 7367 - DNA, 170 bp, Artificial sequence
  Rbm10.5_Pbrm1.969
  crRNA array
cgatttcttggctttatatatcttgtggaaaggacgaaacaccgtaatttctactaagtgtagatacgaaacctgaacccacacataatttctactaagtgtagatgagccctaatgaacagctcattttttaagcttggcgtggatccgatatcaactagatcttgaga

SEQ ID NO: 7368 - DNA, 170 bp, Artificial sequence
  Rbm10.5_Pik3r1.76
  crRNA array
cgatttcttggctttatatatcttgtggaaaggacgaaacaccgtaatttctactaagtgtagatacgaaacctgaacccacacataatttctactaagtgtagataaaacctatacggcccgcacttttttaagcttggcgtggatccgatatcaactagatcttgaga

SEQ ID NO: 7369 - DNA, 170 bp, Artificial sequence
  Rbm10.5_Pik3r1.77
  crRNA array
cgatttcttggctttatatatcttgtggaaaggacgaaacaccgtaatttctactaagtgtagatacgaaacctgaacccacacataatttctactaagtgtagataaacctatacggcccgcactttttttaagcttggcgtggatccgatatcaactagatcttgaga

SEQ ID NO: 7370 - DNA, 170 bp, Artificial sequence
  Rbm10.5_Pten.240
  crRNA array
cgatttcttggctttatatatcttgtggaaaggacgaaacaccgtaatttctactaagtgtagatacgaaacctgaacccacacataatttctactaagtgtagattgcatacgctatagctgcttttttttaagcttggcgtggatccgatatcaactagatcttgaga

SEQ ID NO: 7371 - DNA, 170 bp, Artificial sequence
  Rbm10.5_Pten.265
  crRNA array
cgatttcttggctttatatatcttgtggaaaggacgaaacaccgtaatttctactaagtgtagatacgaaacctgaacccacacataatttctactaagtgtagataagcgtggtgcgtgacgcacttttttaagcttggcgtggatccgatatcaactagatcttgaga

SEQ ID NO: 7372 - DNA, 170 bp, Artificial sequence
  Rbm10.5_Rasa1.1478
  crRNA array
cgatttcttggctttatatatcttgtggaaaggacgaaacaccgtaatttctactaagtgtagatacgaaacctgaacccacacataatttctactaagtgtagatcgataatggtctatgatgtcttttttaagcttggcgtggatccgatatcaactagatcttgaga

SEQ ID NO: 7373 - DNA, 170 bp, Artificial sequence
  Rbm10.5_Rasa1.223
  crRNA array
cgatttcttggctttatatatcttgtggaaaggacgaaacaccgtaatttctactaagtgtagatacgaaacctgaacccacacataatttctactaagtgtagattccatggagtatcgtgctcgttttttaagcttggcgtggatccgatatcaactagatcttgaga

SEQ ID NO: 7374 - DNA, 170 bp, Artificial sequence
  Rbm10.5_Rb1.211
  crRNA array
cgatttcttggctttatatatcttgtggaaaggacgaaacaccgtaatttctactaagtgtagatacgaaacctgaacccacacataatttctactaagtgtagattctgacatgatcgggtacctttttttaagcttggcgtggatccgatatcaactagatcttgaga

SEQ ID NO: 7375 - DNA, 170 bp, Artificial sequence
  Rbm10.5_Rb1.394
  crRNA array
cgatttcttggctttatatatcttgtggaaaggacgaaacaccgtaatttctactaagtgtagatacgaaacctgaacccacacataatttctactaagtgtagatagaaatctcgaagcaggatcttttttaagcttggcgtggatccgatatcaactagatcttgaga

SEQ ID NO: 7376 - DNA, 170 bp, Artificial sequence
  Rbm10.5_Rnf43.1920
  crRNA array
cgatttcttggctttatatatcttgtggaaaggacgaaacaccgtaatttctactaagtgtagatacgaaacctgaacccacacataatttctactaagtgtagatatccccgtgccgtggactccttttttaagcttggcgtggatccgatatcaactagatcttgaga

SEQ ID NO: 7377 - DNA, 170 bp, Artificial sequence
  Rbm10.5_Rnf43.39
  crRNA array
cgatttcttggctttatatatcttgtggaaaggacgaaacaccgtaatttctactaagtgtagatacgaaacctgaacccacacataatttctactaagtgtagatcaaggggatcactctgataattttttaagcttggcgtggatccgatatcaactagatcttgaga

SEQ ID NO: 7378 - DNA, 170 bp, Artificial sequence
  Rbm10.5_Runx1.204
  crRNA array
cgatttcttggctttatatatcttgtggaaaggacgaaacaccgtaatttctactaagtgtagatacgaaacctgaacccacacataatttctactaagtgtagattaaataagtccagccgttttttttttaagcttggcgtggatccgatatcaactagatcttgaga

SEQ ID NO: 7379 - DNA, 170 bp, Artificial sequence
  Rbm10.5_Runx1.81
  crRNA array
cgatttcttggctttatatatcttgtggaaaggacgaaacaccgtaatttctactaagtgtagatacgaaacctgaacccacacataatttctactaagtgtagataggacgcgtatgggaattttttttttaagcttggcgtggatccgatatcaactagatcttgaga

SEQ ID NO: 7380 - DNA, 170 bp, Artificial sequence
  Rbm10.5_Setd2.143
  crRNA array
cgatttcttggctttatatatcttgtggaaaggacgaaacaccgtaatttctactaagtgtagatacgaaacctgaacccacacataatttctactaagtgtagatgcacaaccacaacagactggttttttaagcttggcgtggatccgatatcaactagatcttgaga

SEQ ID NO: 7381 - DNA, 170 bp, Artificial sequence
  Rbm10.5_Setd2.508
  crRNA array
cgatttcttggctttatatatcttgtggaaaggacgaaacaccgtaatttctactaagtgtagatacgaaacctgaacccacacataatttctactaagtgtagattacgatcccgagcacccgacttttttaagcttggcgtggatccgatatcaactagatcttgaga

SEQ ID NO: 7382 - DNA, 170 bp, Artificial sequence
  Rbm10.5_Smad4.3038
  crRNA array
cgatttcttggctttatatatcttgtggaaaggacgaaacaccgtaatttctactaagtgtagatacgaaacctgaacccacacataatttctactaagtgtagatatctgcggcagtgtcaccggttttttaagcttggcgtggatccgatatcaactagatcttgaga

SEQ ID NO: 7383 - DNA, 170 bp, Artificial sequence
  Rbm10.5_Smad4.39
  crRNA array
cgatttcttggctttatatatcttgtggaaaggacgaaacaccgtaatttctactaagtgtagatacgaaacctgaacccacacataatttctactaagtgtagatagtcaaacgcatactgacaattttttaagcttggcgtggatccgatatcaactagatcttgaga

SEQ ID NO: 7384 - DNA, 170 bp, Artificial sequence
  Rbm10.5_Stag2.1409
  crRNA array
cgatttcttggctttatatatcttgtggaaaggacgaaacaccgtaatttctactaagtgtagatacgaaacctgaacccacacataatttctactaagtgtagatgctaataactgcggaagggcttttttaagcttggcgtggatccgatatcaactagatcttgaga

SEQ ID NO: 7385 - DNA, 170 bp, Artificial sequence
  Rbm10.5_Stag2.4401
  crRNA array
cgatttcttggctttatatatcttgtggaaaggacgaaacaccgtaatttctactaagtgtagatacgaaacctgaacccacacataatttctactaagtgtagattaatcgtccagtggtgtatattttttaagcttggcgtggatccgatatcaactagatcttgaga

SEQ ID NO: 7386 - DNA, 170 bp, Artificial sequence
  Rbm10.5_Tbl1xr1.1
  crRNA array
cgatttcttggctttatatatcttgtggaaaggacgaaacaccgtaatttctactaagtgtagatacgaaacctgaacccacacataatttctactaagtgtagatggatgcgcatactggtgaagttttttaagcttggcgtggatccgatatcaactagatcttgaga

SEQ ID NO: 7387 - DNA, 170 bp, Artificial sequence
  Rbm10.5_Tbl1xr1.83
  crRNA array
cgatttcttggctttatatatcttgtggaaaggacgaaacaccgtaatttctactaagtgtagatacgaaacctgaacccacacataatttctactaagtgtagatatggtcgacccatcgagtctttttttaagcttggcgtggatccgatatcaactagatcttgaga

SEQ ID NO: 7388 - DNA, 170 bp, Artificial sequence
  Rbm10.5_Tgfbr2.290
  crRNA array
cgatttcttggctttatatatcttgtggaaaggacgaaacaccgtaatttctactaagtgtagatacgaaacctgaacccacacataatttctactaagtgtagatcctctcggcgcccgggtaaattttttaagcttggcgtggatccgatatcaactagatcttgaga

SEQ ID NO: 7389 - DNA, 170 bp, Artificial sequence
  Rbm10.5_Tgfbr2.292
  crRNA array
cgatttcttggctttatatatcttgtggaaaggacgaaacaccgtaatttctactaagtgtagatacgaaacctgaacccacacataatttctactaagtgtagatcccgggcgccgagagggaaattttttaagcttggcgtggatccgatatcaactagatcttgaga

SEQ ID NO: 7390 - DNA, 170 bp, Artificial sequence
  Rbm10.5_Trp53.4
  crRNA array
cgatttcttggctttatatatcttgtggaaaggacgaaacaccgtaatttctactaagtgtagatacgaaacctgaacccacacataatttctactaagtgtagatccctgaactgcccccagggattttttaagcttggcgtggatccgatatcaactagatcttgaga

SEQ ID NO: 7391 - DNA, 170 bp, Artificial sequence
  Rbm10.5_Trp53.528
  crRNA array
cgatttcttggctttatatatcttgtggaaaggacgaaacaccgtaatttctactaagtgtagatacgaaacctgaacccacacataatttctactaagtgtagatgctgggccagcagagacctgttttttaagcttggcgtggatccgatatcaactagatcttgaga

SEQ ID NO: 7392 - DNA, 170 bp, Artificial sequence
  Rbm10.5_Vhl.1
  crRNA array
cgatttcttggctttatatatcttgtggaaaggacgaaacaccgtaatttctactaagtgtagatacgaaacctgaacccacacataatttctactaagtgtagatagggctcccggcggccatttttttttaagcttggcgtggatccgatatcaactagatcttgaga

SEQ ID NO: 7393 - DNA, 170 bp, Artificial sequence
  Rbm10.5_Vhl.151
  crRNA array
cgatttcttggctttatatatcttgtggaaaggacgaaacaccgtaatttctactaagtgtagatacgaaacctgaacccacacataatttctactaagtgtagattagagcactcacccgagggattttttaagcttggcgtggatccgatatcaactagatcttgaga

SEQ ID NO: 7394 - DNA, 170 bp, Artificial sequence
  Rbm10.5_Zc3h13.1387
  crRNA array
cgatttcttggctttatatatcttgtggaaaggacgaaacaccgtaatttctactaagtgtagatacgaaacctgaacccacacataatttctactaagtgtagatgtgacgccggtcatgtgactttttttaagcttggcgtggatccgatatcaactagatcttgaga

SEQ ID NO: 7395 - DNA, 170 bp, Artificial sequence
  Rbm10.5_Zc3h13.1777
  crRNA array
cgatttcttggctttatatatcttgtggaaaggacgaaacaccgtaatttctactaagtgtagatacgaaacctgaacccacacataatttctactaagtgtagatgatgctgccagtgtagcggcttttttaagcttggcgtggatccgatatcaactagatcttgaga

SEQ ID NO: 7396 - DNA, 170 bp, Artificial sequence
  Rbm10.6_Acvr2a.155
  crRNA array
cgatttcttggctttatatatcttgtggaaaggacgaaacaccgtaatttctactaagtgtagatcgaaacctgaacccacacagtaatttctactaagtgtagatggacctggctaatcaagtatttttttaagcttggcgtggatccgatatcaactagatcttgaga

SEQ ID NO: 7397 - DNA, 170 bp, Artificial sequence
  Rbm10.6_Acvr2a.70
  crRNA array
cgatttcttggctttatatatcttgtggaaaggacgaaacaccgtaatttctactaagtgtagatcgaaacctgaacccacacagtaatttctactaagtgtagatcccgaggcgccggagaagccttttttaagcttggcgtggatccgatatcaactagatcttgaga

SEQ ID NO: 7398 - DNA, 170 bp, Artificial sequence
  Rbm10.6_Apc.21
  crRNA array
cgatttcttggctttatatatcttgtggaaaggacgaaacaccgtaatttctactaagtgtagatcgaaacctgaacccacacagtaatttctactaagtgtagatgtgatccacacgtgtagctgttttttaagcttggcgtggatccgatatcaactagatcttgaga

SEQ ID NO: 7399 - DNA, 170 bp, Artificial sequence
  Rbm10.6_Apc.867
  crRNA array
cgatttcttggctttatatatcttgtggaaaggacgaaacaccgtaatttctactaagtgtagatcgaaacctgaacccacacagtaatttctactaagtgtagatcagtcccaggcggcggaagcttttttaagcttggcgtggatccgatatcaactagatcttgaga

SEQ ID NO: 7400 - DNA, 170 bp, Artificial sequence
  Rbm10.6_Arid1a.2
  crRNA array
cgatttcttggctttatatatcttgtggaaaggacgaaacaccgtaatttctactaagtgtagatcgaaacctgaacccacacagtaatttctactaagtgtagatcccgcgcccccgtcctggggttttttaagcttggcgtggatccgatatcaactagatcttgaga

SEQ ID NO: 7401 - DNA, 170 bp, Artificial sequence
  Rbm10.6_Arid1a.5
  crRNA array
cgatttcttggctttatatatcttgtggaaaggacgaaacaccgtaatttctactaagtgtagatcgaaacctgaacccacacagtaatttctactaagtgtagatcccgcgctcggccgctgccgttttttaagcttggcgtggatccgatatcaactagatcttgaga

SEQ ID NO: 7402 - DNA, 170 bp, Artificial sequence
  Rbm10.6_Arid2.166
  crRNA array
cgatttcttggctttatatatcttgtggaaaggacgaaacaccgtaatttctactaagtgtagatcgaaacctgaacccacacagtaatttctactaagtgtagataaccgcgatctgggttttttttttttaagcttggcgtggatccgatatcaactagatcttgaga

SEQ ID NO: 7403 - DNA, 170 bp, Artificial sequence
  Rbm10.6_Arid2.172
  crRNA array
cgatttcttggctttatatatcttgtggaaaggacgaaacaccgtaatttctactaagtgtagatcgaaacctgaacccacacagtaatttctactaagtgtagatctggacgagctgcggcagttttttttaagcttggcgtggatccgatatcaactagatcttgaga

SEQ ID NO: 7404 - DNA, 170 bp, Artificial sequence
  Rbm10.6_Atm.120
  crRNA array
cgatttcttggctttatatatcttgtggaaaggacgaaacaccgtaatttctactaagtgtagatcgaaacctgaacccacacagtaatttctactaagtgtagatgacaggtagtcggcagctaattttttaagcttggcgtggatccgatatcaactagatcttgaga

SEQ ID NO: 7405 - DNA, 170 bp, Artificial sequence
  Rbm10.6_Atm.997
  crRNA array
cgatttcttggctttatatatcttgtggaaaggacgaaacaccgtaatttctactaagtgtagatcgaaacctgaacccacacagtaatttctactaagtgtagatgagaaagtctccgaatcgttttttttaagcttggcgtggatccgatatcaactagatcttgaga

SEQ ID NO: 7406 - DNA, 170 bp, Artificial sequence
  Rbm10.6_Atrx.249
  crRNA array
cgatttcttggctttatatatcttgtggaaaggacgaaacaccgtaatttctactaagtgtagatcgaaacctgaacccacacagtaatttctactaagtgtagattagccagtcgctcatatctcttttttaagcttggcgtggatccgatatcaactagatcttgaga

SEQ ID NO: 7407 - DNA, 170 bp, Artificial sequence
  Rbm10.6_Atrx.251
  crRNA array
cgatttcttggctttatatatcttgtggaaaggacgaaacaccgtaatttctactaagtgtagatcgaaacctgaacccacacagtaatttctactaagtgtagatgccagtcgctcatatctctgttttttaagcttggcgtggatccgatatcaactagatcttgaga

SEQ ID NO: 7408 - DNA, 170 bp, Artificial sequence
  Rbm10.6_Bcor.203
  crRNA array
cgatttcttggctttatatatcttgtggaaaggacgaaacaccgtaatttctactaagtgtagatcgaaacctgaacccacacagtaatttctactaagtgtagatccccggagcggagtccaggcttttttaagcttggcgtggatccgatatcaactagatcttgaga

SEQ ID NO: 7409 - DNA, 170 bp, Artificial sequence
  Rbm10.6_Bcor.475
  crRNA array
cgatttcttggctttatatatcttgtggaaaggacgaaacaccgtaatttctactaagtgtagatcgaaacctgaacccacacagtaatttctactaagtgtagattgcaacccctctgtatgggattttttaagcttggcgtggatccgatatcaactagatcttgaga

SEQ ID NO: 7410 - DNA, 170 bp, Artificial sequence
  Rbm10.6_Brca1.112
  crRNA array
cgatttcttggctttatatatcttgtggaaaggacgaaacaccgtaatttctactaagtgtagatcgaaacctgaacccacacagtaatttctactaagtgtagatctagacgctctgtggagactttttttaagcttggcgtggatccgatatcaactagatcttgaga

SEQ ID NO: 7411 - DNA, 170 bp, Artificial sequence
  Rbm10.6_Brca1.53
  crRNA array
cgatttcttggctttatatatcttgtggaaaggacgaaacaccgtaatttctactaagtgtagatcgaaacctgaacccacacagtaatttctactaagtgtagataatgaggaggcgtcgatcatttttttaagcttggcgtggatccgatatcaactagatcttgaga

SEQ ID NO: 7412 - DNA, 170 bp, Artificial sequence
  Rbm10.6_Casp8.45
  crRNA array
cgatttcttggctttatatatcttgtggaaaggacgaaacaccgtaatttctactaagtgtagatcgaaacctgaacccacacagtaatttctactaagtgtagatctaccgagatcctgtgaatgttttttaagcttggcgtggatccgatatcaactagatcttgaga

SEQ ID NO: 7413 - DNA, 170 bp, Artificial sequence
  Rbm10.6_Casp8.54
  crRNA array
cgatttcttggctttatatatcttgtggaaaggacgaaacaccgtaatttctactaagtgtagatcgaaacctgaacccacacagtaatttctactaagtgtagatcagtgcagtcgtcgtaagatttttttaagcttggcgtggatccgatatcaactagatcttgaga

SEQ ID NO: 7414 - DNA, 170 bp, Artificial sequence
  Rbm10.6_Cbwd1.84
  crRNA array
cgatttcttggctttatatatcttgtggaaaggacgaaacaccgtaatttctactaagtgtagatcgaaacctgaacccacacagtaatttctactaagtgtagatcacagcaggtaacatgccgcttttttaagcttggcgtggatccgatatcaactagatcttgaga

SEQ ID NO: 7415 - DNA, 170 bp, Artificial sequence
  Rbm10.6_Cbwd1.85
  crRNA array
cgatttcttggctttatatatcttgtggaaaggacgaaacaccgtaatttctactaagtgtagatcgaaacctgaacccacacagtaatttctactaagtgtagatacagcaggtaacatgccgccttttttaagcttggcgtggatccgatatcaactagatcttgaga

SEQ ID NO: 7416 - DNA, 170 bp, Artificial sequence
  Rbm10.6_Cdh1.387
  crRNA array
cgatttcttggctttatatatcttgtggaaaggacgaaacaccgtaatttctactaagtgtagatcgaaacctgaacccacacagtaatttctactaagtgtagatctcggcgtctgccgggtccgttttttaagcttggcgtggatccgatatcaactagatcttgaga

SEQ ID NO: 7417 - DNA, 170 bp, Artificial sequence
  Rbm10.6_Cdh1.58
  crRNA array
cgatttcttggctttatatatcttgtggaaaggacgaaacaccgtaatttctactaagtgtagatcgaaacctgaacccacacagtaatttctactaagtgtagatctcgtccgcgcccgggactcttttttaagcttggcgtggatccgatatcaactagatcttgaga

SEQ ID NO: 7418 - DNA, 170 bp, Artificial sequence
  Rbm10.6_Cdkn2a.647
  crRNA array
cgatttcttggctttatatatcttgtggaaaggacgaaacaccgtaatttctactaagtgtagatcgaaacctgaacccacacagtaatttctactaagtgtagatgcaatcacgggagggagcagttttttaagcttggcgtggatccgatatcaactagatcttgaga

SEQ ID NO: 7419 - DNA, 170 bp, Artificial sequence
  Rbm10.6_Cdkn2a.648
  crRNA array
cgatttcttggctttatatatcttgtggaaaggacgaaacaccgtaatttctactaagtgtagatcgaaacctgaacccacacagtaatttctactaagtgtagatcaatcacgggagggagcagattttttaagcttggcgtggatccgatatcaactagatcttgaga

SEQ ID NO: 7420 - DNA, 170 bp, Artificial sequence
  Rbm10.6_Cic.162
  crRNA array
cgatttcttggctttatatatcttgtggaaaggacgaaacaccgtaatttctactaagtgtagatcgaaacctgaacccacacagtaatttctactaagtgtagatcgcaggcgcgcccggcggagttttttaagcttggcgtggatccgatatcaactagatcttgaga

SEQ ID NO: 7421 - DNA, 170 bp, Artificial sequence
  Rbm10.6_Cic.164
  crRNA array
cgatttcttggctttatatatcttgtggaaaggacgaaacaccgtaatttctactaagtgtagatcgaaacctgaacccacacagtaatttctactaagtgtagatcgggccctgggccggcggctttttttaagcttggcgtggatccgatatcaactagatcttgaga

SEQ ID NO: 7422 - DNA, 170 bp, Artificial sequence
  Rbm10.6_Ctcf.229
  crRNA array
cgatttcttggctttatatatcttgtggaaaggacgaaacaccgtaatttctactaagtgtagatcgaaacctgaacccacacagtaatttctactaagtgtagatggctggtggctgatagtctgttttttaagcttggcgtggatccgatatcaactagatcttgaga

SEQ ID NO: 7423 - DNA, 170 bp, Artificial sequence
  Rbm10.6_Ctcf.809
  crRNA array
cgatttcttggctttatatatcttgtggaaaggacgaaacaccgtaatttctactaagtgtagatcgaaacctgaacccacacagtaatttctactaagtgtagataagcgctatcatgatcccaattttttaagcttggcgtggatccgatatcaactagatcttgaga

SEQ ID NO: 7424 - DNA, 170 bp, Artificial sequence
  Rbm10.6_Elf3.826
  crRNA array
cgatttcttggctttatatatcttgtggaaaggacgaaacaccgtaatttctactaagtgtagatcgaaacctgaacccacacagtaatttctactaagtgtagattccgagacatcctaatccacttttttaagcttggcgtggatccgatatcaactagatcttgaga

SEQ ID NO: 7425 - DNA, 170 bp, Artificial sequence
  Rbm10.6_Elf3.983
  crRNA array
cgatttcttggctttatatatcttgtggaaaggacgaaacaccgtaatttctactaagtgtagatcgaaacctgaacccacacagtaatttctactaagtgtagattaggccccctaactggaccattttttaagcttggcgtggatccgatatcaactagatcttgaga

SEQ ID NO: 7426 - DNA, 170 bp, Artificial sequence
  Rbm10.6_Ep300.310
  crRNA array
cgatttcttggctttatatatcttgtggaaaggacgaaacaccgtaatttctactaagtgtagatcgaaacctgaacccacacagtaatttctactaagtgtagatatggtacgacagtgaggaagttttttaagcttggcgtggatccgatatcaactagatcttgaga

SEQ ID NO: 7427 - DNA, 170 bp, Artificial sequence
  Rbm10.6_Ep300.587
  crRNA array
cgatttcttggctttatatatcttgtggaaaggacgaaacaccgtaatttctactaagtgtagatcgaaacctgaacccacacagtaatttctactaagtgtagatcgccccggggcccccaaccattttttaagcttggcgtggatccgatatcaactagatcttgaga

SEQ ID NO: 7428 - DNA, 170 bp, Artificial sequence
  Rbm10.6_Epha2.126
  crRNA array
cgatttcttggctttatatatcttgtggaaaggacgaaacaccgtaatttctactaagtgtagatcgaaacctgaacccacacagtaatttctactaagtgtagatcctgtgccgccgcggccgccttttttaagcttggcgtggatccgatatcaactagatcttgaga

SEQ ID NO: 7429 - DNA, 170 bp, Artificial sequence
  Rbm10.6_Epha2.5
  crRNA array
cgatttcttggctttatatatcttgtggaaaggacgaaacaccgtaatttctactaagtgtagatcgaaacctgaacccacacagtaatttctactaagtgtagatcatgagctggcgccacccggttttttaagcttggcgtggatccgatatcaactagatcttgaga

SEQ ID NO: 7430 - DNA, 170 bp, Artificial sequence
  Rbm10.6_Fat1.105
  crRNA array
cgatttcttggctttatatatcttgtggaaaggacgaaacaccgtaatttctactaagtgtagatcgaaacctgaacccacacagtaatttctactaagtgtagataactcgaggtgacaacaagtttttttaagcttggcgtggatccgatatcaactagatcttgaga

SEQ ID NO: 7431 - DNA, 170 bp, Artificial sequence
  Rbm10.6_Fat1.122
  crRNA array
cgatttcttggctttatatatcttgtggaaaggacgaaacaccgtaatttctactaagtgtagatcgaaacctgaacccacacagtaatttctactaagtgtagatccatcgacatggaaacgggattttttaagcttggcgtggatccgatatcaactagatcttgaga

SEQ ID NO: 7432 - DNA, 170 bp, Artificial sequence
  Rbm10.6_Fbxw7.21
  crRNA array
cgatttcttggctttatatatcttgtggaaaggacgaaacaccgtaatttctactaagtgtagatcgaaacctgaacccacacagtaatttctactaagtgtagattaatgtgccgtagaaacccattttttaagcttggcgtggatccgatatcaactagatcttgaga

SEQ ID NO: 7433 - DNA, 170 bp, Artificial sequence
  Rbm10.6_Fbxw7.23
  crRNA array
cgatttcttggctttatatatcttgtggaaaggacgaaacaccgtaatttctactaagtgtagatcgaaacctgaacccacacagtaatttctactaagtgtagatatgtgccgtagaaacccatattttttaagcttggcgtggatccgatatcaactagatcttgaga

SEQ ID NO: 7434 - DNA, 170 bp, Artificial sequence
  Rbm10.6_Gata3.34
  crRNA array
cgatttcttggctttatatatcttgtggaaaggacgaaacaccgtaatttctactaagtgtagatcgaaacctgaacccacacagtaatttctactaagtgtagatctaaactatcccgcaaagatttttttaagcttggcgtggatccgatatcaactagatcttgaga

SEQ ID NO: 7435 - DNA, 170 bp, Artificial sequence
  Rbm10.6_Gata3.47
  crRNA array
cgatttcttggctttatatatcttgtggaaaggacgaaacaccgtaatttctactaagtgtagatcgaaacctgaacccacacagtaatttctactaagtgtagatcgtagtaggacgggacgtggttttttaagcttggcgtggatccgatatcaactagatcttgaga

SEQ ID NO: 7436 - DNA, 170 bp, Artificial sequence
  Rbm10.6_H2-Q2.1
  crRNA array
cgatttcttggctttatatatcttgtggaaaggacgaaacaccgtaatttctactaagtgtagatcgaaacctgaacccacacagtaatttctactaagtgtagatagggcggccaccaacagcagttttttaagcttggcgtggatccgatatcaactagatcttgaga

SEQ ID NO: 7437 - DNA, 170 bp, Artificial sequence
  Rbm10.6_H2-Q2.2
  crRNA array
cgatttcttggctttatatatcttgtggaaaggacgaaacaccgtaatttctactaagtgtagatcgaaacctgaacccacacagtaatttctactaagtgtagattaacctgcgcccgctgctgattttttaagcttggcgtggatccgatatcaactagatcttgaga

SEQ ID NO: 7438 - DNA, 170 bp, Artificial sequence
  Rbm10.6_Kdm5c.1878
  crRNA array
cgatttcttggctttatatatcttgtggaaaggacgaaacaccgtaatttctactaagtgtagatcgaaacctgaacccacacagtaatttctactaagtgtagatagagcacggcacccgcccccttttttaagcttggcgtggatccgatatcaactagatcttgaga

SEQ ID NO: 7439 - DNA, 170 bp, Artificial sequence
  Rbm10.6_Kdm5c.1879
  crRNA array
cgatttcttggctttatatatcttgtggaaaggacgaaacaccgtaatttctactaagtgtagatcgaaacctgaacccacacagtaatttctactaagtgtagatgagcacggcacccgccccccttttttaagcttggcgtggatccgatatcaactagatcttgaga

SEQ ID NO: 7440 - DNA, 170 bp, Artificial sequence
  Rbm10.6_Kdm6a.56
  crRNA array
cgatttcttggctttatatatcttgtggaaaggacgaaacaccgtaatttctactaagtgtagatcgaaacctgaacccacacagtaatttctactaagtgtagattcgctgccgcctctcgcggcttttttaagcttggcgtggatccgatatcaactagatcttgaga

SEQ ID NO: 7441 - DNA, 170 bp, Artificial sequence
  Rbm10.6_Kdm6a.57
  crRNA array
cgatttcttggctttatatatcttgtggaaaggacgaaacaccgtaatttctactaagtgtagatcgaaacctgaacccacacagtaatttctactaagtgtagatcgctgccgcctctcgcggcattttttaagcttggcgtggatccgatatcaactagatcttgaga

SEQ ID NO: 7442 - DNA, 170 bp, Artificial sequence
  Rbm10.6_Kmt2b.265
  crRNA array
cgatttcttggctttatatatcttgtggaaaggacgaaacaccgtaatttctactaagtgtagatcgaaacctgaacccacacagtaatttctactaagtgtagatccccaagtgaagcccacctgttttttaagcttggcgtggatccgatatcaactagatcttgaga

SEQ ID NO: 7443 - DNA, 170 bp, Artificial sequence
  Rbm10.6_Kmt2b.298
  crRNA array
cgatttcttggctttatatatcttgtggaaaggacgaaacaccgtaatttctactaagtgtagatcgaaacctgaacccacacagtaatttctactaagtgtagattccggcagggaccggctggcttttttaagcttggcgtggatccgatatcaactagatcttgaga

SEQ ID NO: 7444 - DNA, 170 bp, Artificial sequence
  Rbm10.6_Kmt2c.1962
  crRNA array
cgatttcttggctttatatatcttgtggaaaggacgaaacaccgtaatttctactaagtgtagatcgaaacctgaacccacacagtaatttctactaagtgtagatgtgacgatctgtgccacaagttttttaagcttggcgtggatccgatatcaactagatcttgaga

SEQ ID NO: 7445 - DNA, 170 bp, Artificial sequence
  Rbm10.6_Kmt2c.2236
  crRNA array
cgatttcttggctttatatatcttgtggaaaggacgaaacaccgtaatttctactaagtgtagatcgaaacctgaacccacacagtaatttctactaagtgtagatactcgacctccacctccctattttttaagcttggcgtggatccgatatcaactagatcttgaga

SEQ ID NO: 7446 - DNA, 170 bp, Artificial sequence
  Rbm10.6_Kmt2d.316
  crRNA array
cgatttcttggctttatatatcttgtggaaaggacgaaacaccgtaatttctactaagtgtagatcgaaacctgaacccacacagtaatttctactaagtgtagatactccaggccacccaggtggttttttaagcttggcgtggatccgatatcaactagatcttgaga

SEQ ID NO: 7447 - DNA, 170 bp, Artificial sequence
  Rbm10.6_Kmt2d.416
  crRNA array
cgatttcttggctttatatatcttgtggaaaggacgaaacaccgtaatttctactaagtgtagatcgaaacctgaacccacacagtaatttctactaagtgtagattaaacccccgggggaagggtttttttaagcttggcgtggatccgatatcaactagatcttgaga

SEQ ID NO: 7448 - DNA, 170 bp, Artificial sequence
  Rbm10.6_Map2k4.119
  crRNA array
cgatttcttggctttatatatcttgtggaaaggacgaaacaccgtaatttctactaagtgtagatcgaaacctgaacccacacagtaatttctactaagtgtagattgctgtgtgggcggccacatttttttaagcttggcgtggatccgatatcaactagatcttgaga

SEQ ID NO: 7449 - DNA, 170 bp, Artificial sequence
  Rbm10.6_Map2k4.1261
  crRNA array
cgatttcttggctttatatatcttgtggaaaggacgaaacaccgtaatttctactaagtgtagatcgaaacctgaacccacacagtaatttctactaagtgtagatgatgtagtaatgcggagtagttttttaagcttggcgtggatccgatatcaactagatcttgaga

SEQ ID NO: 7450 - DNA, 170 bp, Artificial sequence
  Rbm10.6_Map3k1.235
  crRNA array
cgatttcttggctttatatatcttgtggaaaggacgaaacaccgtaatttctactaagtgtagatcgaaacctgaacccacacagtaatttctactaagtgtagataaaacgctactgatcgatcgttttttaagcttggcgtggatccgatatcaactagatcttgaga

SEQ ID NO: 7451 - DNA, 170 bp, Artificial sequence
  Rbm10.6_Map3k1.3838
  crRNA array
cgatttcttggctttatatatcttgtggaaaggacgaaacaccgtaatttctactaagtgtagatcgaaacctgaacccacacagtaatttctactaagtgtagatccaacaacagggccccactattttttaagcttggcgtggatccgatatcaactagatcttgaga

SEQ ID NO: 7452 - DNA, 170 bp, Artificial sequence
  Rbm10.6_Mga.1655
  crRNA array
cgatttcttggctttatatatcttgtggaaaggacgaaacaccgtaatttctactaagtgtagatcgaaacctgaacccacacagtaatttctactaagtgtagatcgagaagtggagagcatattttttttaagcttggcgtggatccgatatcaactagatcttgaga

SEQ ID NO: 7453 - DNA, 170 bp, Artificial sequence
  Rbm10.6_Mga.93
  crRNA array
cgatttcttggctttatatatcttgtggaaaggacgaaacaccgtaatttctactaagtgtagatcgaaacctgaacccacacagtaatttctactaagtgtagatgagaaggctccccataatgtttttttaagcttggcgtggatccgatatcaactagatcttgaga

SEQ ID NO: 7454 - DNA, 170 bp, Artificial sequence
  Rbm10.6_Nf1.746
  crRNA array
cgatttcttggctttatatatcttgtggaaaggacgaaacaccgtaatttctactaagtgtagatcgaaacctgaacccacacagtaatttctactaagtgtagattaagcataatgatgatgccattttttaagcttggcgtggatccgatatcaactagatcttgaga

SEQ ID NO: 7455 - DNA, 170 bp, Artificial sequence
  Rbm10.6_Nf1.97
  crRNA array
cgatttcttggctttatatatcttgtggaaaggacgaaacaccgtaatttctactaagtgtagatcgaaacctgaacccacacagtaatttctactaagtgtagatagcccgctacatgctgatgcttttttaagcttggcgtggatccgatatcaactagatcttgaga

SEQ ID NO: 7456 - DNA, 170 bp, Artificial sequence
  Rbm10.6_Nf2.356
  crRNA array
cgatttcttggctttatatatcttgtggaaaggacgaaacaccgtaatttctactaagtgtagatcgaaacctgaacccacacagtaatttctactaagtgtagatcggagtcatctgatagagatttttttaagcttggcgtggatccgatatcaactagatcttgaga

SEQ ID NO: 7457 - DNA, 170 bp, Artificial sequence
  Rbm10.6_Nf2.768
  crRNA array
cgatttcttggctttatatatcttgtggaaaggacgaaacaccgtaatttctactaagtgtagatcgaaacctgaacccacacagtaatttctactaagtgtagatccgaagccccagtgtccggcttttttaagcttggcgtggatccgatatcaactagatcttgaga

SEQ ID NO: 7458 - DNA, 170 bp, Artificial sequence
  Rbm10.6_Notch1.1849
  crRNA array
cgatttcttggctttatatatcttgtggaaaggacgaaacaccgtaatttctactaagtgtagatcgaaacctgaacccacacagtaatttctactaagtgtagatctggcgggtgggcggcgctgttttttaagcttggcgtggatccgatatcaactagatcttgaga

SEQ ID NO: 7459 - DNA, 170 bp, Artificial sequence
  Rbm10.6_Notch1.649
  crRNA array
cgatttcttggctttatatatcttgtggaaaggacgaaacaccgtaatttctactaagtgtagatcgaaacctgaacccacacagtaatttctactaagtgtagattgggccaacgatgccaggacttttttaagcttggcgtggatccgatatcaactagatcttgaga

SEQ ID NO: 7460 - DNA, 170 bp, Artificial sequence
  Rbm10.6_Nsd1.70
  crRNA array
cgatttcttggctttatatatcttgtggaaaggacgaaacaccgtaatttctactaagtgtagatcgaaacctgaacccacacagtaatttctactaagtgtagatactggtgtggacgatgcagattttttaagcttggcgtggatccgatatcaactagatcttgaga

SEQ ID NO: 7461 - DNA, 170 bp, Artificial sequence
  Rbm10.6_Nsd1.90
  crRNA array
cgatttcttggctttatatatcttgtggaaaggacgaaacaccgtaatttctactaagtgtagatcgaaacctgaacccacacagtaatttctactaagtgtagataggagctaacggcaagaatgttttttaagcttggcgtggatccgatatcaactagatcttgaga

SEQ ID NO: 7462 - DNA, 170 bp, Artificial sequence
  Rbm10.6_Pbrm1.1236
  crRNA array
cgatttcttggctttatatatcttgtggaaaggacgaaacaccgtaatttctactaagtgtagatcgaaacctgaacccacacagtaatttctactaagtgtagatgccgataaaaccaacagccgttttttaagcttggcgtggatccgatatcaactagatcttgaga

SEQ ID NO: 7463 - DNA, 170 bp, Artificial sequence
  Rbm10.6_Pbrm1.969
  crRNA array
cgatttcttggctttatatatcttgtggaaaggacgaaacaccgtaatttctactaagtgtagatcgaaacctgaacccacacagtaatttctactaagtgtagatgagccctaatgaacagctcattttttaagcttggcgtggatccgatatcaactagatcttgaga

SEQ ID NO: 7464 - DNA, 170 bp, Artificial sequence
  Rbm10.6_Pik3r1.76
  crRNA array
cgatttcttggctttatatatcttgtggaaaggacgaaacaccgtaatttctactaagtgtagatcgaaacctgaacccacacagtaatttctactaagtgtagataaaacctatacggcccgcacttttttaagcttggcgtggatccgatatcaactagatcttgaga

SEQ ID NO: 7465 - DNA, 170 bp, Artificial sequence
  Rbm10.6_Pik3r1.77
  crRNA array
cgatttcttggctttatatatcttgtggaaaggacgaaacaccgtaatttctactaagtgtagatcgaaacctgaacccacacagtaatttctactaagtgtagataaacctatacggcccgcactttttttaagcttggcgtggatccgatatcaactagatcttgaga

SEQ ID NO: 7466 - DNA, 170 bp, Artificial sequence
  Rbm10.6_Pten.240
  crRNA array
cgatttcttggctttatatatcttgtggaaaggacgaaacaccgtaatttctactaagtgtagatcgaaacctgaacccacacagtaatttctactaagtgtagattgcatacgctatagctgcttttttttaagcttggcgtggatccgatatcaactagatcttgaga

SEQ ID NO: 7467 - DNA, 170 bp, Artificial sequence
  Rbm10.6_Pten.265
  crRNA array
cgatttcttggctttatatatcttgtggaaaggacgaaacaccgtaatttctactaagtgtagatcgaaacctgaacccacacagtaatttctactaagtgtagataagcgtggtgcgtgacgcacttttttaagcttggcgtggatccgatatcaactagatcttgaga

SEQ ID NO: 7468 - DNA, 170 bp, Artificial sequence
  Rbm10.6_Rasa1.1478
  crRNA array
cgatttcttggctttatatatcttgtggaaaggacgaaacaccgtaatttctactaagtgtagatcgaaacctgaacccacacagtaatttctactaagtgtagatcgataatggtctatgatgtcttttttaagcttggcgtggatccgatatcaactagatcttgaga

SEQ ID NO: 7469 - DNA, 170 bp, Artificial sequence
  Rbm10.6_Rasa1.223
  crRNA array
cgatttcttggctttatatatcttgtggaaaggacgaaacaccgtaatttctactaagtgtagatcgaaacctgaacccacacagtaatttctactaagtgtagattccatggagtatcgtgctcgttttttaagcttggcgtggatccgatatcaactagatcttgaga

SEQ ID NO: 7470 - DNA, 170 bp, Artificial sequence
  Rbm10.6_Rb1.211
  crRNA array
cgatttcttggctttatatatcttgtggaaaggacgaaacaccgtaatttctactaagtgtagatcgaaacctgaacccacacagtaatttctactaagtgtagattctgacatgatcgggtacctttttttaagcttggcgtggatccgatatcaactagatcttgaga

SEQ ID NO: 7471 - DNA, 170 bp, Artificial sequence
  Rbm10.6_Rb1.394
  crRNA array
cgatttcttggctttatatatcttgtggaaaggacgaaacaccgtaatttctactaagtgtagatcgaaacctgaacccacacagtaatttctactaagtgtagatagaaatctcgaagcaggatcttttttaagcttggcgtggatccgatatcaactagatcttgaga

SEQ ID NO: 7472 - DNA, 170 bp, Artificial sequence
  Rbm10.6_Rnf43.1920
  crRNA array
cgatttcttggctttatatatcttgtggaaaggacgaaacaccgtaatttctactaagtgtagatcgaaacctgaacccacacagtaatttctactaagtgtagatatccccgtgccgtggactccttttttaagcttggcgtggatccgatatcaactagatcttgaga

SEQ ID NO: 7473 - DNA, 170 bp, Artificial sequence
  Rbm10.6_Rnf43.39
  crRNA array
cgatttcttggctttatatatcttgtggaaaggacgaaacaccgtaatttctactaagtgtagatcgaaacctgaacccacacagtaatttctactaagtgtagatcaaggggatcactctgataattttttaagcttggcgtggatccgatatcaactagatcttgaga

SEQ ID NO: 7474 - DNA, 170 bp, Artificial sequence
  Rbm10.6_Runx1.204
  crRNA array
cgatttcttggctttatatatcttgtggaaaggacgaaacaccgtaatttctactaagtgtagatcgaaacctgaacccacacagtaatttctactaagtgtagattaaataagtccagccgttttttttttaagcttggcgtggatccgatatcaactagatcttgaga

SEQ ID NO: 7475 - DNA, 170 bp, Artificial sequence
  Rbm10.6_Runx1.81
  crRNA array
cgatttcttggctttatatatcttgtggaaaggacgaaacaccgtaatttctactaagtgtagatcgaaacctgaacccacacagtaatttctactaagtgtagataggacgcgtatgggaattttttttttaagcttggcgtggatccgatatcaactagatcttgaga

SEQ ID NO: 7476 - DNA, 170 bp, Artificial sequence
  Rbm10.6_Setd2.143
  crRNA array
cgatttcttggctttatatatcttgtggaaaggacgaaacaccgtaatttctactaagtgtagatcgaaacctgaacccacacagtaatttctactaagtgtagatgcacaaccacaacagactggttttttaagcttggcgtggatccgatatcaactagatcttgaga

SEQ ID NO: 7477 - DNA, 170 bp, Artificial sequence
  Rbm10.6_Setd2.508
  crRNA array
cgatttcttggctttatatatcttgtggaaaggacgaaacaccgtaatttctactaagtgtagatcgaaacctgaacccacacagtaatttctactaagtgtagattacgatcccgagcacccgacttttttaagcttggcgtggatccgatatcaactagatcttgaga

SEQ ID NO: 7478 - DNA, 170 bp, Artificial sequence
  Rbm10.6_Smad4.3038
  crRNA array
cgatttcttggctttatatatcttgtggaaaggacgaaacaccgtaatttctactaagtgtagatcgaaacctgaacccacacagtaatttctactaagtgtagatatctgcggcagtgtcaccggttttttaagcttggcgtggatccgatatcaactagatcttgaga

SEQ ID NO: 7479 - DNA, 170 bp, Artificial sequence
  Rbm10.6_Smad4.39
  crRNA array
cgatttcttggctttatatatcttgtggaaaggacgaaacaccgtaatttctactaagtgtagatcgaaacctgaacccacacagtaatttctactaagtgtagatagtcaaacgcatactgacaattttttaagcttggcgtggatccgatatcaactagatcttgaga

SEQ ID NO: 7480 - DNA, 170 bp, Artificial sequence
  Rbm10.6_Stag2.1409
  crRNA array
cgatttcttggctttatatatcttgtggaaaggacgaaacaccgtaatttctactaagtgtagatcgaaacctgaacccacacagtaatttctactaagtgtagatgctaataactgcggaagggcttttttaagcttggcgtggatccgatatcaactagatcttgaga

SEQ ID NO: 7481 - DNA, 170 bp, Artificial sequence
  Rbm10.6_Stag2.4401
  crRNA array
cgatttcttggctttatatatcttgtggaaaggacgaaacaccgtaatttctactaagtgtagatcgaaacctgaacccacacagtaatttctactaagtgtagattaatcgtccagtggtgtatattttttaagcttggcgtggatccgatatcaactagatcttgaga

SEQ ID NO: 7482 - DNA, 170 bp, Artificial sequence
  Rbm10.6_Tbl1xr1.1
  crRNA array
cgatttcttggctttatatatcttgtggaaaggacgaaacaccgtaatttctactaagtgtagatcgaaacctgaacccacacagtaatttctactaagtgtagatggatgcgcatactggtgaagttttttaagcttggcgtggatccgatatcaactagatcttgaga

SEQ ID NO: 7483 - DNA, 170 bp, Artificial sequence
  Rbm10.6_Tbl1xr1.83
  crRNA array
cgatttcttggctttatatatcttgtggaaaggacgaaacaccgtaatttctactaagtgtagatcgaaacctgaacccacacagtaatttctactaagtgtagatatggtcgacccatcgagtctttttttaagcttggcgtggatccgatatcaactagatcttgaga

SEQ ID NO: 7484 - DNA, 170 bp, Artificial sequence
  Rbm10.6_Tgfbr2.290
  crRNA array
cgatttcttggctttatatatcttgtggaaaggacgaaacaccgtaatttctactaagtgtagatcgaaacctgaacccacacagtaatttctactaagtgtagatcctctcggcgcccgggtaaattttttaagcttggcgtggatccgatatcaactagatcttgaga

SEQ ID NO: 7485 - DNA, 170 bp, Artificial sequence
  Rbm10.6_Tgfbr2.292
  crRNA array
cgatttcttggctttatatatcttgtggaaaggacgaaacaccgtaatttctactaagtgtagatcgaaacctgaacccacacagtaatttctactaagtgtagatcccgggcgccgagagggaaattttttaagcttggcgtggatccgatatcaactagatcttgaga

SEQ ID NO: 7486 - DNA, 170 bp, Artificial sequence
  Rbm10.6_Trp53.4
  crRNA array
cgatttcttggctttatatatcttgtggaaaggacgaaacaccgtaatttctactaagtgtagatcgaaacctgaacccacacagtaatttctactaagtgtagatccctgaactgcccccagggattttttaagcttggcgtggatccgatatcaactagatcttgaga

SEQ ID NO: 7487 - DNA, 170 bp, Artificial sequence
  Rbm10.6_Trp53.528
  crRNA array
cgatttcttggctttatatatcttgtggaaaggacgaaacaccgtaatttctactaagtgtagatcgaaacctgaacccacacagtaatttctactaagtgtagatgctgggccagcagagacctgttttttaagcttggcgtggatccgatatcaactagatcttgaga

SEQ ID NO: 7488 - DNA, 170 bp, Artificial sequence
  Rbm10.6_Vhl.1
  crRNA array
cgatttcttggctttatatatcttgtggaaaggacgaaacaccgtaatttctactaagtgtagatcgaaacctgaacccacacagtaatttctactaagtgtagatagggctcccggcggccatttttttttaagcttggcgtggatccgatatcaactagatcttgaga

SEQ ID NO: 7489 - DNA, 170 bp, Artificial sequence
  Rbm10.6_Vhl.151
  crRNA array
cgatttcttggctttatatatcttgtggaaaggacgaaacaccgtaatttctactaagtgtagatcgaaacctgaacccacacagtaatttctactaagtgtagattagagcactcacccgagggattttttaagcttggcgtggatccgatatcaactagatcttgaga

SEQ ID NO: 7490 - DNA, 170 bp, Artificial sequence
  Rbm10.6_Zc3h13.1387
  crRNA array
cgatttcttggctttatatatcttgtggaaaggacgaaacaccgtaatttctactaagtgtagatcgaaacctgaacccacacagtaatttctactaagtgtagatgtgacgccggtcatgtgactttttttaagcttggcgtggatccgatatcaactagatcttgaga

SEQ ID NO: 7491 - DNA, 170 bp, Artificial sequence
  Rbm10.6_Zc3h13.1777
  crRNA array
cgatttcttggctttatatatcttgtggaaaggacgaaacaccgtaatttctactaagtgtagatcgaaacctgaacccacacagtaatttctactaagtgtagatgatgctgccagtgtagcggcttttttaagcttggcgtggatccgatatcaactagatcttgaga

SEQ ID NO: 7492 - DNA, 170 bp, Artificial sequence
  Rnf43.1920_Acvr2a.155
  crRNA array
cgatttcttggctttatatatcttgtggaaaggacgaaacaccgtaatttctactaagtgtagatatccccgtgccgtggactcctaatttctactaagtgtagatggacctggctaatcaagtatttttttaagcttggcgtggatccgatatcaactagatcttgaga

SEQ ID NO: 7493 - DNA, 170 bp, Artificial sequence
  Rnf43.1920_Acvr2a.70
  crRNA array
cgatttcttggctttatatatcttgtggaaaggacgaaacaccgtaatttctactaagtgtagatatccccgtgccgtggactcctaatttctactaagtgtagatcccgaggcgccggagaagccttttttaagcttggcgtggatccgatatcaactagatcttgaga

SEQ ID NO: 7494 - DNA, 170 bp, Artificial sequence
  Rnf43.1920_Apc.21
  crRNA array
cgatttcttggctttatatatcttgtggaaaggacgaaacaccgtaatttctactaagtgtagatatccccgtgccgtggactcctaatttctactaagtgtagatgtgatccacacgtgtagctgttttttaagcttggcgtggatccgatatcaactagatcttgaga

SEQ ID NO: 7495 - DNA, 170 bp, Artificial sequence
  Rnf43.1920_Apc.867
  crRNA array
cgatttcttggctttatatatcttgtggaaaggacgaaacaccgtaatttctactaagtgtagatatccccgtgccgtggactcctaatttctactaagtgtagatcagtcccaggcggcggaagcttttttaagcttggcgtggatccgatatcaactagatcttgaga

SEQ ID NO: 7496 - DNA, 170 bp, Artificial sequence
  Rnf43.1920_Arid1a.2
  crRNA array
cgatttcttggctttatatatcttgtggaaaggacgaaacaccgtaatttctactaagtgtagatatccccgtgccgtggactcctaatttctactaagtgtagatcccgcgcccccgtcctggggttttttaagcttggcgtggatccgatatcaactagatcttgaga

SEQ ID NO: 7497 - DNA, 170 bp, Artificial sequence
  Rnf43.1920_Arid1a.5
  crRNA array
cgatttcttggctttatatatcttgtggaaaggacgaaacaccgtaatttctactaagtgtagatatccccgtgccgtggactcctaatttctactaagtgtagatcccgcgctcggccgctgccgttttttaagcttggcgtggatccgatatcaactagatcttgaga

SEQ ID NO: 7498 - DNA, 170 bp, Artificial sequence
  Rnf43.1920_Arid2.166
  crRNA array
cgatttcttggctttatatatcttgtggaaaggacgaaacaccgtaatttctactaagtgtagatatccccgtgccgtggactcctaatttctactaagtgtagataaccgcgatctgggttttttttttttaagcttggcgtggatccgatatcaactagatcttgaga

SEQ ID NO: 7499 - DNA, 170 bp, Artificial sequence
  Rnf43.1920_Arid2.172
  crRNA array
cgatttcttggctttatatatcttgtggaaaggacgaaacaccgtaatttctactaagtgtagatatccccgtgccgtggactcctaatttctactaagtgtagatctggacgagctgcggcagttttttttaagcttggcgtggatccgatatcaactagatcttgaga

SEQ ID NO: 7500 - DNA, 170 bp, Artificial sequence
  Rnf43.1920_Atm.120
  crRNA array
cgatttcttggctttatatatcttgtggaaaggacgaaacaccgtaatttctactaagtgtagatatccccgtgccgtggactcctaatttctactaagtgtagatgacaggtagtcggcagctaattttttaagcttggcgtggatccgatatcaactagatcttgaga

SEQ ID NO: 7501 - DNA, 170 bp, Artificial sequence
  Rnf43.1920_Atm.997
  crRNA array
cgatttcttggctttatatatcttgtggaaaggacgaaacaccgtaatttctactaagtgtagatatccccgtgccgtggactcctaatttctactaagtgtagatgagaaagtctccgaatcgttttttttaagcttggcgtggatccgatatcaactagatcttgaga

SEQ ID NO: 7502 - DNA, 170 bp, Artificial sequence
  Rnf43.1920_Atrx.249
  crRNA array
cgatttcttggctttatatatcttgtggaaaggacgaaacaccgtaatttctactaagtgtagatatccccgtgccgtggactcctaatttctactaagtgtagattagccagtcgctcatatctcttttttaagcttggcgtggatccgatatcaactagatcttgaga

SEQ ID NO: 7503 - DNA, 170 bp, Artificial sequence
  Rnf43.1920_Atrx.251
  crRNA array
cgatttcttggctttatatatcttgtggaaaggacgaaacaccgtaatttctactaagtgtagatatccccgtgccgtggactcctaatttctactaagtgtagatgccagtcgctcatatctctgttttttaagcttggcgtggatccgatatcaactagatcttgaga

SEQ ID NO: 7504 - DNA, 170 bp, Artificial sequence
  Rnf43.1920_Bcor.203
  crRNA array
cgatttcttggctttatatatcttgtggaaaggacgaaacaccgtaatttctactaagtgtagatatccccgtgccgtggactcctaatttctactaagtgtagatccccggagcggagtccaggcttttttaagcttggcgtggatccgatatcaactagatcttgaga

SEQ ID NO: 7505 - DNA, 170 bp, Artificial sequence
  Rnf43.1920_Bcor.475
  crRNA array
cgatttcttggctttatatatcttgtggaaaggacgaaacaccgtaatttctactaagtgtagatatccccgtgccgtggactcctaatttctactaagtgtagattgcaacccctctgtatgggattttttaagcttggcgtggatccgatatcaactagatcttgaga

SEQ ID NO: 7506 - DNA, 170 bp, Artificial sequence
  Rnf43.1920_Brca1.112
  crRNA array
cgatttcttggctttatatatcttgtggaaaggacgaaacaccgtaatttctactaagtgtagatatccccgtgccgtggactcctaatttctactaagtgtagatctagacgctctgtggagactttttttaagcttggcgtggatccgatatcaactagatcttgaga

SEQ ID NO: 7507 - DNA, 170 bp, Artificial sequence
  Rnf43.1920_Brca1.53
  crRNA array
cgatttcttggctttatatatcttgtggaaaggacgaaacaccgtaatttctactaagtgtagatatccccgtgccgtggactcctaatttctactaagtgtagataatgaggaggcgtcgatcatttttttaagcttggcgtggatccgatatcaactagatcttgaga

SEQ ID NO: 7508 - DNA, 170 bp, Artificial sequence
  Rnf43.1920_Casp8.45
  crRNA array
cgatttcttggctttatatatcttgtggaaaggacgaaacaccgtaatttctactaagtgtagatatccccgtgccgtggactcctaatttctactaagtgtagatctaccgagatcctgtgaatgttttttaagcttggcgtggatccgatatcaactagatcttgaga

SEQ ID NO: 7509 - DNA, 170 bp, Artificial sequence
  Rnf43.1920_Casp8.54
  crRNA array
cgatttcttggctttatatatcttgtggaaaggacgaaacaccgtaatttctactaagtgtagatatccccgtgccgtggactcctaatttctactaagtgtagatcagtgcagtcgtcgtaagatttttttaagcttggcgtggatccgatatcaactagatcttgaga

SEQ ID NO: 7510 - DNA, 170 bp, Artificial sequence
  Rnf43.1920_Cbwd1.84
  crRNA array
cgatttcttggctttatatatcttgtggaaaggacgaaacaccgtaatttctactaagtgtagatatccccgtgccgtggactcctaatttctactaagtgtagatcacagcaggtaacatgccgcttttttaagcttggcgtggatccgatatcaactagatcttgaga

SEQ ID NO: 7511 - DNA, 170 bp, Artificial sequence
  Rnf43.1920_Cbwd1.85
  crRNA array
cgatttcttggctttatatatcttgtggaaaggacgaaacaccgtaatttctactaagtgtagatatccccgtgccgtggactcctaatttctactaagtgtagatacagcaggtaacatgccgccttttttaagcttggcgtggatccgatatcaactagatcttgaga

SEQ ID NO: 7512 - DNA, 170 bp, Artificial sequence
  Rnf43.1920_Cdh1.387
  crRNA array
cgatttcttggctttatatatcttgtggaaaggacgaaacaccgtaatttctactaagtgtagatatccccgtgccgtggactcctaatttctactaagtgtagatctcggcgtctgccgggtccgttttttaagcttggcgtggatccgatatcaactagatcttgaga

SEQ ID NO: 7513 - DNA, 170 bp, Artificial sequence
  Rnf43.1920_Cdh1.58
  crRNA array
cgatttcttggctttatatatcttgtggaaaggacgaaacaccgtaatttctactaagtgtagatatccccgtgccgtggactcctaatttctactaagtgtagatctcgtccgcgcccgggactcttttttaagcttggcgtggatccgatatcaactagatcttgaga

SEQ ID NO: 7514 - DNA, 170 bp, Artificial sequence
  Rnf43.1920_Cdkn2a.647
  crRNA array
cgatttcttggctttatatatcttgtggaaaggacgaaacaccgtaatttctactaagtgtagatatccccgtgccgtggactcctaatttctactaagtgtagatgcaatcacgggagggagcagttttttaagcttggcgtggatccgatatcaactagatcttgaga

SEQ ID NO: 7515 - DNA, 170 bp, Artificial sequence
  Rnf43.1920_Cdkn2a.648
  crRNA array
cgatttcttggctttatatatcttgtggaaaggacgaaacaccgtaatttctactaagtgtagatatccccgtgccgtggactcctaatttctactaagtgtagatcaatcacgggagggagcagattttttaagcttggcgtggatccgatatcaactagatcttgaga

SEQ ID NO: 7516 - DNA, 170 bp, Artificial sequence
  Rnf43.1920_Cic.162
  crRNA array
cgatttcttggctttatatatcttgtggaaaggacgaaacaccgtaatttctactaagtgtagatatccccgtgccgtggactcctaatttctactaagtgtagatcgcaggcgcgcccggcggagttttttaagcttggcgtggatccgatatcaactagatcttgaga

SEQ ID NO: 7517 - DNA, 170 bp, Artificial sequence
  Rnf43.1920_Cic.164
  crRNA array
cgatttcttggctttatatatcttgtggaaaggacgaaacaccgtaatttctactaagtgtagatatccccgtgccgtggactcctaatttctactaagtgtagatcgggccctgggccggcggctttttttaagcttggcgtggatccgatatcaactagatcttgaga

SEQ ID NO: 7518 - DNA, 170 bp, Artificial sequence
  Rnf43.1920_Ctcf.229
  crRNA array
cgatttcttggctttatatatcttgtggaaaggacgaaacaccgtaatttctactaagtgtagatatccccgtgccgtggactcctaatttctactaagtgtagatggctggtggctgatagtctgttttttaagcttggcgtggatccgatatcaactagatcttgaga

SEQ ID NO: 7519 - DNA, 170 bp, Artificial sequence
  Rnf43.1920_Ctcf.809
  crRNA array
cgatttcttggctttatatatcttgtggaaaggacgaaacaccgtaatttctactaagtgtagatatccccgtgccgtggactcctaatttctactaagtgtagataagcgctatcatgatcccaattttttaagcttggcgtggatccgatatcaactagatcttgaga

SEQ ID NO: 7520 - DNA, 170 bp, Artificial sequence
  Rnf43.1920_Elf3.826
  crRNA array
cgatttcttggctttatatatcttgtggaaaggacgaaacaccgtaatttctactaagtgtagatatccccgtgccgtggactcctaatttctactaagtgtagattccgagacatcctaatccacttttttaagcttggcgtggatccgatatcaactagatcttgaga

SEQ ID NO: 7521 - DNA, 170 bp, Artificial sequence
  Rnf43.1920_Elf3.983
  crRNA array
cgatttcttggctttatatatcttgtggaaaggacgaaacaccgtaatttctactaagtgtagatatccccgtgccgtggactcctaatttctactaagtgtagattaggccccctaactggaccattttttaagcttggcgtggatccgatatcaactagatcttgaga

SEQ ID NO: 7522 - DNA, 170 bp, Artificial sequence
  Rnf43.1920_Ep300.310
  crRNA array
cgatttcttggctttatatatcttgtggaaaggacgaaacaccgtaatttctactaagtgtagatatccccgtgccgtggactcctaatttctactaagtgtagatatggtacgacagtgaggaagttttttaagcttggcgtggatccgatatcaactagatcttgaga

SEQ ID NO: 7523 - DNA, 170 bp, Artificial sequence
  Rnf43.1920_Ep300.587
  crRNA array
cgatttcttggctttatatatcttgtggaaaggacgaaacaccgtaatttctactaagtgtagatatccccgtgccgtggactcctaatttctactaagtgtagatcgccccggggcccccaaccattttttaagcttggcgtggatccgatatcaactagatcttgaga

SEQ ID NO: 7524 - DNA, 170 bp, Artificial sequence
  Rnf43.1920_Epha2.126
  crRNA array
cgatttcttggctttatatatcttgtggaaaggacgaaacaccgtaatttctactaagtgtagatatccccgtgccgtggactcctaatttctactaagtgtagatcctgtgccgccgcggccgccttttttaagcttggcgtggatccgatatcaactagatcttgaga

SEQ ID NO: 7525 - DNA, 170 bp, Artificial sequence
  Rnf43.1920_Epha2.5
  crRNA array
cgatttcttggctttatatatcttgtggaaaggacgaaacaccgtaatttctactaagtgtagatatccccgtgccgtggactcctaatttctactaagtgtagatcatgagctggcgccacccggttttttaagcttggcgtggatccgatatcaactagatcttgaga

SEQ ID NO: 7526 - DNA, 170 bp, Artificial sequence
  Rnf43.1920_Fat1.105
  crRNA array
cgatttcttggctttatatatcttgtggaaaggacgaaacaccgtaatttctactaagtgtagatatccccgtgccgtggactcctaatttctactaagtgtagataactcgaggtgacaacaagtttttttaagcttggcgtggatccgatatcaactagatcttgaga

SEQ ID NO: 7527 - DNA, 170 bp, Artificial sequence
  Rnf43.1920_Fat1.122
  crRNA array
cgatttcttggctttatatatcttgtggaaaggacgaaacaccgtaatttctactaagtgtagatatccccgtgccgtggactcctaatttctactaagtgtagatccatcgacatggaaacgggattttttaagcttggcgtggatccgatatcaactagatcttgaga

SEQ ID NO: 7528 - DNA, 170 bp, Artificial sequence
  Rnf43.1920_Fbxw7.21
  crRNA array
cgatttcttggctttatatatcttgtggaaaggacgaaacaccgtaatttctactaagtgtagatatccccgtgccgtggactcctaatttctactaagtgtagattaatgtgccgtagaaacccattttttaagcttggcgtggatccgatatcaactagatcttgaga

SEQ ID NO: 7529 - DNA, 170 bp, Artificial sequence
  Rnf43.1920_Fbxw7.23
  crRNA array
cgatttcttggctttatatatcttgtggaaaggacgaaacaccgtaatttctactaagtgtagatatccccgtgccgtggactcctaatttctactaagtgtagatatgtgccgtagaaacccatattttttaagcttggcgtggatccgatatcaactagatcttgaga

SEQ ID NO: 7530 - DNA, 170 bp, Artificial sequence
  Rnf43.1920_Gata3.34
  crRNA array
cgatttcttggctttatatatcttgtggaaaggacgaaacaccgtaatttctactaagtgtagatatccccgtgccgtggactcctaatttctactaagtgtagatctaaactatcccgcaaagatttttttaagcttggcgtggatccgatatcaactagatcttgaga

SEQ ID NO: 7531 - DNA, 170 bp, Artificial sequence
  Rnf43.1920_Gata3.47
  crRNA array
cgatttcttggctttatatatcttgtggaaaggacgaaacaccgtaatttctactaagtgtagatatccccgtgccgtggactcctaatttctactaagtgtagatcgtagtaggacgggacgtggttttttaagcttggcgtggatccgatatcaactagatcttgaga

SEQ ID NO: 7532 - DNA, 170 bp, Artificial sequence
  Rnf43.1920_H2-Q2.1
  crRNA array
cgatttcttggctttatatatcttgtggaaaggacgaaacaccgtaatttctactaagtgtagatatccccgtgccgtggactcctaatttctactaagtgtagatagggcggccaccaacagcagttttttaagcttggcgtggatccgatatcaactagatcttgaga

SEQ ID NO: 7533 - DNA, 170 bp, Artificial sequence
  Rnf43.1920_H2-Q2.2
  crRNA array
cgatttcttggctttatatatcttgtggaaaggacgaaacaccgtaatttctactaagtgtagatatccccgtgccgtggactcctaatttctactaagtgtagattaacctgcgcccgctgctgattttttaagcttggcgtggatccgatatcaactagatcttgaga

SEQ ID NO: 7534 - DNA, 170 bp, Artificial sequence
  Rnf43.1920_Kdm5c.1878
  crRNA array
cgatttcttggctttatatatcttgtggaaaggacgaaacaccgtaatttctactaagtgtagatatccccgtgccgtggactcctaatttctactaagtgtagatagagcacggcacccgcccccttttttaagcttggcgtggatccgatatcaactagatcttgaga

SEQ ID NO: 7535 - DNA, 170 bp, Artificial sequence
  Rnf43.1920_Kdm5c.1879
  crRNA array
cgatttcttggctttatatatcttgtggaaaggacgaaacaccgtaatttctactaagtgtagatatccccgtgccgtggactcctaatttctactaagtgtagatgagcacggcacccgccccccttttttaagcttggcgtggatccgatatcaactagatcttgaga

SEQ ID NO: 7536 - DNA, 170 bp, Artificial sequence
  Rnf43.1920_Kdm6a.56
  crRNA array
cgatttcttggctttatatatcttgtggaaaggacgaaacaccgtaatttctactaagtgtagatatccccgtgccgtggactcctaatttctactaagtgtagattcgctgccgcctctcgcggcttttttaagcttggcgtggatccgatatcaactagatcttgaga

SEQ ID NO: 7537 - DNA, 170 bp, Artificial sequence
  Rnf43.1920_Kdm6a.57
  crRNA array
cgatttcttggctttatatatcttgtggaaaggacgaaacaccgtaatttctactaagtgtagatatccccgtgccgtggactcctaatttctactaagtgtagatcgctgccgcctctcgcggcattttttaagcttggcgtggatccgatatcaactagatcttgaga

SEQ ID NO: 7538 - DNA, 170 bp, Artificial sequence
  Rnf43.1920_Kmt2b.265
  crRNA array
cgatttcttggctttatatatcttgtggaaaggacgaaacaccgtaatttctactaagtgtagatatccccgtgccgtggactcctaatttctactaagtgtagatccccaagtgaagcccacctgttttttaagcttggcgtggatccgatatcaactagatcttgaga

SEQ ID NO: 7539 - DNA, 170 bp, Artificial sequence
  Rnf43.1920_Kmt2b.298
  crRNA array
cgatttcttggctttatatatcttgtggaaaggacgaaacaccgtaatttctactaagtgtagatatccccgtgccgtggactcctaatttctactaagtgtagattccggcagggaccggctggcttttttaagcttggcgtggatccgatatcaactagatcttgaga

SEQ ID NO: 7540 - DNA, 170 bp, Artificial sequence
  Rnf43.1920_Kmt2c.1962
  crRNA array
cgatttcttggctttatatatcttgtggaaaggacgaaacaccgtaatttctactaagtgtagatatccccgtgccgtggactcctaatttctactaagtgtagatgtgacgatctgtgccacaagttttttaagcttggcgtggatccgatatcaactagatcttgaga

SEQ ID NO: 7541 - DNA, 170 bp, Artificial sequence
  Rnf43.1920_Kmt2c.2236
  crRNA array
cgatttcttggctttatatatcttgtggaaaggacgaaacaccgtaatttctactaagtgtagatatccccgtgccgtggactcctaatttctactaagtgtagatactcgacctccacctccctattttttaagcttggcgtggatccgatatcaactagatcttgaga

SEQ ID NO: 7542 - DNA, 170 bp, Artificial sequence
  Rnf43.1920_Kmt2d.316
  crRNA array
cgatttcttggctttatatatcttgtggaaaggacgaaacaccgtaatttctactaagtgtagatatccccgtgccgtggactcctaatttctactaagtgtagatactccaggccacccaggtggttttttaagcttggcgtggatccgatatcaactagatcttgaga

SEQ ID NO: 7543 - DNA, 170 bp, Artificial sequence
  Rnf43.1920_Kmt2d.416
  crRNA array
cgatttcttggctttatatatcttgtggaaaggacgaaacaccgtaatttctactaagtgtagatatccccgtgccgtggactcctaatttctactaagtgtagattaaacccccgggggaagggtttttttaagcttggcgtggatccgatatcaactagatcttgaga

SEQ ID NO: 7544 - DNA, 170 bp, Artificial sequence
  Rnf43.1920_Map2k4.119
  crRNA array
cgatttcttggctttatatatcttgtggaaaggacgaaacaccgtaatttctactaagtgtagatatccccgtgccgtggactcctaatttctactaagtgtagattgctgtgtgggcggccacatttttttaagcttggcgtggatccgatatcaactagatcttgaga

SEQ ID NO: 7545 - DNA, 170 bp, Artificial sequence
  Rnf43.1920_Map2k4.1261
  crRNA array
cgatttcttggctttatatatcttgtggaaaggacgaaacaccgtaatttctactaagtgtagatatccccgtgccgtggactcctaatttctactaagtgtagatgatgtagtaatgcggagtagttttttaagcttggcgtggatccgatatcaactagatcttgaga

SEQ ID NO: 7546 - DNA, 170 bp, Artificial sequence
  Rnf43.1920_Map3k1.235
  crRNA array
cgatttcttggctttatatatcttgtggaaaggacgaaacaccgtaatttctactaagtgtagatatccccgtgccgtggactcctaatttctactaagtgtagataaaacgctactgatcgatcgttttttaagcttggcgtggatccgatatcaactagatcttgaga

SEQ ID NO: 7547 - DNA, 170 bp, Artificial sequence
  Rnf43.1920_Map3k1.3838
  crRNA array
cgatttcttggctttatatatcttgtggaaaggacgaaacaccgtaatttctactaagtgtagatatccccgtgccgtggactcctaatttctactaagtgtagatccaacaacagggccccactattttttaagcttggcgtggatccgatatcaactagatcttgaga

SEQ ID NO: 7548 - DNA, 170 bp, Artificial sequence
  Rnf43.1920_Mga.1655
  crRNA array
cgatttcttggctttatatatcttgtggaaaggacgaaacaccgtaatttctactaagtgtagatatccccgtgccgtggactcctaatttctactaagtgtagatcgagaagtggagagcatattttttttaagcttggcgtggatccgatatcaactagatcttgaga

SEQ ID NO: 7549 - DNA, 170 bp, Artificial sequence
  Rnf43.1920_Mga.93
  crRNA array
cgatttcttggctttatatatcttgtggaaaggacgaaacaccgtaatttctactaagtgtagatatccccgtgccgtggactcctaatttctactaagtgtagatgagaaggctccccataatgtttttttaagcttggcgtggatccgatatcaactagatcttgaga

SEQ ID NO: 7550 - DNA, 170 bp, Artificial sequence
  Rnf43.1920_Nf1.746
  crRNA array
cgatttcttggctttatatatcttgtggaaaggacgaaacaccgtaatttctactaagtgtagatatccccgtgccgtggactcctaatttctactaagtgtagattaagcataatgatgatgccattttttaagcttggcgtggatccgatatcaactagatcttgaga

SEQ ID NO: 7551 - DNA, 170 bp, Artificial sequence
  Rnf43.1920_Nf1.97
  crRNA array
cgatttcttggctttatatatcttgtggaaaggacgaaacaccgtaatttctactaagtgtagatatccccgtgccgtggactcctaatttctactaagtgtagatagcccgctacatgctgatgcttttttaagcttggcgtggatccgatatcaactagatcttgaga

SEQ ID NO: 7552 - DNA, 170 bp, Artificial sequence
  Rnf43.1920_Nf2.356
  crRNA array
cgatttcttggctttatatatcttgtggaaaggacgaaacaccgtaatttctactaagtgtagatatccccgtgccgtggactcctaatttctactaagtgtagatcggagtcatctgatagagatttttttaagcttggcgtggatccgatatcaactagatcttgaga

SEQ ID NO: 7553 - DNA, 170 bp, Artificial sequence
  Rnf43.1920_Nf2.768
  crRNA array
cgatttcttggctttatatatcttgtggaaaggacgaaacaccgtaatttctactaagtgtagatatccccgtgccgtggactcctaatttctactaagtgtagatccgaagccccagtgtccggcttttttaagcttggcgtggatccgatatcaactagatcttgaga

SEQ ID NO: 7554 - DNA, 170 bp, Artificial sequence
  Rnf43.1920_Notch1.1849
  crRNA array
cgatttcttggctttatatatcttgtggaaaggacgaaacaccgtaatttctactaagtgtagatatccccgtgccgtggactcctaatttctactaagtgtagatctggcgggtgggcggcgctgttttttaagcttggcgtggatccgatatcaactagatcttgaga

SEQ ID NO: 7555 - DNA, 170 bp, Artificial sequence
  Rnf43.1920_Notch1.649
  crRNA array
cgatttcttggctttatatatcttgtggaaaggacgaaacaccgtaatttctactaagtgtagatatccccgtgccgtggactcctaatttctactaagtgtagattgggccaacgatgccaggacttttttaagcttggcgtggatccgatatcaactagatcttgaga

SEQ ID NO: 7556 - DNA, 170 bp, Artificial sequence
  Rnf43.1920_Nsd1.70
  crRNA array
cgatttcttggctttatatatcttgtggaaaggacgaaacaccgtaatttctactaagtgtagatatccccgtgccgtggactcctaatttctactaagtgtagatactggtgtggacgatgcagattttttaagcttggcgtggatccgatatcaactagatcttgaga

SEQ ID NO: 7557 - DNA, 170 bp, Artificial sequence
  Rnf43.1920_Nsd1.90
  crRNA array
cgatttcttggctttatatatcttgtggaaaggacgaaacaccgtaatttctactaagtgtagatatccccgtgccgtggactcctaatttctactaagtgtagataggagctaacggcaagaatgttttttaagcttggcgtggatccgatatcaactagatcttgaga

SEQ ID NO: 7558 - DNA, 170 bp, Artificial sequence
  Rnf43.1920_Pbrm1.1236
  crRNA array
cgatttcttggctttatatatcttgtggaaaggacgaaacaccgtaatttctactaagtgtagatatccccgtgccgtggactcctaatttctactaagtgtagatgccgataaaaccaacagccgttttttaagcttggcgtggatccgatatcaactagatcttgaga

SEQ ID NO: 7559 - DNA, 170 bp, Artificial sequence
  Rnf43.1920_Pbrm1.969
  crRNA array
cgatttcttggctttatatatcttgtggaaaggacgaaacaccgtaatttctactaagtgtagatatccccgtgccgtggactcctaatttctactaagtgtagatgagccctaatgaacagctcattttttaagcttggcgtggatccgatatcaactagatcttgaga

SEQ ID NO: 7560 - DNA, 170 bp, Artificial sequence
  Rnf43.1920_Pik3r1.76
  crRNA array
cgatttcttggctttatatatcttgtggaaaggacgaaacaccgtaatttctactaagtgtagatatccccgtgccgtggactcctaatttctactaagtgtagataaaacctatacggcccgcacttttttaagcttggcgtggatccgatatcaactagatcttgaga

SEQ ID NO: 7561 - DNA, 170 bp, Artificial sequence
  Rnf43.1920_Pik3r1.77
  crRNA array
cgatttcttggctttatatatcttgtggaaaggacgaaacaccgtaatttctactaagtgtagatatccccgtgccgtggactcctaatttctactaagtgtagataaacctatacggcccgcactttttttaagcttggcgtggatccgatatcaactagatcttgaga

SEQ ID NO: 7562 - DNA, 170 bp, Artificial sequence
  Rnf43.1920_Pten.240
  crRNA array
cgatttcttggctttatatatcttgtggaaaggacgaaacaccgtaatttctactaagtgtagatatccccgtgccgtggactcctaatttctactaagtgtagattgcatacgctatagctgcttttttttaagcttggcgtggatccgatatcaactagatcttgaga

SEQ ID NO: 7563 - DNA, 170 bp, Artificial sequence
  Rnf43.1920_Pten.265
  crRNA array
cgatttcttggctttatatatcttgtggaaaggacgaaacaccgtaatttctactaagtgtagatatccccgtgccgtggactcctaatttctactaagtgtagataagcgtggtgcgtgacgcacttttttaagcttggcgtggatccgatatcaactagatcttgaga

SEQ ID NO: 7564 - DNA, 170 bp, Artificial sequence
  Rnf43.1920_Rasa1.1478
  crRNA array
cgatttcttggctttatatatcttgtggaaaggacgaaacaccgtaatttctactaagtgtagatatccccgtgccgtggactcctaatttctactaagtgtagatcgataatggtctatgatgtcttttttaagcttggcgtggatccgatatcaactagatcttgaga

SEQ ID NO: 7565 - DNA, 170 bp, Artificial sequence
  Rnf43.1920_Rasa1.223
  crRNA array
cgatttcttggctttatatatcttgtggaaaggacgaaacaccgtaatttctactaagtgtagatatccccgtgccgtggactcctaatttctactaagtgtagattccatggagtatcgtgctcgttttttaagcttggcgtggatccgatatcaactagatcttgaga

SEQ ID NO: 7566 - DNA, 170 bp, Artificial sequence
  Rnf43.1920_Rb1.211
  crRNA array
cgatttcttggctttatatatcttgtggaaaggacgaaacaccgtaatttctactaagtgtagatatccccgtgccgtggactcctaatttctactaagtgtagattctgacatgatcgggtacctttttttaagcttggcgtggatccgatatcaactagatcttgaga

SEQ ID NO: 7567 - DNA, 170 bp, Artificial sequence
  Rnf43.1920_Rb1.394
  crRNA array
cgatttcttggctttatatatcttgtggaaaggacgaaacaccgtaatttctactaagtgtagatatccccgtgccgtggactcctaatttctactaagtgtagatagaaatctcgaagcaggatcttttttaagcttggcgtggatccgatatcaactagatcttgaga

SEQ ID NO: 7568 - DNA, 170 bp, Artificial sequence
  Rnf43.1920_Rbm10.5
  crRNA array
cgatttcttggctttatatatcttgtggaaaggacgaaacaccgtaatttctactaagtgtagatatccccgtgccgtggactcctaatttctactaagtgtagatacgaaacctgaacccacacattttttaagcttggcgtggatccgatatcaactagatcttgaga

SEQ ID NO: 7569 - DNA, 170 bp, Artificial sequence
  Rnf43.1920_Rbm10.6
  crRNA array
cgatttcttggctttatatatcttgtggaaaggacgaaacaccgtaatttctactaagtgtagatatccccgtgccgtggactcctaatttctactaagtgtagatcgaaacctgaacccacacagttttttaagcttggcgtggatccgatatcaactagatcttgaga

SEQ ID NO: 7570 - DNA, 170 bp, Artificial sequence
  Rnf43.1920_Runx1.204
  crRNA array
cgatttcttggctttatatatcttgtggaaaggacgaaacaccgtaatttctactaagtgtagatatccccgtgccgtggactcctaatttctactaagtgtagattaaataagtccagccgttttttttttaagcttggcgtggatccgatatcaactagatcttgaga

SEQ ID NO: 7571 - DNA, 170 bp, Artificial sequence
  Rnf43.1920_Runx1.81
  crRNA array
cgatttcttggctttatatatcttgtggaaaggacgaaacaccgtaatttctactaagtgtagatatccccgtgccgtggactcctaatttctactaagtgtagataggacgcgtatgggaattttttttttaagcttggcgtggatccgatatcaactagatcttgaga

SEQ ID NO: 7572 - DNA, 170 bp, Artificial sequence
  Rnf43.1920_Setd2.143
  crRNA array
cgatttcttggctttatatatcttgtggaaaggacgaaacaccgtaatttctactaagtgtagatatccccgtgccgtggactcctaatttctactaagtgtagatgcacaaccacaacagactggttttttaagcttggcgtggatccgatatcaactagatcttgaga

SEQ ID NO: 7573 - DNA, 170 bp, Artificial sequence
  Rnf43.1920_Setd2.508
  crRNA array
cgatttcttggctttatatatcttgtggaaaggacgaaacaccgtaatttctactaagtgtagatatccccgtgccgtggactcctaatttctactaagtgtagattacgatcccgagcacccgacttttttaagcttggcgtggatccgatatcaactagatcttgaga

SEQ ID NO: 7574 - DNA, 170 bp, Artificial sequence
  Rnf43.1920_Smad4.3038
  crRNA array
cgatttcttggctttatatatcttgtggaaaggacgaaacaccgtaatttctactaagtgtagatatccccgtgccgtggactcctaatttctactaagtgtagatatctgcggcagtgtcaccggttttttaagcttggcgtggatccgatatcaactagatcttgaga

SEQ ID NO: 7575 - DNA, 170 bp, Artificial sequence
  Rnf43.1920_Smad4.39
  crRNA array
cgatttcttggctttatatatcttgtggaaaggacgaaacaccgtaatttctactaagtgtagatatccccgtgccgtggactcctaatttctactaagtgtagatagtcaaacgcatactgacaattttttaagcttggcgtggatccgatatcaactagatcttgaga

SEQ ID NO: 7576 - DNA, 170 bp, Artificial sequence
  Rnf43.1920_Stag2.1409
  crRNA array
cgatttcttggctttatatatcttgtggaaaggacgaaacaccgtaatttctactaagtgtagatatccccgtgccgtggactcctaatttctactaagtgtagatgctaataactgcggaagggcttttttaagcttggcgtggatccgatatcaactagatcttgaga

SEQ ID NO: 7577 - DNA, 170 bp, Artificial sequence
  Rnf43.1920_Stag2.4401
  crRNA array
cgatttcttggctttatatatcttgtggaaaggacgaaacaccgtaatttctactaagtgtagatatccccgtgccgtggactcctaatttctactaagtgtagattaatcgtccagtggtgtatattttttaagcttggcgtggatccgatatcaactagatcttgaga

SEQ ID NO: 7578 - DNA, 170 bp, Artificial sequence
  Rnf43.1920_Tbl1xr1.1
  crRNA array
cgatttcttggctttatatatcttgtggaaaggacgaaacaccgtaatttctactaagtgtagatatccccgtgccgtggactcctaatttctactaagtgtagatggatgcgcatactggtgaagttttttaagcttggcgtggatccgatatcaactagatcttgaga

SEQ ID NO: 7579 - DNA, 170 bp, Artificial sequence
  Rnf43.1920_Tbl1xr1.83
  crRNA array
cgatttcttggctttatatatcttgtggaaaggacgaaacaccgtaatttctactaagtgtagatatccccgtgccgtggactcctaatttctactaagtgtagatatggtcgacccatcgagtctttttttaagcttggcgtggatccgatatcaactagatcttgaga

SEQ ID NO: 7580 - DNA, 170 bp, Artificial sequence
  Rnf43.1920_Tgfbr2.290
  crRNA array
cgatttcttggctttatatatcttgtggaaaggacgaaacaccgtaatttctactaagtgtagatatccccgtgccgtggactcctaatttctactaagtgtagatcctctcggcgcccgggtaaattttttaagcttggcgtggatccgatatcaactagatcttgaga

SEQ ID NO: 7581 - DNA, 170 bp, Artificial sequence
  Rnf43.1920_Tgfbr2.292
  crRNA array
cgatttcttggctttatatatcttgtggaaaggacgaaacaccgtaatttctactaagtgtagatatccccgtgccgtggactcctaatttctactaagtgtagatcccgggcgccgagagggaaattttttaagcttggcgtggatccgatatcaactagatcttgaga

SEQ ID NO: 7582 - DNA, 170 bp, Artificial sequence
  Rnf43.1920_Trp53.4
  crRNA array
cgatttcttggctttatatatcttgtggaaaggacgaaacaccgtaatttctactaagtgtagatatccccgtgccgtggactcctaatttctactaagtgtagatccctgaactgcccccagggattttttaagcttggcgtggatccgatatcaactagatcttgaga

SEQ ID NO: 7583 - DNA, 170 bp, Artificial sequence
  Rnf43.1920_Trp53.528
  crRNA array
cgatttcttggctttatatatcttgtggaaaggacgaaacaccgtaatttctactaagtgtagatatccccgtgccgtggactcctaatttctactaagtgtagatgctgggccagcagagacctgttttttaagcttggcgtggatccgatatcaactagatcttgaga

SEQ ID NO: 7584 - DNA, 170 bp, Artificial sequence
  Rnf43.1920_Vhl.1
  crRNA array
cgatttcttggctttatatatcttgtggaaaggacgaaacaccgtaatttctactaagtgtagatatccccgtgccgtggactcctaatttctactaagtgtagatagggctcccggcggccatttttttttaagcttggcgtggatccgatatcaactagatcttgaga

SEQ ID NO: 7585 - DNA, 170 bp, Artificial sequence
  Rnf43.1920_Vhl.151
  crRNA array
cgatttcttggctttatatatcttgtggaaaggacgaaacaccgtaatttctactaagtgtagatatccccgtgccgtggactcctaatttctactaagtgtagattagagcactcacccgagggattttttaagcttggcgtggatccgatatcaactagatcttgaga

SEQ ID NO: 7586 - DNA, 170 bp, Artificial sequence
  Rnf43.1920_Zc3h13.1387
  crRNA array
cgatttcttggctttatatatcttgtggaaaggacgaaacaccgtaatttctactaagtgtagatatccccgtgccgtggactcctaatttctactaagtgtagatgtgacgccggtcatgtgactttttttaagcttggcgtggatccgatatcaactagatcttgaga

SEQ ID NO: 7587 - DNA, 170 bp, Artificial sequence
  Rnf43.1920_Zc3h13.1777
  crRNA array
cgatttcttggctttatatatcttgtggaaaggacgaaacaccgtaatttctactaagtgtagatatccccgtgccgtggactcctaatttctactaagtgtagatgatgctgccagtgtagcggcttttttaagcttggcgtggatccgatatcaactagatcttgaga

SEQ ID NO: 7588 - DNA, 170 bp, Artificial sequence
  Rnf43.39_Acvr2a.155
  crRNA array
cgatttcttggctttatatatcttgtggaaaggacgaaacaccgtaatttctactaagtgtagatcaaggggatcactctgataataatttctactaagtgtagatggacctggctaatcaagtatttttttaagcttggcgtggatccgatatcaactagatcttgaga

SEQ ID NO: 7589 - DNA, 170 bp, Artificial sequence
  Rnf43.39_Acvr2a.70
  crRNA array
cgatttcttggctttatatatcttgtggaaaggacgaaacaccgtaatttctactaagtgtagatcaaggggatcactctgataataatttctactaagtgtagatcccgaggcgccggagaagccttttttaagcttggcgtggatccgatatcaactagatcttgaga

SEQ ID NO: 7590 - DNA, 170 bp, Artificial sequence
  Rnf43.39_Apc.21
  crRNA array
cgatttcttggctttatatatcttgtggaaaggacgaaacaccgtaatttctactaagtgtagatcaaggggatcactctgataataatttctactaagtgtagatgtgatccacacgtgtagctgttttttaagcttggcgtggatccgatatcaactagatcttgaga

SEQ ID NO: 7591 - DNA, 170 bp, Artificial sequence
  Rnf43.39_Apc.867
  crRNA array
cgatttcttggctttatatatcttgtggaaaggacgaaacaccgtaatttctactaagtgtagatcaaggggatcactctgataataatttctactaagtgtagatcagtcccaggcggcggaagcttttttaagcttggcgtggatccgatatcaactagatcttgaga

SEQ ID NO: 7592 - DNA, 170 bp, Artificial sequence
  Rnf43.39_Arid1a.2
  crRNA array
cgatttcttggctttatatatcttgtggaaaggacgaaacaccgtaatttctactaagtgtagatcaaggggatcactctgataataatttctactaagtgtagatcccgcgcccccgtcctggggttttttaagcttggcgtggatccgatatcaactagatcttgaga

SEQ ID NO: 7593 - DNA, 170 bp, Artificial sequence
  Rnf43.39_Arid1a.5
  crRNA array
cgatttcttggctttatatatcttgtggaaaggacgaaacaccgtaatttctactaagtgtagatcaaggggatcactctgataataatttctactaagtgtagatcccgcgctcggccgctgccgttttttaagcttggcgtggatccgatatcaactagatcttgaga

SEQ ID NO: 7594 - DNA, 170 bp, Artificial sequence
  Rnf43.39_Arid2.166
  crRNA array
cgatttcttggctttatatatcttgtggaaaggacgaaacaccgtaatttctactaagtgtagatcaaggggatcactctgataataatttctactaagtgtagataaccgcgatctgggttttttttttttaagcttggcgtggatccgatatcaactagatcttgaga

SEQ ID NO: 7595 - DNA, 170 bp, Artificial sequence
  Rnf43.39_Arid2.172
  crRNA array
cgatttcttggctttatatatcttgtggaaaggacgaaacaccgtaatttctactaagtgtagatcaaggggatcactctgataataatttctactaagtgtagatctggacgagctgcggcagttttttttaagcttggcgtggatccgatatcaactagatcttgaga

SEQ ID NO: 7596 - DNA, 170 bp, Artificial sequence
  Rnf43.39_Atm.120
  crRNA array
cgatttcttggctttatatatcttgtggaaaggacgaaacaccgtaatttctactaagtgtagatcaaggggatcactctgataataatttctactaagtgtagatgacaggtagtcggcagctaattttttaagcttggcgtggatccgatatcaactagatcttgaga

SEQ ID NO: 7597 - DNA, 170 bp, Artificial sequence
  Rnf43.39_Atm.997
  crRNA array
cgatttcttggctttatatatcttgtggaaaggacgaaacaccgtaatttctactaagtgtagatcaaggggatcactctgataataatttctactaagtgtagatgagaaagtctccgaatcgttttttttaagcttggcgtggatccgatatcaactagatcttgaga

SEQ ID NO: 7598 - DNA, 170 bp, Artificial sequence
  Rnf43.39_Atrx.249
  crRNA array
cgatttcttggctttatatatcttgtggaaaggacgaaacaccgtaatttctactaagtgtagatcaaggggatcactctgataataatttctactaagtgtagattagccagtcgctcatatctcttttttaagcttggcgtggatccgatatcaactagatcttgaga

SEQ ID NO: 7599 - DNA, 170 bp, Artificial sequence
  Rnf43.39_Atrx.251
  crRNA array
cgatttcttggctttatatatcttgtggaaaggacgaaacaccgtaatttctactaagtgtagatcaaggggatcactctgataataatttctactaagtgtagatgccagtcgctcatatctctgttttttaagcttggcgtggatccgatatcaactagatcttgaga

SEQ ID NO: 7600 - DNA, 170 bp, Artificial sequence
  Rnf43.39_Bcor.203
  crRNA array
cgatttcttggctttatatatcttgtggaaaggacgaaacaccgtaatttctactaagtgtagatcaaggggatcactctgataataatttctactaagtgtagatccccggagcggagtccaggcttttttaagcttggcgtggatccgatatcaactagatcttgaga

SEQ ID NO: 7601 - DNA, 170 bp, Artificial sequence
  Rnf43.39_Bcor.475
  crRNA array
cgatttcttggctttatatatcttgtggaaaggacgaaacaccgtaatttctactaagtgtagatcaaggggatcactctgataataatttctactaagtgtagattgcaacccctctgtatgggattttttaagcttggcgtggatccgatatcaactagatcttgaga

SEQ ID NO: 7602 - DNA, 170 bp, Artificial sequence
  Rnf43.39_Brca1.112
  crRNA array
cgatttcttggctttatatatcttgtggaaaggacgaaacaccgtaatttctactaagtgtagatcaaggggatcactctgataataatttctactaagtgtagatctagacgctctgtggagactttttttaagcttggcgtggatccgatatcaactagatcttgaga

SEQ ID NO: 7603 - DNA, 170 bp, Artificial sequence
  Rnf43.39_Brca1.53
  crRNA array
cgatttcttggctttatatatcttgtggaaaggacgaaacaccgtaatttctactaagtgtagatcaaggggatcactctgataataatttctactaagtgtagataatgaggaggcgtcgatcatttttttaagcttggcgtggatccgatatcaactagatcttgaga

SEQ ID NO: 7604 - DNA, 170 bp, Artificial sequence
  Rnf43.39_Casp8.45
  crRNA array
cgatttcttggctttatatatcttgtggaaaggacgaaacaccgtaatttctactaagtgtagatcaaggggatcactctgataataatttctactaagtgtagatctaccgagatcctgtgaatgttttttaagcttggcgtggatccgatatcaactagatcttgaga

SEQ ID NO: 7605 - DNA, 170 bp, Artificial sequence
  Rnf43.39_Casp8.54
  crRNA array
cgatttcttggctttatatatcttgtggaaaggacgaaacaccgtaatttctactaagtgtagatcaaggggatcactctgataataatttctactaagtgtagatcagtgcagtcgtcgtaagatttttttaagcttggcgtggatccgatatcaactagatcttgaga

SEQ ID NO: 7606 - DNA, 170 bp, Artificial sequence
  Rnf43.39_Cbwd1.84
  crRNA array
cgatttcttggctttatatatcttgtggaaaggacgaaacaccgtaatttctactaagtgtagatcaaggggatcactctgataataatttctactaagtgtagatcacagcaggtaacatgccgcttttttaagcttggcgtggatccgatatcaactagatcttgaga

SEQ ID NO: 7607 - DNA, 170 bp, Artificial sequence
  Rnf43.39_Cbwd1.85
  crRNA array
cgatttcttggctttatatatcttgtggaaaggacgaaacaccgtaatttctactaagtgtagatcaaggggatcactctgataataatttctactaagtgtagatacagcaggtaacatgccgccttttttaagcttggcgtggatccgatatcaactagatcttgaga

SEQ ID NO: 7608 - DNA, 170 bp, Artificial sequence
  Rnf43.39_Cdh1.387
  crRNA array
cgatttcttggctttatatatcttgtggaaaggacgaaacaccgtaatttctactaagtgtagatcaaggggatcactctgataataatttctactaagtgtagatctcggcgtctgccgggtccgttttttaagcttggcgtggatccgatatcaactagatcttgaga

SEQ ID NO: 7609 - DNA, 170 bp, Artificial sequence
  Rnf43.39_Cdh1.58
  crRNA array
cgatttcttggctttatatatcttgtggaaaggacgaaacaccgtaatttctactaagtgtagatcaaggggatcactctgataataatttctactaagtgtagatctcgtccgcgcccgggactcttttttaagcttggcgtggatccgatatcaactagatcttgaga

SEQ ID NO: 7610 - DNA, 170 bp, Artificial sequence
  Rnf43.39_Cdkn2a.647
  crRNA array
cgatttcttggctttatatatcttgtggaaaggacgaaacaccgtaatttctactaagtgtagatcaaggggatcactctgataataatttctactaagtgtagatgcaatcacgggagggagcagttttttaagcttggcgtggatccgatatcaactagatcttgaga

SEQ ID NO: 7611 - DNA, 170 bp, Artificial sequence
  Rnf43.39_Cdkn2a.648
  crRNA array
cgatttcttggctttatatatcttgtggaaaggacgaaacaccgtaatttctactaagtgtagatcaaggggatcactctgataataatttctactaagtgtagatcaatcacgggagggagcagattttttaagcttggcgtggatccgatatcaactagatcttgaga

SEQ ID NO: 7612 - DNA, 170 bp, Artificial sequence
  Rnf43.39_Cic.162
  crRNA array
cgatttcttggctttatatatcttgtggaaaggacgaaacaccgtaatttctactaagtgtagatcaaggggatcactctgataataatttctactaagtgtagatcgcaggcgcgcccggcggagttttttaagcttggcgtggatccgatatcaactagatcttgaga

SEQ ID NO: 7613 - DNA, 170 bp, Artificial sequence
  Rnf43.39_Cic.164
  crRNA array
cgatttcttggctttatatatcttgtggaaaggacgaaacaccgtaatttctactaagtgtagatcaaggggatcactctgataataatttctactaagtgtagatcgggccctgggccggcggctttttttaagcttggcgtggatccgatatcaactagatcttgaga

SEQ ID NO: 7614 - DNA, 170 bp, Artificial sequence
  Rnf43.39_Ctcf.229
  crRNA array
cgatttcttggctttatatatcttgtggaaaggacgaaacaccgtaatttctactaagtgtagatcaaggggatcactctgataataatttctactaagtgtagatggctggtggctgatagtctgttttttaagcttggcgtggatccgatatcaactagatcttgaga

SEQ ID NO: 7615 - DNA, 170 bp, Artificial sequence
  Rnf43.39_Ctcf.809
  crRNA array
cgatttcttggctttatatatcttgtggaaaggacgaaacaccgtaatttctactaagtgtagatcaaggggatcactctgataataatttctactaagtgtagataagcgctatcatgatcccaattttttaagcttggcgtggatccgatatcaactagatcttgaga

SEQ ID NO: 7616 - DNA, 170 bp, Artificial sequence
  Rnf43.39_Elf3.826
  crRNA array
cgatttcttggctttatatatcttgtggaaaggacgaaacaccgtaatttctactaagtgtagatcaaggggatcactctgataataatttctactaagtgtagattccgagacatcctaatccacttttttaagcttggcgtggatccgatatcaactagatcttgaga

SEQ ID NO: 7617 - DNA, 170 bp, Artificial sequence
  Rnf43.39_Elf3.983
  crRNA array
cgatttcttggctttatatatcttgtggaaaggacgaaacaccgtaatttctactaagtgtagatcaaggggatcactctgataataatttctactaagtgtagattaggccccctaactggaccattttttaagcttggcgtggatccgatatcaactagatcttgaga

SEQ ID NO: 7618 - DNA, 170 bp, Artificial sequence
  Rnf43.39_Ep300.310
  crRNA array
cgatttcttggctttatatatcttgtggaaaggacgaaacaccgtaatttctactaagtgtagatcaaggggatcactctgataataatttctactaagtgtagatatggtacgacagtgaggaagttttttaagcttggcgtggatccgatatcaactagatcttgaga

SEQ ID NO: 7619 - DNA, 170 bp, Artificial sequence
  Rnf43.39_Ep300.587
  crRNA array
cgatttcttggctttatatatcttgtggaaaggacgaaacaccgtaatttctactaagtgtagatcaaggggatcactctgataataatttctactaagtgtagatcgccccggggcccccaaccattttttaagcttggcgtggatccgatatcaactagatcttgaga

SEQ ID NO: 7620 - DNA, 170 bp, Artificial sequence
  Rnf43.39_Epha2.126
  crRNA array
cgatttcttggctttatatatcttgtggaaaggacgaaacaccgtaatttctactaagtgtagatcaaggggatcactctgataataatttctactaagtgtagatcctgtgccgccgcggccgccttttttaagcttggcgtggatccgatatcaactagatcttgaga

SEQ ID NO: 7621 - DNA, 170 bp, Artificial sequence
  Rnf43.39_Epha2.5
  crRNA array
cgatttcttggctttatatatcttgtggaaaggacgaaacaccgtaatttctactaagtgtagatcaaggggatcactctgataataatttctactaagtgtagatcatgagctggcgccacccggttttttaagcttggcgtggatccgatatcaactagatcttgaga

SEQ ID NO: 7622 - DNA, 170 bp, Artificial sequence
  Rnf43.39_Fat1.105
  crRNA array
cgatttcttggctttatatatcttgtggaaaggacgaaacaccgtaatttctactaagtgtagatcaaggggatcactctgataataatttctactaagtgtagataactcgaggtgacaacaagtttttttaagcttggcgtggatccgatatcaactagatcttgaga

SEQ ID NO: 7623 - DNA, 170 bp, Artificial sequence
  Rnf43.39_Fat1.122
  crRNA array
cgatttcttggctttatatatcttgtggaaaggacgaaacaccgtaatttctactaagtgtagatcaaggggatcactctgataataatttctactaagtgtagatccatcgacatggaaacgggattttttaagcttggcgtggatccgatatcaactagatcttgaga

SEQ ID NO: 7624 - DNA, 170 bp, Artificial sequence
  Rnf43.39_Fbxw7.21
  crRNA array
cgatttcttggctttatatatcttgtggaaaggacgaaacaccgtaatttctactaagtgtagatcaaggggatcactctgataataatttctactaagtgtagattaatgtgccgtagaaacccattttttaagcttggcgtggatccgatatcaactagatcttgaga

SEQ ID NO: 7625 - DNA, 170 bp, Artificial sequence
  Rnf43.39_Fbxw7.23
  crRNA array
cgatttcttggctttatatatcttgtggaaaggacgaaacaccgtaatttctactaagtgtagatcaaggggatcactctgataataatttctactaagtgtagatatgtgccgtagaaacccatattttttaagcttggcgtggatccgatatcaactagatcttgaga

SEQ ID NO: 7626 - DNA, 170 bp, Artificial sequence
  Rnf43.39_Gata3.34
  crRNA array
cgatttcttggctttatatatcttgtggaaaggacgaaacaccgtaatttctactaagtgtagatcaaggggatcactctgataataatttctactaagtgtagatctaaactatcccgcaaagatttttttaagcttggcgtggatccgatatcaactagatcttgaga

SEQ ID NO: 7627 - DNA, 170 bp, Artificial sequence
  Rnf43.39_Gata3.47
  crRNA array
cgatttcttggctttatatatcttgtggaaaggacgaaacaccgtaatttctactaagtgtagatcaaggggatcactctgataataatttctactaagtgtagatcgtagtaggacgggacgtggttttttaagcttggcgtggatccgatatcaactagatcttgaga

SEQ ID NO: 7628 - DNA, 170 bp, Artificial sequence
  Rnf43.39_H2-Q2.1
  crRNA array
cgatttcttggctttatatatcttgtggaaaggacgaaacaccgtaatttctactaagtgtagatcaaggggatcactctgataataatttctactaagtgtagatagggcggccaccaacagcagttttttaagcttggcgtggatccgatatcaactagatcttgaga

SEQ ID NO: 7629 - DNA, 170 bp, Artificial sequence
  Rnf43.39_H2-Q2.2
  crRNA array
cgatttcttggctttatatatcttgtggaaaggacgaaacaccgtaatttctactaagtgtagatcaaggggatcactctgataataatttctactaagtgtagattaacctgcgcccgctgctgattttttaagcttggcgtggatccgatatcaactagatcttgaga

SEQ ID NO: 7630 - DNA, 170 bp, Artificial sequence
  Rnf43.39_Kdm5c.1878
  crRNA array
cgatttcttggctttatatatcttgtggaaaggacgaaacaccgtaatttctactaagtgtagatcaaggggatcactctgataataatttctactaagtgtagatagagcacggcacccgcccccttttttaagcttggcgtggatccgatatcaactagatcttgaga

SEQ ID NO: 7631 - DNA, 170 bp, Artificial sequence
  Rnf43.39_Kdm5c.1879
  crRNA array
cgatttcttggctttatatatcttgtggaaaggacgaaacaccgtaatttctactaagtgtagatcaaggggatcactctgataataatttctactaagtgtagatgagcacggcacccgccccccttttttaagcttggcgtggatccgatatcaactagatcttgaga

SEQ ID NO: 7632 - DNA, 170 bp, Artificial sequence
  Rnf43.39_Kdm6a.56
  crRNA array
cgatttcttggctttatatatcttgtggaaaggacgaaacaccgtaatttctactaagtgtagatcaaggggatcactctgataataatttctactaagtgtagattcgctgccgcctctcgcggcttttttaagcttggcgtggatccgatatcaactagatcttgaga

SEQ ID NO: 7633 - DNA, 170 bp, Artificial sequence
  Rnf43.39_Kdm6a.57
  crRNA array
cgatttcttggctttatatatcttgtggaaaggacgaaacaccgtaatttctactaagtgtagatcaaggggatcactctgataataatttctactaagtgtagatcgctgccgcctctcgcggcattttttaagcttggcgtggatccgatatcaactagatcttgaga

SEQ ID NO: 7634 - DNA, 170 bp, Artificial sequence
  Rnf43.39_Kmt2b.265
  crRNA array
cgatttcttggctttatatatcttgtggaaaggacgaaacaccgtaatttctactaagtgtagatcaaggggatcactctgataataatttctactaagtgtagatccccaagtgaagcccacctgttttttaagcttggcgtggatccgatatcaactagatcttgaga

SEQ ID NO: 7635 - DNA, 170 bp, Artificial sequence
  Rnf43.39_Kmt2b.298
  crRNA array
cgatttcttggctttatatatcttgtggaaaggacgaaacaccgtaatttctactaagtgtagatcaaggggatcactctgataataatttctactaagtgtagattccggcagggaccggctggcttttttaagcttggcgtggatccgatatcaactagatcttgaga

SEQ ID NO: 7636 - DNA, 170 bp, Artificial sequence
  Rnf43.39_Kmt2c.1962
  crRNA array
cgatttcttggctttatatatcttgtggaaaggacgaaacaccgtaatttctactaagtgtagatcaaggggatcactctgataataatttctactaagtgtagatgtgacgatctgtgccacaagttttttaagcttggcgtggatccgatatcaactagatcttgaga

SEQ ID NO: 7637 - DNA, 170 bp, Artificial sequence
  Rnf43.39_Kmt2c.2236
  crRNA array
cgatttcttggctttatatatcttgtggaaaggacgaaacaccgtaatttctactaagtgtagatcaaggggatcactctgataataatttctactaagtgtagatactcgacctccacctccctattttttaagcttggcgtggatccgatatcaactagatcttgaga

SEQ ID NO: 7638 - DNA, 170 bp, Artificial sequence
  Rnf43.39_Kmt2d.316
  crRNA array
cgatttcttggctttatatatcttgtggaaaggacgaaacaccgtaatttctactaagtgtagatcaaggggatcactctgataataatttctactaagtgtagatactccaggccacccaggtggttttttaagcttggcgtggatccgatatcaactagatcttgaga

SEQ ID NO: 7639 - DNA, 170 bp, Artificial sequence
  Rnf43.39_Kmt2d.416
  crRNA array
cgatttcttggctttatatatcttgtggaaaggacgaaacaccgtaatttctactaagtgtagatcaaggggatcactctgataataatttctactaagtgtagattaaacccccgggggaagggtttttttaagcttggcgtggatccgatatcaactagatcttgaga

SEQ ID NO: 7640 - DNA, 170 bp, Artificial sequence
  Rnf43.39_Map2k4.119
  crRNA array
cgatttcttggctttatatatcttgtggaaaggacgaaacaccgtaatttctactaagtgtagatcaaggggatcactctgataataatttctactaagtgtagattgctgtgtgggcggccacatttttttaagcttggcgtggatccgatatcaactagatcttgaga

SEQ ID NO: 7641 - DNA, 170 bp, Artificial sequence
  Rnf43.39_Map2k4.1261
  crRNA array
cgatttcttggctttatatatcttgtggaaaggacgaaacaccgtaatttctactaagtgtagatcaaggggatcactctgataataatttctactaagtgtagatgatgtagtaatgcggagtagttttttaagcttggcgtggatccgatatcaactagatcttgaga

SEQ ID NO: 7642 - DNA, 170 bp, Artificial sequence
  Rnf43.39_Map3k1.235
  crRNA array
cgatttcttggctttatatatcttgtggaaaggacgaaacaccgtaatttctactaagtgtagatcaaggggatcactctgataataatttctactaagtgtagataaaacgctactgatcgatcgttttttaagcttggcgtggatccgatatcaactagatcttgaga

SEQ ID NO: 7643 - DNA, 170 bp, Artificial sequence
  Rnf43.39_Map3k1.3838
  crRNA array
cgatttcttggctttatatatcttgtggaaaggacgaaacaccgtaatttctactaagtgtagatcaaggggatcactctgataataatttctactaagtgtagatccaacaacagggccccactattttttaagcttggcgtggatccgatatcaactagatcttgaga

SEQ ID NO: 7644 - DNA, 170 bp, Artificial sequence
  Rnf43.39_Mga.1655
  crRNA array
cgatttcttggctttatatatcttgtggaaaggacgaaacaccgtaatttctactaagtgtagatcaaggggatcactctgataataatttctactaagtgtagatcgagaagtggagagcatattttttttaagcttggcgtggatccgatatcaactagatcttgaga

SEQ ID NO: 7645 - DNA, 170 bp, Artificial sequence
  Rnf43.39_Mga.93
  crRNA array
cgatttcttggctttatatatcttgtggaaaggacgaaacaccgtaatttctactaagtgtagatcaaggggatcactctgataataatttctactaagtgtagatgagaaggctccccataatgtttttttaagcttggcgtggatccgatatcaactagatcttgaga

SEQ ID NO: 7646 - DNA, 170 bp, Artificial sequence
  Rnf43.39_Nf1.746
  crRNA array
cgatttcttggctttatatatcttgtggaaaggacgaaacaccgtaatttctactaagtgtagatcaaggggatcactctgataataatttctactaagtgtagattaagcataatgatgatgccattttttaagcttggcgtggatccgatatcaactagatcttgaga

SEQ ID NO: 7647 - DNA, 170 bp, Artificial sequence
  Rnf43.39_Nf1.97
  crRNA array
cgatttcttggctttatatatcttgtggaaaggacgaaacaccgtaatttctactaagtgtagatcaaggggatcactctgataataatttctactaagtgtagatagcccgctacatgctgatgcttttttaagcttggcgtggatccgatatcaactagatcttgaga

SEQ ID NO: 7648 - DNA, 170 bp, Artificial sequence
  Rnf43.39_Nf2.356
  crRNA array
cgatttcttggctttatatatcttgtggaaaggacgaaacaccgtaatttctactaagtgtagatcaaggggatcactctgataataatttctactaagtgtagatcggagtcatctgatagagatttttttaagcttggcgtggatccgatatcaactagatcttgaga

SEQ ID NO: 7649 - DNA, 170 bp, Artificial sequence
  Rnf43.39_Nf2.768
  crRNA array
cgatttcttggctttatatatcttgtggaaaggacgaaacaccgtaatttctactaagtgtagatcaaggggatcactctgataataatttctactaagtgtagatccgaagccccagtgtccggcttttttaagcttggcgtggatccgatatcaactagatcttgaga

SEQ ID NO: 7650 - DNA, 170 bp, Artificial sequence
  Rnf43.39_Notch1.1849
  crRNA array
cgatttcttggctttatatatcttgtggaaaggacgaaacaccgtaatttctactaagtgtagatcaaggggatcactctgataataatttctactaagtgtagatctggcgggtgggcggcgctgttttttaagcttggcgtggatccgatatcaactagatcttgaga

SEQ ID NO: 7651 - DNA, 170 bp, Artificial sequence
  Rnf43.39_Notch1.649
  crRNA array
cgatttcttggctttatatatcttgtggaaaggacgaaacaccgtaatttctactaagtgtagatcaaggggatcactctgataataatttctactaagtgtagattgggccaacgatgccaggacttttttaagcttggcgtggatccgatatcaactagatcttgaga

SEQ ID NO: 7652 - DNA, 170 bp, Artificial sequence
  Rnf43.39_Nsd1.70
  crRNA array
cgatttcttggctttatatatcttgtggaaaggacgaaacaccgtaatttctactaagtgtagatcaaggggatcactctgataataatttctactaagtgtagatactggtgtggacgatgcagattttttaagcttggcgtggatccgatatcaactagatcttgaga

SEQ ID NO: 7653 - DNA, 170 bp, Artificial sequence
  Rnf43.39_Nsd1.90
  crRNA array
cgatttcttggctttatatatcttgtggaaaggacgaaacaccgtaatttctactaagtgtagatcaaggggatcactctgataataatttctactaagtgtagataggagctaacggcaagaatgttttttaagcttggcgtggatccgatatcaactagatcttgaga

SEQ ID NO: 7654 - DNA, 170 bp, Artificial sequence
  Rnf43.39_Pbrm1.1236
  crRNA array
cgatttcttggctttatatatcttgtggaaaggacgaaacaccgtaatttctactaagtgtagatcaaggggatcactctgataataatttctactaagtgtagatgccgataaaaccaacagccgttttttaagcttggcgtggatccgatatcaactagatcttgaga

SEQ ID NO: 7655 - DNA, 170 bp, Artificial sequence
  Rnf43.39_Pbrm1.969
  crRNA array
cgatttcttggctttatatatcttgtggaaaggacgaaacaccgtaatttctactaagtgtagatcaaggggatcactctgataataatttctactaagtgtagatgagccctaatgaacagctcattttttaagcttggcgtggatccgatatcaactagatcttgaga

SEQ ID NO: 7656 - DNA, 170 bp, Artificial sequence
  Rnf43.39_Pik3r1.76
  crRNA array
cgatttcttggctttatatatcttgtggaaaggacgaaacaccgtaatttctactaagtgtagatcaaggggatcactctgataataatttctactaagtgtagataaaacctatacggcccgcacttttttaagcttggcgtggatccgatatcaactagatcttgaga

SEQ ID NO: 7657 - DNA, 170 bp, Artificial sequence
  Rnf43.39_Pik3r1.77
  crRNA array
cgatttcttggctttatatatcttgtggaaaggacgaaacaccgtaatttctactaagtgtagatcaaggggatcactctgataataatttctactaagtgtagataaacctatacggcccgcactttttttaagcttggcgtggatccgatatcaactagatcttgaga

SEQ ID NO: 7658 - DNA, 170 bp, Artificial sequence
  Rnf43.39_Pten.240
  crRNA array
cgatttcttggctttatatatcttgtggaaaggacgaaacaccgtaatttctactaagtgtagatcaaggggatcactctgataataatttctactaagtgtagattgcatacgctatagctgcttttttttaagcttggcgtggatccgatatcaactagatcttgaga

SEQ ID NO: 7659 - DNA, 170 bp, Artificial sequence
  Rnf43.39_Pten.265
  crRNA array
cgatttcttggctttatatatcttgtggaaaggacgaaacaccgtaatttctactaagtgtagatcaaggggatcactctgataataatttctactaagtgtagataagcgtggtgcgtgacgcacttttttaagcttggcgtggatccgatatcaactagatcttgaga

SEQ ID NO: 7660 - DNA, 170 bp, Artificial sequence
  Rnf43.39_Rasa1.1478
  crRNA array
cgatttcttggctttatatatcttgtggaaaggacgaaacaccgtaatttctactaagtgtagatcaaggggatcactctgataataatttctactaagtgtagatcgataatggtctatgatgtcttttttaagcttggcgtggatccgatatcaactagatcttgaga

SEQ ID NO: 7661 - DNA, 170 bp, Artificial sequence
  Rnf43.39_Rasa1.223
  crRNA array
cgatttcttggctttatatatcttgtggaaaggacgaaacaccgtaatttctactaagtgtagatcaaggggatcactctgataataatttctactaagtgtagattccatggagtatcgtgctcgttttttaagcttggcgtggatccgatatcaactagatcttgaga

SEQ ID NO: 7662 - DNA, 170 bp, Artificial sequence
  Rnf43.39_Rb1.211
  crRNA array
cgatttcttggctttatatatcttgtggaaaggacgaaacaccgtaatttctactaagtgtagatcaaggggatcactctgataataatttctactaagtgtagattctgacatgatcgggtacctttttttaagcttggcgtggatccgatatcaactagatcttgaga

SEQ ID NO: 7663 - DNA, 170 bp, Artificial sequence
  Rnf43.39_Rb1.394
  crRNA array
cgatttcttggctttatatatcttgtggaaaggacgaaacaccgtaatttctactaagtgtagatcaaggggatcactctgataataatttctactaagtgtagatagaaatctcgaagcaggatcttttttaagcttggcgtggatccgatatcaactagatcttgaga

SEQ ID NO: 7664 - DNA, 170 bp, Artificial sequence
  Rnf43.39_Rbm10.5
  crRNA array
cgatttcttggctttatatatcttgtggaaaggacgaaacaccgtaatttctactaagtgtagatcaaggggatcactctgataataatttctactaagtgtagatacgaaacctgaacccacacattttttaagcttggcgtggatccgatatcaactagatcttgaga

SEQ ID NO: 7665 - DNA, 170 bp, Artificial sequence
  Rnf43.39_Rbm10.6
  crRNA array
cgatttcttggctttatatatcttgtggaaaggacgaaacaccgtaatttctactaagtgtagatcaaggggatcactctgataataatttctactaagtgtagatcgaaacctgaacccacacagttttttaagcttggcgtggatccgatatcaactagatcttgaga

SEQ ID NO: 7666 - DNA, 170 bp, Artificial sequence
  Rnf43.39_Runx1.204
  crRNA array
cgatttcttggctttatatatcttgtggaaaggacgaaacaccgtaatttctactaagtgtagatcaaggggatcactctgataataatttctactaagtgtagattaaataagtccagccgttttttttttaagcttggcgtggatccgatatcaactagatcttgaga

SEQ ID NO: 7667 - DNA, 170 bp, Artificial sequence
  Rnf43.39_Runx1.81
  crRNA array
cgatttcttggctttatatatcttgtggaaaggacgaaacaccgtaatttctactaagtgtagatcaaggggatcactctgataataatttctactaagtgtagataggacgcgtatgggaattttttttttaagcttggcgtggatccgatatcaactagatcttgaga

SEQ ID NO: 7668 - DNA, 170 bp, Artificial sequence
  Rnf43.39_Setd2.143
  crRNA array
cgatttcttggctttatatatcttgtggaaaggacgaaacaccgtaatttctactaagtgtagatcaaggggatcactctgataataatttctactaagtgtagatgcacaaccacaacagactggttttttaagcttggcgtggatccgatatcaactagatcttgaga

SEQ ID NO: 7669 - DNA, 170 bp, Artificial sequence
  Rnf43.39_Setd2.508
  crRNA array
cgatttcttggctttatatatcttgtggaaaggacgaaacaccgtaatttctactaagtgtagatcaaggggatcactctgataataatttctactaagtgtagattacgatcccgagcacccgacttttttaagcttggcgtggatccgatatcaactagatcttgaga

SEQ ID NO: 7670 - DNA, 170 bp, Artificial sequence
  Rnf43.39_Smad4.3038
  crRNA array
cgatttcttggctttatatatcttgtggaaaggacgaaacaccgtaatttctactaagtgtagatcaaggggatcactctgataataatttctactaagtgtagatatctgcggcagtgtcaccggttttttaagcttggcgtggatccgatatcaactagatcttgaga

SEQ ID NO: 7671 - DNA, 170 bp, Artificial sequence
  Rnf43.39_Smad4.39
  crRNA array
cgatttcttggctttatatatcttgtggaaaggacgaaacaccgtaatttctactaagtgtagatcaaggggatcactctgataataatttctactaagtgtagatagtcaaacgcatactgacaattttttaagcttggcgtggatccgatatcaactagatcttgaga

SEQ ID NO: 7672 - DNA, 170 bp, Artificial sequence
  Rnf43.39_Stag2.1409
  crRNA array
cgatttcttggctttatatatcttgtggaaaggacgaaacaccgtaatttctactaagtgtagatcaaggggatcactctgataataatttctactaagtgtagatgctaataactgcggaagggcttttttaagcttggcgtggatccgatatcaactagatcttgaga

SEQ ID NO: 7673 - DNA, 170 bp, Artificial sequence
  Rnf43.39_Stag2.4401
  crRNA array
cgatttcttggctttatatatcttgtggaaaggacgaaacaccgtaatttctactaagtgtagatcaaggggatcactctgataataatttctactaagtgtagattaatcgtccagtggtgtatattttttaagcttggcgtggatccgatatcaactagatcttgaga

SEQ ID NO: 7674 - DNA, 170 bp, Artificial sequence
  Rnf43.39_Tbl1xr1.1
  crRNA array
cgatttcttggctttatatatcttgtggaaaggacgaaacaccgtaatttctactaagtgtagatcaaggggatcactctgataataatttctactaagtgtagatggatgcgcatactggtgaagttttttaagcttggcgtggatccgatatcaactagatcttgaga

SEQ ID NO: 7675 - DNA, 170 bp, Artificial sequence
  Rnf43.39_Tbl1xr1.83
  crRNA array
cgatttcttggctttatatatcttgtggaaaggacgaaacaccgtaatttctactaagtgtagatcaaggggatcactctgataataatttctactaagtgtagatatggtcgacccatcgagtctttttttaagcttggcgtggatccgatatcaactagatcttgaga

SEQ ID NO: 7676 - DNA, 170 bp, Artificial sequence
  Rnf43.39_Tgfbr2.290
  crRNA array
cgatttcttggctttatatatcttgtggaaaggacgaaacaccgtaatttctactaagtgtagatcaaggggatcactctgataataatttctactaagtgtagatcctctcggcgcccgggtaaattttttaagcttggcgtggatccgatatcaactagatcttgaga

SEQ ID NO: 7677 - DNA, 170 bp, Artificial sequence
  Rnf43.39_Tgfbr2.292
  crRNA array
cgatttcttggctttatatatcttgtggaaaggacgaaacaccgtaatttctactaagtgtagatcaaggggatcactctgataataatttctactaagtgtagatcccgggcgccgagagggaaattttttaagcttggcgtggatccgatatcaactagatcttgaga

SEQ ID NO: 7678 - DNA, 170 bp, Artificial sequence
  Rnf43.39_Trp53.4
  crRNA array
cgatttcttggctttatatatcttgtggaaaggacgaaacaccgtaatttctactaagtgtagatcaaggggatcactctgataataatttctactaagtgtagatccctgaactgcccccagggattttttaagcttggcgtggatccgatatcaactagatcttgaga

SEQ ID NO: 7679 - DNA, 170 bp, Artificial sequence
  Rnf43.39_Trp53.528
  crRNA array
cgatttcttggctttatatatcttgtggaaaggacgaaacaccgtaatttctactaagtgtagatcaaggggatcactctgataataatttctactaagtgtagatgctgggccagcagagacctgttttttaagcttggcgtggatccgatatcaactagatcttgaga

SEQ ID NO: 7680 - DNA, 170 bp, Artificial sequence
  Rnf43.39_Vhl.1
  crRNA array
cgatttcttggctttatatatcttgtggaaaggacgaaacaccgtaatttctactaagtgtagatcaaggggatcactctgataataatttctactaagtgtagatagggctcccggcggccatttttttttaagcttggcgtggatccgatatcaactagatcttgaga

SEQ ID NO: 7681 - DNA, 170 bp, Artificial sequence
  Rnf43.39_Vhl.151
  crRNA array
cgatttcttggctttatatatcttgtggaaaggacgaaacaccgtaatttctactaagtgtagatcaaggggatcactctgataataatttctactaagtgtagattagagcactcacccgagggattttttaagcttggcgtggatccgatatcaactagatcttgaga

SEQ ID NO: 7682 - DNA, 170 bp, Artificial sequence
  Rnf43.39_Zc3h13.1387
  crRNA array
cgatttcttggctttatatatcttgtggaaaggacgaaacaccgtaatttctactaagtgtagatcaaggggatcactctgataataatttctactaagtgtagatgtgacgccggtcatgtgactttttttaagcttggcgtggatccgatatcaactagatcttgaga

SEQ ID NO: 7683 - DNA, 170 bp, Artificial sequence
  Rnf43.39_Zc3h13.1777
  crRNA array
cgatttcttggctttatatatcttgtggaaaggacgaaacaccgtaatttctactaagtgtagatcaaggggatcactctgataataatttctactaagtgtagatgatgctgccagtgtagcggcttttttaagcttggcgtggatccgatatcaactagatcttgaga

SEQ ID NO: 7684 - DNA, 170 bp, Artificial sequence
  Runx1.204_Acvr2a.155
  crRNA array
cgatttcttggctttatatatcttgtggaaaggacgaaacaccgtaatttctactaagtgtagattaaataagtccagccgtttttaatttctactaagtgtagatggacctggctaatcaagtatttttttaagcttggcgtggatccgatatcaactagatcttgaga

SEQ ID NO: 7685 - DNA, 170 bp, Artificial sequence
  Runx1.204_Acvr2a.70
  crRNA array
cgatttcttggctttatatatcttgtggaaaggacgaaacaccgtaatttctactaagtgtagattaaataagtccagccgtttttaatttctactaagtgtagatcccgaggcgccggagaagccttttttaagcttggcgtggatccgatatcaactagatcttgaga

SEQ ID NO: 7686 - DNA, 170 bp, Artificial sequence
  Runx1.204_Apc.21
  crRNA array
cgatttcttggctttatatatcttgtggaaaggacgaaacaccgtaatttctactaagtgtagattaaataagtccagccgtttttaatttctactaagtgtagatgtgatccacacgtgtagctgttttttaagcttggcgtggatccgatatcaactagatcttgaga

SEQ ID NO: 7687 - DNA, 170 bp, Artificial sequence
  Runx1.204_Apc.867
  crRNA array
cgatttcttggctttatatatcttgtggaaaggacgaaacaccgtaatttctactaagtgtagattaaataagtccagccgtttttaatttctactaagtgtagatcagtcccaggcggcggaagcttttttaagcttggcgtggatccgatatcaactagatcttgaga

SEQ ID NO: 7688 - DNA, 170 bp, Artificial sequence
  Runx1.204_Arid1a.2
  crRNA array
cgatttcttggctttatatatcttgtggaaaggacgaaacaccgtaatttctactaagtgtagattaaataagtccagccgtttttaatttctactaagtgtagatcccgcgcccccgtcctggggttttttaagcttggcgtggatccgatatcaactagatcttgaga

SEQ ID NO: 7689 - DNA, 170 bp, Artificial sequence
  Runx1.204_Arid1a.5
  crRNA array
cgatttcttggctttatatatcttgtggaaaggacgaaacaccgtaatttctactaagtgtagattaaataagtccagccgtttttaatttctactaagtgtagatcccgcgctcggccgctgccgttttttaagcttggcgtggatccgatatcaactagatcttgaga

SEQ ID NO: 7690 - DNA, 170 bp, Artificial sequence
  Runx1.204_Arid2.166
  crRNA array
cgatttcttggctttatatatcttgtggaaaggacgaaacaccgtaatttctactaagtgtagattaaataagtccagccgtttttaatttctactaagtgtagataaccgcgatctgggttttttttttttaagcttggcgtggatccgatatcaactagatcttgaga

SEQ ID NO: 7691 - DNA, 170 bp, Artificial sequence
  Runx1.204_Arid2.172
  crRNA array
cgatttcttggctttatatatcttgtggaaaggacgaaacaccgtaatttctactaagtgtagattaaataagtccagccgtttttaatttctactaagtgtagatctggacgagctgcggcagttttttttaagcttggcgtggatccgatatcaactagatcttgaga

SEQ ID NO: 7692 - DNA, 170 bp, Artificial sequence
  Runx1.204_Atm.120
  crRNA array
cgatttcttggctttatatatcttgtggaaaggacgaaacaccgtaatttctactaagtgtagattaaataagtccagccgtttttaatttctactaagtgtagatgacaggtagtcggcagctaattttttaagcttggcgtggatccgatatcaactagatcttgaga

SEQ ID NO: 7693 - DNA, 170 bp, Artificial sequence
  Runx1.204_Atm.997
  crRNA array
cgatttcttggctttatatatcttgtggaaaggacgaaacaccgtaatttctactaagtgtagattaaataagtccagccgtttttaatttctactaagtgtagatgagaaagtctccgaatcgttttttttaagcttggcgtggatccgatatcaactagatcttgaga

SEQ ID NO: 7694 - DNA, 170 bp, Artificial sequence
  Runx1.204_Atrx.249
  crRNA array
cgatttcttggctttatatatcttgtggaaaggacgaaacaccgtaatttctactaagtgtagattaaataagtccagccgtttttaatttctactaagtgtagattagccagtcgctcatatctcttttttaagcttggcgtggatccgatatcaactagatcttgaga

SEQ ID NO: 7695 - DNA, 170 bp, Artificial sequence
  Runx1.204_Atrx.251
  crRNA array
cgatttcttggctttatatatcttgtggaaaggacgaaacaccgtaatttctactaagtgtagattaaataagtccagccgtttttaatttctactaagtgtagatgccagtcgctcatatctctgttttttaagcttggcgtggatccgatatcaactagatcttgaga

SEQ ID NO: 7696 - DNA, 170 bp, Artificial sequence
  Runx1.204_Bcor.203
  crRNA array
cgatttcttggctttatatatcttgtggaaaggacgaaacaccgtaatttctactaagtgtagattaaataagtccagccgtttttaatttctactaagtgtagatccccggagcggagtccaggcttttttaagcttggcgtggatccgatatcaactagatcttgaga

SEQ ID NO: 7697 - DNA, 170 bp, Artificial sequence
  Runx1.204_Bcor.475
  crRNA array
cgatttcttggctttatatatcttgtggaaaggacgaaacaccgtaatttctactaagtgtagattaaataagtccagccgtttttaatttctactaagtgtagattgcaacccctctgtatgggattttttaagcttggcgtggatccgatatcaactagatcttgaga

SEQ ID NO: 7698 - DNA, 170 bp, Artificial sequence
  Runx1.204_Brca1.112
  crRNA array
cgatttcttggctttatatatcttgtggaaaggacgaaacaccgtaatttctactaagtgtagattaaataagtccagccgtttttaatttctactaagtgtagatctagacgctctgtggagactttttttaagcttggcgtggatccgatatcaactagatcttgaga

SEQ ID NO: 7699 - DNA, 170 bp, Artificial sequence
  Runx1.204_Brca1.53
  crRNA array
cgatttcttggctttatatatcttgtggaaaggacgaaacaccgtaatttctactaagtgtagattaaataagtccagccgtttttaatttctactaagtgtagataatgaggaggcgtcgatcatttttttaagcttggcgtggatccgatatcaactagatcttgaga

SEQ ID NO: 7700 - DNA, 170 bp, Artificial sequence
  Runx1.204_Casp8.45
  crRNA array
cgatttcttggctttatatatcttgtggaaaggacgaaacaccgtaatttctactaagtgtagattaaataagtccagccgtttttaatttctactaagtgtagatctaccgagatcctgtgaatgttttttaagcttggcgtggatccgatatcaactagatcttgaga

SEQ ID NO: 7701 - DNA, 170 bp, Artificial sequence
  Runx1.204_Casp8.54
  crRNA array
cgatttcttggctttatatatcttgtggaaaggacgaaacaccgtaatttctactaagtgtagattaaataagtccagccgtttttaatttctactaagtgtagatcagtgcagtcgtcgtaagatttttttaagcttggcgtggatccgatatcaactagatcttgaga

SEQ ID NO: 7702 - DNA, 170 bp, Artificial sequence
  Runx1.204_Cbwd1.84
  crRNA array
cgatttcttggctttatatatcttgtggaaaggacgaaacaccgtaatttctactaagtgtagattaaataagtccagccgtttttaatttctactaagtgtagatcacagcaggtaacatgccgcttttttaagcttggcgtggatccgatatcaactagatcttgaga

SEQ ID NO: 7703 - DNA, 170 bp, Artificial sequence
  Runx1.204_Cbwd1.85
  crRNA array
cgatttcttggctttatatatcttgtggaaaggacgaaacaccgtaatttctactaagtgtagattaaataagtccagccgtttttaatttctactaagtgtagatacagcaggtaacatgccgccttttttaagcttggcgtggatccgatatcaactagatcttgaga

SEQ ID NO: 7704 - DNA, 170 bp, Artificial sequence
  Runx1.204_Cdh1.387
  crRNA array
cgatttcttggctttatatatcttgtggaaaggacgaaacaccgtaatttctactaagtgtagattaaataagtccagccgtttttaatttctactaagtgtagatctcggcgtctgccgggtccgttttttaagcttggcgtggatccgatatcaactagatcttgaga

SEQ ID NO: 7705 - DNA, 170 bp, Artificial sequence
  Runx1.204_Cdh1.58
  crRNA array
cgatttcttggctttatatatcttgtggaaaggacgaaacaccgtaatttctactaagtgtagattaaataagtccagccgtttttaatttctactaagtgtagatctcgtccgcgcccgggactcttttttaagcttggcgtggatccgatatcaactagatcttgaga

SEQ ID NO: 7706 - DNA, 170 bp, Artificial sequence
  Runx1.204_Cdkn2a.647
  crRNA array
cgatttcttggctttatatatcttgtggaaaggacgaaacaccgtaatttctactaagtgtagattaaataagtccagccgtttttaatttctactaagtgtagatgcaatcacgggagggagcagttttttaagcttggcgtggatccgatatcaactagatcttgaga

SEQ ID NO: 7707 - DNA, 170 bp, Artificial sequence
  Runx1.204_Cdkn2a.648
  crRNA array
cgatttcttggctttatatatcttgtggaaaggacgaaacaccgtaatttctactaagtgtagattaaataagtccagccgtttttaatttctactaagtgtagatcaatcacgggagggagcagattttttaagcttggcgtggatccgatatcaactagatcttgaga

SEQ ID NO: 7708 - DNA, 170 bp, Artificial sequence
  Runx1.204_Cic.162
  crRNA array
cgatttcttggctttatatatcttgtggaaaggacgaaacaccgtaatttctactaagtgtagattaaataagtccagccgtttttaatttctactaagtgtagatcgcaggcgcgcccggcggagttttttaagcttggcgtggatccgatatcaactagatcttgaga

SEQ ID NO: 7709 - DNA, 170 bp, Artificial sequence
  Runx1.204_Cic.164
  crRNA array
cgatttcttggctttatatatcttgtggaaaggacgaaacaccgtaatttctactaagtgtagattaaataagtccagccgtttttaatttctactaagtgtagatcgggccctgggccggcggctttttttaagcttggcgtggatccgatatcaactagatcttgaga

SEQ ID NO: 7710 - DNA, 170 bp, Artificial sequence
  Runx1.204_Ctcf.229
  crRNA array
cgatttcttggctttatatatcttgtggaaaggacgaaacaccgtaatttctactaagtgtagattaaataagtccagccgtttttaatttctactaagtgtagatggctggtggctgatagtctgttttttaagcttggcgtggatccgatatcaactagatcttgaga

SEQ ID NO: 7711 - DNA, 170 bp, Artificial sequence
  Runx1.204_Ctcf.809
  crRNA array
cgatttcttggctttatatatcttgtggaaaggacgaaacaccgtaatttctactaagtgtagattaaataagtccagccgtttttaatttctactaagtgtagataagcgctatcatgatcccaattttttaagcttggcgtggatccgatatcaactagatcttgaga

SEQ ID NO: 7712 - DNA, 170 bp, Artificial sequence
  Runx1.204_Elf3.826
  crRNA array
cgatttcttggctttatatatcttgtggaaaggacgaaacaccgtaatttctactaagtgtagattaaataagtccagccgtttttaatttctactaagtgtagattccgagacatcctaatccacttttttaagcttggcgtggatccgatatcaactagatcttgaga

SEQ ID NO: 7713 - DNA, 170 bp, Artificial sequence
  Runx1.204_Elf3.983
  crRNA array
cgatttcttggctttatatatcttgtggaaaggacgaaacaccgtaatttctactaagtgtagattaaataagtccagccgtttttaatttctactaagtgtagattaggccccctaactggaccattttttaagcttggcgtggatccgatatcaactagatcttgaga

SEQ ID NO: 7714 - DNA, 170 bp, Artificial sequence
  Runx1.204_Ep300.310
  crRNA array
cgatttcttggctttatatatcttgtggaaaggacgaaacaccgtaatttctactaagtgtagattaaataagtccagccgtttttaatttctactaagtgtagatatggtacgacagtgaggaagttttttaagcttggcgtggatccgatatcaactagatcttgaga

SEQ ID NO: 7715 - DNA, 170 bp, Artificial sequence
  Runx1.204_Ep300.587
  crRNA array
cgatttcttggctttatatatcttgtggaaaggacgaaacaccgtaatttctactaagtgtagattaaataagtccagccgtttttaatttctactaagtgtagatcgccccggggcccccaaccattttttaagcttggcgtggatccgatatcaactagatcttgaga

SEQ ID NO: 7716 - DNA, 170 bp, Artificial sequence
  Runx1.204_Epha2.126
  crRNA array
cgatttcttggctttatatatcttgtggaaaggacgaaacaccgtaatttctactaagtgtagattaaataagtccagccgtttttaatttctactaagtgtagatcctgtgccgccgcggccgccttttttaagcttggcgtggatccgatatcaactagatcttgaga

SEQ ID NO: 7717 - DNA, 170 bp, Artificial sequence
  Runx1.204_Epha2.5
  crRNA array
cgatttcttggctttatatatcttgtggaaaggacgaaacaccgtaatttctactaagtgtagattaaataagtccagccgtttttaatttctactaagtgtagatcatgagctggcgccacccggttttttaagcttggcgtggatccgatatcaactagatcttgaga

SEQ ID NO: 7718 - DNA, 170 bp, Artificial sequence
  Runx1.204_Fat1.105
  crRNA array
cgatttcttggctttatatatcttgtggaaaggacgaaacaccgtaatttctactaagtgtagattaaataagtccagccgtttttaatttctactaagtgtagataactcgaggtgacaacaagtttttttaagcttggcgtggatccgatatcaactagatcttgaga

SEQ ID NO: 7719 - DNA, 170 bp, Artificial sequence
  Runx1.204_Fat1.122
  crRNA array
cgatttcttggctttatatatcttgtggaaaggacgaaacaccgtaatttctactaagtgtagattaaataagtccagccgtttttaatttctactaagtgtagatccatcgacatggaaacgggattttttaagcttggcgtggatccgatatcaactagatcttgaga

SEQ ID NO: 7720 - DNA, 170 bp, Artificial sequence
  Runx1.204_Fbxw7.21
  crRNA array
cgatttcttggctttatatatcttgtggaaaggacgaaacaccgtaatttctactaagtgtagattaaataagtccagccgtttttaatttctactaagtgtagattaatgtgccgtagaaacccattttttaagcttggcgtggatccgatatcaactagatcttgaga

SEQ ID NO: 7721 - DNA, 170 bp, Artificial sequence
  Runx1.204_Fbxw7.23
  crRNA array
cgatttcttggctttatatatcttgtggaaaggacgaaacaccgtaatttctactaagtgtagattaaataagtccagccgtttttaatttctactaagtgtagatatgtgccgtagaaacccatattttttaagcttggcgtggatccgatatcaactagatcttgaga

SEQ ID NO: 7722 - DNA, 170 bp, Artificial sequence
  Runx1.204_Gata3.34
  crRNA array
cgatttcttggctttatatatcttgtggaaaggacgaaacaccgtaatttctactaagtgtagattaaataagtccagccgtttttaatttctactaagtgtagatctaaactatcccgcaaagatttttttaagcttggcgtggatccgatatcaactagatcttgaga

SEQ ID NO: 7723 - DNA, 170 bp, Artificial sequence
  Runx1.204_Gata3.47
  crRNA array
cgatttcttggctttatatatcttgtggaaaggacgaaacaccgtaatttctactaagtgtagattaaataagtccagccgtttttaatttctactaagtgtagatcgtagtaggacgggacgtggttttttaagcttggcgtggatccgatatcaactagatcttgaga

SEQ ID NO: 7724 - DNA, 170 bp, Artificial sequence
  Runx1.204_H2-Q2.1
  crRNA array
cgatttcttggctttatatatcttgtggaaaggacgaaacaccgtaatttctactaagtgtagattaaataagtccagccgtttttaatttctactaagtgtagatagggcggccaccaacagcagttttttaagcttggcgtggatccgatatcaactagatcttgaga

SEQ ID NO: 7725 - DNA, 170 bp, Artificial sequence
  Runx1.204_H2-Q2.2
  crRNA array
cgatttcttggctttatatatcttgtggaaaggacgaaacaccgtaatttctactaagtgtagattaaataagtccagccgtttttaatttctactaagtgtagattaacctgcgcccgctgctgattttttaagcttggcgtggatccgatatcaactagatcttgaga

SEQ ID NO: 7726 - DNA, 170 bp, Artificial sequence
  Runx1.204_Kdm5c.1878
  crRNA array
cgatttcttggctttatatatcttgtggaaaggacgaaacaccgtaatttctactaagtgtagattaaataagtccagccgtttttaatttctactaagtgtagatagagcacggcacccgcccccttttttaagcttggcgtggatccgatatcaactagatcttgaga

SEQ ID NO: 7727 - DNA, 170 bp, Artificial sequence
  Runx1.204_Kdm5c.1879
  crRNA array
cgatttcttggctttatatatcttgtggaaaggacgaaacaccgtaatttctactaagtgtagattaaataagtccagccgtttttaatttctactaagtgtagatgagcacggcacccgccccccttttttaagcttggcgtggatccgatatcaactagatcttgaga

SEQ ID NO: 7728 - DNA, 170 bp, Artificial sequence
  Runx1.204_Kdm6a.56
  crRNA array
cgatttcttggctttatatatcttgtggaaaggacgaaacaccgtaatttctactaagtgtagattaaataagtccagccgtttttaatttctactaagtgtagattcgctgccgcctctcgcggcttttttaagcttggcgtggatccgatatcaactagatcttgaga

SEQ ID NO: 7729 - DNA, 170 bp, Artificial sequence
  Runx1.204_Kdm6a.57
  crRNA array
cgatttcttggctttatatatcttgtggaaaggacgaaacaccgtaatttctactaagtgtagattaaataagtccagccgtttttaatttctactaagtgtagatcgctgccgcctctcgcggcattttttaagcttggcgtggatccgatatcaactagatcttgaga

SEQ ID NO: 7730 - DNA, 170 bp, Artificial sequence
  Runx1.204_Kmt2b.265
  crRNA array
cgatttcttggctttatatatcttgtggaaaggacgaaacaccgtaatttctactaagtgtagattaaataagtccagccgtttttaatttctactaagtgtagatccccaagtgaagcccacctgttttttaagcttggcgtggatccgatatcaactagatcttgaga

SEQ ID NO: 7731 - DNA, 170 bp, Artificial sequence
  Runx1.204_Kmt2b.298
  crRNA array
cgatttcttggctttatatatcttgtggaaaggacgaaacaccgtaatttctactaagtgtagattaaataagtccagccgtttttaatttctactaagtgtagattccggcagggaccggctggcttttttaagcttggcgtggatccgatatcaactagatcttgaga

SEQ ID NO: 7732 - DNA, 170 bp, Artificial sequence
  Runx1.204_Kmt2c.1962
  crRNA array
cgatttcttggctttatatatcttgtggaaaggacgaaacaccgtaatttctactaagtgtagattaaataagtccagccgtttttaatttctactaagtgtagatgtgacgatctgtgccacaagttttttaagcttggcgtggatccgatatcaactagatcttgaga

SEQ ID NO: 7733 - DNA, 170 bp, Artificial sequence
  Runx1.204_Kmt2c.2236
  crRNA array
cgatttcttggctttatatatcttgtggaaaggacgaaacaccgtaatttctactaagtgtagattaaataagtccagccgtttttaatttctactaagtgtagatactcgacctccacctccctattttttaagcttggcgtggatccgatatcaactagatcttgaga

SEQ ID NO: 7734 - DNA, 170 bp, Artificial sequence
  Runx1.204_Kmt2d.316
  crRNA array
cgatttcttggctttatatatcttgtggaaaggacgaaacaccgtaatttctactaagtgtagattaaataagtccagccgtttttaatttctactaagtgtagatactccaggccacccaggtggttttttaagcttggcgtggatccgatatcaactagatcttgaga

SEQ ID NO: 7735 - DNA, 170 bp, Artificial sequence
  Runx1.204_Kmt2d.416
  crRNA array
cgatttcttggctttatatatcttgtggaaaggacgaaacaccgtaatttctactaagtgtagattaaataagtccagccgtttttaatttctactaagtgtagattaaacccccgggggaagggtttttttaagcttggcgtggatccgatatcaactagatcttgaga

SEQ ID NO: 7736 - DNA, 170 bp, Artificial sequence
  Runx1.204_Map2k4.119
  crRNA array
cgatttcttggctttatatatcttgtggaaaggacgaaacaccgtaatttctactaagtgtagattaaataagtccagccgtttttaatttctactaagtgtagattgctgtgtgggcggccacatttttttaagcttggcgtggatccgatatcaactagatcttgaga

SEQ ID NO: 7737 - DNA, 170 bp, Artificial sequence
  Runx1.204_Map2k4.1261
  crRNA array
cgatttcttggctttatatatcttgtggaaaggacgaaacaccgtaatttctactaagtgtagattaaataagtccagccgtttttaatttctactaagtgtagatgatgtagtaatgcggagtagttttttaagcttggcgtggatccgatatcaactagatcttgaga

SEQ ID NO: 7738 - DNA, 170 bp, Artificial sequence
  Runx1.204_Map3k1.235
  crRNA array
cgatttcttggctttatatatcttgtggaaaggacgaaacaccgtaatttctactaagtgtagattaaataagtccagccgtttttaatttctactaagtgtagataaaacgctactgatcgatcgttttttaagcttggcgtggatccgatatcaactagatcttgaga

SEQ ID NO: 7739 - DNA, 170 bp, Artificial sequence
  Runx1.204_Map3k1.3838
  crRNA array
cgatttcttggctttatatatcttgtggaaaggacgaaacaccgtaatttctactaagtgtagattaaataagtccagccgtttttaatttctactaagtgtagatccaacaacagggccccactattttttaagcttggcgtggatccgatatcaactagatcttgaga

SEQ ID NO: 7740 - DNA, 170 bp, Artificial sequence
  Runx1.204_Mga.1655
  crRNA array
cgatttcttggctttatatatcttgtggaaaggacgaaacaccgtaatttctactaagtgtagattaaataagtccagccgtttttaatttctactaagtgtagatcgagaagtggagagcatattttttttaagcttggcgtggatccgatatcaactagatcttgaga

SEQ ID NO: 7741 - DNA, 170 bp, Artificial sequence
  Runx1.204_Mga.93
  crRNA array
cgatttcttggctttatatatcttgtggaaaggacgaaacaccgtaatttctactaagtgtagattaaataagtccagccgtttttaatttctactaagtgtagatgagaaggctccccataatgtttttttaagcttggcgtggatccgatatcaactagatcttgaga

SEQ ID NO: 7742 - DNA, 170 bp, Artificial sequence
  Runx1.204_Nf1.746
  crRNA array
cgatttcttggctttatatatcttgtggaaaggacgaaacaccgtaatttctactaagtgtagattaaataagtccagccgtttttaatttctactaagtgtagattaagcataatgatgatgccattttttaagcttggcgtggatccgatatcaactagatcttgaga

SEQ ID NO: 7743 - DNA, 170 bp, Artificial sequence
  Runx1.204_Nf1.97
  crRNA array
cgatttcttggctttatatatcttgtggaaaggacgaaacaccgtaatttctactaagtgtagattaaataagtccagccgtttttaatttctactaagtgtagatagcccgctacatgctgatgcttttttaagcttggcgtggatccgatatcaactagatcttgaga

SEQ ID NO: 7744 - DNA, 170 bp, Artificial sequence
  Runx1.204_Nf2.356
  crRNA array
cgatttcttggctttatatatcttgtggaaaggacgaaacaccgtaatttctactaagtgtagattaaataagtccagccgtttttaatttctactaagtgtagatcggagtcatctgatagagatttttttaagcttggcgtggatccgatatcaactagatcttgaga

SEQ ID NO: 7745 - DNA, 170 bp, Artificial sequence
  Runx1.204_Nf2.768
  crRNA array
cgatttcttggctttatatatcttgtggaaaggacgaaacaccgtaatttctactaagtgtagattaaataagtccagccgtttttaatttctactaagtgtagatccgaagccccagtgtccggcttttttaagcttggcgtggatccgatatcaactagatcttgaga

SEQ ID NO: 7746 - DNA, 170 bp, Artificial sequence
  Runx1.204_Notch1.1849
  crRNA array
cgatttcttggctttatatatcttgtggaaaggacgaaacaccgtaatttctactaagtgtagattaaataagtccagccgtttttaatttctactaagtgtagatctggcgggtgggcggcgctgttttttaagcttggcgtggatccgatatcaactagatcttgaga

SEQ ID NO: 7747 - DNA, 170 bp, Artificial sequence
  Runx1.204_Notch1.649
  crRNA array
cgatttcttggctttatatatcttgtggaaaggacgaaacaccgtaatttctactaagtgtagattaaataagtccagccgtttttaatttctactaagtgtagattgggccaacgatgccaggacttttttaagcttggcgtggatccgatatcaactagatcttgaga

SEQ ID NO: 7748 - DNA, 170 bp, Artificial sequence
  Runx1.204_Nsd1.70
  crRNA array
cgatttcttggctttatatatcttgtggaaaggacgaaacaccgtaatttctactaagtgtagattaaataagtccagccgtttttaatttctactaagtgtagatactggtgtggacgatgcagattttttaagcttggcgtggatccgatatcaactagatcttgaga

SEQ ID NO: 7749 - DNA, 170 bp, Artificial sequence
  Runx1.204_Nsd1.90
  crRNA array
cgatttcttggctttatatatcttgtggaaaggacgaaacaccgtaatttctactaagtgtagattaaataagtccagccgtttttaatttctactaagtgtagataggagctaacggcaagaatgttttttaagcttggcgtggatccgatatcaactagatcttgaga

SEQ ID NO: 7750 - DNA, 170 bp, Artificial sequence
  Runx1.204_Pbrm1.1236
  crRNA array
cgatttcttggctttatatatcttgtggaaaggacgaaacaccgtaatttctactaagtgtagattaaataagtccagccgtttttaatttctactaagtgtagatgccgataaaaccaacagccgttttttaagcttggcgtggatccgatatcaactagatcttgaga

SEQ ID NO: 7751 - DNA, 170 bp, Artificial sequence
  Runx1.204_Pbrm1.969
  crRNA array
cgatttcttggctttatatatcttgtggaaaggacgaaacaccgtaatttctactaagtgtagattaaataagtccagccgtttttaatttctactaagtgtagatgagccctaatgaacagctcattttttaagcttggcgtggatccgatatcaactagatcttgaga

SEQ ID NO: 7752 - DNA, 170 bp, Artificial sequence
  Runx1.204_Pik3r1.76
  crRNA array
cgatttcttggctttatatatcttgtggaaaggacgaaacaccgtaatttctactaagtgtagattaaataagtccagccgtttttaatttctactaagtgtagataaaacctatacggcccgcacttttttaagcttggcgtggatccgatatcaactagatcttgaga

SEQ ID NO: 7753 - DNA, 170 bp, Artificial sequence
  Runx1.204_Pik3r1.77
  crRNA array
cgatttcttggctttatatatcttgtggaaaggacgaaacaccgtaatttctactaagtgtagattaaataagtccagccgtttttaatttctactaagtgtagataaacctatacggcccgcactttttttaagcttggcgtggatccgatatcaactagatcttgaga

SEQ ID NO: 7754 - DNA, 170 bp, Artificial sequence
  Runx1.204_Pten.240
  crRNA array
cgatttcttggctttatatatcttgtggaaaggacgaaacaccgtaatttctactaagtgtagattaaataagtccagccgtttttaatttctactaagtgtagattgcatacgctatagctgcttttttttaagcttggcgtggatccgatatcaactagatcttgaga

SEQ ID NO: 7755 - DNA, 170 bp, Artificial sequence
  Runx1.204_Pten.265
  crRNA array
cgatttcttggctttatatatcttgtggaaaggacgaaacaccgtaatttctactaagtgtagattaaataagtccagccgtttttaatttctactaagtgtagataagcgtggtgcgtgacgcacttttttaagcttggcgtggatccgatatcaactagatcttgaga

SEQ ID NO: 7756 - DNA, 170 bp, Artificial sequence
  Runx1.204_Rasa1.1478
  crRNA array
cgatttcttggctttatatatcttgtggaaaggacgaaacaccgtaatttctactaagtgtagattaaataagtccagccgtttttaatttctactaagtgtagatcgataatggtctatgatgtcttttttaagcttggcgtggatccgatatcaactagatcttgaga

SEQ ID NO: 7757 - DNA, 170 bp, Artificial sequence
  Runx1.204_Rasa1.223
  crRNA array
cgatttcttggctttatatatcttgtggaaaggacgaaacaccgtaatttctactaagtgtagattaaataagtccagccgtttttaatttctactaagtgtagattccatggagtatcgtgctcgttttttaagcttggcgtggatccgatatcaactagatcttgaga

SEQ ID NO: 7758 - DNA, 170 bp, Artificial sequence
  Runx1.204_Rb1.211
  crRNA array
cgatttcttggctttatatatcttgtggaaaggacgaaacaccgtaatttctactaagtgtagattaaataagtccagccgtttttaatttctactaagtgtagattctgacatgatcgggtacctttttttaagcttggcgtggatccgatatcaactagatcttgaga

SEQ ID NO: 7759 - DNA, 170 bp, Artificial sequence
  Runx1.204_Rb1.394
  crRNA array
cgatttcttggctttatatatcttgtggaaaggacgaaacaccgtaatttctactaagtgtagattaaataagtccagccgtttttaatttctactaagtgtagatagaaatctcgaagcaggatcttttttaagcttggcgtggatccgatatcaactagatcttgaga

SEQ ID NO: 7760 - DNA, 170 bp, Artificial sequence
  Runx1.204_Rbm10.5
  crRNA array
cgatttcttggctttatatatcttgtggaaaggacgaaacaccgtaatttctactaagtgtagattaaataagtccagccgtttttaatttctactaagtgtagatacgaaacctgaacccacacattttttaagcttggcgtggatccgatatcaactagatcttgaga

SEQ ID NO: 7761 - DNA, 170 bp, Artificial sequence
  Runx1.204_Rbm10.6
  crRNA array
cgatttcttggctttatatatcttgtggaaaggacgaaacaccgtaatttctactaagtgtagattaaataagtccagccgtttttaatttctactaagtgtagatcgaaacctgaacccacacagttttttaagcttggcgtggatccgatatcaactagatcttgaga

SEQ ID NO: 7762 - DNA, 170 bp, Artificial sequence
  Runx1.204_Rnf43.1920
  crRNA array
cgatttcttggctttatatatcttgtggaaaggacgaaacaccgtaatttctactaagtgtagattaaataagtccagccgtttttaatttctactaagtgtagatatccccgtgccgtggactccttttttaagcttggcgtggatccgatatcaactagatcttgaga

SEQ ID NO: 7763 - DNA, 170 bp, Artificial sequence
  Runx1.204_Rnf43.39
  crRNA array
cgatttcttggctttatatatcttgtggaaaggacgaaacaccgtaatttctactaagtgtagattaaataagtccagccgtttttaatttctactaagtgtagatcaaggggatcactctgataattttttaagcttggcgtggatccgatatcaactagatcttgaga

SEQ ID NO: 7764 - DNA, 170 bp, Artificial sequence
  Runx1.204_Setd2.143
  crRNA array
cgatttcttggctttatatatcttgtggaaaggacgaaacaccgtaatttctactaagtgtagattaaataagtccagccgtttttaatttctactaagtgtagatgcacaaccacaacagactggttttttaagcttggcgtggatccgatatcaactagatcttgaga

SEQ ID NO: 7765 - DNA, 170 bp, Artificial sequence
  Runx1.204_Setd2.508
  crRNA array
cgatttcttggctttatatatcttgtggaaaggacgaaacaccgtaatttctactaagtgtagattaaataagtccagccgtttttaatttctactaagtgtagattacgatcccgagcacccgacttttttaagcttggcgtggatccgatatcaactagatcttgaga

SEQ ID NO: 7766 - DNA, 170 bp, Artificial sequence
  Runx1.204_Smad4.3038
  crRNA array
cgatttcttggctttatatatcttgtggaaaggacgaaacaccgtaatttctactaagtgtagattaaataagtccagccgtttttaatttctactaagtgtagatatctgcggcagtgtcaccggttttttaagcttggcgtggatccgatatcaactagatcttgaga

SEQ ID NO: 7767 - DNA, 170 bp, Artificial sequence
  Runx1.204_Smad4.39
  crRNA array
cgatttcttggctttatatatcttgtggaaaggacgaaacaccgtaatttctactaagtgtagattaaataagtccagccgtttttaatttctactaagtgtagatagtcaaacgcatactgacaattttttaagcttggcgtggatccgatatcaactagatcttgaga

SEQ ID NO: 7768 - DNA, 170 bp, Artificial sequence
  Runx1.204_Stag2.1409
  crRNA array
cgatttcttggctttatatatcttgtggaaaggacgaaacaccgtaatttctactaagtgtagattaaataagtccagccgtttttaatttctactaagtgtagatgctaataactgcggaagggcttttttaagcttggcgtggatccgatatcaactagatcttgaga

SEQ ID NO: 7769 - DNA, 170 bp, Artificial sequence
  Runx1.204_Stag2.4401
  crRNA array
cgatttcttggctttatatatcttgtggaaaggacgaaacaccgtaatttctactaagtgtagattaaataagtccagccgtttttaatttctactaagtgtagattaatcgtccagtggtgtatattttttaagcttggcgtggatccgatatcaactagatcttgaga

SEQ ID NO: 7770 - DNA, 170 bp, Artificial sequence
  Runx1.204_Tbl1xr1.1
  crRNA array
cgatttcttggctttatatatcttgtggaaaggacgaaacaccgtaatttctactaagtgtagattaaataagtccagccgtttttaatttctactaagtgtagatggatgcgcatactggtgaagttttttaagcttggcgtggatccgatatcaactagatcttgaga

SEQ ID NO: 7771 - DNA, 170 bp, Artificial sequence
  Runx1.204_Tbl1xr1.83
  crRNA array
cgatttcttggctttatatatcttgtggaaaggacgaaacaccgtaatttctactaagtgtagattaaataagtccagccgtttttaatttctactaagtgtagatatggtcgacccatcgagtctttttttaagcttggcgtggatccgatatcaactagatcttgaga

SEQ ID NO: 7772 - DNA, 170 bp, Artificial sequence
  Runx1.204_Tgfbr2.290
  crRNA array
cgatttcttggctttatatatcttgtggaaaggacgaaacaccgtaatttctactaagtgtagattaaataagtccagccgtttttaatttctactaagtgtagatcctctcggcgcccgggtaaattttttaagcttggcgtggatccgatatcaactagatcttgaga

SEQ ID NO: 7773 - DNA, 170 bp, Artificial sequence
  Runx1.204_Tgfbr2.292
  crRNA array
cgatttcttggctttatatatcttgtggaaaggacgaaacaccgtaatttctactaagtgtagattaaataagtccagccgtttttaatttctactaagtgtagatcccgggcgccgagagggaaattttttaagcttggcgtggatccgatatcaactagatcttgaga

SEQ ID NO: 7774 - DNA, 170 bp, Artificial sequence
  Runx1.204_Trp53.4
  crRNA array
cgatttcttggctttatatatcttgtggaaaggacgaaacaccgtaatttctactaagtgtagattaaataagtccagccgtttttaatttctactaagtgtagatccctgaactgcccccagggattttttaagcttggcgtggatccgatatcaactagatcttgaga

SEQ ID NO: 7775 - DNA, 170 bp, Artificial sequence
  Runx1.204_Trp53.528
  crRNA array
cgatttcttggctttatatatcttgtggaaaggacgaaacaccgtaatttctactaagtgtagattaaataagtccagccgtttttaatttctactaagtgtagatgctgggccagcagagacctgttttttaagcttggcgtggatccgatatcaactagatcttgaga

SEQ ID NO: 7776 - DNA, 170 bp, Artificial sequence
  Runx1.204_Vhl.1
  crRNA array
cgatttcttggctttatatatcttgtggaaaggacgaaacaccgtaatttctactaagtgtagattaaataagtccagccgtttttaatttctactaagtgtagatagggctcccggcggccatttttttttaagcttggcgtggatccgatatcaactagatcttgaga

SEQ ID NO: 7777 - DNA, 170 bp, Artificial sequence
  Runx1.204_Vhl.151
  crRNA array
cgatttcttggctttatatatcttgtggaaaggacgaaacaccgtaatttctactaagtgtagattaaataagtccagccgtttttaatttctactaagtgtagattagagcactcacccgagggattttttaagcttggcgtggatccgatatcaactagatcttgaga

SEQ ID NO: 7778 - DNA, 170 bp, Artificial sequence
  Runx1.204_Zc3h13.1387
  crRNA array
cgatttcttggctttatatatcttgtggaaaggacgaaacaccgtaatttctactaagtgtagattaaataagtccagccgtttttaatttctactaagtgtagatgtgacgccggtcatgtgactttttttaagcttggcgtggatccgatatcaactagatcttgaga

SEQ ID NO: 7779 - DNA, 170 bp, Artificial sequence
  Runx1.204_Zc3h13.1777
  crRNA array
cgatttcttggctttatatatcttgtggaaaggacgaaacaccgtaatttctactaagtgtagattaaataagtccagccgtttttaatttctactaagtgtagatgatgctgccagtgtagcggcttttttaagcttggcgtggatccgatatcaactagatcttgaga

SEQ ID NO: 7780 - DNA, 170 bp, Artificial sequence
  Runx1.81_Acvr2a.155
  crRNA array
cgatttcttggctttatatatcttgtggaaaggacgaaacaccgtaatttctactaagtgtagataggacgcgtatgggaatttttaatttctactaagtgtagatggacctggctaatcaagtatttttttaagcttggcgtggatccgatatcaactagatcttgaga

SEQ ID NO: 7781 - DNA, 170 bp, Artificial sequence
  Runx1.81_Acvr2a.70
  crRNA array
cgatttcttggctttatatatcttgtggaaaggacgaaacaccgtaatttctactaagtgtagataggacgcgtatgggaatttttaatttctactaagtgtagatcccgaggcgccggagaagccttttttaagcttggcgtggatccgatatcaactagatcttgaga

SEQ ID NO: 7782 - DNA, 170 bp, Artificial sequence
  Runx1.81_Apc.21
  crRNA array
cgatttcttggctttatatatcttgtggaaaggacgaaacaccgtaatttctactaagtgtagataggacgcgtatgggaatttttaatttctactaagtgtagatgtgatccacacgtgtagctgttttttaagcttggcgtggatccgatatcaactagatcttgaga

SEQ ID NO: 7783 - DNA, 170 bp, Artificial sequence
  Runx1.81_Apc.867
  crRNA array
cgatttcttggctttatatatcttgtggaaaggacgaaacaccgtaatttctactaagtgtagataggacgcgtatgggaatttttaatttctactaagtgtagatcagtcccaggcggcggaagcttttttaagcttggcgtggatccgatatcaactagatcttgaga

SEQ ID NO: 7784 - DNA, 170 bp, Artificial sequence
  Runx1.81_Arid1a.2
  crRNA array
cgatttcttggctttatatatcttgtggaaaggacgaaacaccgtaatttctactaagtgtagataggacgcgtatgggaatttttaatttctactaagtgtagatcccgcgcccccgtcctggggttttttaagcttggcgtggatccgatatcaactagatcttgaga

SEQ ID NO: 7785 - DNA, 170 bp, Artificial sequence
  Runx1.81_Arid1a.5
  crRNA array
cgatttcttggctttatatatcttgtggaaaggacgaaacaccgtaatttctactaagtgtagataggacgcgtatgggaatttttaatttctactaagtgtagatcccgcgctcggccgctgccgttttttaagcttggcgtggatccgatatcaactagatcttgaga

SEQ ID NO: 7786 - DNA, 170 bp, Artificial sequence
  Runx1.81_Arid2.166
  crRNA array
cgatttcttggctttatatatcttgtggaaaggacgaaacaccgtaatttctactaagtgtagataggacgcgtatgggaatttttaatttctactaagtgtagataaccgcgatctgggttttttttttttaagcttggcgtggatccgatatcaactagatcttgaga

SEQ ID NO: 7787 - DNA, 170 bp, Artificial sequence
  Runx1.81_Arid2.172
  crRNA array
cgatttcttggctttatatatcttgtggaaaggacgaaacaccgtaatttctactaagtgtagataggacgcgtatgggaatttttaatttctactaagtgtagatctggacgagctgcggcagttttttttaagcttggcgtggatccgatatcaactagatcttgaga

SEQ ID NO: 7788 - DNA, 170 bp, Artificial sequence
  Runx1.81_Atm.120
  crRNA array
cgatttcttggctttatatatcttgtggaaaggacgaaacaccgtaatttctactaagtgtagataggacgcgtatgggaatttttaatttctactaagtgtagatgacaggtagtcggcagctaattttttaagcttggcgtggatccgatatcaactagatcttgaga

SEQ ID NO: 7789 - DNA, 170 bp, Artificial sequence
  Runx1.81_Atm.997
  crRNA array
cgatttcttggctttatatatcttgtggaaaggacgaaacaccgtaatttctactaagtgtagataggacgcgtatgggaatttttaatttctactaagtgtagatgagaaagtctccgaatcgttttttttaagcttggcgtggatccgatatcaactagatcttgaga

SEQ ID NO: 7790 - DNA, 170 bp, Artificial sequence
  Runx1.81_Atrx.249
  crRNA array
cgatttcttggctttatatatcttgtggaaaggacgaaacaccgtaatttctactaagtgtagataggacgcgtatgggaatttttaatttctactaagtgtagattagccagtcgctcatatctcttttttaagcttggcgtggatccgatatcaactagatcttgaga

SEQ ID NO: 7791 - DNA, 170 bp, Artificial sequence
  Runx1.81_Atrx.251
  crRNA array
cgatttcttggctttatatatcttgtggaaaggacgaaacaccgtaatttctactaagtgtagataggacgcgtatgggaatttttaatttctactaagtgtagatgccagtcgctcatatctctgttttttaagcttggcgtggatccgatatcaactagatcttgaga

SEQ ID NO: 7792 - DNA, 170 bp, Artificial sequence
  Runx1.81_Bcor.203
  crRNA array
cgatttcttggctttatatatcttgtggaaaggacgaaacaccgtaatttctactaagtgtagataggacgcgtatgggaatttttaatttctactaagtgtagatccccggagcggagtccaggcttttttaagcttggcgtggatccgatatcaactagatcttgaga

SEQ ID NO: 7793 - DNA, 170 bp, Artificial sequence
  Runx1.81_Bcor.475
  crRNA array
cgatttcttggctttatatatcttgtggaaaggacgaaacaccgtaatttctactaagtgtagataggacgcgtatgggaatttttaatttctactaagtgtagattgcaacccctctgtatgggattttttaagcttggcgtggatccgatatcaactagatcttgaga

SEQ ID NO: 7794 - DNA, 170 bp, Artificial sequence
  Runx1.81_Brca1.112
  crRNA array
cgatttcttggctttatatatcttgtggaaaggacgaaacaccgtaatttctactaagtgtagataggacgcgtatgggaatttttaatttctactaagtgtagatctagacgctctgtggagactttttttaagcttggcgtggatccgatatcaactagatcttgaga

SEQ ID NO: 7795 - DNA, 170 bp, Artificial sequence
  Runx1.81_Brca1.53
  crRNA array
cgatttcttggctttatatatcttgtggaaaggacgaaacaccgtaatttctactaagtgtagataggacgcgtatgggaatttttaatttctactaagtgtagataatgaggaggcgtcgatcatttttttaagcttggcgtggatccgatatcaactagatcttgaga

SEQ ID NO: 7796 - DNA, 170 bp, Artificial sequence
  Runx1.81_Casp8.45
  crRNA array
cgatttcttggctttatatatcttgtggaaaggacgaaacaccgtaatttctactaagtgtagataggacgcgtatgggaatttttaatttctactaagtgtagatctaccgagatcctgtgaatgttttttaagcttggcgtggatccgatatcaactagatcttgaga

SEQ ID NO: 7797 - DNA, 170 bp, Artificial sequence
  Runx1.81_Casp8.54
  crRNA array
cgatttcttggctttatatatcttgtggaaaggacgaaacaccgtaatttctactaagtgtagataggacgcgtatgggaatttttaatttctactaagtgtagatcagtgcagtcgtcgtaagatttttttaagcttggcgtggatccgatatcaactagatcttgaga

SEQ ID NO: 7798 - DNA, 170 bp, Artificial sequence
  Runx1.81_Cbwd1.84
  crRNA array
cgatttcttggctttatatatcttgtggaaaggacgaaacaccgtaatttctactaagtgtagataggacgcgtatgggaatttttaatttctactaagtgtagatcacagcaggtaacatgccgcttttttaagcttggcgtggatccgatatcaactagatcttgaga

SEQ ID NO: 7799 - DNA, 170 bp, Artificial sequence
  Runx1.81_Cbwd1.85
  crRNA array
cgatttcttggctttatatatcttgtggaaaggacgaaacaccgtaatttctactaagtgtagataggacgcgtatgggaatttttaatttctactaagtgtagatacagcaggtaacatgccgccttttttaagcttggcgtggatccgatatcaactagatcttgaga

SEQ ID NO: 7800 - DNA, 170 bp, Artificial sequence
  Runx1.81_Cdh1.387
  crRNA array
cgatttcttggctttatatatcttgtggaaaggacgaaacaccgtaatttctactaagtgtagataggacgcgtatgggaatttttaatttctactaagtgtagatctcggcgtctgccgggtccgttttttaagcttggcgtggatccgatatcaactagatcttgaga

SEQ ID NO: 7801 - DNA, 170 bp, Artificial sequence
  Runx1.81_Cdh1.58
  crRNA array
cgatttcttggctttatatatcttgtggaaaggacgaaacaccgtaatttctactaagtgtagataggacgcgtatgggaatttttaatttctactaagtgtagatctcgtccgcgcccgggactcttttttaagcttggcgtggatccgatatcaactagatcttgaga

SEQ ID NO: 7802 - DNA, 170 bp, Artificial sequence
  Runx1.81_Cdkn2a.647
  crRNA array
cgatttcttggctttatatatcttgtggaaaggacgaaacaccgtaatttctactaagtgtagataggacgcgtatgggaatttttaatttctactaagtgtagatgcaatcacgggagggagcagttttttaagcttggcgtggatccgatatcaactagatcttgaga

SEQ ID NO: 7803 - DNA, 170 bp, Artificial sequence
  Runx1.81_Cdkn2a.648
  crRNA array
cgatttcttggctttatatatcttgtggaaaggacgaaacaccgtaatttctactaagtgtagataggacgcgtatgggaatttttaatttctactaagtgtagatcaatcacgggagggagcagattttttaagcttggcgtggatccgatatcaactagatcttgaga

SEQ ID NO: 7804 - DNA, 170 bp, Artificial sequence
  Runx1.81_Cic.162
  crRNA array
cgatttcttggctttatatatcttgtggaaaggacgaaacaccgtaatttctactaagtgtagataggacgcgtatgggaatttttaatttctactaagtgtagatcgcaggcgcgcccggcggagttttttaagcttggcgtggatccgatatcaactagatcttgaga

SEQ ID NO: 7805 - DNA, 170 bp, Artificial sequence
  Runx1.81_Cic.164
  crRNA array
cgatttcttggctttatatatcttgtggaaaggacgaaacaccgtaatttctactaagtgtagataggacgcgtatgggaatttttaatttctactaagtgtagatcgggccctgggccggcggctttttttaagcttggcgtggatccgatatcaactagatcttgaga

SEQ ID NO: 7806 - DNA, 170 bp, Artificial sequence
  Runx1.81_Ctcf.229
  crRNA array
cgatttcttggctttatatatcttgtggaaaggacgaaacaccgtaatttctactaagtgtagataggacgcgtatgggaatttttaatttctactaagtgtagatggctggtggctgatagtctgttttttaagcttggcgtggatccgatatcaactagatcttgaga

SEQ ID NO: 7807 - DNA, 170 bp, Artificial sequence
  Runx1.81_Ctcf.809
  crRNA array
cgatttcttggctttatatatcttgtggaaaggacgaaacaccgtaatttctactaagtgtagataggacgcgtatgggaatttttaatttctactaagtgtagataagcgctatcatgatcccaattttttaagcttggcgtggatccgatatcaactagatcttgaga

SEQ ID NO: 7808 - DNA, 170 bp, Artificial sequence
  Runx1.81_Elf3.826
  crRNA array
cgatttcttggctttatatatcttgtggaaaggacgaaacaccgtaatttctactaagtgtagataggacgcgtatgggaatttttaatttctactaagtgtagattccgagacatcctaatccacttttttaagcttggcgtggatccgatatcaactagatcttgaga

SEQ ID NO: 7809 - DNA, 170 bp, Artificial sequence
  Runx1.81_Elf3.983
  crRNA array
cgatttcttggctttatatatcttgtggaaaggacgaaacaccgtaatttctactaagtgtagataggacgcgtatgggaatttttaatttctactaagtgtagattaggccccctaactggaccattttttaagcttggcgtggatccgatatcaactagatcttgaga

SEQ ID NO: 7810 - DNA, 170 bp, Artificial sequence
  Runx1.81_Ep300.310
  crRNA array
cgatttcttggctttatatatcttgtggaaaggacgaaacaccgtaatttctactaagtgtagataggacgcgtatgggaatttttaatttctactaagtgtagatatggtacgacagtgaggaagttttttaagcttggcgtggatccgatatcaactagatcttgaga

SEQ ID NO: 7811 - DNA, 170 bp, Artificial sequence
  Runx1.81_Ep300.587
  crRNA array
cgatttcttggctttatatatcttgtggaaaggacgaaacaccgtaatttctactaagtgtagataggacgcgtatgggaatttttaatttctactaagtgtagatcgccccggggcccccaaccattttttaagcttggcgtggatccgatatcaactagatcttgaga

SEQ ID NO: 7812 - DNA, 170 bp, Artificial sequence
  Runx1.81_Epha2.126
  crRNA array
cgatttcttggctttatatatcttgtggaaaggacgaaacaccgtaatttctactaagtgtagataggacgcgtatgggaatttttaatttctactaagtgtagatcctgtgccgccgcggccgccttttttaagcttggcgtggatccgatatcaactagatcttgaga

SEQ ID NO: 7813 - DNA, 170 bp, Artificial sequence
  Runx1.81_Epha2.5
  crRNA array
cgatttcttggctttatatatcttgtggaaaggacgaaacaccgtaatttctactaagtgtagataggacgcgtatgggaatttttaatttctactaagtgtagatcatgagctggcgccacccggttttttaagcttggcgtggatccgatatcaactagatcttgaga

SEQ ID NO: 7814 - DNA, 170 bp, Artificial sequence
  Runx1.81_Fat1.105
  crRNA array
cgatttcttggctttatatatcttgtggaaaggacgaaacaccgtaatttctactaagtgtagataggacgcgtatgggaatttttaatttctactaagtgtagataactcgaggtgacaacaagtttttttaagcttggcgtggatccgatatcaactagatcttgaga

SEQ ID NO: 7815 - DNA, 170 bp, Artificial sequence
  Runx1.81_Fat1.122
  crRNA array
cgatttcttggctttatatatcttgtggaaaggacgaaacaccgtaatttctactaagtgtagataggacgcgtatgggaatttttaatttctactaagtgtagatccatcgacatggaaacgggattttttaagcttggcgtggatccgatatcaactagatcttgaga

SEQ ID NO: 7816 - DNA, 170 bp, Artificial sequence
  Runx1.81_Fbxw7.21
  crRNA array
cgatttcttggctttatatatcttgtggaaaggacgaaacaccgtaatttctactaagtgtagataggacgcgtatgggaatttttaatttctactaagtgtagattaatgtgccgtagaaacccattttttaagcttggcgtggatccgatatcaactagatcttgaga

SEQ ID NO: 7817 - DNA, 170 bp, Artificial sequence
  Runx1.81_Fbxw7.23
  crRNA array
cgatttcttggctttatatatcttgtggaaaggacgaaacaccgtaatttctactaagtgtagataggacgcgtatgggaatttttaatttctactaagtgtagatatgtgccgtagaaacccatattttttaagcttggcgtggatccgatatcaactagatcttgaga

SEQ ID NO: 7818 - DNA, 170 bp, Artificial sequence
  Runx1.81_Gata3.34
  crRNA array
cgatttcttggctttatatatcttgtggaaaggacgaaacaccgtaatttctactaagtgtagataggacgcgtatgggaatttttaatttctactaagtgtagatctaaactatcccgcaaagatttttttaagcttggcgtggatccgatatcaactagatcttgaga

SEQ ID NO: 7819 - DNA, 170 bp, Artificial sequence
  Runx1.81_Gata3.47
  crRNA array
cgatttcttggctttatatatcttgtggaaaggacgaaacaccgtaatttctactaagtgtagataggacgcgtatgggaatttttaatttctactaagtgtagatcgtagtaggacgggacgtggttttttaagcttggcgtggatccgatatcaactagatcttgaga

SEQ ID NO: 7820 - DNA, 170 bp, Artificial sequence
  Runx1.81_H2-Q2.1
  crRNA array
cgatttcttggctttatatatcttgtggaaaggacgaaacaccgtaatttctactaagtgtagataggacgcgtatgggaatttttaatttctactaagtgtagatagggcggccaccaacagcagttttttaagcttggcgtggatccgatatcaactagatcttgaga

SEQ ID NO: 7821 - DNA, 170 bp, Artificial sequence
  Runx1.81_H2-Q2.2
  crRNA array
cgatttcttggctttatatatcttgtggaaaggacgaaacaccgtaatttctactaagtgtagataggacgcgtatgggaatttttaatttctactaagtgtagattaacctgcgcccgctgctgattttttaagcttggcgtggatccgatatcaactagatcttgaga

SEQ ID NO: 7822 - DNA, 170 bp, Artificial sequence
  Runx1.81_Kdm5c.1878
  crRNA array
cgatttcttggctttatatatcttgtggaaaggacgaaacaccgtaatttctactaagtgtagataggacgcgtatgggaatttttaatttctactaagtgtagatagagcacggcacccgcccccttttttaagcttggcgtggatccgatatcaactagatcttgaga

SEQ ID NO: 7823 - DNA, 170 bp, Artificial sequence
  Runx1.81_Kdm5c.1879
  crRNA array
cgatttcttggctttatatatcttgtggaaaggacgaaacaccgtaatttctactaagtgtagataggacgcgtatgggaatttttaatttctactaagtgtagatgagcacggcacccgccccccttttttaagcttggcgtggatccgatatcaactagatcttgaga

SEQ ID NO: 7824 - DNA, 170 bp, Artificial sequence
  Runx1.81_Kdm6a.56
  crRNA array
cgatttcttggctttatatatcttgtggaaaggacgaaacaccgtaatttctactaagtgtagataggacgcgtatgggaatttttaatttctactaagtgtagattcgctgccgcctctcgcggcttttttaagcttggcgtggatccgatatcaactagatcttgaga

SEQ ID NO: 7825 - DNA, 170 bp, Artificial sequence
  Runx1.81_Kdm6a.57
  crRNA array
cgatttcttggctttatatatcttgtggaaaggacgaaacaccgtaatttctactaagtgtagataggacgcgtatgggaatttttaatttctactaagtgtagatcgctgccgcctctcgcggcattttttaagcttggcgtggatccgatatcaactagatcttgaga

SEQ ID NO: 7826 - DNA, 170 bp, Artificial sequence
  Runx1.81_Kmt2b.265
  crRNA array
cgatttcttggctttatatatcttgtggaaaggacgaaacaccgtaatttctactaagtgtagataggacgcgtatgggaatttttaatttctactaagtgtagatccccaagtgaagcccacctgttttttaagcttggcgtggatccgatatcaactagatcttgaga

SEQ ID NO: 7827 - DNA, 170 bp, Artificial sequence
  Runx1.81_Kmt2b.298
  crRNA array
cgatttcttggctttatatatcttgtggaaaggacgaaacaccgtaatttctactaagtgtagataggacgcgtatgggaatttttaatttctactaagtgtagattccggcagggaccggctggcttttttaagcttggcgtggatccgatatcaactagatcttgaga

SEQ ID NO: 7828 - DNA, 170 bp, Artificial sequence
  Runx1.81_Kmt2c.1962
  crRNA array
cgatttcttggctttatatatcttgtggaaaggacgaaacaccgtaatttctactaagtgtagataggacgcgtatgggaatttttaatttctactaagtgtagatgtgacgatctgtgccacaagttttttaagcttggcgtggatccgatatcaactagatcttgaga

SEQ ID NO: 7829 - DNA, 170 bp, Artificial sequence
  Runx1.81_Kmt2c.2236
  crRNA array
cgatttcttggctttatatatcttgtggaaaggacgaaacaccgtaatttctactaagtgtagataggacgcgtatgggaatttttaatttctactaagtgtagatactcgacctccacctccctattttttaagcttggcgtggatccgatatcaactagatcttgaga

SEQ ID NO: 7830 - DNA, 170 bp, Artificial sequence
  Runx1.81_Kmt2d.316
  crRNA array
cgatttcttggctttatatatcttgtggaaaggacgaaacaccgtaatttctactaagtgtagataggacgcgtatgggaatttttaatttctactaagtgtagatactccaggccacccaggtggttttttaagcttggcgtggatccgatatcaactagatcttgaga

SEQ ID NO: 7831 - DNA, 170 bp, Artificial sequence
  Runx1.81_Kmt2d.416
  crRNA array
cgatttcttggctttatatatcttgtggaaaggacgaaacaccgtaatttctactaagtgtagataggacgcgtatgggaatttttaatttctactaagtgtagattaaacccccgggggaagggtttttttaagcttggcgtggatccgatatcaactagatcttgaga

SEQ ID NO: 7832 - DNA, 170 bp, Artificial sequence
  Runx1.81_Map2k4.119
  crRNA array
cgatttcttggctttatatatcttgtggaaaggacgaaacaccgtaatttctactaagtgtagataggacgcgtatgggaatttttaatttctactaagtgtagattgctgtgtgggcggccacatttttttaagcttggcgtggatccgatatcaactagatcttgaga

SEQ ID NO: 7833 - DNA, 170 bp, Artificial sequence
  Runx1.81_Map2k4.1261
  crRNA array
cgatttcttggctttatatatcttgtggaaaggacgaaacaccgtaatttctactaagtgtagataggacgcgtatgggaatttttaatttctactaagtgtagatgatgtagtaatgcggagtagttttttaagcttggcgtggatccgatatcaactagatcttgaga

SEQ ID NO: 7834 - DNA, 170 bp, Artificial sequence
  Runx1.81_Map3k1.235
  crRNA array
cgatttcttggctttatatatcttgtggaaaggacgaaacaccgtaatttctactaagtgtagataggacgcgtatgggaatttttaatttctactaagtgtagataaaacgctactgatcgatcgttttttaagcttggcgtggatccgatatcaactagatcttgaga

SEQ ID NO: 7835 - DNA, 170 bp, Artificial sequence
  Runx1.81_Map3k1.3838
  crRNA array
cgatttcttggctttatatatcttgtggaaaggacgaaacaccgtaatttctactaagtgtagataggacgcgtatgggaatttttaatttctactaagtgtagatccaacaacagggccccactattttttaagcttggcgtggatccgatatcaactagatcttgaga

SEQ ID NO: 7836 - DNA, 170 bp, Artificial sequence
  Runx1.81_Mga.1655
  crRNA array
cgatttcttggctttatatatcttgtggaaaggacgaaacaccgtaatttctactaagtgtagataggacgcgtatgggaatttttaatttctactaagtgtagatcgagaagtggagagcatattttttttaagcttggcgtggatccgatatcaactagatcttgaga

SEQ ID NO: 7837 - DNA, 170 bp, Artificial sequence
  Runx1.81_Mga.93
  crRNA array
cgatttcttggctttatatatcttgtggaaaggacgaaacaccgtaatttctactaagtgtagataggacgcgtatgggaatttttaatttctactaagtgtagatgagaaggctccccataatgtttttttaagcttggcgtggatccgatatcaactagatcttgaga

SEQ ID NO: 7838 - DNA, 170 bp, Artificial sequence
  Runx1.81_Nf1.746
  crRNA array
cgatttcttggctttatatatcttgtggaaaggacgaaacaccgtaatttctactaagtgtagataggacgcgtatgggaatttttaatttctactaagtgtagattaagcataatgatgatgccattttttaagcttggcgtggatccgatatcaactagatcttgaga

SEQ ID NO: 7839 - DNA, 170 bp, Artificial sequence
  Runx1.81_Nf1.97
  crRNA array
cgatttcttggctttatatatcttgtggaaaggacgaaacaccgtaatttctactaagtgtagataggacgcgtatgggaatttttaatttctactaagtgtagatagcccgctacatgctgatgcttttttaagcttggcgtggatccgatatcaactagatcttgaga

SEQ ID NO: 7840 - DNA, 170 bp, Artificial sequence
  Runx1.81_Nf2.356
  crRNA array
cgatttcttggctttatatatcttgtggaaaggacgaaacaccgtaatttctactaagtgtagataggacgcgtatgggaatttttaatttctactaagtgtagatcggagtcatctgatagagatttttttaagcttggcgtggatccgatatcaactagatcttgaga

SEQ ID NO: 7841 - DNA, 170 bp, Artificial sequence
  Runx1.81_Nf2.768
  crRNA array
cgatttcttggctttatatatcttgtggaaaggacgaaacaccgtaatttctactaagtgtagataggacgcgtatgggaatttttaatttctactaagtgtagatccgaagccccagtgtccggcttttttaagcttggcgtggatccgatatcaactagatcttgaga

SEQ ID NO: 7842 - DNA, 170 bp, Artificial sequence
  Runx1.81_Notch1.1849
  crRNA array
cgatttcttggctttatatatcttgtggaaaggacgaaacaccgtaatttctactaagtgtagataggacgcgtatgggaatttttaatttctactaagtgtagatctggcgggtgggcggcgctgttttttaagcttggcgtggatccgatatcaactagatcttgaga

SEQ ID NO: 7843 - DNA, 170 bp, Artificial sequence
  Runx1.81_Notch1.649
  crRNA array
cgatttcttggctttatatatcttgtggaaaggacgaaacaccgtaatttctactaagtgtagataggacgcgtatgggaatttttaatttctactaagtgtagattgggccaacgatgccaggacttttttaagcttggcgtggatccgatatcaactagatcttgaga

SEQ ID NO: 7844 - DNA, 170 bp, Artificial sequence
  Runx1.81_Nsd1.70
  crRNA array
cgatttcttggctttatatatcttgtggaaaggacgaaacaccgtaatttctactaagtgtagataggacgcgtatgggaatttttaatttctactaagtgtagatactggtgtggacgatgcagattttttaagcttggcgtggatccgatatcaactagatcttgaga

SEQ ID NO: 7845 - DNA, 170 bp, Artificial sequence
  Runx1.81_Nsd1.90
  crRNA array
cgatttcttggctttatatatcttgtggaaaggacgaaacaccgtaatttctactaagtgtagataggacgcgtatgggaatttttaatttctactaagtgtagataggagctaacggcaagaatgttttttaagcttggcgtggatccgatatcaactagatcttgaga

SEQ ID NO: 7846 - DNA, 170 bp, Artificial sequence
  Runx1.81_Pbrm1.1236
  crRNA array
cgatttcttggctttatatatcttgtggaaaggacgaaacaccgtaatttctactaagtgtagataggacgcgtatgggaatttttaatttctactaagtgtagatgccgataaaaccaacagccgttttttaagcttggcgtggatccgatatcaactagatcttgaga

SEQ ID NO: 7847 - DNA, 170 bp, Artificial sequence
  Runx1.81_Pbrm1.969
  crRNA array
cgatttcttggctttatatatcttgtggaaaggacgaaacaccgtaatttctactaagtgtagataggacgcgtatgggaatttttaatttctactaagtgtagatgagccctaatgaacagctcattttttaagcttggcgtggatccgatatcaactagatcttgaga

SEQ ID NO: 7848 - DNA, 170 bp, Artificial sequence
  Runx1.81_Pik3r1.76
  crRNA array
cgatttcttggctttatatatcttgtggaaaggacgaaacaccgtaatttctactaagtgtagataggacgcgtatgggaatttttaatttctactaagtgtagataaaacctatacggcccgcacttttttaagcttggcgtggatccgatatcaactagatcttgaga

SEQ ID NO: 7849 - DNA, 170 bp, Artificial sequence
  Runx1.81_Pik3r1.77
  crRNA array
cgatttcttggctttatatatcttgtggaaaggacgaaacaccgtaatttctactaagtgtagataggacgcgtatgggaatttttaatttctactaagtgtagataaacctatacggcccgcactttttttaagcttggcgtggatccgatatcaactagatcttgaga

SEQ ID NO: 7850 - DNA, 170 bp, Artificial sequence
  Runx1.81_Pten.240
  crRNA array
cgatttcttggctttatatatcttgtggaaaggacgaaacaccgtaatttctactaagtgtagataggacgcgtatgggaatttttaatttctactaagtgtagattgcatacgctatagctgcttttttttaagcttggcgtggatccgatatcaactagatcttgaga

SEQ ID NO: 7851 - DNA, 170 bp, Artificial sequence
  Runx1.81_Pten.265
  crRNA array
cgatttcttggctttatatatcttgtggaaaggacgaaacaccgtaatttctactaagtgtagataggacgcgtatgggaatttttaatttctactaagtgtagataagcgtggtgcgtgacgcacttttttaagcttggcgtggatccgatatcaactagatcttgaga

SEQ ID NO: 7852 - DNA, 170 bp, Artificial sequence
  Runx1.81_Rasa1.1478
  crRNA array
cgatttcttggctttatatatcttgtggaaaggacgaaacaccgtaatttctactaagtgtagataggacgcgtatgggaatttttaatttctactaagtgtagatcgataatggtctatgatgtcttttttaagcttggcgtggatccgatatcaactagatcttgaga

SEQ ID NO: 7853 - DNA, 170 bp, Artificial sequence
  Runx1.81_Rasa1.223
  crRNA array
cgatttcttggctttatatatcttgtggaaaggacgaaacaccgtaatttctactaagtgtagataggacgcgtatgggaatttttaatttctactaagtgtagattccatggagtatcgtgctcgttttttaagcttggcgtggatccgatatcaactagatcttgaga

SEQ ID NO: 7854 - DNA, 170 bp, Artificial sequence
  Runx1.81_Rb1.211
  crRNA array
cgatttcttggctttatatatcttgtggaaaggacgaaacaccgtaatttctactaagtgtagataggacgcgtatgggaatttttaatttctactaagtgtagattctgacatgatcgggtacctttttttaagcttggcgtggatccgatatcaactagatcttgaga

SEQ ID NO: 7855 - DNA, 170 bp, Artificial sequence
  Runx1.81_Rb1.394
  crRNA array
cgatttcttggctttatatatcttgtggaaaggacgaaacaccgtaatttctactaagtgtagataggacgcgtatgggaatttttaatttctactaagtgtagatagaaatctcgaagcaggatcttttttaagcttggcgtggatccgatatcaactagatcttgaga

SEQ ID NO: 7856 - DNA, 170 bp, Artificial sequence
  Runx1.81_Rbm10.5
  crRNA array
cgatttcttggctttatatatcttgtggaaaggacgaaacaccgtaatttctactaagtgtagataggacgcgtatgggaatttttaatttctactaagtgtagatacgaaacctgaacccacacattttttaagcttggcgtggatccgatatcaactagatcttgaga

SEQ ID NO: 7857 - DNA, 170 bp, Artificial sequence
  Runx1.81_Rbm10.6
  crRNA array
cgatttcttggctttatatatcttgtggaaaggacgaaacaccgtaatttctactaagtgtagataggacgcgtatgggaatttttaatttctactaagtgtagatcgaaacctgaacccacacagttttttaagcttggcgtggatccgatatcaactagatcttgaga

SEQ ID NO: 7858 - DNA, 170 bp, Artificial sequence
  Runx1.81_Rnf43.1920
  crRNA array
cgatttcttggctttatatatcttgtggaaaggacgaaacaccgtaatttctactaagtgtagataggacgcgtatgggaatttttaatttctactaagtgtagatatccccgtgccgtggactccttttttaagcttggcgtggatccgatatcaactagatcttgaga

SEQ ID NO: 7859 - DNA, 170 bp, Artificial sequence
  Runx1.81_Rnf43.39
  crRNA array
cgatttcttggctttatatatcttgtggaaaggacgaaacaccgtaatttctactaagtgtagataggacgcgtatgggaatttttaatttctactaagtgtagatcaaggggatcactctgataattttttaagcttggcgtggatccgatatcaactagatcttgaga

SEQ ID NO: 7860 - DNA, 170 bp, Artificial sequence
  Runx1.81_Setd2.143
  crRNA array
cgatttcttggctttatatatcttgtggaaaggacgaaacaccgtaatttctactaagtgtagataggacgcgtatgggaatttttaatttctactaagtgtagatgcacaaccacaacagactggttttttaagcttggcgtggatccgatatcaactagatcttgaga

SEQ ID NO: 7861 - DNA, 170 bp, Artificial sequence
  Runx1.81_Setd2.508
  crRNA array
cgatttcttggctttatatatcttgtggaaaggacgaaacaccgtaatttctactaagtgtagataggacgcgtatgggaatttttaatttctactaagtgtagattacgatcccgagcacccgacttttttaagcttggcgtggatccgatatcaactagatcttgaga

SEQ ID NO: 7862 - DNA, 170 bp, Artificial sequence
  Runx1.81_Smad4.3038
  crRNA array
cgatttcttggctttatatatcttgtggaaaggacgaaacaccgtaatttctactaagtgtagataggacgcgtatgggaatttttaatttctactaagtgtagatatctgcggcagtgtcaccggttttttaagcttggcgtggatccgatatcaactagatcttgaga

SEQ ID NO: 7863 - DNA, 170 bp, Artificial sequence
  Runx1.81_Smad4.39
  crRNA array
cgatttcttggctttatatatcttgtggaaaggacgaaacaccgtaatttctactaagtgtagataggacgcgtatgggaatttttaatttctactaagtgtagatagtcaaacgcatactgacaattttttaagcttggcgtggatccgatatcaactagatcttgaga

SEQ ID NO: 7864 - DNA, 170 bp, Artificial sequence
  Runx1.81_Stag2.1409
  crRNA array
cgatttcttggctttatatatcttgtggaaaggacgaaacaccgtaatttctactaagtgtagataggacgcgtatgggaatttttaatttctactaagtgtagatgctaataactgcggaagggcttttttaagcttggcgtggatccgatatcaactagatcttgaga

SEQ ID NO: 7865 - DNA, 170 bp, Artificial sequence
  Runx1.81_Stag2.4401
  crRNA array
cgatttcttggctttatatatcttgtggaaaggacgaaacaccgtaatttctactaagtgtagataggacgcgtatgggaatttttaatttctactaagtgtagattaatcgtccagtggtgtatattttttaagcttggcgtggatccgatatcaactagatcttgaga

SEQ ID NO: 7866 - DNA, 170 bp, Artificial sequence
  Runx1.81_Tbl1xr1.1
  crRNA array
cgatttcttggctttatatatcttgtggaaaggacgaaacaccgtaatttctactaagtgtagataggacgcgtatgggaatttttaatttctactaagtgtagatggatgcgcatactggtgaagttttttaagcttggcgtggatccgatatcaactagatcttgaga

SEQ ID NO: 7867 - DNA, 170 bp, Artificial sequence
  Runx1.81_Tbl1xr1.83
  crRNA array
cgatttcttggctttatatatcttgtggaaaggacgaaacaccgtaatttctactaagtgtagataggacgcgtatgggaatttttaatttctactaagtgtagatatggtcgacccatcgagtctttttttaagcttggcgtggatccgatatcaactagatcttgaga

SEQ ID NO: 7868 - DNA, 170 bp, Artificial sequence
  Runx1.81_Tgfbr2.290
  crRNA array
cgatttcttggctttatatatcttgtggaaaggacgaaacaccgtaatttctactaagtgtagataggacgcgtatgggaatttttaatttctactaagtgtagatcctctcggcgcccgggtaaattttttaagcttggcgtggatccgatatcaactagatcttgaga

SEQ ID NO: 7869 - DNA, 170 bp, Artificial sequence
  Runx1.81_Tgfbr2.292
  crRNA array
cgatttcttggctttatatatcttgtggaaaggacgaaacaccgtaatttctactaagtgtagataggacgcgtatgggaatttttaatttctactaagtgtagatcccgggcgccgagagggaaattttttaagcttggcgtggatccgatatcaactagatcttgaga

SEQ ID NO: 7870 - DNA, 170 bp, Artificial sequence
  Runx1.81_Trp53.4
  crRNA array
cgatttcttggctttatatatcttgtggaaaggacgaaacaccgtaatttctactaagtgtagataggacgcgtatgggaatttttaatttctactaagtgtagatccctgaactgcccccagggattttttaagcttggcgtggatccgatatcaactagatcttgaga

SEQ ID NO: 7871 - DNA, 170 bp, Artificial sequence
  Runx1.81_Trp53.528
  crRNA array
cgatttcttggctttatatatcttgtggaaaggacgaaacaccgtaatttctactaagtgtagataggacgcgtatgggaatttttaatttctactaagtgtagatgctgggccagcagagacctgttttttaagcttggcgtggatccgatatcaactagatcttgaga

SEQ ID NO: 7872 - DNA, 170 bp, Artificial sequence
  Runx1.81_Vhl.1
  crRNA array
cgatttcttggctttatatatcttgtggaaaggacgaaacaccgtaatttctactaagtgtagataggacgcgtatgggaatttttaatttctactaagtgtagatagggctcccggcggccatttttttttaagcttggcgtggatccgatatcaactagatcttgaga

SEQ ID NO: 7873 - DNA, 170 bp, Artificial sequence
  Runx1.81_Vhl.151
  crRNA array
cgatttcttggctttatatatcttgtggaaaggacgaaacaccgtaatttctactaagtgtagataggacgcgtatgggaatttttaatttctactaagtgtagattagagcactcacccgagggattttttaagcttggcgtggatccgatatcaactagatcttgaga

SEQ ID NO: 7874 - DNA, 170 bp, Artificial sequence
  Runx1.81_Zc3h13.1387
  crRNA array
cgatttcttggctttatatatcttgtggaaaggacgaaacaccgtaatttctactaagtgtagataggacgcgtatgggaatttttaatttctactaagtgtagatgtgacgccggtcatgtgactttttttaagcttggcgtggatccgatatcaactagatcttgaga

SEQ ID NO: 7875 - DNA, 170 bp, Artificial sequence
  Runx1.81_Zc3h13.1777
  crRNA array
cgatttcttggctttatatatcttgtggaaaggacgaaacaccgtaatttctactaagtgtagataggacgcgtatgggaatttttaatttctactaagtgtagatgatgctgccagtgtagcggcttttttaagcttggcgtggatccgatatcaactagatcttgaga

SEQ ID NO: 7876 - DNA, 170 bp, Artificial sequence
  Setd2.143_Acvr2a.155
  crRNA array
cgatttcttggctttatatatcttgtggaaaggacgaaacaccgtaatttctactaagtgtagatgcacaaccacaacagactggtaatttctactaagtgtagatggacctggctaatcaagtatttttttaagcttggcgtggatccgatatcaactagatcttgaga

SEQ ID NO: 7877 - DNA, 170 bp, Artificial sequence
  Setd2.143_Acvr2a.70
  crRNA array
cgatttcttggctttatatatcttgtggaaaggacgaaacaccgtaatttctactaagtgtagatgcacaaccacaacagactggtaatttctactaagtgtagatcccgaggcgccggagaagccttttttaagcttggcgtggatccgatatcaactagatcttgaga

SEQ ID NO: 7878 - DNA, 170 bp, Artificial sequence
  Setd2.143_Apc.21
  crRNA array
cgatttcttggctttatatatcttgtggaaaggacgaaacaccgtaatttctactaagtgtagatgcacaaccacaacagactggtaatttctactaagtgtagatgtgatccacacgtgtagctgttttttaagcttggcgtggatccgatatcaactagatcttgaga

SEQ ID NO: 7879 - DNA, 170 bp, Artificial sequence
  Setd2.143_Apc.867
  crRNA array
cgatttcttggctttatatatcttgtggaaaggacgaaacaccgtaatttctactaagtgtagatgcacaaccacaacagactggtaatttctactaagtgtagatcagtcccaggcggcggaagcttttttaagcttggcgtggatccgatatcaactagatcttgaga

SEQ ID NO: 7880 - DNA, 170 bp, Artificial sequence
  Setd2.143_Arid1a.2
  crRNA array
cgatttcttggctttatatatcttgtggaaaggacgaaacaccgtaatttctactaagtgtagatgcacaaccacaacagactggtaatttctactaagtgtagatcccgcgcccccgtcctggggttttttaagcttggcgtggatccgatatcaactagatcttgaga

SEQ ID NO: 7881 - DNA, 170 bp, Artificial sequence
  Setd2.143_Arid1a.5
  crRNA array
cgatttcttggctttatatatcttgtggaaaggacgaaacaccgtaatttctactaagtgtagatgcacaaccacaacagactggtaatttctactaagtgtagatcccgcgctcggccgctgccgttttttaagcttggcgtggatccgatatcaactagatcttgaga

SEQ ID NO: 7882 - DNA, 170 bp, Artificial sequence
  Setd2.143_Arid2.166
  crRNA array
cgatttcttggctttatatatcttgtggaaaggacgaaacaccgtaatttctactaagtgtagatgcacaaccacaacagactggtaatttctactaagtgtagataaccgcgatctgggttttttttttttaagcttggcgtggatccgatatcaactagatcttgaga

SEQ ID NO: 7883 - DNA, 170 bp, Artificial sequence
  Setd2.143_Arid2.172
  crRNA array
cgatttcttggctttatatatcttgtggaaaggacgaaacaccgtaatttctactaagtgtagatgcacaaccacaacagactggtaatttctactaagtgtagatctggacgagctgcggcagttttttttaagcttggcgtggatccgatatcaactagatcttgaga

SEQ ID NO: 7884 - DNA, 170 bp, Artificial sequence
  Setd2.143_Atm.120
  crRNA array
cgatttcttggctttatatatcttgtggaaaggacgaaacaccgtaatttctactaagtgtagatgcacaaccacaacagactggtaatttctactaagtgtagatgacaggtagtcggcagctaattttttaagcttggcgtggatccgatatcaactagatcttgaga

SEQ ID NO: 7885 - DNA, 170 bp, Artificial sequence
  Setd2.143_Atm.997
  crRNA array
cgatttcttggctttatatatcttgtggaaaggacgaaacaccgtaatttctactaagtgtagatgcacaaccacaacagactggtaatttctactaagtgtagatgagaaagtctccgaatcgttttttttaagcttggcgtggatccgatatcaactagatcttgaga

SEQ ID NO: 7886 - DNA, 170 bp, Artificial sequence
  Setd2.143_Atrx.249
  crRNA array
cgatttcttggctttatatatcttgtggaaaggacgaaacaccgtaatttctactaagtgtagatgcacaaccacaacagactggtaatttctactaagtgtagattagccagtcgctcatatctcttttttaagcttggcgtggatccgatatcaactagatcttgaga

SEQ ID NO: 7887 - DNA, 170 bp, Artificial sequence
  Setd2.143_Atrx.251
  crRNA array
cgatttcttggctttatatatcttgtggaaaggacgaaacaccgtaatttctactaagtgtagatgcacaaccacaacagactggtaatttctactaagtgtagatgccagtcgctcatatctctgttttttaagcttggcgtggatccgatatcaactagatcttgaga

SEQ ID NO: 7888 - DNA, 170 bp, Artificial sequence
  Setd2.143_Bcor.203
  crRNA array
cgatttcttggctttatatatcttgtggaaaggacgaaacaccgtaatttctactaagtgtagatgcacaaccacaacagactggtaatttctactaagtgtagatccccggagcggagtccaggcttttttaagcttggcgtggatccgatatcaactagatcttgaga

SEQ ID NO: 7889 - DNA, 170 bp, Artificial sequence
  Setd2.143_Bcor.475
  crRNA array
cgatttcttggctttatatatcttgtggaaaggacgaaacaccgtaatttctactaagtgtagatgcacaaccacaacagactggtaatttctactaagtgtagattgcaacccctctgtatgggattttttaagcttggcgtggatccgatatcaactagatcttgaga

SEQ ID NO: 7890 - DNA, 170 bp, Artificial sequence
  Setd2.143_Brca1.112
  crRNA array
cgatttcttggctttatatatcttgtggaaaggacgaaacaccgtaatttctactaagtgtagatgcacaaccacaacagactggtaatttctactaagtgtagatctagacgctctgtggagactttttttaagcttggcgtggatccgatatcaactagatcttgaga

SEQ ID NO: 7891 - DNA, 170 bp, Artificial sequence
  Setd2.143_Brca1.53
  crRNA array
cgatttcttggctttatatatcttgtggaaaggacgaaacaccgtaatttctactaagtgtagatgcacaaccacaacagactggtaatttctactaagtgtagataatgaggaggcgtcgatcatttttttaagcttggcgtggatccgatatcaactagatcttgaga

SEQ ID NO: 7892 - DNA, 170 bp, Artificial sequence
  Setd2.143_Casp8.45
  crRNA array
cgatttcttggctttatatatcttgtggaaaggacgaaacaccgtaatttctactaagtgtagatgcacaaccacaacagactggtaatttctactaagtgtagatctaccgagatcctgtgaatgttttttaagcttggcgtggatccgatatcaactagatcttgaga

SEQ ID NO: 7893 - DNA, 170 bp, Artificial sequence
  Setd2.143_Casp8.54
  crRNA array
cgatttcttggctttatatatcttgtggaaaggacgaaacaccgtaatttctactaagtgtagatgcacaaccacaacagactggtaatttctactaagtgtagatcagtgcagtcgtcgtaagatttttttaagcttggcgtggatccgatatcaactagatcttgaga

SEQ ID NO: 7894 - DNA, 170 bp, Artificial sequence
  Setd2.143_Cbwd1.84
  crRNA array
cgatttcttggctttatatatcttgtggaaaggacgaaacaccgtaatttctactaagtgtagatgcacaaccacaacagactggtaatttctactaagtgtagatcacagcaggtaacatgccgcttttttaagcttggcgtggatccgatatcaactagatcttgaga

SEQ ID NO: 7895 - DNA, 170 bp, Artificial sequence
  Setd2.143_Cbwd1.85
  crRNA array
cgatttcttggctttatatatcttgtggaaaggacgaaacaccgtaatttctactaagtgtagatgcacaaccacaacagactggtaatttctactaagtgtagatacagcaggtaacatgccgccttttttaagcttggcgtggatccgatatcaactagatcttgaga

SEQ ID NO: 7896 - DNA, 170 bp, Artificial sequence
  Setd2.143_Cdh1.387
  crRNA array
cgatttcttggctttatatatcttgtggaaaggacgaaacaccgtaatttctactaagtgtagatgcacaaccacaacagactggtaatttctactaagtgtagatctcggcgtctgccgggtccgttttttaagcttggcgtggatccgatatcaactagatcttgaga

SEQ ID NO: 7897 - DNA, 170 bp, Artificial sequence
  Setd2.143_Cdh1.58
  crRNA array
cgatttcttggctttatatatcttgtggaaaggacgaaacaccgtaatttctactaagtgtagatgcacaaccacaacagactggtaatttctactaagtgtagatctcgtccgcgcccgggactcttttttaagcttggcgtggatccgatatcaactagatcttgaga

SEQ ID NO: 7898 - DNA, 170 bp, Artificial sequence
  Setd2.143_Cdkn2a.647
  crRNA array
cgatttcttggctttatatatcttgtggaaaggacgaaacaccgtaatttctactaagtgtagatgcacaaccacaacagactggtaatttctactaagtgtagatgcaatcacgggagggagcagttttttaagcttggcgtggatccgatatcaactagatcttgaga

SEQ ID NO: 7899 - DNA, 170 bp, Artificial sequence
  Setd2.143_Cdkn2a.648
  crRNA array
cgatttcttggctttatatatcttgtggaaaggacgaaacaccgtaatttctactaagtgtagatgcacaaccacaacagactggtaatttctactaagtgtagatcaatcacgggagggagcagattttttaagcttggcgtggatccgatatcaactagatcttgaga

SEQ ID NO: 7900 - DNA, 170 bp, Artificial sequence
  Setd2.143_Cic.162
  crRNA array
cgatttcttggctttatatatcttgtggaaaggacgaaacaccgtaatttctactaagtgtagatgcacaaccacaacagactggtaatttctactaagtgtagatcgcaggcgcgcccggcggagttttttaagcttggcgtggatccgatatcaactagatcttgaga

SEQ ID NO: 7901 - DNA, 170 bp, Artificial sequence
  Setd2.143_Cic.164
  crRNA array
cgatttcttggctttatatatcttgtggaaaggacgaaacaccgtaatttctactaagtgtagatgcacaaccacaacagactggtaatttctactaagtgtagatcgggccctgggccggcggctttttttaagcttggcgtggatccgatatcaactagatcttgaga

SEQ ID NO: 7902 - DNA, 170 bp, Artificial sequence
  Setd2.143_Ctcf.229
  crRNA array
cgatttcttggctttatatatcttgtggaaaggacgaaacaccgtaatttctactaagtgtagatgcacaaccacaacagactggtaatttctactaagtgtagatggctggtggctgatagtctgttttttaagcttggcgtggatccgatatcaactagatcttgaga

SEQ ID NO: 7903 - DNA, 170 bp, Artificial sequence
  Setd2.143_Ctcf.809
  crRNA array
cgatttcttggctttatatatcttgtggaaaggacgaaacaccgtaatttctactaagtgtagatgcacaaccacaacagactggtaatttctactaagtgtagataagcgctatcatgatcccaattttttaagcttggcgtggatccgatatcaactagatcttgaga

SEQ ID NO: 7904 - DNA, 170 bp, Artificial sequence
  Setd2.143_Elf3.826
  crRNA array
cgatttcttggctttatatatcttgtggaaaggacgaaacaccgtaatttctactaagtgtagatgcacaaccacaacagactggtaatttctactaagtgtagattccgagacatcctaatccacttttttaagcttggcgtggatccgatatcaactagatcttgaga

SEQ ID NO: 7905 - DNA, 170 bp, Artificial sequence
  Setd2.143_Elf3.983
  crRNA array
cgatttcttggctttatatatcttgtggaaaggacgaaacaccgtaatttctactaagtgtagatgcacaaccacaacagactggtaatttctactaagtgtagattaggccccctaactggaccattttttaagcttggcgtggatccgatatcaactagatcttgaga

SEQ ID NO: 7906 - DNA, 170 bp, Artificial sequence
  Setd2.143_Ep300.310
  crRNA array
cgatttcttggctttatatatcttgtggaaaggacgaaacaccgtaatttctactaagtgtagatgcacaaccacaacagactggtaatttctactaagtgtagatatggtacgacagtgaggaagttttttaagcttggcgtggatccgatatcaactagatcttgaga

SEQ ID NO: 7907 - DNA, 170 bp, Artificial sequence
  Setd2.143_Ep300.587
  crRNA array
cgatttcttggctttatatatcttgtggaaaggacgaaacaccgtaatttctactaagtgtagatgcacaaccacaacagactggtaatttctactaagtgtagatcgccccggggcccccaaccattttttaagcttggcgtggatccgatatcaactagatcttgaga

SEQ ID NO: 7908 - DNA, 170 bp, Artificial sequence
  Setd2.143_Epha2.126
  crRNA array
cgatttcttggctttatatatcttgtggaaaggacgaaacaccgtaatttctactaagtgtagatgcacaaccacaacagactggtaatttctactaagtgtagatcctgtgccgccgcggccgccttttttaagcttggcgtggatccgatatcaactagatcttgaga

SEQ ID NO: 7909 - DNA, 170 bp, Artificial sequence
  Setd2.143_Epha2.5
  crRNA array
cgatttcttggctttatatatcttgtggaaaggacgaaacaccgtaatttctactaagtgtagatgcacaaccacaacagactggtaatttctactaagtgtagatcatgagctggcgccacccggttttttaagcttggcgtggatccgatatcaactagatcttgaga

SEQ ID NO: 7910 - DNA, 170 bp, Artificial sequence
  Setd2.143_Fat1.105
  crRNA array
cgatttcttggctttatatatcttgtggaaaggacgaaacaccgtaatttctactaagtgtagatgcacaaccacaacagactggtaatttctactaagtgtagataactcgaggtgacaacaagtttttttaagcttggcgtggatccgatatcaactagatcttgaga

SEQ ID NO: 7911 - DNA, 170 bp, Artificial sequence
  Setd2.143_Fat1.122
  crRNA array
cgatttcttggctttatatatcttgtggaaaggacgaaacaccgtaatttctactaagtgtagatgcacaaccacaacagactggtaatttctactaagtgtagatccatcgacatggaaacgggattttttaagcttggcgtggatccgatatcaactagatcttgaga

SEQ ID NO: 7912 - DNA, 170 bp, Artificial sequence
  Setd2.143_Fbxw7.21
  crRNA array
cgatttcttggctttatatatcttgtggaaaggacgaaacaccgtaatttctactaagtgtagatgcacaaccacaacagactggtaatttctactaagtgtagattaatgtgccgtagaaacccattttttaagcttggcgtggatccgatatcaactagatcttgaga

SEQ ID NO: 7913 - DNA, 170 bp, Artificial sequence
  Setd2.143_Fbxw7.23
  crRNA array
cgatttcttggctttatatatcttgtggaaaggacgaaacaccgtaatttctactaagtgtagatgcacaaccacaacagactggtaatttctactaagtgtagatatgtgccgtagaaacccatattttttaagcttggcgtggatccgatatcaactagatcttgaga

SEQ ID NO: 7914 - DNA, 170 bp, Artificial sequence
  Setd2.143_Gata3.34
  crRNA array
cgatttcttggctttatatatcttgtggaaaggacgaaacaccgtaatttctactaagtgtagatgcacaaccacaacagactggtaatttctactaagtgtagatctaaactatcccgcaaagatttttttaagcttggcgtggatccgatatcaactagatcttgaga

SEQ ID NO: 7915 - DNA, 170 bp, Artificial sequence
  Setd2.143_Gata3.47
  crRNA array
cgatttcttggctttatatatcttgtggaaaggacgaaacaccgtaatttctactaagtgtagatgcacaaccacaacagactggtaatttctactaagtgtagatcgtagtaggacgggacgtggttttttaagcttggcgtggatccgatatcaactagatcttgaga

SEQ ID NO: 7916 - DNA, 170 bp, Artificial sequence
  Setd2.143_H2-Q2.1
  crRNA array
cgatttcttggctttatatatcttgtggaaaggacgaaacaccgtaatttctactaagtgtagatgcacaaccacaacagactggtaatttctactaagtgtagatagggcggccaccaacagcagttttttaagcttggcgtggatccgatatcaactagatcttgaga

SEQ ID NO: 7917 - DNA, 170 bp, Artificial sequence
  Setd2.143_H2-Q2.2
  crRNA array
cgatttcttggctttatatatcttgtggaaaggacgaaacaccgtaatttctactaagtgtagatgcacaaccacaacagactggtaatttctactaagtgtagattaacctgcgcccgctgctgattttttaagcttggcgtggatccgatatcaactagatcttgaga

SEQ ID NO: 7918 - DNA, 170 bp, Artificial sequence
  Setd2.143_Kdm5c.1878
  crRNA array
cgatttcttggctttatatatcttgtggaaaggacgaaacaccgtaatttctactaagtgtagatgcacaaccacaacagactggtaatttctactaagtgtagatagagcacggcacccgcccccttttttaagcttggcgtggatccgatatcaactagatcttgaga

SEQ ID NO: 7919 - DNA, 170 bp, Artificial sequence
  Setd2.143_Kdm5c.1879
  crRNA array
cgatttcttggctttatatatcttgtggaaaggacgaaacaccgtaatttctactaagtgtagatgcacaaccacaacagactggtaatttctactaagtgtagatgagcacggcacccgccccccttttttaagcttggcgtggatccgatatcaactagatcttgaga

SEQ ID NO: 7920 - DNA, 170 bp, Artificial sequence
  Setd2.143_Kdm6a.56
  crRNA array
cgatttcttggctttatatatcttgtggaaaggacgaaacaccgtaatttctactaagtgtagatgcacaaccacaacagactggtaatttctactaagtgtagattcgctgccgcctctcgcggcttttttaagcttggcgtggatccgatatcaactagatcttgaga

SEQ ID NO: 7921 - DNA, 170 bp, Artificial sequence
  Setd2.143_Kdm6a.57
  crRNA array
cgatttcttggctttatatatcttgtggaaaggacgaaacaccgtaatttctactaagtgtagatgcacaaccacaacagactggtaatttctactaagtgtagatcgctgccgcctctcgcggcattttttaagcttggcgtggatccgatatcaactagatcttgaga

SEQ ID NO: 7922 - DNA, 170 bp, Artificial sequence
  Setd2.143_Kmt2b.265
  crRNA array
cgatttcttggctttatatatcttgtggaaaggacgaaacaccgtaatttctactaagtgtagatgcacaaccacaacagactggtaatttctactaagtgtagatccccaagtgaagcccacctgttttttaagcttggcgtggatccgatatcaactagatcttgaga

SEQ ID NO: 7923 - DNA, 170 bp, Artificial sequence
  Setd2.143_Kmt2b.298
  crRNA array
cgatttcttggctttatatatcttgtggaaaggacgaaacaccgtaatttctactaagtgtagatgcacaaccacaacagactggtaatttctactaagtgtagattccggcagggaccggctggcttttttaagcttggcgtggatccgatatcaactagatcttgaga

SEQ ID NO: 7924 - DNA, 170 bp, Artificial sequence
  Setd2.143_Kmt2c.1962
  crRNA array
cgatttcttggctttatatatcttgtggaaaggacgaaacaccgtaatttctactaagtgtagatgcacaaccacaacagactggtaatttctactaagtgtagatgtgacgatctgtgccacaagttttttaagcttggcgtggatccgatatcaactagatcttgaga

SEQ ID NO: 7925 - DNA, 170 bp, Artificial sequence
  Setd2.143_Kmt2c.2236
  crRNA array
cgatttcttggctttatatatcttgtggaaaggacgaaacaccgtaatttctactaagtgtagatgcacaaccacaacagactggtaatttctactaagtgtagatactcgacctccacctccctattttttaagcttggcgtggatccgatatcaactagatcttgaga

SEQ ID NO: 7926 - DNA, 170 bp, Artificial sequence
  Setd2.143_Kmt2d.316
  crRNA array
cgatttcttggctttatatatcttgtggaaaggacgaaacaccgtaatttctactaagtgtagatgcacaaccacaacagactggtaatttctactaagtgtagatactccaggccacccaggtggttttttaagcttggcgtggatccgatatcaactagatcttgaga

SEQ ID NO: 7927 - DNA, 170 bp, Artificial sequence
  Setd2.143_Kmt2d.416
  crRNA array
cgatttcttggctttatatatcttgtggaaaggacgaaacaccgtaatttctactaagtgtagatgcacaaccacaacagactggtaatttctactaagtgtagattaaacccccgggggaagggtttttttaagcttggcgtggatccgatatcaactagatcttgaga

SEQ ID NO: 7928 - DNA, 170 bp, Artificial sequence
  Setd2.143_Map2k4.119
  crRNA array
cgatttcttggctttatatatcttgtggaaaggacgaaacaccgtaatttctactaagtgtagatgcacaaccacaacagactggtaatttctactaagtgtagattgctgtgtgggcggccacatttttttaagcttggcgtggatccgatatcaactagatcttgaga

SEQ ID NO: 7929 - DNA, 170 bp, Artificial sequence
  Setd2.143_Map2k4.1261
  crRNA array
cgatttcttggctttatatatcttgtggaaaggacgaaacaccgtaatttctactaagtgtagatgcacaaccacaacagactggtaatttctactaagtgtagatgatgtagtaatgcggagtagttttttaagcttggcgtggatccgatatcaactagatcttgaga

SEQ ID NO: 7930 - DNA, 170 bp, Artificial sequence
  Setd2.143_Map3k1.235
  crRNA array
cgatttcttggctttatatatcttgtggaaaggacgaaacaccgtaatttctactaagtgtagatgcacaaccacaacagactggtaatttctactaagtgtagataaaacgctactgatcgatcgttttttaagcttggcgtggatccgatatcaactagatcttgaga

SEQ ID NO: 7931 - DNA, 170 bp, Artificial sequence
  Setd2.143_Map3k1.3838
  crRNA array
cgatttcttggctttatatatcttgtggaaaggacgaaacaccgtaatttctactaagtgtagatgcacaaccacaacagactggtaatttctactaagtgtagatccaacaacagggccccactattttttaagcttggcgtggatccgatatcaactagatcttgaga

SEQ ID NO: 7932 - DNA, 170 bp, Artificial sequence
  Setd2.143_Mga.1655
  crRNA array
cgatttcttggctttatatatcttgtggaaaggacgaaacaccgtaatttctactaagtgtagatgcacaaccacaacagactggtaatttctactaagtgtagatcgagaagtggagagcatattttttttaagcttggcgtggatccgatatcaactagatcttgaga

SEQ ID NO: 7933 - DNA, 170 bp, Artificial sequence
  Setd2.143_Mga.93
  crRNA array
cgatttcttggctttatatatcttgtggaaaggacgaaacaccgtaatttctactaagtgtagatgcacaaccacaacagactggtaatttctactaagtgtagatgagaaggctccccataatgtttttttaagcttggcgtggatccgatatcaactagatcttgaga

SEQ ID NO: 7934 - DNA, 170 bp, Artificial sequence
  Setd2.143_Nf1.746
  crRNA array
cgatttcttggctttatatatcttgtggaaaggacgaaacaccgtaatttctactaagtgtagatgcacaaccacaacagactggtaatttctactaagtgtagattaagcataatgatgatgccattttttaagcttggcgtggatccgatatcaactagatcttgaga

SEQ ID NO: 7935 - DNA, 170 bp, Artificial sequence
  Setd2.143_Nf1.97
  crRNA array
cgatttcttggctttatatatcttgtggaaaggacgaaacaccgtaatttctactaagtgtagatgcacaaccacaacagactggtaatttctactaagtgtagatagcccgctacatgctgatgcttttttaagcttggcgtggatccgatatcaactagatcttgaga

SEQ ID NO: 7936 - DNA, 170 bp, Artificial sequence
  Setd2.143_Nf2.356
  crRNA array
cgatttcttggctttatatatcttgtggaaaggacgaaacaccgtaatttctactaagtgtagatgcacaaccacaacagactggtaatttctactaagtgtagatcggagtcatctgatagagatttttttaagcttggcgtggatccgatatcaactagatcttgaga

SEQ ID NO: 7937 - DNA, 170 bp, Artificial sequence
  Setd2.143_Nf2.768
  crRNA array
cgatttcttggctttatatatcttgtggaaaggacgaaacaccgtaatttctactaagtgtagatgcacaaccacaacagactggtaatttctactaagtgtagatccgaagccccagtgtccggcttttttaagcttggcgtggatccgatatcaactagatcttgaga

SEQ ID NO: 7938 - DNA, 170 bp, Artificial sequence
  Setd2.143_Notch1.1849
  crRNA array
cgatttcttggctttatatatcttgtggaaaggacgaaacaccgtaatttctactaagtgtagatgcacaaccacaacagactggtaatttctactaagtgtagatctggcgggtgggcggcgctgttttttaagcttggcgtggatccgatatcaactagatcttgaga

SEQ ID NO: 7939 - DNA, 170 bp, Artificial sequence
  Setd2.143_Notch1.649
  crRNA array
cgatttcttggctttatatatcttgtggaaaggacgaaacaccgtaatttctactaagtgtagatgcacaaccacaacagactggtaatttctactaagtgtagattgggccaacgatgccaggacttttttaagcttggcgtggatccgatatcaactagatcttgaga

SEQ ID NO: 7940 - DNA, 170 bp, Artificial sequence
  Setd2.143_Nsd1.70
  crRNA array
cgatttcttggctttatatatcttgtggaaaggacgaaacaccgtaatttctactaagtgtagatgcacaaccacaacagactggtaatttctactaagtgtagatactggtgtggacgatgcagattttttaagcttggcgtggatccgatatcaactagatcttgaga

SEQ ID NO: 7941 - DNA, 170 bp, Artificial sequence
  Setd2.143_Nsd1.90
  crRNA array
cgatttcttggctttatatatcttgtggaaaggacgaaacaccgtaatttctactaagtgtagatgcacaaccacaacagactggtaatttctactaagtgtagataggagctaacggcaagaatgttttttaagcttggcgtggatccgatatcaactagatcttgaga

SEQ ID NO: 7942 - DNA, 170 bp, Artificial sequence
  Setd2.143_Pbrm1.1236
  crRNA array
cgatttcttggctttatatatcttgtggaaaggacgaaacaccgtaatttctactaagtgtagatgcacaaccacaacagactggtaatttctactaagtgtagatgccgataaaaccaacagccgttttttaagcttggcgtggatccgatatcaactagatcttgaga

SEQ ID NO: 7943 - DNA, 170 bp, Artificial sequence
  Setd2.143_Pbrm1.969
  crRNA array
cgatttcttggctttatatatcttgtggaaaggacgaaacaccgtaatttctactaagtgtagatgcacaaccacaacagactggtaatttctactaagtgtagatgagccctaatgaacagctcattttttaagcttggcgtggatccgatatcaactagatcttgaga

SEQ ID NO: 7944 - DNA, 170 bp, Artificial sequence
  Setd2.143_Pik3r1.76
  crRNA array
cgatttcttggctttatatatcttgtggaaaggacgaaacaccgtaatttctactaagtgtagatgcacaaccacaacagactggtaatttctactaagtgtagataaaacctatacggcccgcacttttttaagcttggcgtggatccgatatcaactagatcttgaga

SEQ ID NO: 7945 - DNA, 170 bp, Artificial sequence
  Setd2.143_Pik3r1.77
  crRNA array
cgatttcttggctttatatatcttgtggaaaggacgaaacaccgtaatttctactaagtgtagatgcacaaccacaacagactggtaatttctactaagtgtagataaacctatacggcccgcactttttttaagcttggcgtggatccgatatcaactagatcttgaga

SEQ ID NO: 7946 - DNA, 170 bp, Artificial sequence
  Setd2.143_Pten.240
  crRNA array
cgatttcttggctttatatatcttgtggaaaggacgaaacaccgtaatttctactaagtgtagatgcacaaccacaacagactggtaatttctactaagtgtagattgcatacgctatagctgcttttttttaagcttggcgtggatccgatatcaactagatcttgaga

SEQ ID NO: 7947 - DNA, 170 bp, Artificial sequence
  Setd2.143_Pten.265
  crRNA array
cgatttcttggctttatatatcttgtggaaaggacgaaacaccgtaatttctactaagtgtagatgcacaaccacaacagactggtaatttctactaagtgtagataagcgtggtgcgtgacgcacttttttaagcttggcgtggatccgatatcaactagatcttgaga

SEQ ID NO: 7948 - DNA, 170 bp, Artificial sequence
  Setd2.143_Rasa1.1478
  crRNA array
cgatttcttggctttatatatcttgtggaaaggacgaaacaccgtaatttctactaagtgtagatgcacaaccacaacagactggtaatttctactaagtgtagatcgataatggtctatgatgtcttttttaagcttggcgtggatccgatatcaactagatcttgaga

SEQ ID NO: 7949 - DNA, 170 bp, Artificial sequence
  Setd2.143_Rasa1.223
  crRNA array
cgatttcttggctttatatatcttgtggaaaggacgaaacaccgtaatttctactaagtgtagatgcacaaccacaacagactggtaatttctactaagtgtagattccatggagtatcgtgctcgttttttaagcttggcgtggatccgatatcaactagatcttgaga

SEQ ID NO: 7950 - DNA, 170 bp, Artificial sequence
  Setd2.143_Rb1.211
  crRNA array
cgatttcttggctttatatatcttgtggaaaggacgaaacaccgtaatttctactaagtgtagatgcacaaccacaacagactggtaatttctactaagtgtagattctgacatgatcgggtacctttttttaagcttggcgtggatccgatatcaactagatcttgaga

SEQ ID NO: 7951 - DNA, 170 bp, Artificial sequence
  Setd2.143_Rb1.394
  crRNA array
cgatttcttggctttatatatcttgtggaaaggacgaaacaccgtaatttctactaagtgtagatgcacaaccacaacagactggtaatttctactaagtgtagatagaaatctcgaagcaggatcttttttaagcttggcgtggatccgatatcaactagatcttgaga

SEQ ID NO: 7952 - DNA, 170 bp, Artificial sequence
  Setd2.143_Rbm10.5
  crRNA array
cgatttcttggctttatatatcttgtggaaaggacgaaacaccgtaatttctactaagtgtagatgcacaaccacaacagactggtaatttctactaagtgtagatacgaaacctgaacccacacattttttaagcttggcgtggatccgatatcaactagatcttgaga

SEQ ID NO: 7953 - DNA, 170 bp, Artificial sequence
  Setd2.143_Rbm10.6
  crRNA array
cgatttcttggctttatatatcttgtggaaaggacgaaacaccgtaatttctactaagtgtagatgcacaaccacaacagactggtaatttctactaagtgtagatcgaaacctgaacccacacagttttttaagcttggcgtggatccgatatcaactagatcttgaga

SEQ ID NO: 7954 - DNA, 170 bp, Artificial sequence
  Setd2.143_Rnf43.1920
  crRNA array
cgatttcttggctttatatatcttgtggaaaggacgaaacaccgtaatttctactaagtgtagatgcacaaccacaacagactggtaatttctactaagtgtagatatccccgtgccgtggactccttttttaagcttggcgtggatccgatatcaactagatcttgaga

SEQ ID NO: 7955 - DNA, 170 bp, Artificial sequence
  Setd2.143_Rnf43.39
  crRNA array
cgatttcttggctttatatatcttgtggaaaggacgaaacaccgtaatttctactaagtgtagatgcacaaccacaacagactggtaatttctactaagtgtagatcaaggggatcactctgataattttttaagcttggcgtggatccgatatcaactagatcttgaga

SEQ ID NO: 7956 - DNA, 170 bp, Artificial sequence
  Setd2.143_Runx1.204
  crRNA array
cgatttcttggctttatatatcttgtggaaaggacgaaacaccgtaatttctactaagtgtagatgcacaaccacaacagactggtaatttctactaagtgtagattaaataagtccagccgttttttttttaagcttggcgtggatccgatatcaactagatcttgaga

SEQ ID NO: 7957 - DNA, 170 bp, Artificial sequence
  Setd2.143_Runx1.81
  crRNA array
cgatttcttggctttatatatcttgtggaaaggacgaaacaccgtaatttctactaagtgtagatgcacaaccacaacagactggtaatttctactaagtgtagataggacgcgtatgggaattttttttttaagcttggcgtggatccgatatcaactagatcttgaga

SEQ ID NO: 7958 - DNA, 170 bp, Artificial sequence
  Setd2.143_Smad4.3038
  crRNA array
cgatttcttggctttatatatcttgtggaaaggacgaaacaccgtaatttctactaagtgtagatgcacaaccacaacagactggtaatttctactaagtgtagatatctgcggcagtgtcaccggttttttaagcttggcgtggatccgatatcaactagatcttgaga

SEQ ID NO: 7959 - DNA, 170 bp, Artificial sequence
  Setd2.143_Smad4.39
  crRNA array
cgatttcttggctttatatatcttgtggaaaggacgaaacaccgtaatttctactaagtgtagatgcacaaccacaacagactggtaatttctactaagtgtagatagtcaaacgcatactgacaattttttaagcttggcgtggatccgatatcaactagatcttgaga

SEQ ID NO: 7960 - DNA, 170 bp, Artificial sequence
  Setd2.143_Stag2.1409
  crRNA array
cgatttcttggctttatatatcttgtggaaaggacgaaacaccgtaatttctactaagtgtagatgcacaaccacaacagactggtaatttctactaagtgtagatgctaataactgcggaagggcttttttaagcttggcgtggatccgatatcaactagatcttgaga

SEQ ID NO: 7961 - DNA, 170 bp, Artificial sequence
  Setd2.143_Stag2.4401
  crRNA array
cgatttcttggctttatatatcttgtggaaaggacgaaacaccgtaatttctactaagtgtagatgcacaaccacaacagactggtaatttctactaagtgtagattaatcgtccagtggtgtatattttttaagcttggcgtggatccgatatcaactagatcttgaga

SEQ ID NO: 7962 - DNA, 170 bp, Artificial sequence
  Setd2.143_Tbl1xr1.1
  crRNA array
cgatttcttggctttatatatcttgtggaaaggacgaaacaccgtaatttctactaagtgtagatgcacaaccacaacagactggtaatttctactaagtgtagatggatgcgcatactggtgaagttttttaagcttggcgtggatccgatatcaactagatcttgaga

SEQ ID NO: 7963 - DNA, 170 bp, Artificial sequence
  Setd2.143_Tbl1xr1.83
  crRNA array
cgatttcttggctttatatatcttgtggaaaggacgaaacaccgtaatttctactaagtgtagatgcacaaccacaacagactggtaatttctactaagtgtagatatggtcgacccatcgagtctttttttaagcttggcgtggatccgatatcaactagatcttgaga

SEQ ID NO: 7964 - DNA, 170 bp, Artificial sequence
  Setd2.143_Tgfbr2.290
  crRNA array
cgatttcttggctttatatatcttgtggaaaggacgaaacaccgtaatttctactaagtgtagatgcacaaccacaacagactggtaatttctactaagtgtagatcctctcggcgcccgggtaaattttttaagcttggcgtggatccgatatcaactagatcttgaga

SEQ ID NO: 7965 - DNA, 170 bp, Artificial sequence
  Setd2.143_Tgfbr2.292
  crRNA array
cgatttcttggctttatatatcttgtggaaaggacgaaacaccgtaatttctactaagtgtagatgcacaaccacaacagactggtaatttctactaagtgtagatcccgggcgccgagagggaaattttttaagcttggcgtggatccgatatcaactagatcttgaga

SEQ ID NO: 7966 - DNA, 170 bp, Artificial sequence
  Setd2.143_Trp53.4
  crRNA array
cgatttcttggctttatatatcttgtggaaaggacgaaacaccgtaatttctactaagtgtagatgcacaaccacaacagactggtaatttctactaagtgtagatccctgaactgcccccagggattttttaagcttggcgtggatccgatatcaactagatcttgaga

SEQ ID NO: 7967 - DNA, 170 bp, Artificial sequence
  Setd2.143_Trp53.528
  crRNA array
cgatttcttggctttatatatcttgtggaaaggacgaaacaccgtaatttctactaagtgtagatgcacaaccacaacagactggtaatttctactaagtgtagatgctgggccagcagagacctgttttttaagcttggcgtggatccgatatcaactagatcttgaga

SEQ ID NO: 7968 - DNA, 170 bp, Artificial sequence
  Setd2.143_Vhl.1
  crRNA array
cgatttcttggctttatatatcttgtggaaaggacgaaacaccgtaatttctactaagtgtagatgcacaaccacaacagactggtaatttctactaagtgtagatagggctcccggcggccatttttttttaagcttggcgtggatccgatatcaactagatcttgaga

SEQ ID NO: 7969 - DNA, 170 bp, Artificial sequence
  Setd2.143_Vhl.151
  crRNA array
cgatttcttggctttatatatcttgtggaaaggacgaaacaccgtaatttctactaagtgtagatgcacaaccacaacagactggtaatttctactaagtgtagattagagcactcacccgagggattttttaagcttggcgtggatccgatatcaactagatcttgaga

SEQ ID NO: 7970 - DNA, 170 bp, Artificial sequence
  Setd2.143_Zc3h13.1387
  crRNA array
cgatttcttggctttatatatcttgtggaaaggacgaaacaccgtaatttctactaagtgtagatgcacaaccacaacagactggtaatttctactaagtgtagatgtgacgccggtcatgtgactttttttaagcttggcgtggatccgatatcaactagatcttgaga

SEQ ID NO: 7971 - DNA, 170 bp, Artificial sequence
  Setd2.143_Zc3h13.1777
  crRNA array
cgatttcttggctttatatatcttgtggaaaggacgaaacaccgtaatttctactaagtgtagatgcacaaccacaacagactggtaatttctactaagtgtagatgatgctgccagtgtagcggcttttttaagcttggcgtggatccgatatcaactagatcttgaga

SEQ ID NO: 7972 - DNA, 170 bp, Artificial sequence
  Setd2.508_Acvr2a.155
  crRNA array
cgatttcttggctttatatatcttgtggaaaggacgaaacaccgtaatttctactaagtgtagattacgatcccgagcacccgactaatttctactaagtgtagatggacctggctaatcaagtatttttttaagcttggcgtggatccgatatcaactagatcttgaga

SEQ ID NO: 7973 - DNA, 170 bp, Artificial sequence
  Setd2.508_Acvr2a.70
  crRNA array
cgatttcttggctttatatatcttgtggaaaggacgaaacaccgtaatttctactaagtgtagattacgatcccgagcacccgactaatttctactaagtgtagatcccgaggcgccggagaagccttttttaagcttggcgtggatccgatatcaactagatcttgaga

SEQ ID NO: 7974 - DNA, 170 bp, Artificial sequence
  Setd2.508_Apc.21
  crRNA array
cgatttcttggctttatatatcttgtggaaaggacgaaacaccgtaatttctactaagtgtagattacgatcccgagcacccgactaatttctactaagtgtagatgtgatccacacgtgtagctgttttttaagcttggcgtggatccgatatcaactagatcttgaga

SEQ ID NO: 7975 - DNA, 170 bp, Artificial sequence
  Setd2.508_Apc.867
  crRNA array
cgatttcttggctttatatatcttgtggaaaggacgaaacaccgtaatttctactaagtgtagattacgatcccgagcacccgactaatttctactaagtgtagatcagtcccaggcggcggaagcttttttaagcttggcgtggatccgatatcaactagatcttgaga

SEQ ID NO: 7976 - DNA, 170 bp, Artificial sequence
  Setd2.508_Arid1a.2
  crRNA array
cgatttcttggctttatatatcttgtggaaaggacgaaacaccgtaatttctactaagtgtagattacgatcccgagcacccgactaatttctactaagtgtagatcccgcgcccccgtcctggggttttttaagcttggcgtggatccgatatcaactagatcttgaga

SEQ ID NO: 7977 - DNA, 170 bp, Artificial sequence
  Setd2.508_Arid1a.5
  crRNA array
cgatttcttggctttatatatcttgtggaaaggacgaaacaccgtaatttctactaagtgtagattacgatcccgagcacccgactaatttctactaagtgtagatcccgcgctcggccgctgccgttttttaagcttggcgtggatccgatatcaactagatcttgaga

SEQ ID NO: 7978 - DNA, 170 bp, Artificial sequence
  Setd2.508_Arid2.166
  crRNA array
cgatttcttggctttatatatcttgtggaaaggacgaaacaccgtaatttctactaagtgtagattacgatcccgagcacccgactaatttctactaagtgtagataaccgcgatctgggttttttttttttaagcttggcgtggatccgatatcaactagatcttgaga

SEQ ID NO: 7979 - DNA, 170 bp, Artificial sequence
  Setd2.508_Arid2.172
  crRNA array
cgatttcttggctttatatatcttgtggaaaggacgaaacaccgtaatttctactaagtgtagattacgatcccgagcacccgactaatttctactaagtgtagatctggacgagctgcggcagttttttttaagcttggcgtggatccgatatcaactagatcttgaga

SEQ ID NO: 7980 - DNA, 170 bp, Artificial sequence
  Setd2.508_Atm.120
  crRNA array
cgatttcttggctttatatatcttgtggaaaggacgaaacaccgtaatttctactaagtgtagattacgatcccgagcacccgactaatttctactaagtgtagatgacaggtagtcggcagctaattttttaagcttggcgtggatccgatatcaactagatcttgaga

SEQ ID NO: 7981 - DNA, 170 bp, Artificial sequence
  Setd2.508_Atm.997
  crRNA array
cgatttcttggctttatatatcttgtggaaaggacgaaacaccgtaatttctactaagtgtagattacgatcccgagcacccgactaatttctactaagtgtagatgagaaagtctccgaatcgttttttttaagcttggcgtggatccgatatcaactagatcttgaga

SEQ ID NO: 7982 - DNA, 170 bp, Artificial sequence
  Setd2.508_Atrx.249
  crRNA array
cgatttcttggctttatatatcttgtggaaaggacgaaacaccgtaatttctactaagtgtagattacgatcccgagcacccgactaatttctactaagtgtagattagccagtcgctcatatctcttttttaagcttggcgtggatccgatatcaactagatcttgaga

SEQ ID NO: 7983 - DNA, 170 bp, Artificial sequence
  Setd2.508_Atrx.251
  crRNA array
cgatttcttggctttatatatcttgtggaaaggacgaaacaccgtaatttctactaagtgtagattacgatcccgagcacccgactaatttctactaagtgtagatgccagtcgctcatatctctgttttttaagcttggcgtggatccgatatcaactagatcttgaga

SEQ ID NO: 7984 - DNA, 170 bp, Artificial sequence
  Setd2.508_Bcor.203
  crRNA array
cgatttcttggctttatatatcttgtggaaaggacgaaacaccgtaatttctactaagtgtagattacgatcccgagcacccgactaatttctactaagtgtagatccccggagcggagtccaggcttttttaagcttggcgtggatccgatatcaactagatcttgaga

SEQ ID NO: 7985 - DNA, 170 bp, Artificial sequence
  Setd2.508_Bcor.475
  crRNA array
cgatttcttggctttatatatcttgtggaaaggacgaaacaccgtaatttctactaagtgtagattacgatcccgagcacccgactaatttctactaagtgtagattgcaacccctctgtatgggattttttaagcttggcgtggatccgatatcaactagatcttgaga

SEQ ID NO: 7986 - DNA, 170 bp, Artificial sequence
  Setd2.508_Brca1.112
  crRNA array
cgatttcttggctttatatatcttgtggaaaggacgaaacaccgtaatttctactaagtgtagattacgatcccgagcacccgactaatttctactaagtgtagatctagacgctctgtggagactttttttaagcttggcgtggatccgatatcaactagatcttgaga

SEQ ID NO: 7987 - DNA, 170 bp, Artificial sequence
  Setd2.508_Brca1.53
  crRNA array
cgatttcttggctttatatatcttgtggaaaggacgaaacaccgtaatttctactaagtgtagattacgatcccgagcacccgactaatttctactaagtgtagataatgaggaggcgtcgatcatttttttaagcttggcgtggatccgatatcaactagatcttgaga

SEQ ID NO: 7988 - DNA, 170 bp, Artificial sequence
  Setd2.508_Casp8.45
  crRNA array
cgatttcttggctttatatatcttgtggaaaggacgaaacaccgtaatttctactaagtgtagattacgatcccgagcacccgactaatttctactaagtgtagatctaccgagatcctgtgaatgttttttaagcttggcgtggatccgatatcaactagatcttgaga

SEQ ID NO: 7989 - DNA, 170 bp, Artificial sequence
  Setd2.508_Casp8.54
  crRNA array
cgatttcttggctttatatatcttgtggaaaggacgaaacaccgtaatttctactaagtgtagattacgatcccgagcacccgactaatttctactaagtgtagatcagtgcagtcgtcgtaagatttttttaagcttggcgtggatccgatatcaactagatcttgaga

SEQ ID NO: 7990 - DNA, 170 bp, Artificial sequence
  Setd2.508_Cbwd1.84
  crRNA array
cgatttcttggctttatatatcttgtggaaaggacgaaacaccgtaatttctactaagtgtagattacgatcccgagcacccgactaatttctactaagtgtagatcacagcaggtaacatgccgcttttttaagcttggcgtggatccgatatcaactagatcttgaga

SEQ ID NO: 7991 - DNA, 170 bp, Artificial sequence
  Setd2.508_Cbwd1.85
  crRNA array
cgatttcttggctttatatatcttgtggaaaggacgaaacaccgtaatttctactaagtgtagattacgatcccgagcacccgactaatttctactaagtgtagatacagcaggtaacatgccgccttttttaagcttggcgtggatccgatatcaactagatcttgaga

SEQ ID NO: 7992 - DNA, 170 bp, Artificial sequence
  Setd2.508_Cdh1.387
  crRNA array
cgatttcttggctttatatatcttgtggaaaggacgaaacaccgtaatttctactaagtgtagattacgatcccgagcacccgactaatttctactaagtgtagatctcggcgtctgccgggtccgttttttaagcttggcgtggatccgatatcaactagatcttgaga

SEQ ID NO: 7993 - DNA, 170 bp, Artificial sequence
  Setd2.508_Cdh1.58
  crRNA array
cgatttcttggctttatatatcttgtggaaaggacgaaacaccgtaatttctactaagtgtagattacgatcccgagcacccgactaatttctactaagtgtagatctcgtccgcgcccgggactcttttttaagcttggcgtggatccgatatcaactagatcttgaga

SEQ ID NO: 7994 - DNA, 170 bp, Artificial sequence
  Setd2.508_Cdkn2a.647
  crRNA array
cgatttcttggctttatatatcttgtggaaaggacgaaacaccgtaatttctactaagtgtagattacgatcccgagcacccgactaatttctactaagtgtagatgcaatcacgggagggagcagttttttaagcttggcgtggatccgatatcaactagatcttgaga

SEQ ID NO: 7995 - DNA, 170 bp, Artificial sequence
  Setd2.508_Cdkn2a.648
  crRNA array
cgatttcttggctttatatatcttgtggaaaggacgaaacaccgtaatttctactaagtgtagattacgatcccgagcacccgactaatttctactaagtgtagatcaatcacgggagggagcagattttttaagcttggcgtggatccgatatcaactagatcttgaga

SEQ ID NO: 7996 - DNA, 170 bp, Artificial sequence
  Setd2.508_Cic.162
  crRNA array
cgatttcttggctttatatatcttgtggaaaggacgaaacaccgtaatttctactaagtgtagattacgatcccgagcacccgactaatttctactaagtgtagatcgcaggcgcgcccggcggagttttttaagcttggcgtggatccgatatcaactagatcttgaga

SEQ ID NO: 7997 - DNA, 170 bp, Artificial sequence
  Setd2.508_Cic.164
  crRNA array
cgatttcttggctttatatatcttgtggaaaggacgaaacaccgtaatttctactaagtgtagattacgatcccgagcacccgactaatttctactaagtgtagatcgggccctgggccggcggctttttttaagcttggcgtggatccgatatcaactagatcttgaga

SEQ ID NO: 7998 - DNA, 170 bp, Artificial sequence
  Setd2.508_Ctcf.229
  crRNA array
cgatttcttggctttatatatcttgtggaaaggacgaaacaccgtaatttctactaagtgtagattacgatcccgagcacccgactaatttctactaagtgtagatggctggtggctgatagtctgttttttaagcttggcgtggatccgatatcaactagatcttgaga

SEQ ID NO: 7999 - DNA, 170 bp, Artificial sequence
  Setd2.508_Ctcf.809
  crRNA array
cgatttcttggctttatatatcttgtggaaaggacgaaacaccgtaatttctactaagtgtagattacgatcccgagcacccgactaatttctactaagtgtagataagcgctatcatgatcccaattttttaagcttggcgtggatccgatatcaactagatcttgaga

SEQ ID NO: 8000 - DNA, 170 bp, Artificial sequence
  Setd2.508_Elf3.826
  crRNA array
cgatttcttggctttatatatcttgtggaaaggacgaaacaccgtaatttctactaagtgtagattacgatcccgagcacccgactaatttctactaagtgtagattccgagacatcctaatccacttttttaagcttggcgtggatccgatatcaactagatcttgaga

SEQ ID NO: 8001 - DNA, 170 bp, Artificial sequence
  Setd2.508_Elf3.983
  crRNA array
cgatttcttggctttatatatcttgtggaaaggacgaaacaccgtaatttctactaagtgtagattacgatcccgagcacccgactaatttctactaagtgtagattaggccccctaactggaccattttttaagcttggcgtggatccgatatcaactagatcttgaga

SEQ ID NO: 8002 - DNA, 170 bp, Artificial sequence
  Setd2.508_Ep300.310
  crRNA array
cgatttcttggctttatatatcttgtggaaaggacgaaacaccgtaatttctactaagtgtagattacgatcccgagcacccgactaatttctactaagtgtagatatggtacgacagtgaggaagttttttaagcttggcgtggatccgatatcaactagatcttgaga

SEQ ID NO: 8003 - DNA, 170 bp, Artificial sequence
  Setd2.508_Ep300.587
  crRNA array
cgatttcttggctttatatatcttgtggaaaggacgaaacaccgtaatttctactaagtgtagattacgatcccgagcacccgactaatttctactaagtgtagatcgccccggggcccccaaccattttttaagcttggcgtggatccgatatcaactagatcttgaga

SEQ ID NO: 8004 - DNA, 170 bp, Artificial sequence
  Setd2.508_Epha2.126
  crRNA array
cgatttcttggctttatatatcttgtggaaaggacgaaacaccgtaatttctactaagtgtagattacgatcccgagcacccgactaatttctactaagtgtagatcctgtgccgccgcggccgccttttttaagcttggcgtggatccgatatcaactagatcttgaga

SEQ ID NO: 8005 - DNA, 170 bp, Artificial sequence
  Setd2.508_Epha2.5
  crRNA array
cgatttcttggctttatatatcttgtggaaaggacgaaacaccgtaatttctactaagtgtagattacgatcccgagcacccgactaatttctactaagtgtagatcatgagctggcgccacccggttttttaagcttggcgtggatccgatatcaactagatcttgaga

SEQ ID NO: 8006 - DNA, 170 bp, Artificial sequence
  Setd2.508_Fat1.105
  crRNA array
cgatttcttggctttatatatcttgtggaaaggacgaaacaccgtaatttctactaagtgtagattacgatcccgagcacccgactaatttctactaagtgtagataactcgaggtgacaacaagtttttttaagcttggcgtggatccgatatcaactagatcttgaga

SEQ ID NO: 8007 - DNA, 170 bp, Artificial sequence
  Setd2.508_Fat1.122
  crRNA array
cgatttcttggctttatatatcttgtggaaaggacgaaacaccgtaatttctactaagtgtagattacgatcccgagcacccgactaatttctactaagtgtagatccatcgacatggaaacgggattttttaagcttggcgtggatccgatatcaactagatcttgaga

SEQ ID NO: 8008 - DNA, 170 bp, Artificial sequence
  Setd2.508_Fbxw7.21
  crRNA array
cgatttcttggctttatatatcttgtggaaaggacgaaacaccgtaatttctactaagtgtagattacgatcccgagcacccgactaatttctactaagtgtagattaatgtgccgtagaaacccattttttaagcttggcgtggatccgatatcaactagatcttgaga

SEQ ID NO: 8009 - DNA, 170 bp, Artificial sequence
  Setd2.508_Fbxw7.23
  crRNA array
cgatttcttggctttatatatcttgtggaaaggacgaaacaccgtaatttctactaagtgtagattacgatcccgagcacccgactaatttctactaagtgtagatatgtgccgtagaaacccatattttttaagcttggcgtggatccgatatcaactagatcttgaga

SEQ ID NO: 8010 - DNA, 170 bp, Artificial sequence
  Setd2.508_Gata3.34
  crRNA array
cgatttcttggctttatatatcttgtggaaaggacgaaacaccgtaatttctactaagtgtagattacgatcccgagcacccgactaatttctactaagtgtagatctaaactatcccgcaaagatttttttaagcttggcgtggatccgatatcaactagatcttgaga

SEQ ID NO: 8011 - DNA, 170 bp, Artificial sequence
  Setd2.508_Gata3.47
  crRNA array
cgatttcttggctttatatatcttgtggaaaggacgaaacaccgtaatttctactaagtgtagattacgatcccgagcacccgactaatttctactaagtgtagatcgtagtaggacgggacgtggttttttaagcttggcgtggatccgatatcaactagatcttgaga

SEQ ID NO: 8012 - DNA, 170 bp, Artificial sequence
  Setd2.508_H2-Q2.1
  crRNA array
cgatttcttggctttatatatcttgtggaaaggacgaaacaccgtaatttctactaagtgtagattacgatcccgagcacccgactaatttctactaagtgtagatagggcggccaccaacagcagttttttaagcttggcgtggatccgatatcaactagatcttgaga

SEQ ID NO: 8013 - DNA, 170 bp, Artificial sequence
  Setd2.508_H2-Q2.2
  crRNA array
cgatttcttggctttatatatcttgtggaaaggacgaaacaccgtaatttctactaagtgtagattacgatcccgagcacccgactaatttctactaagtgtagattaacctgcgcccgctgctgattttttaagcttggcgtggatccgatatcaactagatcttgaga

SEQ ID NO: 8014 - DNA, 170 bp, Artificial sequence
  Setd2.508_Kdm5c.1878
  crRNA array
cgatttcttggctttatatatcttgtggaaaggacgaaacaccgtaatttctactaagtgtagattacgatcccgagcacccgactaatttctactaagtgtagatagagcacggcacccgcccccttttttaagcttggcgtggatccgatatcaactagatcttgaga

SEQ ID NO: 8015 - DNA, 170 bp, Artificial sequence
  Setd2.508_Kdm5c.1879
  crRNA array
cgatttcttggctttatatatcttgtggaaaggacgaaacaccgtaatttctactaagtgtagattacgatcccgagcacccgactaatttctactaagtgtagatgagcacggcacccgccccccttttttaagcttggcgtggatccgatatcaactagatcttgaga

SEQ ID NO: 8016 - DNA, 170 bp, Artificial sequence
  Setd2.508_Kdm6a.56
  crRNA array
cgatttcttggctttatatatcttgtggaaaggacgaaacaccgtaatttctactaagtgtagattacgatcccgagcacccgactaatttctactaagtgtagattcgctgccgcctctcgcggcttttttaagcttggcgtggatccgatatcaactagatcttgaga

SEQ ID NO: 8017 - DNA, 170 bp, Artificial sequence
  Setd2.508_Kdm6a.57
  crRNA array
cgatttcttggctttatatatcttgtggaaaggacgaaacaccgtaatttctactaagtgtagattacgatcccgagcacccgactaatttctactaagtgtagatcgctgccgcctctcgcggcattttttaagcttggcgtggatccgatatcaactagatcttgaga

SEQ ID NO: 8018 - DNA, 170 bp, Artificial sequence
  Setd2.508_Kmt2b.265
  crRNA array
cgatttcttggctttatatatcttgtggaaaggacgaaacaccgtaatttctactaagtgtagattacgatcccgagcacccgactaatttctactaagtgtagatccccaagtgaagcccacctgttttttaagcttggcgtggatccgatatcaactagatcttgaga

SEQ ID NO: 8019 - DNA, 170 bp, Artificial sequence
  Setd2.508_Kmt2b.298
  crRNA array
cgatttcttggctttatatatcttgtggaaaggacgaaacaccgtaatttctactaagtgtagattacgatcccgagcacccgactaatttctactaagtgtagattccggcagggaccggctggcttttttaagcttggcgtggatccgatatcaactagatcttgaga

SEQ ID NO: 8020 - DNA, 170 bp, Artificial sequence
  Setd2.508_Kmt2c.1962
  crRNA array
cgatttcttggctttatatatcttgtggaaaggacgaaacaccgtaatttctactaagtgtagattacgatcccgagcacccgactaatttctactaagtgtagatgtgacgatctgtgccacaagttttttaagcttggcgtggatccgatatcaactagatcttgaga

SEQ ID NO: 8021 - DNA, 170 bp, Artificial sequence
  Setd2.508_Kmt2c.2236
  crRNA array
cgatttcttggctttatatatcttgtggaaaggacgaaacaccgtaatttctactaagtgtagattacgatcccgagcacccgactaatttctactaagtgtagatactcgacctccacctccctattttttaagcttggcgtggatccgatatcaactagatcttgaga

SEQ ID NO: 8022 - DNA, 170 bp, Artificial sequence
  Setd2.508_Kmt2d.316
  crRNA array
cgatttcttggctttatatatcttgtggaaaggacgaaacaccgtaatttctactaagtgtagattacgatcccgagcacccgactaatttctactaagtgtagatactccaggccacccaggtggttttttaagcttggcgtggatccgatatcaactagatcttgaga

SEQ ID NO: 8023 - DNA, 170 bp, Artificial sequence
  Setd2.508_Kmt2d.416
  crRNA array
cgatttcttggctttatatatcttgtggaaaggacgaaacaccgtaatttctactaagtgtagattacgatcccgagcacccgactaatttctactaagtgtagattaaacccccgggggaagggtttttttaagcttggcgtggatccgatatcaactagatcttgaga

SEQ ID NO: 8024 - DNA, 170 bp, Artificial sequence
  Setd2.508_Map2k4.119
  crRNA array
cgatttcttggctttatatatcttgtggaaaggacgaaacaccgtaatttctactaagtgtagattacgatcccgagcacccgactaatttctactaagtgtagattgctgtgtgggcggccacatttttttaagcttggcgtggatccgatatcaactagatcttgaga

SEQ ID NO: 8025 - DNA, 170 bp, Artificial sequence
  Setd2.508_Map2k4.1261
  crRNA array
cgatttcttggctttatatatcttgtggaaaggacgaaacaccgtaatttctactaagtgtagattacgatcccgagcacccgactaatttctactaagtgtagatgatgtagtaatgcggagtagttttttaagcttggcgtggatccgatatcaactagatcttgaga

SEQ ID NO: 8026 - DNA, 170 bp, Artificial sequence
  Setd2.508_Map3k1.235
  crRNA array
cgatttcttggctttatatatcttgtggaaaggacgaaacaccgtaatttctactaagtgtagattacgatcccgagcacccgactaatttctactaagtgtagataaaacgctactgatcgatcgttttttaagcttggcgtggatccgatatcaactagatcttgaga

SEQ ID NO: 8027 - DNA, 170 bp, Artificial sequence
  Setd2.508_Map3k1.3838
  crRNA array
cgatttcttggctttatatatcttgtggaaaggacgaaacaccgtaatttctactaagtgtagattacgatcccgagcacccgactaatttctactaagtgtagatccaacaacagggccccactattttttaagcttggcgtggatccgatatcaactagatcttgaga

SEQ ID NO: 8028 - DNA, 170 bp, Artificial sequence
  Setd2.508_Mga.1655
  crRNA array
cgatttcttggctttatatatcttgtggaaaggacgaaacaccgtaatttctactaagtgtagattacgatcccgagcacccgactaatttctactaagtgtagatcgagaagtggagagcatattttttttaagcttggcgtggatccgatatcaactagatcttgaga

SEQ ID NO: 8029 - DNA, 170 bp, Artificial sequence
  Setd2.508_Mga.93
  crRNA array
cgatttcttggctttatatatcttgtggaaaggacgaaacaccgtaatttctactaagtgtagattacgatcccgagcacccgactaatttctactaagtgtagatgagaaggctccccataatgtttttttaagcttggcgtggatccgatatcaactagatcttgaga

SEQ ID NO: 8030 - DNA, 170 bp, Artificial sequence
  Setd2.508_Nf1.746
  crRNA array
cgatttcttggctttatatatcttgtggaaaggacgaaacaccgtaatttctactaagtgtagattacgatcccgagcacccgactaatttctactaagtgtagattaagcataatgatgatgccattttttaagcttggcgtggatccgatatcaactagatcttgaga

SEQ ID NO: 8031 - DNA, 170 bp, Artificial sequence
  Setd2.508_Nf1.97
  crRNA array
cgatttcttggctttatatatcttgtggaaaggacgaaacaccgtaatttctactaagtgtagattacgatcccgagcacccgactaatttctactaagtgtagatagcccgctacatgctgatgcttttttaagcttggcgtggatccgatatcaactagatcttgaga

SEQ ID NO: 8032 - DNA, 170 bp, Artificial sequence
  Setd2.508_Nf2.356
  crRNA array
cgatttcttggctttatatatcttgtggaaaggacgaaacaccgtaatttctactaagtgtagattacgatcccgagcacccgactaatttctactaagtgtagatcggagtcatctgatagagatttttttaagcttggcgtggatccgatatcaactagatcttgaga

SEQ ID NO: 8033 - DNA, 170 bp, Artificial sequence
  Setd2.508_Nf2.768
  crRNA array
cgatttcttggctttatatatcttgtggaaaggacgaaacaccgtaatttctactaagtgtagattacgatcccgagcacccgactaatttctactaagtgtagatccgaagccccagtgtccggcttttttaagcttggcgtggatccgatatcaactagatcttgaga

SEQ ID NO: 8034 - DNA, 170 bp, Artificial sequence
  Setd2.508_Notch1.1849
  crRNA array
cgatttcttggctttatatatcttgtggaaaggacgaaacaccgtaatttctactaagtgtagattacgatcccgagcacccgactaatttctactaagtgtagatctggcgggtgggcggcgctgttttttaagcttggcgtggatccgatatcaactagatcttgaga

SEQ ID NO: 8035 - DNA, 170 bp, Artificial sequence
  Setd2.508_Notch1.649
  crRNA array
cgatttcttggctttatatatcttgtggaaaggacgaaacaccgtaatttctactaagtgtagattacgatcccgagcacccgactaatttctactaagtgtagattgggccaacgatgccaggacttttttaagcttggcgtggatccgatatcaactagatcttgaga

SEQ ID NO: 8036 - DNA, 170 bp, Artificial sequence
  Setd2.508_Nsd1.70
  crRNA array
cgatttcttggctttatatatcttgtggaaaggacgaaacaccgtaatttctactaagtgtagattacgatcccgagcacccgactaatttctactaagtgtagatactggtgtggacgatgcagattttttaagcttggcgtggatccgatatcaactagatcttgaga

SEQ ID NO: 8037 - DNA, 170 bp, Artificial sequence
  Setd2.508_Nsd1.90
  crRNA array
cgatttcttggctttatatatcttgtggaaaggacgaaacaccgtaatttctactaagtgtagattacgatcccgagcacccgactaatttctactaagtgtagataggagctaacggcaagaatgttttttaagcttggcgtggatccgatatcaactagatcttgaga

SEQ ID NO: 8038 - DNA, 170 bp, Artificial sequence
  Setd2.508_Pbrm1.1236
  crRNA array
cgatttcttggctttatatatcttgtggaaaggacgaaacaccgtaatttctactaagtgtagattacgatcccgagcacccgactaatttctactaagtgtagatgccgataaaaccaacagccgttttttaagcttggcgtggatccgatatcaactagatcttgaga

SEQ ID NO: 8039 - DNA, 170 bp, Artificial sequence
  Setd2.508_Pbrm1.969
  crRNA array
cgatttcttggctttatatatcttgtggaaaggacgaaacaccgtaatttctactaagtgtagattacgatcccgagcacccgactaatttctactaagtgtagatgagccctaatgaacagctcattttttaagcttggcgtggatccgatatcaactagatcttgaga

SEQ ID NO: 8040 - DNA, 170 bp, Artificial sequence
  Setd2.508_Pik3r1.76
  crRNA array
cgatttcttggctttatatatcttgtggaaaggacgaaacaccgtaatttctactaagtgtagattacgatcccgagcacccgactaatttctactaagtgtagataaaacctatacggcccgcacttttttaagcttggcgtggatccgatatcaactagatcttgaga

SEQ ID NO: 8041 - DNA, 170 bp, Artificial sequence
  Setd2.508_Pik3r1.77
  crRNA array
cgatttcttggctttatatatcttgtggaaaggacgaaacaccgtaatttctactaagtgtagattacgatcccgagcacccgactaatttctactaagtgtagataaacctatacggcccgcactttttttaagcttggcgtggatccgatatcaactagatcttgaga

SEQ ID NO: 8042 - DNA, 170 bp, Artificial sequence
  Setd2.508_Pten.240
  crRNA array
cgatttcttggctttatatatcttgtggaaaggacgaaacaccgtaatttctactaagtgtagattacgatcccgagcacccgactaatttctactaagtgtagattgcatacgctatagctgcttttttttaagcttggcgtggatccgatatcaactagatcttgaga

SEQ ID NO: 8043 - DNA, 170 bp, Artificial sequence
  Setd2.508_Pten.265
  crRNA array
cgatttcttggctttatatatcttgtggaaaggacgaaacaccgtaatttctactaagtgtagattacgatcccgagcacccgactaatttctactaagtgtagataagcgtggtgcgtgacgcacttttttaagcttggcgtggatccgatatcaactagatcttgaga

SEQ ID NO: 8044 - DNA, 170 bp, Artificial sequence
  Setd2.508_Rasa1.1478
  crRNA array
cgatttcttggctttatatatcttgtggaaaggacgaaacaccgtaatttctactaagtgtagattacgatcccgagcacccgactaatttctactaagtgtagatcgataatggtctatgatgtcttttttaagcttggcgtggatccgatatcaactagatcttgaga

SEQ ID NO: 8045 - DNA, 170 bp, Artificial sequence
  Setd2.508_Rasa1.223
  crRNA array
cgatttcttggctttatatatcttgtggaaaggacgaaacaccgtaatttctactaagtgtagattacgatcccgagcacccgactaatttctactaagtgtagattccatggagtatcgtgctcgttttttaagcttggcgtggatccgatatcaactagatcttgaga

SEQ ID NO: 8046 - DNA, 170 bp, Artificial sequence
  Setd2.508_Rb1.211
  crRNA array
cgatttcttggctttatatatcttgtggaaaggacgaaacaccgtaatttctactaagtgtagattacgatcccgagcacccgactaatttctactaagtgtagattctgacatgatcgggtacctttttttaagcttggcgtggatccgatatcaactagatcttgaga

SEQ ID NO: 8047 - DNA, 170 bp, Artificial sequence
  Setd2.508_Rb1.394
  crRNA array
cgatttcttggctttatatatcttgtggaaaggacgaaacaccgtaatttctactaagtgtagattacgatcccgagcacccgactaatttctactaagtgtagatagaaatctcgaagcaggatcttttttaagcttggcgtggatccgatatcaactagatcttgaga

SEQ ID NO: 8048 - DNA, 170 bp, Artificial sequence
  Setd2.508_Rbm10.5
  crRNA array
cgatttcttggctttatatatcttgtggaaaggacgaaacaccgtaatttctactaagtgtagattacgatcccgagcacccgactaatttctactaagtgtagatacgaaacctgaacccacacattttttaagcttggcgtggatccgatatcaactagatcttgaga

SEQ ID NO: 8049 - DNA, 170 bp, Artificial sequence
  Setd2.508_Rbm10.6
  crRNA array
cgatttcttggctttatatatcttgtggaaaggacgaaacaccgtaatttctactaagtgtagattacgatcccgagcacccgactaatttctactaagtgtagatcgaaacctgaacccacacagttttttaagcttggcgtggatccgatatcaactagatcttgaga

SEQ ID NO: 8050 - DNA, 170 bp, Artificial sequence
  Setd2.508_Rnf43.1920
  crRNA array
cgatttcttggctttatatatcttgtggaaaggacgaaacaccgtaatttctactaagtgtagattacgatcccgagcacccgactaatttctactaagtgtagatatccccgtgccgtggactccttttttaagcttggcgtggatccgatatcaactagatcttgaga

SEQ ID NO: 8051 - DNA, 170 bp, Artificial sequence
  Setd2.508_Rnf43.39
  crRNA array
cgatttcttggctttatatatcttgtggaaaggacgaaacaccgtaatttctactaagtgtagattacgatcccgagcacccgactaatttctactaagtgtagatcaaggggatcactctgataattttttaagcttggcgtggatccgatatcaactagatcttgaga

SEQ ID NO: 8052 - DNA, 170 bp, Artificial sequence
  Setd2.508_Runx1.204
  crRNA array
cgatttcttggctttatatatcttgtggaaaggacgaaacaccgtaatttctactaagtgtagattacgatcccgagcacccgactaatttctactaagtgtagattaaataagtccagccgttttttttttaagcttggcgtggatccgatatcaactagatcttgaga

SEQ ID NO: 8053 - DNA, 170 bp, Artificial sequence
  Setd2.508_Runx1.81
  crRNA array
cgatttcttggctttatatatcttgtggaaaggacgaaacaccgtaatttctactaagtgtagattacgatcccgagcacccgactaatttctactaagtgtagataggacgcgtatgggaattttttttttaagcttggcgtggatccgatatcaactagatcttgaga

SEQ ID NO: 8054 - DNA, 170 bp, Artificial sequence
  Setd2.508_Smad4.3038
  crRNA array
cgatttcttggctttatatatcttgtggaaaggacgaaacaccgtaatttctactaagtgtagattacgatcccgagcacccgactaatttctactaagtgtagatatctgcggcagtgtcaccggttttttaagcttggcgtggatccgatatcaactagatcttgaga

SEQ ID NO: 8055 - DNA, 170 bp, Artificial sequence
  Setd2.508_Smad4.39
  crRNA array
cgatttcttggctttatatatcttgtggaaaggacgaaacaccgtaatttctactaagtgtagattacgatcccgagcacccgactaatttctactaagtgtagatagtcaaacgcatactgacaattttttaagcttggcgtggatccgatatcaactagatcttgaga

SEQ ID NO: 8056 - DNA, 170 bp, Artificial sequence
  Setd2.508_Stag2.1409
  crRNA array
cgatttcttggctttatatatcttgtggaaaggacgaaacaccgtaatttctactaagtgtagattacgatcccgagcacccgactaatttctactaagtgtagatgctaataactgcggaagggcttttttaagcttggcgtggatccgatatcaactagatcttgaga

SEQ ID NO: 8057 - DNA, 170 bp, Artificial sequence
  Setd2.508_Stag2.4401
  crRNA array
cgatttcttggctttatatatcttgtggaaaggacgaaacaccgtaatttctactaagtgtagattacgatcccgagcacccgactaatttctactaagtgtagattaatcgtccagtggtgtatattttttaagcttggcgtggatccgatatcaactagatcttgaga

SEQ ID NO: 8058 - DNA, 170 bp, Artificial sequence
  Setd2.508_Tbl1xr1.1
  crRNA array
cgatttcttggctttatatatcttgtggaaaggacgaaacaccgtaatttctactaagtgtagattacgatcccgagcacccgactaatttctactaagtgtagatggatgcgcatactggtgaagttttttaagcttggcgtggatccgatatcaactagatcttgaga

SEQ ID NO: 8059 - DNA, 170 bp, Artificial sequence
  Setd2.508_Tbl1xr1.83
  crRNA array
cgatttcttggctttatatatcttgtggaaaggacgaaacaccgtaatttctactaagtgtagattacgatcccgagcacccgactaatttctactaagtgtagatatggtcgacccatcgagtctttttttaagcttggcgtggatccgatatcaactagatcttgaga

SEQ ID NO: 8060 - DNA, 170 bp, Artificial sequence
  Setd2.508_Tgfbr2.290
  crRNA array
cgatttcttggctttatatatcttgtggaaaggacgaaacaccgtaatttctactaagtgtagattacgatcccgagcacccgactaatttctactaagtgtagatcctctcggcgcccgggtaaattttttaagcttggcgtggatccgatatcaactagatcttgaga

SEQ ID NO: 8061 - DNA, 170 bp, Artificial sequence
  Setd2.508_Tgfbr2.292
  crRNA array
cgatttcttggctttatatatcttgtggaaaggacgaaacaccgtaatttctactaagtgtagattacgatcccgagcacccgactaatttctactaagtgtagatcccgggcgccgagagggaaattttttaagcttggcgtggatccgatatcaactagatcttgaga

SEQ ID NO: 8062 - DNA, 170 bp, Artificial sequence
  Setd2.508_Trp53.4
  crRNA array
cgatttcttggctttatatatcttgtggaaaggacgaaacaccgtaatttctactaagtgtagattacgatcccgagcacccgactaatttctactaagtgtagatccctgaactgcccccagggattttttaagcttggcgtggatccgatatcaactagatcttgaga

SEQ ID NO: 8063 - DNA, 170 bp, Artificial sequence
  Setd2.508_Trp53.528
  crRNA array
cgatttcttggctttatatatcttgtggaaaggacgaaacaccgtaatttctactaagtgtagattacgatcccgagcacccgactaatttctactaagtgtagatgctgggccagcagagacctgttttttaagcttggcgtggatccgatatcaactagatcttgaga

SEQ ID NO: 8064 - DNA, 170 bp, Artificial sequence
  Setd2.508_Vhl.1
  crRNA array
cgatttcttggctttatatatcttgtggaaaggacgaaacaccgtaatttctactaagtgtagattacgatcccgagcacccgactaatttctactaagtgtagatagggctcccggcggccatttttttttaagcttggcgtggatccgatatcaactagatcttgaga

SEQ ID NO: 8065 - DNA, 170 bp, Artificial sequence
  Setd2.508_Vhl.151
  crRNA array
cgatttcttggctttatatatcttgtggaaaggacgaaacaccgtaatttctactaagtgtagattacgatcccgagcacccgactaatttctactaagtgtagattagagcactcacccgagggattttttaagcttggcgtggatccgatatcaactagatcttgaga

SEQ ID NO: 8066 - DNA, 170 bp, Artificial sequence
  Setd2.508_Zc3h13.1387
  crRNA array
cgatttcttggctttatatatcttgtggaaaggacgaaacaccgtaatttctactaagtgtagattacgatcccgagcacccgactaatttctactaagtgtagatgtgacgccggtcatgtgactttttttaagcttggcgtggatccgatatcaactagatcttgaga

SEQ ID NO: 8067 - DNA, 170 bp, Artificial sequence
  Setd2.508_Zc3h13.1777
  crRNA array
cgatttcttggctttatatatcttgtggaaaggacgaaacaccgtaatttctactaagtgtagattacgatcccgagcacccgactaatttctactaagtgtagatgatgctgccagtgtagcggcttttttaagcttggcgtggatccgatatcaactagatcttgaga

SEQ ID NO: 8068 - DNA, 170 bp, Artificial sequence
  Smad4.3038_Acvr2a.155
  crRNA array
cgatttcttggctttatatatcttgtggaaaggacgaaacaccgtaatttctactaagtgtagatatctgcggcagtgtcaccggtaatttctactaagtgtagatggacctggctaatcaagtatttttttaagcttggcgtggatccgatatcaactagatcttgaga

SEQ ID NO: 8069 - DNA, 170 bp, Artificial sequence
  Smad4.3038_Acvr2a.70
  crRNA array
cgatttcttggctttatatatcttgtggaaaggacgaaacaccgtaatttctactaagtgtagatatctgcggcagtgtcaccggtaatttctactaagtgtagatcccgaggcgccggagaagccttttttaagcttggcgtggatccgatatcaactagatcttgaga

SEQ ID NO: 8070 - DNA, 170 bp, Artificial sequence
  Smad4.3038_Apc.21
  crRNA array
cgatttcttggctttatatatcttgtggaaaggacgaaacaccgtaatttctactaagtgtagatatctgcggcagtgtcaccggtaatttctactaagtgtagatgtgatccacacgtgtagctgttttttaagcttggcgtggatccgatatcaactagatcttgaga

SEQ ID NO: 8071 - DNA, 170 bp, Artificial sequence
  Smad4.3038_Apc.867
  crRNA array
cgatttcttggctttatatatcttgtggaaaggacgaaacaccgtaatttctactaagtgtagatatctgcggcagtgtcaccggtaatttctactaagtgtagatcagtcccaggcggcggaagcttttttaagcttggcgtggatccgatatcaactagatcttgaga

SEQ ID NO: 8072 - DNA, 170 bp, Artificial sequence
  Smad4.3038_Arid1a.2
  crRNA array
cgatttcttggctttatatatcttgtggaaaggacgaaacaccgtaatttctactaagtgtagatatctgcggcagtgtcaccggtaatttctactaagtgtagatcccgcgcccccgtcctggggttttttaagcttggcgtggatccgatatcaactagatcttgaga

SEQ ID NO: 8073 - DNA, 170 bp, Artificial sequence
  Smad4.3038_Arid1a.5
  crRNA array
cgatttcttggctttatatatcttgtggaaaggacgaaacaccgtaatttctactaagtgtagatatctgcggcagtgtcaccggtaatttctactaagtgtagatcccgcgctcggccgctgccgttttttaagcttggcgtggatccgatatcaactagatcttgaga

SEQ ID NO: 8074 - DNA, 170 bp, Artificial sequence
  Smad4.3038_Arid2.166
  crRNA array
cgatttcttggctttatatatcttgtggaaaggacgaaacaccgtaatttctactaagtgtagatatctgcggcagtgtcaccggtaatttctactaagtgtagataaccgcgatctgggttttttttttttaagcttggcgtggatccgatatcaactagatcttgaga

SEQ ID NO: 8075 - DNA, 170 bp, Artificial sequence
  Smad4.3038_Arid2.172
  crRNA array
cgatttcttggctttatatatcttgtggaaaggacgaaacaccgtaatttctactaagtgtagatatctgcggcagtgtcaccggtaatttctactaagtgtagatctggacgagctgcggcagttttttttaagcttggcgtggatccgatatcaactagatcttgaga

SEQ ID NO: 8076 - DNA, 170 bp, Artificial sequence
  Smad4.3038_Atm.120
  crRNA array
cgatttcttggctttatatatcttgtggaaaggacgaaacaccgtaatttctactaagtgtagatatctgcggcagtgtcaccggtaatttctactaagtgtagatgacaggtagtcggcagctaattttttaagcttggcgtggatccgatatcaactagatcttgaga

SEQ ID NO: 8077 - DNA, 170 bp, Artificial sequence
  Smad4.3038_Atm.997
  crRNA array
cgatttcttggctttatatatcttgtggaaaggacgaaacaccgtaatttctactaagtgtagatatctgcggcagtgtcaccggtaatttctactaagtgtagatgagaaagtctccgaatcgttttttttaagcttggcgtggatccgatatcaactagatcttgaga

SEQ ID NO: 8078 - DNA, 170 bp, Artificial sequence
  Smad4.3038_Atrx.249
  crRNA array
cgatttcttggctttatatatcttgtggaaaggacgaaacaccgtaatttctactaagtgtagatatctgcggcagtgtcaccggtaatttctactaagtgtagattagccagtcgctcatatctcttttttaagcttggcgtggatccgatatcaactagatcttgaga

SEQ ID NO: 8079 - DNA, 170 bp, Artificial sequence
  Smad4.3038_Atrx.251
  crRNA array
cgatttcttggctttatatatcttgtggaaaggacgaaacaccgtaatttctactaagtgtagatatctgcggcagtgtcaccggtaatttctactaagtgtagatgccagtcgctcatatctctgttttttaagcttggcgtggatccgatatcaactagatcttgaga

SEQ ID NO: 8080 - DNA, 170 bp, Artificial sequence
  Smad4.3038_Bcor.203
  crRNA array
cgatttcttggctttatatatcttgtggaaaggacgaaacaccgtaatttctactaagtgtagatatctgcggcagtgtcaccggtaatttctactaagtgtagatccccggagcggagtccaggcttttttaagcttggcgtggatccgatatcaactagatcttgaga

SEQ ID NO: 8081 - DNA, 170 bp, Artificial sequence
  Smad4.3038_Bcor.475
  crRNA array
cgatttcttggctttatatatcttgtggaaaggacgaaacaccgtaatttctactaagtgtagatatctgcggcagtgtcaccggtaatttctactaagtgtagattgcaacccctctgtatgggattttttaagcttggcgtggatccgatatcaactagatcttgaga

SEQ ID NO: 8082 - DNA, 170 bp, Artificial sequence
  Smad4.3038_Brca1.112
  crRNA array
cgatttcttggctttatatatcttgtggaaaggacgaaacaccgtaatttctactaagtgtagatatctgcggcagtgtcaccggtaatttctactaagtgtagatctagacgctctgtggagactttttttaagcttggcgtggatccgatatcaactagatcttgaga

SEQ ID NO: 8083 - DNA, 170 bp, Artificial sequence
  Smad4.3038_Brca1.53
  crRNA array
cgatttcttggctttatatatcttgtggaaaggacgaaacaccgtaatttctactaagtgtagatatctgcggcagtgtcaccggtaatttctactaagtgtagataatgaggaggcgtcgatcatttttttaagcttggcgtggatccgatatcaactagatcttgaga

SEQ ID NO: 8084 - DNA, 170 bp, Artificial sequence
  Smad4.3038_Casp8.45
  crRNA array
cgatttcttggctttatatatcttgtggaaaggacgaaacaccgtaatttctactaagtgtagatatctgcggcagtgtcaccggtaatttctactaagtgtagatctaccgagatcctgtgaatgttttttaagcttggcgtggatccgatatcaactagatcttgaga

SEQ ID NO: 8085 - DNA, 170 bp, Artificial sequence
  Smad4.3038_Casp8.54
  crRNA array
cgatttcttggctttatatatcttgtggaaaggacgaaacaccgtaatttctactaagtgtagatatctgcggcagtgtcaccggtaatttctactaagtgtagatcagtgcagtcgtcgtaagatttttttaagcttggcgtggatccgatatcaactagatcttgaga

SEQ ID NO: 8086 - DNA, 170 bp, Artificial sequence
  Smad4.3038_Cbwd1.84
  crRNA array
cgatttcttggctttatatatcttgtggaaaggacgaaacaccgtaatttctactaagtgtagatatctgcggcagtgtcaccggtaatttctactaagtgtagatcacagcaggtaacatgccgcttttttaagcttggcgtggatccgatatcaactagatcttgaga

SEQ ID NO: 8087 - DNA, 170 bp, Artificial sequence
  Smad4.3038_Cbwd1.85
  crRNA array
cgatttcttggctttatatatcttgtggaaaggacgaaacaccgtaatttctactaagtgtagatatctgcggcagtgtcaccggtaatttctactaagtgtagatacagcaggtaacatgccgccttttttaagcttggcgtggatccgatatcaactagatcttgaga

SEQ ID NO: 8088 - DNA, 170 bp, Artificial sequence
  Smad4.3038_Cdh1.387
  crRNA array
cgatttcttggctttatatatcttgtggaaaggacgaaacaccgtaatttctactaagtgtagatatctgcggcagtgtcaccggtaatttctactaagtgtagatctcggcgtctgccgggtccgttttttaagcttggcgtggatccgatatcaactagatcttgaga

SEQ ID NO: 8089 - DNA, 170 bp, Artificial sequence
  Smad4.3038_Cdh1.58
  crRNA array
cgatttcttggctttatatatcttgtggaaaggacgaaacaccgtaatttctactaagtgtagatatctgcggcagtgtcaccggtaatttctactaagtgtagatctcgtccgcgcccgggactcttttttaagcttggcgtggatccgatatcaactagatcttgaga

SEQ ID NO: 8090 - DNA, 170 bp, Artificial sequence
  Smad4.3038_Cdkn2a.647
  crRNA array
cgatttcttggctttatatatcttgtggaaaggacgaaacaccgtaatttctactaagtgtagatatctgcggcagtgtcaccggtaatttctactaagtgtagatgcaatcacgggagggagcagttttttaagcttggcgtggatccgatatcaactagatcttgaga

SEQ ID NO: 8091 - DNA, 170 bp, Artificial sequence
  Smad4.3038_Cdkn2a.648
  crRNA array
cgatttcttggctttatatatcttgtggaaaggacgaaacaccgtaatttctactaagtgtagatatctgcggcagtgtcaccggtaatttctactaagtgtagatcaatcacgggagggagcagattttttaagcttggcgtggatccgatatcaactagatcttgaga

SEQ ID NO: 8092 - DNA, 170 bp, Artificial sequence
  Smad4.3038_Cic.162
  crRNA array
cgatttcttggctttatatatcttgtggaaaggacgaaacaccgtaatttctactaagtgtagatatctgcggcagtgtcaccggtaatttctactaagtgtagatcgcaggcgcgcccggcggagttttttaagcttggcgtggatccgatatcaactagatcttgaga

SEQ ID NO: 8093 - DNA, 170 bp, Artificial sequence
  Smad4.3038_Cic.164
  crRNA array
cgatttcttggctttatatatcttgtggaaaggacgaaacaccgtaatttctactaagtgtagatatctgcggcagtgtcaccggtaatttctactaagtgtagatcgggccctgggccggcggctttttttaagcttggcgtggatccgatatcaactagatcttgaga

SEQ ID NO: 8094 - DNA, 170 bp, Artificial sequence
  Smad4.3038_Ctcf.229
  crRNA array
cgatttcttggctttatatatcttgtggaaaggacgaaacaccgtaatttctactaagtgtagatatctgcggcagtgtcaccggtaatttctactaagtgtagatggctggtggctgatagtctgttttttaagcttggcgtggatccgatatcaactagatcttgaga

SEQ ID NO: 8095 - DNA, 170 bp, Artificial sequence
  Smad4.3038_Ctcf.809
  crRNA array
cgatttcttggctttatatatcttgtggaaaggacgaaacaccgtaatttctactaagtgtagatatctgcggcagtgtcaccggtaatttctactaagtgtagataagcgctatcatgatcccaattttttaagcttggcgtggatccgatatcaactagatcttgaga

SEQ ID NO: 8096 - DNA, 170 bp, Artificial sequence
  Smad4.3038_Elf3.826
  crRNA array
cgatttcttggctttatatatcttgtggaaaggacgaaacaccgtaatttctactaagtgtagatatctgcggcagtgtcaccggtaatttctactaagtgtagattccgagacatcctaatccacttttttaagcttggcgtggatccgatatcaactagatcttgaga

SEQ ID NO: 8097 - DNA, 170 bp, Artificial sequence
  Smad4.3038_Elf3.983
  crRNA array
cgatttcttggctttatatatcttgtggaaaggacgaaacaccgtaatttctactaagtgtagatatctgcggcagtgtcaccggtaatttctactaagtgtagattaggccccctaactggaccattttttaagcttggcgtggatccgatatcaactagatcttgaga

SEQ ID NO: 8098 - DNA, 170 bp, Artificial sequence
  Smad4.3038_Ep300.310
  crRNA array
cgatttcttggctttatatatcttgtggaaaggacgaaacaccgtaatttctactaagtgtagatatctgcggcagtgtcaccggtaatttctactaagtgtagatatggtacgacagtgaggaagttttttaagcttggcgtggatccgatatcaactagatcttgaga

SEQ ID NO: 8099 - DNA, 170 bp, Artificial sequence
  Smad4.3038_Ep300.587
  crRNA array
cgatttcttggctttatatatcttgtggaaaggacgaaacaccgtaatttctactaagtgtagatatctgcggcagtgtcaccggtaatttctactaagtgtagatcgccccggggcccccaaccattttttaagcttggcgtggatccgatatcaactagatcttgaga

SEQ ID NO: 8100 - DNA, 170 bp, Artificial sequence
  Smad4.3038_Epha2.126
  crRNA array
cgatttcttggctttatatatcttgtggaaaggacgaaacaccgtaatttctactaagtgtagatatctgcggcagtgtcaccggtaatttctactaagtgtagatcctgtgccgccgcggccgccttttttaagcttggcgtggatccgatatcaactagatcttgaga

SEQ ID NO: 8101 - DNA, 170 bp, Artificial sequence
  Smad4.3038_Epha2.5
  crRNA array
cgatttcttggctttatatatcttgtggaaaggacgaaacaccgtaatttctactaagtgtagatatctgcggcagtgtcaccggtaatttctactaagtgtagatcatgagctggcgccacccggttttttaagcttggcgtggatccgatatcaactagatcttgaga

SEQ ID NO: 8102 - DNA, 170 bp, Artificial sequence
  Smad4.3038_Fat1.105
  crRNA array
cgatttcttggctttatatatcttgtggaaaggacgaaacaccgtaatttctactaagtgtagatatctgcggcagtgtcaccggtaatttctactaagtgtagataactcgaggtgacaacaagtttttttaagcttggcgtggatccgatatcaactagatcttgaga

SEQ ID NO: 8103 - DNA, 170 bp, Artificial sequence
  Smad4.3038_Fat1.122
  crRNA array
cgatttcttggctttatatatcttgtggaaaggacgaaacaccgtaatttctactaagtgtagatatctgcggcagtgtcaccggtaatttctactaagtgtagatccatcgacatggaaacgggattttttaagcttggcgtggatccgatatcaactagatcttgaga

SEQ ID NO: 8104 - DNA, 170 bp, Artificial sequence
  Smad4.3038_Fbxw7.21
  crRNA array
cgatttcttggctttatatatcttgtggaaaggacgaaacaccgtaatttctactaagtgtagatatctgcggcagtgtcaccggtaatttctactaagtgtagattaatgtgccgtagaaacccattttttaagcttggcgtggatccgatatcaactagatcttgaga

SEQ ID NO: 8105 - DNA, 170 bp, Artificial sequence
  Smad4.3038_Fbxw7.23
  crRNA array
cgatttcttggctttatatatcttgtggaaaggacgaaacaccgtaatttctactaagtgtagatatctgcggcagtgtcaccggtaatttctactaagtgtagatatgtgccgtagaaacccatattttttaagcttggcgtggatccgatatcaactagatcttgaga

SEQ ID NO: 8106 - DNA, 170 bp, Artificial sequence
  Smad4.3038_Gata3.34
  crRNA array
cgatttcttggctttatatatcttgtggaaaggacgaaacaccgtaatttctactaagtgtagatatctgcggcagtgtcaccggtaatttctactaagtgtagatctaaactatcccgcaaagatttttttaagcttggcgtggatccgatatcaactagatcttgaga

SEQ ID NO: 8107 - DNA, 170 bp, Artificial sequence
  Smad4.3038_Gata3.47
  crRNA array
cgatttcttggctttatatatcttgtggaaaggacgaaacaccgtaatttctactaagtgtagatatctgcggcagtgtcaccggtaatttctactaagtgtagatcgtagtaggacgggacgtggttttttaagcttggcgtggatccgatatcaactagatcttgaga

SEQ ID NO: 8108 - DNA, 170 bp, Artificial sequence
  Smad4.3038_H2-Q2.1
  crRNA array
cgatttcttggctttatatatcttgtggaaaggacgaaacaccgtaatttctactaagtgtagatatctgcggcagtgtcaccggtaatttctactaagtgtagatagggcggccaccaacagcagttttttaagcttggcgtggatccgatatcaactagatcttgaga

SEQ ID NO: 8109 - DNA, 170 bp, Artificial sequence
  Smad4.3038_H2-Q2.2
  crRNA array
cgatttcttggctttatatatcttgtggaaaggacgaaacaccgtaatttctactaagtgtagatatctgcggcagtgtcaccggtaatttctactaagtgtagattaacctgcgcccgctgctgattttttaagcttggcgtggatccgatatcaactagatcttgaga

SEQ ID NO: 8110 - DNA, 170 bp, Artificial sequence
  Smad4.3038_Kdm5c.1878
  crRNA array
cgatttcttggctttatatatcttgtggaaaggacgaaacaccgtaatttctactaagtgtagatatctgcggcagtgtcaccggtaatttctactaagtgtagatagagcacggcacccgcccccttttttaagcttggcgtggatccgatatcaactagatcttgaga

SEQ ID NO: 8111 - DNA, 170 bp, Artificial sequence
  Smad4.3038_Kdm5c.1879
  crRNA array
cgatttcttggctttatatatcttgtggaaaggacgaaacaccgtaatttctactaagtgtagatatctgcggcagtgtcaccggtaatttctactaagtgtagatgagcacggcacccgccccccttttttaagcttggcgtggatccgatatcaactagatcttgaga

SEQ ID NO: 8112 - DNA, 170 bp, Artificial sequence
  Smad4.3038_Kdm6a.56
  crRNA array
cgatttcttggctttatatatcttgtggaaaggacgaaacaccgtaatttctactaagtgtagatatctgcggcagtgtcaccggtaatttctactaagtgtagattcgctgccgcctctcgcggcttttttaagcttggcgtggatccgatatcaactagatcttgaga

SEQ ID NO: 8113 - DNA, 170 bp, Artificial sequence
  Smad4.3038_Kdm6a.57
  crRNA array
cgatttcttggctttatatatcttgtggaaaggacgaaacaccgtaatttctactaagtgtagatatctgcggcagtgtcaccggtaatttctactaagtgtagatcgctgccgcctctcgcggcattttttaagcttggcgtggatccgatatcaactagatcttgaga

SEQ ID NO: 8114 - DNA, 170 bp, Artificial sequence
  Smad4.3038_Kmt2b.265
  crRNA array
cgatttcttggctttatatatcttgtggaaaggacgaaacaccgtaatttctactaagtgtagatatctgcggcagtgtcaccggtaatttctactaagtgtagatccccaagtgaagcccacctgttttttaagcttggcgtggatccgatatcaactagatcttgaga

SEQ ID NO: 8115 - DNA, 170 bp, Artificial sequence
  Smad4.3038_Kmt2b.298
  crRNA array
cgatttcttggctttatatatcttgtggaaaggacgaaacaccgtaatttctactaagtgtagatatctgcggcagtgtcaccggtaatttctactaagtgtagattccggcagggaccggctggcttttttaagcttggcgtggatccgatatcaactagatcttgaga

SEQ ID NO: 8116 - DNA, 170 bp, Artificial sequence
  Smad4.3038_Kmt2c.1962
  crRNA array
cgatttcttggctttatatatcttgtggaaaggacgaaacaccgtaatttctactaagtgtagatatctgcggcagtgtcaccggtaatttctactaagtgtagatgtgacgatctgtgccacaagttttttaagcttggcgtggatccgatatcaactagatcttgaga

SEQ ID NO: 8117 - DNA, 170 bp, Artificial sequence
  Smad4.3038_Kmt2c.2236
  crRNA array
cgatttcttggctttatatatcttgtggaaaggacgaaacaccgtaatttctactaagtgtagatatctgcggcagtgtcaccggtaatttctactaagtgtagatactcgacctccacctccctattttttaagcttggcgtggatccgatatcaactagatcttgaga

SEQ ID NO: 8118 - DNA, 170 bp, Artificial sequence
  Smad4.3038_Kmt2d.316
  crRNA array
cgatttcttggctttatatatcttgtggaaaggacgaaacaccgtaatttctactaagtgtagatatctgcggcagtgtcaccggtaatttctactaagtgtagatactccaggccacccaggtggttttttaagcttggcgtggatccgatatcaactagatcttgaga

SEQ ID NO: 8119 - DNA, 170 bp, Artificial sequence
  Smad4.3038_Kmt2d.416
  crRNA array
cgatttcttggctttatatatcttgtggaaaggacgaaacaccgtaatttctactaagtgtagatatctgcggcagtgtcaccggtaatttctactaagtgtagattaaacccccgggggaagggtttttttaagcttggcgtggatccgatatcaactagatcttgaga

SEQ ID NO: 8120 - DNA, 170 bp, Artificial sequence
  Smad4.3038_Map2k4.119
  crRNA array
cgatttcttggctttatatatcttgtggaaaggacgaaacaccgtaatttctactaagtgtagatatctgcggcagtgtcaccggtaatttctactaagtgtagattgctgtgtgggcggccacatttttttaagcttggcgtggatccgatatcaactagatcttgaga

SEQ ID NO: 8121 - DNA, 170 bp, Artificial sequence
  Smad4.3038_Map2k4.1261
  crRNA array
cgatttcttggctttatatatcttgtggaaaggacgaaacaccgtaatttctactaagtgtagatatctgcggcagtgtcaccggtaatttctactaagtgtagatgatgtagtaatgcggagtagttttttaagcttggcgtggatccgatatcaactagatcttgaga

SEQ ID NO: 8122 - DNA, 170 bp, Artificial sequence
  Smad4.3038_Map3k1.235
  crRNA array
cgatttcttggctttatatatcttgtggaaaggacgaaacaccgtaatttctactaagtgtagatatctgcggcagtgtcaccggtaatttctactaagtgtagataaaacgctactgatcgatcgttttttaagcttggcgtggatccgatatcaactagatcttgaga

SEQ ID NO: 8123 - DNA, 170 bp, Artificial sequence
  Smad4.3038_Map3k1.3838
  crRNA array
cgatttcttggctttatatatcttgtggaaaggacgaaacaccgtaatttctactaagtgtagatatctgcggcagtgtcaccggtaatttctactaagtgtagatccaacaacagggccccactattttttaagcttggcgtggatccgatatcaactagatcttgaga

SEQ ID NO: 8124 - DNA, 170 bp, Artificial sequence
  Smad4.3038_Mga.1655
  crRNA array
cgatttcttggctttatatatcttgtggaaaggacgaaacaccgtaatttctactaagtgtagatatctgcggcagtgtcaccggtaatttctactaagtgtagatcgagaagtggagagcatattttttttaagcttggcgtggatccgatatcaactagatcttgaga

SEQ ID NO: 8125 - DNA, 170 bp, Artificial sequence
  Smad4.3038_Mga.93
  crRNA array
cgatttcttggctttatatatcttgtggaaaggacgaaacaccgtaatttctactaagtgtagatatctgcggcagtgtcaccggtaatttctactaagtgtagatgagaaggctccccataatgtttttttaagcttggcgtggatccgatatcaactagatcttgaga

SEQ ID NO: 8126 - DNA, 170 bp, Artificial sequence
  Smad4.3038_Nf1.746
  crRNA array
cgatttcttggctttatatatcttgtggaaaggacgaaacaccgtaatttctactaagtgtagatatctgcggcagtgtcaccggtaatttctactaagtgtagattaagcataatgatgatgccattttttaagcttggcgtggatccgatatcaactagatcttgaga

SEQ ID NO: 8127 - DNA, 170 bp, Artificial sequence
  Smad4.3038_Nf1.97
  crRNA array
cgatttcttggctttatatatcttgtggaaaggacgaaacaccgtaatttctactaagtgtagatatctgcggcagtgtcaccggtaatttctactaagtgtagatagcccgctacatgctgatgcttttttaagcttggcgtggatccgatatcaactagatcttgaga

SEQ ID NO: 8128 - DNA, 170 bp, Artificial sequence
  Smad4.3038_Nf2.356
  crRNA array
cgatttcttggctttatatatcttgtggaaaggacgaaacaccgtaatttctactaagtgtagatatctgcggcagtgtcaccggtaatttctactaagtgtagatcggagtcatctgatagagatttttttaagcttggcgtggatccgatatcaactagatcttgaga

SEQ ID NO: 8129 - DNA, 170 bp, Artificial sequence
  Smad4.3038_Nf2.768
  crRNA array
cgatttcttggctttatatatcttgtggaaaggacgaaacaccgtaatttctactaagtgtagatatctgcggcagtgtcaccggtaatttctactaagtgtagatccgaagccccagtgtccggcttttttaagcttggcgtggatccgatatcaactagatcttgaga

SEQ ID NO: 8130 - DNA, 170 bp, Artificial sequence
  Smad4.3038_Notch1.1849
  crRNA array
cgatttcttggctttatatatcttgtggaaaggacgaaacaccgtaatttctactaagtgtagatatctgcggcagtgtcaccggtaatttctactaagtgtagatctggcgggtgggcggcgctgttttttaagcttggcgtggatccgatatcaactagatcttgaga

SEQ ID NO: 8131 - DNA, 170 bp, Artificial sequence
  Smad4.3038_Notch1.649
  crRNA array
cgatttcttggctttatatatcttgtggaaaggacgaaacaccgtaatttctactaagtgtagatatctgcggcagtgtcaccggtaatttctactaagtgtagattgggccaacgatgccaggacttttttaagcttggcgtggatccgatatcaactagatcttgaga

SEQ ID NO: 8132 - DNA, 170 bp, Artificial sequence
  Smad4.3038_Nsd1.70
  crRNA array
cgatttcttggctttatatatcttgtggaaaggacgaaacaccgtaatttctactaagtgtagatatctgcggcagtgtcaccggtaatttctactaagtgtagatactggtgtggacgatgcagattttttaagcttggcgtggatccgatatcaactagatcttgaga

SEQ ID NO: 8133 - DNA, 170 bp, Artificial sequence
  Smad4.3038_Nsd1.90
  crRNA array
cgatttcttggctttatatatcttgtggaaaggacgaaacaccgtaatttctactaagtgtagatatctgcggcagtgtcaccggtaatttctactaagtgtagataggagctaacggcaagaatgttttttaagcttggcgtggatccgatatcaactagatcttgaga

SEQ ID NO: 8134 - DNA, 170 bp, Artificial sequence
  Smad4.3038_Pbrm1.1236
  crRNA array
cgatttcttggctttatatatcttgtggaaaggacgaaacaccgtaatttctactaagtgtagatatctgcggcagtgtcaccggtaatttctactaagtgtagatgccgataaaaccaacagccgttttttaagcttggcgtggatccgatatcaactagatcttgaga

SEQ ID NO: 8135 - DNA, 170 bp, Artificial sequence
  Smad4.3038_Pbrm1.969
  crRNA array
cgatttcttggctttatatatcttgtggaaaggacgaaacaccgtaatttctactaagtgtagatatctgcggcagtgtcaccggtaatttctactaagtgtagatgagccctaatgaacagctcattttttaagcttggcgtggatccgatatcaactagatcttgaga

SEQ ID NO: 8136 - DNA, 170 bp, Artificial sequence
  Smad4.3038_Pik3r1.76
  crRNA array
cgatttcttggctttatatatcttgtggaaaggacgaaacaccgtaatttctactaagtgtagatatctgcggcagtgtcaccggtaatttctactaagtgtagataaaacctatacggcccgcacttttttaagcttggcgtggatccgatatcaactagatcttgaga

SEQ ID NO: 8137 - DNA, 170 bp, Artificial sequence
  Smad4.3038_Pik3r1.77
  crRNA array
cgatttcttggctttatatatcttgtggaaaggacgaaacaccgtaatttctactaagtgtagatatctgcggcagtgtcaccggtaatttctactaagtgtagataaacctatacggcccgcactttttttaagcttggcgtggatccgatatcaactagatcttgaga

SEQ ID NO: 8138 - DNA, 170 bp, Artificial sequence
  Smad4.3038_Pten.240
  crRNA array
cgatttcttggctttatatatcttgtggaaaggacgaaacaccgtaatttctactaagtgtagatatctgcggcagtgtcaccggtaatttctactaagtgtagattgcatacgctatagctgcttttttttaagcttggcgtggatccgatatcaactagatcttgaga

SEQ ID NO: 8139 - DNA, 170 bp, Artificial sequence
  Smad4.3038_Pten.265
  crRNA array
cgatttcttggctttatatatcttgtggaaaggacgaaacaccgtaatttctactaagtgtagatatctgcggcagtgtcaccggtaatttctactaagtgtagataagcgtggtgcgtgacgcacttttttaagcttggcgtggatccgatatcaactagatcttgaga

SEQ ID NO: 8140 - DNA, 170 bp, Artificial sequence
  Smad4.3038_Rasa1.1478
  crRNA array
cgatttcttggctttatatatcttgtggaaaggacgaaacaccgtaatttctactaagtgtagatatctgcggcagtgtcaccggtaatttctactaagtgtagatcgataatggtctatgatgtcttttttaagcttggcgtggatccgatatcaactagatcttgaga

SEQ ID NO: 8141 - DNA, 170 bp, Artificial sequence
  Smad4.3038_Rasa1.223
  crRNA array
cgatttcttggctttatatatcttgtggaaaggacgaaacaccgtaatttctactaagtgtagatatctgcggcagtgtcaccggtaatttctactaagtgtagattccatggagtatcgtgctcgttttttaagcttggcgtggatccgatatcaactagatcttgaga

SEQ ID NO: 8142 - DNA, 170 bp, Artificial sequence
  Smad4.3038_Rb1.211
  crRNA array
cgatttcttggctttatatatcttgtggaaaggacgaaacaccgtaatttctactaagtgtagatatctgcggcagtgtcaccggtaatttctactaagtgtagattctgacatgatcgggtacctttttttaagcttggcgtggatccgatatcaactagatcttgaga

SEQ ID NO: 8143 - DNA, 170 bp, Artificial sequence
  Smad4.3038_Rb1.394
  crRNA array
cgatttcttggctttatatatcttgtggaaaggacgaaacaccgtaatttctactaagtgtagatatctgcggcagtgtcaccggtaatttctactaagtgtagatagaaatctcgaagcaggatcttttttaagcttggcgtggatccgatatcaactagatcttgaga

SEQ ID NO: 8144 - DNA, 170 bp, Artificial sequence
  Smad4.3038_Rbm10.5
  crRNA array
cgatttcttggctttatatatcttgtggaaaggacgaaacaccgtaatttctactaagtgtagatatctgcggcagtgtcaccggtaatttctactaagtgtagatacgaaacctgaacccacacattttttaagcttggcgtggatccgatatcaactagatcttgaga

SEQ ID NO: 8145 - DNA, 170 bp, Artificial sequence
  Smad4.3038_Rbm10.6
  crRNA array
cgatttcttggctttatatatcttgtggaaaggacgaaacaccgtaatttctactaagtgtagatatctgcggcagtgtcaccggtaatttctactaagtgtagatcgaaacctgaacccacacagttttttaagcttggcgtggatccgatatcaactagatcttgaga

SEQ ID NO: 8146 - DNA, 170 bp, Artificial sequence
  Smad4.3038_Rnf43.1920
  crRNA array
cgatttcttggctttatatatcttgtggaaaggacgaaacaccgtaatttctactaagtgtagatatctgcggcagtgtcaccggtaatttctactaagtgtagatatccccgtgccgtggactccttttttaagcttggcgtggatccgatatcaactagatcttgaga

SEQ ID NO: 8147 - DNA, 170 bp, Artificial sequence
  Smad4.3038_Rnf43.39
  crRNA array
cgatttcttggctttatatatcttgtggaaaggacgaaacaccgtaatttctactaagtgtagatatctgcggcagtgtcaccggtaatttctactaagtgtagatcaaggggatcactctgataattttttaagcttggcgtggatccgatatcaactagatcttgaga

SEQ ID NO: 8148 - DNA, 170 bp, Artificial sequence
  Smad4.3038_Runx1.204
  crRNA array
cgatttcttggctttatatatcttgtggaaaggacgaaacaccgtaatttctactaagtgtagatatctgcggcagtgtcaccggtaatttctactaagtgtagattaaataagtccagccgttttttttttaagcttggcgtggatccgatatcaactagatcttgaga

SEQ ID NO: 8149 - DNA, 170 bp, Artificial sequence
  Smad4.3038_Runx1.81
  crRNA array
cgatttcttggctttatatatcttgtggaaaggacgaaacaccgtaatttctactaagtgtagatatctgcggcagtgtcaccggtaatttctactaagtgtagataggacgcgtatgggaattttttttttaagcttggcgtggatccgatatcaactagatcttgaga

SEQ ID NO: 8150 - DNA, 170 bp, Artificial sequence
  Smad4.3038_Setd2.143
  crRNA array
cgatttcttggctttatatatcttgtggaaaggacgaaacaccgtaatttctactaagtgtagatatctgcggcagtgtcaccggtaatttctactaagtgtagatgcacaaccacaacagactggttttttaagcttggcgtggatccgatatcaactagatcttgaga

SEQ ID NO: 8151 - DNA, 170 bp, Artificial sequence
  Smad4.3038_Setd2.508
  crRNA array
cgatttcttggctttatatatcttgtggaaaggacgaaacaccgtaatttctactaagtgtagatatctgcggcagtgtcaccggtaatttctactaagtgtagattacgatcccgagcacccgacttttttaagcttggcgtggatccgatatcaactagatcttgaga

SEQ ID NO: 8152 - DNA, 170 bp, Artificial sequence
  Smad4.3038_Stag2.1409
  crRNA array
cgatttcttggctttatatatcttgtggaaaggacgaaacaccgtaatttctactaagtgtagatatctgcggcagtgtcaccggtaatttctactaagtgtagatgctaataactgcggaagggcttttttaagcttggcgtggatccgatatcaactagatcttgaga

SEQ ID NO: 8153 - DNA, 170 bp, Artificial sequence
  Smad4.3038_Stag2.4401
  crRNA array
cgatttcttggctttatatatcttgtggaaaggacgaaacaccgtaatttctactaagtgtagatatctgcggcagtgtcaccggtaatttctactaagtgtagattaatcgtccagtggtgtatattttttaagcttggcgtggatccgatatcaactagatcttgaga

SEQ ID NO: 8154 - DNA, 170 bp, Artificial sequence
  Smad4.3038_Tbl1xr1.1
  crRNA array
cgatttcttggctttatatatcttgtggaaaggacgaaacaccgtaatttctactaagtgtagatatctgcggcagtgtcaccggtaatttctactaagtgtagatggatgcgcatactggtgaagttttttaagcttggcgtggatccgatatcaactagatcttgaga

SEQ ID NO: 8155 - DNA, 170 bp, Artificial sequence
  Smad4.3038_Tbl1xr1.83
  crRNA array
cgatttcttggctttatatatcttgtggaaaggacgaaacaccgtaatttctactaagtgtagatatctgcggcagtgtcaccggtaatttctactaagtgtagatatggtcgacccatcgagtctttttttaagcttggcgtggatccgatatcaactagatcttgaga

SEQ ID NO: 8156 - DNA, 170 bp, Artificial sequence
  Smad4.3038_Tgfbr2.290
  crRNA array
cgatttcttggctttatatatcttgtggaaaggacgaaacaccgtaatttctactaagtgtagatatctgcggcagtgtcaccggtaatttctactaagtgtagatcctctcggcgcccgggtaaattttttaagcttggcgtggatccgatatcaactagatcttgaga

SEQ ID NO: 8157 - DNA, 170 bp, Artificial sequence
  Smad4.3038_Tgfbr2.292
  crRNA array
cgatttcttggctttatatatcttgtggaaaggacgaaacaccgtaatttctactaagtgtagatatctgcggcagtgtcaccggtaatttctactaagtgtagatcccgggcgccgagagggaaattttttaagcttggcgtggatccgatatcaactagatcttgaga

SEQ ID NO: 8158 - DNA, 170 bp, Artificial sequence
  Smad4.3038_Trp53.4
  crRNA array
cgatttcttggctttatatatcttgtggaaaggacgaaacaccgtaatttctactaagtgtagatatctgcggcagtgtcaccggtaatttctactaagtgtagatccctgaactgcccccagggattttttaagcttggcgtggatccgatatcaactagatcttgaga

SEQ ID NO: 8159 - DNA, 170 bp, Artificial sequence
  Smad4.3038_Trp53.528
  crRNA array
cgatttcttggctttatatatcttgtggaaaggacgaaacaccgtaatttctactaagtgtagatatctgcggcagtgtcaccggtaatttctactaagtgtagatgctgggccagcagagacctgttttttaagcttggcgtggatccgatatcaactagatcttgaga

SEQ ID NO: 8160 - DNA, 170 bp, Artificial sequence
  Smad4.3038_Vhl.1
  crRNA array
cgatttcttggctttatatatcttgtggaaaggacgaaacaccgtaatttctactaagtgtagatatctgcggcagtgtcaccggtaatttctactaagtgtagatagggctcccggcggccatttttttttaagcttggcgtggatccgatatcaactagatcttgaga

SEQ ID NO: 8161 - DNA, 170 bp, Artificial sequence
  Smad4.3038_Vhl.151
  crRNA array
cgatttcttggctttatatatcttgtggaaaggacgaaacaccgtaatttctactaagtgtagatatctgcggcagtgtcaccggtaatttctactaagtgtagattagagcactcacccgagggattttttaagcttggcgtggatccgatatcaactagatcttgaga

SEQ ID NO: 8162 - DNA, 170 bp, Artificial sequence
  Smad4.3038_Zc3h13.1387
  crRNA array
cgatttcttggctttatatatcttgtggaaaggacgaaacaccgtaatttctactaagtgtagatatctgcggcagtgtcaccggtaatttctactaagtgtagatgtgacgccggtcatgtgactttttttaagcttggcgtggatccgatatcaactagatcttgaga

SEQ ID NO: 8163 - DNA, 170 bp, Artificial sequence
  Smad4.3038_Zc3h13.1777
  crRNA array
cgatttcttggctttatatatcttgtggaaaggacgaaacaccgtaatttctactaagtgtagatatctgcggcagtgtcaccggtaatttctactaagtgtagatgatgctgccagtgtagcggcttttttaagcttggcgtggatccgatatcaactagatcttgaga

SEQ ID NO: 8164 - DNA, 170 bp, Artificial sequence
  Smad4.39_Acvr2a.155
  crRNA array
cgatttcttggctttatatatcttgtggaaaggacgaaacaccgtaatttctactaagtgtagatagtcaaacgcatactgacaataatttctactaagtgtagatggacctggctaatcaagtatttttttaagcttggcgtggatccgatatcaactagatcttgaga

SEQ ID NO: 8165 - DNA, 170 bp, Artificial sequence
  Smad4.39_Acvr2a.70
  crRNA array
cgatttcttggctttatatatcttgtggaaaggacgaaacaccgtaatttctactaagtgtagatagtcaaacgcatactgacaataatttctactaagtgtagatcccgaggcgccggagaagccttttttaagcttggcgtggatccgatatcaactagatcttgaga

SEQ ID NO: 8166 - DNA, 170 bp, Artificial sequence
  Smad4.39_Apc.21
  crRNA array
cgatttcttggctttatatatcttgtggaaaggacgaaacaccgtaatttctactaagtgtagatagtcaaacgcatactgacaataatttctactaagtgtagatgtgatccacacgtgtagctgttttttaagcttggcgtggatccgatatcaactagatcttgaga

SEQ ID NO: 8167 - DNA, 170 bp, Artificial sequence
  Smad4.39_Apc.867
  crRNA array
cgatttcttggctttatatatcttgtggaaaggacgaaacaccgtaatttctactaagtgtagatagtcaaacgcatactgacaataatttctactaagtgtagatcagtcccaggcggcggaagcttttttaagcttggcgtggatccgatatcaactagatcttgaga

SEQ ID NO: 8168 - DNA, 170 bp, Artificial sequence
  Smad4.39_Arid1a.2
  crRNA array
cgatttcttggctttatatatcttgtggaaaggacgaaacaccgtaatttctactaagtgtagatagtcaaacgcatactgacaataatttctactaagtgtagatcccgcgcccccgtcctggggttttttaagcttggcgtggatccgatatcaactagatcttgaga

SEQ ID NO: 8169 - DNA, 170 bp, Artificial sequence
  Smad4.39_Arid1a.5
  crRNA array
cgatttcttggctttatatatcttgtggaaaggacgaaacaccgtaatttctactaagtgtagatagtcaaacgcatactgacaataatttctactaagtgtagatcccgcgctcggccgctgccgttttttaagcttggcgtggatccgatatcaactagatcttgaga

SEQ ID NO: 8170 - DNA, 170 bp, Artificial sequence
  Smad4.39_Arid2.166
  crRNA array
cgatttcttggctttatatatcttgtggaaaggacgaaacaccgtaatttctactaagtgtagatagtcaaacgcatactgacaataatttctactaagtgtagataaccgcgatctgggttttttttttttaagcttggcgtggatccgatatcaactagatcttgaga

SEQ ID NO: 8171 - DNA, 170 bp, Artificial sequence
  Smad4.39_Arid2.172
  crRNA array
cgatttcttggctttatatatcttgtggaaaggacgaaacaccgtaatttctactaagtgtagatagtcaaacgcatactgacaataatttctactaagtgtagatctggacgagctgcggcagttttttttaagcttggcgtggatccgatatcaactagatcttgaga

SEQ ID NO: 8172 - DNA, 170 bp, Artificial sequence
  Smad4.39_Atm.120
  crRNA array
cgatttcttggctttatatatcttgtggaaaggacgaaacaccgtaatttctactaagtgtagatagtcaaacgcatactgacaataatttctactaagtgtagatgacaggtagtcggcagctaattttttaagcttggcgtggatccgatatcaactagatcttgaga

SEQ ID NO: 8173 - DNA, 170 bp, Artificial sequence
  Smad4.39_Atm.997
  crRNA array
cgatttcttggctttatatatcttgtggaaaggacgaaacaccgtaatttctactaagtgtagatagtcaaacgcatactgacaataatttctactaagtgtagatgagaaagtctccgaatcgttttttttaagcttggcgtggatccgatatcaactagatcttgaga

SEQ ID NO: 8174 - DNA, 170 bp, Artificial sequence
  Smad4.39_Atrx.249
  crRNA array
cgatttcttggctttatatatcttgtggaaaggacgaaacaccgtaatttctactaagtgtagatagtcaaacgcatactgacaataatttctactaagtgtagattagccagtcgctcatatctcttttttaagcttggcgtggatccgatatcaactagatcttgaga

SEQ ID NO: 8175 - DNA, 170 bp, Artificial sequence
  Smad4.39_Atrx.251
  crRNA array
cgatttcttggctttatatatcttgtggaaaggacgaaacaccgtaatttctactaagtgtagatagtcaaacgcatactgacaataatttctactaagtgtagatgccagtcgctcatatctctgttttttaagcttggcgtggatccgatatcaactagatcttgaga

SEQ ID NO: 8176 - DNA, 170 bp, Artificial sequence
  Smad4.39_Bcor.203
  crRNA array
cgatttcttggctttatatatcttgtggaaaggacgaaacaccgtaatttctactaagtgtagatagtcaaacgcatactgacaataatttctactaagtgtagatccccggagcggagtccaggcttttttaagcttggcgtggatccgatatcaactagatcttgaga

SEQ ID NO: 8177 - DNA, 170 bp, Artificial sequence
  Smad4.39_Bcor.475
  crRNA array
cgatttcttggctttatatatcttgtggaaaggacgaaacaccgtaatttctactaagtgtagatagtcaaacgcatactgacaataatttctactaagtgtagattgcaacccctctgtatgggattttttaagcttggcgtggatccgatatcaactagatcttgaga

SEQ ID NO: 8178 - DNA, 170 bp, Artificial sequence
  Smad4.39_Brca1.112
  crRNA array
cgatttcttggctttatatatcttgtggaaaggacgaaacaccgtaatttctactaagtgtagatagtcaaacgcatactgacaataatttctactaagtgtagatctagacgctctgtggagactttttttaagcttggcgtggatccgatatcaactagatcttgaga

SEQ ID NO: 8179 - DNA, 170 bp, Artificial sequence
  Smad4.39_Brca1.53
  crRNA array
cgatttcttggctttatatatcttgtggaaaggacgaaacaccgtaatttctactaagtgtagatagtcaaacgcatactgacaataatttctactaagtgtagataatgaggaggcgtcgatcatttttttaagcttggcgtggatccgatatcaactagatcttgaga

SEQ ID NO: 8180 - DNA, 170 bp, Artificial sequence
  Smad4.39_Casp8.45
  crRNA array
cgatttcttggctttatatatcttgtggaaaggacgaaacaccgtaatttctactaagtgtagatagtcaaacgcatactgacaataatttctactaagtgtagatctaccgagatcctgtgaatgttttttaagcttggcgtggatccgatatcaactagatcttgaga

SEQ ID NO: 8181 - DNA, 170 bp, Artificial sequence
  Smad4.39_Casp8.54
  crRNA array
cgatttcttggctttatatatcttgtggaaaggacgaaacaccgtaatttctactaagtgtagatagtcaaacgcatactgacaataatttctactaagtgtagatcagtgcagtcgtcgtaagatttttttaagcttggcgtggatccgatatcaactagatcttgaga

SEQ ID NO: 8182 - DNA, 170 bp, Artificial sequence
  Smad4.39_Cbwd1.84
  crRNA array
cgatttcttggctttatatatcttgtggaaaggacgaaacaccgtaatttctactaagtgtagatagtcaaacgcatactgacaataatttctactaagtgtagatcacagcaggtaacatgccgcttttttaagcttggcgtggatccgatatcaactagatcttgaga

SEQ ID NO: 8183 - DNA, 170 bp, Artificial sequence
  Smad4.39_Cbwd1.85
  crRNA array
cgatttcttggctttatatatcttgtggaaaggacgaaacaccgtaatttctactaagtgtagatagtcaaacgcatactgacaataatttctactaagtgtagatacagcaggtaacatgccgccttttttaagcttggcgtggatccgatatcaactagatcttgaga

SEQ ID NO: 8184 - DNA, 170 bp, Artificial sequence
  Smad4.39_Cdh1.387
  crRNA array
cgatttcttggctttatatatcttgtggaaaggacgaaacaccgtaatttctactaagtgtagatagtcaaacgcatactgacaataatttctactaagtgtagatctcggcgtctgccgggtccgttttttaagcttggcgtggatccgatatcaactagatcttgaga

SEQ ID NO: 8185 - DNA, 170 bp, Artificial sequence
  Smad4.39_Cdh1.58
  crRNA array
cgatttcttggctttatatatcttgtggaaaggacgaaacaccgtaatttctactaagtgtagatagtcaaacgcatactgacaataatttctactaagtgtagatctcgtccgcgcccgggactcttttttaagcttggcgtggatccgatatcaactagatcttgaga

SEQ ID NO: 8186 - DNA, 170 bp, Artificial sequence
  Smad4.39_Cdkn2a.647
  crRNA array
cgatttcttggctttatatatcttgtggaaaggacgaaacaccgtaatttctactaagtgtagatagtcaaacgcatactgacaataatttctactaagtgtagatgcaatcacgggagggagcagttttttaagcttggcgtggatccgatatcaactagatcttgaga

SEQ ID NO: 8187 - DNA, 170 bp, Artificial sequence
  Smad4.39_Cdkn2a.648
  crRNA array
cgatttcttggctttatatatcttgtggaaaggacgaaacaccgtaatttctactaagtgtagatagtcaaacgcatactgacaataatttctactaagtgtagatcaatcacgggagggagcagattttttaagcttggcgtggatccgatatcaactagatcttgaga

SEQ ID NO: 8188 - DNA, 170 bp, Artificial sequence
  Smad4.39_Cic.162
  crRNA array
cgatttcttggctttatatatcttgtggaaaggacgaaacaccgtaatttctactaagtgtagatagtcaaacgcatactgacaataatttctactaagtgtagatcgcaggcgcgcccggcggagttttttaagcttggcgtggatccgatatcaactagatcttgaga

SEQ ID NO: 8189 - DNA, 170 bp, Artificial sequence
  Smad4.39_Cic.164
  crRNA array
cgatttcttggctttatatatcttgtggaaaggacgaaacaccgtaatttctactaagtgtagatagtcaaacgcatactgacaataatttctactaagtgtagatcgggccctgggccggcggctttttttaagcttggcgtggatccgatatcaactagatcttgaga

SEQ ID NO: 8190 - DNA, 170 bp, Artificial sequence
  Smad4.39_Ctcf.229
  crRNA array
cgatttcttggctttatatatcttgtggaaaggacgaaacaccgtaatttctactaagtgtagatagtcaaacgcatactgacaataatttctactaagtgtagatggctggtggctgatagtctgttttttaagcttggcgtggatccgatatcaactagatcttgaga

SEQ ID NO: 8191 - DNA, 170 bp, Artificial sequence
  Smad4.39_Ctcf.809
  crRNA array
cgatttcttggctttatatatcttgtggaaaggacgaaacaccgtaatttctactaagtgtagatagtcaaacgcatactgacaataatttctactaagtgtagataagcgctatcatgatcccaattttttaagcttggcgtggatccgatatcaactagatcttgaga

SEQ ID NO: 8192 - DNA, 170 bp, Artificial sequence
  Smad4.39_Elf3.826
  crRNA array
cgatttcttggctttatatatcttgtggaaaggacgaaacaccgtaatttctactaagtgtagatagtcaaacgcatactgacaataatttctactaagtgtagattccgagacatcctaatccacttttttaagcttggcgtggatccgatatcaactagatcttgaga

SEQ ID NO: 8193 - DNA, 170 bp, Artificial sequence
  Smad4.39_Elf3.983
  crRNA array
cgatttcttggctttatatatcttgtggaaaggacgaaacaccgtaatttctactaagtgtagatagtcaaacgcatactgacaataatttctactaagtgtagattaggccccctaactggaccattttttaagcttggcgtggatccgatatcaactagatcttgaga

SEQ ID NO: 8194 - DNA, 170 bp, Artificial sequence
  Smad4.39_Ep300.310
  crRNA array
cgatttcttggctttatatatcttgtggaaaggacgaaacaccgtaatttctactaagtgtagatagtcaaacgcatactgacaataatttctactaagtgtagatatggtacgacagtgaggaagttttttaagcttggcgtggatccgatatcaactagatcttgaga

SEQ ID NO: 8195 - DNA, 170 bp, Artificial sequence
  Smad4.39_Ep300.587
  crRNA array
cgatttcttggctttatatatcttgtggaaaggacgaaacaccgtaatttctactaagtgtagatagtcaaacgcatactgacaataatttctactaagtgtagatcgccccggggcccccaaccattttttaagcttggcgtggatccgatatcaactagatcttgaga

SEQ ID NO: 8196 - DNA, 170 bp, Artificial sequence
  Smad4.39_Epha2.126
  crRNA array
cgatttcttggctttatatatcttgtggaaaggacgaaacaccgtaatttctactaagtgtagatagtcaaacgcatactgacaataatttctactaagtgtagatcctgtgccgccgcggccgccttttttaagcttggcgtggatccgatatcaactagatcttgaga

SEQ ID NO: 8197 - DNA, 170 bp, Artificial sequence
  Smad4.39_Epha2.5
  crRNA array
cgatttcttggctttatatatcttgtggaaaggacgaaacaccgtaatttctactaagtgtagatagtcaaacgcatactgacaataatttctactaagtgtagatcatgagctggcgccacccggttttttaagcttggcgtggatccgatatcaactagatcttgaga

SEQ ID NO: 8198 - DNA, 170 bp, Artificial sequence
  Smad4.39_Fat1.105
  crRNA array
cgatttcttggctttatatatcttgtggaaaggacgaaacaccgtaatttctactaagtgtagatagtcaaacgcatactgacaataatttctactaagtgtagataactcgaggtgacaacaagtttttttaagcttggcgtggatccgatatcaactagatcttgaga

SEQ ID NO: 8199 - DNA, 170 bp, Artificial sequence
  Smad4.39_Fat1.122
  crRNA array
cgatttcttggctttatatatcttgtggaaaggacgaaacaccgtaatttctactaagtgtagatagtcaaacgcatactgacaataatttctactaagtgtagatccatcgacatggaaacgggattttttaagcttggcgtggatccgatatcaactagatcttgaga

SEQ ID NO: 8200 - DNA, 170 bp, Artificial sequence
  Smad4.39_Fbxw7.21
  crRNA array
cgatttcttggctttatatatcttgtggaaaggacgaaacaccgtaatttctactaagtgtagatagtcaaacgcatactgacaataatttctactaagtgtagattaatgtgccgtagaaacccattttttaagcttggcgtggatccgatatcaactagatcttgaga

SEQ ID NO: 8201 - DNA, 170 bp, Artificial sequence
  Smad4.39_Fbxw7.23
  crRNA array
cgatttcttggctttatatatcttgtggaaaggacgaaacaccgtaatttctactaagtgtagatagtcaaacgcatactgacaataatttctactaagtgtagatatgtgccgtagaaacccatattttttaagcttggcgtggatccgatatcaactagatcttgaga

SEQ ID NO: 8202 - DNA, 170 bp, Artificial sequence
  Smad4.39_Gata3.34
  crRNA array
cgatttcttggctttatatatcttgtggaaaggacgaaacaccgtaatttctactaagtgtagatagtcaaacgcatactgacaataatttctactaagtgtagatctaaactatcccgcaaagatttttttaagcttggcgtggatccgatatcaactagatcttgaga

SEQ ID NO: 8203 - DNA, 170 bp, Artificial sequence
  Smad4.39_Gata3.47
  crRNA array
cgatttcttggctttatatatcttgtggaaaggacgaaacaccgtaatttctactaagtgtagatagtcaaacgcatactgacaataatttctactaagtgtagatcgtagtaggacgggacgtggttttttaagcttggcgtggatccgatatcaactagatcttgaga

SEQ ID NO: 8204 - DNA, 170 bp, Artificial sequence
  Smad4.39_H2-Q2.1
  crRNA array
cgatttcttggctttatatatcttgtggaaaggacgaaacaccgtaatttctactaagtgtagatagtcaaacgcatactgacaataatttctactaagtgtagatagggcggccaccaacagcagttttttaagcttggcgtggatccgatatcaactagatcttgaga

SEQ ID NO: 8205 - DNA, 170 bp, Artificial sequence
  Smad4.39_H2-Q2.2
  crRNA array
cgatttcttggctttatatatcttgtggaaaggacgaaacaccgtaatttctactaagtgtagatagtcaaacgcatactgacaataatttctactaagtgtagattaacctgcgcccgctgctgattttttaagcttggcgtggatccgatatcaactagatcttgaga

SEQ ID NO: 8206 - DNA, 170 bp, Artificial sequence
  Smad4.39_Kdm5c.1878
  crRNA array
cgatttcttggctttatatatcttgtggaaaggacgaaacaccgtaatttctactaagtgtagatagtcaaacgcatactgacaataatttctactaagtgtagatagagcacggcacccgcccccttttttaagcttggcgtggatccgatatcaactagatcttgaga

SEQ ID NO: 8207 - DNA, 170 bp, Artificial sequence
  Smad4.39_Kdm5c.1879
  crRNA array
cgatttcttggctttatatatcttgtggaaaggacgaaacaccgtaatttctactaagtgtagatagtcaaacgcatactgacaataatttctactaagtgtagatgagcacggcacccgccccccttttttaagcttggcgtggatccgatatcaactagatcttgaga

SEQ ID NO: 8208 - DNA, 170 bp, Artificial sequence
  Smad4.39_Kdm6a.56
  crRNA array
cgatttcttggctttatatatcttgtggaaaggacgaaacaccgtaatttctactaagtgtagatagtcaaacgcatactgacaataatttctactaagtgtagattcgctgccgcctctcgcggcttttttaagcttggcgtggatccgatatcaactagatcttgaga

SEQ ID NO: 8209 - DNA, 170 bp, Artificial sequence
  Smad4.39_Kdm6a.57
  crRNA array
cgatttcttggctttatatatcttgtggaaaggacgaaacaccgtaatttctactaagtgtagatagtcaaacgcatactgacaataatttctactaagtgtagatcgctgccgcctctcgcggcattttttaagcttggcgtggatccgatatcaactagatcttgaga

SEQ ID NO: 8210 - DNA, 170 bp, Artificial sequence
  Smad4.39_Kmt2b.265
  crRNA array
cgatttcttggctttatatatcttgtggaaaggacgaaacaccgtaatttctactaagtgtagatagtcaaacgcatactgacaataatttctactaagtgtagatccccaagtgaagcccacctgttttttaagcttggcgtggatccgatatcaactagatcttgaga

SEQ ID NO: 8211 - DNA, 170 bp, Artificial sequence
  Smad4.39_Kmt2b.298
  crRNA array
cgatttcttggctttatatatcttgtggaaaggacgaaacaccgtaatttctactaagtgtagatagtcaaacgcatactgacaataatttctactaagtgtagattccggcagggaccggctggcttttttaagcttggcgtggatccgatatcaactagatcttgaga

SEQ ID NO: 8212 - DNA, 170 bp, Artificial sequence
  Smad4.39_Kmt2c.1962
  crRNA array
cgatttcttggctttatatatcttgtggaaaggacgaaacaccgtaatttctactaagtgtagatagtcaaacgcatactgacaataatttctactaagtgtagatgtgacgatctgtgccacaagttttttaagcttggcgtggatccgatatcaactagatcttgaga

SEQ ID NO: 8213 - DNA, 170 bp, Artificial sequence
  Smad4.39_Kmt2c.2236
  crRNA array
cgatttcttggctttatatatcttgtggaaaggacgaaacaccgtaatttctactaagtgtagatagtcaaacgcatactgacaataatttctactaagtgtagatactcgacctccacctccctattttttaagcttggcgtggatccgatatcaactagatcttgaga

SEQ ID NO: 8214 - DNA, 170 bp, Artificial sequence
  Smad4.39_Kmt2d.316
  crRNA array
cgatttcttggctttatatatcttgtggaaaggacgaaacaccgtaatttctactaagtgtagatagtcaaacgcatactgacaataatttctactaagtgtagatactccaggccacccaggtggttttttaagcttggcgtggatccgatatcaactagatcttgaga

SEQ ID NO: 8215 - DNA, 170 bp, Artificial sequence
  Smad4.39_Kmt2d.416
  crRNA array
cgatttcttggctttatatatcttgtggaaaggacgaaacaccgtaatttctactaagtgtagatagtcaaacgcatactgacaataatttctactaagtgtagattaaacccccgggggaagggtttttttaagcttggcgtggatccgatatcaactagatcttgaga

SEQ ID NO: 8216 - DNA, 170 bp, Artificial sequence
  Smad4.39_Map2k4.119
  crRNA array
cgatttcttggctttatatatcttgtggaaaggacgaaacaccgtaatttctactaagtgtagatagtcaaacgcatactgacaataatttctactaagtgtagattgctgtgtgggcggccacatttttttaagcttggcgtggatccgatatcaactagatcttgaga

SEQ ID NO: 8217 - DNA, 170 bp, Artificial sequence
  Smad4.39_Map2k4.1261
  crRNA array
cgatttcttggctttatatatcttgtggaaaggacgaaacaccgtaatttctactaagtgtagatagtcaaacgcatactgacaataatttctactaagtgtagatgatgtagtaatgcggagtagttttttaagcttggcgtggatccgatatcaactagatcttgaga

SEQ ID NO: 8218 - DNA, 170 bp, Artificial sequence
  Smad4.39_Map3k1.235
  crRNA array
cgatttcttggctttatatatcttgtggaaaggacgaaacaccgtaatttctactaagtgtagatagtcaaacgcatactgacaataatttctactaagtgtagataaaacgctactgatcgatcgttttttaagcttggcgtggatccgatatcaactagatcttgaga

SEQ ID NO: 8219 - DNA, 170 bp, Artificial sequence
  Smad4.39_Map3k1.3838
  crRNA array
cgatttcttggctttatatatcttgtggaaaggacgaaacaccgtaatttctactaagtgtagatagtcaaacgcatactgacaataatttctactaagtgtagatccaacaacagggccccactattttttaagcttggcgtggatccgatatcaactagatcttgaga

SEQ ID NO: 8220 - DNA, 170 bp, Artificial sequence
  Smad4.39_Mga.1655
  crRNA array
cgatttcttggctttatatatcttgtggaaaggacgaaacaccgtaatttctactaagtgtagatagtcaaacgcatactgacaataatttctactaagtgtagatcgagaagtggagagcatattttttttaagcttggcgtggatccgatatcaactagatcttgaga

SEQ ID NO: 8221 - DNA, 170 bp, Artificial sequence
  Smad4.39_Mga.93
  crRNA array
cgatttcttggctttatatatcttgtggaaaggacgaaacaccgtaatttctactaagtgtagatagtcaaacgcatactgacaataatttctactaagtgtagatgagaaggctccccataatgtttttttaagcttggcgtggatccgatatcaactagatcttgaga

SEQ ID NO: 8222 - DNA, 170 bp, Artificial sequence
  Smad4.39_Nf1.746
  crRNA array
cgatttcttggctttatatatcttgtggaaaggacgaaacaccgtaatttctactaagtgtagatagtcaaacgcatactgacaataatttctactaagtgtagattaagcataatgatgatgccattttttaagcttggcgtggatccgatatcaactagatcttgaga

SEQ ID NO: 8223 - DNA, 170 bp, Artificial sequence
  Smad4.39_Nf1.97
  crRNA array
cgatttcttggctttatatatcttgtggaaaggacgaaacaccgtaatttctactaagtgtagatagtcaaacgcatactgacaataatttctactaagtgtagatagcccgctacatgctgatgcttttttaagcttggcgtggatccgatatcaactagatcttgaga

SEQ ID NO: 8224 - DNA, 170 bp, Artificial sequence
  Smad4.39_Nf2.356
  crRNA array
cgatttcttggctttatatatcttgtggaaaggacgaaacaccgtaatttctactaagtgtagatagtcaaacgcatactgacaataatttctactaagtgtagatcggagtcatctgatagagatttttttaagcttggcgtggatccgatatcaactagatcttgaga

SEQ ID NO: 8225 - DNA, 170 bp, Artificial sequence
  Smad4.39_Nf2.768
  crRNA array
cgatttcttggctttatatatcttgtggaaaggacgaaacaccgtaatttctactaagtgtagatagtcaaacgcatactgacaataatttctactaagtgtagatccgaagccccagtgtccggcttttttaagcttggcgtggatccgatatcaactagatcttgaga

SEQ ID NO: 8226 - DNA, 170 bp, Artificial sequence
  Smad4.39_Notch1.1849
  crRNA array
cgatttcttggctttatatatcttgtggaaaggacgaaacaccgtaatttctactaagtgtagatagtcaaacgcatactgacaataatttctactaagtgtagatctggcgggtgggcggcgctgttttttaagcttggcgtggatccgatatcaactagatcttgaga

SEQ ID NO: 8227 - DNA, 170 bp, Artificial sequence
  Smad4.39_Notch1.649
  crRNA array
cgatttcttggctttatatatcttgtggaaaggacgaaacaccgtaatttctactaagtgtagatagtcaaacgcatactgacaataatttctactaagtgtagattgggccaacgatgccaggacttttttaagcttggcgtggatccgatatcaactagatcttgaga

SEQ ID NO: 8228 - DNA, 170 bp, Artificial sequence
  Smad4.39_Nsd1.70
  crRNA array
cgatttcttggctttatatatcttgtggaaaggacgaaacaccgtaatttctactaagtgtagatagtcaaacgcatactgacaataatttctactaagtgtagatactggtgtggacgatgcagattttttaagcttggcgtggatccgatatcaactagatcttgaga

SEQ ID NO: 8229 - DNA, 170 bp, Artificial sequence
  Smad4.39_Nsd1.90
  crRNA array
cgatttcttggctttatatatcttgtggaaaggacgaaacaccgtaatttctactaagtgtagatagtcaaacgcatactgacaataatttctactaagtgtagataggagctaacggcaagaatgttttttaagcttggcgtggatccgatatcaactagatcttgaga

SEQ ID NO: 8230 - DNA, 170 bp, Artificial sequence
  Smad4.39_Pbrm1.1236
  crRNA array
cgatttcttggctttatatatcttgtggaaaggacgaaacaccgtaatttctactaagtgtagatagtcaaacgcatactgacaataatttctactaagtgtagatgccgataaaaccaacagccgttttttaagcttggcgtggatccgatatcaactagatcttgaga

SEQ ID NO: 8231 - DNA, 170 bp, Artificial sequence
  Smad4.39_Pbrm1.969
  crRNA array
cgatttcttggctttatatatcttgtggaaaggacgaaacaccgtaatttctactaagtgtagatagtcaaacgcatactgacaataatttctactaagtgtagatgagccctaatgaacagctcattttttaagcttggcgtggatccgatatcaactagatcttgaga

SEQ ID NO: 8232 - DNA, 170 bp, Artificial sequence
  Smad4.39_Pik3r1.76
  crRNA array
cgatttcttggctttatatatcttgtggaaaggacgaaacaccgtaatttctactaagtgtagatagtcaaacgcatactgacaataatttctactaagtgtagataaaacctatacggcccgcacttttttaagcttggcgtggatccgatatcaactagatcttgaga

SEQ ID NO: 8233 - DNA, 170 bp, Artificial sequence
  Smad4.39_Pik3r1.77
  crRNA array
cgatttcttggctttatatatcttgtggaaaggacgaaacaccgtaatttctactaagtgtagatagtcaaacgcatactgacaataatttctactaagtgtagataaacctatacggcccgcactttttttaagcttggcgtggatccgatatcaactagatcttgaga

SEQ ID NO: 8234 - DNA, 170 bp, Artificial sequence
  Smad4.39_Pten.240
  crRNA array
cgatttcttggctttatatatcttgtggaaaggacgaaacaccgtaatttctactaagtgtagatagtcaaacgcatactgacaataatttctactaagtgtagattgcatacgctatagctgcttttttttaagcttggcgtggatccgatatcaactagatcttgaga

SEQ ID NO: 8235 - DNA, 170 bp, Artificial sequence
  Smad4.39_Pten.265
  crRNA array
cgatttcttggctttatatatcttgtggaaaggacgaaacaccgtaatttctactaagtgtagatagtcaaacgcatactgacaataatttctactaagtgtagataagcgtggtgcgtgacgcacttttttaagcttggcgtggatccgatatcaactagatcttgaga

SEQ ID NO: 8236 - DNA, 170 bp, Artificial sequence
  Smad4.39_Rasa1.1478
  crRNA array
cgatttcttggctttatatatcttgtggaaaggacgaaacaccgtaatttctactaagtgtagatagtcaaacgcatactgacaataatttctactaagtgtagatcgataatggtctatgatgtcttttttaagcttggcgtggatccgatatcaactagatcttgaga

SEQ ID NO: 8237 - DNA, 170 bp, Artificial sequence
  Smad4.39_Rasa1.223
  crRNA array
cgatttcttggctttatatatcttgtggaaaggacgaaacaccgtaatttctactaagtgtagatagtcaaacgcatactgacaataatttctactaagtgtagattccatggagtatcgtgctcgttttttaagcttggcgtggatccgatatcaactagatcttgaga

SEQ ID NO: 8238 - DNA, 170 bp, Artificial sequence
  Smad4.39_Rb1.211
  crRNA array
cgatttcttggctttatatatcttgtggaaaggacgaaacaccgtaatttctactaagtgtagatagtcaaacgcatactgacaataatttctactaagtgtagattctgacatgatcgggtacctttttttaagcttggcgtggatccgatatcaactagatcttgaga

SEQ ID NO: 8239 - DNA, 170 bp, Artificial sequence
  Smad4.39_Rb1.394
  crRNA array
cgatttcttggctttatatatcttgtggaaaggacgaaacaccgtaatttctactaagtgtagatagtcaaacgcatactgacaataatttctactaagtgtagatagaaatctcgaagcaggatcttttttaagcttggcgtggatccgatatcaactagatcttgaga

SEQ ID NO: 8240 - DNA, 170 bp, Artificial sequence
  Smad4.39_Rbm10.5
  crRNA array
cgatttcttggctttatatatcttgtggaaaggacgaaacaccgtaatttctactaagtgtagatagtcaaacgcatactgacaataatttctactaagtgtagatacgaaacctgaacccacacattttttaagcttggcgtggatccgatatcaactagatcttgaga

SEQ ID NO: 8241 - DNA, 170 bp, Artificial sequence
  Smad4.39_Rbm10.6
  crRNA array
cgatttcttggctttatatatcttgtggaaaggacgaaacaccgtaatttctactaagtgtagatagtcaaacgcatactgacaataatttctactaagtgtagatcgaaacctgaacccacacagttttttaagcttggcgtggatccgatatcaactagatcttgaga

SEQ ID NO: 8242 - DNA, 170 bp, Artificial sequence
  Smad4.39_Rnf43.1920
  crRNA array
cgatttcttggctttatatatcttgtggaaaggacgaaacaccgtaatttctactaagtgtagatagtcaaacgcatactgacaataatttctactaagtgtagatatccccgtgccgtggactccttttttaagcttggcgtggatccgatatcaactagatcttgaga

SEQ ID NO: 8243 - DNA, 170 bp, Artificial sequence
  Smad4.39_Rnf43.39
  crRNA array
cgatttcttggctttatatatcttgtggaaaggacgaaacaccgtaatttctactaagtgtagatagtcaaacgcatactgacaataatttctactaagtgtagatcaaggggatcactctgataattttttaagcttggcgtggatccgatatcaactagatcttgaga

SEQ ID NO: 8244 - DNA, 170 bp, Artificial sequence
  Smad4.39_Runx1.204
  crRNA array
cgatttcttggctttatatatcttgtggaaaggacgaaacaccgtaatttctactaagtgtagatagtcaaacgcatactgacaataatttctactaagtgtagattaaataagtccagccgttttttttttaagcttggcgtggatccgatatcaactagatcttgaga

SEQ ID NO: 8245 - DNA, 170 bp, Artificial sequence
  Smad4.39_Runx1.81
  crRNA array
cgatttcttggctttatatatcttgtggaaaggacgaaacaccgtaatttctactaagtgtagatagtcaaacgcatactgacaataatttctactaagtgtagataggacgcgtatgggaattttttttttaagcttggcgtggatccgatatcaactagatcttgaga

SEQ ID NO: 8246 - DNA, 170 bp, Artificial sequence
  Smad4.39_Setd2.143
  crRNA array
cgatttcttggctttatatatcttgtggaaaggacgaaacaccgtaatttctactaagtgtagatagtcaaacgcatactgacaataatttctactaagtgtagatgcacaaccacaacagactggttttttaagcttggcgtggatccgatatcaactagatcttgaga

SEQ ID NO: 8247 - DNA, 170 bp, Artificial sequence
  Smad4.39_Setd2.508
  crRNA array
cgatttcttggctttatatatcttgtggaaaggacgaaacaccgtaatttctactaagtgtagatagtcaaacgcatactgacaataatttctactaagtgtagattacgatcccgagcacccgacttttttaagcttggcgtggatccgatatcaactagatcttgaga

SEQ ID NO: 8248 - DNA, 170 bp, Artificial sequence
  Smad4.39_Stag2.1409
  crRNA array
cgatttcttggctttatatatcttgtggaaaggacgaaacaccgtaatttctactaagtgtagatagtcaaacgcatactgacaataatttctactaagtgtagatgctaataactgcggaagggcttttttaagcttggcgtggatccgatatcaactagatcttgaga

SEQ ID NO: 8249 - DNA, 170 bp, Artificial sequence
  Smad4.39_Stag2.4401
  crRNA array
cgatttcttggctttatatatcttgtggaaaggacgaaacaccgtaatttctactaagtgtagatagtcaaacgcatactgacaataatttctactaagtgtagattaatcgtccagtggtgtatattttttaagcttggcgtggatccgatatcaactagatcttgaga

SEQ ID NO: 8250 - DNA, 170 bp, Artificial sequence
  Smad4.39_Tbl1xr1.1
  crRNA array
cgatttcttggctttatatatcttgtggaaaggacgaaacaccgtaatttctactaagtgtagatagtcaaacgcatactgacaataatttctactaagtgtagatggatgcgcatactggtgaagttttttaagcttggcgtggatccgatatcaactagatcttgaga

SEQ ID NO: 8251 - DNA, 170 bp, Artificial sequence
  Smad4.39_Tbl1xr1.83
  crRNA array
cgatttcttggctttatatatcttgtggaaaggacgaaacaccgtaatttctactaagtgtagatagtcaaacgcatactgacaataatttctactaagtgtagatatggtcgacccatcgagtctttttttaagcttggcgtggatccgatatcaactagatcttgaga

SEQ ID NO: 8252 - DNA, 170 bp, Artificial sequence
  Smad4.39_Tgfbr2.290
  crRNA array
cgatttcttggctttatatatcttgtggaaaggacgaaacaccgtaatttctactaagtgtagatagtcaaacgcatactgacaataatttctactaagtgtagatcctctcggcgcccgggtaaattttttaagcttggcgtggatccgatatcaactagatcttgaga

SEQ ID NO: 8253 - DNA, 170 bp, Artificial sequence
  Smad4.39_Tgfbr2.292
  crRNA array
cgatttcttggctttatatatcttgtggaaaggacgaaacaccgtaatttctactaagtgtagatagtcaaacgcatactgacaataatttctactaagtgtagatcccgggcgccgagagggaaattttttaagcttggcgtggatccgatatcaactagatcttgaga

SEQ ID NO: 8254 - DNA, 170 bp, Artificial sequence
  Smad4.39_Trp53.4
  crRNA array
cgatttcttggctttatatatcttgtggaaaggacgaaacaccgtaatttctactaagtgtagatagtcaaacgcatactgacaataatttctactaagtgtagatccctgaactgcccccagggattttttaagcttggcgtggatccgatatcaactagatcttgaga

SEQ ID NO: 8255 - DNA, 170 bp, Artificial sequence
  Smad4.39_Trp53.528
  crRNA array
cgatttcttggctttatatatcttgtggaaaggacgaaacaccgtaatttctactaagtgtagatagtcaaacgcatactgacaataatttctactaagtgtagatgctgggccagcagagacctgttttttaagcttggcgtggatccgatatcaactagatcttgaga

SEQ ID NO: 8256 - DNA, 170 bp, Artificial sequence
  Smad4.39_Vhl.1
  crRNA array
cgatttcttggctttatatatcttgtggaaaggacgaaacaccgtaatttctactaagtgtagatagtcaaacgcatactgacaataatttctactaagtgtagatagggctcccggcggccatttttttttaagcttggcgtggatccgatatcaactagatcttgaga

SEQ ID NO: 8257 - DNA, 170 bp, Artificial sequence
  Smad4.39_Vhl.151
  crRNA array
cgatttcttggctttatatatcttgtggaaaggacgaaacaccgtaatttctactaagtgtagatagtcaaacgcatactgacaataatttctactaagtgtagattagagcactcacccgagggattttttaagcttggcgtggatccgatatcaactagatcttgaga

SEQ ID NO: 8258 - DNA, 170 bp, Artificial sequence
  Smad4.39_Zc3h13.1387
  crRNA array
cgatttcttggctttatatatcttgtggaaaggacgaaacaccgtaatttctactaagtgtagatagtcaaacgcatactgacaataatttctactaagtgtagatgtgacgccggtcatgtgactttttttaagcttggcgtggatccgatatcaactagatcttgaga

SEQ ID NO: 8259 - DNA, 170 bp, Artificial sequence
  Smad4.39_Zc3h13.1777
  crRNA array
cgatttcttggctttatatatcttgtggaaaggacgaaacaccgtaatttctactaagtgtagatagtcaaacgcatactgacaataatttctactaagtgtagatgatgctgccagtgtagcggcttttttaagcttggcgtggatccgatatcaactagatcttgaga

SEQ ID NO: 8260 - DNA, 170 bp, Artificial sequence
  Stag2.1409_Acvr2a.155
  crRNA array
cgatttcttggctttatatatcttgtggaaaggacgaaacaccgtaatttctactaagtgtagatgctaataactgcggaagggctaatttctactaagtgtagatggacctggctaatcaagtatttttttaagcttggcgtggatccgatatcaactagatcttgaga

SEQ ID NO: 8261 - DNA, 170 bp, Artificial sequence
  Stag2.1409_Acvr2a.70
  crRNA array
cgatttcttggctttatatatcttgtggaaaggacgaaacaccgtaatttctactaagtgtagatgctaataactgcggaagggctaatttctactaagtgtagatcccgaggcgccggagaagccttttttaagcttggcgtggatccgatatcaactagatcttgaga

SEQ ID NO: 8262 - DNA, 170 bp, Artificial sequence
  Stag2.1409_Apc.21
  crRNA array
cgatttcttggctttatatatcttgtggaaaggacgaaacaccgtaatttctactaagtgtagatgctaataactgcggaagggctaatttctactaagtgtagatgtgatccacacgtgtagctgttttttaagcttggcgtggatccgatatcaactagatcttgaga

SEQ ID NO: 8263 - DNA, 170 bp, Artificial sequence
  Stag2.1409_Apc.867
  crRNA array
cgatttcttggctttatatatcttgtggaaaggacgaaacaccgtaatttctactaagtgtagatgctaataactgcggaagggctaatttctactaagtgtagatcagtcccaggcggcggaagcttttttaagcttggcgtggatccgatatcaactagatcttgaga

SEQ ID NO: 8264 - DNA, 170 bp, Artificial sequence
  Stag2.1409_Arid1a.2
  crRNA array
cgatttcttggctttatatatcttgtggaaaggacgaaacaccgtaatttctactaagtgtagatgctaataactgcggaagggctaatttctactaagtgtagatcccgcgcccccgtcctggggttttttaagcttggcgtggatccgatatcaactagatcttgaga

SEQ ID NO: 8265 - DNA, 170 bp, Artificial sequence
  Stag2.1409_Arid1a.5
  crRNA array
cgatttcttggctttatatatcttgtggaaaggacgaaacaccgtaatttctactaagtgtagatgctaataactgcggaagggctaatttctactaagtgtagatcccgcgctcggccgctgccgttttttaagcttggcgtggatccgatatcaactagatcttgaga

SEQ ID NO: 8266 - DNA, 170 bp, Artificial sequence
  Stag2.1409_Arid2.166
  crRNA array
cgatttcttggctttatatatcttgtggaaaggacgaaacaccgtaatttctactaagtgtagatgctaataactgcggaagggctaatttctactaagtgtagataaccgcgatctgggttttttttttttaagcttggcgtggatccgatatcaactagatcttgaga

SEQ ID NO: 8267 - DNA, 170 bp, Artificial sequence
  Stag2.1409_Arid2.172
  crRNA array
cgatttcttggctttatatatcttgtggaaaggacgaaacaccgtaatttctactaagtgtagatgctaataactgcggaagggctaatttctactaagtgtagatctggacgagctgcggcagttttttttaagcttggcgtggatccgatatcaactagatcttgaga

SEQ ID NO: 8268 - DNA, 170 bp, Artificial sequence
  Stag2.1409_Atm.120
  crRNA array
cgatttcttggctttatatatcttgtggaaaggacgaaacaccgtaatttctactaagtgtagatgctaataactgcggaagggctaatttctactaagtgtagatgacaggtagtcggcagctaattttttaagcttggcgtggatccgatatcaactagatcttgaga

SEQ ID NO: 8269 - DNA, 170 bp, Artificial sequence
  Stag2.1409_Atm.997
  crRNA array
cgatttcttggctttatatatcttgtggaaaggacgaaacaccgtaatttctactaagtgtagatgctaataactgcggaagggctaatttctactaagtgtagatgagaaagtctccgaatcgttttttttaagcttggcgtggatccgatatcaactagatcttgaga

SEQ ID NO: 8270 - DNA, 170 bp, Artificial sequence
  Stag2.1409_Atrx.249
  crRNA array
cgatttcttggctttatatatcttgtggaaaggacgaaacaccgtaatttctactaagtgtagatgctaataactgcggaagggctaatttctactaagtgtagattagccagtcgctcatatctcttttttaagcttggcgtggatccgatatcaactagatcttgaga

SEQ ID NO: 8271 - DNA, 170 bp, Artificial sequence
  Stag2.1409_Atrx.251
  crRNA array
cgatttcttggctttatatatcttgtggaaaggacgaaacaccgtaatttctactaagtgtagatgctaataactgcggaagggctaatttctactaagtgtagatgccagtcgctcatatctctgttttttaagcttggcgtggatccgatatcaactagatcttgaga

SEQ ID NO: 8272 - DNA, 170 bp, Artificial sequence
  Stag2.1409_Bcor.203
  crRNA array
cgatttcttggctttatatatcttgtggaaaggacgaaacaccgtaatttctactaagtgtagatgctaataactgcggaagggctaatttctactaagtgtagatccccggagcggagtccaggcttttttaagcttggcgtggatccgatatcaactagatcttgaga

SEQ ID NO: 8273 - DNA, 170 bp, Artificial sequence
  Stag2.1409_Bcor.475
  crRNA array
cgatttcttggctttatatatcttgtggaaaggacgaaacaccgtaatttctactaagtgtagatgctaataactgcggaagggctaatttctactaagtgtagattgcaacccctctgtatgggattttttaagcttggcgtggatccgatatcaactagatcttgaga

SEQ ID NO: 8274 - DNA, 170 bp, Artificial sequence
  Stag2.1409_Brca1.112
  crRNA array
cgatttcttggctttatatatcttgtggaaaggacgaaacaccgtaatttctactaagtgtagatgctaataactgcggaagggctaatttctactaagtgtagatctagacgctctgtggagactttttttaagcttggcgtggatccgatatcaactagatcttgaga

SEQ ID NO: 8275 - DNA, 170 bp, Artificial sequence
  Stag2.1409_Brca1.53
  crRNA array
cgatttcttggctttatatatcttgtggaaaggacgaaacaccgtaatttctactaagtgtagatgctaataactgcggaagggctaatttctactaagtgtagataatgaggaggcgtcgatcatttttttaagcttggcgtggatccgatatcaactagatcttgaga

SEQ ID NO: 8276 - DNA, 170 bp, Artificial sequence
  Stag2.1409_Casp8.45
  crRNA array
cgatttcttggctttatatatcttgtggaaaggacgaaacaccgtaatttctactaagtgtagatgctaataactgcggaagggctaatttctactaagtgtagatctaccgagatcctgtgaatgttttttaagcttggcgtggatccgatatcaactagatcttgaga

SEQ ID NO: 8277 - DNA, 170 bp, Artificial sequence
  Stag2.1409_Casp8.54
  crRNA array
cgatttcttggctttatatatcttgtggaaaggacgaaacaccgtaatttctactaagtgtagatgctaataactgcggaagggctaatttctactaagtgtagatcagtgcagtcgtcgtaagatttttttaagcttggcgtggatccgatatcaactagatcttgaga

SEQ ID NO: 8278 - DNA, 170 bp, Artificial sequence
  Stag2.1409_Cbwd1.84
  crRNA array
cgatttcttggctttatatatcttgtggaaaggacgaaacaccgtaatttctactaagtgtagatgctaataactgcggaagggctaatttctactaagtgtagatcacagcaggtaacatgccgcttttttaagcttggcgtggatccgatatcaactagatcttgaga

SEQ ID NO: 8279 - DNA, 170 bp, Artificial sequence
  Stag2.1409_Cbwd1.85
  crRNA array
cgatttcttggctttatatatcttgtggaaaggacgaaacaccgtaatttctactaagtgtagatgctaataactgcggaagggctaatttctactaagtgtagatacagcaggtaacatgccgccttttttaagcttggcgtggatccgatatcaactagatcttgaga

SEQ ID NO: 8280 - DNA, 170 bp, Artificial sequence
  Stag2.1409_Cdh1.387
  crRNA array
cgatttcttggctttatatatcttgtggaaaggacgaaacaccgtaatttctactaagtgtagatgctaataactgcggaagggctaatttctactaagtgtagatctcggcgtctgccgggtccgttttttaagcttggcgtggatccgatatcaactagatcttgaga

SEQ ID NO: 8281 - DNA, 170 bp, Artificial sequence
  Stag2.1409_Cdh1.58
  crRNA array
cgatttcttggctttatatatcttgtggaaaggacgaaacaccgtaatttctactaagtgtagatgctaataactgcggaagggctaatttctactaagtgtagatctcgtccgcgcccgggactcttttttaagcttggcgtggatccgatatcaactagatcttgaga

SEQ ID NO: 8282 - DNA, 170 bp, Artificial sequence
  Stag2.1409_Cdkn2a.647
  crRNA array
cgatttcttggctttatatatcttgtggaaaggacgaaacaccgtaatttctactaagtgtagatgctaataactgcggaagggctaatttctactaagtgtagatgcaatcacgggagggagcagttttttaagcttggcgtggatccgatatcaactagatcttgaga

SEQ ID NO: 8283 - DNA, 170 bp, Artificial sequence
  Stag2.1409_Cdkn2a.648
  crRNA array
cgatttcttggctttatatatcttgtggaaaggacgaaacaccgtaatttctactaagtgtagatgctaataactgcggaagggctaatttctactaagtgtagatcaatcacgggagggagcagattttttaagcttggcgtggatccgatatcaactagatcttgaga

SEQ ID NO: 8284 - DNA, 170 bp, Artificial sequence
  Stag2.1409_Cic.162
  crRNA array
cgatttcttggctttatatatcttgtggaaaggacgaaacaccgtaatttctactaagtgtagatgctaataactgcggaagggctaatttctactaagtgtagatcgcaggcgcgcccggcggagttttttaagcttggcgtggatccgatatcaactagatcttgaga

SEQ ID NO: 8285 - DNA, 170 bp, Artificial sequence
  Stag2.1409_Cic.164
  crRNA array
cgatttcttggctttatatatcttgtggaaaggacgaaacaccgtaatttctactaagtgtagatgctaataactgcggaagggctaatttctactaagtgtagatcgggccctgggccggcggctttttttaagcttggcgtggatccgatatcaactagatcttgaga

SEQ ID NO: 8286 - DNA, 170 bp, Artificial sequence
  Stag2.1409_Ctcf.229
  crRNA array
cgatttcttggctttatatatcttgtggaaaggacgaaacaccgtaatttctactaagtgtagatgctaataactgcggaagggctaatttctactaagtgtagatggctggtggctgatagtctgttttttaagcttggcgtggatccgatatcaactagatcttgaga

SEQ ID NO: 8287 - DNA, 170 bp, Artificial sequence
  Stag2.1409_Ctcf.809
  crRNA array
cgatttcttggctttatatatcttgtggaaaggacgaaacaccgtaatttctactaagtgtagatgctaataactgcggaagggctaatttctactaagtgtagataagcgctatcatgatcccaattttttaagcttggcgtggatccgatatcaactagatcttgaga

SEQ ID NO: 8288 - DNA, 170 bp, Artificial sequence
  Stag2.1409_Elf3.826
  crRNA array
cgatttcttggctttatatatcttgtggaaaggacgaaacaccgtaatttctactaagtgtagatgctaataactgcggaagggctaatttctactaagtgtagattccgagacatcctaatccacttttttaagcttggcgtggatccgatatcaactagatcttgaga

SEQ ID NO: 8289 - DNA, 170 bp, Artificial sequence
  Stag2.1409_Elf3.983
  crRNA array
cgatttcttggctttatatatcttgtggaaaggacgaaacaccgtaatttctactaagtgtagatgctaataactgcggaagggctaatttctactaagtgtagattaggccccctaactggaccattttttaagcttggcgtggatccgatatcaactagatcttgaga

SEQ ID NO: 8290 - DNA, 170 bp, Artificial sequence
  Stag2.1409_Ep300.310
  crRNA array
cgatttcttggctttatatatcttgtggaaaggacgaaacaccgtaatttctactaagtgtagatgctaataactgcggaagggctaatttctactaagtgtagatatggtacgacagtgaggaagttttttaagcttggcgtggatccgatatcaactagatcttgaga

SEQ ID NO: 8291 - DNA, 170 bp, Artificial sequence
  Stag2.1409_Ep300.587
  crRNA array
cgatttcttggctttatatatcttgtggaaaggacgaaacaccgtaatttctactaagtgtagatgctaataactgcggaagggctaatttctactaagtgtagatcgccccggggcccccaaccattttttaagcttggcgtggatccgatatcaactagatcttgaga

SEQ ID NO: 8292 - DNA, 170 bp, Artificial sequence
  Stag2.1409_Epha2.126
  crRNA array
cgatttcttggctttatatatcttgtggaaaggacgaaacaccgtaatttctactaagtgtagatgctaataactgcggaagggctaatttctactaagtgtagatcctgtgccgccgcggccgccttttttaagcttggcgtggatccgatatcaactagatcttgaga

SEQ ID NO: 8293 - DNA, 170 bp, Artificial sequence
  Stag2.1409_Epha2.5
  crRNA array
cgatttcttggctttatatatcttgtggaaaggacgaaacaccgtaatttctactaagtgtagatgctaataactgcggaagggctaatttctactaagtgtagatcatgagctggcgccacccggttttttaagcttggcgtggatccgatatcaactagatcttgaga

SEQ ID NO: 8294 - DNA, 170 bp, Artificial sequence
  Stag2.1409_Fat1.105
  crRNA array
cgatttcttggctttatatatcttgtggaaaggacgaaacaccgtaatttctactaagtgtagatgctaataactgcggaagggctaatttctactaagtgtagataactcgaggtgacaacaagtttttttaagcttggcgtggatccgatatcaactagatcttgaga

SEQ ID NO: 8295 - DNA, 170 bp, Artificial sequence
  Stag2.1409_Fat1.122
  crRNA array
cgatttcttggctttatatatcttgtggaaaggacgaaacaccgtaatttctactaagtgtagatgctaataactgcggaagggctaatttctactaagtgtagatccatcgacatggaaacgggattttttaagcttggcgtggatccgatatcaactagatcttgaga

SEQ ID NO: 8296 - DNA, 170 bp, Artificial sequence
  Stag2.1409_Fbxw7.21
  crRNA array
cgatttcttggctttatatatcttgtggaaaggacgaaacaccgtaatttctactaagtgtagatgctaataactgcggaagggctaatttctactaagtgtagattaatgtgccgtagaaacccattttttaagcttggcgtggatccgatatcaactagatcttgaga

SEQ ID NO: 8297 - DNA, 170 bp, Artificial sequence
  Stag2.1409_Fbxw7.23
  crRNA array
cgatttcttggctttatatatcttgtggaaaggacgaaacaccgtaatttctactaagtgtagatgctaataactgcggaagggctaatttctactaagtgtagatatgtgccgtagaaacccatattttttaagcttggcgtggatccgatatcaactagatcttgaga

SEQ ID NO: 8298 - DNA, 170 bp, Artificial sequence
  Stag2.1409_Gata3.34
  crRNA array
cgatttcttggctttatatatcttgtggaaaggacgaaacaccgtaatttctactaagtgtagatgctaataactgcggaagggctaatttctactaagtgtagatctaaactatcccgcaaagatttttttaagcttggcgtggatccgatatcaactagatcttgaga

SEQ ID NO: 8299 - DNA, 170 bp, Artificial sequence
  Stag2.1409_Gata3.47
  crRNA array
cgatttcttggctttatatatcttgtggaaaggacgaaacaccgtaatttctactaagtgtagatgctaataactgcggaagggctaatttctactaagtgtagatcgtagtaggacgggacgtggttttttaagcttggcgtggatccgatatcaactagatcttgaga

SEQ ID NO: 8300 - DNA, 170 bp, Artificial sequence
  Stag2.1409_H2-Q2.1
  crRNA array
cgatttcttggctttatatatcttgtggaaaggacgaaacaccgtaatttctactaagtgtagatgctaataactgcggaagggctaatttctactaagtgtagatagggcggccaccaacagcagttttttaagcttggcgtggatccgatatcaactagatcttgaga

SEQ ID NO: 8301 - DNA, 170 bp, Artificial sequence
  Stag2.1409_H2-Q2.2
  crRNA array
cgatttcttggctttatatatcttgtggaaaggacgaaacaccgtaatttctactaagtgtagatgctaataactgcggaagggctaatttctactaagtgtagattaacctgcgcccgctgctgattttttaagcttggcgtggatccgatatcaactagatcttgaga

SEQ ID NO: 8302 - DNA, 170 bp, Artificial sequence
  Stag2.1409_Kdm5c.1878
  crRNA array
cgatttcttggctttatatatcttgtggaaaggacgaaacaccgtaatttctactaagtgtagatgctaataactgcggaagggctaatttctactaagtgtagatagagcacggcacccgcccccttttttaagcttggcgtggatccgatatcaactagatcttgaga

SEQ ID NO: 8303 - DNA, 170 bp, Artificial sequence
  Stag2.1409_Kdm5c.1879
  crRNA array
cgatttcttggctttatatatcttgtggaaaggacgaaacaccgtaatttctactaagtgtagatgctaataactgcggaagggctaatttctactaagtgtagatgagcacggcacccgccccccttttttaagcttggcgtggatccgatatcaactagatcttgaga

SEQ ID NO: 8304 - DNA, 170 bp, Artificial sequence
  Stag2.1409_Kdm6a.56
  crRNA array
cgatttcttggctttatatatcttgtggaaaggacgaaacaccgtaatttctactaagtgtagatgctaataactgcggaagggctaatttctactaagtgtagattcgctgccgcctctcgcggcttttttaagcttggcgtggatccgatatcaactagatcttgaga

SEQ ID NO: 8305 - DNA, 170 bp, Artificial sequence
  Stag2.1409_Kdm6a.57
  crRNA array
cgatttcttggctttatatatcttgtggaaaggacgaaacaccgtaatttctactaagtgtagatgctaataactgcggaagggctaatttctactaagtgtagatcgctgccgcctctcgcggcattttttaagcttggcgtggatccgatatcaactagatcttgaga

SEQ ID NO: 8306 - DNA, 170 bp, Artificial sequence
  Stag2.1409_Kmt2b.265
  crRNA array
cgatttcttggctttatatatcttgtggaaaggacgaaacaccgtaatttctactaagtgtagatgctaataactgcggaagggctaatttctactaagtgtagatccccaagtgaagcccacctgttttttaagcttggcgtggatccgatatcaactagatcttgaga

SEQ ID NO: 8307 - DNA, 170 bp, Artificial sequence
  Stag2.1409_Kmt2b.298
  crRNA array
cgatttcttggctttatatatcttgtggaaaggacgaaacaccgtaatttctactaagtgtagatgctaataactgcggaagggctaatttctactaagtgtagattccggcagggaccggctggcttttttaagcttggcgtggatccgatatcaactagatcttgaga

SEQ ID NO: 8308 - DNA, 170 bp, Artificial sequence
  Stag2.1409_Kmt2c.1962
  crRNA array
cgatttcttggctttatatatcttgtggaaaggacgaaacaccgtaatttctactaagtgtagatgctaataactgcggaagggctaatttctactaagtgtagatgtgacgatctgtgccacaagttttttaagcttggcgtggatccgatatcaactagatcttgaga

SEQ ID NO: 8309 - DNA, 170 bp, Artificial sequence
  Stag2.1409_Kmt2c.2236
  crRNA array
cgatttcttggctttatatatcttgtggaaaggacgaaacaccgtaatttctactaagtgtagatgctaataactgcggaagggctaatttctactaagtgtagatactcgacctccacctccctattttttaagcttggcgtggatccgatatcaactagatcttgaga

SEQ ID NO: 8310 - DNA, 170 bp, Artificial sequence
  Stag2.1409_Kmt2d.316
  crRNA array
cgatttcttggctttatatatcttgtggaaaggacgaaacaccgtaatttctactaagtgtagatgctaataactgcggaagggctaatttctactaagtgtagatactccaggccacccaggtggttttttaagcttggcgtggatccgatatcaactagatcttgaga

SEQ ID NO: 8311 - DNA, 170 bp, Artificial sequence
  Stag2.1409_Kmt2d.416
  crRNA array
cgatttcttggctttatatatcttgtggaaaggacgaaacaccgtaatttctactaagtgtagatgctaataactgcggaagggctaatttctactaagtgtagattaaacccccgggggaagggtttttttaagcttggcgtggatccgatatcaactagatcttgaga

SEQ ID NO: 8312 - DNA, 170 bp, Artificial sequence
  Stag2.1409_Map2k4.119
  crRNA array
cgatttcttggctttatatatcttgtggaaaggacgaaacaccgtaatttctactaagtgtagatgctaataactgcggaagggctaatttctactaagtgtagattgctgtgtgggcggccacatttttttaagcttggcgtggatccgatatcaactagatcttgaga

SEQ ID NO: 8313 - DNA, 170 bp, Artificial sequence
  Stag2.1409_Map2k4.1261
  crRNA array
cgatttcttggctttatatatcttgtggaaaggacgaaacaccgtaatttctactaagtgtagatgctaataactgcggaagggctaatttctactaagtgtagatgatgtagtaatgcggagtagttttttaagcttggcgtggatccgatatcaactagatcttgaga

SEQ ID NO: 8314 - DNA, 170 bp, Artificial sequence
  Stag2.1409_Map3k1.235
  crRNA array
cgatttcttggctttatatatcttgtggaaaggacgaaacaccgtaatttctactaagtgtagatgctaataactgcggaagggctaatttctactaagtgtagataaaacgctactgatcgatcgttttttaagcttggcgtggatccgatatcaactagatcttgaga

SEQ ID NO: 8315 - DNA, 170 bp, Artificial sequence
  Stag2.1409_Map3k1.3838
  crRNA array
cgatttcttggctttatatatcttgtggaaaggacgaaacaccgtaatttctactaagtgtagatgctaataactgcggaagggctaatttctactaagtgtagatccaacaacagggccccactattttttaagcttggcgtggatccgatatcaactagatcttgaga

SEQ ID NO: 8316 - DNA, 170 bp, Artificial sequence
  Stag2.1409_Mga.1655
  crRNA array
cgatttcttggctttatatatcttgtggaaaggacgaaacaccgtaatttctactaagtgtagatgctaataactgcggaagggctaatttctactaagtgtagatcgagaagtggagagcatattttttttaagcttggcgtggatccgatatcaactagatcttgaga

SEQ ID NO: 8317 - DNA, 170 bp, Artificial sequence
  Stag2.1409_Mga.93
  crRNA array
cgatttcttggctttatatatcttgtggaaaggacgaaacaccgtaatttctactaagtgtagatgctaataactgcggaagggctaatttctactaagtgtagatgagaaggctccccataatgtttttttaagcttggcgtggatccgatatcaactagatcttgaga

SEQ ID NO: 8318 - DNA, 170 bp, Artificial sequence
  Stag2.1409_Nf1.746
  crRNA array
cgatttcttggctttatatatcttgtggaaaggacgaaacaccgtaatttctactaagtgtagatgctaataactgcggaagggctaatttctactaagtgtagattaagcataatgatgatgccattttttaagcttggcgtggatccgatatcaactagatcttgaga

SEQ ID NO: 8319 - DNA, 170 bp, Artificial sequence
  Stag2.1409_Nf1.97
  crRNA array
cgatttcttggctttatatatcttgtggaaaggacgaaacaccgtaatttctactaagtgtagatgctaataactgcggaagggctaatttctactaagtgtagatagcccgctacatgctgatgcttttttaagcttggcgtggatccgatatcaactagatcttgaga

SEQ ID NO: 8320 - DNA, 170 bp, Artificial sequence
  Stag2.1409_Nf2.356
  crRNA array
cgatttcttggctttatatatcttgtggaaaggacgaaacaccgtaatttctactaagtgtagatgctaataactgcggaagggctaatttctactaagtgtagatcggagtcatctgatagagatttttttaagcttggcgtggatccgatatcaactagatcttgaga

SEQ ID NO: 8321 - DNA, 170 bp, Artificial sequence
  Stag2.1409_Nf2.768
  crRNA array
cgatttcttggctttatatatcttgtggaaaggacgaaacaccgtaatttctactaagtgtagatgctaataactgcggaagggctaatttctactaagtgtagatccgaagccccagtgtccggcttttttaagcttggcgtggatccgatatcaactagatcttgaga

SEQ ID NO: 8322 - DNA, 170 bp, Artificial sequence
  Stag2.1409_Notch1.1849
  crRNA array
cgatttcttggctttatatatcttgtggaaaggacgaaacaccgtaatttctactaagtgtagatgctaataactgcggaagggctaatttctactaagtgtagatctggcgggtgggcggcgctgttttttaagcttggcgtggatccgatatcaactagatcttgaga

SEQ ID NO: 8323 - DNA, 170 bp, Artificial sequence
  Stag2.1409_Notch1.649
  crRNA array
cgatttcttggctttatatatcttgtggaaaggacgaaacaccgtaatttctactaagtgtagatgctaataactgcggaagggctaatttctactaagtgtagattgggccaacgatgccaggacttttttaagcttggcgtggatccgatatcaactagatcttgaga

SEQ ID NO: 8324 - DNA, 170 bp, Artificial sequence
  Stag2.1409_Nsd1.70
  crRNA array
cgatttcttggctttatatatcttgtggaaaggacgaaacaccgtaatttctactaagtgtagatgctaataactgcggaagggctaatttctactaagtgtagatactggtgtggacgatgcagattttttaagcttggcgtggatccgatatcaactagatcttgaga

SEQ ID NO: 8325 - DNA, 170 bp, Artificial sequence
  Stag2.1409_Nsd1.90
  crRNA array
cgatttcttggctttatatatcttgtggaaaggacgaaacaccgtaatttctactaagtgtagatgctaataactgcggaagggctaatttctactaagtgtagataggagctaacggcaagaatgttttttaagcttggcgtggatccgatatcaactagatcttgaga

SEQ ID NO: 8326 - DNA, 170 bp, Artificial sequence
  Stag2.1409_Pbrm1.1236
  crRNA array
cgatttcttggctttatatatcttgtggaaaggacgaaacaccgtaatttctactaagtgtagatgctaataactgcggaagggctaatttctactaagtgtagatgccgataaaaccaacagccgttttttaagcttggcgtggatccgatatcaactagatcttgaga

SEQ ID NO: 8327 - DNA, 170 bp, Artificial sequence
  Stag2.1409_Pbrm1.969
  crRNA array
cgatttcttggctttatatatcttgtggaaaggacgaaacaccgtaatttctactaagtgtagatgctaataactgcggaagggctaatttctactaagtgtagatgagccctaatgaacagctcattttttaagcttggcgtggatccgatatcaactagatcttgaga

SEQ ID NO: 8328 - DNA, 170 bp, Artificial sequence
  Stag2.1409_Pik3r1.76
  crRNA array
cgatttcttggctttatatatcttgtggaaaggacgaaacaccgtaatttctactaagtgtagatgctaataactgcggaagggctaatttctactaagtgtagataaaacctatacggcccgcacttttttaagcttggcgtggatccgatatcaactagatcttgaga

SEQ ID NO: 8329 - DNA, 170 bp, Artificial sequence
  Stag2.1409_Pik3r1.77
  crRNA array
cgatttcttggctttatatatcttgtggaaaggacgaaacaccgtaatttctactaagtgtagatgctaataactgcggaagggctaatttctactaagtgtagataaacctatacggcccgcactttttttaagcttggcgtggatccgatatcaactagatcttgaga

SEQ ID NO: 8330 - DNA, 170 bp, Artificial sequence
  Stag2.1409_Pten.240
  crRNA array
cgatttcttggctttatatatcttgtggaaaggacgaaacaccgtaatttctactaagtgtagatgctaataactgcggaagggctaatttctactaagtgtagattgcatacgctatagctgcttttttttaagcttggcgtggatccgatatcaactagatcttgaga

SEQ ID NO: 8331 - DNA, 170 bp, Artificial sequence
  Stag2.1409_Pten.265
  crRNA array
cgatttcttggctttatatatcttgtggaaaggacgaaacaccgtaatttctactaagtgtagatgctaataactgcggaagggctaatttctactaagtgtagataagcgtggtgcgtgacgcacttttttaagcttggcgtggatccgatatcaactagatcttgaga

SEQ ID NO: 8332 - DNA, 170 bp, Artificial sequence
  Stag2.1409_Rasa1.1478
  crRNA array
cgatttcttggctttatatatcttgtggaaaggacgaaacaccgtaatttctactaagtgtagatgctaataactgcggaagggctaatttctactaagtgtagatcgataatggtctatgatgtcttttttaagcttggcgtggatccgatatcaactagatcttgaga

SEQ ID NO: 8333 - DNA, 170 bp, Artificial sequence
  Stag2.1409_Rasa1.223
  crRNA array
cgatttcttggctttatatatcttgtggaaaggacgaaacaccgtaatttctactaagtgtagatgctaataactgcggaagggctaatttctactaagtgtagattccatggagtatcgtgctcgttttttaagcttggcgtggatccgatatcaactagatcttgaga

SEQ ID NO: 8334 - DNA, 170 bp, Artificial sequence
  Stag2.1409_Rb1.211
  crRNA array
cgatttcttggctttatatatcttgtggaaaggacgaaacaccgtaatttctactaagtgtagatgctaataactgcggaagggctaatttctactaagtgtagattctgacatgatcgggtacctttttttaagcttggcgtggatccgatatcaactagatcttgaga

SEQ ID NO: 8335 - DNA, 170 bp, Artificial sequence
  Stag2.1409_Rb1.394
  crRNA array
cgatttcttggctttatatatcttgtggaaaggacgaaacaccgtaatttctactaagtgtagatgctaataactgcggaagggctaatttctactaagtgtagatagaaatctcgaagcaggatcttttttaagcttggcgtggatccgatatcaactagatcttgaga

SEQ ID NO: 8336 - DNA, 170 bp, Artificial sequence
  Stag2.1409_Rbm10.5
  crRNA array
cgatttcttggctttatatatcttgtggaaaggacgaaacaccgtaatttctactaagtgtagatgctaataactgcggaagggctaatttctactaagtgtagatacgaaacctgaacccacacattttttaagcttggcgtggatccgatatcaactagatcttgaga

SEQ ID NO: 8337 - DNA, 170 bp, Artificial sequence
  Stag2.1409_Rbm10.6
  crRNA array
cgatttcttggctttatatatcttgtggaaaggacgaaacaccgtaatttctactaagtgtagatgctaataactgcggaagggctaatttctactaagtgtagatcgaaacctgaacccacacagttttttaagcttggcgtggatccgatatcaactagatcttgaga

SEQ ID NO: 8338 - DNA, 170 bp, Artificial sequence
  Stag2.1409_Rnf43.1920
  crRNA array
cgatttcttggctttatatatcttgtggaaaggacgaaacaccgtaatttctactaagtgtagatgctaataactgcggaagggctaatttctactaagtgtagatatccccgtgccgtggactccttttttaagcttggcgtggatccgatatcaactagatcttgaga

SEQ ID NO: 8339 - DNA, 170 bp, Artificial sequence
  Stag2.1409_Rnf43.39
  crRNA array
cgatttcttggctttatatatcttgtggaaaggacgaaacaccgtaatttctactaagtgtagatgctaataactgcggaagggctaatttctactaagtgtagatcaaggggatcactctgataattttttaagcttggcgtggatccgatatcaactagatcttgaga

SEQ ID NO: 8340 - DNA, 170 bp, Artificial sequence
  Stag2.1409_Runx1.204
  crRNA array
cgatttcttggctttatatatcttgtggaaaggacgaaacaccgtaatttctactaagtgtagatgctaataactgcggaagggctaatttctactaagtgtagattaaataagtccagccgttttttttttaagcttggcgtggatccgatatcaactagatcttgaga

SEQ ID NO: 8341 - DNA, 170 bp, Artificial sequence
  Stag2.1409_Runx1.81
  crRNA array
cgatttcttggctttatatatcttgtggaaaggacgaaacaccgtaatttctactaagtgtagatgctaataactgcggaagggctaatttctactaagtgtagataggacgcgtatgggaattttttttttaagcttggcgtggatccgatatcaactagatcttgaga

SEQ ID NO: 8342 - DNA, 170 bp, Artificial sequence
  Stag2.1409_Setd2.143
  crRNA array
cgatttcttggctttatatatcttgtggaaaggacgaaacaccgtaatttctactaagtgtagatgctaataactgcggaagggctaatttctactaagtgtagatgcacaaccacaacagactggttttttaagcttggcgtggatccgatatcaactagatcttgaga

SEQ ID NO: 8343 - DNA, 170 bp, Artificial sequence
  Stag2.1409_Setd2.508
  crRNA array
cgatttcttggctttatatatcttgtggaaaggacgaaacaccgtaatttctactaagtgtagatgctaataactgcggaagggctaatttctactaagtgtagattacgatcccgagcacccgacttttttaagcttggcgtggatccgatatcaactagatcttgaga

SEQ ID NO: 8344 - DNA, 170 bp, Artificial sequence
  Stag2.1409_Smad4.3038
  crRNA array
cgatttcttggctttatatatcttgtggaaaggacgaaacaccgtaatttctactaagtgtagatgctaataactgcggaagggctaatttctactaagtgtagatatctgcggcagtgtcaccggttttttaagcttggcgtggatccgatatcaactagatcttgaga

SEQ ID NO: 8345 - DNA, 170 bp, Artificial sequence
  Stag2.1409_Smad4.39
  crRNA array
cgatttcttggctttatatatcttgtggaaaggacgaaacaccgtaatttctactaagtgtagatgctaataactgcggaagggctaatttctactaagtgtagatagtcaaacgcatactgacaattttttaagcttggcgtggatccgatatcaactagatcttgaga

SEQ ID NO: 8346 - DNA, 170 bp, Artificial sequence
  Stag2.1409_Tbl1xr1.1
  crRNA array
cgatttcttggctttatatatcttgtggaaaggacgaaacaccgtaatttctactaagtgtagatgctaataactgcggaagggctaatttctactaagtgtagatggatgcgcatactggtgaagttttttaagcttggcgtggatccgatatcaactagatcttgaga

SEQ ID NO: 8347 - DNA, 170 bp, Artificial sequence
  Stag2.1409_Tbl1xr1.83
  crRNA array
cgatttcttggctttatatatcttgtggaaaggacgaaacaccgtaatttctactaagtgtagatgctaataactgcggaagggctaatttctactaagtgtagatatggtcgacccatcgagtctttttttaagcttggcgtggatccgatatcaactagatcttgaga

SEQ ID NO: 8348 - DNA, 170 bp, Artificial sequence
  Stag2.1409_Tgfbr2.290
  crRNA array
cgatttcttggctttatatatcttgtggaaaggacgaaacaccgtaatttctactaagtgtagatgctaataactgcggaagggctaatttctactaagtgtagatcctctcggcgcccgggtaaattttttaagcttggcgtggatccgatatcaactagatcttgaga

SEQ ID NO: 8349 - DNA, 170 bp, Artificial sequence
  Stag2.1409_Tgfbr2.292
  crRNA array
cgatttcttggctttatatatcttgtggaaaggacgaaacaccgtaatttctactaagtgtagatgctaataactgcggaagggctaatttctactaagtgtagatcccgggcgccgagagggaaattttttaagcttggcgtggatccgatatcaactagatcttgaga

SEQ ID NO: 8350 - DNA, 170 bp, Artificial sequence
  Stag2.1409_Trp53.4
  crRNA array
cgatttcttggctttatatatcttgtggaaaggacgaaacaccgtaatttctactaagtgtagatgctaataactgcggaagggctaatttctactaagtgtagatccctgaactgcccccagggattttttaagcttggcgtggatccgatatcaactagatcttgaga

SEQ ID NO: 8351 - DNA, 170 bp, Artificial sequence
  Stag2.1409_Trp53.528
  crRNA array
cgatttcttggctttatatatcttgtggaaaggacgaaacaccgtaatttctactaagtgtagatgctaataactgcggaagggctaatttctactaagtgtagatgctgggccagcagagacctgttttttaagcttggcgtggatccgatatcaactagatcttgaga

SEQ ID NO: 8352 - DNA, 170 bp, Artificial sequence
  Stag2.1409_Vhl.1
  crRNA array
cgatttcttggctttatatatcttgtggaaaggacgaaacaccgtaatttctactaagtgtagatgctaataactgcggaagggctaatttctactaagtgtagatagggctcccggcggccatttttttttaagcttggcgtggatccgatatcaactagatcttgaga

SEQ ID NO: 8353 - DNA, 170 bp, Artificial sequence
  Stag2.1409_Vhl.151
  crRNA array
cgatttcttggctttatatatcttgtggaaaggacgaaacaccgtaatttctactaagtgtagatgctaataactgcggaagggctaatttctactaagtgtagattagagcactcacccgagggattttttaagcttggcgtggatccgatatcaactagatcttgaga

SEQ ID NO: 8354 - DNA, 170 bp, Artificial sequence
  Stag2.1409_Zc3h13.1387
  crRNA array
cgatttcttggctttatatatcttgtggaaaggacgaaacaccgtaatttctactaagtgtagatgctaataactgcggaagggctaatttctactaagtgtagatgtgacgccggtcatgtgactttttttaagcttggcgtggatccgatatcaactagatcttgaga

SEQ ID NO: 8355 - DNA, 170 bp, Artificial sequence
  Stag2.1409_Zc3h13.1777
  crRNA array
cgatttcttggctttatatatcttgtggaaaggacgaaacaccgtaatttctactaagtgtagatgctaataactgcggaagggctaatttctactaagtgtagatgatgctgccagtgtagcggcttttttaagcttggcgtggatccgatatcaactagatcttgaga

SEQ ID NO: 8356 - DNA, 170 bp, Artificial sequence
  Stag2.4401_Acvr2a.155
  crRNA array
cgatttcttggctttatatatcttgtggaaaggacgaaacaccgtaatttctactaagtgtagattaatcgtccagtggtgtatataatttctactaagtgtagatggacctggctaatcaagtatttttttaagcttggcgtggatccgatatcaactagatcttgaga

SEQ ID NO: 8357 - DNA, 170 bp, Artificial sequence
  Stag2.4401_Acvr2a.70
  crRNA array
cgatttcttggctttatatatcttgtggaaaggacgaaacaccgtaatttctactaagtgtagattaatcgtccagtggtgtatataatttctactaagtgtagatcccgaggcgccggagaagccttttttaagcttggcgtggatccgatatcaactagatcttgaga

SEQ ID NO: 8358 - DNA, 170 bp, Artificial sequence
  Stag2.4401_Apc.21
  crRNA array
cgatttcttggctttatatatcttgtggaaaggacgaaacaccgtaatttctactaagtgtagattaatcgtccagtggtgtatataatttctactaagtgtagatgtgatccacacgtgtagctgttttttaagcttggcgtggatccgatatcaactagatcttgaga

SEQ ID NO: 8359 - DNA, 170 bp, Artificial sequence
  Stag2.4401_Apc.867
  crRNA array
cgatttcttggctttatatatcttgtggaaaggacgaaacaccgtaatttctactaagtgtagattaatcgtccagtggtgtatataatttctactaagtgtagatcagtcccaggcggcggaagcttttttaagcttggcgtggatccgatatcaactagatcttgaga

SEQ ID NO: 8360 - DNA, 170 bp, Artificial sequence
  Stag2.4401_Arid1a.2
  crRNA array
cgatttcttggctttatatatcttgtggaaaggacgaaacaccgtaatttctactaagtgtagattaatcgtccagtggtgtatataatttctactaagtgtagatcccgcgcccccgtcctggggttttttaagcttggcgtggatccgatatcaactagatcttgaga

SEQ ID NO: 8361 - DNA, 170 bp, Artificial sequence
  Stag2.4401_Arid1a.5
  crRNA array
cgatttcttggctttatatatcttgtggaaaggacgaaacaccgtaatttctactaagtgtagattaatcgtccagtggtgtatataatttctactaagtgtagatcccgcgctcggccgctgccgttttttaagcttggcgtggatccgatatcaactagatcttgaga

SEQ ID NO: 8362 - DNA, 170 bp, Artificial sequence
  Stag2.4401_Arid2.166
  crRNA array
cgatttcttggctttatatatcttgtggaaaggacgaaacaccgtaatttctactaagtgtagattaatcgtccagtggtgtatataatttctactaagtgtagataaccgcgatctgggttttttttttttaagcttggcgtggatccgatatcaactagatcttgaga

SEQ ID NO: 8363 - DNA, 170 bp, Artificial sequence
  Stag2.4401_Arid2.172
  crRNA array
cgatttcttggctttatatatcttgtggaaaggacgaaacaccgtaatttctactaagtgtagattaatcgtccagtggtgtatataatttctactaagtgtagatctggacgagctgcggcagttttttttaagcttggcgtggatccgatatcaactagatcttgaga

SEQ ID NO: 8364 - DNA, 170 bp, Artificial sequence
  Stag2.4401_Atm.120
  crRNA array
cgatttcttggctttatatatcttgtggaaaggacgaaacaccgtaatttctactaagtgtagattaatcgtccagtggtgtatataatttctactaagtgtagatgacaggtagtcggcagctaattttttaagcttggcgtggatccgatatcaactagatcttgaga

SEQ ID NO: 8365 - DNA, 170 bp, Artificial sequence
  Stag2.4401_Atm.997
  crRNA array
cgatttcttggctttatatatcttgtggaaaggacgaaacaccgtaatttctactaagtgtagattaatcgtccagtggtgtatataatttctactaagtgtagatgagaaagtctccgaatcgttttttttaagcttggcgtggatccgatatcaactagatcttgaga

SEQ ID NO: 8366 - DNA, 170 bp, Artificial sequence
  Stag2.4401_Atrx.249
  crRNA array
cgatttcttggctttatatatcttgtggaaaggacgaaacaccgtaatttctactaagtgtagattaatcgtccagtggtgtatataatttctactaagtgtagattagccagtcgctcatatctcttttttaagcttggcgtggatccgatatcaactagatcttgaga

SEQ ID NO: 8367 - DNA, 170 bp, Artificial sequence
  Stag2.4401_Atrx.251
  crRNA array
cgatttcttggctttatatatcttgtggaaaggacgaaacaccgtaatttctactaagtgtagattaatcgtccagtggtgtatataatttctactaagtgtagatgccagtcgctcatatctctgttttttaagcttggcgtggatccgatatcaactagatcttgaga

SEQ ID NO: 8368 - DNA, 170 bp, Artificial sequence
  Stag2.4401_Bcor.203
  crRNA array
cgatttcttggctttatatatcttgtggaaaggacgaaacaccgtaatttctactaagtgtagattaatcgtccagtggtgtatataatttctactaagtgtagatccccggagcggagtccaggcttttttaagcttggcgtggatccgatatcaactagatcttgaga

SEQ ID NO: 8369 - DNA, 170 bp, Artificial sequence
  Stag2.4401_Bcor.475
  crRNA array
cgatttcttggctttatatatcttgtggaaaggacgaaacaccgtaatttctactaagtgtagattaatcgtccagtggtgtatataatttctactaagtgtagattgcaacccctctgtatgggattttttaagcttggcgtggatccgatatcaactagatcttgaga

SEQ ID NO: 8370 - DNA, 170 bp, Artificial sequence
  Stag2.4401_Brca1.112
  crRNA array
cgatttcttggctttatatatcttgtggaaaggacgaaacaccgtaatttctactaagtgtagattaatcgtccagtggtgtatataatttctactaagtgtagatctagacgctctgtggagactttttttaagcttggcgtggatccgatatcaactagatcttgaga

SEQ ID NO: 8371 - DNA, 170 bp, Artificial sequence
  Stag2.4401_Brca1.53
  crRNA array
cgatttcttggctttatatatcttgtggaaaggacgaaacaccgtaatttctactaagtgtagattaatcgtccagtggtgtatataatttctactaagtgtagataatgaggaggcgtcgatcatttttttaagcttggcgtggatccgatatcaactagatcttgaga

SEQ ID NO: 8372 - DNA, 170 bp, Artificial sequence
  Stag2.4401_Casp8.45
  crRNA array
cgatttcttggctttatatatcttgtggaaaggacgaaacaccgtaatttctactaagtgtagattaatcgtccagtggtgtatataatttctactaagtgtagatctaccgagatcctgtgaatgttttttaagcttggcgtggatccgatatcaactagatcttgaga

SEQ ID NO: 8373 - DNA, 170 bp, Artificial sequence
  Stag2.4401_Casp8.54
  crRNA array
cgatttcttggctttatatatcttgtggaaaggacgaaacaccgtaatttctactaagtgtagattaatcgtccagtggtgtatataatttctactaagtgtagatcagtgcagtcgtcgtaagatttttttaagcttggcgtggatccgatatcaactagatcttgaga

SEQ ID NO: 8374 - DNA, 170 bp, Artificial sequence
  Stag2.4401_Cbwd1.84
  crRNA array
cgatttcttggctttatatatcttgtggaaaggacgaaacaccgtaatttctactaagtgtagattaatcgtccagtggtgtatataatttctactaagtgtagatcacagcaggtaacatgccgcttttttaagcttggcgtggatccgatatcaactagatcttgaga

SEQ ID NO: 8375 - DNA, 170 bp, Artificial sequence
  Stag2.4401_Cbwd1.85
  crRNA array
cgatttcttggctttatatatcttgtggaaaggacgaaacaccgtaatttctactaagtgtagattaatcgtccagtggtgtatataatttctactaagtgtagatacagcaggtaacatgccgccttttttaagcttggcgtggatccgatatcaactagatcttgaga

SEQ ID NO: 8376 - DNA, 170 bp, Artificial sequence
  Stag2.4401_Cdh1.387
  crRNA array
cgatttcttggctttatatatcttgtggaaaggacgaaacaccgtaatttctactaagtgtagattaatcgtccagtggtgtatataatttctactaagtgtagatctcggcgtctgccgggtccgttttttaagcttggcgtggatccgatatcaactagatcttgaga

SEQ ID NO: 8377 - DNA, 170 bp, Artificial sequence
  Stag2.4401_Cdh1.58
  crRNA array
cgatttcttggctttatatatcttgtggaaaggacgaaacaccgtaatttctactaagtgtagattaatcgtccagtggtgtatataatttctactaagtgtagatctcgtccgcgcccgggactcttttttaagcttggcgtggatccgatatcaactagatcttgaga

SEQ ID NO: 8378 - DNA, 170 bp, Artificial sequence
  Stag2.4401_Cdkn2a.647
  crRNA array
cgatttcttggctttatatatcttgtggaaaggacgaaacaccgtaatttctactaagtgtagattaatcgtccagtggtgtatataatttctactaagtgtagatgcaatcacgggagggagcagttttttaagcttggcgtggatccgatatcaactagatcttgaga

SEQ ID NO: 8379 - DNA, 170 bp, Artificial sequence
  Stag2.4401_Cdkn2a.648
  crRNA array
cgatttcttggctttatatatcttgtggaaaggacgaaacaccgtaatttctactaagtgtagattaatcgtccagtggtgtatataatttctactaagtgtagatcaatcacgggagggagcagattttttaagcttggcgtggatccgatatcaactagatcttgaga

SEQ ID NO: 8380 - DNA, 170 bp, Artificial sequence
  Stag2.4401_Cic.162
  crRNA array
cgatttcttggctttatatatcttgtggaaaggacgaaacaccgtaatttctactaagtgtagattaatcgtccagtggtgtatataatttctactaagtgtagatcgcaggcgcgcccggcggagttttttaagcttggcgtggatccgatatcaactagatcttgaga

SEQ ID NO: 8381 - DNA, 170 bp, Artificial sequence
  Stag2.4401_Cic.164
  crRNA array
cgatttcttggctttatatatcttgtggaaaggacgaaacaccgtaatttctactaagtgtagattaatcgtccagtggtgtatataatttctactaagtgtagatcgggccctgggccggcggctttttttaagcttggcgtggatccgatatcaactagatcttgaga

SEQ ID NO: 8382 - DNA, 170 bp, Artificial sequence
  Stag2.4401_Ctcf.229
  crRNA array
cgatttcttggctttatatatcttgtggaaaggacgaaacaccgtaatttctactaagtgtagattaatcgtccagtggtgtatataatttctactaagtgtagatggctggtggctgatagtctgttttttaagcttggcgtggatccgatatcaactagatcttgaga

SEQ ID NO: 8383 - DNA, 170 bp, Artificial sequence
  Stag2.4401_Ctcf.809
  crRNA array
cgatttcttggctttatatatcttgtggaaaggacgaaacaccgtaatttctactaagtgtagattaatcgtccagtggtgtatataatttctactaagtgtagataagcgctatcatgatcccaattttttaagcttggcgtggatccgatatcaactagatcttgaga

SEQ ID NO: 8384 - DNA, 170 bp, Artificial sequence
  Stag2.4401_Elf3.826
  crRNA array
cgatttcttggctttatatatcttgtggaaaggacgaaacaccgtaatttctactaagtgtagattaatcgtccagtggtgtatataatttctactaagtgtagattccgagacatcctaatccacttttttaagcttggcgtggatccgatatcaactagatcttgaga

SEQ ID NO: 8385 - DNA, 170 bp, Artificial sequence
  Stag2.4401_Elf3.983
  crRNA array
cgatttcttggctttatatatcttgtggaaaggacgaaacaccgtaatttctactaagtgtagattaatcgtccagtggtgtatataatttctactaagtgtagattaggccccctaactggaccattttttaagcttggcgtggatccgatatcaactagatcttgaga

SEQ ID NO: 8386 - DNA, 170 bp, Artificial sequence
  Stag2.4401_Ep300.310
  crRNA array
cgatttcttggctttatatatcttgtggaaaggacgaaacaccgtaatttctactaagtgtagattaatcgtccagtggtgtatataatttctactaagtgtagatatggtacgacagtgaggaagttttttaagcttggcgtggatccgatatcaactagatcttgaga

SEQ ID NO: 8387 - DNA, 170 bp, Artificial sequence
  Stag2.4401_Ep300.587
  crRNA array
cgatttcttggctttatatatcttgtggaaaggacgaaacaccgtaatttctactaagtgtagattaatcgtccagtggtgtatataatttctactaagtgtagatcgccccggggcccccaaccattttttaagcttggcgtggatccgatatcaactagatcttgaga

SEQ ID NO: 8388 - DNA, 170 bp, Artificial sequence
  Stag2.4401_Epha2.126
  crRNA array
cgatttcttggctttatatatcttgtggaaaggacgaaacaccgtaatttctactaagtgtagattaatcgtccagtggtgtatataatttctactaagtgtagatcctgtgccgccgcggccgccttttttaagcttggcgtggatccgatatcaactagatcttgaga

SEQ ID NO: 8389 - DNA, 170 bp, Artificial sequence
  Stag2.4401_Epha2.5
  crRNA array
cgatttcttggctttatatatcttgtggaaaggacgaaacaccgtaatttctactaagtgtagattaatcgtccagtggtgtatataatttctactaagtgtagatcatgagctggcgccacccggttttttaagcttggcgtggatccgatatcaactagatcttgaga

SEQ ID NO: 8390 - DNA, 170 bp, Artificial sequence
  Stag2.4401_Fat1.105
  crRNA array
cgatttcttggctttatatatcttgtggaaaggacgaaacaccgtaatttctactaagtgtagattaatcgtccagtggtgtatataatttctactaagtgtagataactcgaggtgacaacaagtttttttaagcttggcgtggatccgatatcaactagatcttgaga

SEQ ID NO: 8391 - DNA, 170 bp, Artificial sequence
  Stag2.4401_Fat1.122
  crRNA array
cgatttcttggctttatatatcttgtggaaaggacgaaacaccgtaatttctactaagtgtagattaatcgtccagtggtgtatataatttctactaagtgtagatccatcgacatggaaacgggattttttaagcttggcgtggatccgatatcaactagatcttgaga

SEQ ID NO: 8392 - DNA, 170 bp, Artificial sequence
  Stag2.4401_Fbxw7.21
  crRNA array
cgatttcttggctttatatatcttgtggaaaggacgaaacaccgtaatttctactaagtgtagattaatcgtccagtggtgtatataatttctactaagtgtagattaatgtgccgtagaaacccattttttaagcttggcgtggatccgatatcaactagatcttgaga

SEQ ID NO: 8393 - DNA, 170 bp, Artificial sequence
  Stag2.4401_Fbxw7.23
  crRNA array
cgatttcttggctttatatatcttgtggaaaggacgaaacaccgtaatttctactaagtgtagattaatcgtccagtggtgtatataatttctactaagtgtagatatgtgccgtagaaacccatattttttaagcttggcgtggatccgatatcaactagatcttgaga

SEQ ID NO: 8394 - DNA, 170 bp, Artificial sequence
  Stag2.4401_Gata3.34
  crRNA array
cgatttcttggctttatatatcttgtggaaaggacgaaacaccgtaatttctactaagtgtagattaatcgtccagtggtgtatataatttctactaagtgtagatctaaactatcccgcaaagatttttttaagcttggcgtggatccgatatcaactagatcttgaga

SEQ ID NO: 8395 - DNA, 170 bp, Artificial sequence
  Stag2.4401_Gata3.47
  crRNA array
cgatttcttggctttatatatcttgtggaaaggacgaaacaccgtaatttctactaagtgtagattaatcgtccagtggtgtatataatttctactaagtgtagatcgtagtaggacgggacgtggttttttaagcttggcgtggatccgatatcaactagatcttgaga

SEQ ID NO: 8396 - DNA, 170 bp, Artificial sequence
  Stag2.4401_H2-Q2.1
  crRNA array
cgatttcttggctttatatatcttgtggaaaggacgaaacaccgtaatttctactaagtgtagattaatcgtccagtggtgtatataatttctactaagtgtagatagggcggccaccaacagcagttttttaagcttggcgtggatccgatatcaactagatcttgaga

SEQ ID NO: 8397 - DNA, 170 bp, Artificial sequence
  Stag2.4401_H2-Q2.2
  crRNA array
cgatttcttggctttatatatcttgtggaaaggacgaaacaccgtaatttctactaagtgtagattaatcgtccagtggtgtatataatttctactaagtgtagattaacctgcgcccgctgctgattttttaagcttggcgtggatccgatatcaactagatcttgaga

SEQ ID NO: 8398 - DNA, 170 bp, Artificial sequence
  Stag2.4401_Kdm5c.1878
  crRNA array
cgatttcttggctttatatatcttgtggaaaggacgaaacaccgtaatttctactaagtgtagattaatcgtccagtggtgtatataatttctactaagtgtagatagagcacggcacccgcccccttttttaagcttggcgtggatccgatatcaactagatcttgaga

SEQ ID NO: 8399 - DNA, 170 bp, Artificial sequence
  Stag2.4401_Kdm5c.1879
  crRNA array
cgatttcttggctttatatatcttgtggaaaggacgaaacaccgtaatttctactaagtgtagattaatcgtccagtggtgtatataatttctactaagtgtagatgagcacggcacccgccccccttttttaagcttggcgtggatccgatatcaactagatcttgaga

SEQ ID NO: 8400 - DNA, 170 bp, Artificial sequence
  Stag2.4401_Kdm6a.56
  crRNA array
cgatttcttggctttatatatcttgtggaaaggacgaaacaccgtaatttctactaagtgtagattaatcgtccagtggtgtatataatttctactaagtgtagattcgctgccgcctctcgcggcttttttaagcttggcgtggatccgatatcaactagatcttgaga

SEQ ID NO: 8401 - DNA, 170 bp, Artificial sequence
  Stag2.4401_Kdm6a.57
  crRNA array
cgatttcttggctttatatatcttgtggaaaggacgaaacaccgtaatttctactaagtgtagattaatcgtccagtggtgtatataatttctactaagtgtagatcgctgccgcctctcgcggcattttttaagcttggcgtggatccgatatcaactagatcttgaga

SEQ ID NO: 8402 - DNA, 170 bp, Artificial sequence
  Stag2.4401_Kmt2b.265
  crRNA array
cgatttcttggctttatatatcttgtggaaaggacgaaacaccgtaatttctactaagtgtagattaatcgtccagtggtgtatataatttctactaagtgtagatccccaagtgaagcccacctgttttttaagcttggcgtggatccgatatcaactagatcttgaga

SEQ ID NO: 8403 - DNA, 170 bp, Artificial sequence
  Stag2.4401_Kmt2b.298
  crRNA array
cgatttcttggctttatatatcttgtggaaaggacgaaacaccgtaatttctactaagtgtagattaatcgtccagtggtgtatataatttctactaagtgtagattccggcagggaccggctggcttttttaagcttggcgtggatccgatatcaactagatcttgaga

SEQ ID NO: 8404 - DNA, 170 bp, Artificial sequence
  Stag2.4401_Kmt2c.1962
  crRNA array
cgatttcttggctttatatatcttgtggaaaggacgaaacaccgtaatttctactaagtgtagattaatcgtccagtggtgtatataatttctactaagtgtagatgtgacgatctgtgccacaagttttttaagcttggcgtggatccgatatcaactagatcttgaga

SEQ ID NO: 8405 - DNA, 170 bp, Artificial sequence
  Stag2.4401_Kmt2c.2236
  crRNA array
cgatttcttggctttatatatcttgtggaaaggacgaaacaccgtaatttctactaagtgtagattaatcgtccagtggtgtatataatttctactaagtgtagatactcgacctccacctccctattttttaagcttggcgtggatccgatatcaactagatcttgaga

SEQ ID NO: 8406 - DNA, 170 bp, Artificial sequence
  Stag2.4401_Kmt2d.316
  crRNA array
cgatttcttggctttatatatcttgtggaaaggacgaaacaccgtaatttctactaagtgtagattaatcgtccagtggtgtatataatttctactaagtgtagatactccaggccacccaggtggttttttaagcttggcgtggatccgatatcaactagatcttgaga

SEQ ID NO: 8407 - DNA, 170 bp, Artificial sequence
  Stag2.4401_Kmt2d.416
  crRNA array
cgatttcttggctttatatatcttgtggaaaggacgaaacaccgtaatttctactaagtgtagattaatcgtccagtggtgtatataatttctactaagtgtagattaaacccccgggggaagggtttttttaagcttggcgtggatccgatatcaactagatcttgaga

SEQ ID NO: 8408 - DNA, 170 bp, Artificial sequence
  Stag2.4401_Map2k4.119
  crRNA array
cgatttcttggctttatatatcttgtggaaaggacgaaacaccgtaatttctactaagtgtagattaatcgtccagtggtgtatataatttctactaagtgtagattgctgtgtgggcggccacatttttttaagcttggcgtggatccgatatcaactagatcttgaga

SEQ ID NO: 8409 - DNA, 170 bp, Artificial sequence
  Stag2.4401_Map2k4.1261
  crRNA array
cgatttcttggctttatatatcttgtggaaaggacgaaacaccgtaatttctactaagtgtagattaatcgtccagtggtgtatataatttctactaagtgtagatgatgtagtaatgcggagtagttttttaagcttggcgtggatccgatatcaactagatcttgaga

SEQ ID NO: 8410 - DNA, 170 bp, Artificial sequence
  Stag2.4401_Map3k1.235
  crRNA array
cgatttcttggctttatatatcttgtggaaaggacgaaacaccgtaatttctactaagtgtagattaatcgtccagtggtgtatataatttctactaagtgtagataaaacgctactgatcgatcgttttttaagcttggcgtggatccgatatcaactagatcttgaga

SEQ ID NO: 8411 - DNA, 170 bp, Artificial sequence
  Stag2.4401_Map3k1.3838
  crRNA array
cgatttcttggctttatatatcttgtggaaaggacgaaacaccgtaatttctactaagtgtagattaatcgtccagtggtgtatataatttctactaagtgtagatccaacaacagggccccactattttttaagcttggcgtggatccgatatcaactagatcttgaga

SEQ ID NO: 8412 - DNA, 170 bp, Artificial sequence
  Stag2.4401_Mga.1655
  crRNA array
cgatttcttggctttatatatcttgtggaaaggacgaaacaccgtaatttctactaagtgtagattaatcgtccagtggtgtatataatttctactaagtgtagatcgagaagtggagagcatattttttttaagcttggcgtggatccgatatcaactagatcttgaga

SEQ ID NO: 8413 - DNA, 170 bp, Artificial sequence
  Stag2.4401_Mga.93
  crRNA array
cgatttcttggctttatatatcttgtggaaaggacgaaacaccgtaatttctactaagtgtagattaatcgtccagtggtgtatataatttctactaagtgtagatgagaaggctccccataatgtttttttaagcttggcgtggatccgatatcaactagatcttgaga

SEQ ID NO: 8414 - DNA, 170 bp, Artificial sequence
  Stag2.4401_Nf1.746
  crRNA array
cgatttcttggctttatatatcttgtggaaaggacgaaacaccgtaatttctactaagtgtagattaatcgtccagtggtgtatataatttctactaagtgtagattaagcataatgatgatgccattttttaagcttggcgtggatccgatatcaactagatcttgaga

SEQ ID NO: 8415 - DNA, 170 bp, Artificial sequence
  Stag2.4401_Nf1.97
  crRNA array
cgatttcttggctttatatatcttgtggaaaggacgaaacaccgtaatttctactaagtgtagattaatcgtccagtggtgtatataatttctactaagtgtagatagcccgctacatgctgatgcttttttaagcttggcgtggatccgatatcaactagatcttgaga

SEQ ID NO: 8416 - DNA, 170 bp, Artificial sequence
  Stag2.4401_Nf2.356
  crRNA array
cgatttcttggctttatatatcttgtggaaaggacgaaacaccgtaatttctactaagtgtagattaatcgtccagtggtgtatataatttctactaagtgtagatcggagtcatctgatagagatttttttaagcttggcgtggatccgatatcaactagatcttgaga

SEQ ID NO: 8417 - DNA, 170 bp, Artificial sequence
  Stag2.4401_Nf2.768
  crRNA array
cgatttcttggctttatatatcttgtggaaaggacgaaacaccgtaatttctactaagtgtagattaatcgtccagtggtgtatataatttctactaagtgtagatccgaagccccagtgtccggcttttttaagcttggcgtggatccgatatcaactagatcttgaga

SEQ ID NO: 8418 - DNA, 170 bp, Artificial sequence
  Stag2.4401_Notch1.1849
  crRNA array
cgatttcttggctttatatatcttgtggaaaggacgaaacaccgtaatttctactaagtgtagattaatcgtccagtggtgtatataatttctactaagtgtagatctggcgggtgggcggcgctgttttttaagcttggcgtggatccgatatcaactagatcttgaga

SEQ ID NO: 8419 - DNA, 170 bp, Artificial sequence
  Stag2.4401_Notch1.649
  crRNA array
cgatttcttggctttatatatcttgtggaaaggacgaaacaccgtaatttctactaagtgtagattaatcgtccagtggtgtatataatttctactaagtgtagattgggccaacgatgccaggacttttttaagcttggcgtggatccgatatcaactagatcttgaga

SEQ ID NO: 8420 - DNA, 170 bp, Artificial sequence
  Stag2.4401_Nsd1.70
  crRNA array
cgatttcttggctttatatatcttgtggaaaggacgaaacaccgtaatttctactaagtgtagattaatcgtccagtggtgtatataatttctactaagtgtagatactggtgtggacgatgcagattttttaagcttggcgtggatccgatatcaactagatcttgaga

SEQ ID NO: 8421 - DNA, 170 bp, Artificial sequence
  Stag2.4401_Nsd1.90
  crRNA array
cgatttcttggctttatatatcttgtggaaaggacgaaacaccgtaatttctactaagtgtagattaatcgtccagtggtgtatataatttctactaagtgtagataggagctaacggcaagaatgttttttaagcttggcgtggatccgatatcaactagatcttgaga

SEQ ID NO: 8422 - DNA, 170 bp, Artificial sequence
  Stag2.4401_Pbrm1.1236
  crRNA array
cgatttcttggctttatatatcttgtggaaaggacgaaacaccgtaatttctactaagtgtagattaatcgtccagtggtgtatataatttctactaagtgtagatgccgataaaaccaacagccgttttttaagcttggcgtggatccgatatcaactagatcttgaga

SEQ ID NO: 8423 - DNA, 170 bp, Artificial sequence
  Stag2.4401_Pbrm1.969
  crRNA array
cgatttcttggctttatatatcttgtggaaaggacgaaacaccgtaatttctactaagtgtagattaatcgtccagtggtgtatataatttctactaagtgtagatgagccctaatgaacagctcattttttaagcttggcgtggatccgatatcaactagatcttgaga

SEQ ID NO: 8424 - DNA, 170 bp, Artificial sequence
  Stag2.4401_Pik3r1.76
  crRNA array
cgatttcttggctttatatatcttgtggaaaggacgaaacaccgtaatttctactaagtgtagattaatcgtccagtggtgtatataatttctactaagtgtagataaaacctatacggcccgcacttttttaagcttggcgtggatccgatatcaactagatcttgaga

SEQ ID NO: 8425 - DNA, 170 bp, Artificial sequence
  Stag2.4401_Pik3r1.77
  crRNA array
cgatttcttggctttatatatcttgtggaaaggacgaaacaccgtaatttctactaagtgtagattaatcgtccagtggtgtatataatttctactaagtgtagataaacctatacggcccgcactttttttaagcttggcgtggatccgatatcaactagatcttgaga

SEQ ID NO: 8426 - DNA, 170 bp, Artificial sequence
  Stag2.4401_Pten.240
  crRNA array
cgatttcttggctttatatatcttgtggaaaggacgaaacaccgtaatttctactaagtgtagattaatcgtccagtggtgtatataatttctactaagtgtagattgcatacgctatagctgcttttttttaagcttggcgtggatccgatatcaactagatcttgaga

SEQ ID NO: 8427 - DNA, 170 bp, Artificial sequence
  Stag2.4401_Pten.265
  crRNA array
cgatttcttggctttatatatcttgtggaaaggacgaaacaccgtaatttctactaagtgtagattaatcgtccagtggtgtatataatttctactaagtgtagataagcgtggtgcgtgacgcacttttttaagcttggcgtggatccgatatcaactagatcttgaga

SEQ ID NO: 8428 - DNA, 170 bp, Artificial sequence
  Stag2.4401_Rasa1.1478
  crRNA array
cgatttcttggctttatatatcttgtggaaaggacgaaacaccgtaatttctactaagtgtagattaatcgtccagtggtgtatataatttctactaagtgtagatcgataatggtctatgatgtcttttttaagcttggcgtggatccgatatcaactagatcttgaga

SEQ ID NO: 8429 - DNA, 170 bp, Artificial sequence
  Stag2.4401_Rasa1.223
  crRNA array
cgatttcttggctttatatatcttgtggaaaggacgaaacaccgtaatttctactaagtgtagattaatcgtccagtggtgtatataatttctactaagtgtagattccatggagtatcgtgctcgttttttaagcttggcgtggatccgatatcaactagatcttgaga

SEQ ID NO: 8430 - DNA, 170 bp, Artificial sequence
  Stag2.4401_Rb1.211
  crRNA array
cgatttcttggctttatatatcttgtggaaaggacgaaacaccgtaatttctactaagtgtagattaatcgtccagtggtgtatataatttctactaagtgtagattctgacatgatcgggtacctttttttaagcttggcgtggatccgatatcaactagatcttgaga

SEQ ID NO: 8431 - DNA, 170 bp, Artificial sequence
  Stag2.4401_Rb1.394
  crRNA array
cgatttcttggctttatatatcttgtggaaaggacgaaacaccgtaatttctactaagtgtagattaatcgtccagtggtgtatataatttctactaagtgtagatagaaatctcgaagcaggatcttttttaagcttggcgtggatccgatatcaactagatcttgaga

SEQ ID NO: 8432 - DNA, 170 bp, Artificial sequence
  Stag2.4401_Rbm10.5
  crRNA array
cgatttcttggctttatatatcttgtggaaaggacgaaacaccgtaatttctactaagtgtagattaatcgtccagtggtgtatataatttctactaagtgtagatacgaaacctgaacccacacattttttaagcttggcgtggatccgatatcaactagatcttgaga

SEQ ID NO: 8433 - DNA, 170 bp, Artificial sequence
  Stag2.4401_Rbm10.6
  crRNA array
cgatttcttggctttatatatcttgtggaaaggacgaaacaccgtaatttctactaagtgtagattaatcgtccagtggtgtatataatttctactaagtgtagatcgaaacctgaacccacacagttttttaagcttggcgtggatccgatatcaactagatcttgaga

SEQ ID NO: 8434 - DNA, 170 bp, Artificial sequence
  Stag2.4401_Rnf43.1920
  crRNA array
cgatttcttggctttatatatcttgtggaaaggacgaaacaccgtaatttctactaagtgtagattaatcgtccagtggtgtatataatttctactaagtgtagatatccccgtgccgtggactccttttttaagcttggcgtggatccgatatcaactagatcttgaga

SEQ ID NO: 8435 - DNA, 170 bp, Artificial sequence
  Stag2.4401_Rnf43.39
  crRNA array
cgatttcttggctttatatatcttgtggaaaggacgaaacaccgtaatttctactaagtgtagattaatcgtccagtggtgtatataatttctactaagtgtagatcaaggggatcactctgataattttttaagcttggcgtggatccgatatcaactagatcttgaga

SEQ ID NO: 8436 - DNA, 170 bp, Artificial sequence
  Stag2.4401_Runx1.204
  crRNA array
cgatttcttggctttatatatcttgtggaaaggacgaaacaccgtaatttctactaagtgtagattaatcgtccagtggtgtatataatttctactaagtgtagattaaataagtccagccgttttttttttaagcttggcgtggatccgatatcaactagatcttgaga

SEQ ID NO: 8437 - DNA, 170 bp, Artificial sequence
  Stag2.4401_Runx1.81
  crRNA array
cgatttcttggctttatatatcttgtggaaaggacgaaacaccgtaatttctactaagtgtagattaatcgtccagtggtgtatataatttctactaagtgtagataggacgcgtatgggaattttttttttaagcttggcgtggatccgatatcaactagatcttgaga

SEQ ID NO: 8438 - DNA, 170 bp, Artificial sequence
  Stag2.4401_Setd2.143
  crRNA array
cgatttcttggctttatatatcttgtggaaaggacgaaacaccgtaatttctactaagtgtagattaatcgtccagtggtgtatataatttctactaagtgtagatgcacaaccacaacagactggttttttaagcttggcgtggatccgatatcaactagatcttgaga

SEQ ID NO: 8439 - DNA, 170 bp, Artificial sequence
  Stag2.4401_Setd2.508
  crRNA array
cgatttcttggctttatatatcttgtggaaaggacgaaacaccgtaatttctactaagtgtagattaatcgtccagtggtgtatataatttctactaagtgtagattacgatcccgagcacccgacttttttaagcttggcgtggatccgatatcaactagatcttgaga

SEQ ID NO: 8440 - DNA, 170 bp, Artificial sequence
  Stag2.4401_Smad4.3038
  crRNA array
cgatttcttggctttatatatcttgtggaaaggacgaaacaccgtaatttctactaagtgtagattaatcgtccagtggtgtatataatttctactaagtgtagatatctgcggcagtgtcaccggttttttaagcttggcgtggatccgatatcaactagatcttgaga

SEQ ID NO: 8441 - DNA, 170 bp, Artificial sequence
  Stag2.4401_Smad4.39
  crRNA array
cgatttcttggctttatatatcttgtggaaaggacgaaacaccgtaatttctactaagtgtagattaatcgtccagtggtgtatataatttctactaagtgtagatagtcaaacgcatactgacaattttttaagcttggcgtggatccgatatcaactagatcttgaga

SEQ ID NO: 8442 - DNA, 170 bp, Artificial sequence
  Stag2.4401_Tbl1xr1.1
  crRNA array
cgatttcttggctttatatatcttgtggaaaggacgaaacaccgtaatttctactaagtgtagattaatcgtccagtggtgtatataatttctactaagtgtagatggatgcgcatactggtgaagttttttaagcttggcgtggatccgatatcaactagatcttgaga

SEQ ID NO: 8443 - DNA, 170 bp, Artificial sequence
  Stag2.4401_Tbl1xr1.83
  crRNA array
cgatttcttggctttatatatcttgtggaaaggacgaaacaccgtaatttctactaagtgtagattaatcgtccagtggtgtatataatttctactaagtgtagatatggtcgacccatcgagtctttttttaagcttggcgtggatccgatatcaactagatcttgaga

SEQ ID NO: 8444 - DNA, 170 bp, Artificial sequence
  Stag2.4401_Tgfbr2.290
  crRNA array
cgatttcttggctttatatatcttgtggaaaggacgaaacaccgtaatttctactaagtgtagattaatcgtccagtggtgtatataatttctactaagtgtagatcctctcggcgcccgggtaaattttttaagcttggcgtggatccgatatcaactagatcttgaga

SEQ ID NO: 8445 - DNA, 170 bp, Artificial sequence
  Stag2.4401_Tgfbr2.292
  crRNA array
cgatttcttggctttatatatcttgtggaaaggacgaaacaccgtaatttctactaagtgtagattaatcgtccagtggtgtatataatttctactaagtgtagatcccgggcgccgagagggaaattttttaagcttggcgtggatccgatatcaactagatcttgaga

SEQ ID NO: 8446 - DNA, 170 bp, Artificial sequence
  Stag2.4401_Trp53.4
  crRNA array
cgatttcttggctttatatatcttgtggaaaggacgaaacaccgtaatttctactaagtgtagattaatcgtccagtggtgtatataatttctactaagtgtagatccctgaactgcccccagggattttttaagcttggcgtggatccgatatcaactagatcttgaga

SEQ ID NO: 8447 - DNA, 170 bp, Artificial sequence
  Stag2.4401_Trp53.528
  crRNA array
cgatttcttggctttatatatcttgtggaaaggacgaaacaccgtaatttctactaagtgtagattaatcgtccagtggtgtatataatttctactaagtgtagatgctgggccagcagagacctgttttttaagcttggcgtggatccgatatcaactagatcttgaga

SEQ ID NO: 8448 - DNA, 170 bp, Artificial sequence
  Stag2.4401_Vhl.1
  crRNA array
cgatttcttggctttatatatcttgtggaaaggacgaaacaccgtaatttctactaagtgtagattaatcgtccagtggtgtatataatttctactaagtgtagatagggctcccggcggccatttttttttaagcttggcgtggatccgatatcaactagatcttgaga

SEQ ID NO: 8449 - DNA, 170 bp, Artificial sequence
  Stag2.4401_Vhl.151
  crRNA array
cgatttcttggctttatatatcttgtggaaaggacgaaacaccgtaatttctactaagtgtagattaatcgtccagtggtgtatataatttctactaagtgtagattagagcactcacccgagggattttttaagcttggcgtggatccgatatcaactagatcttgaga

SEQ ID NO: 8450 - DNA, 170 bp, Artificial sequence
  Stag2.4401_Zc3h13.1387
  crRNA array
cgatttcttggctttatatatcttgtggaaaggacgaaacaccgtaatttctactaagtgtagattaatcgtccagtggtgtatataatttctactaagtgtagatgtgacgccggtcatgtgactttttttaagcttggcgtggatccgatatcaactagatcttgaga

SEQ ID NO: 8451 - DNA, 170 bp, Artificial sequence
  Stag2.4401_Zc3h13.1777
  crRNA array
cgatttcttggctttatatatcttgtggaaaggacgaaacaccgtaatttctactaagtgtagattaatcgtccagtggtgtatataatttctactaagtgtagatgatgctgccagtgtagcggcttttttaagcttggcgtggatccgatatcaactagatcttgaga

SEQ ID NO: 8452 - DNA, 170 bp, Artificial sequence
  Tbl1xr1.1_Acvr2a.155
  crRNA array
cgatttcttggctttatatatcttgtggaaaggacgaaacaccgtaatttctactaagtgtagatggatgcgcatactggtgaagtaatttctactaagtgtagatggacctggctaatcaagtatttttttaagcttggcgtggatccgatatcaactagatcttgaga

SEQ ID NO: 8453 - DNA, 170 bp, Artificial sequence
  Tbl1xr1.1_Acvr2a.70
  crRNA array
cgatttcttggctttatatatcttgtggaaaggacgaaacaccgtaatttctactaagtgtagatggatgcgcatactggtgaagtaatttctactaagtgtagatcccgaggcgccggagaagccttttttaagcttggcgtggatccgatatcaactagatcttgaga

SEQ ID NO: 8454 - DNA, 170 bp, Artificial sequence
  Tbl1xr1.1_Apc.21
  crRNA array
cgatttcttggctttatatatcttgtggaaaggacgaaacaccgtaatttctactaagtgtagatggatgcgcatactggtgaagtaatttctactaagtgtagatgtgatccacacgtgtagctgttttttaagcttggcgtggatccgatatcaactagatcttgaga

SEQ ID NO: 8455 - DNA, 170 bp, Artificial sequence
  Tbl1xr1.1_Apc.867
  crRNA array
cgatttcttggctttatatatcttgtggaaaggacgaaacaccgtaatttctactaagtgtagatggatgcgcatactggtgaagtaatttctactaagtgtagatcagtcccaggcggcggaagcttttttaagcttggcgtggatccgatatcaactagatcttgaga

SEQ ID NO: 8456 - DNA, 170 bp, Artificial sequence
  Tbl1xr1.1_Arid1a.2
  crRNA array
cgatttcttggctttatatatcttgtggaaaggacgaaacaccgtaatttctactaagtgtagatggatgcgcatactggtgaagtaatttctactaagtgtagatcccgcgcccccgtcctggggttttttaagcttggcgtggatccgatatcaactagatcttgaga

SEQ ID NO: 8457 - DNA, 170 bp, Artificial sequence
  Tbl1xr1.1_Arid1a.5
  crRNA array
cgatttcttggctttatatatcttgtggaaaggacgaaacaccgtaatttctactaagtgtagatggatgcgcatactggtgaagtaatttctactaagtgtagatcccgcgctcggccgctgccgttttttaagcttggcgtggatccgatatcaactagatcttgaga

SEQ ID NO: 8458 - DNA, 170 bp, Artificial sequence
  Tbl1xr1.1_Arid2.166
  crRNA array
cgatttcttggctttatatatcttgtggaaaggacgaaacaccgtaatttctactaagtgtagatggatgcgcatactggtgaagtaatttctactaagtgtagataaccgcgatctgggttttttttttttaagcttggcgtggatccgatatcaactagatcttgaga

SEQ ID NO: 8459 - DNA, 170 bp, Artificial sequence
  Tbl1xr1.1_Arid2.172
  crRNA array
cgatttcttggctttatatatcttgtggaaaggacgaaacaccgtaatttctactaagtgtagatggatgcgcatactggtgaagtaatttctactaagtgtagatctggacgagctgcggcagttttttttaagcttggcgtggatccgatatcaactagatcttgaga

SEQ ID NO: 8460 - DNA, 170 bp, Artificial sequence
  Tbl1xr1.1_Atm.120
  crRNA array
cgatttcttggctttatatatcttgtggaaaggacgaaacaccgtaatttctactaagtgtagatggatgcgcatactggtgaagtaatttctactaagtgtagatgacaggtagtcggcagctaattttttaagcttggcgtggatccgatatcaactagatcttgaga

SEQ ID NO: 8461 - DNA, 170 bp, Artificial sequence
  Tbl1xr1.1_Atm.997
  crRNA array
cgatttcttggctttatatatcttgtggaaaggacgaaacaccgtaatttctactaagtgtagatggatgcgcatactggtgaagtaatttctactaagtgtagatgagaaagtctccgaatcgttttttttaagcttggcgtggatccgatatcaactagatcttgaga

SEQ ID NO: 8462 - DNA, 170 bp, Artificial sequence
  Tbl1xr1.1_Atrx.249
  crRNA array
cgatttcttggctttatatatcttgtggaaaggacgaaacaccgtaatttctactaagtgtagatggatgcgcatactggtgaagtaatttctactaagtgtagattagccagtcgctcatatctcttttttaagcttggcgtggatccgatatcaactagatcttgaga

SEQ ID NO: 8463 - DNA, 170 bp, Artificial sequence
  Tbl1xr1.1_Atrx.251
  crRNA array
cgatttcttggctttatatatcttgtggaaaggacgaaacaccgtaatttctactaagtgtagatggatgcgcatactggtgaagtaatttctactaagtgtagatgccagtcgctcatatctctgttttttaagcttggcgtggatccgatatcaactagatcttgaga

SEQ ID NO: 8464 - DNA, 170 bp, Artificial sequence
  Tbl1xr1.1_Bcor.203
  crRNA array
cgatttcttggctttatatatcttgtggaaaggacgaaacaccgtaatttctactaagtgtagatggatgcgcatactggtgaagtaatttctactaagtgtagatccccggagcggagtccaggcttttttaagcttggcgtggatccgatatcaactagatcttgaga

SEQ ID NO: 8465 - DNA, 170 bp, Artificial sequence
  Tbl1xr1.1_Bcor.475
  crRNA array
cgatttcttggctttatatatcttgtggaaaggacgaaacaccgtaatttctactaagtgtagatggatgcgcatactggtgaagtaatttctactaagtgtagattgcaacccctctgtatgggattttttaagcttggcgtggatccgatatcaactagatcttgaga

SEQ ID NO: 8466 - DNA, 170 bp, Artificial sequence
  Tbl1xr1.1_Brca1.112
  crRNA array
cgatttcttggctttatatatcttgtggaaaggacgaaacaccgtaatttctactaagtgtagatggatgcgcatactggtgaagtaatttctactaagtgtagatctagacgctctgtggagactttttttaagcttggcgtggatccgatatcaactagatcttgaga

SEQ ID NO: 8467 - DNA, 170 bp, Artificial sequence
  Tbl1xr1.1_Brca1.53
  crRNA array
cgatttcttggctttatatatcttgtggaaaggacgaaacaccgtaatttctactaagtgtagatggatgcgcatactggtgaagtaatttctactaagtgtagataatgaggaggcgtcgatcatttttttaagcttggcgtggatccgatatcaactagatcttgaga

SEQ ID NO: 8468 - DNA, 170 bp, Artificial sequence
  Tbl1xr1.1_Casp8.45
  crRNA array
cgatttcttggctttatatatcttgtggaaaggacgaaacaccgtaatttctactaagtgtagatggatgcgcatactggtgaagtaatttctactaagtgtagatctaccgagatcctgtgaatgttttttaagcttggcgtggatccgatatcaactagatcttgaga

SEQ ID NO: 8469 - DNA, 170 bp, Artificial sequence
  Tbl1xr1.1_Casp8.54
  crRNA array
cgatttcttggctttatatatcttgtggaaaggacgaaacaccgtaatttctactaagtgtagatggatgcgcatactggtgaagtaatttctactaagtgtagatcagtgcagtcgtcgtaagatttttttaagcttggcgtggatccgatatcaactagatcttgaga

SEQ ID NO: 8470 - DNA, 170 bp, Artificial sequence
  Tbl1xr1.1_Cbwd1.84
  crRNA array
cgatttcttggctttatatatcttgtggaaaggacgaaacaccgtaatttctactaagtgtagatggatgcgcatactggtgaagtaatttctactaagtgtagatcacagcaggtaacatgccgcttttttaagcttggcgtggatccgatatcaactagatcttgaga

SEQ ID NO: 8471 - DNA, 170 bp, Artificial sequence
  Tbl1xr1.1_Cbwd1.85
  crRNA array
cgatttcttggctttatatatcttgtggaaaggacgaaacaccgtaatttctactaagtgtagatggatgcgcatactggtgaagtaatttctactaagtgtagatacagcaggtaacatgccgccttttttaagcttggcgtggatccgatatcaactagatcttgaga

SEQ ID NO: 8472 - DNA, 170 bp, Artificial sequence
  Tbl1xr1.1_Cdh1.387
  crRNA array
cgatttcttggctttatatatcttgtggaaaggacgaaacaccgtaatttctactaagtgtagatggatgcgcatactggtgaagtaatttctactaagtgtagatctcggcgtctgccgggtccgttttttaagcttggcgtggatccgatatcaactagatcttgaga

SEQ ID NO: 8473 - DNA, 170 bp, Artificial sequence
  Tbl1xr1.1_Cdh1.58
  crRNA array
cgatttcttggctttatatatcttgtggaaaggacgaaacaccgtaatttctactaagtgtagatggatgcgcatactggtgaagtaatttctactaagtgtagatctcgtccgcgcccgggactcttttttaagcttggcgtggatccgatatcaactagatcttgaga

SEQ ID NO: 8474 - DNA, 170 bp, Artificial sequence
  Tbl1xr1.1_Cdkn2a.647
  crRNA array
cgatttcttggctttatatatcttgtggaaaggacgaaacaccgtaatttctactaagtgtagatggatgcgcatactggtgaagtaatttctactaagtgtagatgcaatcacgggagggagcagttttttaagcttggcgtggatccgatatcaactagatcttgaga

SEQ ID NO: 8475 - DNA, 170 bp, Artificial sequence
  Tbl1xr1.1_Cdkn2a.648
  crRNA array
cgatttcttggctttatatatcttgtggaaaggacgaaacaccgtaatttctactaagtgtagatggatgcgcatactggtgaagtaatttctactaagtgtagatcaatcacgggagggagcagattttttaagcttggcgtggatccgatatcaactagatcttgaga

SEQ ID NO: 8476 - DNA, 170 bp, Artificial sequence
  Tbl1xr1.1_Cic.162
  crRNA array
cgatttcttggctttatatatcttgtggaaaggacgaaacaccgtaatttctactaagtgtagatggatgcgcatactggtgaagtaatttctactaagtgtagatcgcaggcgcgcccggcggagttttttaagcttggcgtggatccgatatcaactagatcttgaga

SEQ ID NO: 8477 - DNA, 170 bp, Artificial sequence
  Tbl1xr1.1_Cic.164
  crRNA array
cgatttcttggctttatatatcttgtggaaaggacgaaacaccgtaatttctactaagtgtagatggatgcgcatactggtgaagtaatttctactaagtgtagatcgggccctgggccggcggctttttttaagcttggcgtggatccgatatcaactagatcttgaga

SEQ ID NO: 8478 - DNA, 170 bp, Artificial sequence
  Tbl1xr1.1_Ctcf.229
  crRNA array
cgatttcttggctttatatatcttgtggaaaggacgaaacaccgtaatttctactaagtgtagatggatgcgcatactggtgaagtaatttctactaagtgtagatggctggtggctgatagtctgttttttaagcttggcgtggatccgatatcaactagatcttgaga

SEQ ID NO: 8479 - DNA, 170 bp, Artificial sequence
  Tbl1xr1.1_Ctcf.809
  crRNA array
cgatttcttggctttatatatcttgtggaaaggacgaaacaccgtaatttctactaagtgtagatggatgcgcatactggtgaagtaatttctactaagtgtagataagcgctatcatgatcccaattttttaagcttggcgtggatccgatatcaactagatcttgaga

SEQ ID NO: 8480 - DNA, 170 bp, Artificial sequence
  Tbl1xr1.1_Elf3.826
  crRNA array
cgatttcttggctttatatatcttgtggaaaggacgaaacaccgtaatttctactaagtgtagatggatgcgcatactggtgaagtaatttctactaagtgtagattccgagacatcctaatccacttttttaagcttggcgtggatccgatatcaactagatcttgaga

SEQ ID NO: 8481 - DNA, 170 bp, Artificial sequence
  Tbl1xr1.1_Elf3.983
  crRNA array
cgatttcttggctttatatatcttgtggaaaggacgaaacaccgtaatttctactaagtgtagatggatgcgcatactggtgaagtaatttctactaagtgtagattaggccccctaactggaccattttttaagcttggcgtggatccgatatcaactagatcttgaga

SEQ ID NO: 8482 - DNA, 170 bp, Artificial sequence
  Tbl1xr1.1_Ep300.310
  crRNA array
cgatttcttggctttatatatcttgtggaaaggacgaaacaccgtaatttctactaagtgtagatggatgcgcatactggtgaagtaatttctactaagtgtagatatggtacgacagtgaggaagttttttaagcttggcgtggatccgatatcaactagatcttgaga

SEQ ID NO: 8483 - DNA, 170 bp, Artificial sequence
  Tbl1xr1.1_Ep300.587
  crRNA array
cgatttcttggctttatatatcttgtggaaaggacgaaacaccgtaatttctactaagtgtagatggatgcgcatactggtgaagtaatttctactaagtgtagatcgccccggggcccccaaccattttttaagcttggcgtggatccgatatcaactagatcttgaga

SEQ ID NO: 8484 - DNA, 170 bp, Artificial sequence
  Tbl1xr1.1_Epha2.126
  crRNA array
cgatttcttggctttatatatcttgtggaaaggacgaaacaccgtaatttctactaagtgtagatggatgcgcatactggtgaagtaatttctactaagtgtagatcctgtgccgccgcggccgccttttttaagcttggcgtggatccgatatcaactagatcttgaga

SEQ ID NO: 8485 - DNA, 170 bp, Artificial sequence
  Tbl1xr1.1_Epha2.5
  crRNA array
cgatttcttggctttatatatcttgtggaaaggacgaaacaccgtaatttctactaagtgtagatggatgcgcatactggtgaagtaatttctactaagtgtagatcatgagctggcgccacccggttttttaagcttggcgtggatccgatatcaactagatcttgaga

SEQ ID NO: 8486 - DNA, 170 bp, Artificial sequence
  Tbl1xr1.1_Fat1.105
  crRNA array
cgatttcttggctttatatatcttgtggaaaggacgaaacaccgtaatttctactaagtgtagatggatgcgcatactggtgaagtaatttctactaagtgtagataactcgaggtgacaacaagtttttttaagcttggcgtggatccgatatcaactagatcttgaga

SEQ ID NO: 8487 - DNA, 170 bp, Artificial sequence
  Tbl1xr1.1_Fat1.122
  crRNA array
cgatttcttggctttatatatcttgtggaaaggacgaaacaccgtaatttctactaagtgtagatggatgcgcatactggtgaagtaatttctactaagtgtagatccatcgacatggaaacgggattttttaagcttggcgtggatccgatatcaactagatcttgaga

SEQ ID NO: 8488 - DNA, 170 bp, Artificial sequence
  Tbl1xr1.1_Fbxw7.21
  crRNA array
cgatttcttggctttatatatcttgtggaaaggacgaaacaccgtaatttctactaagtgtagatggatgcgcatactggtgaagtaatttctactaagtgtagattaatgtgccgtagaaacccattttttaagcttggcgtggatccgatatcaactagatcttgaga

SEQ ID NO: 8489 - DNA, 170 bp, Artificial sequence
  Tbl1xr1.1_Fbxw7.23
  crRNA array
cgatttcttggctttatatatcttgtggaaaggacgaaacaccgtaatttctactaagtgtagatggatgcgcatactggtgaagtaatttctactaagtgtagatatgtgccgtagaaacccatattttttaagcttggcgtggatccgatatcaactagatcttgaga

SEQ ID NO: 8490 - DNA, 170 bp, Artificial sequence
  Tbl1xr1.1_Gata3.34
  crRNA array
cgatttcttggctttatatatcttgtggaaaggacgaaacaccgtaatttctactaagtgtagatggatgcgcatactggtgaagtaatttctactaagtgtagatctaaactatcccgcaaagatttttttaagcttggcgtggatccgatatcaactagatcttgaga

SEQ ID NO: 8491 - DNA, 170 bp, Artificial sequence
  Tbl1xr1.1_Gata3.47
  crRNA array
cgatttcttggctttatatatcttgtggaaaggacgaaacaccgtaatttctactaagtgtagatggatgcgcatactggtgaagtaatttctactaagtgtagatcgtagtaggacgggacgtggttttttaagcttggcgtggatccgatatcaactagatcttgaga

SEQ ID NO: 8492 - DNA, 170 bp, Artificial sequence
  Tbl1xr1.1_H2-Q2.1
  crRNA array
cgatttcttggctttatatatcttgtggaaaggacgaaacaccgtaatttctactaagtgtagatggatgcgcatactggtgaagtaatttctactaagtgtagatagggcggccaccaacagcagttttttaagcttggcgtggatccgatatcaactagatcttgaga

SEQ ID NO: 8493 - DNA, 170 bp, Artificial sequence
  Tbl1xr1.1_H2-Q2.2
  crRNA array
cgatttcttggctttatatatcttgtggaaaggacgaaacaccgtaatttctactaagtgtagatggatgcgcatactggtgaagtaatttctactaagtgtagattaacctgcgcccgctgctgattttttaagcttggcgtggatccgatatcaactagatcttgaga

SEQ ID NO: 8494 - DNA, 170 bp, Artificial sequence
  Tbl1xr1.1_Kdm5c.1878
  crRNA array
cgatttcttggctttatatatcttgtggaaaggacgaaacaccgtaatttctactaagtgtagatggatgcgcatactggtgaagtaatttctactaagtgtagatagagcacggcacccgcccccttttttaagcttggcgtggatccgatatcaactagatcttgaga

SEQ ID NO: 8495 - DNA, 170 bp, Artificial sequence
  Tbl1xr1.1_Kdm5c.1879
  crRNA array
cgatttcttggctttatatatcttgtggaaaggacgaaacaccgtaatttctactaagtgtagatggatgcgcatactggtgaagtaatttctactaagtgtagatgagcacggcacccgccccccttttttaagcttggcgtggatccgatatcaactagatcttgaga

SEQ ID NO: 8496 - DNA, 170 bp, Artificial sequence
  Tbl1xr1.1_Kdm6a.56
  crRNA array
cgatttcttggctttatatatcttgtggaaaggacgaaacaccgtaatttctactaagtgtagatggatgcgcatactggtgaagtaatttctactaagtgtagattcgctgccgcctctcgcggcttttttaagcttggcgtggatccgatatcaactagatcttgaga

SEQ ID NO: 8497 - DNA, 170 bp, Artificial sequence
  Tbl1xr1.1_Kdm6a.57
  crRNA array
cgatttcttggctttatatatcttgtggaaaggacgaaacaccgtaatttctactaagtgtagatggatgcgcatactggtgaagtaatttctactaagtgtagatcgctgccgcctctcgcggcattttttaagcttggcgtggatccgatatcaactagatcttgaga

SEQ ID NO: 8498 - DNA, 170 bp, Artificial sequence
  Tbl1xr1.1_Kmt2b.265
  crRNA array
cgatttcttggctttatatatcttgtggaaaggacgaaacaccgtaatttctactaagtgtagatggatgcgcatactggtgaagtaatttctactaagtgtagatccccaagtgaagcccacctgttttttaagcttggcgtggatccgatatcaactagatcttgaga

SEQ ID NO: 8499 - DNA, 170 bp, Artificial sequence
  Tbl1xr1.1_Kmt2b.298
  crRNA array
cgatttcttggctttatatatcttgtggaaaggacgaaacaccgtaatttctactaagtgtagatggatgcgcatactggtgaagtaatttctactaagtgtagattccggcagggaccggctggcttttttaagcttggcgtggatccgatatcaactagatcttgaga

SEQ ID NO: 8500 - DNA, 170 bp, Artificial sequence
  Tbl1xr1.1_Kmt2c.1962
  crRNA array
cgatttcttggctttatatatcttgtggaaaggacgaaacaccgtaatttctactaagtgtagatggatgcgcatactggtgaagtaatttctactaagtgtagatgtgacgatctgtgccacaagttttttaagcttggcgtggatccgatatcaactagatcttgaga

SEQ ID NO: 8501 - DNA, 170 bp, Artificial sequence
  Tbl1xr1.1_Kmt2c.2236
  crRNA array
cgatttcttggctttatatatcttgtggaaaggacgaaacaccgtaatttctactaagtgtagatggatgcgcatactggtgaagtaatttctactaagtgtagatactcgacctccacctccctattttttaagcttggcgtggatccgatatcaactagatcttgaga

SEQ ID NO: 8502 - DNA, 170 bp, Artificial sequence
  Tbl1xr1.1_Kmt2d.316
  crRNA array
cgatttcttggctttatatatcttgtggaaaggacgaaacaccgtaatttctactaagtgtagatggatgcgcatactggtgaagtaatttctactaagtgtagatactccaggccacccaggtggttttttaagcttggcgtggatccgatatcaactagatcttgaga

SEQ ID NO: 8503 - DNA, 170 bp, Artificial sequence
  Tbl1xr1.1_Kmt2d.416
  crRNA array
cgatttcttggctttatatatcttgtggaaaggacgaaacaccgtaatttctactaagtgtagatggatgcgcatactggtgaagtaatttctactaagtgtagattaaacccccgggggaagggtttttttaagcttggcgtggatccgatatcaactagatcttgaga

SEQ ID NO: 8504 - DNA, 170 bp, Artificial sequence
  Tbl1xr1.1_Map2k4.119
  crRNA array
cgatttcttggctttatatatcttgtggaaaggacgaaacaccgtaatttctactaagtgtagatggatgcgcatactggtgaagtaatttctactaagtgtagattgctgtgtgggcggccacatttttttaagcttggcgtggatccgatatcaactagatcttgaga

SEQ ID NO: 8505 - DNA, 170 bp, Artificial sequence
  Tbl1xr1.1_Map2k4.1261
  crRNA array
cgatttcttggctttatatatcttgtggaaaggacgaaacaccgtaatttctactaagtgtagatggatgcgcatactggtgaagtaatttctactaagtgtagatgatgtagtaatgcggagtagttttttaagcttggcgtggatccgatatcaactagatcttgaga

SEQ ID NO: 8506 - DNA, 170 bp, Artificial sequence
  Tbl1xr1.1_Map3k1.235
  crRNA array
cgatttcttggctttatatatcttgtggaaaggacgaaacaccgtaatttctactaagtgtagatggatgcgcatactggtgaagtaatttctactaagtgtagataaaacgctactgatcgatcgttttttaagcttggcgtggatccgatatcaactagatcttgaga

SEQ ID NO: 8507 - DNA, 170 bp, Artificial sequence
  Tbl1xr1.1_Map3k1.3838
  crRNA array
cgatttcttggctttatatatcttgtggaaaggacgaaacaccgtaatttctactaagtgtagatggatgcgcatactggtgaagtaatttctactaagtgtagatccaacaacagggccccactattttttaagcttggcgtggatccgatatcaactagatcttgaga

SEQ ID NO: 8508 - DNA, 170 bp, Artificial sequence
  Tbl1xr1.1_Mga.1655
  crRNA array
cgatttcttggctttatatatcttgtggaaaggacgaaacaccgtaatttctactaagtgtagatggatgcgcatactggtgaagtaatttctactaagtgtagatcgagaagtggagagcatattttttttaagcttggcgtggatccgatatcaactagatcttgaga

SEQ ID NO: 8509 - DNA, 170 bp, Artificial sequence
  Tbl1xr1.1_Mga.93
  crRNA array
cgatttcttggctttatatatcttgtggaaaggacgaaacaccgtaatttctactaagtgtagatggatgcgcatactggtgaagtaatttctactaagtgtagatgagaaggctccccataatgtttttttaagcttggcgtggatccgatatcaactagatcttgaga

SEQ ID NO: 8510 - DNA, 170 bp, Artificial sequence
  Tbl1xr1.1_Nf1.746
  crRNA array
cgatttcttggctttatatatcttgtggaaaggacgaaacaccgtaatttctactaagtgtagatggatgcgcatactggtgaagtaatttctactaagtgtagattaagcataatgatgatgccattttttaagcttggcgtggatccgatatcaactagatcttgaga

SEQ ID NO: 8511 - DNA, 170 bp, Artificial sequence
  Tbl1xr1.1_Nf1.97
  crRNA array
cgatttcttggctttatatatcttgtggaaaggacgaaacaccgtaatttctactaagtgtagatggatgcgcatactggtgaagtaatttctactaagtgtagatagcccgctacatgctgatgcttttttaagcttggcgtggatccgatatcaactagatcttgaga

SEQ ID NO: 8512 - DNA, 170 bp, Artificial sequence
  Tbl1xr1.1_Nf2.356
  crRNA array
cgatttcttggctttatatatcttgtggaaaggacgaaacaccgtaatttctactaagtgtagatggatgcgcatactggtgaagtaatttctactaagtgtagatcggagtcatctgatagagatttttttaagcttggcgtggatccgatatcaactagatcttgaga

SEQ ID NO: 8513 - DNA, 170 bp, Artificial sequence
  Tbl1xr1.1_Nf2.768
  crRNA array
cgatttcttggctttatatatcttgtggaaaggacgaaacaccgtaatttctactaagtgtagatggatgcgcatactggtgaagtaatttctactaagtgtagatccgaagccccagtgtccggcttttttaagcttggcgtggatccgatatcaactagatcttgaga

SEQ ID NO: 8514 - DNA, 170 bp, Artificial sequence
  Tbl1xr1.1_Notch1.1849
  crRNA array
cgatttcttggctttatatatcttgtggaaaggacgaaacaccgtaatttctactaagtgtagatggatgcgcatactggtgaagtaatttctactaagtgtagatctggcgggtgggcggcgctgttttttaagcttggcgtggatccgatatcaactagatcttgaga

SEQ ID NO: 8515 - DNA, 170 bp, Artificial sequence
  Tbl1xr1.1_Notch1.649
  crRNA array
cgatttcttggctttatatatcttgtggaaaggacgaaacaccgtaatttctactaagtgtagatggatgcgcatactggtgaagtaatttctactaagtgtagattgggccaacgatgccaggacttttttaagcttggcgtggatccgatatcaactagatcttgaga

SEQ ID NO: 8516 - DNA, 170 bp, Artificial sequence
  Tbl1xr1.1_Nsd1.70
  crRNA array
cgatttcttggctttatatatcttgtggaaaggacgaaacaccgtaatttctactaagtgtagatggatgcgcatactggtgaagtaatttctactaagtgtagatactggtgtggacgatgcagattttttaagcttggcgtggatccgatatcaactagatcttgaga

SEQ ID NO: 8517 - DNA, 170 bp, Artificial sequence
  Tbl1xr1.1_Nsd1.90
  crRNA array
cgatttcttggctttatatatcttgtggaaaggacgaaacaccgtaatttctactaagtgtagatggatgcgcatactggtgaagtaatttctactaagtgtagataggagctaacggcaagaatgttttttaagcttggcgtggatccgatatcaactagatcttgaga

SEQ ID NO: 8518 - DNA, 170 bp, Artificial sequence
  Tbl1xr1.1_Pbrm1.1236
  crRNA array
cgatttcttggctttatatatcttgtggaaaggacgaaacaccgtaatttctactaagtgtagatggatgcgcatactggtgaagtaatttctactaagtgtagatgccgataaaaccaacagccgttttttaagcttggcgtggatccgatatcaactagatcttgaga

SEQ ID NO: 8519 - DNA, 170 bp, Artificial sequence
  Tbl1xr1.1_Pbrm1.969
  crRNA array
cgatttcttggctttatatatcttgtggaaaggacgaaacaccgtaatttctactaagtgtagatggatgcgcatactggtgaagtaatttctactaagtgtagatgagccctaatgaacagctcattttttaagcttggcgtggatccgatatcaactagatcttgaga

SEQ ID NO: 8520 - DNA, 170 bp, Artificial sequence
  Tbl1xr1.1_Pik3r1.76
  crRNA array
cgatttcttggctttatatatcttgtggaaaggacgaaacaccgtaatttctactaagtgtagatggatgcgcatactggtgaagtaatttctactaagtgtagataaaacctatacggcccgcacttttttaagcttggcgtggatccgatatcaactagatcttgaga

SEQ ID NO: 8521 - DNA, 170 bp, Artificial sequence
  Tbl1xr1.1_Pik3r1.77
  crRNA array
cgatttcttggctttatatatcttgtggaaaggacgaaacaccgtaatttctactaagtgtagatggatgcgcatactggtgaagtaatttctactaagtgtagataaacctatacggcccgcactttttttaagcttggcgtggatccgatatcaactagatcttgaga

SEQ ID NO: 8522 - DNA, 170 bp, Artificial sequence
  Tbl1xr1.1_Pten.240
  crRNA array
cgatttcttggctttatatatcttgtggaaaggacgaaacaccgtaatttctactaagtgtagatggatgcgcatactggtgaagtaatttctactaagtgtagattgcatacgctatagctgcttttttttaagcttggcgtggatccgatatcaactagatcttgaga

SEQ ID NO: 8523 - DNA, 170 bp, Artificial sequence
  Tbl1xr1.1_Pten.265
  crRNA array
cgatttcttggctttatatatcttgtggaaaggacgaaacaccgtaatttctactaagtgtagatggatgcgcatactggtgaagtaatttctactaagtgtagataagcgtggtgcgtgacgcacttttttaagcttggcgtggatccgatatcaactagatcttgaga

SEQ ID NO: 8524 - DNA, 170 bp, Artificial sequence
  Tbl1xr1.1_Rasa1.1478
  crRNA array
cgatttcttggctttatatatcttgtggaaaggacgaaacaccgtaatttctactaagtgtagatggatgcgcatactggtgaagtaatttctactaagtgtagatcgataatggtctatgatgtcttttttaagcttggcgtggatccgatatcaactagatcttgaga

SEQ ID NO: 8525 - DNA, 170 bp, Artificial sequence
  Tbl1xr1.1_Rasa1.223
  crRNA array
cgatttcttggctttatatatcttgtggaaaggacgaaacaccgtaatttctactaagtgtagatggatgcgcatactggtgaagtaatttctactaagtgtagattccatggagtatcgtgctcgttttttaagcttggcgtggatccgatatcaactagatcttgaga

SEQ ID NO: 8526 - DNA, 170 bp, Artificial sequence
  Tbl1xr1.1_Rb1.211
  crRNA array
cgatttcttggctttatatatcttgtggaaaggacgaaacaccgtaatttctactaagtgtagatggatgcgcatactggtgaagtaatttctactaagtgtagattctgacatgatcgggtacctttttttaagcttggcgtggatccgatatcaactagatcttgaga

SEQ ID NO: 8527 - DNA, 170 bp, Artificial sequence
  Tbl1xr1.1_Rb1.394
  crRNA array
cgatttcttggctttatatatcttgtggaaaggacgaaacaccgtaatttctactaagtgtagatggatgcgcatactggtgaagtaatttctactaagtgtagatagaaatctcgaagcaggatcttttttaagcttggcgtggatccgatatcaactagatcttgaga

SEQ ID NO: 8528 - DNA, 170 bp, Artificial sequence
  Tbl1xr1.1_Rbm10.5
  crRNA array
cgatttcttggctttatatatcttgtggaaaggacgaaacaccgtaatttctactaagtgtagatggatgcgcatactggtgaagtaatttctactaagtgtagatacgaaacctgaacccacacattttttaagcttggcgtggatccgatatcaactagatcttgaga

SEQ ID NO: 8529 - DNA, 170 bp, Artificial sequence
  Tbl1xr1.1_Rbm10.6
  crRNA array
cgatttcttggctttatatatcttgtggaaaggacgaaacaccgtaatttctactaagtgtagatggatgcgcatactggtgaagtaatttctactaagtgtagatcgaaacctgaacccacacagttttttaagcttggcgtggatccgatatcaactagatcttgaga

SEQ ID NO: 8530 - DNA, 170 bp, Artificial sequence
  Tbl1xr1.1_Rnf43.1920
  crRNA array
cgatttcttggctttatatatcttgtggaaaggacgaaacaccgtaatttctactaagtgtagatggatgcgcatactggtgaagtaatttctactaagtgtagatatccccgtgccgtggactccttttttaagcttggcgtggatccgatatcaactagatcttgaga

SEQ ID NO: 8531 - DNA, 170 bp, Artificial sequence
  Tbl1xr1.1_Rnf43.39
  crRNA array
cgatttcttggctttatatatcttgtggaaaggacgaaacaccgtaatttctactaagtgtagatggatgcgcatactggtgaagtaatttctactaagtgtagatcaaggggatcactctgataattttttaagcttggcgtggatccgatatcaactagatcttgaga

SEQ ID NO: 8532 - DNA, 170 bp, Artificial sequence
  Tbl1xr1.1_Runx1.204
  crRNA array
cgatttcttggctttatatatcttgtggaaaggacgaaacaccgtaatttctactaagtgtagatggatgcgcatactggtgaagtaatttctactaagtgtagattaaataagtccagccgttttttttttaagcttggcgtggatccgatatcaactagatcttgaga

SEQ ID NO: 8533 - DNA, 170 bp, Artificial sequence
  Tbl1xr1.1_Runx1.81
  crRNA array
cgatttcttggctttatatatcttgtggaaaggacgaaacaccgtaatttctactaagtgtagatggatgcgcatactggtgaagtaatttctactaagtgtagataggacgcgtatgggaattttttttttaagcttggcgtggatccgatatcaactagatcttgaga

SEQ ID NO: 8534 - DNA, 170 bp, Artificial sequence
  Tbl1xr1.1_Setd2.143
  crRNA array
cgatttcttggctttatatatcttgtggaaaggacgaaacaccgtaatttctactaagtgtagatggatgcgcatactggtgaagtaatttctactaagtgtagatgcacaaccacaacagactggttttttaagcttggcgtggatccgatatcaactagatcttgaga

SEQ ID NO: 8535 - DNA, 170 bp, Artificial sequence
  Tbl1xr1.1_Setd2.508
  crRNA array
cgatttcttggctttatatatcttgtggaaaggacgaaacaccgtaatttctactaagtgtagatggatgcgcatactggtgaagtaatttctactaagtgtagattacgatcccgagcacccgacttttttaagcttggcgtggatccgatatcaactagatcttgaga

SEQ ID NO: 8536 - DNA, 170 bp, Artificial sequence
  Tbl1xr1.1_Smad4.3038
  crRNA array
cgatttcttggctttatatatcttgtggaaaggacgaaacaccgtaatttctactaagtgtagatggatgcgcatactggtgaagtaatttctactaagtgtagatatctgcggcagtgtcaccggttttttaagcttggcgtggatccgatatcaactagatcttgaga

SEQ ID NO: 8537 - DNA, 170 bp, Artificial sequence
  Tbl1xr1.1_Smad4.39
  crRNA array
cgatttcttggctttatatatcttgtggaaaggacgaaacaccgtaatttctactaagtgtagatggatgcgcatactggtgaagtaatttctactaagtgtagatagtcaaacgcatactgacaattttttaagcttggcgtggatccgatatcaactagatcttgaga

SEQ ID NO: 8538 - DNA, 170 bp, Artificial sequence
  Tbl1xr1.1_Stag2.1409
  crRNA array
cgatttcttggctttatatatcttgtggaaaggacgaaacaccgtaatttctactaagtgtagatggatgcgcatactggtgaagtaatttctactaagtgtagatgctaataactgcggaagggcttttttaagcttggcgtggatccgatatcaactagatcttgaga

SEQ ID NO: 8539 - DNA, 170 bp, Artificial sequence
  Tbl1xr1.1_Stag2.4401
  crRNA array
cgatttcttggctttatatatcttgtggaaaggacgaaacaccgtaatttctactaagtgtagatggatgcgcatactggtgaagtaatttctactaagtgtagattaatcgtccagtggtgtatattttttaagcttggcgtggatccgatatcaactagatcttgaga

SEQ ID NO: 8540 - DNA, 170 bp, Artificial sequence
  Tbl1xr1.1_Tgfbr2.290
  crRNA array
cgatttcttggctttatatatcttgtggaaaggacgaaacaccgtaatttctactaagtgtagatggatgcgcatactggtgaagtaatttctactaagtgtagatcctctcggcgcccgggtaaattttttaagcttggcgtggatccgatatcaactagatcttgaga

SEQ ID NO: 8541 - DNA, 170 bp, Artificial sequence
  Tbl1xr1.1_Tgfbr2.292
  crRNA array
cgatttcttggctttatatatcttgtggaaaggacgaaacaccgtaatttctactaagtgtagatggatgcgcatactggtgaagtaatttctactaagtgtagatcccgggcgccgagagggaaattttttaagcttggcgtggatccgatatcaactagatcttgaga

SEQ ID NO: 8542 - DNA, 170 bp, Artificial sequence
  Tbl1xr1.1_Trp53.4
  crRNA array
cgatttcttggctttatatatcttgtggaaaggacgaaacaccgtaatttctactaagtgtagatggatgcgcatactggtgaagtaatttctactaagtgtagatccctgaactgcccccagggattttttaagcttggcgtggatccgatatcaactagatcttgaga

SEQ ID NO: 8543 - DNA, 170 bp, Artificial sequence
  Tbl1xr1.1_Trp53.528
  crRNA array
cgatttcttggctttatatatcttgtggaaaggacgaaacaccgtaatttctactaagtgtagatggatgcgcatactggtgaagtaatttctactaagtgtagatgctgggccagcagagacctgttttttaagcttggcgtggatccgatatcaactagatcttgaga

SEQ ID NO: 8544 - DNA, 170 bp, Artificial sequence
  Tbl1xr1.1_Vhl.1
  crRNA array
cgatttcttggctttatatatcttgtggaaaggacgaaacaccgtaatttctactaagtgtagatggatgcgcatactggtgaagtaatttctactaagtgtagatagggctcccggcggccatttttttttaagcttggcgtggatccgatatcaactagatcttgaga

SEQ ID NO: 8545 - DNA, 170 bp, Artificial sequence
  Tbl1xr1.1_Vhl.151
  crRNA array
cgatttcttggctttatatatcttgtggaaaggacgaaacaccgtaatttctactaagtgtagatggatgcgcatactggtgaagtaatttctactaagtgtagattagagcactcacccgagggattttttaagcttggcgtggatccgatatcaactagatcttgaga

SEQ ID NO: 8546 - DNA, 170 bp, Artificial sequence
  Tbl1xr1.1_Zc3h13.1387
  crRNA array
cgatttcttggctttatatatcttgtggaaaggacgaaacaccgtaatttctactaagtgtagatggatgcgcatactggtgaagtaatttctactaagtgtagatgtgacgccggtcatgtgactttttttaagcttggcgtggatccgatatcaactagatcttgaga

SEQ ID NO: 8547 - DNA, 170 bp, Artificial sequence
  Tbl1xr1.1_Zc3h13.1777
  crRNA array
cgatttcttggctttatatatcttgtggaaaggacgaaacaccgtaatttctactaagtgtagatggatgcgcatactggtgaagtaatttctactaagtgtagatgatgctgccagtgtagcggcttttttaagcttggcgtggatccgatatcaactagatcttgaga

SEQ ID NO: 8548 - DNA, 170 bp, Artificial sequence
  Tbl1xr1.83_Acvr2a.155
  crRNA array
cgatttcttggctttatatatcttgtggaaaggacgaaacaccgtaatttctactaagtgtagatatggtcgacccatcgagtcttaatttctactaagtgtagatggacctggctaatcaagtatttttttaagcttggcgtggatccgatatcaactagatcttgaga

SEQ ID NO: 8549 - DNA, 170 bp, Artificial sequence
  Tbl1xr1.83_Acvr2a.70
  crRNA array
cgatttcttggctttatatatcttgtggaaaggacgaaacaccgtaatttctactaagtgtagatatggtcgacccatcgagtcttaatttctactaagtgtagatcccgaggcgccggagaagccttttttaagcttggcgtggatccgatatcaactagatcttgaga

SEQ ID NO: 8550 - DNA, 170 bp, Artificial sequence
  Tbl1xr1.83_Apc.21
  crRNA array
cgatttcttggctttatatatcttgtggaaaggacgaaacaccgtaatttctactaagtgtagatatggtcgacccatcgagtcttaatttctactaagtgtagatgtgatccacacgtgtagctgttttttaagcttggcgtggatccgatatcaactagatcttgaga

SEQ ID NO: 8551 - DNA, 170 bp, Artificial sequence
  Tbl1xr1.83_Apc.867
  crRNA array
cgatttcttggctttatatatcttgtggaaaggacgaaacaccgtaatttctactaagtgtagatatggtcgacccatcgagtcttaatttctactaagtgtagatcagtcccaggcggcggaagcttttttaagcttggcgtggatccgatatcaactagatcttgaga

SEQ ID NO: 8552 - DNA, 170 bp, Artificial sequence
  Tbl1xr1.83_Arid1a.2
  crRNA array
cgatttcttggctttatatatcttgtggaaaggacgaaacaccgtaatttctactaagtgtagatatggtcgacccatcgagtcttaatttctactaagtgtagatcccgcgcccccgtcctggggttttttaagcttggcgtggatccgatatcaactagatcttgaga

SEQ ID NO: 8553 - DNA, 170 bp, Artificial sequence
  Tbl1xr1.83_Arid1a.5
  crRNA array
cgatttcttggctttatatatcttgtggaaaggacgaaacaccgtaatttctactaagtgtagatatggtcgacccatcgagtcttaatttctactaagtgtagatcccgcgctcggccgctgccgttttttaagcttggcgtggatccgatatcaactagatcttgaga

SEQ ID NO: 8554 - DNA, 170 bp, Artificial sequence
  Tbl1xr1.83_Arid2.166
  crRNA array
cgatttcttggctttatatatcttgtggaaaggacgaaacaccgtaatttctactaagtgtagatatggtcgacccatcgagtcttaatttctactaagtgtagataaccgcgatctgggttttttttttttaagcttggcgtggatccgatatcaactagatcttgaga

SEQ ID NO: 8555 - DNA, 170 bp, Artificial sequence
  Tbl1xr1.83_Arid2.172
  crRNA array
cgatttcttggctttatatatcttgtggaaaggacgaaacaccgtaatttctactaagtgtagatatggtcgacccatcgagtcttaatttctactaagtgtagatctggacgagctgcggcagttttttttaagcttggcgtggatccgatatcaactagatcttgaga

SEQ ID NO: 8556 - DNA, 170 bp, Artificial sequence
  Tbl1xr1.83_Atm.120
  crRNA array
cgatttcttggctttatatatcttgtggaaaggacgaaacaccgtaatttctactaagtgtagatatggtcgacccatcgagtcttaatttctactaagtgtagatgacaggtagtcggcagctaattttttaagcttggcgtggatccgatatcaactagatcttgaga

SEQ ID NO: 8557 - DNA, 170 bp, Artificial sequence
  Tbl1xr1.83_Atm.997
  crRNA array
cgatttcttggctttatatatcttgtggaaaggacgaaacaccgtaatttctactaagtgtagatatggtcgacccatcgagtcttaatttctactaagtgtagatgagaaagtctccgaatcgttttttttaagcttggcgtggatccgatatcaactagatcttgaga

SEQ ID NO: 8558 - DNA, 170 bp, Artificial sequence
  Tbl1xr1.83_Atrx.249
  crRNA array
cgatttcttggctttatatatcttgtggaaaggacgaaacaccgtaatttctactaagtgtagatatggtcgacccatcgagtcttaatttctactaagtgtagattagccagtcgctcatatctcttttttaagcttggcgtggatccgatatcaactagatcttgaga

SEQ ID NO: 8559 - DNA, 170 bp, Artificial sequence
  Tbl1xr1.83_Atrx.251
  crRNA array
cgatttcttggctttatatatcttgtggaaaggacgaaacaccgtaatttctactaagtgtagatatggtcgacccatcgagtcttaatttctactaagtgtagatgccagtcgctcatatctctgttttttaagcttggcgtggatccgatatcaactagatcttgaga

SEQ ID NO: 8560 - DNA, 170 bp, Artificial sequence
  Tbl1xr1.83_Bcor.203
  crRNA array
cgatttcttggctttatatatcttgtggaaaggacgaaacaccgtaatttctactaagtgtagatatggtcgacccatcgagtcttaatttctactaagtgtagatccccggagcggagtccaggcttttttaagcttggcgtggatccgatatcaactagatcttgaga

SEQ ID NO: 8561 - DNA, 170 bp, Artificial sequence
  Tbl1xr1.83_Bcor.475
  crRNA array
cgatttcttggctttatatatcttgtggaaaggacgaaacaccgtaatttctactaagtgtagatatggtcgacccatcgagtcttaatttctactaagtgtagattgcaacccctctgtatgggattttttaagcttggcgtggatccgatatcaactagatcttgaga

SEQ ID NO: 8562 - DNA, 170 bp, Artificial sequence
  Tbl1xr1.83_Brca1.112
  crRNA array
cgatttcttggctttatatatcttgtggaaaggacgaaacaccgtaatttctactaagtgtagatatggtcgacccatcgagtcttaatttctactaagtgtagatctagacgctctgtggagactttttttaagcttggcgtggatccgatatcaactagatcttgaga

SEQ ID NO: 8563 - DNA, 170 bp, Artificial sequence
  Tbl1xr1.83_Brca1.53
  crRNA array
cgatttcttggctttatatatcttgtggaaaggacgaaacaccgtaatttctactaagtgtagatatggtcgacccatcgagtcttaatttctactaagtgtagataatgaggaggcgtcgatcatttttttaagcttggcgtggatccgatatcaactagatcttgaga

SEQ ID NO: 8564 - DNA, 170 bp, Artificial sequence
  Tbl1xr1.83_Casp8.45
  crRNA array
cgatttcttggctttatatatcttgtggaaaggacgaaacaccgtaatttctactaagtgtagatatggtcgacccatcgagtcttaatttctactaagtgtagatctaccgagatcctgtgaatgttttttaagcttggcgtggatccgatatcaactagatcttgaga

SEQ ID NO: 8565 - DNA, 170 bp, Artificial sequence
  Tbl1xr1.83_Casp8.54
  crRNA array
cgatttcttggctttatatatcttgtggaaaggacgaaacaccgtaatttctactaagtgtagatatggtcgacccatcgagtcttaatttctactaagtgtagatcagtgcagtcgtcgtaagatttttttaagcttggcgtggatccgatatcaactagatcttgaga

SEQ ID NO: 8566 - DNA, 170 bp, Artificial sequence
  Tbl1xr1.83_Cbwd1.84
  crRNA array
cgatttcttggctttatatatcttgtggaaaggacgaaacaccgtaatttctactaagtgtagatatggtcgacccatcgagtcttaatttctactaagtgtagatcacagcaggtaacatgccgcttttttaagcttggcgtggatccgatatcaactagatcttgaga

SEQ ID NO: 8567 - DNA, 170 bp, Artificial sequence
  Tbl1xr1.83_Cbwd1.85
  crRNA array
cgatttcttggctttatatatcttgtggaaaggacgaaacaccgtaatttctactaagtgtagatatggtcgacccatcgagtcttaatttctactaagtgtagatacagcaggtaacatgccgccttttttaagcttggcgtggatccgatatcaactagatcttgaga

SEQ ID NO: 8568 - DNA, 170 bp, Artificial sequence
  Tbl1xr1.83_Cdh1.387
  crRNA array
cgatttcttggctttatatatcttgtggaaaggacgaaacaccgtaatttctactaagtgtagatatggtcgacccatcgagtcttaatttctactaagtgtagatctcggcgtctgccgggtccgttttttaagcttggcgtggatccgatatcaactagatcttgaga

SEQ ID NO: 8569 - DNA, 170 bp, Artificial sequence
  Tbl1xr1.83_Cdh1.58
  crRNA array
cgatttcttggctttatatatcttgtggaaaggacgaaacaccgtaatttctactaagtgtagatatggtcgacccatcgagtcttaatttctactaagtgtagatctcgtccgcgcccgggactcttttttaagcttggcgtggatccgatatcaactagatcttgaga

SEQ ID NO: 8570 - DNA, 170 bp, Artificial sequence
  Tbl1xr1.83_Cdkn2a.647
  crRNA array
cgatttcttggctttatatatcttgtggaaaggacgaaacaccgtaatttctactaagtgtagatatggtcgacccatcgagtcttaatttctactaagtgtagatgcaatcacgggagggagcagttttttaagcttggcgtggatccgatatcaactagatcttgaga

SEQ ID NO: 8571 - DNA, 170 bp, Artificial sequence
  Tbl1xr1.83_Cdkn2a.648
  crRNA array
cgatttcttggctttatatatcttgtggaaaggacgaaacaccgtaatttctactaagtgtagatatggtcgacccatcgagtcttaatttctactaagtgtagatcaatcacgggagggagcagattttttaagcttggcgtggatccgatatcaactagatcttgaga

SEQ ID NO: 8572 - DNA, 170 bp, Artificial sequence
  Tbl1xr1.83_Cic.162
  crRNA array
cgatttcttggctttatatatcttgtggaaaggacgaaacaccgtaatttctactaagtgtagatatggtcgacccatcgagtcttaatttctactaagtgtagatcgcaggcgcgcccggcggagttttttaagcttggcgtggatccgatatcaactagatcttgaga

SEQ ID NO: 8573 - DNA, 170 bp, Artificial sequence
  Tbl1xr1.83_Cic.164
  crRNA array
cgatttcttggctttatatatcttgtggaaaggacgaaacaccgtaatttctactaagtgtagatatggtcgacccatcgagtcttaatttctactaagtgtagatcgggccctgggccggcggctttttttaagcttggcgtggatccgatatcaactagatcttgaga

SEQ ID NO: 8574 - DNA, 170 bp, Artificial sequence
  Tbl1xr1.83_Ctcf.229
  crRNA array
cgatttcttggctttatatatcttgtggaaaggacgaaacaccgtaatttctactaagtgtagatatggtcgacccatcgagtcttaatttctactaagtgtagatggctggtggctgatagtctgttttttaagcttggcgtggatccgatatcaactagatcttgaga

SEQ ID NO: 8575 - DNA, 170 bp, Artificial sequence
  Tbl1xr1.83_Ctcf.809
  crRNA array
cgatttcttggctttatatatcttgtggaaaggacgaaacaccgtaatttctactaagtgtagatatggtcgacccatcgagtcttaatttctactaagtgtagataagcgctatcatgatcccaattttttaagcttggcgtggatccgatatcaactagatcttgaga

SEQ ID NO: 8576 - DNA, 170 bp, Artificial sequence
  Tbl1xr1.83_Elf3.826
  crRNA array
cgatttcttggctttatatatcttgtggaaaggacgaaacaccgtaatttctactaagtgtagatatggtcgacccatcgagtcttaatttctactaagtgtagattccgagacatcctaatccacttttttaagcttggcgtggatccgatatcaactagatcttgaga

SEQ ID NO: 8577 - DNA, 170 bp, Artificial sequence
  Tbl1xr1.83_Elf3.983
  crRNA array
cgatttcttggctttatatatcttgtggaaaggacgaaacaccgtaatttctactaagtgtagatatggtcgacccatcgagtcttaatttctactaagtgtagattaggccccctaactggaccattttttaagcttggcgtggatccgatatcaactagatcttgaga

SEQ ID NO: 8578 - DNA, 170 bp, Artificial sequence
  Tbl1xr1.83_Ep300.310
  crRNA array
cgatttcttggctttatatatcttgtggaaaggacgaaacaccgtaatttctactaagtgtagatatggtcgacccatcgagtcttaatttctactaagtgtagatatggtacgacagtgaggaagttttttaagcttggcgtggatccgatatcaactagatcttgaga

SEQ ID NO: 8579 - DNA, 170 bp, Artificial sequence
  Tbl1xr1.83_Ep300.587
  crRNA array
cgatttcttggctttatatatcttgtggaaaggacgaaacaccgtaatttctactaagtgtagatatggtcgacccatcgagtcttaatttctactaagtgtagatcgccccggggcccccaaccattttttaagcttggcgtggatccgatatcaactagatcttgaga

SEQ ID NO: 8580 - DNA, 170 bp, Artificial sequence
  Tbl1xr1.83_Epha2.126
  crRNA array
cgatttcttggctttatatatcttgtggaaaggacgaaacaccgtaatttctactaagtgtagatatggtcgacccatcgagtcttaatttctactaagtgtagatcctgtgccgccgcggccgccttttttaagcttggcgtggatccgatatcaactagatcttgaga

SEQ ID NO: 8581 - DNA, 170 bp, Artificial sequence
  Tbl1xr1.83_Epha2.5
  crRNA array
cgatttcttggctttatatatcttgtggaaaggacgaaacaccgtaatttctactaagtgtagatatggtcgacccatcgagtcttaatttctactaagtgtagatcatgagctggcgccacccggttttttaagcttggcgtggatccgatatcaactagatcttgaga

SEQ ID NO: 8582 - DNA, 170 bp, Artificial sequence
  Tbl1xr1.83_Fat1.105
  crRNA array
cgatttcttggctttatatatcttgtggaaaggacgaaacaccgtaatttctactaagtgtagatatggtcgacccatcgagtcttaatttctactaagtgtagataactcgaggtgacaacaagtttttttaagcttggcgtggatccgatatcaactagatcttgaga

SEQ ID NO: 8583 - DNA, 170 bp, Artificial sequence
  Tbl1xr1.83_Fat1.122
  crRNA array
cgatttcttggctttatatatcttgtggaaaggacgaaacaccgtaatttctactaagtgtagatatggtcgacccatcgagtcttaatttctactaagtgtagatccatcgacatggaaacgggattttttaagcttggcgtggatccgatatcaactagatcttgaga

SEQ ID NO: 8584 - DNA, 170 bp, Artificial sequence
  Tbl1xr1.83_Fbxw7.21
  crRNA array
cgatttcttggctttatatatcttgtggaaaggacgaaacaccgtaatttctactaagtgtagatatggtcgacccatcgagtcttaatttctactaagtgtagattaatgtgccgtagaaacccattttttaagcttggcgtggatccgatatcaactagatcttgaga

SEQ ID NO: 8585 - DNA, 170 bp, Artificial sequence
  Tbl1xr1.83_Fbxw7.23
  crRNA array
cgatttcttggctttatatatcttgtggaaaggacgaaacaccgtaatttctactaagtgtagatatggtcgacccatcgagtcttaatttctactaagtgtagatatgtgccgtagaaacccatattttttaagcttggcgtggatccgatatcaactagatcttgaga

SEQ ID NO: 8586 - DNA, 170 bp, Artificial sequence
  Tbl1xr1.83_Gata3.34
  crRNA array
cgatttcttggctttatatatcttgtggaaaggacgaaacaccgtaatttctactaagtgtagatatggtcgacccatcgagtcttaatttctactaagtgtagatctaaactatcccgcaaagatttttttaagcttggcgtggatccgatatcaactagatcttgaga

SEQ ID NO: 8587 - DNA, 170 bp, Artificial sequence
  Tbl1xr1.83_Gata3.47
  crRNA array
cgatttcttggctttatatatcttgtggaaaggacgaaacaccgtaatttctactaagtgtagatatggtcgacccatcgagtcttaatttctactaagtgtagatcgtagtaggacgggacgtggttttttaagcttggcgtggatccgatatcaactagatcttgaga

SEQ ID NO: 8588 - DNA, 170 bp, Artificial sequence
  Tbl1xr1.83_H2-Q2.1
  crRNA array
cgatttcttggctttatatatcttgtggaaaggacgaaacaccgtaatttctactaagtgtagatatggtcgacccatcgagtcttaatttctactaagtgtagatagggcggccaccaacagcagttttttaagcttggcgtggatccgatatcaactagatcttgaga

SEQ ID NO: 8589 - DNA, 170 bp, Artificial sequence
  Tbl1xr1.83_H2-Q2.2
  crRNA array
cgatttcttggctttatatatcttgtggaaaggacgaaacaccgtaatttctactaagtgtagatatggtcgacccatcgagtcttaatttctactaagtgtagattaacctgcgcccgctgctgattttttaagcttggcgtggatccgatatcaactagatcttgaga

SEQ ID NO: 8590 - DNA, 170 bp, Artificial sequence
  Tbl1xr1.83_Kdm5c.1878
  crRNA array
cgatttcttggctttatatatcttgtggaaaggacgaaacaccgtaatttctactaagtgtagatatggtcgacccatcgagtcttaatttctactaagtgtagatagagcacggcacccgcccccttttttaagcttggcgtggatccgatatcaactagatcttgaga

SEQ ID NO: 8591 - DNA, 170 bp, Artificial sequence
  Tbl1xr1.83_Kdm5c.1879
  crRNA array
cgatttcttggctttatatatcttgtggaaaggacgaaacaccgtaatttctactaagtgtagatatggtcgacccatcgagtcttaatttctactaagtgtagatgagcacggcacccgccccccttttttaagcttggcgtggatccgatatcaactagatcttgaga

SEQ ID NO: 8592 - DNA, 170 bp, Artificial sequence
  Tbl1xr1.83_Kdm6a.56
  crRNA array
cgatttcttggctttatatatcttgtggaaaggacgaaacaccgtaatttctactaagtgtagatatggtcgacccatcgagtcttaatttctactaagtgtagattcgctgccgcctctcgcggcttttttaagcttggcgtggatccgatatcaactagatcttgaga

SEQ ID NO: 8593 - DNA, 170 bp, Artificial sequence
  Tbl1xr1.83_Kdm6a.57
  crRNA array
cgatttcttggctttatatatcttgtggaaaggacgaaacaccgtaatttctactaagtgtagatatggtcgacccatcgagtcttaatttctactaagtgtagatcgctgccgcctctcgcggcattttttaagcttggcgtggatccgatatcaactagatcttgaga

SEQ ID NO: 8594 - DNA, 170 bp, Artificial sequence
  Tbl1xr1.83_Kmt2b.265
  crRNA array
cgatttcttggctttatatatcttgtggaaaggacgaaacaccgtaatttctactaagtgtagatatggtcgacccatcgagtcttaatttctactaagtgtagatccccaagtgaagcccacctgttttttaagcttggcgtggatccgatatcaactagatcttgaga

SEQ ID NO: 8595 - DNA, 170 bp, Artificial sequence
  Tbl1xr1.83_Kmt2b.298
  crRNA array
cgatttcttggctttatatatcttgtggaaaggacgaaacaccgtaatttctactaagtgtagatatggtcgacccatcgagtcttaatttctactaagtgtagattccggcagggaccggctggcttttttaagcttggcgtggatccgatatcaactagatcttgaga

SEQ ID NO: 8596 - DNA, 170 bp, Artificial sequence
  Tbl1xr1.83_Kmt2c.1962
  crRNA array
cgatttcttggctttatatatcttgtggaaaggacgaaacaccgtaatttctactaagtgtagatatggtcgacccatcgagtcttaatttctactaagtgtagatgtgacgatctgtgccacaagttttttaagcttggcgtggatccgatatcaactagatcttgaga

SEQ ID NO: 8597 - DNA, 170 bp, Artificial sequence
  Tbl1xr1.83_Kmt2c.2236
  crRNA array
cgatttcttggctttatatatcttgtggaaaggacgaaacaccgtaatttctactaagtgtagatatggtcgacccatcgagtcttaatttctactaagtgtagatactcgacctccacctccctattttttaagcttggcgtggatccgatatcaactagatcttgaga

SEQ ID NO: 8598 - DNA, 170 bp, Artificial sequence
  Tbl1xr1.83_Kmt2d.316
  crRNA array
cgatttcttggctttatatatcttgtggaaaggacgaaacaccgtaatttctactaagtgtagatatggtcgacccatcgagtcttaatttctactaagtgtagatactccaggccacccaggtggttttttaagcttggcgtggatccgatatcaactagatcttgaga

SEQ ID NO: 8599 - DNA, 170 bp, Artificial sequence
  Tbl1xr1.83_Kmt2d.416
  crRNA array
cgatttcttggctttatatatcttgtggaaaggacgaaacaccgtaatttctactaagtgtagatatggtcgacccatcgagtcttaatttctactaagtgtagattaaacccccgggggaagggtttttttaagcttggcgtggatccgatatcaactagatcttgaga

SEQ ID NO: 8600 - DNA, 170 bp, Artificial sequence
  Tbl1xr1.83_Map2k4.119
  crRNA array
cgatttcttggctttatatatcttgtggaaaggacgaaacaccgtaatttctactaagtgtagatatggtcgacccatcgagtcttaatttctactaagtgtagattgctgtgtgggcggccacatttttttaagcttggcgtggatccgatatcaactagatcttgaga

SEQ ID NO: 8601 - DNA, 170 bp, Artificial sequence
  Tbl1xr1.83_Map2k4.1261
  crRNA array
cgatttcttggctttatatatcttgtggaaaggacgaaacaccgtaatttctactaagtgtagatatggtcgacccatcgagtcttaatttctactaagtgtagatgatgtagtaatgcggagtagttttttaagcttggcgtggatccgatatcaactagatcttgaga

SEQ ID NO: 8602 - DNA, 170 bp, Artificial sequence
  Tbl1xr1.83_Map3k1.235
  crRNA array
cgatttcttggctttatatatcttgtggaaaggacgaaacaccgtaatttctactaagtgtagatatggtcgacccatcgagtcttaatttctactaagtgtagataaaacgctactgatcgatcgttttttaagcttggcgtggatccgatatcaactagatcttgaga

SEQ ID NO: 8603 - DNA, 170 bp, Artificial sequence
  Tbl1xr1.83_Map3k1.3838
  crRNA array
cgatttcttggctttatatatcttgtggaaaggacgaaacaccgtaatttctactaagtgtagatatggtcgacccatcgagtcttaatttctactaagtgtagatccaacaacagggccccactattttttaagcttggcgtggatccgatatcaactagatcttgaga

SEQ ID NO: 8604 - DNA, 170 bp, Artificial sequence
  Tbl1xr1.83_Mga.1655
  crRNA array
cgatttcttggctttatatatcttgtggaaaggacgaaacaccgtaatttctactaagtgtagatatggtcgacccatcgagtcttaatttctactaagtgtagatcgagaagtggagagcatattttttttaagcttggcgtggatccgatatcaactagatcttgaga

SEQ ID NO: 8605 - DNA, 170 bp, Artificial sequence
  Tbl1xr1.83_Mga.93
  crRNA array
cgatttcttggctttatatatcttgtggaaaggacgaaacaccgtaatttctactaagtgtagatatggtcgacccatcgagtcttaatttctactaagtgtagatgagaaggctccccataatgtttttttaagcttggcgtggatccgatatcaactagatcttgaga

SEQ ID NO: 8606 - DNA, 170 bp, Artificial sequence
  Tbl1xr1.83_Nf1.746
  crRNA array
cgatttcttggctttatatatcttgtggaaaggacgaaacaccgtaatttctactaagtgtagatatggtcgacccatcgagtcttaatttctactaagtgtagattaagcataatgatgatgccattttttaagcttggcgtggatccgatatcaactagatcttgaga

SEQ ID NO: 8607 - DNA, 170 bp, Artificial sequence
  Tbl1xr1.83_Nf1.97
  crRNA array
cgatttcttggctttatatatcttgtggaaaggacgaaacaccgtaatttctactaagtgtagatatggtcgacccatcgagtcttaatttctactaagtgtagatagcccgctacatgctgatgcttttttaagcttggcgtggatccgatatcaactagatcttgaga

SEQ ID NO: 8608 - DNA, 170 bp, Artificial sequence
  Tbl1xr1.83_Nf2.356
  crRNA array
cgatttcttggctttatatatcttgtggaaaggacgaaacaccgtaatttctactaagtgtagatatggtcgacccatcgagtcttaatttctactaagtgtagatcggagtcatctgatagagatttttttaagcttggcgtggatccgatatcaactagatcttgaga

SEQ ID NO: 8609 - DNA, 170 bp, Artificial sequence
  Tbl1xr1.83_Nf2.768
  crRNA array
cgatttcttggctttatatatcttgtggaaaggacgaaacaccgtaatttctactaagtgtagatatggtcgacccatcgagtcttaatttctactaagtgtagatccgaagccccagtgtccggcttttttaagcttggcgtggatccgatatcaactagatcttgaga

SEQ ID NO: 8610 - DNA, 170 bp, Artificial sequence
  Tbl1xr1.83_Notch1.1849
  crRNA array
cgatttcttggctttatatatcttgtggaaaggacgaaacaccgtaatttctactaagtgtagatatggtcgacccatcgagtcttaatttctactaagtgtagatctggcgggtgggcggcgctgttttttaagcttggcgtggatccgatatcaactagatcttgaga

SEQ ID NO: 8611 - DNA, 170 bp, Artificial sequence
  Tbl1xr1.83_Notch1.649
  crRNA array
cgatttcttggctttatatatcttgtggaaaggacgaaacaccgtaatttctactaagtgtagatatggtcgacccatcgagtcttaatttctactaagtgtagattgggccaacgatgccaggacttttttaagcttggcgtggatccgatatcaactagatcttgaga

SEQ ID NO: 8612 - DNA, 170 bp, Artificial sequence
  Tbl1xr1.83_Nsd1.70
  crRNA array
cgatttcttggctttatatatcttgtggaaaggacgaaacaccgtaatttctactaagtgtagatatggtcgacccatcgagtcttaatttctactaagtgtagatactggtgtggacgatgcagattttttaagcttggcgtggatccgatatcaactagatcttgaga

SEQ ID NO: 8613 - DNA, 170 bp, Artificial sequence
  Tbl1xr1.83_Nsd1.90
  crRNA array
cgatttcttggctttatatatcttgtggaaaggacgaaacaccgtaatttctactaagtgtagatatggtcgacccatcgagtcttaatttctactaagtgtagataggagctaacggcaagaatgttttttaagcttggcgtggatccgatatcaactagatcttgaga

SEQ ID NO: 8614 - DNA, 170 bp, Artificial sequence
  Tbl1xr1.83_Pbrm1.1236
  crRNA array
cgatttcttggctttatatatcttgtggaaaggacgaaacaccgtaatttctactaagtgtagatatggtcgacccatcgagtcttaatttctactaagtgtagatgccgataaaaccaacagccgttttttaagcttggcgtggatccgatatcaactagatcttgaga

SEQ ID NO: 8615 - DNA, 170 bp, Artificial sequence
  Tbl1xr1.83_Pbrm1.969
  crRNA array
cgatttcttggctttatatatcttgtggaaaggacgaaacaccgtaatttctactaagtgtagatatggtcgacccatcgagtcttaatttctactaagtgtagatgagccctaatgaacagctcattttttaagcttggcgtggatccgatatcaactagatcttgaga

SEQ ID NO: 8616 - DNA, 170 bp, Artificial sequence
  Tbl1xr1.83_Pik3r1.76
  crRNA array
cgatttcttggctttatatatcttgtggaaaggacgaaacaccgtaatttctactaagtgtagatatggtcgacccatcgagtcttaatttctactaagtgtagataaaacctatacggcccgcacttttttaagcttggcgtggatccgatatcaactagatcttgaga

SEQ ID NO: 8617 - DNA, 170 bp, Artificial sequence
  Tbl1xr1.83_Pik3r1.77
  crRNA array
cgatttcttggctttatatatcttgtggaaaggacgaaacaccgtaatttctactaagtgtagatatggtcgacccatcgagtcttaatttctactaagtgtagataaacctatacggcccgcactttttttaagcttggcgtggatccgatatcaactagatcttgaga

SEQ ID NO: 8618 - DNA, 170 bp, Artificial sequence
  Tbl1xr1.83_Pten.240
  crRNA array
cgatttcttggctttatatatcttgtggaaaggacgaaacaccgtaatttctactaagtgtagatatggtcgacccatcgagtcttaatttctactaagtgtagattgcatacgctatagctgcttttttttaagcttggcgtggatccgatatcaactagatcttgaga

SEQ ID NO: 8619 - DNA, 170 bp, Artificial sequence
  Tbl1xr1.83_Pten.265
  crRNA array
cgatttcttggctttatatatcttgtggaaaggacgaaacaccgtaatttctactaagtgtagatatggtcgacccatcgagtcttaatttctactaagtgtagataagcgtggtgcgtgacgcacttttttaagcttggcgtggatccgatatcaactagatcttgaga

SEQ ID NO: 8620 - DNA, 170 bp, Artificial sequence
  Tbl1xr1.83_Rasa1.1478
  crRNA array
cgatttcttggctttatatatcttgtggaaaggacgaaacaccgtaatttctactaagtgtagatatggtcgacccatcgagtcttaatttctactaagtgtagatcgataatggtctatgatgtcttttttaagcttggcgtggatccgatatcaactagatcttgaga

SEQ ID NO: 8621 - DNA, 170 bp, Artificial sequence
  Tbl1xr1.83_Rasa1.223
  crRNA array
cgatttcttggctttatatatcttgtggaaaggacgaaacaccgtaatttctactaagtgtagatatggtcgacccatcgagtcttaatttctactaagtgtagattccatggagtatcgtgctcgttttttaagcttggcgtggatccgatatcaactagatcttgaga

SEQ ID NO: 8622 - DNA, 170 bp, Artificial sequence
  Tbl1xr1.83_Rb1.211
  crRNA array
cgatttcttggctttatatatcttgtggaaaggacgaaacaccgtaatttctactaagtgtagatatggtcgacccatcgagtcttaatttctactaagtgtagattctgacatgatcgggtacctttttttaagcttggcgtggatccgatatcaactagatcttgaga

SEQ ID NO: 8623 - DNA, 170 bp, Artificial sequence
  Tbl1xr1.83_Rb1.394
  crRNA array
cgatttcttggctttatatatcttgtggaaaggacgaaacaccgtaatttctactaagtgtagatatggtcgacccatcgagtcttaatttctactaagtgtagatagaaatctcgaagcaggatcttttttaagcttggcgtggatccgatatcaactagatcttgaga

SEQ ID NO: 8624 - DNA, 170 bp, Artificial sequence
  Tbl1xr1.83_Rbm10.5
  crRNA array
cgatttcttggctttatatatcttgtggaaaggacgaaacaccgtaatttctactaagtgtagatatggtcgacccatcgagtcttaatttctactaagtgtagatacgaaacctgaacccacacattttttaagcttggcgtggatccgatatcaactagatcttgaga

SEQ ID NO: 8625 - DNA, 170 bp, Artificial sequence
  Tbl1xr1.83_Rbm10.6
  crRNA array
cgatttcttggctttatatatcttgtggaaaggacgaaacaccgtaatttctactaagtgtagatatggtcgacccatcgagtcttaatttctactaagtgtagatcgaaacctgaacccacacagttttttaagcttggcgtggatccgatatcaactagatcttgaga

SEQ ID NO: 8626 - DNA, 170 bp, Artificial sequence
  Tbl1xr1.83_Rnf43.1920
  crRNA array
cgatttcttggctttatatatcttgtggaaaggacgaaacaccgtaatttctactaagtgtagatatggtcgacccatcgagtcttaatttctactaagtgtagatatccccgtgccgtggactccttttttaagcttggcgtggatccgatatcaactagatcttgaga

SEQ ID NO: 8627 - DNA, 170 bp, Artificial sequence
  Tbl1xr1.83_Rnf43.39
  crRNA array
cgatttcttggctttatatatcttgtggaaaggacgaaacaccgtaatttctactaagtgtagatatggtcgacccatcgagtcttaatttctactaagtgtagatcaaggggatcactctgataattttttaagcttggcgtggatccgatatcaactagatcttgaga

SEQ ID NO: 8628 - DNA, 170 bp, Artificial sequence
  Tbl1xr1.83_Runx1.204
  crRNA array
cgatttcttggctttatatatcttgtggaaaggacgaaacaccgtaatttctactaagtgtagatatggtcgacccatcgagtcttaatttctactaagtgtagattaaataagtccagccgttttttttttaagcttggcgtggatccgatatcaactagatcttgaga

SEQ ID NO: 8629 - DNA, 170 bp, Artificial sequence
  Tbl1xr1.83_Runx1.81
  crRNA array
cgatttcttggctttatatatcttgtggaaaggacgaaacaccgtaatttctactaagtgtagatatggtcgacccatcgagtcttaatttctactaagtgtagataggacgcgtatgggaattttttttttaagcttggcgtggatccgatatcaactagatcttgaga

SEQ ID NO: 8630 - DNA, 170 bp, Artificial sequence
  Tbl1xr1.83_Setd2.143
  crRNA array
cgatttcttggctttatatatcttgtggaaaggacgaaacaccgtaatttctactaagtgtagatatggtcgacccatcgagtcttaatttctactaagtgtagatgcacaaccacaacagactggttttttaagcttggcgtggatccgatatcaactagatcttgaga

SEQ ID NO: 8631 - DNA, 170 bp, Artificial sequence
  Tbl1xr1.83_Setd2.508
  crRNA array
cgatttcttggctttatatatcttgtggaaaggacgaaacaccgtaatttctactaagtgtagatatggtcgacccatcgagtcttaatttctactaagtgtagattacgatcccgagcacccgacttttttaagcttggcgtggatccgatatcaactagatcttgaga

SEQ ID NO: 8632 - DNA, 170 bp, Artificial sequence
  Tbl1xr1.83_Smad4.3038
  crRNA array
cgatttcttggctttatatatcttgtggaaaggacgaaacaccgtaatttctactaagtgtagatatggtcgacccatcgagtcttaatttctactaagtgtagatatctgcggcagtgtcaccggttttttaagcttggcgtggatccgatatcaactagatcttgaga

SEQ ID NO: 8633 - DNA, 170 bp, Artificial sequence
  Tbl1xr1.83_Smad4.39
  crRNA array
cgatttcttggctttatatatcttgtggaaaggacgaaacaccgtaatttctactaagtgtagatatggtcgacccatcgagtcttaatttctactaagtgtagatagtcaaacgcatactgacaattttttaagcttggcgtggatccgatatcaactagatcttgaga

SEQ ID NO: 8634 - DNA, 170 bp, Artificial sequence
  Tbl1xr1.83_Stag2.1409
  crRNA array
cgatttcttggctttatatatcttgtggaaaggacgaaacaccgtaatttctactaagtgtagatatggtcgacccatcgagtcttaatttctactaagtgtagatgctaataactgcggaagggcttttttaagcttggcgtggatccgatatcaactagatcttgaga

SEQ ID NO: 8635 - DNA, 170 bp, Artificial sequence
  Tbl1xr1.83_Stag2.4401
  crRNA array
cgatttcttggctttatatatcttgtggaaaggacgaaacaccgtaatttctactaagtgtagatatggtcgacccatcgagtcttaatttctactaagtgtagattaatcgtccagtggtgtatattttttaagcttggcgtggatccgatatcaactagatcttgaga

SEQ ID NO: 8636 - DNA, 170 bp, Artificial sequence
  Tbl1xr1.83_Tgfbr2.290
  crRNA array
cgatttcttggctttatatatcttgtggaaaggacgaaacaccgtaatttctactaagtgtagatatggtcgacccatcgagtcttaatttctactaagtgtagatcctctcggcgcccgggtaaattttttaagcttggcgtggatccgatatcaactagatcttgaga

SEQ ID NO: 8637 - DNA, 170 bp, Artificial sequence
  Tbl1xr1.83_Tgfbr2.292
  crRNA array
cgatttcttggctttatatatcttgtggaaaggacgaaacaccgtaatttctactaagtgtagatatggtcgacccatcgagtcttaatttctactaagtgtagatcccgggcgccgagagggaaattttttaagcttggcgtggatccgatatcaactagatcttgaga

SEQ ID NO: 8638 - DNA, 170 bp, Artificial sequence
  Tbl1xr1.83_Trp53.4
  crRNA array
cgatttcttggctttatatatcttgtggaaaggacgaaacaccgtaatttctactaagtgtagatatggtcgacccatcgagtcttaatttctactaagtgtagatccctgaactgcccccagggattttttaagcttggcgtggatccgatatcaactagatcttgaga

SEQ ID NO: 8639 - DNA, 170 bp, Artificial sequence
  Tbl1xr1.83_Trp53.528
  crRNA array
cgatttcttggctttatatatcttgtggaaaggacgaaacaccgtaatttctactaagtgtagatatggtcgacccatcgagtcttaatttctactaagtgtagatgctgggccagcagagacctgttttttaagcttggcgtggatccgatatcaactagatcttgaga

SEQ ID NO: 8640 - DNA, 170 bp, Artificial sequence
  Tbl1xr1.83_Vhl.1
  crRNA array
cgatttcttggctttatatatcttgtggaaaggacgaaacaccgtaatttctactaagtgtagatatggtcgacccatcgagtcttaatttctactaagtgtagatagggctcccggcggccatttttttttaagcttggcgtggatccgatatcaactagatcttgaga

SEQ ID NO: 8641 - DNA, 170 bp, Artificial sequence
  Tbl1xr1.83_Vhl.151
  crRNA array
cgatttcttggctttatatatcttgtggaaaggacgaaacaccgtaatttctactaagtgtagatatggtcgacccatcgagtcttaatttctactaagtgtagattagagcactcacccgagggattttttaagcttggcgtggatccgatatcaactagatcttgaga

SEQ ID NO: 8642 - DNA, 170 bp, Artificial sequence
  Tbl1xr1.83_Zc3h13.1387
  crRNA array
cgatttcttggctttatatatcttgtggaaaggacgaaacaccgtaatttctactaagtgtagatatggtcgacccatcgagtcttaatttctactaagtgtagatgtgacgccggtcatgtgactttttttaagcttggcgtggatccgatatcaactagatcttgaga

SEQ ID NO: 8643 - DNA, 170 bp, Artificial sequence
  Tbl1xr1.83_Zc3h13.1777
  crRNA array
cgatttcttggctttatatatcttgtggaaaggacgaaacaccgtaatttctactaagtgtagatatggtcgacccatcgagtcttaatttctactaagtgtagatgatgctgccagtgtagcggcttttttaagcttggcgtggatccgatatcaactagatcttgaga

SEQ ID NO: 8644 - DNA, 170 bp, Artificial sequence
  Tgfbr2.290_Acvr2a.155
  crRNA array
cgatttcttggctttatatatcttgtggaaaggacgaaacaccgtaatttctactaagtgtagatcctctcggcgcccgggtaaataatttctactaagtgtagatggacctggctaatcaagtatttttttaagcttggcgtggatccgatatcaactagatcttgaga

SEQ ID NO: 8645 - DNA, 170 bp, Artificial sequence
  Tgfbr2.290_Acvr2a.70
  crRNA array
cgatttcttggctttatatatcttgtggaaaggacgaaacaccgtaatttctactaagtgtagatcctctcggcgcccgggtaaataatttctactaagtgtagatcccgaggcgccggagaagccttttttaagcttggcgtggatccgatatcaactagatcttgaga

SEQ ID NO: 8646 - DNA, 170 bp, Artificial sequence
  Tgfbr2.290_Apc.21
  crRNA array
cgatttcttggctttatatatcttgtggaaaggacgaaacaccgtaatttctactaagtgtagatcctctcggcgcccgggtaaataatttctactaagtgtagatgtgatccacacgtgtagctgttttttaagcttggcgtggatccgatatcaactagatcttgaga

SEQ ID NO: 8647 - DNA, 170 bp, Artificial sequence
  Tgfbr2.290_Apc.867
  crRNA array
cgatttcttggctttatatatcttgtggaaaggacgaaacaccgtaatttctactaagtgtagatcctctcggcgcccgggtaaataatttctactaagtgtagatcagtcccaggcggcggaagcttttttaagcttggcgtggatccgatatcaactagatcttgaga

SEQ ID NO: 8648 - DNA, 170 bp, Artificial sequence
  Tgfbr2.290_Arid1a.2
  crRNA array
cgatttcttggctttatatatcttgtggaaaggacgaaacaccgtaatttctactaagtgtagatcctctcggcgcccgggtaaataatttctactaagtgtagatcccgcgcccccgtcctggggttttttaagcttggcgtggatccgatatcaactagatcttgaga

SEQ ID NO: 8649 - DNA, 170 bp, Artificial sequence
  Tgfbr2.290_Arid1a.5
  crRNA array
cgatttcttggctttatatatcttgtggaaaggacgaaacaccgtaatttctactaagtgtagatcctctcggcgcccgggtaaataatttctactaagtgtagatcccgcgctcggccgctgccgttttttaagcttggcgtggatccgatatcaactagatcttgaga

SEQ ID NO: 8650 - DNA, 170 bp, Artificial sequence
  Tgfbr2.290_Arid2.166
  crRNA array
cgatttcttggctttatatatcttgtggaaaggacgaaacaccgtaatttctactaagtgtagatcctctcggcgcccgggtaaataatttctactaagtgtagataaccgcgatctgggttttttttttttaagcttggcgtggatccgatatcaactagatcttgaga

SEQ ID NO: 8651 - DNA, 170 bp, Artificial sequence
  Tgfbr2.290_Arid2.172
  crRNA array
cgatttcttggctttatatatcttgtggaaaggacgaaacaccgtaatttctactaagtgtagatcctctcggcgcccgggtaaataatttctactaagtgtagatctggacgagctgcggcagttttttttaagcttggcgtggatccgatatcaactagatcttgaga

SEQ ID NO: 8652 - DNA, 170 bp, Artificial sequence
  Tgfbr2.290_Atm.120
  crRNA array
cgatttcttggctttatatatcttgtggaaaggacgaaacaccgtaatttctactaagtgtagatcctctcggcgcccgggtaaataatttctactaagtgtagatgacaggtagtcggcagctaattttttaagcttggcgtggatccgatatcaactagatcttgaga

SEQ ID NO: 8653 - DNA, 170 bp, Artificial sequence
  Tgfbr2.290_Atm.997
  crRNA array
cgatttcttggctttatatatcttgtggaaaggacgaaacaccgtaatttctactaagtgtagatcctctcggcgcccgggtaaataatttctactaagtgtagatgagaaagtctccgaatcgttttttttaagcttggcgtggatccgatatcaactagatcttgaga

SEQ ID NO: 8654 - DNA, 170 bp, Artificial sequence
  Tgfbr2.290_Atrx.249
  crRNA array
cgatttcttggctttatatatcttgtggaaaggacgaaacaccgtaatttctactaagtgtagatcctctcggcgcccgggtaaataatttctactaagtgtagattagccagtcgctcatatctcttttttaagcttggcgtggatccgatatcaactagatcttgaga

SEQ ID NO: 8655 - DNA, 170 bp, Artificial sequence
  Tgfbr2.290_Atrx.251
  crRNA array
cgatttcttggctttatatatcttgtggaaaggacgaaacaccgtaatttctactaagtgtagatcctctcggcgcccgggtaaataatttctactaagtgtagatgccagtcgctcatatctctgttttttaagcttggcgtggatccgatatcaactagatcttgaga

SEQ ID NO: 8656 - DNA, 170 bp, Artificial sequence
  Tgfbr2.290_Bcor.203
  crRNA array
cgatttcttggctttatatatcttgtggaaaggacgaaacaccgtaatttctactaagtgtagatcctctcggcgcccgggtaaataatttctactaagtgtagatccccggagcggagtccaggcttttttaagcttggcgtggatccgatatcaactagatcttgaga

SEQ ID NO: 8657 - DNA, 170 bp, Artificial sequence
  Tgfbr2.290_Bcor.475
  crRNA array
cgatttcttggctttatatatcttgtggaaaggacgaaacaccgtaatttctactaagtgtagatcctctcggcgcccgggtaaataatttctactaagtgtagattgcaacccctctgtatgggattttttaagcttggcgtggatccgatatcaactagatcttgaga

SEQ ID NO: 8658 - DNA, 170 bp, Artificial sequence
  Tgfbr2.290_Brca1.112
  crRNA array
cgatttcttggctttatatatcttgtggaaaggacgaaacaccgtaatttctactaagtgtagatcctctcggcgcccgggtaaataatttctactaagtgtagatctagacgctctgtggagactttttttaagcttggcgtggatccgatatcaactagatcttgaga

SEQ ID NO: 8659 - DNA, 170 bp, Artificial sequence
  Tgfbr2.290_Brca1.53
  crRNA array
cgatttcttggctttatatatcttgtggaaaggacgaaacaccgtaatttctactaagtgtagatcctctcggcgcccgggtaaataatttctactaagtgtagataatgaggaggcgtcgatcatttttttaagcttggcgtggatccgatatcaactagatcttgaga

SEQ ID NO: 8660 - DNA, 170 bp, Artificial sequence
  Tgfbr2.290_Casp8.45
  crRNA array
cgatttcttggctttatatatcttgtggaaaggacgaaacaccgtaatttctactaagtgtagatcctctcggcgcccgggtaaataatttctactaagtgtagatctaccgagatcctgtgaatgttttttaagcttggcgtggatccgatatcaactagatcttgaga

SEQ ID NO: 8661 - DNA, 170 bp, Artificial sequence
  Tgfbr2.290_Casp8.54
  crRNA array
cgatttcttggctttatatatcttgtggaaaggacgaaacaccgtaatttctactaagtgtagatcctctcggcgcccgggtaaataatttctactaagtgtagatcagtgcagtcgtcgtaagatttttttaagcttggcgtggatccgatatcaactagatcttgaga

SEQ ID NO: 8662 - DNA, 170 bp, Artificial sequence
  Tgfbr2.290_Cbwd1.84
  crRNA array
cgatttcttggctttatatatcttgtggaaaggacgaaacaccgtaatttctactaagtgtagatcctctcggcgcccgggtaaataatttctactaagtgtagatcacagcaggtaacatgccgcttttttaagcttggcgtggatccgatatcaactagatcttgaga

SEQ ID NO: 8663 - DNA, 170 bp, Artificial sequence
  Tgfbr2.290_Cbwd1.85
  crRNA array
cgatttcttggctttatatatcttgtggaaaggacgaaacaccgtaatttctactaagtgtagatcctctcggcgcccgggtaaataatttctactaagtgtagatacagcaggtaacatgccgccttttttaagcttggcgtggatccgatatcaactagatcttgaga

SEQ ID NO: 8664 - DNA, 170 bp, Artificial sequence
  Tgfbr2.290_Cdh1.387
  crRNA array
cgatttcttggctttatatatcttgtggaaaggacgaaacaccgtaatttctactaagtgtagatcctctcggcgcccgggtaaataatttctactaagtgtagatctcggcgtctgccgggtccgttttttaagcttggcgtggatccgatatcaactagatcttgaga

SEQ ID NO: 8665 - DNA, 170 bp, Artificial sequence
  Tgfbr2.290_Cdh1.58
  crRNA array
cgatttcttggctttatatatcttgtggaaaggacgaaacaccgtaatttctactaagtgtagatcctctcggcgcccgggtaaataatttctactaagtgtagatctcgtccgcgcccgggactcttttttaagcttggcgtggatccgatatcaactagatcttgaga

SEQ ID NO: 8666 - DNA, 170 bp, Artificial sequence
  Tgfbr2.290_Cdkn2a.647
  crRNA array
cgatttcttggctttatatatcttgtggaaaggacgaaacaccgtaatttctactaagtgtagatcctctcggcgcccgggtaaataatttctactaagtgtagatgcaatcacgggagggagcagttttttaagcttggcgtggatccgatatcaactagatcttgaga

SEQ ID NO: 8667 - DNA, 170 bp, Artificial sequence
  Tgfbr2.290_Cdkn2a.648
  crRNA array
cgatttcttggctttatatatcttgtggaaaggacgaaacaccgtaatttctactaagtgtagatcctctcggcgcccgggtaaataatttctactaagtgtagatcaatcacgggagggagcagattttttaagcttggcgtggatccgatatcaactagatcttgaga

SEQ ID NO: 8668 - DNA, 170 bp, Artificial sequence
  Tgfbr2.290_Cic.162
  crRNA array
cgatttcttggctttatatatcttgtggaaaggacgaaacaccgtaatttctactaagtgtagatcctctcggcgcccgggtaaataatttctactaagtgtagatcgcaggcgcgcccggcggagttttttaagcttggcgtggatccgatatcaactagatcttgaga

SEQ ID NO: 8669 - DNA, 170 bp, Artificial sequence
  Tgfbr2.290_Cic.164
  crRNA array
cgatttcttggctttatatatcttgtggaaaggacgaaacaccgtaatttctactaagtgtagatcctctcggcgcccgggtaaataatttctactaagtgtagatcgggccctgggccggcggctttttttaagcttggcgtggatccgatatcaactagatcttgaga

SEQ ID NO: 8670 - DNA, 170 bp, Artificial sequence
  Tgfbr2.290_Ctcf.229
  crRNA array
cgatttcttggctttatatatcttgtggaaaggacgaaacaccgtaatttctactaagtgtagatcctctcggcgcccgggtaaataatttctactaagtgtagatggctggtggctgatagtctgttttttaagcttggcgtggatccgatatcaactagatcttgaga

SEQ ID NO: 8671 - DNA, 170 bp, Artificial sequence
  Tgfbr2.290_Ctcf.809
  crRNA array
cgatttcttggctttatatatcttgtggaaaggacgaaacaccgtaatttctactaagtgtagatcctctcggcgcccgggtaaataatttctactaagtgtagataagcgctatcatgatcccaattttttaagcttggcgtggatccgatatcaactagatcttgaga

SEQ ID NO: 8672 - DNA, 170 bp, Artificial sequence
  Tgfbr2.290_Elf3.826
  crRNA array
cgatttcttggctttatatatcttgtggaaaggacgaaacaccgtaatttctactaagtgtagatcctctcggcgcccgggtaaataatttctactaagtgtagattccgagacatcctaatccacttttttaagcttggcgtggatccgatatcaactagatcttgaga

SEQ ID NO: 8673 - DNA, 170 bp, Artificial sequence
  Tgfbr2.290_Elf3.983
  crRNA array
cgatttcttggctttatatatcttgtggaaaggacgaaacaccgtaatttctactaagtgtagatcctctcggcgcccgggtaaataatttctactaagtgtagattaggccccctaactggaccattttttaagcttggcgtggatccgatatcaactagatcttgaga

SEQ ID NO: 8674 - DNA, 170 bp, Artificial sequence
  Tgfbr2.290_Ep300.310
  crRNA array
cgatttcttggctttatatatcttgtggaaaggacgaaacaccgtaatttctactaagtgtagatcctctcggcgcccgggtaaataatttctactaagtgtagatatggtacgacagtgaggaagttttttaagcttggcgtggatccgatatcaactagatcttgaga

SEQ ID NO: 8675 - DNA, 170 bp, Artificial sequence
  Tgfbr2.290_Ep300.587
  crRNA array
cgatttcttggctttatatatcttgtggaaaggacgaaacaccgtaatttctactaagtgtagatcctctcggcgcccgggtaaataatttctactaagtgtagatcgccccggggcccccaaccattttttaagcttggcgtggatccgatatcaactagatcttgaga

SEQ ID NO: 8676 - DNA, 170 bp, Artificial sequence
  Tgfbr2.290_Epha2.126
  crRNA array
cgatttcttggctttatatatcttgtggaaaggacgaaacaccgtaatttctactaagtgtagatcctctcggcgcccgggtaaataatttctactaagtgtagatcctgtgccgccgcggccgccttttttaagcttggcgtggatccgatatcaactagatcttgaga

SEQ ID NO: 8677 - DNA, 170 bp, Artificial sequence
  Tgfbr2.290_Epha2.5
  crRNA array
cgatttcttggctttatatatcttgtggaaaggacgaaacaccgtaatttctactaagtgtagatcctctcggcgcccgggtaaataatttctactaagtgtagatcatgagctggcgccacccggttttttaagcttggcgtggatccgatatcaactagatcttgaga

SEQ ID NO: 8678 - DNA, 170 bp, Artificial sequence
  Tgfbr2.290_Fat1.105
  crRNA array
cgatttcttggctttatatatcttgtggaaaggacgaaacaccgtaatttctactaagtgtagatcctctcggcgcccgggtaaataatttctactaagtgtagataactcgaggtgacaacaagtttttttaagcttggcgtggatccgatatcaactagatcttgaga

SEQ ID NO: 8679 - DNA, 170 bp, Artificial sequence
  Tgfbr2.290_Fat1.122
  crRNA array
cgatttcttggctttatatatcttgtggaaaggacgaaacaccgtaatttctactaagtgtagatcctctcggcgcccgggtaaataatttctactaagtgtagatccatcgacatggaaacgggattttttaagcttggcgtggatccgatatcaactagatcttgaga

SEQ ID NO: 8680 - DNA, 170 bp, Artificial sequence
  Tgfbr2.290_Fbxw7.21
  crRNA array
cgatttcttggctttatatatcttgtggaaaggacgaaacaccgtaatttctactaagtgtagatcctctcggcgcccgggtaaataatttctactaagtgtagattaatgtgccgtagaaacccattttttaagcttggcgtggatccgatatcaactagatcttgaga

SEQ ID NO: 8681 - DNA, 170 bp, Artificial sequence
  Tgfbr2.290_Fbxw7.23
  crRNA array
cgatttcttggctttatatatcttgtggaaaggacgaaacaccgtaatttctactaagtgtagatcctctcggcgcccgggtaaataatttctactaagtgtagatatgtgccgtagaaacccatattttttaagcttggcgtggatccgatatcaactagatcttgaga

SEQ ID NO: 8682 - DNA, 170 bp, Artificial sequence
  Tgfbr2.290_Gata3.34
  crRNA array
cgatttcttggctttatatatcttgtggaaaggacgaaacaccgtaatttctactaagtgtagatcctctcggcgcccgggtaaataatttctactaagtgtagatctaaactatcccgcaaagatttttttaagcttggcgtggatccgatatcaactagatcttgaga

SEQ ID NO: 8683 - DNA, 170 bp, Artificial sequence
  Tgfbr2.290_Gata3.47
  crRNA array
cgatttcttggctttatatatcttgtggaaaggacgaaacaccgtaatttctactaagtgtagatcctctcggcgcccgggtaaataatttctactaagtgtagatcgtagtaggacgggacgtggttttttaagcttggcgtggatccgatatcaactagatcttgaga

SEQ ID NO: 8684 - DNA, 170 bp, Artificial sequence
  Tgfbr2.290_H2-Q2.1
  crRNA array
cgatttcttggctttatatatcttgtggaaaggacgaaacaccgtaatttctactaagtgtagatcctctcggcgcccgggtaaataatttctactaagtgtagatagggcggccaccaacagcagttttttaagcttggcgtggatccgatatcaactagatcttgaga

SEQ ID NO: 8685 - DNA, 170 bp, Artificial sequence
  Tgfbr2.290_H2-Q2.2
  crRNA array
cgatttcttggctttatatatcttgtggaaaggacgaaacaccgtaatttctactaagtgtagatcctctcggcgcccgggtaaataatttctactaagtgtagattaacctgcgcccgctgctgattttttaagcttggcgtggatccgatatcaactagatcttgaga

SEQ ID NO: 8686 - DNA, 170 bp, Artificial sequence
  Tgfbr2.290_Kdm5c.1878
  crRNA array
cgatttcttggctttatatatcttgtggaaaggacgaaacaccgtaatttctactaagtgtagatcctctcggcgcccgggtaaataatttctactaagtgtagatagagcacggcacccgcccccttttttaagcttggcgtggatccgatatcaactagatcttgaga

SEQ ID NO: 8687 - DNA, 170 bp, Artificial sequence
  Tgfbr2.290_Kdm5c.1879
  crRNA array
cgatttcttggctttatatatcttgtggaaaggacgaaacaccgtaatttctactaagtgtagatcctctcggcgcccgggtaaataatttctactaagtgtagatgagcacggcacccgccccccttttttaagcttggcgtggatccgatatcaactagatcttgaga

SEQ ID NO: 8688 - DNA, 170 bp, Artificial sequence
  Tgfbr2.290_Kdm6a.56
  crRNA array
cgatttcttggctttatatatcttgtggaaaggacgaaacaccgtaatttctactaagtgtagatcctctcggcgcccgggtaaataatttctactaagtgtagattcgctgccgcctctcgcggcttttttaagcttggcgtggatccgatatcaactagatcttgaga

SEQ ID NO: 8689 - DNA, 170 bp, Artificial sequence
  Tgfbr2.290_Kdm6a.57
  crRNA array
cgatttcttggctttatatatcttgtggaaaggacgaaacaccgtaatttctactaagtgtagatcctctcggcgcccgggtaaataatttctactaagtgtagatcgctgccgcctctcgcggcattttttaagcttggcgtggatccgatatcaactagatcttgaga

SEQ ID NO: 8690 - DNA, 170 bp, Artificial sequence
  Tgfbr2.290_Kmt2b.265
  crRNA array
cgatttcttggctttatatatcttgtggaaaggacgaaacaccgtaatttctactaagtgtagatcctctcggcgcccgggtaaataatttctactaagtgtagatccccaagtgaagcccacctgttttttaagcttggcgtggatccgatatcaactagatcttgaga

SEQ ID NO: 8691 - DNA, 170 bp, Artificial sequence
  Tgfbr2.290_Kmt2b.298
  crRNA array
cgatttcttggctttatatatcttgtggaaaggacgaaacaccgtaatttctactaagtgtagatcctctcggcgcccgggtaaataatttctactaagtgtagattccggcagggaccggctggcttttttaagcttggcgtggatccgatatcaactagatcttgaga

SEQ ID NO: 8692 - DNA, 170 bp, Artificial sequence
  Tgfbr2.290_Kmt2c.1962
  crRNA array
cgatttcttggctttatatatcttgtggaaaggacgaaacaccgtaatttctactaagtgtagatcctctcggcgcccgggtaaataatttctactaagtgtagatgtgacgatctgtgccacaagttttttaagcttggcgtggatccgatatcaactagatcttgaga

SEQ ID NO: 8693 - DNA, 170 bp, Artificial sequence
  Tgfbr2.290_Kmt2c.2236
  crRNA array
cgatttcttggctttatatatcttgtggaaaggacgaaacaccgtaatttctactaagtgtagatcctctcggcgcccgggtaaataatttctactaagtgtagatactcgacctccacctccctattttttaagcttggcgtggatccgatatcaactagatcttgaga

SEQ ID NO: 8694 - DNA, 170 bp, Artificial sequence
  Tgfbr2.290_Kmt2d.316
  crRNA array
cgatttcttggctttatatatcttgtggaaaggacgaaacaccgtaatttctactaagtgtagatcctctcggcgcccgggtaaataatttctactaagtgtagatactccaggccacccaggtggttttttaagcttggcgtggatccgatatcaactagatcttgaga

SEQ ID NO: 8695 - DNA, 170 bp, Artificial sequence
  Tgfbr2.290_Kmt2d.416
  crRNA array
cgatttcttggctttatatatcttgtggaaaggacgaaacaccgtaatttctactaagtgtagatcctctcggcgcccgggtaaataatttctactaagtgtagattaaacccccgggggaagggtttttttaagcttggcgtggatccgatatcaactagatcttgaga

SEQ ID NO: 8696 - DNA, 170 bp, Artificial sequence
  Tgfbr2.290_Map2k4.119
  crRNA array
cgatttcttggctttatatatcttgtggaaaggacgaaacaccgtaatttctactaagtgtagatcctctcggcgcccgggtaaataatttctactaagtgtagattgctgtgtgggcggccacatttttttaagcttggcgtggatccgatatcaactagatcttgaga

SEQ ID NO: 8697 - DNA, 170 bp, Artificial sequence
  Tgfbr2.290_Map2k4.1261
  crRNA array
cgatttcttggctttatatatcttgtggaaaggacgaaacaccgtaatttctactaagtgtagatcctctcggcgcccgggtaaataatttctactaagtgtagatgatgtagtaatgcggagtagttttttaagcttggcgtggatccgatatcaactagatcttgaga

SEQ ID NO: 8698 - DNA, 170 bp, Artificial sequence
  Tgfbr2.290_Map3k1.235
  crRNA array
cgatttcttggctttatatatcttgtggaaaggacgaaacaccgtaatttctactaagtgtagatcctctcggcgcccgggtaaataatttctactaagtgtagataaaacgctactgatcgatcgttttttaagcttggcgtggatccgatatcaactagatcttgaga

SEQ ID NO: 8699 - DNA, 170 bp, Artificial sequence
  Tgfbr2.290_Map3k1.3838
  crRNA array
cgatttcttggctttatatatcttgtggaaaggacgaaacaccgtaatttctactaagtgtagatcctctcggcgcccgggtaaataatttctactaagtgtagatccaacaacagggccccactattttttaagcttggcgtggatccgatatcaactagatcttgaga

SEQ ID NO: 8700 - DNA, 170 bp, Artificial sequence
  Tgfbr2.290_Mga.1655
  crRNA array
cgatttcttggctttatatatcttgtggaaaggacgaaacaccgtaatttctactaagtgtagatcctctcggcgcccgggtaaataatttctactaagtgtagatcgagaagtggagagcatattttttttaagcttggcgtggatccgatatcaactagatcttgaga

SEQ ID NO: 8701 - DNA, 170 bp, Artificial sequence
  Tgfbr2.290_Mga.93
  crRNA array
cgatttcttggctttatatatcttgtggaaaggacgaaacaccgtaatttctactaagtgtagatcctctcggcgcccgggtaaataatttctactaagtgtagatgagaaggctccccataatgtttttttaagcttggcgtggatccgatatcaactagatcttgaga

SEQ ID NO: 8702 - DNA, 170 bp, Artificial sequence
  Tgfbr2.290_Nf1.746
  crRNA array
cgatttcttggctttatatatcttgtggaaaggacgaaacaccgtaatttctactaagtgtagatcctctcggcgcccgggtaaataatttctactaagtgtagattaagcataatgatgatgccattttttaagcttggcgtggatccgatatcaactagatcttgaga

SEQ ID NO: 8703 - DNA, 170 bp, Artificial sequence
  Tgfbr2.290_Nf1.97
  crRNA array
cgatttcttggctttatatatcttgtggaaaggacgaaacaccgtaatttctactaagtgtagatcctctcggcgcccgggtaaataatttctactaagtgtagatagcccgctacatgctgatgcttttttaagcttggcgtggatccgatatcaactagatcttgaga

SEQ ID NO: 8704 - DNA, 170 bp, Artificial sequence
  Tgfbr2.290_Nf2.356
  crRNA array
cgatttcttggctttatatatcttgtggaaaggacgaaacaccgtaatttctactaagtgtagatcctctcggcgcccgggtaaataatttctactaagtgtagatcggagtcatctgatagagatttttttaagcttggcgtggatccgatatcaactagatcttgaga

SEQ ID NO: 8705 - DNA, 170 bp, Artificial sequence
  Tgfbr2.290_Nf2.768
  crRNA array
cgatttcttggctttatatatcttgtggaaaggacgaaacaccgtaatttctactaagtgtagatcctctcggcgcccgggtaaataatttctactaagtgtagatccgaagccccagtgtccggcttttttaagcttggcgtggatccgatatcaactagatcttgaga

SEQ ID NO: 8706 - DNA, 170 bp, Artificial sequence
  Tgfbr2.290_Notch1.1849
  crRNA array
cgatttcttggctttatatatcttgtggaaaggacgaaacaccgtaatttctactaagtgtagatcctctcggcgcccgggtaaataatttctactaagtgtagatctggcgggtgggcggcgctgttttttaagcttggcgtggatccgatatcaactagatcttgaga

SEQ ID NO: 8707 - DNA, 170 bp, Artificial sequence
  Tgfbr2.290_Notch1.649
  crRNA array
cgatttcttggctttatatatcttgtggaaaggacgaaacaccgtaatttctactaagtgtagatcctctcggcgcccgggtaaataatttctactaagtgtagattgggccaacgatgccaggacttttttaagcttggcgtggatccgatatcaactagatcttgaga

SEQ ID NO: 8708 - DNA, 170 bp, Artificial sequence
  Tgfbr2.290_Nsd1.70
  crRNA array
cgatttcttggctttatatatcttgtggaaaggacgaaacaccgtaatttctactaagtgtagatcctctcggcgcccgggtaaataatttctactaagtgtagatactggtgtggacgatgcagattttttaagcttggcgtggatccgatatcaactagatcttgaga

SEQ ID NO: 8709 - DNA, 170 bp, Artificial sequence
  Tgfbr2.290_Nsd1.90
  crRNA array
cgatttcttggctttatatatcttgtggaaaggacgaaacaccgtaatttctactaagtgtagatcctctcggcgcccgggtaaataatttctactaagtgtagataggagctaacggcaagaatgttttttaagcttggcgtggatccgatatcaactagatcttgaga

SEQ ID NO: 8710 - DNA, 170 bp, Artificial sequence
  Tgfbr2.290_Pbrm1.1236
  crRNA array
cgatttcttggctttatatatcttgtggaaaggacgaaacaccgtaatttctactaagtgtagatcctctcggcgcccgggtaaataatttctactaagtgtagatgccgataaaaccaacagccgttttttaagcttggcgtggatccgatatcaactagatcttgaga

SEQ ID NO: 8711 - DNA, 170 bp, Artificial sequence
  Tgfbr2.290_Pbrm1.969
  crRNA array
cgatttcttggctttatatatcttgtggaaaggacgaaacaccgtaatttctactaagtgtagatcctctcggcgcccgggtaaataatttctactaagtgtagatgagccctaatgaacagctcattttttaagcttggcgtggatccgatatcaactagatcttgaga

SEQ ID NO: 8712 - DNA, 170 bp, Artificial sequence
  Tgfbr2.290_Pik3r1.76
  crRNA array
cgatttcttggctttatatatcttgtggaaaggacgaaacaccgtaatttctactaagtgtagatcctctcggcgcccgggtaaataatttctactaagtgtagataaaacctatacggcccgcacttttttaagcttggcgtggatccgatatcaactagatcttgaga

SEQ ID NO: 8713 - DNA, 170 bp, Artificial sequence
  Tgfbr2.290_Pik3r1.77
  crRNA array
cgatttcttggctttatatatcttgtggaaaggacgaaacaccgtaatttctactaagtgtagatcctctcggcgcccgggtaaataatttctactaagtgtagataaacctatacggcccgcactttttttaagcttggcgtggatccgatatcaactagatcttgaga

SEQ ID NO: 8714 - DNA, 170 bp, Artificial sequence
  Tgfbr2.290_Pten.240
  crRNA array
cgatttcttggctttatatatcttgtggaaaggacgaaacaccgtaatttctactaagtgtagatcctctcggcgcccgggtaaataatttctactaagtgtagattgcatacgctatagctgcttttttttaagcttggcgtggatccgatatcaactagatcttgaga

SEQ ID NO: 8715 - DNA, 170 bp, Artificial sequence
  Tgfbr2.290_Pten.265
  crRNA array
cgatttcttggctttatatatcttgtggaaaggacgaaacaccgtaatttctactaagtgtagatcctctcggcgcccgggtaaataatttctactaagtgtagataagcgtggtgcgtgacgcacttttttaagcttggcgtggatccgatatcaactagatcttgaga

SEQ ID NO: 8716 - DNA, 170 bp, Artificial sequence
  Tgfbr2.290_Rasa1.1478
  crRNA array
cgatttcttggctttatatatcttgtggaaaggacgaaacaccgtaatttctactaagtgtagatcctctcggcgcccgggtaaataatttctactaagtgtagatcgataatggtctatgatgtcttttttaagcttggcgtggatccgatatcaactagatcttgaga

SEQ ID NO: 8717 - DNA, 170 bp, Artificial sequence
  Tgfbr2.290_Rasa1.223
  crRNA array
cgatttcttggctttatatatcttgtggaaaggacgaaacaccgtaatttctactaagtgtagatcctctcggcgcccgggtaaataatttctactaagtgtagattccatggagtatcgtgctcgttttttaagcttggcgtggatccgatatcaactagatcttgaga

SEQ ID NO: 8718 - DNA, 170 bp, Artificial sequence
  Tgfbr2.290_Rb1.211
  crRNA array
cgatttcttggctttatatatcttgtggaaaggacgaaacaccgtaatttctactaagtgtagatcctctcggcgcccgggtaaataatttctactaagtgtagattctgacatgatcgggtacctttttttaagcttggcgtggatccgatatcaactagatcttgaga

SEQ ID NO: 8719 - DNA, 170 bp, Artificial sequence
  Tgfbr2.290_Rb1.394
  crRNA array
cgatttcttggctttatatatcttgtggaaaggacgaaacaccgtaatttctactaagtgtagatcctctcggcgcccgggtaaataatttctactaagtgtagatagaaatctcgaagcaggatcttttttaagcttggcgtggatccgatatcaactagatcttgaga

SEQ ID NO: 8720 - DNA, 170 bp, Artificial sequence
  Tgfbr2.290_Rbm10.5
  crRNA array
cgatttcttggctttatatatcttgtggaaaggacgaaacaccgtaatttctactaagtgtagatcctctcggcgcccgggtaaataatttctactaagtgtagatacgaaacctgaacccacacattttttaagcttggcgtggatccgatatcaactagatcttgaga

SEQ ID NO: 8721 - DNA, 170 bp, Artificial sequence
  Tgfbr2.290_Rbm10.6
  crRNA array
cgatttcttggctttatatatcttgtggaaaggacgaaacaccgtaatttctactaagtgtagatcctctcggcgcccgggtaaataatttctactaagtgtagatcgaaacctgaacccacacagttttttaagcttggcgtggatccgatatcaactagatcttgaga

SEQ ID NO: 8722 - DNA, 170 bp, Artificial sequence
  Tgfbr2.290_Rnf43.1920
  crRNA array
cgatttcttggctttatatatcttgtggaaaggacgaaacaccgtaatttctactaagtgtagatcctctcggcgcccgggtaaataatttctactaagtgtagatatccccgtgccgtggactccttttttaagcttggcgtggatccgatatcaactagatcttgaga

SEQ ID NO: 8723 - DNA, 170 bp, Artificial sequence
  Tgfbr2.290_Rnf43.39
  crRNA array
cgatttcttggctttatatatcttgtggaaaggacgaaacaccgtaatttctactaagtgtagatcctctcggcgcccgggtaaataatttctactaagtgtagatcaaggggatcactctgataattttttaagcttggcgtggatccgatatcaactagatcttgaga

SEQ ID NO: 8724 - DNA, 170 bp, Artificial sequence
  Tgfbr2.290_Runx1.204
  crRNA array
cgatttcttggctttatatatcttgtggaaaggacgaaacaccgtaatttctactaagtgtagatcctctcggcgcccgggtaaataatttctactaagtgtagattaaataagtccagccgttttttttttaagcttggcgtggatccgatatcaactagatcttgaga

SEQ ID NO: 8725 - DNA, 170 bp, Artificial sequence
  Tgfbr2.290_Runx1.81
  crRNA array
cgatttcttggctttatatatcttgtggaaaggacgaaacaccgtaatttctactaagtgtagatcctctcggcgcccgggtaaataatttctactaagtgtagataggacgcgtatgggaattttttttttaagcttggcgtggatccgatatcaactagatcttgaga

SEQ ID NO: 8726 - DNA, 170 bp, Artificial sequence
  Tgfbr2.290_Setd2.143
  crRNA array
cgatttcttggctttatatatcttgtggaaaggacgaaacaccgtaatttctactaagtgtagatcctctcggcgcccgggtaaataatttctactaagtgtagatgcacaaccacaacagactggttttttaagcttggcgtggatccgatatcaactagatcttgaga

SEQ ID NO: 8727 - DNA, 170 bp, Artificial sequence
  Tgfbr2.290_Setd2.508
  crRNA array
cgatttcttggctttatatatcttgtggaaaggacgaaacaccgtaatttctactaagtgtagatcctctcggcgcccgggtaaataatttctactaagtgtagattacgatcccgagcacccgacttttttaagcttggcgtggatccgatatcaactagatcttgaga

SEQ ID NO: 8728 - DNA, 170 bp, Artificial sequence
  Tgfbr2.290_Smad4.3038
  crRNA array
cgatttcttggctttatatatcttgtggaaaggacgaaacaccgtaatttctactaagtgtagatcctctcggcgcccgggtaaataatttctactaagtgtagatatctgcggcagtgtcaccggttttttaagcttggcgtggatccgatatcaactagatcttgaga

SEQ ID NO: 8729 - DNA, 170 bp, Artificial sequence
  Tgfbr2.290_Smad4.39
  crRNA array
cgatttcttggctttatatatcttgtggaaaggacgaaacaccgtaatttctactaagtgtagatcctctcggcgcccgggtaaataatttctactaagtgtagatagtcaaacgcatactgacaattttttaagcttggcgtggatccgatatcaactagatcttgaga

SEQ ID NO: 8730 - DNA, 170 bp, Artificial sequence
  Tgfbr2.290_Stag2.1409
  crRNA array
cgatttcttggctttatatatcttgtggaaaggacgaaacaccgtaatttctactaagtgtagatcctctcggcgcccgggtaaataatttctactaagtgtagatgctaataactgcggaagggcttttttaagcttggcgtggatccgatatcaactagatcttgaga

SEQ ID NO: 8731 - DNA, 170 bp, Artificial sequence
  Tgfbr2.290_Stag2.4401
  crRNA array
cgatttcttggctttatatatcttgtggaaaggacgaaacaccgtaatttctactaagtgtagatcctctcggcgcccgggtaaataatttctactaagtgtagattaatcgtccagtggtgtatattttttaagcttggcgtggatccgatatcaactagatcttgaga

SEQ ID NO: 8732 - DNA, 170 bp, Artificial sequence
  Tgfbr2.290_Tbl1xr1.1
  crRNA array
cgatttcttggctttatatatcttgtggaaaggacgaaacaccgtaatttctactaagtgtagatcctctcggcgcccgggtaaataatttctactaagtgtagatggatgcgcatactggtgaagttttttaagcttggcgtggatccgatatcaactagatcttgaga

SEQ ID NO: 8733 - DNA, 170 bp, Artificial sequence
  Tgfbr2.290_Tbl1xr1.83
  crRNA array
cgatttcttggctttatatatcttgtggaaaggacgaaacaccgtaatttctactaagtgtagatcctctcggcgcccgggtaaataatttctactaagtgtagatatggtcgacccatcgagtctttttttaagcttggcgtggatccgatatcaactagatcttgaga

SEQ ID NO: 8734 - DNA, 170 bp, Artificial sequence
  Tgfbr2.290_Trp53.4
  crRNA array
cgatttcttggctttatatatcttgtggaaaggacgaaacaccgtaatttctactaagtgtagatcctctcggcgcccgggtaaataatttctactaagtgtagatccctgaactgcccccagggattttttaagcttggcgtggatccgatatcaactagatcttgaga

SEQ ID NO: 8735 - DNA, 170 bp, Artificial sequence
  Tgfbr2.290_Trp53.528
  crRNA array
cgatttcttggctttatatatcttgtggaaaggacgaaacaccgtaatttctactaagtgtagatcctctcggcgcccgggtaaataatttctactaagtgtagatgctgggccagcagagacctgttttttaagcttggcgtggatccgatatcaactagatcttgaga

SEQ ID NO: 8736 - DNA, 170 bp, Artificial sequence
  Tgfbr2.290_Vhl.1
  crRNA array
cgatttcttggctttatatatcttgtggaaaggacgaaacaccgtaatttctactaagtgtagatcctctcggcgcccgggtaaataatttctactaagtgtagatagggctcccggcggccatttttttttaagcttggcgtggatccgatatcaactagatcttgaga

SEQ ID NO: 8737 - DNA, 170 bp, Artificial sequence
  Tgfbr2.290_Vhl.151
  crRNA array
cgatttcttggctttatatatcttgtggaaaggacgaaacaccgtaatttctactaagtgtagatcctctcggcgcccgggtaaataatttctactaagtgtagattagagcactcacccgagggattttttaagcttggcgtggatccgatatcaactagatcttgaga

SEQ ID NO: 8738 - DNA, 170 bp, Artificial sequence
  Tgfbr2.290_Zc3h13.1387
  crRNA array
cgatttcttggctttatatatcttgtggaaaggacgaaacaccgtaatttctactaagtgtagatcctctcggcgcccgggtaaataatttctactaagtgtagatgtgacgccggtcatgtgactttttttaagcttggcgtggatccgatatcaactagatcttgaga

SEQ ID NO: 8739 - DNA, 170 bp, Artificial sequence
  Tgfbr2.290_Zc3h13.1777
  crRNA array
cgatttcttggctttatatatcttgtggaaaggacgaaacaccgtaatttctactaagtgtagatcctctcggcgcccgggtaaataatttctactaagtgtagatgatgctgccagtgtagcggcttttttaagcttggcgtggatccgatatcaactagatcttgaga

SEQ ID NO: 8740 - DNA, 170 bp, Artificial sequence
  Tgfbr2.292_Acvr2a.155
  crRNA array
cgatttcttggctttatatatcttgtggaaaggacgaaacaccgtaatttctactaagtgtagatcccgggcgccgagagggaaataatttctactaagtgtagatggacctggctaatcaagtatttttttaagcttggcgtggatccgatatcaactagatcttgaga

SEQ ID NO: 8741 - DNA, 170 bp, Artificial sequence
  Tgfbr2.292_Acvr2a.70
  crRNA array
cgatttcttggctttatatatcttgtggaaaggacgaaacaccgtaatttctactaagtgtagatcccgggcgccgagagggaaataatttctactaagtgtagatcccgaggcgccggagaagccttttttaagcttggcgtggatccgatatcaactagatcttgaga

SEQ ID NO: 8742 - DNA, 170 bp, Artificial sequence
  Tgfbr2.292_Apc.21
  crRNA array
cgatttcttggctttatatatcttgtggaaaggacgaaacaccgtaatttctactaagtgtagatcccgggcgccgagagggaaataatttctactaagtgtagatgtgatccacacgtgtagctgttttttaagcttggcgtggatccgatatcaactagatcttgaga

SEQ ID NO: 8743 - DNA, 170 bp, Artificial sequence
  Tgfbr2.292_Apc.867
  crRNA array
cgatttcttggctttatatatcttgtggaaaggacgaaacaccgtaatttctactaagtgtagatcccgggcgccgagagggaaataatttctactaagtgtagatcagtcccaggcggcggaagcttttttaagcttggcgtggatccgatatcaactagatcttgaga

SEQ ID NO: 8744 - DNA, 170 bp, Artificial sequence
  Tgfbr2.292_Arid1a.2
  crRNA array
cgatttcttggctttatatatcttgtggaaaggacgaaacaccgtaatttctactaagtgtagatcccgggcgccgagagggaaataatttctactaagtgtagatcccgcgcccccgtcctggggttttttaagcttggcgtggatccgatatcaactagatcttgaga

SEQ ID NO: 8745 - DNA, 170 bp, Artificial sequence
  Tgfbr2.292_Arid1a.5
  crRNA array
cgatttcttggctttatatatcttgtggaaaggacgaaacaccgtaatttctactaagtgtagatcccgggcgccgagagggaaataatttctactaagtgtagatcccgcgctcggccgctgccgttttttaagcttggcgtggatccgatatcaactagatcttgaga

SEQ ID NO: 8746 - DNA, 170 bp, Artificial sequence
  Tgfbr2.292_Arid2.166
  crRNA array
cgatttcttggctttatatatcttgtggaaaggacgaaacaccgtaatttctactaagtgtagatcccgggcgccgagagggaaataatttctactaagtgtagataaccgcgatctgggttttttttttttaagcttggcgtggatccgatatcaactagatcttgaga

SEQ ID NO: 8747 - DNA, 170 bp, Artificial sequence
  Tgfbr2.292_Arid2.172
  crRNA array
cgatttcttggctttatatatcttgtggaaaggacgaaacaccgtaatttctactaagtgtagatcccgggcgccgagagggaaataatttctactaagtgtagatctggacgagctgcggcagttttttttaagcttggcgtggatccgatatcaactagatcttgaga

SEQ ID NO: 8748 - DNA, 170 bp, Artificial sequence
  Tgfbr2.292_Atm.120
  crRNA array
cgatttcttggctttatatatcttgtggaaaggacgaaacaccgtaatttctactaagtgtagatcccgggcgccgagagggaaataatttctactaagtgtagatgacaggtagtcggcagctaattttttaagcttggcgtggatccgatatcaactagatcttgaga

SEQ ID NO: 8749 - DNA, 170 bp, Artificial sequence
  Tgfbr2.292_Atm.997
  crRNA array
cgatttcttggctttatatatcttgtggaaaggacgaaacaccgtaatttctactaagtgtagatcccgggcgccgagagggaaataatttctactaagtgtagatgagaaagtctccgaatcgttttttttaagcttggcgtggatccgatatcaactagatcttgaga

SEQ ID NO: 8750 - DNA, 170 bp, Artificial sequence
  Tgfbr2.292_Atrx.249
  crRNA array
cgatttcttggctttatatatcttgtggaaaggacgaaacaccgtaatttctactaagtgtagatcccgggcgccgagagggaaataatttctactaagtgtagattagccagtcgctcatatctcttttttaagcttggcgtggatccgatatcaactagatcttgaga

SEQ ID NO: 8751 - DNA, 170 bp, Artificial sequence
  Tgfbr2.292_Atrx.251
  crRNA array
cgatttcttggctttatatatcttgtggaaaggacgaaacaccgtaatttctactaagtgtagatcccgggcgccgagagggaaataatttctactaagtgtagatgccagtcgctcatatctctgttttttaagcttggcgtggatccgatatcaactagatcttgaga

SEQ ID NO: 8752 - DNA, 170 bp, Artificial sequence
  Tgfbr2.292_Bcor.203
  crRNA array
cgatttcttggctttatatatcttgtggaaaggacgaaacaccgtaatttctactaagtgtagatcccgggcgccgagagggaaataatttctactaagtgtagatccccggagcggagtccaggcttttttaagcttggcgtggatccgatatcaactagatcttgaga

SEQ ID NO: 8753 - DNA, 170 bp, Artificial sequence
  Tgfbr2.292_Bcor.475
  crRNA array
cgatttcttggctttatatatcttgtggaaaggacgaaacaccgtaatttctactaagtgtagatcccgggcgccgagagggaaataatttctactaagtgtagattgcaacccctctgtatgggattttttaagcttggcgtggatccgatatcaactagatcttgaga

SEQ ID NO: 8754 - DNA, 170 bp, Artificial sequence
  Tgfbr2.292_Brca1.112
  crRNA array
cgatttcttggctttatatatcttgtggaaaggacgaaacaccgtaatttctactaagtgtagatcccgggcgccgagagggaaataatttctactaagtgtagatctagacgctctgtggagactttttttaagcttggcgtggatccgatatcaactagatcttgaga

SEQ ID NO: 8755 - DNA, 170 bp, Artificial sequence
  Tgfbr2.292_Brca1.53
  crRNA array
cgatttcttggctttatatatcttgtggaaaggacgaaacaccgtaatttctactaagtgtagatcccgggcgccgagagggaaataatttctactaagtgtagataatgaggaggcgtcgatcatttttttaagcttggcgtggatccgatatcaactagatcttgaga

SEQ ID NO: 8756 - DNA, 170 bp, Artificial sequence
  Tgfbr2.292_Casp8.45
  crRNA array
cgatttcttggctttatatatcttgtggaaaggacgaaacaccgtaatttctactaagtgtagatcccgggcgccgagagggaaataatttctactaagtgtagatctaccgagatcctgtgaatgttttttaagcttggcgtggatccgatatcaactagatcttgaga

SEQ ID NO: 8757 - DNA, 170 bp, Artificial sequence
  Tgfbr2.292_Casp8.54
  crRNA array
cgatttcttggctttatatatcttgtggaaaggacgaaacaccgtaatttctactaagtgtagatcccgggcgccgagagggaaataatttctactaagtgtagatcagtgcagtcgtcgtaagatttttttaagcttggcgtggatccgatatcaactagatcttgaga

SEQ ID NO: 8758 - DNA, 170 bp, Artificial sequence
  Tgfbr2.292_Cbwd1.84
  crRNA array
cgatttcttggctttatatatcttgtggaaaggacgaaacaccgtaatttctactaagtgtagatcccgggcgccgagagggaaataatttctactaagtgtagatcacagcaggtaacatgccgcttttttaagcttggcgtggatccgatatcaactagatcttgaga

SEQ ID NO: 8759 - DNA, 170 bp, Artificial sequence
  Tgfbr2.292_Cbwd1.85
  crRNA array
cgatttcttggctttatatatcttgtggaaaggacgaaacaccgtaatttctactaagtgtagatcccgggcgccgagagggaaataatttctactaagtgtagatacagcaggtaacatgccgccttttttaagcttggcgtggatccgatatcaactagatcttgaga

SEQ ID NO: 8760 - DNA, 170 bp, Artificial sequence
  Tgfbr2.292_Cdh1.387
  crRNA array
cgatttcttggctttatatatcttgtggaaaggacgaaacaccgtaatttctactaagtgtagatcccgggcgccgagagggaaataatttctactaagtgtagatctcggcgtctgccgggtccgttttttaagcttggcgtggatccgatatcaactagatcttgaga

SEQ ID NO: 8761 - DNA, 170 bp, Artificial sequence
  Tgfbr2.292_Cdh1.58
  crRNA array
cgatttcttggctttatatatcttgtggaaaggacgaaacaccgtaatttctactaagtgtagatcccgggcgccgagagggaaataatttctactaagtgtagatctcgtccgcgcccgggactcttttttaagcttggcgtggatccgatatcaactagatcttgaga

SEQ ID NO: 8762 - DNA, 170 bp, Artificial sequence
  Tgfbr2.292_Cdkn2a.647
  crRNA array
cgatttcttggctttatatatcttgtggaaaggacgaaacaccgtaatttctactaagtgtagatcccgggcgccgagagggaaataatttctactaagtgtagatgcaatcacgggagggagcagttttttaagcttggcgtggatccgatatcaactagatcttgaga

SEQ ID NO: 8763 - DNA, 170 bp, Artificial sequence
  Tgfbr2.292_Cdkn2a.648
  crRNA array
cgatttcttggctttatatatcttgtggaaaggacgaaacaccgtaatttctactaagtgtagatcccgggcgccgagagggaaataatttctactaagtgtagatcaatcacgggagggagcagattttttaagcttggcgtggatccgatatcaactagatcttgaga

SEQ ID NO: 8764 - DNA, 170 bp, Artificial sequence
  Tgfbr2.292_Cic.162
  crRNA array
cgatttcttggctttatatatcttgtggaaaggacgaaacaccgtaatttctactaagtgtagatcccgggcgccgagagggaaataatttctactaagtgtagatcgcaggcgcgcccggcggagttttttaagcttggcgtggatccgatatcaactagatcttgaga

SEQ ID NO: 8765 - DNA, 170 bp, Artificial sequence
  Tgfbr2.292_Cic.164
  crRNA array
cgatttcttggctttatatatcttgtggaaaggacgaaacaccgtaatttctactaagtgtagatcccgggcgccgagagggaaataatttctactaagtgtagatcgggccctgggccggcggctttttttaagcttggcgtggatccgatatcaactagatcttgaga

SEQ ID NO: 8766 - DNA, 170 bp, Artificial sequence
  Tgfbr2.292_Ctcf.229
  crRNA array
cgatttcttggctttatatatcttgtggaaaggacgaaacaccgtaatttctactaagtgtagatcccgggcgccgagagggaaataatttctactaagtgtagatggctggtggctgatagtctgttttttaagcttggcgtggatccgatatcaactagatcttgaga

SEQ ID NO: 8767 - DNA, 170 bp, Artificial sequence
  Tgfbr2.292_Ctcf.809
  crRNA array
cgatttcttggctttatatatcttgtggaaaggacgaaacaccgtaatttctactaagtgtagatcccgggcgccgagagggaaataatttctactaagtgtagataagcgctatcatgatcccaattttttaagcttggcgtggatccgatatcaactagatcttgaga

SEQ ID NO: 8768 - DNA, 170 bp, Artificial sequence
  Tgfbr2.292_Elf3.826
  crRNA array
cgatttcttggctttatatatcttgtggaaaggacgaaacaccgtaatttctactaagtgtagatcccgggcgccgagagggaaataatttctactaagtgtagattccgagacatcctaatccacttttttaagcttggcgtggatccgatatcaactagatcttgaga

SEQ ID NO: 8769 - DNA, 170 bp, Artificial sequence
  Tgfbr2.292_Elf3.983
  crRNA array
cgatttcttggctttatatatcttgtggaaaggacgaaacaccgtaatttctactaagtgtagatcccgggcgccgagagggaaataatttctactaagtgtagattaggccccctaactggaccattttttaagcttggcgtggatccgatatcaactagatcttgaga

SEQ ID NO: 8770 - DNA, 170 bp, Artificial sequence
  Tgfbr2.292_Ep300.310
  crRNA array
cgatttcttggctttatatatcttgtggaaaggacgaaacaccgtaatttctactaagtgtagatcccgggcgccgagagggaaataatttctactaagtgtagatatggtacgacagtgaggaagttttttaagcttggcgtggatccgatatcaactagatcttgaga

SEQ ID NO: 8771 - DNA, 170 bp, Artificial sequence
  Tgfbr2.292_Ep300.587
  crRNA array
cgatttcttggctttatatatcttgtggaaaggacgaaacaccgtaatttctactaagtgtagatcccgggcgccgagagggaaataatttctactaagtgtagatcgccccggggcccccaaccattttttaagcttggcgtggatccgatatcaactagatcttgaga

SEQ ID NO: 8772 - DNA, 170 bp, Artificial sequence
  Tgfbr2.292_Epha2.126
  crRNA array
cgatttcttggctttatatatcttgtggaaaggacgaaacaccgtaatttctactaagtgtagatcccgggcgccgagagggaaataatttctactaagtgtagatcctgtgccgccgcggccgccttttttaagcttggcgtggatccgatatcaactagatcttgaga

SEQ ID NO: 8773 - DNA, 170 bp, Artificial sequence
  Tgfbr2.292_Epha2.5
  crRNA array
cgatttcttggctttatatatcttgtggaaaggacgaaacaccgtaatttctactaagtgtagatcccgggcgccgagagggaaataatttctactaagtgtagatcatgagctggcgccacccggttttttaagcttggcgtggatccgatatcaactagatcttgaga

SEQ ID NO: 8774 - DNA, 170 bp, Artificial sequence
  Tgfbr2.292_Fat1.105
  crRNA array
cgatttcttggctttatatatcttgtggaaaggacgaaacaccgtaatttctactaagtgtagatcccgggcgccgagagggaaataatttctactaagtgtagataactcgaggtgacaacaagtttttttaagcttggcgtggatccgatatcaactagatcttgaga

SEQ ID NO: 8775 - DNA, 170 bp, Artificial sequence
  Tgfbr2.292_Fat1.122
  crRNA array
cgatttcttggctttatatatcttgtggaaaggacgaaacaccgtaatttctactaagtgtagatcccgggcgccgagagggaaataatttctactaagtgtagatccatcgacatggaaacgggattttttaagcttggcgtggatccgatatcaactagatcttgaga

SEQ ID NO: 8776 - DNA, 170 bp, Artificial sequence
  Tgfbr2.292_Fbxw7.21
  crRNA array
cgatttcttggctttatatatcttgtggaaaggacgaaacaccgtaatttctactaagtgtagatcccgggcgccgagagggaaataatttctactaagtgtagattaatgtgccgtagaaacccattttttaagcttggcgtggatccgatatcaactagatcttgaga

SEQ ID NO: 8777 - DNA, 170 bp, Artificial sequence
  Tgfbr2.292_Fbxw7.23
  crRNA array
cgatttcttggctttatatatcttgtggaaaggacgaaacaccgtaatttctactaagtgtagatcccgggcgccgagagggaaataatttctactaagtgtagatatgtgccgtagaaacccatattttttaagcttggcgtggatccgatatcaactagatcttgaga

SEQ ID NO: 8778 - DNA, 170 bp, Artificial sequence
  Tgfbr2.292_Gata3.34
  crRNA array
cgatttcttggctttatatatcttgtggaaaggacgaaacaccgtaatttctactaagtgtagatcccgggcgccgagagggaaataatttctactaagtgtagatctaaactatcccgcaaagatttttttaagcttggcgtggatccgatatcaactagatcttgaga

SEQ ID NO: 8779 - DNA, 170 bp, Artificial sequence
  Tgfbr2.292_Gata3.47
  crRNA array
cgatttcttggctttatatatcttgtggaaaggacgaaacaccgtaatttctactaagtgtagatcccgggcgccgagagggaaataatttctactaagtgtagatcgtagtaggacgggacgtggttttttaagcttggcgtggatccgatatcaactagatcttgaga

SEQ ID NO: 8780 - DNA, 170 bp, Artificial sequence
  Tgfbr2.292_H2-Q2.1
  crRNA array
cgatttcttggctttatatatcttgtggaaaggacgaaacaccgtaatttctactaagtgtagatcccgggcgccgagagggaaataatttctactaagtgtagatagggcggccaccaacagcagttttttaagcttggcgtggatccgatatcaactagatcttgaga

SEQ ID NO: 8781 - DNA, 170 bp, Artificial sequence
  Tgfbr2.292_H2-Q2.2
  crRNA array
cgatttcttggctttatatatcttgtggaaaggacgaaacaccgtaatttctactaagtgtagatcccgggcgccgagagggaaataatttctactaagtgtagattaacctgcgcccgctgctgattttttaagcttggcgtggatccgatatcaactagatcttgaga

SEQ ID NO: 8782 - DNA, 170 bp, Artificial sequence
  Tgfbr2.292_Kdm5c.1878
  crRNA array
cgatttcttggctttatatatcttgtggaaaggacgaaacaccgtaatttctactaagtgtagatcccgggcgccgagagggaaataatttctactaagtgtagatagagcacggcacccgcccccttttttaagcttggcgtggatccgatatcaactagatcttgaga

SEQ ID NO: 8783 - DNA, 170 bp, Artificial sequence
  Tgfbr2.292_Kdm5c.1879
  crRNA array
cgatttcttggctttatatatcttgtggaaaggacgaaacaccgtaatttctactaagtgtagatcccgggcgccgagagggaaataatttctactaagtgtagatgagcacggcacccgccccccttttttaagcttggcgtggatccgatatcaactagatcttgaga

SEQ ID NO: 8784 - DNA, 170 bp, Artificial sequence
  Tgfbr2.292_Kdm6a.56
  crRNA array
cgatttcttggctttatatatcttgtggaaaggacgaaacaccgtaatttctactaagtgtagatcccgggcgccgagagggaaataatttctactaagtgtagattcgctgccgcctctcgcggcttttttaagcttggcgtggatccgatatcaactagatcttgaga

SEQ ID NO: 8785 - DNA, 170 bp, Artificial sequence
  Tgfbr2.292_Kdm6a.57
  crRNA array
cgatttcttggctttatatatcttgtggaaaggacgaaacaccgtaatttctactaagtgtagatcccgggcgccgagagggaaataatttctactaagtgtagatcgctgccgcctctcgcggcattttttaagcttggcgtggatccgatatcaactagatcttgaga

SEQ ID NO: 8786 - DNA, 170 bp, Artificial sequence
  Tgfbr2.292_Kmt2b.265
  crRNA array
cgatttcttggctttatatatcttgtggaaaggacgaaacaccgtaatttctactaagtgtagatcccgggcgccgagagggaaataatttctactaagtgtagatccccaagtgaagcccacctgttttttaagcttggcgtggatccgatatcaactagatcttgaga

SEQ ID NO: 8787 - DNA, 170 bp, Artificial sequence
  Tgfbr2.292_Kmt2b.298
  crRNA array
cgatttcttggctttatatatcttgtggaaaggacgaaacaccgtaatttctactaagtgtagatcccgggcgccgagagggaaataatttctactaagtgtagattccggcagggaccggctggcttttttaagcttggcgtggatccgatatcaactagatcttgaga

SEQ ID NO: 8788 - DNA, 170 bp, Artificial sequence
  Tgfbr2.292_Kmt2c.1962
  crRNA array
cgatttcttggctttatatatcttgtggaaaggacgaaacaccgtaatttctactaagtgtagatcccgggcgccgagagggaaataatttctactaagtgtagatgtgacgatctgtgccacaagttttttaagcttggcgtggatccgatatcaactagatcttgaga

SEQ ID NO: 8789 - DNA, 170 bp, Artificial sequence
  Tgfbr2.292_Kmt2c.2236
  crRNA array
cgatttcttggctttatatatcttgtggaaaggacgaaacaccgtaatttctactaagtgtagatcccgggcgccgagagggaaataatttctactaagtgtagatactcgacctccacctccctattttttaagcttggcgtggatccgatatcaactagatcttgaga

SEQ ID NO: 8790 - DNA, 170 bp, Artificial sequence
  Tgfbr2.292_Kmt2d.316
  crRNA array
cgatttcttggctttatatatcttgtggaaaggacgaaacaccgtaatttctactaagtgtagatcccgggcgccgagagggaaataatttctactaagtgtagatactccaggccacccaggtggttttttaagcttggcgtggatccgatatcaactagatcttgaga

SEQ ID NO: 8791 - DNA, 170 bp, Artificial sequence
  Tgfbr2.292_Kmt2d.416
  crRNA array
cgatttcttggctttatatatcttgtggaaaggacgaaacaccgtaatttctactaagtgtagatcccgggcgccgagagggaaataatttctactaagtgtagattaaacccccgggggaagggtttttttaagcttggcgtggatccgatatcaactagatcttgaga

SEQ ID NO: 8792 - DNA, 170 bp, Artificial sequence
  Tgfbr2.292_Map2k4.119
  crRNA array
cgatttcttggctttatatatcttgtggaaaggacgaaacaccgtaatttctactaagtgtagatcccgggcgccgagagggaaataatttctactaagtgtagattgctgtgtgggcggccacatttttttaagcttggcgtggatccgatatcaactagatcttgaga

SEQ ID NO: 8793 - DNA, 170 bp, Artificial sequence
  Tgfbr2.292_Map2k4.1261
  crRNA array
cgatttcttggctttatatatcttgtggaaaggacgaaacaccgtaatttctactaagtgtagatcccgggcgccgagagggaaataatttctactaagtgtagatgatgtagtaatgcggagtagttttttaagcttggcgtggatccgatatcaactagatcttgaga

SEQ ID NO: 8794 - DNA, 170 bp, Artificial sequence
  Tgfbr2.292_Map3k1.235
  crRNA array
cgatttcttggctttatatatcttgtggaaaggacgaaacaccgtaatttctactaagtgtagatcccgggcgccgagagggaaataatttctactaagtgtagataaaacgctactgatcgatcgttttttaagcttggcgtggatccgatatcaactagatcttgaga

SEQ ID NO: 8795 - DNA, 170 bp, Artificial sequence
  Tgfbr2.292_Map3k1.3838
  crRNA array
cgatttcttggctttatatatcttgtggaaaggacgaaacaccgtaatttctactaagtgtagatcccgggcgccgagagggaaataatttctactaagtgtagatccaacaacagggccccactattttttaagcttggcgtggatccgatatcaactagatcttgaga

SEQ ID NO: 8796 - DNA, 170 bp, Artificial sequence
  Tgfbr2.292_Mga.1655
  crRNA array
cgatttcttggctttatatatcttgtggaaaggacgaaacaccgtaatttctactaagtgtagatcccgggcgccgagagggaaataatttctactaagtgtagatcgagaagtggagagcatattttttttaagcttggcgtggatccgatatcaactagatcttgaga

SEQ ID NO: 8797 - DNA, 170 bp, Artificial sequence
  Tgfbr2.292_Mga.93
  crRNA array
cgatttcttggctttatatatcttgtggaaaggacgaaacaccgtaatttctactaagtgtagatcccgggcgccgagagggaaataatttctactaagtgtagatgagaaggctccccataatgtttttttaagcttggcgtggatccgatatcaactagatcttgaga

SEQ ID NO: 8798 - DNA, 170 bp, Artificial sequence
  Tgfbr2.292_Nf1.746
  crRNA array
cgatttcttggctttatatatcttgtggaaaggacgaaacaccgtaatttctactaagtgtagatcccgggcgccgagagggaaataatttctactaagtgtagattaagcataatgatgatgccattttttaagcttggcgtggatccgatatcaactagatcttgaga

SEQ ID NO: 8799 - DNA, 170 bp, Artificial sequence
  Tgfbr2.292_Nf1.97
  crRNA array
cgatttcttggctttatatatcttgtggaaaggacgaaacaccgtaatttctactaagtgtagatcccgggcgccgagagggaaataatttctactaagtgtagatagcccgctacatgctgatgcttttttaagcttggcgtggatccgatatcaactagatcttgaga

SEQ ID NO: 8800 - DNA, 170 bp, Artificial sequence
  Tgfbr2.292_Nf2.356
  crRNA array
cgatttcttggctttatatatcttgtggaaaggacgaaacaccgtaatttctactaagtgtagatcccgggcgccgagagggaaataatttctactaagtgtagatcggagtcatctgatagagatttttttaagcttggcgtggatccgatatcaactagatcttgaga

SEQ ID NO: 8801 - DNA, 170 bp, Artificial sequence
  Tgfbr2.292_Nf2.768
  crRNA array
cgatttcttggctttatatatcttgtggaaaggacgaaacaccgtaatttctactaagtgtagatcccgggcgccgagagggaaataatttctactaagtgtagatccgaagccccagtgtccggcttttttaagcttggcgtggatccgatatcaactagatcttgaga

SEQ ID NO: 8802 - DNA, 170 bp, Artificial sequence
  Tgfbr2.292_Notch1.1849
  crRNA array
cgatttcttggctttatatatcttgtggaaaggacgaaacaccgtaatttctactaagtgtagatcccgggcgccgagagggaaataatttctactaagtgtagatctggcgggtgggcggcgctgttttttaagcttggcgtggatccgatatcaactagatcttgaga

SEQ ID NO: 8803 - DNA, 170 bp, Artificial sequence
  Tgfbr2.292_Notch1.649
  crRNA array
cgatttcttggctttatatatcttgtggaaaggacgaaacaccgtaatttctactaagtgtagatcccgggcgccgagagggaaataatttctactaagtgtagattgggccaacgatgccaggacttttttaagcttggcgtggatccgatatcaactagatcttgaga

SEQ ID NO: 8804 - DNA, 170 bp, Artificial sequence
  Tgfbr2.292_Nsd1.70
  crRNA array
cgatttcttggctttatatatcttgtggaaaggacgaaacaccgtaatttctactaagtgtagatcccgggcgccgagagggaaataatttctactaagtgtagatactggtgtggacgatgcagattttttaagcttggcgtggatccgatatcaactagatcttgaga

SEQ ID NO: 8805 - DNA, 170 bp, Artificial sequence
  Tgfbr2.292_Nsd1.90
  crRNA array
cgatttcttggctttatatatcttgtggaaaggacgaaacaccgtaatttctactaagtgtagatcccgggcgccgagagggaaataatttctactaagtgtagataggagctaacggcaagaatgttttttaagcttggcgtggatccgatatcaactagatcttgaga

SEQ ID NO: 8806 - DNA, 170 bp, Artificial sequence
  Tgfbr2.292_Pbrm1.1236
  crRNA array
cgatttcttggctttatatatcttgtggaaaggacgaaacaccgtaatttctactaagtgtagatcccgggcgccgagagggaaataatttctactaagtgtagatgccgataaaaccaacagccgttttttaagcttggcgtggatccgatatcaactagatcttgaga

SEQ ID NO: 8807 - DNA, 170 bp, Artificial sequence
  Tgfbr2.292_Pbrm1.969
  crRNA array
cgatttcttggctttatatatcttgtggaaaggacgaaacaccgtaatttctactaagtgtagatcccgggcgccgagagggaaataatttctactaagtgtagatgagccctaatgaacagctcattttttaagcttggcgtggatccgatatcaactagatcttgaga

SEQ ID NO: 8808 - DNA, 170 bp, Artificial sequence
  Tgfbr2.292_Pik3r1.76
  crRNA array
cgatttcttggctttatatatcttgtggaaaggacgaaacaccgtaatttctactaagtgtagatcccgggcgccgagagggaaataatttctactaagtgtagataaaacctatacggcccgcacttttttaagcttggcgtggatccgatatcaactagatcttgaga

SEQ ID NO: 8809 - DNA, 170 bp, Artificial sequence
  Tgfbr2.292_Pik3r1.77
  crRNA array
cgatttcttggctttatatatcttgtggaaaggacgaaacaccgtaatttctactaagtgtagatcccgggcgccgagagggaaataatttctactaagtgtagataaacctatacggcccgcactttttttaagcttggcgtggatccgatatcaactagatcttgaga

SEQ ID NO: 8810 - DNA, 170 bp, Artificial sequence
  Tgfbr2.292_Pten.240
  crRNA array
cgatttcttggctttatatatcttgtggaaaggacgaaacaccgtaatttctactaagtgtagatcccgggcgccgagagggaaataatttctactaagtgtagattgcatacgctatagctgcttttttttaagcttggcgtggatccgatatcaactagatcttgaga

SEQ ID NO: 8811 - DNA, 170 bp, Artificial sequence
  Tgfbr2.292_Pten.265
  crRNA array
cgatttcttggctttatatatcttgtggaaaggacgaaacaccgtaatttctactaagtgtagatcccgggcgccgagagggaaataatttctactaagtgtagataagcgtggtgcgtgacgcacttttttaagcttggcgtggatccgatatcaactagatcttgaga

SEQ ID NO: 8812 - DNA, 170 bp, Artificial sequence
  Tgfbr2.292_Rasa1.1478
  crRNA array
cgatttcttggctttatatatcttgtggaaaggacgaaacaccgtaatttctactaagtgtagatcccgggcgccgagagggaaataatttctactaagtgtagatcgataatggtctatgatgtcttttttaagcttggcgtggatccgatatcaactagatcttgaga

SEQ ID NO: 8813 - DNA, 170 bp, Artificial sequence
  Tgfbr2.292_Rasa1.223
  crRNA array
cgatttcttggctttatatatcttgtggaaaggacgaaacaccgtaatttctactaagtgtagatcccgggcgccgagagggaaataatttctactaagtgtagattccatggagtatcgtgctcgttttttaagcttggcgtggatccgatatcaactagatcttgaga

SEQ ID NO: 8814 - DNA, 170 bp, Artificial sequence
  Tgfbr2.292_Rb1.211
  crRNA array
cgatttcttggctttatatatcttgtggaaaggacgaaacaccgtaatttctactaagtgtagatcccgggcgccgagagggaaataatttctactaagtgtagattctgacatgatcgggtacctttttttaagcttggcgtggatccgatatcaactagatcttgaga

SEQ ID NO: 8815 - DNA, 170 bp, Artificial sequence
  Tgfbr2.292_Rb1.394
  crRNA array
cgatttcttggctttatatatcttgtggaaaggacgaaacaccgtaatttctactaagtgtagatcccgggcgccgagagggaaataatttctactaagtgtagatagaaatctcgaagcaggatcttttttaagcttggcgtggatccgatatcaactagatcttgaga

SEQ ID NO: 8816 - DNA, 170 bp, Artificial sequence
  Tgfbr2.292_Rbm10.5
  crRNA array
cgatttcttggctttatatatcttgtggaaaggacgaaacaccgtaatttctactaagtgtagatcccgggcgccgagagggaaataatttctactaagtgtagatacgaaacctgaacccacacattttttaagcttggcgtggatccgatatcaactagatcttgaga

SEQ ID NO: 8817 - DNA, 170 bp, Artificial sequence
  Tgfbr2.292_Rbm10.6
  crRNA array
cgatttcttggctttatatatcttgtggaaaggacgaaacaccgtaatttctactaagtgtagatcccgggcgccgagagggaaataatttctactaagtgtagatcgaaacctgaacccacacagttttttaagcttggcgtggatccgatatcaactagatcttgaga

SEQ ID NO: 8818 - DNA, 170 bp, Artificial sequence
  Tgfbr2.292_Rnf43.1920
  crRNA array
cgatttcttggctttatatatcttgtggaaaggacgaaacaccgtaatttctactaagtgtagatcccgggcgccgagagggaaataatttctactaagtgtagatatccccgtgccgtggactccttttttaagcttggcgtggatccgatatcaactagatcttgaga

SEQ ID NO: 8819 - DNA, 170 bp, Artificial sequence
  Tgfbr2.292_Rnf43.39
  crRNA array
cgatttcttggctttatatatcttgtggaaaggacgaaacaccgtaatttctactaagtgtagatcccgggcgccgagagggaaataatttctactaagtgtagatcaaggggatcactctgataattttttaagcttggcgtggatccgatatcaactagatcttgaga

SEQ ID NO: 8820 - DNA, 170 bp, Artificial sequence
  Tgfbr2.292_Runx1.204
  crRNA array
cgatttcttggctttatatatcttgtggaaaggacgaaacaccgtaatttctactaagtgtagatcccgggcgccgagagggaaataatttctactaagtgtagattaaataagtccagccgttttttttttaagcttggcgtggatccgatatcaactagatcttgaga

SEQ ID NO: 8821 - DNA, 170 bp, Artificial sequence
  Tgfbr2.292_Runx1.81
  crRNA array
cgatttcttggctttatatatcttgtggaaaggacgaaacaccgtaatttctactaagtgtagatcccgggcgccgagagggaaataatttctactaagtgtagataggacgcgtatgggaattttttttttaagcttggcgtggatccgatatcaactagatcttgaga

SEQ ID NO: 8822 - DNA, 170 bp, Artificial sequence
  Tgfbr2.292_Setd2.143
  crRNA array
cgatttcttggctttatatatcttgtggaaaggacgaaacaccgtaatttctactaagtgtagatcccgggcgccgagagggaaataatttctactaagtgtagatgcacaaccacaacagactggttttttaagcttggcgtggatccgatatcaactagatcttgaga

SEQ ID NO: 8823 - DNA, 170 bp, Artificial sequence
  Tgfbr2.292_Setd2.508
  crRNA array
cgatttcttggctttatatatcttgtggaaaggacgaaacaccgtaatttctactaagtgtagatcccgggcgccgagagggaaataatttctactaagtgtagattacgatcccgagcacccgacttttttaagcttggcgtggatccgatatcaactagatcttgaga

SEQ ID NO: 8824 - DNA, 170 bp, Artificial sequence
  Tgfbr2.292_Smad4.3038
  crRNA array
cgatttcttggctttatatatcttgtggaaaggacgaaacaccgtaatttctactaagtgtagatcccgggcgccgagagggaaataatttctactaagtgtagatatctgcggcagtgtcaccggttttttaagcttggcgtggatccgatatcaactagatcttgaga

SEQ ID NO: 8825 - DNA, 170 bp, Artificial sequence
  Tgfbr2.292_Smad4.39
  crRNA array
cgatttcttggctttatatatcttgtggaaaggacgaaacaccgtaatttctactaagtgtagatcccgggcgccgagagggaaataatttctactaagtgtagatagtcaaacgcatactgacaattttttaagcttggcgtggatccgatatcaactagatcttgaga

SEQ ID NO: 8826 - DNA, 170 bp, Artificial sequence
  Tgfbr2.292_Stag2.1409
  crRNA array
cgatttcttggctttatatatcttgtggaaaggacgaaacaccgtaatttctactaagtgtagatcccgggcgccgagagggaaataatttctactaagtgtagatgctaataactgcggaagggcttttttaagcttggcgtggatccgatatcaactagatcttgaga

SEQ ID NO: 8827 - DNA, 170 bp, Artificial sequence
  Tgfbr2.292_Stag2.4401
  crRNA array
cgatttcttggctttatatatcttgtggaaaggacgaaacaccgtaatttctactaagtgtagatcccgggcgccgagagggaaataatttctactaagtgtagattaatcgtccagtggtgtatattttttaagcttggcgtggatccgatatcaactagatcttgaga

SEQ ID NO: 8828 - DNA, 170 bp, Artificial sequence
  Tgfbr2.292_Tbl1xr1.1
  crRNA array
cgatttcttggctttatatatcttgtggaaaggacgaaacaccgtaatttctactaagtgtagatcccgggcgccgagagggaaataatttctactaagtgtagatggatgcgcatactggtgaagttttttaagcttggcgtggatccgatatcaactagatcttgaga

SEQ ID NO: 8829 - DNA, 170 bp, Artificial sequence
  Tgfbr2.292_Tbl1xr1.83
  crRNA array
cgatttcttggctttatatatcttgtggaaaggacgaaacaccgtaatttctactaagtgtagatcccgggcgccgagagggaaataatttctactaagtgtagatatggtcgacccatcgagtctttttttaagcttggcgtggatccgatatcaactagatcttgaga

SEQ ID NO: 8830 - DNA, 170 bp, Artificial sequence
  Tgfbr2.292_Trp53.4
  crRNA array
cgatttcttggctttatatatcttgtggaaaggacgaaacaccgtaatttctactaagtgtagatcccgggcgccgagagggaaataatttctactaagtgtagatccctgaactgcccccagggattttttaagcttggcgtggatccgatatcaactagatcttgaga

SEQ ID NO: 8831 - DNA, 170 bp, Artificial sequence
  Tgfbr2.292_Trp53.528
  crRNA array
cgatttcttggctttatatatcttgtggaaaggacgaaacaccgtaatttctactaagtgtagatcccgggcgccgagagggaaataatttctactaagtgtagatgctgggccagcagagacctgttttttaagcttggcgtggatccgatatcaactagatcttgaga

SEQ ID NO: 8832 - DNA, 170 bp, Artificial sequence
  Tgfbr2.292_Vhl.1
  crRNA array
cgatttcttggctttatatatcttgtggaaaggacgaaacaccgtaatttctactaagtgtagatcccgggcgccgagagggaaataatttctactaagtgtagatagggctcccggcggccatttttttttaagcttggcgtggatccgatatcaactagatcttgaga

SEQ ID NO: 8833 - DNA, 170 bp, Artificial sequence
  Tgfbr2.292_Vhl.151
  crRNA array
cgatttcttggctttatatatcttgtggaaaggacgaaacaccgtaatttctactaagtgtagatcccgggcgccgagagggaaataatttctactaagtgtagattagagcactcacccgagggattttttaagcttggcgtggatccgatatcaactagatcttgaga

SEQ ID NO: 8834 - DNA, 170 bp, Artificial sequence
  Tgfbr2.292_Zc3h13.1387
  crRNA array
cgatttcttggctttatatatcttgtggaaaggacgaaacaccgtaatttctactaagtgtagatcccgggcgccgagagggaaataatttctactaagtgtagatgtgacgccggtcatgtgactttttttaagcttggcgtggatccgatatcaactagatcttgaga

SEQ ID NO: 8835 - DNA, 170 bp, Artificial sequence
  Tgfbr2.292_Zc3h13.1777
  crRNA array
cgatttcttggctttatatatcttgtggaaaggacgaaacaccgtaatttctactaagtgtagatcccgggcgccgagagggaaataatttctactaagtgtagatgatgctgccagtgtagcggcttttttaagcttggcgtggatccgatatcaactagatcttgaga

SEQ ID NO: 8836 - DNA, 170 bp, Artificial sequence
  Trp53.4_Acvr2a.155
  crRNA array
cgatttcttggctttatatatcttgtggaaaggacgaaacaccgtaatttctactaagtgtagatccctgaactgcccccagggataatttctactaagtgtagatggacctggctaatcaagtatttttttaagcttggcgtggatccgatatcaactagatcttgaga

SEQ ID NO: 8837 - DNA, 170 bp, Artificial sequence
  Trp53.4_Acvr2a.70
  crRNA array
cgatttcttggctttatatatcttgtggaaaggacgaaacaccgtaatttctactaagtgtagatccctgaactgcccccagggataatttctactaagtgtagatcccgaggcgccggagaagccttttttaagcttggcgtggatccgatatcaactagatcttgaga

SEQ ID NO: 8838 - DNA, 170 bp, Artificial sequence
  Trp53.4_Apc.21
  crRNA array
cgatttcttggctttatatatcttgtggaaaggacgaaacaccgtaatttctactaagtgtagatccctgaactgcccccagggataatttctactaagtgtagatgtgatccacacgtgtagctgttttttaagcttggcgtggatccgatatcaactagatcttgaga

SEQ ID NO: 8839 - DNA, 170 bp, Artificial sequence
  Trp53.4_Apc.867
  crRNA array
cgatttcttggctttatatatcttgtggaaaggacgaaacaccgtaatttctactaagtgtagatccctgaactgcccccagggataatttctactaagtgtagatcagtcccaggcggcggaagcttttttaagcttggcgtggatccgatatcaactagatcttgaga

SEQ ID NO: 8840 - DNA, 170 bp, Artificial sequence
  Trp53.4_Arid1a.2
  crRNA array
cgatttcttggctttatatatcttgtggaaaggacgaaacaccgtaatttctactaagtgtagatccctgaactgcccccagggataatttctactaagtgtagatcccgcgcccccgtcctggggttttttaagcttggcgtggatccgatatcaactagatcttgaga

SEQ ID NO: 8841 - DNA, 170 bp, Artificial sequence
  Trp53.4_Arid1a.5
  crRNA array
cgatttcttggctttatatatcttgtggaaaggacgaaacaccgtaatttctactaagtgtagatccctgaactgcccccagggataatttctactaagtgtagatcccgcgctcggccgctgccgttttttaagcttggcgtggatccgatatcaactagatcttgaga

SEQ ID NO: 8842 - DNA, 170 bp, Artificial sequence
  Trp53.4_Arid2.166
  crRNA array
cgatttcttggctttatatatcttgtggaaaggacgaaacaccgtaatttctactaagtgtagatccctgaactgcccccagggataatttctactaagtgtagataaccgcgatctgggttttttttttttaagcttggcgtggatccgatatcaactagatcttgaga

SEQ ID NO: 8843 - DNA, 170 bp, Artificial sequence
  Trp53.4_Arid2.172
  crRNA array
cgatttcttggctttatatatcttgtggaaaggacgaaacaccgtaatttctactaagtgtagatccctgaactgcccccagggataatttctactaagtgtagatctggacgagctgcggcagttttttttaagcttggcgtggatccgatatcaactagatcttgaga

SEQ ID NO: 8844 - DNA, 170 bp, Artificial sequence
  Trp53.4_Atm.120
  crRNA array
cgatttcttggctttatatatcttgtggaaaggacgaaacaccgtaatttctactaagtgtagatccctgaactgcccccagggataatttctactaagtgtagatgacaggtagtcggcagctaattttttaagcttggcgtggatccgatatcaactagatcttgaga

SEQ ID NO: 8845 - DNA, 170 bp, Artificial sequence
  Trp53.4_Atm.997
  crRNA array
cgatttcttggctttatatatcttgtggaaaggacgaaacaccgtaatttctactaagtgtagatccctgaactgcccccagggataatttctactaagtgtagatgagaaagtctccgaatcgttttttttaagcttggcgtggatccgatatcaactagatcttgaga

SEQ ID NO: 8846 - DNA, 170 bp, Artificial sequence
  Trp53.4_Atrx.249
  crRNA array
cgatttcttggctttatatatcttgtggaaaggacgaaacaccgtaatttctactaagtgtagatccctgaactgcccccagggataatttctactaagtgtagattagccagtcgctcatatctcttttttaagcttggcgtggatccgatatcaactagatcttgaga

SEQ ID NO: 8847 - DNA, 170 bp, Artificial sequence
  Trp53.4_Atrx.251
  crRNA array
cgatttcttggctttatatatcttgtggaaaggacgaaacaccgtaatttctactaagtgtagatccctgaactgcccccagggataatttctactaagtgtagatgccagtcgctcatatctctgttttttaagcttggcgtggatccgatatcaactagatcttgaga

SEQ ID NO: 8848 - DNA, 170 bp, Artificial sequence
  Trp53.4_Bcor.203
  crRNA array
cgatttcttggctttatatatcttgtggaaaggacgaaacaccgtaatttctactaagtgtagatccctgaactgcccccagggataatttctactaagtgtagatccccggagcggagtccaggcttttttaagcttggcgtggatccgatatcaactagatcttgaga

SEQ ID NO: 8849 - DNA, 170 bp, Artificial sequence
  Trp53.4_Bcor.475
  crRNA array
cgatttcttggctttatatatcttgtggaaaggacgaaacaccgtaatttctactaagtgtagatccctgaactgcccccagggataatttctactaagtgtagattgcaacccctctgtatgggattttttaagcttggcgtggatccgatatcaactagatcttgaga

SEQ ID NO: 8850 - DNA, 170 bp, Artificial sequence
  Trp53.4_Brca1.112
  crRNA array
cgatttcttggctttatatatcttgtggaaaggacgaaacaccgtaatttctactaagtgtagatccctgaactgcccccagggataatttctactaagtgtagatctagacgctctgtggagactttttttaagcttggcgtggatccgatatcaactagatcttgaga

SEQ ID NO: 8851 - DNA, 170 bp, Artificial sequence
  Trp53.4_Brca1.53
  crRNA array
cgatttcttggctttatatatcttgtggaaaggacgaaacaccgtaatttctactaagtgtagatccctgaactgcccccagggataatttctactaagtgtagataatgaggaggcgtcgatcatttttttaagcttggcgtggatccgatatcaactagatcttgaga

SEQ ID NO: 8852 - DNA, 170 bp, Artificial sequence
  Trp53.4_Casp8.45
  crRNA array
cgatttcttggctttatatatcttgtggaaaggacgaaacaccgtaatttctactaagtgtagatccctgaactgcccccagggataatttctactaagtgtagatctaccgagatcctgtgaatgttttttaagcttggcgtggatccgatatcaactagatcttgaga

SEQ ID NO: 8853 - DNA, 170 bp, Artificial sequence
  Trp53.4_Casp8.54
  crRNA array
cgatttcttggctttatatatcttgtggaaaggacgaaacaccgtaatttctactaagtgtagatccctgaactgcccccagggataatttctactaagtgtagatcagtgcagtcgtcgtaagatttttttaagcttggcgtggatccgatatcaactagatcttgaga

SEQ ID NO: 8854 - DNA, 170 bp, Artificial sequence
  Trp53.4_Cbwd1.84
  crRNA array
cgatttcttggctttatatatcttgtggaaaggacgaaacaccgtaatttctactaagtgtagatccctgaactgcccccagggataatttctactaagtgtagatcacagcaggtaacatgccgcttttttaagcttggcgtggatccgatatcaactagatcttgaga

SEQ ID NO: 8855 - DNA, 170 bp, Artificial sequence
  Trp53.4_Cbwd1.85
  crRNA array
cgatttcttggctttatatatcttgtggaaaggacgaaacaccgtaatttctactaagtgtagatccctgaactgcccccagggataatttctactaagtgtagatacagcaggtaacatgccgccttttttaagcttggcgtggatccgatatcaactagatcttgaga

SEQ ID NO: 8856 - DNA, 170 bp, Artificial sequence
  Trp53.4_Cdh1.387
  crRNA array
cgatttcttggctttatatatcttgtggaaaggacgaaacaccgtaatttctactaagtgtagatccctgaactgcccccagggataatttctactaagtgtagatctcggcgtctgccgggtccgttttttaagcttggcgtggatccgatatcaactagatcttgaga

SEQ ID NO: 8857 - DNA, 170 bp, Artificial sequence
  Trp53.4_Cdh1.58
  crRNA array
cgatttcttggctttatatatcttgtggaaaggacgaaacaccgtaatttctactaagtgtagatccctgaactgcccccagggataatttctactaagtgtagatctcgtccgcgcccgggactcttttttaagcttggcgtggatccgatatcaactagatcttgaga

SEQ ID NO: 8858 - DNA, 170 bp, Artificial sequence
  Trp53.4_Cdkn2a.647
  crRNA array
cgatttcttggctttatatatcttgtggaaaggacgaaacaccgtaatttctactaagtgtagatccctgaactgcccccagggataatttctactaagtgtagatgcaatcacgggagggagcagttttttaagcttggcgtggatccgatatcaactagatcttgaga

SEQ ID NO: 8859 - DNA, 170 bp, Artificial sequence
  Trp53.4_Cdkn2a.648
  crRNA array
cgatttcttggctttatatatcttgtggaaaggacgaaacaccgtaatttctactaagtgtagatccctgaactgcccccagggataatttctactaagtgtagatcaatcacgggagggagcagattttttaagcttggcgtggatccgatatcaactagatcttgaga

SEQ ID NO: 8860 - DNA, 170 bp, Artificial sequence
  Trp53.4_Cic.162
  crRNA array
cgatttcttggctttatatatcttgtggaaaggacgaaacaccgtaatttctactaagtgtagatccctgaactgcccccagggataatttctactaagtgtagatcgcaggcgcgcccggcggagttttttaagcttggcgtggatccgatatcaactagatcttgaga

SEQ ID NO: 8861 - DNA, 170 bp, Artificial sequence
  Trp53.4_Cic.164
  crRNA array
cgatttcttggctttatatatcttgtggaaaggacgaaacaccgtaatttctactaagtgtagatccctgaactgcccccagggataatttctactaagtgtagatcgggccctgggccggcggctttttttaagcttggcgtggatccgatatcaactagatcttgaga

SEQ ID NO: 8862 - DNA, 170 bp, Artificial sequence
  Trp53.4_Ctcf.229
  crRNA array
cgatttcttggctttatatatcttgtggaaaggacgaaacaccgtaatttctactaagtgtagatccctgaactgcccccagggataatttctactaagtgtagatggctggtggctgatagtctgttttttaagcttggcgtggatccgatatcaactagatcttgaga

SEQ ID NO: 8863 - DNA, 170 bp, Artificial sequence
  Trp53.4_Ctcf.809
  crRNA array
cgatttcttggctttatatatcttgtggaaaggacgaaacaccgtaatttctactaagtgtagatccctgaactgcccccagggataatttctactaagtgtagataagcgctatcatgatcccaattttttaagcttggcgtggatccgatatcaactagatcttgaga

SEQ ID NO: 8864 - DNA, 170 bp, Artificial sequence
  Trp53.4_Elf3.826
  crRNA array
cgatttcttggctttatatatcttgtggaaaggacgaaacaccgtaatttctactaagtgtagatccctgaactgcccccagggataatttctactaagtgtagattccgagacatcctaatccacttttttaagcttggcgtggatccgatatcaactagatcttgaga

SEQ ID NO: 8865 - DNA, 170 bp, Artificial sequence
  Trp53.4_Elf3.983
  crRNA array
cgatttcttggctttatatatcttgtggaaaggacgaaacaccgtaatttctactaagtgtagatccctgaactgcccccagggataatttctactaagtgtagattaggccccctaactggaccattttttaagcttggcgtggatccgatatcaactagatcttgaga

SEQ ID NO: 8866 - DNA, 170 bp, Artificial sequence
  Trp53.4_Ep300.310
  crRNA array
cgatttcttggctttatatatcttgtggaaaggacgaaacaccgtaatttctactaagtgtagatccctgaactgcccccagggataatttctactaagtgtagatatggtacgacagtgaggaagttttttaagcttggcgtggatccgatatcaactagatcttgaga

SEQ ID NO: 8867 - DNA, 170 bp, Artificial sequence
  Trp53.4_Ep300.587
  crRNA array
cgatttcttggctttatatatcttgtggaaaggacgaaacaccgtaatttctactaagtgtagatccctgaactgcccccagggataatttctactaagtgtagatcgccccggggcccccaaccattttttaagcttggcgtggatccgatatcaactagatcttgaga

SEQ ID NO: 8868 - DNA, 170 bp, Artificial sequence
  Trp53.4_Epha2.126
  crRNA array
cgatttcttggctttatatatcttgtggaaaggacgaaacaccgtaatttctactaagtgtagatccctgaactgcccccagggataatttctactaagtgtagatcctgtgccgccgcggccgccttttttaagcttggcgtggatccgatatcaactagatcttgaga

SEQ ID NO: 8869 - DNA, 170 bp, Artificial sequence
  Trp53.4_Epha2.5
  crRNA array
cgatttcttggctttatatatcttgtggaaaggacgaaacaccgtaatttctactaagtgtagatccctgaactgcccccagggataatttctactaagtgtagatcatgagctggcgccacccggttttttaagcttggcgtggatccgatatcaactagatcttgaga

SEQ ID NO: 8870 - DNA, 170 bp, Artificial sequence
  Trp53.4_Fat1.105
  crRNA array
cgatttcttggctttatatatcttgtggaaaggacgaaacaccgtaatttctactaagtgtagatccctgaactgcccccagggataatttctactaagtgtagataactcgaggtgacaacaagtttttttaagcttggcgtggatccgatatcaactagatcttgaga

SEQ ID NO: 8871 - DNA, 170 bp, Artificial sequence
  Trp53.4_Fat1.122
  crRNA array
cgatttcttggctttatatatcttgtggaaaggacgaaacaccgtaatttctactaagtgtagatccctgaactgcccccagggataatttctactaagtgtagatccatcgacatggaaacgggattttttaagcttggcgtggatccgatatcaactagatcttgaga

SEQ ID NO: 8872 - DNA, 170 bp, Artificial sequence
  Trp53.4_Fbxw7.21
  crRNA array
cgatttcttggctttatatatcttgtggaaaggacgaaacaccgtaatttctactaagtgtagatccctgaactgcccccagggataatttctactaagtgtagattaatgtgccgtagaaacccattttttaagcttggcgtggatccgatatcaactagatcttgaga

SEQ ID NO: 8873 - DNA, 170 bp, Artificial sequence
  Trp53.4_Fbxw7.23
  crRNA array
cgatttcttggctttatatatcttgtggaaaggacgaaacaccgtaatttctactaagtgtagatccctgaactgcccccagggataatttctactaagtgtagatatgtgccgtagaaacccatattttttaagcttggcgtggatccgatatcaactagatcttgaga

SEQ ID NO: 8874 - DNA, 170 bp, Artificial sequence
  Trp53.4_Gata3.34
  crRNA array
cgatttcttggctttatatatcttgtggaaaggacgaaacaccgtaatttctactaagtgtagatccctgaactgcccccagggataatttctactaagtgtagatctaaactatcccgcaaagatttttttaagcttggcgtggatccgatatcaactagatcttgaga

SEQ ID NO: 8875 - DNA, 170 bp, Artificial sequence
  Trp53.4_Gata3.47
  crRNA array
cgatttcttggctttatatatcttgtggaaaggacgaaacaccgtaatttctactaagtgtagatccctgaactgcccccagggataatttctactaagtgtagatcgtagtaggacgggacgtggttttttaagcttggcgtggatccgatatcaactagatcttgaga

SEQ ID NO: 8876 - DNA, 170 bp, Artificial sequence
  Trp53.4_H2-Q2.1
  crRNA array
cgatttcttggctttatatatcttgtggaaaggacgaaacaccgtaatttctactaagtgtagatccctgaactgcccccagggataatttctactaagtgtagatagggcggccaccaacagcagttttttaagcttggcgtggatccgatatcaactagatcttgaga

SEQ ID NO: 8877 - DNA, 170 bp, Artificial sequence
  Trp53.4_H2-Q2.2
  crRNA array
cgatttcttggctttatatatcttgtggaaaggacgaaacaccgtaatttctactaagtgtagatccctgaactgcccccagggataatttctactaagtgtagattaacctgcgcccgctgctgattttttaagcttggcgtggatccgatatcaactagatcttgaga

SEQ ID NO: 8878 - DNA, 170 bp, Artificial sequence
  Trp53.4_Kdm5c.1878
  crRNA array
cgatttcttggctttatatatcttgtggaaaggacgaaacaccgtaatttctactaagtgtagatccctgaactgcccccagggataatttctactaagtgtagatagagcacggcacccgcccccttttttaagcttggcgtggatccgatatcaactagatcttgaga

SEQ ID NO: 8879 - DNA, 170 bp, Artificial sequence
  Trp53.4_Kdm5c.1879
  crRNA array
cgatttcttggctttatatatcttgtggaaaggacgaaacaccgtaatttctactaagtgtagatccctgaactgcccccagggataatttctactaagtgtagatgagcacggcacccgccccccttttttaagcttggcgtggatccgatatcaactagatcttgaga

SEQ ID NO: 8880 - DNA, 170 bp, Artificial sequence
  Trp53.4_Kdm6a.56
  crRNA array
cgatttcttggctttatatatcttgtggaaaggacgaaacaccgtaatttctactaagtgtagatccctgaactgcccccagggataatttctactaagtgtagattcgctgccgcctctcgcggcttttttaagcttggcgtggatccgatatcaactagatcttgaga

SEQ ID NO: 8881 - DNA, 170 bp, Artificial sequence
  Trp53.4_Kdm6a.57
  crRNA array
cgatttcttggctttatatatcttgtggaaaggacgaaacaccgtaatttctactaagtgtagatccctgaactgcccccagggataatttctactaagtgtagatcgctgccgcctctcgcggcattttttaagcttggcgtggatccgatatcaactagatcttgaga

SEQ ID NO: 8882 - DNA, 170 bp, Artificial sequence
  Trp53.4_Kmt2b.265
  crRNA array
cgatttcttggctttatatatcttgtggaaaggacgaaacaccgtaatttctactaagtgtagatccctgaactgcccccagggataatttctactaagtgtagatccccaagtgaagcccacctgttttttaagcttggcgtggatccgatatcaactagatcttgaga

SEQ ID NO: 8883 - DNA, 170 bp, Artificial sequence
  Trp53.4_Kmt2b.298
  crRNA array
cgatttcttggctttatatatcttgtggaaaggacgaaacaccgtaatttctactaagtgtagatccctgaactgcccccagggataatttctactaagtgtagattccggcagggaccggctggcttttttaagcttggcgtggatccgatatcaactagatcttgaga

SEQ ID NO: 8884 - DNA, 170 bp, Artificial sequence
  Trp53.4_Kmt2c.1962
  crRNA array
cgatttcttggctttatatatcttgtggaaaggacgaaacaccgtaatttctactaagtgtagatccctgaactgcccccagggataatttctactaagtgtagatgtgacgatctgtgccacaagttttttaagcttggcgtggatccgatatcaactagatcttgaga

SEQ ID NO: 8885 - DNA, 170 bp, Artificial sequence
  Trp53.4_Kmt2c.2236
  crRNA array
cgatttcttggctttatatatcttgtggaaaggacgaaacaccgtaatttctactaagtgtagatccctgaactgcccccagggataatttctactaagtgtagatactcgacctccacctccctattttttaagcttggcgtggatccgatatcaactagatcttgaga

SEQ ID NO: 8886 - DNA, 170 bp, Artificial sequence
  Trp53.4_Kmt2d.316
  crRNA array
cgatttcttggctttatatatcttgtggaaaggacgaaacaccgtaatttctactaagtgtagatccctgaactgcccccagggataatttctactaagtgtagatactccaggccacccaggtggttttttaagcttggcgtggatccgatatcaactagatcttgaga

SEQ ID NO: 8887 - DNA, 170 bp, Artificial sequence
  Trp53.4_Kmt2d.416
  crRNA array
cgatttcttggctttatatatcttgtggaaaggacgaaacaccgtaatttctactaagtgtagatccctgaactgcccccagggataatttctactaagtgtagattaaacccccgggggaagggtttttttaagcttggcgtggatccgatatcaactagatcttgaga

SEQ ID NO: 8888 - DNA, 170 bp, Artificial sequence
  Trp53.4_Map2k4.119
  crRNA array
cgatttcttggctttatatatcttgtggaaaggacgaaacaccgtaatttctactaagtgtagatccctgaactgcccccagggataatttctactaagtgtagattgctgtgtgggcggccacatttttttaagcttggcgtggatccgatatcaactagatcttgaga

SEQ ID NO: 8889 - DNA, 170 bp, Artificial sequence
  Trp53.4_Map2k4.1261
  crRNA array
cgatttcttggctttatatatcttgtggaaaggacgaaacaccgtaatttctactaagtgtagatccctgaactgcccccagggataatttctactaagtgtagatgatgtagtaatgcggagtagttttttaagcttggcgtggatccgatatcaactagatcttgaga

SEQ ID NO: 8890 - DNA, 170 bp, Artificial sequence
  Trp53.4_Map3k1.235
  crRNA array
cgatttcttggctttatatatcttgtggaaaggacgaaacaccgtaatttctactaagtgtagatccctgaactgcccccagggataatttctactaagtgtagataaaacgctactgatcgatcgttttttaagcttggcgtggatccgatatcaactagatcttgaga

SEQ ID NO: 8891 - DNA, 170 bp, Artificial sequence
  Trp53.4_Map3k1.3838
  crRNA array
cgatttcttggctttatatatcttgtggaaaggacgaaacaccgtaatttctactaagtgtagatccctgaactgcccccagggataatttctactaagtgtagatccaacaacagggccccactattttttaagcttggcgtggatccgatatcaactagatcttgaga

SEQ ID NO: 8892 - DNA, 170 bp, Artificial sequence
  Trp53.4_Mga.1655
  crRNA array
cgatttcttggctttatatatcttgtggaaaggacgaaacaccgtaatttctactaagtgtagatccctgaactgcccccagggataatttctactaagtgtagatcgagaagtggagagcatattttttttaagcttggcgtggatccgatatcaactagatcttgaga

SEQ ID NO: 8893 - DNA, 170 bp, Artificial sequence
  Trp53.4_Mga.93
  crRNA array
cgatttcttggctttatatatcttgtggaaaggacgaaacaccgtaatttctactaagtgtagatccctgaactgcccccagggataatttctactaagtgtagatgagaaggctccccataatgtttttttaagcttggcgtggatccgatatcaactagatcttgaga

SEQ ID NO: 8894 - DNA, 170 bp, Artificial sequence
  Trp53.4_Nf1.746
  crRNA array
cgatttcttggctttatatatcttgtggaaaggacgaaacaccgtaatttctactaagtgtagatccctgaactgcccccagggataatttctactaagtgtagattaagcataatgatgatgccattttttaagcttggcgtggatccgatatcaactagatcttgaga

SEQ ID NO: 8895 - DNA, 170 bp, Artificial sequence
  Trp53.4_Nf1.97
  crRNA array
cgatttcttggctttatatatcttgtggaaaggacgaaacaccgtaatttctactaagtgtagatccctgaactgcccccagggataatttctactaagtgtagatagcccgctacatgctgatgcttttttaagcttggcgtggatccgatatcaactagatcttgaga

SEQ ID NO: 8896 - DNA, 170 bp, Artificial sequence
  Trp53.4_Nf2.356
  crRNA array
cgatttcttggctttatatatcttgtggaaaggacgaaacaccgtaatttctactaagtgtagatccctgaactgcccccagggataatttctactaagtgtagatcggagtcatctgatagagatttttttaagcttggcgtggatccgatatcaactagatcttgaga

SEQ ID NO: 8897 - DNA, 170 bp, Artificial sequence
  Trp53.4_Nf2.768
  crRNA array
cgatttcttggctttatatatcttgtggaaaggacgaaacaccgtaatttctactaagtgtagatccctgaactgcccccagggataatttctactaagtgtagatccgaagccccagtgtccggcttttttaagcttggcgtggatccgatatcaactagatcttgaga

SEQ ID NO: 8898 - DNA, 170 bp, Artificial sequence
  Trp53.4_Notch1.1849
  crRNA array
cgatttcttggctttatatatcttgtggaaaggacgaaacaccgtaatttctactaagtgtagatccctgaactgcccccagggataatttctactaagtgtagatctggcgggtgggcggcgctgttttttaagcttggcgtggatccgatatcaactagatcttgaga

SEQ ID NO: 8899 - DNA, 170 bp, Artificial sequence
  Trp53.4_Notch1.649
  crRNA array
cgatttcttggctttatatatcttgtggaaaggacgaaacaccgtaatttctactaagtgtagatccctgaactgcccccagggataatttctactaagtgtagattgggccaacgatgccaggacttttttaagcttggcgtggatccgatatcaactagatcttgaga

SEQ ID NO: 8900 - DNA, 170 bp, Artificial sequence
  Trp53.4_Nsd1.70
  crRNA array
cgatttcttggctttatatatcttgtggaaaggacgaaacaccgtaatttctactaagtgtagatccctgaactgcccccagggataatttctactaagtgtagatactggtgtggacgatgcagattttttaagcttggcgtggatccgatatcaactagatcttgaga

SEQ ID NO: 8901 - DNA, 170 bp, Artificial sequence
  Trp53.4_Nsd1.90
  crRNA array
cgatttcttggctttatatatcttgtggaaaggacgaaacaccgtaatttctactaagtgtagatccctgaactgcccccagggataatttctactaagtgtagataggagctaacggcaagaatgttttttaagcttggcgtggatccgatatcaactagatcttgaga

SEQ ID NO: 8902 - DNA, 170 bp, Artificial sequence
  Trp53.4_Pbrm1.1236
  crRNA array
cgatttcttggctttatatatcttgtggaaaggacgaaacaccgtaatttctactaagtgtagatccctgaactgcccccagggataatttctactaagtgtagatgccgataaaaccaacagccgttttttaagcttggcgtggatccgatatcaactagatcttgaga

SEQ ID NO: 8903 - DNA, 170 bp, Artificial sequence
  Trp53.4_Pbrm1.969
  crRNA array
cgatttcttggctttatatatcttgtggaaaggacgaaacaccgtaatttctactaagtgtagatccctgaactgcccccagggataatttctactaagtgtagatgagccctaatgaacagctcattttttaagcttggcgtggatccgatatcaactagatcttgaga

SEQ ID NO: 8904 - DNA, 170 bp, Artificial sequence
  Trp53.4_Pik3r1.76
  crRNA array
cgatttcttggctttatatatcttgtggaaaggacgaaacaccgtaatttctactaagtgtagatccctgaactgcccccagggataatttctactaagtgtagataaaacctatacggcccgcacttttttaagcttggcgtggatccgatatcaactagatcttgaga

SEQ ID NO: 8905 - DNA, 170 bp, Artificial sequence
  Trp53.4_Pik3r1.77
  crRNA array
cgatttcttggctttatatatcttgtggaaaggacgaaacaccgtaatttctactaagtgtagatccctgaactgcccccagggataatttctactaagtgtagataaacctatacggcccgcactttttttaagcttggcgtggatccgatatcaactagatcttgaga

SEQ ID NO: 8906 - DNA, 170 bp, Artificial sequence
  Trp53.4_Pten.240
  crRNA array
cgatttcttggctttatatatcttgtggaaaggacgaaacaccgtaatttctactaagtgtagatccctgaactgcccccagggataatttctactaagtgtagattgcatacgctatagctgcttttttttaagcttggcgtggatccgatatcaactagatcttgaga

SEQ ID NO: 8907 - DNA, 170 bp, Artificial sequence
  Trp53.4_Pten.265
  crRNA array
cgatttcttggctttatatatcttgtggaaaggacgaaacaccgtaatttctactaagtgtagatccctgaactgcccccagggataatttctactaagtgtagataagcgtggtgcgtgacgcacttttttaagcttggcgtggatccgatatcaactagatcttgaga

SEQ ID NO: 8908 - DNA, 170 bp, Artificial sequence
  Trp53.4_Rasa1.1478
  crRNA array
cgatttcttggctttatatatcttgtggaaaggacgaaacaccgtaatttctactaagtgtagatccctgaactgcccccagggataatttctactaagtgtagatcgataatggtctatgatgtcttttttaagcttggcgtggatccgatatcaactagatcttgaga

SEQ ID NO: 8909 - DNA, 170 bp, Artificial sequence
  Trp53.4_Rasa1.223
  crRNA array
cgatttcttggctttatatatcttgtggaaaggacgaaacaccgtaatttctactaagtgtagatccctgaactgcccccagggataatttctactaagtgtagattccatggagtatcgtgctcgttttttaagcttggcgtggatccgatatcaactagatcttgaga

SEQ ID NO: 8910 - DNA, 170 bp, Artificial sequence
  Trp53.4_Rb1.211
  crRNA array
cgatttcttggctttatatatcttgtggaaaggacgaaacaccgtaatttctactaagtgtagatccctgaactgcccccagggataatttctactaagtgtagattctgacatgatcgggtacctttttttaagcttggcgtggatccgatatcaactagatcttgaga

SEQ ID NO: 8911 - DNA, 170 bp, Artificial sequence
  Trp53.4_Rb1.394
  crRNA array
cgatttcttggctttatatatcttgtggaaaggacgaaacaccgtaatttctactaagtgtagatccctgaactgcccccagggataatttctactaagtgtagatagaaatctcgaagcaggatcttttttaagcttggcgtggatccgatatcaactagatcttgaga

SEQ ID NO: 8912 - DNA, 170 bp, Artificial sequence
  Trp53.4_Rbm10.5
  crRNA array
cgatttcttggctttatatatcttgtggaaaggacgaaacaccgtaatttctactaagtgtagatccctgaactgcccccagggataatttctactaagtgtagatacgaaacctgaacccacacattttttaagcttggcgtggatccgatatcaactagatcttgaga

SEQ ID NO: 8913 - DNA, 170 bp, Artificial sequence
  Trp53.4_Rbm10.6
  crRNA array
cgatttcttggctttatatatcttgtggaaaggacgaaacaccgtaatttctactaagtgtagatccctgaactgcccccagggataatttctactaagtgtagatcgaaacctgaacccacacagttttttaagcttggcgtggatccgatatcaactagatcttgaga

SEQ ID NO: 8914 - DNA, 170 bp, Artificial sequence
  Trp53.4_Rnf43.1920
  crRNA array
cgatttcttggctttatatatcttgtggaaaggacgaaacaccgtaatttctactaagtgtagatccctgaactgcccccagggataatttctactaagtgtagatatccccgtgccgtggactccttttttaagcttggcgtggatccgatatcaactagatcttgaga

SEQ ID NO: 8915 - DNA, 170 bp, Artificial sequence
  Trp53.4_Rnf43.39
  crRNA array
cgatttcttggctttatatatcttgtggaaaggacgaaacaccgtaatttctactaagtgtagatccctgaactgcccccagggataatttctactaagtgtagatcaaggggatcactctgataattttttaagcttggcgtggatccgatatcaactagatcttgaga

SEQ ID NO: 8916 - DNA, 170 bp, Artificial sequence
  Trp53.4_Runx1.204
  crRNA array
cgatttcttggctttatatatcttgtggaaaggacgaaacaccgtaatttctactaagtgtagatccctgaactgcccccagggataatttctactaagtgtagattaaataagtccagccgttttttttttaagcttggcgtggatccgatatcaactagatcttgaga

SEQ ID NO: 8917 - DNA, 170 bp, Artificial sequence
  Trp53.4_Runx1.81
  crRNA array
cgatttcttggctttatatatcttgtggaaaggacgaaacaccgtaatttctactaagtgtagatccctgaactgcccccagggataatttctactaagtgtagataggacgcgtatgggaattttttttttaagcttggcgtggatccgatatcaactagatcttgaga

SEQ ID NO: 8918 - DNA, 170 bp, Artificial sequence
  Trp53.4_Setd2.143
  crRNA array
cgatttcttggctttatatatcttgtggaaaggacgaaacaccgtaatttctactaagtgtagatccctgaactgcccccagggataatttctactaagtgtagatgcacaaccacaacagactggttttttaagcttggcgtggatccgatatcaactagatcttgaga

SEQ ID NO: 8919 - DNA, 170 bp, Artificial sequence
  Trp53.4_Setd2.508
  crRNA array
cgatttcttggctttatatatcttgtggaaaggacgaaacaccgtaatttctactaagtgtagatccctgaactgcccccagggataatttctactaagtgtagattacgatcccgagcacccgacttttttaagcttggcgtggatccgatatcaactagatcttgaga

SEQ ID NO: 8920 - DNA, 170 bp, Artificial sequence
  Trp53.4_Smad4.3038
  crRNA array
cgatttcttggctttatatatcttgtggaaaggacgaaacaccgtaatttctactaagtgtagatccctgaactgcccccagggataatttctactaagtgtagatatctgcggcagtgtcaccggttttttaagcttggcgtggatccgatatcaactagatcttgaga

SEQ ID NO: 8921 - DNA, 170 bp, Artificial sequence
  Trp53.4_Smad4.39
  crRNA array
cgatttcttggctttatatatcttgtggaaaggacgaaacaccgtaatttctactaagtgtagatccctgaactgcccccagggataatttctactaagtgtagatagtcaaacgcatactgacaattttttaagcttggcgtggatccgatatcaactagatcttgaga

SEQ ID NO: 8922 - DNA, 170 bp, Artificial sequence
  Trp53.4_Stag2.1409
  crRNA array
cgatttcttggctttatatatcttgtggaaaggacgaaacaccgtaatttctactaagtgtagatccctgaactgcccccagggataatttctactaagtgtagatgctaataactgcggaagggcttttttaagcttggcgtggatccgatatcaactagatcttgaga

SEQ ID NO: 8923 - DNA, 170 bp, Artificial sequence
  Trp53.4_Stag2.4401
  crRNA array
cgatttcttggctttatatatcttgtggaaaggacgaaacaccgtaatttctactaagtgtagatccctgaactgcccccagggataatttctactaagtgtagattaatcgtccagtggtgtatattttttaagcttggcgtggatccgatatcaactagatcttgaga

SEQ ID NO: 8924 - DNA, 170 bp, Artificial sequence
  Trp53.4_Tbl1xr1.1
  crRNA array
cgatttcttggctttatatatcttgtggaaaggacgaaacaccgtaatttctactaagtgtagatccctgaactgcccccagggataatttctactaagtgtagatggatgcgcatactggtgaagttttttaagcttggcgtggatccgatatcaactagatcttgaga

SEQ ID NO: 8925 - DNA, 170 bp, Artificial sequence
  Trp53.4_Tbl1xr1.83
  crRNA array
cgatttcttggctttatatatcttgtggaaaggacgaaacaccgtaatttctactaagtgtagatccctgaactgcccccagggataatttctactaagtgtagatatggtcgacccatcgagtctttttttaagcttggcgtggatccgatatcaactagatcttgaga

SEQ ID NO: 8926 - DNA, 170 bp, Artificial sequence
  Trp53.4_Tgfbr2.290
  crRNA array
cgatttcttggctttatatatcttgtggaaaggacgaaacaccgtaatttctactaagtgtagatccctgaactgcccccagggataatttctactaagtgtagatcctctcggcgcccgggtaaattttttaagcttggcgtggatccgatatcaactagatcttgaga

SEQ ID NO: 8927 - DNA, 170 bp, Artificial sequence
  Trp53.4_Tgfbr2.292
  crRNA array
cgatttcttggctttatatatcttgtggaaaggacgaaacaccgtaatttctactaagtgtagatccctgaactgcccccagggataatttctactaagtgtagatcccgggcgccgagagggaaattttttaagcttggcgtggatccgatatcaactagatcttgaga

SEQ ID NO: 8928 - DNA, 170 bp, Artificial sequence
  Trp53.4_Vhl.1
  crRNA array
cgatttcttggctttatatatcttgtggaaaggacgaaacaccgtaatttctactaagtgtagatccctgaactgcccccagggataatttctactaagtgtagatagggctcccggcggccatttttttttaagcttggcgtggatccgatatcaactagatcttgaga

SEQ ID NO: 8929 - DNA, 170 bp, Artificial sequence
  Trp53.4_Vhl.151
  crRNA array
cgatttcttggctttatatatcttgtggaaaggacgaaacaccgtaatttctactaagtgtagatccctgaactgcccccagggataatttctactaagtgtagattagagcactcacccgagggattttttaagcttggcgtggatccgatatcaactagatcttgaga

SEQ ID NO: 8930 - DNA, 170 bp, Artificial sequence
  Trp53.4_Zc3h13.1387
  crRNA array
cgatttcttggctttatatatcttgtggaaaggacgaaacaccgtaatttctactaagtgtagatccctgaactgcccccagggataatttctactaagtgtagatgtgacgccggtcatgtgactttttttaagcttggcgtggatccgatatcaactagatcttgaga

SEQ ID NO: 8931 - DNA, 170 bp, Artificial sequence
  Trp53.4_Zc3h13.1777
  crRNA array
cgatttcttggctttatatatcttgtggaaaggacgaaacaccgtaatttctactaagtgtagatccctgaactgcccccagggataatttctactaagtgtagatgatgctgccagtgtagcggcttttttaagcttggcgtggatccgatatcaactagatcttgaga

SEQ ID NO: 8932 - DNA, 170 bp, Artificial sequence
  Trp53.528_Acvr2a.155
  crRNA array
cgatttcttggctttatatatcttgtggaaaggacgaaacaccgtaatttctactaagtgtagatgctgggccagcagagacctgtaatttctactaagtgtagatggacctggctaatcaagtatttttttaagcttggcgtggatccgatatcaactagatcttgaga

SEQ ID NO: 8933 - DNA, 170 bp, Artificial sequence
  Trp53.528_Acvr2a.70
  crRNA array
cgatttcttggctttatatatcttgtggaaaggacgaaacaccgtaatttctactaagtgtagatgctgggccagcagagacctgtaatttctactaagtgtagatcccgaggcgccggagaagccttttttaagcttggcgtggatccgatatcaactagatcttgaga

SEQ ID NO: 8934 - DNA, 170 bp, Artificial sequence
  Trp53.528_Apc.21
  crRNA array
cgatttcttggctttatatatcttgtggaaaggacgaaacaccgtaatttctactaagtgtagatgctgggccagcagagacctgtaatttctactaagtgtagatgtgatccacacgtgtagctgttttttaagcttggcgtggatccgatatcaactagatcttgaga

SEQ ID NO: 8935 - DNA, 170 bp, Artificial sequence
  Trp53.528_Apc.867
  crRNA array
cgatttcttggctttatatatcttgtggaaaggacgaaacaccgtaatttctactaagtgtagatgctgggccagcagagacctgtaatttctactaagtgtagatcagtcccaggcggcggaagcttttttaagcttggcgtggatccgatatcaactagatcttgaga

SEQ ID NO: 8936 - DNA, 170 bp, Artificial sequence
  Trp53.528_Arid1a.2
  crRNA array
cgatttcttggctttatatatcttgtggaaaggacgaaacaccgtaatttctactaagtgtagatgctgggccagcagagacctgtaatttctactaagtgtagatcccgcgcccccgtcctggggttttttaagcttggcgtggatccgatatcaactagatcttgaga

SEQ ID NO: 8937 - DNA, 170 bp, Artificial sequence
  Trp53.528_Arid1a.5
  crRNA array
cgatttcttggctttatatatcttgtggaaaggacgaaacaccgtaatttctactaagtgtagatgctgggccagcagagacctgtaatttctactaagtgtagatcccgcgctcggccgctgccgttttttaagcttggcgtggatccgatatcaactagatcttgaga

SEQ ID NO: 8938 - DNA, 170 bp, Artificial sequence
  Trp53.528_Arid2.166
  crRNA array
cgatttcttggctttatatatcttgtggaaaggacgaaacaccgtaatttctactaagtgtagatgctgggccagcagagacctgtaatttctactaagtgtagataaccgcgatctgggttttttttttttaagcttggcgtggatccgatatcaactagatcttgaga

SEQ ID NO: 8939 - DNA, 170 bp, Artificial sequence
  Trp53.528_Arid2.172
  crRNA array
cgatttcttggctttatatatcttgtggaaaggacgaaacaccgtaatttctactaagtgtagatgctgggccagcagagacctgtaatttctactaagtgtagatctggacgagctgcggcagttttttttaagcttggcgtggatccgatatcaactagatcttgaga

SEQ ID NO: 8940 - DNA, 170 bp, Artificial sequence
  Trp53.528_Atm.120
  crRNA array
cgatttcttggctttatatatcttgtggaaaggacgaaacaccgtaatttctactaagtgtagatgctgggccagcagagacctgtaatttctactaagtgtagatgacaggtagtcggcagctaattttttaagcttggcgtggatccgatatcaactagatcttgaga

SEQ ID NO: 8941 - DNA, 170 bp, Artificial sequence
  Trp53.528_Atm.997
  crRNA array
cgatttcttggctttatatatcttgtggaaaggacgaaacaccgtaatttctactaagtgtagatgctgggccagcagagacctgtaatttctactaagtgtagatgagaaagtctccgaatcgttttttttaagcttggcgtggatccgatatcaactagatcttgaga

SEQ ID NO: 8942 - DNA, 170 bp, Artificial sequence
  Trp53.528_Atrx.249
  crRNA array
cgatttcttggctttatatatcttgtggaaaggacgaaacaccgtaatttctactaagtgtagatgctgggccagcagagacctgtaatttctactaagtgtagattagccagtcgctcatatctcttttttaagcttggcgtggatccgatatcaactagatcttgaga

SEQ ID NO: 8943 - DNA, 170 bp, Artificial sequence
  Trp53.528_Atrx.251
  crRNA array
cgatttcttggctttatatatcttgtggaaaggacgaaacaccgtaatttctactaagtgtagatgctgggccagcagagacctgtaatttctactaagtgtagatgccagtcgctcatatctctgttttttaagcttggcgtggatccgatatcaactagatcttgaga

SEQ ID NO: 8944 - DNA, 170 bp, Artificial sequence
  Trp53.528_Bcor.203
  crRNA array
cgatttcttggctttatatatcttgtggaaaggacgaaacaccgtaatttctactaagtgtagatgctgggccagcagagacctgtaatttctactaagtgtagatccccggagcggagtccaggcttttttaagcttggcgtggatccgatatcaactagatcttgaga

SEQ ID NO: 8945 - DNA, 170 bp, Artificial sequence
  Trp53.528_Bcor.475
  crRNA array
cgatttcttggctttatatatcttgtggaaaggacgaaacaccgtaatttctactaagtgtagatgctgggccagcagagacctgtaatttctactaagtgtagattgcaacccctctgtatgggattttttaagcttggcgtggatccgatatcaactagatcttgaga

SEQ ID NO: 8946 - DNA, 170 bp, Artificial sequence
  Trp53.528_Brca1.112
  crRNA array
cgatttcttggctttatatatcttgtggaaaggacgaaacaccgtaatttctactaagtgtagatgctgggccagcagagacctgtaatttctactaagtgtagatctagacgctctgtggagactttttttaagcttggcgtggatccgatatcaactagatcttgaga

SEQ ID NO: 8947 - DNA, 170 bp, Artificial sequence
  Trp53.528_Brca1.53
  crRNA array
cgatttcttggctttatatatcttgtggaaaggacgaaacaccgtaatttctactaagtgtagatgctgggccagcagagacctgtaatttctactaagtgtagataatgaggaggcgtcgatcatttttttaagcttggcgtggatccgatatcaactagatcttgaga

SEQ ID NO: 8948 - DNA, 170 bp, Artificial sequence
  Trp53.528_Casp8.45
  crRNA array
cgatttcttggctttatatatcttgtggaaaggacgaaacaccgtaatttctactaagtgtagatgctgggccagcagagacctgtaatttctactaagtgtagatctaccgagatcctgtgaatgttttttaagcttggcgtggatccgatatcaactagatcttgaga

SEQ ID NO: 8949 - DNA, 170 bp, Artificial sequence
  Trp53.528_Casp8.54
  crRNA array
cgatttcttggctttatatatcttgtggaaaggacgaaacaccgtaatttctactaagtgtagatgctgggccagcagagacctgtaatttctactaagtgtagatcagtgcagtcgtcgtaagatttttttaagcttggcgtggatccgatatcaactagatcttgaga

SEQ ID NO: 8950 - DNA, 170 bp, Artificial sequence
  Trp53.528_Cbwd1.84
  crRNA array
cgatttcttggctttatatatcttgtggaaaggacgaaacaccgtaatttctactaagtgtagatgctgggccagcagagacctgtaatttctactaagtgtagatcacagcaggtaacatgccgcttttttaagcttggcgtggatccgatatcaactagatcttgaga

SEQ ID NO: 8951 - DNA, 170 bp, Artificial sequence
  Trp53.528_Cbwd1.85
  crRNA array
cgatttcttggctttatatatcttgtggaaaggacgaaacaccgtaatttctactaagtgtagatgctgggccagcagagacctgtaatttctactaagtgtagatacagcaggtaacatgccgccttttttaagcttggcgtggatccgatatcaactagatcttgaga

SEQ ID NO: 8952 - DNA, 170 bp, Artificial sequence
  Trp53.528_Cdh1.387
  crRNA array
cgatttcttggctttatatatcttgtggaaaggacgaaacaccgtaatttctactaagtgtagatgctgggccagcagagacctgtaatttctactaagtgtagatctcggcgtctgccgggtccgttttttaagcttggcgtggatccgatatcaactagatcttgaga

SEQ ID NO: 8953 - DNA, 170 bp, Artificial sequence
  Trp53.528_Cdh1.58
  crRNA array
cgatttcttggctttatatatcttgtggaaaggacgaaacaccgtaatttctactaagtgtagatgctgggccagcagagacctgtaatttctactaagtgtagatctcgtccgcgcccgggactcttttttaagcttggcgtggatccgatatcaactagatcttgaga

SEQ ID NO: 8954 - DNA, 170 bp, Artificial sequence
  Trp53.528_Cdkn2a.647
  crRNA array
cgatttcttggctttatatatcttgtggaaaggacgaaacaccgtaatttctactaagtgtagatgctgggccagcagagacctgtaatttctactaagtgtagatgcaatcacgggagggagcagttttttaagcttggcgtggatccgatatcaactagatcttgaga

SEQ ID NO: 8955 - DNA, 170 bp, Artificial sequence
  Trp53.528_Cdkn2a.648
  crRNA array
cgatttcttggctttatatatcttgtggaaaggacgaaacaccgtaatttctactaagtgtagatgctgggccagcagagacctgtaatttctactaagtgtagatcaatcacgggagggagcagattttttaagcttggcgtggatccgatatcaactagatcttgaga

SEQ ID NO: 8956 - DNA, 170 bp, Artificial sequence
  Trp53.528_Cic.162
  crRNA array
cgatttcttggctttatatatcttgtggaaaggacgaaacaccgtaatttctactaagtgtagatgctgggccagcagagacctgtaatttctactaagtgtagatcgcaggcgcgcccggcggagttttttaagcttggcgtggatccgatatcaactagatcttgaga

SEQ ID NO: 8957 - DNA, 170 bp, Artificial sequence
  Trp53.528_Cic.164
  crRNA array
cgatttcttggctttatatatcttgtggaaaggacgaaacaccgtaatttctactaagtgtagatgctgggccagcagagacctgtaatttctactaagtgtagatcgggccctgggccggcggctttttttaagcttggcgtggatccgatatcaactagatcttgaga

SEQ ID NO: 8958 - DNA, 170 bp, Artificial sequence
  Trp53.528_Ctcf.229
  crRNA array
cgatttcttggctttatatatcttgtggaaaggacgaaacaccgtaatttctactaagtgtagatgctgggccagcagagacctgtaatttctactaagtgtagatggctggtggctgatagtctgttttttaagcttggcgtggatccgatatcaactagatcttgaga

SEQ ID NO: 8959 - DNA, 170 bp, Artificial sequence
  Trp53.528_Ctcf.809
  crRNA array
cgatttcttggctttatatatcttgtggaaaggacgaaacaccgtaatttctactaagtgtagatgctgggccagcagagacctgtaatttctactaagtgtagataagcgctatcatgatcccaattttttaagcttggcgtggatccgatatcaactagatcttgaga

SEQ ID NO: 8960 - DNA, 170 bp, Artificial sequence
  Trp53.528_Elf3.826
  crRNA array
cgatttcttggctttatatatcttgtggaaaggacgaaacaccgtaatttctactaagtgtagatgctgggccagcagagacctgtaatttctactaagtgtagattccgagacatcctaatccacttttttaagcttggcgtggatccgatatcaactagatcttgaga

SEQ ID NO: 8961 - DNA, 170 bp, Artificial sequence
  Trp53.528_Elf3.983
  crRNA array
cgatttcttggctttatatatcttgtggaaaggacgaaacaccgtaatttctactaagtgtagatgctgggccagcagagacctgtaatttctactaagtgtagattaggccccctaactggaccattttttaagcttggcgtggatccgatatcaactagatcttgaga

SEQ ID NO: 8962 - DNA, 170 bp, Artificial sequence
  Trp53.528_Ep300.310
  crRNA array
cgatttcttggctttatatatcttgtggaaaggacgaaacaccgtaatttctactaagtgtagatgctgggccagcagagacctgtaatttctactaagtgtagatatggtacgacagtgaggaagttttttaagcttggcgtggatccgatatcaactagatcttgaga

SEQ ID NO: 8963 - DNA, 170 bp, Artificial sequence
  Trp53.528_Ep300.587
  crRNA array
cgatttcttggctttatatatcttgtggaaaggacgaaacaccgtaatttctactaagtgtagatgctgggccagcagagacctgtaatttctactaagtgtagatcgccccggggcccccaaccattttttaagcttggcgtggatccgatatcaactagatcttgaga

SEQ ID NO: 8964 - DNA, 170 bp, Artificial sequence
  Trp53.528_Epha2.126
  crRNA array
cgatttcttggctttatatatcttgtggaaaggacgaaacaccgtaatttctactaagtgtagatgctgggccagcagagacctgtaatttctactaagtgtagatcctgtgccgccgcggccgccttttttaagcttggcgtggatccgatatcaactagatcttgaga

SEQ ID NO: 8965 - DNA, 170 bp, Artificial sequence
  Trp53.528_Epha2.5
  crRNA array
cgatttcttggctttatatatcttgtggaaaggacgaaacaccgtaatttctactaagtgtagatgctgggccagcagagacctgtaatttctactaagtgtagatcatgagctggcgccacccggttttttaagcttggcgtggatccgatatcaactagatcttgaga

SEQ ID NO: 8966 - DNA, 170 bp, Artificial sequence
  Trp53.528_Fat1.105
  crRNA array
cgatttcttggctttatatatcttgtggaaaggacgaaacaccgtaatttctactaagtgtagatgctgggccagcagagacctgtaatttctactaagtgtagataactcgaggtgacaacaagtttttttaagcttggcgtggatccgatatcaactagatcttgaga

SEQ ID NO: 8967 - DNA, 170 bp, Artificial sequence
  Trp53.528_Fat1.122
  crRNA array
cgatttcttggctttatatatcttgtggaaaggacgaaacaccgtaatttctactaagtgtagatgctgggccagcagagacctgtaatttctactaagtgtagatccatcgacatggaaacgggattttttaagcttggcgtggatccgatatcaactagatcttgaga

SEQ ID NO: 8968 - DNA, 170 bp, Artificial sequence
  Trp53.528_Fbxw7.21
  crRNA array
cgatttcttggctttatatatcttgtggaaaggacgaaacaccgtaatttctactaagtgtagatgctgggccagcagagacctgtaatttctactaagtgtagattaatgtgccgtagaaacccattttttaagcttggcgtggatccgatatcaactagatcttgaga

SEQ ID NO: 8969 - DNA, 170 bp, Artificial sequence
  Trp53.528_Fbxw7.23
  crRNA array
cgatttcttggctttatatatcttgtggaaaggacgaaacaccgtaatttctactaagtgtagatgctgggccagcagagacctgtaatttctactaagtgtagatatgtgccgtagaaacccatattttttaagcttggcgtggatccgatatcaactagatcttgaga

SEQ ID NO: 8970 - DNA, 170 bp, Artificial sequence
  Trp53.528_Gata3.34
  crRNA array
cgatttcttggctttatatatcttgtggaaaggacgaaacaccgtaatttctactaagtgtagatgctgggccagcagagacctgtaatttctactaagtgtagatctaaactatcccgcaaagatttttttaagcttggcgtggatccgatatcaactagatcttgaga

SEQ ID NO: 8971 - DNA, 170 bp, Artificial sequence
  Trp53.528_Gata3.47
  crRNA array
cgatttcttggctttatatatcttgtggaaaggacgaaacaccgtaatttctactaagtgtagatgctgggccagcagagacctgtaatttctactaagtgtagatcgtagtaggacgggacgtggttttttaagcttggcgtggatccgatatcaactagatcttgaga

SEQ ID NO: 8972 - DNA, 170 bp, Artificial sequence
  Trp53.528_H2-Q2.1
  crRNA array
cgatttcttggctttatatatcttgtggaaaggacgaaacaccgtaatttctactaagtgtagatgctgggccagcagagacctgtaatttctactaagtgtagatagggcggccaccaacagcagttttttaagcttggcgtggatccgatatcaactagatcttgaga

SEQ ID NO: 8973 - DNA, 170 bp, Artificial sequence
  Trp53.528_H2-Q2.2
  crRNA array
cgatttcttggctttatatatcttgtggaaaggacgaaacaccgtaatttctactaagtgtagatgctgggccagcagagacctgtaatttctactaagtgtagattaacctgcgcccgctgctgattttttaagcttggcgtggatccgatatcaactagatcttgaga

SEQ ID NO: 8974 - DNA, 170 bp, Artificial sequence
  Trp53.528_Kdm5c.1878
  crRNA array
cgatttcttggctttatatatcttgtggaaaggacgaaacaccgtaatttctactaagtgtagatgctgggccagcagagacctgtaatttctactaagtgtagatagagcacggcacccgcccccttttttaagcttggcgtggatccgatatcaactagatcttgaga

SEQ ID NO: 8975 - DNA, 170 bp, Artificial sequence
  Trp53.528_Kdm5c.1879
  crRNA array
cgatttcttggctttatatatcttgtggaaaggacgaaacaccgtaatttctactaagtgtagatgctgggccagcagagacctgtaatttctactaagtgtagatgagcacggcacccgccccccttttttaagcttggcgtggatccgatatcaactagatcttgaga

SEQ ID NO: 8976 - DNA, 170 bp, Artificial sequence
  Trp53.528_Kdm6a.56
  crRNA array
cgatttcttggctttatatatcttgtggaaaggacgaaacaccgtaatttctactaagtgtagatgctgggccagcagagacctgtaatttctactaagtgtagattcgctgccgcctctcgcggcttttttaagcttggcgtggatccgatatcaactagatcttgaga

SEQ ID NO: 8977 - DNA, 170 bp, Artificial sequence
  Trp53.528_Kdm6a.57
  crRNA array
cgatttcttggctttatatatcttgtggaaaggacgaaacaccgtaatttctactaagtgtagatgctgggccagcagagacctgtaatttctactaagtgtagatcgctgccgcctctcgcggcattttttaagcttggcgtggatccgatatcaactagatcttgaga

SEQ ID NO: 8978 - DNA, 170 bp, Artificial sequence
  Trp53.528_Kmt2b.265
  crRNA array
cgatttcttggctttatatatcttgtggaaaggacgaaacaccgtaatttctactaagtgtagatgctgggccagcagagacctgtaatttctactaagtgtagatccccaagtgaagcccacctgttttttaagcttggcgtggatccgatatcaactagatcttgaga

SEQ ID NO: 8979 - DNA, 170 bp, Artificial sequence
  Trp53.528_Kmt2b.298
  crRNA array
cgatttcttggctttatatatcttgtggaaaggacgaaacaccgtaatttctactaagtgtagatgctgggccagcagagacctgtaatttctactaagtgtagattccggcagggaccggctggcttttttaagcttggcgtggatccgatatcaactagatcttgaga

SEQ ID NO: 8980 - DNA, 170 bp, Artificial sequence
  Trp53.528_Kmt2c.1962
  crRNA array
cgatttcttggctttatatatcttgtggaaaggacgaaacaccgtaatttctactaagtgtagatgctgggccagcagagacctgtaatttctactaagtgtagatgtgacgatctgtgccacaagttttttaagcttggcgtggatccgatatcaactagatcttgaga

SEQ ID NO: 8981 - DNA, 170 bp, Artificial sequence
  Trp53.528_Kmt2c.2236
  crRNA array
cgatttcttggctttatatatcttgtggaaaggacgaaacaccgtaatttctactaagtgtagatgctgggccagcagagacctgtaatttctactaagtgtagatactcgacctccacctccctattttttaagcttggcgtggatccgatatcaactagatcttgaga

SEQ ID NO: 8982 - DNA, 170 bp, Artificial sequence
  Trp53.528_Kmt2d.316
  crRNA array
cgatttcttggctttatatatcttgtggaaaggacgaaacaccgtaatttctactaagtgtagatgctgggccagcagagacctgtaatttctactaagtgtagatactccaggccacccaggtggttttttaagcttggcgtggatccgatatcaactagatcttgaga

SEQ ID NO: 8983 - DNA, 170 bp, Artificial sequence
  Trp53.528_Kmt2d.416
  crRNA array
cgatttcttggctttatatatcttgtggaaaggacgaaacaccgtaatttctactaagtgtagatgctgggccagcagagacctgtaatttctactaagtgtagattaaacccccgggggaagggtttttttaagcttggcgtggatccgatatcaactagatcttgaga

SEQ ID NO: 8984 - DNA, 170 bp, Artificial sequence
  Trp53.528_Map2k4.119
  crRNA array
cgatttcttggctttatatatcttgtggaaaggacgaaacaccgtaatttctactaagtgtagatgctgggccagcagagacctgtaatttctactaagtgtagattgctgtgtgggcggccacatttttttaagcttggcgtggatccgatatcaactagatcttgaga

SEQ ID NO: 8985 - DNA, 170 bp, Artificial sequence
  Trp53.528_Map2k4.1261
  crRNA array
cgatttcttggctttatatatcttgtggaaaggacgaaacaccgtaatttctactaagtgtagatgctgggccagcagagacctgtaatttctactaagtgtagatgatgtagtaatgcggagtagttttttaagcttggcgtggatccgatatcaactagatcttgaga

SEQ ID NO: 8986 - DNA, 170 bp, Artificial sequence
  Trp53.528_Map3k1.235
  crRNA array
cgatttcttggctttatatatcttgtggaaaggacgaaacaccgtaatttctactaagtgtagatgctgggccagcagagacctgtaatttctactaagtgtagataaaacgctactgatcgatcgttttttaagcttggcgtggatccgatatcaactagatcttgaga

SEQ ID NO: 8987 - DNA, 170 bp, Artificial sequence
  Trp53.528_Map3k1.3838
  crRNA array
cgatttcttggctttatatatcttgtggaaaggacgaaacaccgtaatttctactaagtgtagatgctgggccagcagagacctgtaatttctactaagtgtagatccaacaacagggccccactattttttaagcttggcgtggatccgatatcaactagatcttgaga

SEQ ID NO: 8988 - DNA, 170 bp, Artificial sequence
  Trp53.528_Mga.1655
  crRNA array
cgatttcttggctttatatatcttgtggaaaggacgaaacaccgtaatttctactaagtgtagatgctgggccagcagagacctgtaatttctactaagtgtagatcgagaagtggagagcatattttttttaagcttggcgtggatccgatatcaactagatcttgaga

SEQ ID NO: 8989 - DNA, 170 bp, Artificial sequence
  Trp53.528_Mga.93
  crRNA array
cgatttcttggctttatatatcttgtggaaaggacgaaacaccgtaatttctactaagtgtagatgctgggccagcagagacctgtaatttctactaagtgtagatgagaaggctccccataatgtttttttaagcttggcgtggatccgatatcaactagatcttgaga

SEQ ID NO: 8990 - DNA, 170 bp, Artificial sequence
  Trp53.528_Nf1.746
  crRNA array
cgatttcttggctttatatatcttgtggaaaggacgaaacaccgtaatttctactaagtgtagatgctgggccagcagagacctgtaatttctactaagtgtagattaagcataatgatgatgccattttttaagcttggcgtggatccgatatcaactagatcttgaga

SEQ ID NO: 8991 - DNA, 170 bp, Artificial sequence
  Trp53.528_Nf1.97
  crRNA array
cgatttcttggctttatatatcttgtggaaaggacgaaacaccgtaatttctactaagtgtagatgctgggccagcagagacctgtaatttctactaagtgtagatagcccgctacatgctgatgcttttttaagcttggcgtggatccgatatcaactagatcttgaga

SEQ ID NO: 8992 - DNA, 170 bp, Artificial sequence
  Trp53.528_Nf2.356
  crRNA array
cgatttcttggctttatatatcttgtggaaaggacgaaacaccgtaatttctactaagtgtagatgctgggccagcagagacctgtaatttctactaagtgtagatcggagtcatctgatagagatttttttaagcttggcgtggatccgatatcaactagatcttgaga

SEQ ID NO: 8993 - DNA, 170 bp, Artificial sequence
  Trp53.528_Nf2.768
  crRNA array
cgatttcttggctttatatatcttgtggaaaggacgaaacaccgtaatttctactaagtgtagatgctgggccagcagagacctgtaatttctactaagtgtagatccgaagccccagtgtccggcttttttaagcttggcgtggatccgatatcaactagatcttgaga

SEQ ID NO: 8994 - DNA, 170 bp, Artificial sequence
  Trp53.528_Notch1.1849
  crRNA array
cgatttcttggctttatatatcttgtggaaaggacgaaacaccgtaatttctactaagtgtagatgctgggccagcagagacctgtaatttctactaagtgtagatctggcgggtgggcggcgctgttttttaagcttggcgtggatccgatatcaactagatcttgaga

SEQ ID NO: 8995 - DNA, 170 bp, Artificial sequence
  Trp53.528_Notch1.649
  crRNA array
cgatttcttggctttatatatcttgtggaaaggacgaaacaccgtaatttctactaagtgtagatgctgggccagcagagacctgtaatttctactaagtgtagattgggccaacgatgccaggacttttttaagcttggcgtggatccgatatcaactagatcttgaga

SEQ ID NO: 8996 - DNA, 170 bp, Artificial sequence
  Trp53.528_Nsd1.70
  crRNA array
cgatttcttggctttatatatcttgtggaaaggacgaaacaccgtaatttctactaagtgtagatgctgggccagcagagacctgtaatttctactaagtgtagatactggtgtggacgatgcagattttttaagcttggcgtggatccgatatcaactagatcttgaga

SEQ ID NO: 8997 - DNA, 170 bp, Artificial sequence
  Trp53.528_Nsd1.90
  crRNA array
cgatttcttggctttatatatcttgtggaaaggacgaaacaccgtaatttctactaagtgtagatgctgggccagcagagacctgtaatttctactaagtgtagataggagctaacggcaagaatgttttttaagcttggcgtggatccgatatcaactagatcttgaga

SEQ ID NO: 8998 - DNA, 170 bp, Artificial sequence
  Trp53.528_Pbrm1.1236
  crRNA array
cgatttcttggctttatatatcttgtggaaaggacgaaacaccgtaatttctactaagtgtagatgctgggccagcagagacctgtaatttctactaagtgtagatgccgataaaaccaacagccgttttttaagcttggcgtggatccgatatcaactagatcttgaga

SEQ ID NO: 8999 - DNA, 170 bp, Artificial sequence
  Trp53.528_Pbrm1.969
  crRNA array
cgatttcttggctttatatatcttgtggaaaggacgaaacaccgtaatttctactaagtgtagatgctgggccagcagagacctgtaatttctactaagtgtagatgagccctaatgaacagctcattttttaagcttggcgtggatccgatatcaactagatcttgaga

SEQ ID NO: 9000 - DNA, 170 bp, Artificial sequence
  Trp53.528_Pik3r1.76
  crRNA array
cgatttcttggctttatatatcttgtggaaaggacgaaacaccgtaatttctactaagtgtagatgctgggccagcagagacctgtaatttctactaagtgtagataaaacctatacggcccgcacttttttaagcttggcgtggatccgatatcaactagatcttgaga

SEQ ID NO: 9001 - DNA, 170 bp, Artificial sequence
  Trp53.528_Pik3r1.77
  crRNA array
cgatttcttggctttatatatcttgtggaaaggacgaaacaccgtaatttctactaagtgtagatgctgggccagcagagacctgtaatttctactaagtgtagataaacctatacggcccgcactttttttaagcttggcgtggatccgatatcaactagatcttgaga

SEQ ID NO: 9002 - DNA, 170 bp, Artificial sequence
  Trp53.528_Pten.240
  crRNA array
cgatttcttggctttatatatcttgtggaaaggacgaaacaccgtaatttctactaagtgtagatgctgggccagcagagacctgtaatttctactaagtgtagattgcatacgctatagctgcttttttttaagcttggcgtggatccgatatcaactagatcttgaga

SEQ ID NO: 9003 - DNA, 170 bp, Artificial sequence
  Trp53.528_Pten.265
  crRNA array
cgatttcttggctttatatatcttgtggaaaggacgaaacaccgtaatttctactaagtgtagatgctgggccagcagagacctgtaatttctactaagtgtagataagcgtggtgcgtgacgcacttttttaagcttggcgtggatccgatatcaactagatcttgaga

SEQ ID NO: 9004 - DNA, 170 bp, Artificial sequence
  Trp53.528_Rasa1.1478
  crRNA array
cgatttcttggctttatatatcttgtggaaaggacgaaacaccgtaatttctactaagtgtagatgctgggccagcagagacctgtaatttctactaagtgtagatcgataatggtctatgatgtcttttttaagcttggcgtggatccgatatcaactagatcttgaga

SEQ ID NO: 9005 - DNA, 170 bp, Artificial sequence
  Trp53.528_Rasa1.223
  crRNA array
cgatttcttggctttatatatcttgtggaaaggacgaaacaccgtaatttctactaagtgtagatgctgggccagcagagacctgtaatttctactaagtgtagattccatggagtatcgtgctcgttttttaagcttggcgtggatccgatatcaactagatcttgaga

SEQ ID NO: 9006 - DNA, 170 bp, Artificial sequence
  Trp53.528_Rb1.211
  crRNA array
cgatttcttggctttatatatcttgtggaaaggacgaaacaccgtaatttctactaagtgtagatgctgggccagcagagacctgtaatttctactaagtgtagattctgacatgatcgggtacctttttttaagcttggcgtggatccgatatcaactagatcttgaga

SEQ ID NO: 9007 - DNA, 170 bp, Artificial sequence
  Trp53.528_Rb1.394
  crRNA array
cgatttcttggctttatatatcttgtggaaaggacgaaacaccgtaatttctactaagtgtagatgctgggccagcagagacctgtaatttctactaagtgtagatagaaatctcgaagcaggatcttttttaagcttggcgtggatccgatatcaactagatcttgaga

SEQ ID NO: 9008 - DNA, 170 bp, Artificial sequence
  Trp53.528_Rbm10.5
  crRNA array
cgatttcttggctttatatatcttgtggaaaggacgaaacaccgtaatttctactaagtgtagatgctgggccagcagagacctgtaatttctactaagtgtagatacgaaacctgaacccacacattttttaagcttggcgtggatccgatatcaactagatcttgaga

SEQ ID NO: 9009 - DNA, 170 bp, Artificial sequence
  Trp53.528_Rbm10.6
  crRNA array
cgatttcttggctttatatatcttgtggaaaggacgaaacaccgtaatttctactaagtgtagatgctgggccagcagagacctgtaatttctactaagtgtagatcgaaacctgaacccacacagttttttaagcttggcgtggatccgatatcaactagatcttgaga

SEQ ID NO: 9010 - DNA, 170 bp, Artificial sequence
  Trp53.528_Rnf43.1920
  crRNA array
cgatttcttggctttatatatcttgtggaaaggacgaaacaccgtaatttctactaagtgtagatgctgggccagcagagacctgtaatttctactaagtgtagatatccccgtgccgtggactccttttttaagcttggcgtggatccgatatcaactagatcttgaga

SEQ ID NO: 9011 - DNA, 170 bp, Artificial sequence
  Trp53.528_Rnf43.39
  crRNA array
cgatttcttggctttatatatcttgtggaaaggacgaaacaccgtaatttctactaagtgtagatgctgggccagcagagacctgtaatttctactaagtgtagatcaaggggatcactctgataattttttaagcttggcgtggatccgatatcaactagatcttgaga

SEQ ID NO: 9012 - DNA, 170 bp, Artificial sequence
  Trp53.528_Runx1.204
  crRNA array
cgatttcttggctttatatatcttgtggaaaggacgaaacaccgtaatttctactaagtgtagatgctgggccagcagagacctgtaatttctactaagtgtagattaaataagtccagccgttttttttttaagcttggcgtggatccgatatcaactagatcttgaga

SEQ ID NO: 9013 - DNA, 170 bp, Artificial sequence
  Trp53.528_Runx1.81
  crRNA array
cgatttcttggctttatatatcttgtggaaaggacgaaacaccgtaatttctactaagtgtagatgctgggccagcagagacctgtaatttctactaagtgtagataggacgcgtatgggaattttttttttaagcttggcgtggatccgatatcaactagatcttgaga

SEQ ID NO: 9014 - DNA, 170 bp, Artificial sequence
  Trp53.528_Setd2.143
  crRNA array
cgatttcttggctttatatatcttgtggaaaggacgaaacaccgtaatttctactaagtgtagatgctgggccagcagagacctgtaatttctactaagtgtagatgcacaaccacaacagactggttttttaagcttggcgtggatccgatatcaactagatcttgaga

SEQ ID NO: 9015 - DNA, 170 bp, Artificial sequence
  Trp53.528_Setd2.508
  crRNA array
cgatttcttggctttatatatcttgtggaaaggacgaaacaccgtaatttctactaagtgtagatgctgggccagcagagacctgtaatttctactaagtgtagattacgatcccgagcacccgacttttttaagcttggcgtggatccgatatcaactagatcttgaga

SEQ ID NO: 9016 - DNA, 170 bp, Artificial sequence
  Trp53.528_Smad4.3038
  crRNA array
cgatttcttggctttatatatcttgtggaaaggacgaaacaccgtaatttctactaagtgtagatgctgggccagcagagacctgtaatttctactaagtgtagatatctgcggcagtgtcaccggttttttaagcttggcgtggatccgatatcaactagatcttgaga

SEQ ID NO: 9017 - DNA, 170 bp, Artificial sequence
  Trp53.528_Smad4.39
  crRNA array
cgatttcttggctttatatatcttgtggaaaggacgaaacaccgtaatttctactaagtgtagatgctgggccagcagagacctgtaatttctactaagtgtagatagtcaaacgcatactgacaattttttaagcttggcgtggatccgatatcaactagatcttgaga

SEQ ID NO: 9018 - DNA, 170 bp, Artificial sequence
  Trp53.528_Stag2.1409
  crRNA array
cgatttcttggctttatatatcttgtggaaaggacgaaacaccgtaatttctactaagtgtagatgctgggccagcagagacctgtaatttctactaagtgtagatgctaataactgcggaagggcttttttaagcttggcgtggatccgatatcaactagatcttgaga

SEQ ID NO: 9019 - DNA, 170 bp, Artificial sequence
  Trp53.528_Stag2.4401
  crRNA array
cgatttcttggctttatatatcttgtggaaaggacgaaacaccgtaatttctactaagtgtagatgctgggccagcagagacctgtaatttctactaagtgtagattaatcgtccagtggtgtatattttttaagcttggcgtggatccgatatcaactagatcttgaga

SEQ ID NO: 9020 - DNA, 170 bp, Artificial sequence
  Trp53.528_Tbl1xr1.1
  crRNA array
cgatttcttggctttatatatcttgtggaaaggacgaaacaccgtaatttctactaagtgtagatgctgggccagcagagacctgtaatttctactaagtgtagatggatgcgcatactggtgaagttttttaagcttggcgtggatccgatatcaactagatcttgaga

SEQ ID NO: 9021 - DNA, 170 bp, Artificial sequence
  Trp53.528_Tbl1xr1.83
  crRNA array
cgatttcttggctttatatatcttgtggaaaggacgaaacaccgtaatttctactaagtgtagatgctgggccagcagagacctgtaatttctactaagtgtagatatggtcgacccatcgagtctttttttaagcttggcgtggatccgatatcaactagatcttgaga

SEQ ID NO: 9022 - DNA, 170 bp, Artificial sequence
  Trp53.528_Tgfbr2.290
  crRNA array
cgatttcttggctttatatatcttgtggaaaggacgaaacaccgtaatttctactaagtgtagatgctgggccagcagagacctgtaatttctactaagtgtagatcctctcggcgcccgggtaaattttttaagcttggcgtggatccgatatcaactagatcttgaga

SEQ ID NO: 9023 - DNA, 170 bp, Artificial sequence
  Trp53.528_Tgfbr2.292
  crRNA array
cgatttcttggctttatatatcttgtggaaaggacgaaacaccgtaatttctactaagtgtagatgctgggccagcagagacctgtaatttctactaagtgtagatcccgggcgccgagagggaaattttttaagcttggcgtggatccgatatcaactagatcttgaga

SEQ ID NO: 9024 - DNA, 170 bp, Artificial sequence
  Trp53.528_Vhl.1
  crRNA array
cgatttcttggctttatatatcttgtggaaaggacgaaacaccgtaatttctactaagtgtagatgctgggccagcagagacctgtaatttctactaagtgtagatagggctcccggcggccatttttttttaagcttggcgtggatccgatatcaactagatcttgaga

SEQ ID NO: 9025 - DNA, 170 bp, Artificial sequence
  Trp53.528_Vhl.151
  crRNA array
cgatttcttggctttatatatcttgtggaaaggacgaaacaccgtaatttctactaagtgtagatgctgggccagcagagacctgtaatttctactaagtgtagattagagcactcacccgagggattttttaagcttggcgtggatccgatatcaactagatcttgaga

SEQ ID NO: 9026 - DNA, 170 bp, Artificial sequence
  Trp53.528_Zc3h13.1387
  crRNA array
cgatttcttggctttatatatcttgtggaaaggacgaaacaccgtaatttctactaagtgtagatgctgggccagcagagacctgtaatttctactaagtgtagatgtgacgccggtcatgtgactttttttaagcttggcgtggatccgatatcaactagatcttgaga

SEQ ID NO: 9027 - DNA, 170 bp, Artificial sequence
  Trp53.528_Zc3h13.1777
  crRNA array
cgatttcttggctttatatatcttgtggaaaggacgaaacaccgtaatttctactaagtgtagatgctgggccagcagagacctgtaatttctactaagtgtagatgatgctgccagtgtagcggcttttttaagcttggcgtggatccgatatcaactagatcttgaga

SEQ ID NO: 9028 - DNA, 170 bp, Artificial sequence
  Vhl.1_Acvr2a.155
  crRNA array
cgatttcttggctttatatatcttgtggaaaggacgaaacaccgtaatttctactaagtgtagatagggctcccggcggccattttaatttctactaagtgtagatggacctggctaatcaagtatttttttaagcttggcgtggatccgatatcaactagatcttgaga

SEQ ID NO: 9029 - DNA, 170 bp, Artificial sequence
  Vhl.1_Acvr2a.70
  crRNA array
cgatttcttggctttatatatcttgtggaaaggacgaaacaccgtaatttctactaagtgtagatagggctcccggcggccattttaatttctactaagtgtagatcccgaggcgccggagaagccttttttaagcttggcgtggatccgatatcaactagatcttgaga

SEQ ID NO: 9030 - DNA, 170 bp, Artificial sequence
  Vhl.1_Apc.21
  crRNA array
cgatttcttggctttatatatcttgtggaaaggacgaaacaccgtaatttctactaagtgtagatagggctcccggcggccattttaatttctactaagtgtagatgtgatccacacgtgtagctgttttttaagcttggcgtggatccgatatcaactagatcttgaga

SEQ ID NO: 9031 - DNA, 170 bp, Artificial sequence
  Vhl.1_Apc.867
  crRNA array
cgatttcttggctttatatatcttgtggaaaggacgaaacaccgtaatttctactaagtgtagatagggctcccggcggccattttaatttctactaagtgtagatcagtcccaggcggcggaagcttttttaagcttggcgtggatccgatatcaactagatcttgaga

SEQ ID NO: 9032 - DNA, 170 bp, Artificial sequence
  Vhl.1_Arid1a.2
  crRNA array
cgatttcttggctttatatatcttgtggaaaggacgaaacaccgtaatttctactaagtgtagatagggctcccggcggccattttaatttctactaagtgtagatcccgcgcccccgtcctggggttttttaagcttggcgtggatccgatatcaactagatcttgaga

SEQ ID NO: 9033 - DNA, 170 bp, Artificial sequence
  Vhl.1_Arid1a.5
  crRNA array
cgatttcttggctttatatatcttgtggaaaggacgaaacaccgtaatttctactaagtgtagatagggctcccggcggccattttaatttctactaagtgtagatcccgcgctcggccgctgccgttttttaagcttggcgtggatccgatatcaactagatcttgaga

SEQ ID NO: 9034 - DNA, 170 bp, Artificial sequence
  Vhl.1_Arid2.166
  crRNA array
cgatttcttggctttatatatcttgtggaaaggacgaaacaccgtaatttctactaagtgtagatagggctcccggcggccattttaatttctactaagtgtagataaccgcgatctgggttttttttttttaagcttggcgtggatccgatatcaactagatcttgaga

SEQ ID NO: 9035 - DNA, 170 bp, Artificial sequence
  Vhl.1_Arid2.172
  crRNA array
cgatttcttggctttatatatcttgtggaaaggacgaaacaccgtaatttctactaagtgtagatagggctcccggcggccattttaatttctactaagtgtagatctggacgagctgcggcagttttttttaagcttggcgtggatccgatatcaactagatcttgaga

SEQ ID NO: 9036 - DNA, 170 bp, Artificial sequence
  Vhl.1_Atm.120
  crRNA array
cgatttcttggctttatatatcttgtggaaaggacgaaacaccgtaatttctactaagtgtagatagggctcccggcggccattttaatttctactaagtgtagatgacaggtagtcggcagctaattttttaagcttggcgtggatccgatatcaactagatcttgaga

SEQ ID NO: 9037 - DNA, 170 bp, Artificial sequence
  Vhl.1_Atm.997
  crRNA array
cgatttcttggctttatatatcttgtggaaaggacgaaacaccgtaatttctactaagtgtagatagggctcccggcggccattttaatttctactaagtgtagatgagaaagtctccgaatcgttttttttaagcttggcgtggatccgatatcaactagatcttgaga

SEQ ID NO: 9038 - DNA, 170 bp, Artificial sequence
  Vhl.1_Atrx.249
  crRNA array
cgatttcttggctttatatatcttgtggaaaggacgaaacaccgtaatttctactaagtgtagatagggctcccggcggccattttaatttctactaagtgtagattagccagtcgctcatatctcttttttaagcttggcgtggatccgatatcaactagatcttgaga

SEQ ID NO: 9039 - DNA, 170 bp, Artificial sequence
  Vhl.1_Atrx.251
  crRNA array
cgatttcttggctttatatatcttgtggaaaggacgaaacaccgtaatttctactaagtgtagatagggctcccggcggccattttaatttctactaagtgtagatgccagtcgctcatatctctgttttttaagcttggcgtggatccgatatcaactagatcttgaga

SEQ ID NO: 9040 - DNA, 170 bp, Artificial sequence
  Vhl.1_Bcor.203
  crRNA array
cgatttcttggctttatatatcttgtggaaaggacgaaacaccgtaatttctactaagtgtagatagggctcccggcggccattttaatttctactaagtgtagatccccggagcggagtccaggcttttttaagcttggcgtggatccgatatcaactagatcttgaga

SEQ ID NO: 9041 - DNA, 170 bp, Artificial sequence
  Vhl.1_Bcor.475
  crRNA array
cgatttcttggctttatatatcttgtggaaaggacgaaacaccgtaatttctactaagtgtagatagggctcccggcggccattttaatttctactaagtgtagattgcaacccctctgtatgggattttttaagcttggcgtggatccgatatcaactagatcttgaga

SEQ ID NO: 9042 - DNA, 170 bp, Artificial sequence
  Vhl.1_Brca1.112
  crRNA array
cgatttcttggctttatatatcttgtggaaaggacgaaacaccgtaatttctactaagtgtagatagggctcccggcggccattttaatttctactaagtgtagatctagacgctctgtggagactttttttaagcttggcgtggatccgatatcaactagatcttgaga

SEQ ID NO: 9043 - DNA, 170 bp, Artificial sequence
  Vhl.1_Brca1.53
  crRNA array
cgatttcttggctttatatatcttgtggaaaggacgaaacaccgtaatttctactaagtgtagatagggctcccggcggccattttaatttctactaagtgtagataatgaggaggcgtcgatcatttttttaagcttggcgtggatccgatatcaactagatcttgaga

SEQ ID NO: 9044 - DNA, 170 bp, Artificial sequence
  Vhl.1_Casp8.45
  crRNA array
cgatttcttggctttatatatcttgtggaaaggacgaaacaccgtaatttctactaagtgtagatagggctcccggcggccattttaatttctactaagtgtagatctaccgagatcctgtgaatgttttttaagcttggcgtggatccgatatcaactagatcttgaga

SEQ ID NO: 9045 - DNA, 170 bp, Artificial sequence
  Vhl.1_Casp8.54
  crRNA array
cgatttcttggctttatatatcttgtggaaaggacgaaacaccgtaatttctactaagtgtagatagggctcccggcggccattttaatttctactaagtgtagatcagtgcagtcgtcgtaagatttttttaagcttggcgtggatccgatatcaactagatcttgaga

SEQ ID NO: 9046 - DNA, 170 bp, Artificial sequence
  Vhl.1_Cbwd1.84
  crRNA array
cgatttcttggctttatatatcttgtggaaaggacgaaacaccgtaatttctactaagtgtagatagggctcccggcggccattttaatttctactaagtgtagatcacagcaggtaacatgccgcttttttaagcttggcgtggatccgatatcaactagatcttgaga

SEQ ID NO: 9047 - DNA, 170 bp, Artificial sequence
  Vhl.1_Cbwd1.85
  crRNA array
cgatttcttggctttatatatcttgtggaaaggacgaaacaccgtaatttctactaagtgtagatagggctcccggcggccattttaatttctactaagtgtagatacagcaggtaacatgccgccttttttaagcttggcgtggatccgatatcaactagatcttgaga

SEQ ID NO: 9048 - DNA, 170 bp, Artificial sequence
  Vhl.1_Cdh1.387
  crRNA array
cgatttcttggctttatatatcttgtggaaaggacgaaacaccgtaatttctactaagtgtagatagggctcccggcggccattttaatttctactaagtgtagatctcggcgtctgccgggtccgttttttaagcttggcgtggatccgatatcaactagatcttgaga

SEQ ID NO: 9049 - DNA, 170 bp, Artificial sequence
  Vhl.1_Cdh1.58
  crRNA array
cgatttcttggctttatatatcttgtggaaaggacgaaacaccgtaatttctactaagtgtagatagggctcccggcggccattttaatttctactaagtgtagatctcgtccgcgcccgggactcttttttaagcttggcgtggatccgatatcaactagatcttgaga

SEQ ID NO: 9050 - DNA, 170 bp, Artificial sequence
  Vhl.1_Cdkn2a.647
  crRNA array
cgatttcttggctttatatatcttgtggaaaggacgaaacaccgtaatttctactaagtgtagatagggctcccggcggccattttaatttctactaagtgtagatgcaatcacgggagggagcagttttttaagcttggcgtggatccgatatcaactagatcttgaga

SEQ ID NO: 9051 - DNA, 170 bp, Artificial sequence
  Vhl.1_Cdkn2a.648
  crRNA array
cgatttcttggctttatatatcttgtggaaaggacgaaacaccgtaatttctactaagtgtagatagggctcccggcggccattttaatttctactaagtgtagatcaatcacgggagggagcagattttttaagcttggcgtggatccgatatcaactagatcttgaga

SEQ ID NO: 9052 - DNA, 170 bp, Artificial sequence
  Vhl.1_Cic.162
  crRNA array
cgatttcttggctttatatatcttgtggaaaggacgaaacaccgtaatttctactaagtgtagatagggctcccggcggccattttaatttctactaagtgtagatcgcaggcgcgcccggcggagttttttaagcttggcgtggatccgatatcaactagatcttgaga

SEQ ID NO: 9053 - DNA, 170 bp, Artificial sequence
  Vhl.1_Cic.164
  crRNA array
cgatttcttggctttatatatcttgtggaaaggacgaaacaccgtaatttctactaagtgtagatagggctcccggcggccattttaatttctactaagtgtagatcgggccctgggccggcggctttttttaagcttggcgtggatccgatatcaactagatcttgaga

SEQ ID NO: 9054 - DNA, 170 bp, Artificial sequence
  Vhl.1_Ctcf.229
  crRNA array
cgatttcttggctttatatatcttgtggaaaggacgaaacaccgtaatttctactaagtgtagatagggctcccggcggccattttaatttctactaagtgtagatggctggtggctgatagtctgttttttaagcttggcgtggatccgatatcaactagatcttgaga

SEQ ID NO: 9055 - DNA, 170 bp, Artificial sequence
  Vhl.1_Ctcf.809
  crRNA array
cgatttcttggctttatatatcttgtggaaaggacgaaacaccgtaatttctactaagtgtagatagggctcccggcggccattttaatttctactaagtgtagataagcgctatcatgatcccaattttttaagcttggcgtggatccgatatcaactagatcttgaga

SEQ ID NO: 9056 - DNA, 170 bp, Artificial sequence
  Vhl.1_Elf3.826
  crRNA array
cgatttcttggctttatatatcttgtggaaaggacgaaacaccgtaatttctactaagtgtagatagggctcccggcggccattttaatttctactaagtgtagattccgagacatcctaatccacttttttaagcttggcgtggatccgatatcaactagatcttgaga

SEQ ID NO: 9057 - DNA, 170 bp, Artificial sequence
  Vhl.1_Elf3.983
  crRNA array
cgatttcttggctttatatatcttgtggaaaggacgaaacaccgtaatttctactaagtgtagatagggctcccggcggccattttaatttctactaagtgtagattaggccccctaactggaccattttttaagcttggcgtggatccgatatcaactagatcttgaga

SEQ ID NO: 9058 - DNA, 170 bp, Artificial sequence
  Vhl.1_Ep300.310
  crRNA array
cgatttcttggctttatatatcttgtggaaaggacgaaacaccgtaatttctactaagtgtagatagggctcccggcggccattttaatttctactaagtgtagatatggtacgacagtgaggaagttttttaagcttggcgtggatccgatatcaactagatcttgaga

SEQ ID NO: 9059 - DNA, 170 bp, Artificial sequence
  Vhl.1_Ep300.587
  crRNA array
cgatttcttggctttatatatcttgtggaaaggacgaaacaccgtaatttctactaagtgtagatagggctcccggcggccattttaatttctactaagtgtagatcgccccggggcccccaaccattttttaagcttggcgtggatccgatatcaactagatcttgaga

SEQ ID NO: 9060 - DNA, 170 bp, Artificial sequence
  Vhl.1_Epha2.126
  crRNA array
cgatttcttggctttatatatcttgtggaaaggacgaaacaccgtaatttctactaagtgtagatagggctcccggcggccattttaatttctactaagtgtagatcctgtgccgccgcggccgccttttttaagcttggcgtggatccgatatcaactagatcttgaga

SEQ ID NO: 9061 - DNA, 170 bp, Artificial sequence
  Vhl.1_Epha2.5
  crRNA array
cgatttcttggctttatatatcttgtggaaaggacgaaacaccgtaatttctactaagtgtagatagggctcccggcggccattttaatttctactaagtgtagatcatgagctggcgccacccggttttttaagcttggcgtggatccgatatcaactagatcttgaga

SEQ ID NO: 9062 - DNA, 170 bp, Artificial sequence
  Vhl.1_Fat1.105
  crRNA array
cgatttcttggctttatatatcttgtggaaaggacgaaacaccgtaatttctactaagtgtagatagggctcccggcggccattttaatttctactaagtgtagataactcgaggtgacaacaagtttttttaagcttggcgtggatccgatatcaactagatcttgaga

SEQ ID NO: 9063 - DNA, 170 bp, Artificial sequence
  Vhl.1_Fat1.122
  crRNA array
cgatttcttggctttatatatcttgtggaaaggacgaaacaccgtaatttctactaagtgtagatagggctcccggcggccattttaatttctactaagtgtagatccatcgacatggaaacgggattttttaagcttggcgtggatccgatatcaactagatcttgaga

SEQ ID NO: 9064 - DNA, 170 bp, Artificial sequence
  Vhl.1_Fbxw7.21
  crRNA array
cgatttcttggctttatatatcttgtggaaaggacgaaacaccgtaatttctactaagtgtagatagggctcccggcggccattttaatttctactaagtgtagattaatgtgccgtagaaacccattttttaagcttggcgtggatccgatatcaactagatcttgaga

SEQ ID NO: 9065 - DNA, 170 bp, Artificial sequence
  Vhl.1_Fbxw7.23
  crRNA array
cgatttcttggctttatatatcttgtggaaaggacgaaacaccgtaatttctactaagtgtagatagggctcccggcggccattttaatttctactaagtgtagatatgtgccgtagaaacccatattttttaagcttggcgtggatccgatatcaactagatcttgaga

SEQ ID NO: 9066 - DNA, 170 bp, Artificial sequence
  Vhl.1_Gata3.34
  crRNA array
cgatttcttggctttatatatcttgtggaaaggacgaaacaccgtaatttctactaagtgtagatagggctcccggcggccattttaatttctactaagtgtagatctaaactatcccgcaaagatttttttaagcttggcgtggatccgatatcaactagatcttgaga

SEQ ID NO: 9067 - DNA, 170 bp, Artificial sequence
  Vhl.1_Gata3.47
  crRNA array
cgatttcttggctttatatatcttgtggaaaggacgaaacaccgtaatttctactaagtgtagatagggctcccggcggccattttaatttctactaagtgtagatcgtagtaggacgggacgtggttttttaagcttggcgtggatccgatatcaactagatcttgaga

SEQ ID NO: 9068 - DNA, 170 bp, Artificial sequence
  Vhl.1_H2-Q2.1
  crRNA array
cgatttcttggctttatatatcttgtggaaaggacgaaacaccgtaatttctactaagtgtagatagggctcccggcggccattttaatttctactaagtgtagatagggcggccaccaacagcagttttttaagcttggcgtggatccgatatcaactagatcttgaga

SEQ ID NO: 9069 - DNA, 170 bp, Artificial sequence
  Vhl.1_H2-Q2.2
  crRNA array
cgatttcttggctttatatatcttgtggaaaggacgaaacaccgtaatttctactaagtgtagatagggctcccggcggccattttaatttctactaagtgtagattaacctgcgcccgctgctgattttttaagcttggcgtggatccgatatcaactagatcttgaga

SEQ ID NO: 9070 - DNA, 170 bp, Artificial sequence
  Vhl.1_Kdm5c.1878
  crRNA array
cgatttcttggctttatatatcttgtggaaaggacgaaacaccgtaatttctactaagtgtagatagggctcccggcggccattttaatttctactaagtgtagatagagcacggcacccgcccccttttttaagcttggcgtggatccgatatcaactagatcttgaga

SEQ ID NO: 9071 - DNA, 170 bp, Artificial sequence
  Vhl.1_Kdm5c.1879
  crRNA array
cgatttcttggctttatatatcttgtggaaaggacgaaacaccgtaatttctactaagtgtagatagggctcccggcggccattttaatttctactaagtgtagatgagcacggcacccgccccccttttttaagcttggcgtggatccgatatcaactagatcttgaga

SEQ ID NO: 9072 - DNA, 170 bp, Artificial sequence
  Vhl.1_Kdm6a.56
  crRNA array
cgatttcttggctttatatatcttgtggaaaggacgaaacaccgtaatttctactaagtgtagatagggctcccggcggccattttaatttctactaagtgtagattcgctgccgcctctcgcggcttttttaagcttggcgtggatccgatatcaactagatcttgaga

SEQ ID NO: 9073 - DNA, 170 bp, Artificial sequence
  Vhl.1_Kdm6a.57
  crRNA array
cgatttcttggctttatatatcttgtggaaaggacgaaacaccgtaatttctactaagtgtagatagggctcccggcggccattttaatttctactaagtgtagatcgctgccgcctctcgcggcattttttaagcttggcgtggatccgatatcaactagatcttgaga

SEQ ID NO: 9074 - DNA, 170 bp, Artificial sequence
  Vhl.1_Kmt2b.265
  crRNA array
cgatttcttggctttatatatcttgtggaaaggacgaaacaccgtaatttctactaagtgtagatagggctcccggcggccattttaatttctactaagtgtagatccccaagtgaagcccacctgttttttaagcttggcgtggatccgatatcaactagatcttgaga

SEQ ID NO: 9075 - DNA, 170 bp, Artificial sequence
  Vhl.1_Kmt2b.298
  crRNA array
cgatttcttggctttatatatcttgtggaaaggacgaaacaccgtaatttctactaagtgtagatagggctcccggcggccattttaatttctactaagtgtagattccggcagggaccggctggcttttttaagcttggcgtggatccgatatcaactagatcttgaga

SEQ ID NO: 9076 - DNA, 170 bp, Artificial sequence
  Vhl.1_Kmt2c.1962
  crRNA array
cgatttcttggctttatatatcttgtggaaaggacgaaacaccgtaatttctactaagtgtagatagggctcccggcggccattttaatttctactaagtgtagatgtgacgatctgtgccacaagttttttaagcttggcgtggatccgatatcaactagatcttgaga

SEQ ID NO: 9077 - DNA, 170 bp, Artificial sequence
  Vhl.1_Kmt2c.2236
  crRNA array
cgatttcttggctttatatatcttgtggaaaggacgaaacaccgtaatttctactaagtgtagatagggctcccggcggccattttaatttctactaagtgtagatactcgacctccacctccctattttttaagcttggcgtggatccgatatcaactagatcttgaga

SEQ ID NO: 9078 - DNA, 170 bp, Artificial sequence
  Vhl.1_Kmt2d.316
  crRNA array
cgatttcttggctttatatatcttgtggaaaggacgaaacaccgtaatttctactaagtgtagatagggctcccggcggccattttaatttctactaagtgtagatactccaggccacccaggtggttttttaagcttggcgtggatccgatatcaactagatcttgaga

SEQ ID NO: 9079 - DNA, 170 bp, Artificial sequence
  Vhl.1_Kmt2d.416
  crRNA array
cgatttcttggctttatatatcttgtggaaaggacgaaacaccgtaatttctactaagtgtagatagggctcccggcggccattttaatttctactaagtgtagattaaacccccgggggaagggtttttttaagcttggcgtggatccgatatcaactagatcttgaga

SEQ ID NO: 9080 - DNA, 170 bp, Artificial sequence
  Vhl.1_Map2k4.119
  crRNA array
cgatttcttggctttatatatcttgtggaaaggacgaaacaccgtaatttctactaagtgtagatagggctcccggcggccattttaatttctactaagtgtagattgctgtgtgggcggccacatttttttaagcttggcgtggatccgatatcaactagatcttgaga

SEQ ID NO: 9081 - DNA, 170 bp, Artificial sequence
  Vhl.1_Map2k4.1261
  crRNA array
cgatttcttggctttatatatcttgtggaaaggacgaaacaccgtaatttctactaagtgtagatagggctcccggcggccattttaatttctactaagtgtagatgatgtagtaatgcggagtagttttttaagcttggcgtggatccgatatcaactagatcttgaga

SEQ ID NO: 9082 - DNA, 170 bp, Artificial sequence
  Vhl.1_Map3k1.235
  crRNA array
cgatttcttggctttatatatcttgtggaaaggacgaaacaccgtaatttctactaagtgtagatagggctcccggcggccattttaatttctactaagtgtagataaaacgctactgatcgatcgttttttaagcttggcgtggatccgatatcaactagatcttgaga

SEQ ID NO: 9083 - DNA, 170 bp, Artificial sequence
  Vhl.1_Map3k1.3838
  crRNA array
cgatttcttggctttatatatcttgtggaaaggacgaaacaccgtaatttctactaagtgtagatagggctcccggcggccattttaatttctactaagtgtagatccaacaacagggccccactattttttaagcttggcgtggatccgatatcaactagatcttgaga

SEQ ID NO: 9084 - DNA, 170 bp, Artificial sequence
  Vhl.1_Mga.1655
  crRNA array
cgatttcttggctttatatatcttgtggaaaggacgaaacaccgtaatttctactaagtgtagatagggctcccggcggccattttaatttctactaagtgtagatcgagaagtggagagcatattttttttaagcttggcgtggatccgatatcaactagatcttgaga

SEQ ID NO: 9085 - DNA, 170 bp, Artificial sequence
  Vhl.1_Mga.93
  crRNA array
cgatttcttggctttatatatcttgtggaaaggacgaaacaccgtaatttctactaagtgtagatagggctcccggcggccattttaatttctactaagtgtagatgagaaggctccccataatgtttttttaagcttggcgtggatccgatatcaactagatcttgaga

SEQ ID NO: 9086 - DNA, 170 bp, Artificial sequence
  Vhl.1_Nf1.746
  crRNA array
cgatttcttggctttatatatcttgtggaaaggacgaaacaccgtaatttctactaagtgtagatagggctcccggcggccattttaatttctactaagtgtagattaagcataatgatgatgccattttttaagcttggcgtggatccgatatcaactagatcttgaga

SEQ ID NO: 9087 - DNA, 170 bp, Artificial sequence
  Vhl.1_Nf1.97
  crRNA array
cgatttcttggctttatatatcttgtggaaaggacgaaacaccgtaatttctactaagtgtagatagggctcccggcggccattttaatttctactaagtgtagatagcccgctacatgctgatgcttttttaagcttggcgtggatccgatatcaactagatcttgaga

SEQ ID NO: 9088 - DNA, 170 bp, Artificial sequence
  Vhl.1_Nf2.356
  crRNA array
cgatttcttggctttatatatcttgtggaaaggacgaaacaccgtaatttctactaagtgtagatagggctcccggcggccattttaatttctactaagtgtagatcggagtcatctgatagagatttttttaagcttggcgtggatccgatatcaactagatcttgaga

SEQ ID NO: 9089 - DNA, 170 bp, Artificial sequence
  Vhl.1_Nf2.768
  crRNA array
cgatttcttggctttatatatcttgtggaaaggacgaaacaccgtaatttctactaagtgtagatagggctcccggcggccattttaatttctactaagtgtagatccgaagccccagtgtccggcttttttaagcttggcgtggatccgatatcaactagatcttgaga

SEQ ID NO: 9090 - DNA, 170 bp, Artificial sequence
  Vhl.1_Notch1.1849
  crRNA array
cgatttcttggctttatatatcttgtggaaaggacgaaacaccgtaatttctactaagtgtagatagggctcccggcggccattttaatttctactaagtgtagatctggcgggtgggcggcgctgttttttaagcttggcgtggatccgatatcaactagatcttgaga

SEQ ID NO: 9091 - DNA, 170 bp, Artificial sequence
  Vhl.1_Notch1.649
  crRNA array
cgatttcttggctttatatatcttgtggaaaggacgaaacaccgtaatttctactaagtgtagatagggctcccggcggccattttaatttctactaagtgtagattgggccaacgatgccaggacttttttaagcttggcgtggatccgatatcaactagatcttgaga

SEQ ID NO: 9092 - DNA, 170 bp, Artificial sequence
  Vhl.1_Nsd1.70
  crRNA array
cgatttcttggctttatatatcttgtggaaaggacgaaacaccgtaatttctactaagtgtagatagggctcccggcggccattttaatttctactaagtgtagatactggtgtggacgatgcagattttttaagcttggcgtggatccgatatcaactagatcttgaga

SEQ ID NO: 9093 - DNA, 170 bp, Artificial sequence
  Vhl.1_Nsd1.90
  crRNA array
cgatttcttggctttatatatcttgtggaaaggacgaaacaccgtaatttctactaagtgtagatagggctcccggcggccattttaatttctactaagtgtagataggagctaacggcaagaatgttttttaagcttggcgtggatccgatatcaactagatcttgaga

SEQ ID NO: 9094 - DNA, 170 bp, Artificial sequence
  Vhl.1_Pbrm1.1236
  crRNA array
cgatttcttggctttatatatcttgtggaaaggacgaaacaccgtaatttctactaagtgtagatagggctcccggcggccattttaatttctactaagtgtagatgccgataaaaccaacagccgttttttaagcttggcgtggatccgatatcaactagatcttgaga

SEQ ID NO: 9095 - DNA, 170 bp, Artificial sequence
  Vhl.1_Pbrm1.969
  crRNA array
cgatttcttggctttatatatcttgtggaaaggacgaaacaccgtaatttctactaagtgtagatagggctcccggcggccattttaatttctactaagtgtagatgagccctaatgaacagctcattttttaagcttggcgtggatccgatatcaactagatcttgaga

SEQ ID NO: 9096 - DNA, 170 bp, Artificial sequence
  Vhl.1_Pik3r1.76
  crRNA array
cgatttcttggctttatatatcttgtggaaaggacgaaacaccgtaatttctactaagtgtagatagggctcccggcggccattttaatttctactaagtgtagataaaacctatacggcccgcacttttttaagcttggcgtggatccgatatcaactagatcttgaga

SEQ ID NO: 9097 - DNA, 170 bp, Artificial sequence
  Vhl.1_Pik3r1.77
  crRNA array
cgatttcttggctttatatatcttgtggaaaggacgaaacaccgtaatttctactaagtgtagatagggctcccggcggccattttaatttctactaagtgtagataaacctatacggcccgcactttttttaagcttggcgtggatccgatatcaactagatcttgaga

SEQ ID NO: 9098 - DNA, 170 bp, Artificial sequence
  Vhl.1_Pten.240
  crRNA array
cgatttcttggctttatatatcttgtggaaaggacgaaacaccgtaatttctactaagtgtagatagggctcccggcggccattttaatttctactaagtgtagattgcatacgctatagctgcttttttttaagcttggcgtggatccgatatcaactagatcttgaga

SEQ ID NO: 9099 - DNA, 170 bp, Artificial sequence
  Vhl.1_Pten.265
  crRNA array
cgatttcttggctttatatatcttgtggaaaggacgaaacaccgtaatttctactaagtgtagatagggctcccggcggccattttaatttctactaagtgtagataagcgtggtgcgtgacgcacttttttaagcttggcgtggatccgatatcaactagatcttgaga

SEQ ID NO: 9100 - DNA, 170 bp, Artificial sequence
  Vhl.1_Rasa1.1478
  crRNA array
cgatttcttggctttatatatcttgtggaaaggacgaaacaccgtaatttctactaagtgtagatagggctcccggcggccattttaatttctactaagtgtagatcgataatggtctatgatgtcttttttaagcttggcgtggatccgatatcaactagatcttgaga

SEQ ID NO: 9101 - DNA, 170 bp, Artificial sequence
  Vhl.1_Rasa1.223
  crRNA array
cgatttcttggctttatatatcttgtggaaaggacgaaacaccgtaatttctactaagtgtagatagggctcccggcggccattttaatttctactaagtgtagattccatggagtatcgtgctcgttttttaagcttggcgtggatccgatatcaactagatcttgaga

SEQ ID NO: 9102 - DNA, 170 bp, Artificial sequence
  Vhl.1_Rb1.211
  crRNA array
cgatttcttggctttatatatcttgtggaaaggacgaaacaccgtaatttctactaagtgtagatagggctcccggcggccattttaatttctactaagtgtagattctgacatgatcgggtacctttttttaagcttggcgtggatccgatatcaactagatcttgaga

SEQ ID NO: 9103 - DNA, 170 bp, Artificial sequence
  Vhl.1_Rb1.394
  crRNA array
cgatttcttggctttatatatcttgtggaaaggacgaaacaccgtaatttctactaagtgtagatagggctcccggcggccattttaatttctactaagtgtagatagaaatctcgaagcaggatcttttttaagcttggcgtggatccgatatcaactagatcttgaga

SEQ ID NO: 9104 - DNA, 170 bp, Artificial sequence
  Vhl.1_Rbm10.5
  crRNA array
cgatttcttggctttatatatcttgtggaaaggacgaaacaccgtaatttctactaagtgtagatagggctcccggcggccattttaatttctactaagtgtagatacgaaacctgaacccacacattttttaagcttggcgtggatccgatatcaactagatcttgaga

SEQ ID NO: 9105 - DNA, 170 bp, Artificial sequence
  Vhl.1_Rbm10.6
  crRNA array
cgatttcttggctttatatatcttgtggaaaggacgaaacaccgtaatttctactaagtgtagatagggctcccggcggccattttaatttctactaagtgtagatcgaaacctgaacccacacagttttttaagcttggcgtggatccgatatcaactagatcttgaga

SEQ ID NO: 9106 - DNA, 170 bp, Artificial sequence
  Vhl.1_Rnf43.1920
  crRNA array
cgatttcttggctttatatatcttgtggaaaggacgaaacaccgtaatttctactaagtgtagatagggctcccggcggccattttaatttctactaagtgtagatatccccgtgccgtggactccttttttaagcttggcgtggatccgatatcaactagatcttgaga

SEQ ID NO: 9107 - DNA, 170 bp, Artificial sequence
  Vhl.1_Rnf43.39
  crRNA array
cgatttcttggctttatatatcttgtggaaaggacgaaacaccgtaatttctactaagtgtagatagggctcccggcggccattttaatttctactaagtgtagatcaaggggatcactctgataattttttaagcttggcgtggatccgatatcaactagatcttgaga

SEQ ID NO: 9108 - DNA, 170 bp, Artificial sequence
  Vhl.1_Runx1.204
  crRNA array
cgatttcttggctttatatatcttgtggaaaggacgaaacaccgtaatttctactaagtgtagatagggctcccggcggccattttaatttctactaagtgtagattaaataagtccagccgttttttttttaagcttggcgtggatccgatatcaactagatcttgaga

SEQ ID NO: 9109 - DNA, 170 bp, Artificial sequence
  Vhl.1_Runx1.81
  crRNA array
cgatttcttggctttatatatcttgtggaaaggacgaaacaccgtaatttctactaagtgtagatagggctcccggcggccattttaatttctactaagtgtagataggacgcgtatgggaattttttttttaagcttggcgtggatccgatatcaactagatcttgaga

SEQ ID NO: 9110 - DNA, 170 bp, Artificial sequence
  Vhl.1_Setd2.143
  crRNA array
cgatttcttggctttatatatcttgtggaaaggacgaaacaccgtaatttctactaagtgtagatagggctcccggcggccattttaatttctactaagtgtagatgcacaaccacaacagactggttttttaagcttggcgtggatccgatatcaactagatcttgaga

SEQ ID NO: 9111 - DNA, 170 bp, Artificial sequence
  Vhl.1_Setd2.508
  crRNA array
cgatttcttggctttatatatcttgtggaaaggacgaaacaccgtaatttctactaagtgtagatagggctcccggcggccattttaatttctactaagtgtagattacgatcccgagcacccgacttttttaagcttggcgtggatccgatatcaactagatcttgaga

SEQ ID NO: 9112 - DNA, 170 bp, Artificial sequence
  Vhl.1_Smad4.3038
  crRNA array
cgatttcttggctttatatatcttgtggaaaggacgaaacaccgtaatttctactaagtgtagatagggctcccggcggccattttaatttctactaagtgtagatatctgcggcagtgtcaccggttttttaagcttggcgtggatccgatatcaactagatcttgaga

SEQ ID NO: 9113 - DNA, 170 bp, Artificial sequence
  Vhl.1_Smad4.39
  crRNA array
cgatttcttggctttatatatcttgtggaaaggacgaaacaccgtaatttctactaagtgtagatagggctcccggcggccattttaatttctactaagtgtagatagtcaaacgcatactgacaattttttaagcttggcgtggatccgatatcaactagatcttgaga

SEQ ID NO: 9114 - DNA, 170 bp, Artificial sequence
  Vhl.1_Stag2.1409
  crRNA array
cgatttcttggctttatatatcttgtggaaaggacgaaacaccgtaatttctactaagtgtagatagggctcccggcggccattttaatttctactaagtgtagatgctaataactgcggaagggcttttttaagcttggcgtggatccgatatcaactagatcttgaga

SEQ ID NO: 9115 - DNA, 170 bp, Artificial sequence
  Vhl.1_Stag2.4401
  crRNA array
cgatttcttggctttatatatcttgtggaaaggacgaaacaccgtaatttctactaagtgtagatagggctcccggcggccattttaatttctactaagtgtagattaatcgtccagtggtgtatattttttaagcttggcgtggatccgatatcaactagatcttgaga

SEQ ID NO: 9116 - DNA, 170 bp, Artificial sequence
  Vhl.1_Tbl1xr1.1
  crRNA array
cgatttcttggctttatatatcttgtggaaaggacgaaacaccgtaatttctactaagtgtagatagggctcccggcggccattttaatttctactaagtgtagatggatgcgcatactggtgaagttttttaagcttggcgtggatccgatatcaactagatcttgaga

SEQ ID NO: 9117 - DNA, 170 bp, Artificial sequence
  Vhl.1_Tbl1xr1.83
  crRNA array
cgatttcttggctttatatatcttgtggaaaggacgaaacaccgtaatttctactaagtgtagatagggctcccggcggccattttaatttctactaagtgtagatatggtcgacccatcgagtctttttttaagcttggcgtggatccgatatcaactagatcttgaga

SEQ ID NO: 9118 - DNA, 170 bp, Artificial sequence
  Vhl.1_Tgfbr2.290
  crRNA array
cgatttcttggctttatatatcttgtggaaaggacgaaacaccgtaatttctactaagtgtagatagggctcccggcggccattttaatttctactaagtgtagatcctctcggcgcccgggtaaattttttaagcttggcgtggatccgatatcaactagatcttgaga

SEQ ID NO: 9119 - DNA, 170 bp, Artificial sequence
  Vhl.1_Tgfbr2.292
  crRNA array
cgatttcttggctttatatatcttgtggaaaggacgaaacaccgtaatttctactaagtgtagatagggctcccggcggccattttaatttctactaagtgtagatcccgggcgccgagagggaaattttttaagcttggcgtggatccgatatcaactagatcttgaga

SEQ ID NO: 9120 - DNA, 170 bp, Artificial sequence
  Vhl.1_Trp53.4
  crRNA array
cgatttcttggctttatatatcttgtggaaaggacgaaacaccgtaatttctactaagtgtagatagggctcccggcggccattttaatttctactaagtgtagatccctgaactgcccccagggattttttaagcttggcgtggatccgatatcaactagatcttgaga

SEQ ID NO: 9121 - DNA, 170 bp, Artificial sequence
  Vhl.1_Trp53.528
  crRNA array
cgatttcttggctttatatatcttgtggaaaggacgaaacaccgtaatttctactaagtgtagatagggctcccggcggccattttaatttctactaagtgtagatgctgggccagcagagacctgttttttaagcttggcgtggatccgatatcaactagatcttgaga

SEQ ID NO: 9122 - DNA, 170 bp, Artificial sequence
  Vhl.1_Zc3h13.1387
  crRNA array
cgatttcttggctttatatatcttgtggaaaggacgaaacaccgtaatttctactaagtgtagatagggctcccggcggccattttaatttctactaagtgtagatgtgacgccggtcatgtgactttttttaagcttggcgtggatccgatatcaactagatcttgaga

SEQ ID NO: 9123 - DNA, 170 bp, Artificial sequence
  Vhl.1_Zc3h13.1777
  crRNA array
cgatttcttggctttatatatcttgtggaaaggacgaaacaccgtaatttctactaagtgtagatagggctcccggcggccattttaatttctactaagtgtagatgatgctgccagtgtagcggcttttttaagcttggcgtggatccgatatcaactagatcttgaga

SEQ ID NO: 9124 - DNA, 170 bp, Artificial sequence
  Vhl.151_Acvr2a.155
  crRNA array
cgatttcttggctttatatatcttgtggaaaggacgaaacaccgtaatttctactaagtgtagattagagcactcacccgagggataatttctactaagtgtagatggacctggctaatcaagtatttttttaagcttggcgtggatccgatatcaactagatcttgaga

SEQ ID NO: 9125 - DNA, 170 bp, Artificial sequence
  Vhl.151_Acvr2a.70
  crRNA array
cgatttcttggctttatatatcttgtggaaaggacgaaacaccgtaatttctactaagtgtagattagagcactcacccgagggataatttctactaagtgtagatcccgaggcgccggagaagccttttttaagcttggcgtggatccgatatcaactagatcttgaga

SEQ ID NO: 9126 - DNA, 170 bp, Artificial sequence
  Vhl.151_Apc.21
  crRNA array
cgatttcttggctttatatatcttgtggaaaggacgaaacaccgtaatttctactaagtgtagattagagcactcacccgagggataatttctactaagtgtagatgtgatccacacgtgtagctgttttttaagcttggcgtggatccgatatcaactagatcttgaga

SEQ ID NO: 9127 - DNA, 170 bp, Artificial sequence
  Vhl.151_Apc.867
  crRNA array
cgatttcttggctttatatatcttgtggaaaggacgaaacaccgtaatttctactaagtgtagattagagcactcacccgagggataatttctactaagtgtagatcagtcccaggcggcggaagcttttttaagcttggcgtggatccgatatcaactagatcttgaga

SEQ ID NO: 9128 - DNA, 170 bp, Artificial sequence
  Vhl.151_Arid1a.2
  crRNA array
cgatttcttggctttatatatcttgtggaaaggacgaaacaccgtaatttctactaagtgtagattagagcactcacccgagggataatttctactaagtgtagatcccgcgcccccgtcctggggttttttaagcttggcgtggatccgatatcaactagatcttgaga

SEQ ID NO: 9129 - DNA, 170 bp, Artificial sequence
  Vhl.151_Arid1a.5
  crRNA array
cgatttcttggctttatatatcttgtggaaaggacgaaacaccgtaatttctactaagtgtagattagagcactcacccgagggataatttctactaagtgtagatcccgcgctcggccgctgccgttttttaagcttggcgtggatccgatatcaactagatcttgaga

SEQ ID NO: 9130 - DNA, 170 bp, Artificial sequence
  Vhl.151_Arid2.166
  crRNA array
cgatttcttggctttatatatcttgtggaaaggacgaaacaccgtaatttctactaagtgtagattagagcactcacccgagggataatttctactaagtgtagataaccgcgatctgggttttttttttttaagcttggcgtggatccgatatcaactagatcttgaga

SEQ ID NO: 9131 - DNA, 170 bp, Artificial sequence
  Vhl.151_Arid2.172
  crRNA array
cgatttcttggctttatatatcttgtggaaaggacgaaacaccgtaatttctactaagtgtagattagagcactcacccgagggataatttctactaagtgtagatctggacgagctgcggcagttttttttaagcttggcgtggatccgatatcaactagatcttgaga

SEQ ID NO: 9132 - DNA, 170 bp, Artificial sequence
  Vhl.151_Atm.120
  crRNA array
cgatttcttggctttatatatcttgtggaaaggacgaaacaccgtaatttctactaagtgtagattagagcactcacccgagggataatttctactaagtgtagatgacaggtagtcggcagctaattttttaagcttggcgtggatccgatatcaactagatcttgaga

SEQ ID NO: 9133 - DNA, 170 bp, Artificial sequence
  Vhl.151_Atm.997
  crRNA array
cgatttcttggctttatatatcttgtggaaaggacgaaacaccgtaatttctactaagtgtagattagagcactcacccgagggataatttctactaagtgtagatgagaaagtctccgaatcgttttttttaagcttggcgtggatccgatatcaactagatcttgaga

SEQ ID NO: 9134 - DNA, 170 bp, Artificial sequence
  Vhl.151_Atrx.249
  crRNA array
cgatttcttggctttatatatcttgtggaaaggacgaaacaccgtaatttctactaagtgtagattagagcactcacccgagggataatttctactaagtgtagattagccagtcgctcatatctcttttttaagcttggcgtggatccgatatcaactagatcttgaga

SEQ ID NO: 9135 - DNA, 170 bp, Artificial sequence
  Vhl.151_Atrx.251
  crRNA array
cgatttcttggctttatatatcttgtggaaaggacgaaacaccgtaatttctactaagtgtagattagagcactcacccgagggataatttctactaagtgtagatgccagtcgctcatatctctgttttttaagcttggcgtggatccgatatcaactagatcttgaga

SEQ ID NO: 9136 - DNA, 170 bp, Artificial sequence
  Vhl.151_Bcor.203
  crRNA array
cgatttcttggctttatatatcttgtggaaaggacgaaacaccgtaatttctactaagtgtagattagagcactcacccgagggataatttctactaagtgtagatccccggagcggagtccaggcttttttaagcttggcgtggatccgatatcaactagatcttgaga

SEQ ID NO: 9137 - DNA, 170 bp, Artificial sequence
  Vhl.151_Bcor.475
  crRNA array
cgatttcttggctttatatatcttgtggaaaggacgaaacaccgtaatttctactaagtgtagattagagcactcacccgagggataatttctactaagtgtagattgcaacccctctgtatgggattttttaagcttggcgtggatccgatatcaactagatcttgaga

SEQ ID NO: 9138 - DNA, 170 bp, Artificial sequence
  Vhl.151_Brca1.112
  crRNA array
cgatttcttggctttatatatcttgtggaaaggacgaaacaccgtaatttctactaagtgtagattagagcactcacccgagggataatttctactaagtgtagatctagacgctctgtggagactttttttaagcttggcgtggatccgatatcaactagatcttgaga

SEQ ID NO: 9139 - DNA, 170 bp, Artificial sequence
  Vhl.151_Brca1.53
  crRNA array
cgatttcttggctttatatatcttgtggaaaggacgaaacaccgtaatttctactaagtgtagattagagcactcacccgagggataatttctactaagtgtagataatgaggaggcgtcgatcatttttttaagcttggcgtggatccgatatcaactagatcttgaga

SEQ ID NO: 9140 - DNA, 170 bp, Artificial sequence
  Vhl.151_Casp8.45
  crRNA array
cgatttcttggctttatatatcttgtggaaaggacgaaacaccgtaatttctactaagtgtagattagagcactcacccgagggataatttctactaagtgtagatctaccgagatcctgtgaatgttttttaagcttggcgtggatccgatatcaactagatcttgaga

SEQ ID NO: 9141 - DNA, 170 bp, Artificial sequence
  Vhl.151_Casp8.54
  crRNA array
cgatttcttggctttatatatcttgtggaaaggacgaaacaccgtaatttctactaagtgtagattagagcactcacccgagggataatttctactaagtgtagatcagtgcagtcgtcgtaagatttttttaagcttggcgtggatccgatatcaactagatcttgaga

SEQ ID NO: 9142 - DNA, 170 bp, Artificial sequence
  Vhl.151_Cbwd1.84
  crRNA array
cgatttcttggctttatatatcttgtggaaaggacgaaacaccgtaatttctactaagtgtagattagagcactcacccgagggataatttctactaagtgtagatcacagcaggtaacatgccgcttttttaagcttggcgtggatccgatatcaactagatcttgaga

SEQ ID NO: 9143 - DNA, 170 bp, Artificial sequence
  Vhl.151_Cbwd1.85
  crRNA array
cgatttcttggctttatatatcttgtggaaaggacgaaacaccgtaatttctactaagtgtagattagagcactcacccgagggataatttctactaagtgtagatacagcaggtaacatgccgccttttttaagcttggcgtggatccgatatcaactagatcttgaga

SEQ ID NO: 9144 - DNA, 170 bp, Artificial sequence
  Vhl.151_Cdh1.387
  crRNA array
cgatttcttggctttatatatcttgtggaaaggacgaaacaccgtaatttctactaagtgtagattagagcactcacccgagggataatttctactaagtgtagatctcggcgtctgccgggtccgttttttaagcttggcgtggatccgatatcaactagatcttgaga

SEQ ID NO: 9145 - DNA, 170 bp, Artificial sequence
  Vhl.151_Cdh1.58
  crRNA array
cgatttcttggctttatatatcttgtggaaaggacgaaacaccgtaatttctactaagtgtagattagagcactcacccgagggataatttctactaagtgtagatctcgtccgcgcccgggactcttttttaagcttggcgtggatccgatatcaactagatcttgaga

SEQ ID NO: 9146 - DNA, 170 bp, Artificial sequence
  Vhl.151_Cdkn2a.647
  crRNA array
cgatttcttggctttatatatcttgtggaaaggacgaaacaccgtaatttctactaagtgtagattagagcactcacccgagggataatttctactaagtgtagatgcaatcacgggagggagcagttttttaagcttggcgtggatccgatatcaactagatcttgaga

SEQ ID NO: 9147 - DNA, 170 bp, Artificial sequence
  Vhl.151_Cdkn2a.648
  crRNA array
cgatttcttggctttatatatcttgtggaaaggacgaaacaccgtaatttctactaagtgtagattagagcactcacccgagggataatttctactaagtgtagatcaatcacgggagggagcagattttttaagcttggcgtggatccgatatcaactagatcttgaga

SEQ ID NO: 9148 - DNA, 170 bp, Artificial sequence
  Vhl.151_Cic.162
  crRNA array
cgatttcttggctttatatatcttgtggaaaggacgaaacaccgtaatttctactaagtgtagattagagcactcacccgagggataatttctactaagtgtagatcgcaggcgcgcccggcggagttttttaagcttggcgtggatccgatatcaactagatcttgaga

SEQ ID NO: 9149 - DNA, 170 bp, Artificial sequence
  Vhl.151_Cic.164
  crRNA array
cgatttcttggctttatatatcttgtggaaaggacgaaacaccgtaatttctactaagtgtagattagagcactcacccgagggataatttctactaagtgtagatcgggccctgggccggcggctttttttaagcttggcgtggatccgatatcaactagatcttgaga

SEQ ID NO: 9150 - DNA, 170 bp, Artificial sequence
  Vhl.151_Ctcf.229
  crRNA array
cgatttcttggctttatatatcttgtggaaaggacgaaacaccgtaatttctactaagtgtagattagagcactcacccgagggataatttctactaagtgtagatggctggtggctgatagtctgttttttaagcttggcgtggatccgatatcaactagatcttgaga

SEQ ID NO: 9151 - DNA, 170 bp, Artificial sequence
  Vhl.151_Ctcf.809
  crRNA array
cgatttcttggctttatatatcttgtggaaaggacgaaacaccgtaatttctactaagtgtagattagagcactcacccgagggataatttctactaagtgtagataagcgctatcatgatcccaattttttaagcttggcgtggatccgatatcaactagatcttgaga

SEQ ID NO: 9152 - DNA, 170 bp, Artificial sequence
  Vhl.151_Elf3.826
  crRNA array
cgatttcttggctttatatatcttgtggaaaggacgaaacaccgtaatttctactaagtgtagattagagcactcacccgagggataatttctactaagtgtagattccgagacatcctaatccacttttttaagcttggcgtggatccgatatcaactagatcttgaga

SEQ ID NO: 9153 - DNA, 170 bp, Artificial sequence
  Vhl.151_Elf3.983
  crRNA array
cgatttcttggctttatatatcttgtggaaaggacgaaacaccgtaatttctactaagtgtagattagagcactcacccgagggataatttctactaagtgtagattaggccccctaactggaccattttttaagcttggcgtggatccgatatcaactagatcttgaga

SEQ ID NO: 9154 - DNA, 170 bp, Artificial sequence
  Vhl.151_Ep300.310
  crRNA array
cgatttcttggctttatatatcttgtggaaaggacgaaacaccgtaatttctactaagtgtagattagagcactcacccgagggataatttctactaagtgtagatatggtacgacagtgaggaagttttttaagcttggcgtggatccgatatcaactagatcttgaga

SEQ ID NO: 9155 - DNA, 170 bp, Artificial sequence
  Vhl.151_Ep300.587
  crRNA array
cgatttcttggctttatatatcttgtggaaaggacgaaacaccgtaatttctactaagtgtagattagagcactcacccgagggataatttctactaagtgtagatcgccccggggcccccaaccattttttaagcttggcgtggatccgatatcaactagatcttgaga

SEQ ID NO: 9156 - DNA, 170 bp, Artificial sequence
  Vhl.151_Epha2.126
  crRNA array
cgatttcttggctttatatatcttgtggaaaggacgaaacaccgtaatttctactaagtgtagattagagcactcacccgagggataatttctactaagtgtagatcctgtgccgccgcggccgccttttttaagcttggcgtggatccgatatcaactagatcttgaga

SEQ ID NO: 9157 - DNA, 170 bp, Artificial sequence
  Vhl.151_Epha2.5
  crRNA array
cgatttcttggctttatatatcttgtggaaaggacgaaacaccgtaatttctactaagtgtagattagagcactcacccgagggataatttctactaagtgtagatcatgagctggcgccacccggttttttaagcttggcgtggatccgatatcaactagatcttgaga

SEQ ID NO: 9158 - DNA, 170 bp, Artificial sequence
  Vhl.151_Fat1.105
  crRNA array
cgatttcttggctttatatatcttgtggaaaggacgaaacaccgtaatttctactaagtgtagattagagcactcacccgagggataatttctactaagtgtagataactcgaggtgacaacaagtttttttaagcttggcgtggatccgatatcaactagatcttgaga

SEQ ID NO: 9159 - DNA, 170 bp, Artificial sequence
  Vhl.151_Fat1.122
  crRNA array
cgatttcttggctttatatatcttgtggaaaggacgaaacaccgtaatttctactaagtgtagattagagcactcacccgagggataatttctactaagtgtagatccatcgacatggaaacgggattttttaagcttggcgtggatccgatatcaactagatcttgaga

SEQ ID NO: 9160 - DNA, 170 bp, Artificial sequence
  Vhl.151_Fbxw7.21
  crRNA array
cgatttcttggctttatatatcttgtggaaaggacgaaacaccgtaatttctactaagtgtagattagagcactcacccgagggataatttctactaagtgtagattaatgtgccgtagaaacccattttttaagcttggcgtggatccgatatcaactagatcttgaga

SEQ ID NO: 9161 - DNA, 170 bp, Artificial sequence
  Vhl.151_Fbxw7.23
  crRNA array
cgatttcttggctttatatatcttgtggaaaggacgaaacaccgtaatttctactaagtgtagattagagcactcacccgagggataatttctactaagtgtagatatgtgccgtagaaacccatattttttaagcttggcgtggatccgatatcaactagatcttgaga

SEQ ID NO: 9162 - DNA, 170 bp, Artificial sequence
  Vhl.151_Gata3.34
  crRNA array
cgatttcttggctttatatatcttgtggaaaggacgaaacaccgtaatttctactaagtgtagattagagcactcacccgagggataatttctactaagtgtagatctaaactatcccgcaaagatttttttaagcttggcgtggatccgatatcaactagatcttgaga

SEQ ID NO: 9163 - DNA, 170 bp, Artificial sequence
  Vhl.151_Gata3.47
  crRNA array
cgatttcttggctttatatatcttgtggaaaggacgaaacaccgtaatttctactaagtgtagattagagcactcacccgagggataatttctactaagtgtagatcgtagtaggacgggacgtggttttttaagcttggcgtggatccgatatcaactagatcttgaga

SEQ ID NO: 9164 - DNA, 170 bp, Artificial sequence
  Vhl.151_H2-Q2.1
  crRNA array
cgatttcttggctttatatatcttgtggaaaggacgaaacaccgtaatttctactaagtgtagattagagcactcacccgagggataatttctactaagtgtagatagggcggccaccaacagcagttttttaagcttggcgtggatccgatatcaactagatcttgaga

SEQ ID NO: 9165 - DNA, 170 bp, Artificial sequence
  Vhl.151_H2-Q2.2
  crRNA array
cgatttcttggctttatatatcttgtggaaaggacgaaacaccgtaatttctactaagtgtagattagagcactcacccgagggataatttctactaagtgtagattaacctgcgcccgctgctgattttttaagcttggcgtggatccgatatcaactagatcttgaga

SEQ ID NO: 9166 - DNA, 170 bp, Artificial sequence
  Vhl.151_Kdm5c.1878
  crRNA array
cgatttcttggctttatatatcttgtggaaaggacgaaacaccgtaatttctactaagtgtagattagagcactcacccgagggataatttctactaagtgtagatagagcacggcacccgcccccttttttaagcttggcgtggatccgatatcaactagatcttgaga

SEQ ID NO: 9167 - DNA, 170 bp, Artificial sequence
  Vhl.151_Kdm5c.1879
  crRNA array
cgatttcttggctttatatatcttgtggaaaggacgaaacaccgtaatttctactaagtgtagattagagcactcacccgagggataatttctactaagtgtagatgagcacggcacccgccccccttttttaagcttggcgtggatccgatatcaactagatcttgaga

SEQ ID NO: 9168 - DNA, 170 bp, Artificial sequence
  Vhl.151_Kdm6a.56
  crRNA array
cgatttcttggctttatatatcttgtggaaaggacgaaacaccgtaatttctactaagtgtagattagagcactcacccgagggataatttctactaagtgtagattcgctgccgcctctcgcggcttttttaagcttggcgtggatccgatatcaactagatcttgaga

SEQ ID NO: 9169 - DNA, 170 bp, Artificial sequence
  Vhl.151_Kdm6a.57
  crRNA array
cgatttcttggctttatatatcttgtggaaaggacgaaacaccgtaatttctactaagtgtagattagagcactcacccgagggataatttctactaagtgtagatcgctgccgcctctcgcggcattttttaagcttggcgtggatccgatatcaactagatcttgaga

SEQ ID NO: 9170 - DNA, 170 bp, Artificial sequence
  Vhl.151_Kmt2b.265
  crRNA array
cgatttcttggctttatatatcttgtggaaaggacgaaacaccgtaatttctactaagtgtagattagagcactcacccgagggataatttctactaagtgtagatccccaagtgaagcccacctgttttttaagcttggcgtggatccgatatcaactagatcttgaga

SEQ ID NO: 9171 - DNA, 170 bp, Artificial sequence
  Vhl.151_Kmt2b.298
  crRNA array
cgatttcttggctttatatatcttgtggaaaggacgaaacaccgtaatttctactaagtgtagattagagcactcacccgagggataatttctactaagtgtagattccggcagggaccggctggcttttttaagcttggcgtggatccgatatcaactagatcttgaga

SEQ ID NO: 9172 - DNA, 170 bp, Artificial sequence
  Vhl.151_Kmt2c.1962
  crRNA array
cgatttcttggctttatatatcttgtggaaaggacgaaacaccgtaatttctactaagtgtagattagagcactcacccgagggataatttctactaagtgtagatgtgacgatctgtgccacaagttttttaagcttggcgtggatccgatatcaactagatcttgaga

SEQ ID NO: 9173 - DNA, 170 bp, Artificial sequence
  Vhl.151_Kmt2c.2236
  crRNA array
cgatttcttggctttatatatcttgtggaaaggacgaaacaccgtaatttctactaagtgtagattagagcactcacccgagggataatttctactaagtgtagatactcgacctccacctccctattttttaagcttggcgtggatccgatatcaactagatcttgaga

SEQ ID NO: 9174 - DNA, 170 bp, Artificial sequence
  Vhl.151_Kmt2d.316
  crRNA array
cgatttcttggctttatatatcttgtggaaaggacgaaacaccgtaatttctactaagtgtagattagagcactcacccgagggataatttctactaagtgtagatactccaggccacccaggtggttttttaagcttggcgtggatccgatatcaactagatcttgaga

SEQ ID NO: 9175 - DNA, 170 bp, Artificial sequence
  Vhl.151_Kmt2d.416
  crRNA array
cgatttcttggctttatatatcttgtggaaaggacgaaacaccgtaatttctactaagtgtagattagagcactcacccgagggataatttctactaagtgtagattaaacccccgggggaagggtttttttaagcttggcgtggatccgatatcaactagatcttgaga

SEQ ID NO: 9176 - DNA, 170 bp, Artificial sequence
  Vhl.151_Map2k4.119
  crRNA array
cgatttcttggctttatatatcttgtggaaaggacgaaacaccgtaatttctactaagtgtagattagagcactcacccgagggataatttctactaagtgtagattgctgtgtgggcggccacatttttttaagcttggcgtggatccgatatcaactagatcttgaga

SEQ ID NO: 9177 - DNA, 170 bp, Artificial sequence
  Vhl.151_Map2k4.1261
  crRNA array
cgatttcttggctttatatatcttgtggaaaggacgaaacaccgtaatttctactaagtgtagattagagcactcacccgagggataatttctactaagtgtagatgatgtagtaatgcggagtagttttttaagcttggcgtggatccgatatcaactagatcttgaga

SEQ ID NO: 9178 - DNA, 170 bp, Artificial sequence
  Vhl.151_Map3k1.235
  crRNA array
cgatttcttggctttatatatcttgtggaaaggacgaaacaccgtaatttctactaagtgtagattagagcactcacccgagggataatttctactaagtgtagataaaacgctactgatcgatcgttttttaagcttggcgtggatccgatatcaactagatcttgaga

SEQ ID NO: 9179 - DNA, 170 bp, Artificial sequence
  Vhl.151_Map3k1.3838
  crRNA array
cgatttcttggctttatatatcttgtggaaaggacgaaacaccgtaatttctactaagtgtagattagagcactcacccgagggataatttctactaagtgtagatccaacaacagggccccactattttttaagcttggcgtggatccgatatcaactagatcttgaga

SEQ ID NO: 9180 - DNA, 170 bp, Artificial sequence
  Vhl.151_Mga.1655
  crRNA array
cgatttcttggctttatatatcttgtggaaaggacgaaacaccgtaatttctactaagtgtagattagagcactcacccgagggataatttctactaagtgtagatcgagaagtggagagcatattttttttaagcttggcgtggatccgatatcaactagatcttgaga

SEQ ID NO: 9181 - DNA, 170 bp, Artificial sequence
  Vhl.151_Mga.93
  crRNA array
cgatttcttggctttatatatcttgtggaaaggacgaaacaccgtaatttctactaagtgtagattagagcactcacccgagggataatttctactaagtgtagatgagaaggctccccataatgtttttttaagcttggcgtggatccgatatcaactagatcttgaga

SEQ ID NO: 9182 - DNA, 170 bp, Artificial sequence
  Vhl.151_Nf1.746
  crRNA array
cgatttcttggctttatatatcttgtggaaaggacgaaacaccgtaatttctactaagtgtagattagagcactcacccgagggataatttctactaagtgtagattaagcataatgatgatgccattttttaagcttggcgtggatccgatatcaactagatcttgaga

SEQ ID NO: 9183 - DNA, 170 bp, Artificial sequence
  Vhl.151_Nf1.97
  crRNA array
cgatttcttggctttatatatcttgtggaaaggacgaaacaccgtaatttctactaagtgtagattagagcactcacccgagggataatttctactaagtgtagatagcccgctacatgctgatgcttttttaagcttggcgtggatccgatatcaactagatcttgaga

SEQ ID NO: 9184 - DNA, 170 bp, Artificial sequence
  Vhl.151_Nf2.356
  crRNA array
cgatttcttggctttatatatcttgtggaaaggacgaaacaccgtaatttctactaagtgtagattagagcactcacccgagggataatttctactaagtgtagatcggagtcatctgatagagatttttttaagcttggcgtggatccgatatcaactagatcttgaga

SEQ ID NO: 9185 - DNA, 170 bp, Artificial sequence
  Vhl.151_Nf2.768
  crRNA array
cgatttcttggctttatatatcttgtggaaaggacgaaacaccgtaatttctactaagtgtagattagagcactcacccgagggataatttctactaagtgtagatccgaagccccagtgtccggcttttttaagcttggcgtggatccgatatcaactagatcttgaga

SEQ ID NO: 9186 - DNA, 170 bp, Artificial sequence
  Vhl.151_Notch1.1849
  crRNA array
cgatttcttggctttatatatcttgtggaaaggacgaaacaccgtaatttctactaagtgtagattagagcactcacccgagggataatttctactaagtgtagatctggcgggtgggcggcgctgttttttaagcttggcgtggatccgatatcaactagatcttgaga

SEQ ID NO: 9187 - DNA, 170 bp, Artificial sequence
  Vhl.151_Notch1.649
  crRNA array
cgatttcttggctttatatatcttgtggaaaggacgaaacaccgtaatttctactaagtgtagattagagcactcacccgagggataatttctactaagtgtagattgggccaacgatgccaggacttttttaagcttggcgtggatccgatatcaactagatcttgaga

SEQ ID NO: 9188 - DNA, 170 bp, Artificial sequence
  Vhl.151_Nsd1.70
  crRNA array
cgatttcttggctttatatatcttgtggaaaggacgaaacaccgtaatttctactaagtgtagattagagcactcacccgagggataatttctactaagtgtagatactggtgtggacgatgcagattttttaagcttggcgtggatccgatatcaactagatcttgaga

SEQ ID NO: 9189 - DNA, 170 bp, Artificial sequence
  Vhl.151_Nsd1.90
  crRNA array
cgatttcttggctttatatatcttgtggaaaggacgaaacaccgtaatttctactaagtgtagattagagcactcacccgagggataatttctactaagtgtagataggagctaacggcaagaatgttttttaagcttggcgtggatccgatatcaactagatcttgaga

SEQ ID NO: 9190 - DNA, 170 bp, Artificial sequence
  Vhl.151_Pbrm1.1236
  crRNA array
cgatttcttggctttatatatcttgtggaaaggacgaaacaccgtaatttctactaagtgtagattagagcactcacccgagggataatttctactaagtgtagatgccgataaaaccaacagccgttttttaagcttggcgtggatccgatatcaactagatcttgaga

SEQ ID NO: 9191 - DNA, 170 bp, Artificial sequence
  Vhl.151_Pbrm1.969
  crRNA array
cgatttcttggctttatatatcttgtggaaaggacgaaacaccgtaatttctactaagtgtagattagagcactcacccgagggataatttctactaagtgtagatgagccctaatgaacagctcattttttaagcttggcgtggatccgatatcaactagatcttgaga

SEQ ID NO: 9192 - DNA, 170 bp, Artificial sequence
  Vhl.151_Pik3r1.76
  crRNA array
cgatttcttggctttatatatcttgtggaaaggacgaaacaccgtaatttctactaagtgtagattagagcactcacccgagggataatttctactaagtgtagataaaacctatacggcccgcacttttttaagcttggcgtggatccgatatcaactagatcttgaga

SEQ ID NO: 9193 - DNA, 170 bp, Artificial sequence
  Vhl.151_Pik3r1.77
  crRNA array
cgatttcttggctttatatatcttgtggaaaggacgaaacaccgtaatttctactaagtgtagattagagcactcacccgagggataatttctactaagtgtagataaacctatacggcccgcactttttttaagcttggcgtggatccgatatcaactagatcttgaga

SEQ ID NO: 9194 - DNA, 170 bp, Artificial sequence
  Vhl.151_Pten.240
  crRNA array
cgatttcttggctttatatatcttgtggaaaggacgaaacaccgtaatttctactaagtgtagattagagcactcacccgagggataatttctactaagtgtagattgcatacgctatagctgcttttttttaagcttggcgtggatccgatatcaactagatcttgaga

SEQ ID NO: 9195 - DNA, 170 bp, Artificial sequence
  Vhl.151_Pten.265
  crRNA array
cgatttcttggctttatatatcttgtggaaaggacgaaacaccgtaatttctactaagtgtagattagagcactcacccgagggataatttctactaagtgtagataagcgtggtgcgtgacgcacttttttaagcttggcgtggatccgatatcaactagatcttgaga

SEQ ID NO: 9196 - DNA, 170 bp, Artificial sequence
  Vhl.151_Rasa1.1478
  crRNA array
cgatttcttggctttatatatcttgtggaaaggacgaaacaccgtaatttctactaagtgtagattagagcactcacccgagggataatttctactaagtgtagatcgataatggtctatgatgtcttttttaagcttggcgtggatccgatatcaactagatcttgaga

SEQ ID NO: 9197 - DNA, 170 bp, Artificial sequence
  Vhl.151_Rasa1.223
  crRNA array
cgatttcttggctttatatatcttgtggaaaggacgaaacaccgtaatttctactaagtgtagattagagcactcacccgagggataatttctactaagtgtagattccatggagtatcgtgctcgttttttaagcttggcgtggatccgatatcaactagatcttgaga

SEQ ID NO: 9198 - DNA, 170 bp, Artificial sequence
  Vhl.151_Rb1.211
  crRNA array
cgatttcttggctttatatatcttgtggaaaggacgaaacaccgtaatttctactaagtgtagattagagcactcacccgagggataatttctactaagtgtagattctgacatgatcgggtacctttttttaagcttggcgtggatccgatatcaactagatcttgaga

SEQ ID NO: 9199 - DNA, 170 bp, Artificial sequence
  Vhl.151_Rb1.394
  crRNA array
cgatttcttggctttatatatcttgtggaaaggacgaaacaccgtaatttctactaagtgtagattagagcactcacccgagggataatttctactaagtgtagatagaaatctcgaagcaggatcttttttaagcttggcgtggatccgatatcaactagatcttgaga

SEQ ID NO: 9200 - DNA, 170 bp, Artificial sequence
  Vhl.151_Rbm10.5
  crRNA array
cgatttcttggctttatatatcttgtggaaaggacgaaacaccgtaatttctactaagtgtagattagagcactcacccgagggataatttctactaagtgtagatacgaaacctgaacccacacattttttaagcttggcgtggatccgatatcaactagatcttgaga

SEQ ID NO: 9201 - DNA, 170 bp, Artificial sequence
  Vhl.151_Rbm10.6
  crRNA array
cgatttcttggctttatatatcttgtggaaaggacgaaacaccgtaatttctactaagtgtagattagagcactcacccgagggataatttctactaagtgtagatcgaaacctgaacccacacagttttttaagcttggcgtggatccgatatcaactagatcttgaga

SEQ ID NO: 9202 - DNA, 170 bp, Artificial sequence
  Vhl.151_Rnf43.1920
  crRNA array
cgatttcttggctttatatatcttgtggaaaggacgaaacaccgtaatttctactaagtgtagattagagcactcacccgagggataatttctactaagtgtagatatccccgtgccgtggactccttttttaagcttggcgtggatccgatatcaactagatcttgaga

SEQ ID NO: 9203 - DNA, 170 bp, Artificial sequence
  Vhl.151_Rnf43.39
  crRNA array
cgatttcttggctttatatatcttgtggaaaggacgaaacaccgtaatttctactaagtgtagattagagcactcacccgagggataatttctactaagtgtagatcaaggggatcactctgataattttttaagcttggcgtggatccgatatcaactagatcttgaga

SEQ ID NO: 9204 - DNA, 170 bp, Artificial sequence
  Vhl.151_Runx1.204
  crRNA array
cgatttcttggctttatatatcttgtggaaaggacgaaacaccgtaatttctactaagtgtagattagagcactcacccgagggataatttctactaagtgtagattaaataagtccagccgttttttttttaagcttggcgtggatccgatatcaactagatcttgaga

SEQ ID NO: 9205 - DNA, 170 bp, Artificial sequence
  Vhl.151_Runx1.81
  crRNA array
cgatttcttggctttatatatcttgtggaaaggacgaaacaccgtaatttctactaagtgtagattagagcactcacccgagggataatttctactaagtgtagataggacgcgtatgggaattttttttttaagcttggcgtggatccgatatcaactagatcttgaga

SEQ ID NO: 9206 - DNA, 170 bp, Artificial sequence
  Vhl.151_Setd2.143
  crRNA array
cgatttcttggctttatatatcttgtggaaaggacgaaacaccgtaatttctactaagtgtagattagagcactcacccgagggataatttctactaagtgtagatgcacaaccacaacagactggttttttaagcttggcgtggatccgatatcaactagatcttgaga

SEQ ID NO: 9207 - DNA, 170 bp, Artificial sequence
  Vhl.151_Setd2.508
  crRNA array
cgatttcttggctttatatatcttgtggaaaggacgaaacaccgtaatttctactaagtgtagattagagcactcacccgagggataatttctactaagtgtagattacgatcccgagcacccgacttttttaagcttggcgtggatccgatatcaactagatcttgaga

SEQ ID NO: 9208 - DNA, 170 bp, Artificial sequence
  Vhl.151_Smad4.3038
  crRNA array
cgatttcttggctttatatatcttgtggaaaggacgaaacaccgtaatttctactaagtgtagattagagcactcacccgagggataatttctactaagtgtagatatctgcggcagtgtcaccggttttttaagcttggcgtggatccgatatcaactagatcttgaga

SEQ ID NO: 9209 - DNA, 170 bp, Artificial sequence
  Vhl.151_Smad4.39
  crRNA array
cgatttcttggctttatatatcttgtggaaaggacgaaacaccgtaatttctactaagtgtagattagagcactcacccgagggataatttctactaagtgtagatagtcaaacgcatactgacaattttttaagcttggcgtggatccgatatcaactagatcttgaga

SEQ ID NO: 9210 - DNA, 170 bp, Artificial sequence
  Vhl.151_Stag2.1409
  crRNA array
cgatttcttggctttatatatcttgtggaaaggacgaaacaccgtaatttctactaagtgtagattagagcactcacccgagggataatttctactaagtgtagatgctaataactgcggaagggcttttttaagcttggcgtggatccgatatcaactagatcttgaga

SEQ ID NO: 9211 - DNA, 170 bp, Artificial sequence
  Vhl.151_Stag2.4401
  crRNA array
cgatttcttggctttatatatcttgtggaaaggacgaaacaccgtaatttctactaagtgtagattagagcactcacccgagggataatttctactaagtgtagattaatcgtccagtggtgtatattttttaagcttggcgtggatccgatatcaactagatcttgaga

SEQ ID NO: 9212 - DNA, 170 bp, Artificial sequence
  Vhl.151_Tbl1xr1.1
  crRNA array
cgatttcttggctttatatatcttgtggaaaggacgaaacaccgtaatttctactaagtgtagattagagcactcacccgagggataatttctactaagtgtagatggatgcgcatactggtgaagttttttaagcttggcgtggatccgatatcaactagatcttgaga

SEQ ID NO: 9213 - DNA, 170 bp, Artificial sequence
  Vhl.151_Tbl1xr1.83
  crRNA array
cgatttcttggctttatatatcttgtggaaaggacgaaacaccgtaatttctactaagtgtagattagagcactcacccgagggataatttctactaagtgtagatatggtcgacccatcgagtctttttttaagcttggcgtggatccgatatcaactagatcttgaga

SEQ ID NO: 9214 - DNA, 170 bp, Artificial sequence
  Vhl.151_Tgfbr2.290
  crRNA array
cgatttcttggctttatatatcttgtggaaaggacgaaacaccgtaatttctactaagtgtagattagagcactcacccgagggataatttctactaagtgtagatcctctcggcgcccgggtaaattttttaagcttggcgtggatccgatatcaactagatcttgaga

SEQ ID NO: 9215 - DNA, 170 bp, Artificial sequence
  Vhl.151_Tgfbr2.292
  crRNA array
cgatttcttggctttatatatcttgtggaaaggacgaaacaccgtaatttctactaagtgtagattagagcactcacccgagggataatttctactaagtgtagatcccgggcgccgagagggaaattttttaagcttggcgtggatccgatatcaactagatcttgaga

SEQ ID NO: 9216 - DNA, 170 bp, Artificial sequence
  Vhl.151_Trp53.4
  crRNA array
cgatttcttggctttatatatcttgtggaaaggacgaaacaccgtaatttctactaagtgtagattagagcactcacccgagggataatttctactaagtgtagatccctgaactgcccccagggattttttaagcttggcgtggatccgatatcaactagatcttgaga

SEQ ID NO: 9217 - DNA, 170 bp, Artificial sequence
  Vhl.151_Trp53.528
  crRNA array
cgatttcttggctttatatatcttgtggaaaggacgaaacaccgtaatttctactaagtgtagattagagcactcacccgagggataatttctactaagtgtagatgctgggccagcagagacctgttttttaagcttggcgtggatccgatatcaactagatcttgaga

SEQ ID NO: 9218 - DNA, 170 bp, Artificial sequence
  Vhl.151_Zc3h13.1387
  crRNA array
cgatttcttggctttatatatcttgtggaaaggacgaaacaccgtaatttctactaagtgtagattagagcactcacccgagggataatttctactaagtgtagatgtgacgccggtcatgtgactttttttaagcttggcgtggatccgatatcaactagatcttgaga

SEQ ID NO: 9219 - DNA, 170 bp, Artificial sequence
  Vhl.151_Zc3h13.1777
  crRNA array
cgatttcttggctttatatatcttgtggaaaggacgaaacaccgtaatttctactaagtgtagattagagcactcacccgagggataatttctactaagtgtagatgatgctgccagtgtagcggcttttttaagcttggcgtggatccgatatcaactagatcttgaga

SEQ ID NO: 9220 - DNA, 170 bp, Artificial sequence
  Zc3h13.1387_Acvr2a.155
  crRNA array
cgatttcttggctttatatatcttgtggaaaggacgaaacaccgtaatttctactaagtgtagatgtgacgccggtcatgtgacttaatttctactaagtgtagatggacctggctaatcaagtatttttttaagcttggcgtggatccgatatcaactagatcttgaga

SEQ ID NO: 9221 - DNA, 170 bp, Artificial sequence
  Zc3h13.1387_Acvr2a.70
  crRNA array
cgatttcttggctttatatatcttgtggaaaggacgaaacaccgtaatttctactaagtgtagatgtgacgccggtcatgtgacttaatttctactaagtgtagatcccgaggcgccggagaagccttttttaagcttggcgtggatccgatatcaactagatcttgaga

SEQ ID NO: 9222 - DNA, 170 bp, Artificial sequence
  Zc3h13.1387_Apc.21
  crRNA array
cgatttcttggctttatatatcttgtggaaaggacgaaacaccgtaatttctactaagtgtagatgtgacgccggtcatgtgacttaatttctactaagtgtagatgtgatccacacgtgtagctgttttttaagcttggcgtggatccgatatcaactagatcttgaga

SEQ ID NO: 9223 - DNA, 170 bp, Artificial sequence
  Zc3h13.1387_Apc.867
  crRNA array
cgatttcttggctttatatatcttgtggaaaggacgaaacaccgtaatttctactaagtgtagatgtgacgccggtcatgtgacttaatttctactaagtgtagatcagtcccaggcggcggaagcttttttaagcttggcgtggatccgatatcaactagatcttgaga

SEQ ID NO: 9224 - DNA, 170 bp, Artificial sequence
  Zc3h13.1387_Arid1a.2
  crRNA array
cgatttcttggctttatatatcttgtggaaaggacgaaacaccgtaatttctactaagtgtagatgtgacgccggtcatgtgacttaatttctactaagtgtagatcccgcgcccccgtcctggggttttttaagcttggcgtggatccgatatcaactagatcttgaga

SEQ ID NO: 9225 - DNA, 170 bp, Artificial sequence
  Zc3h13.1387_Arid1a.5
  crRNA array
cgatttcttggctttatatatcttgtggaaaggacgaaacaccgtaatttctactaagtgtagatgtgacgccggtcatgtgacttaatttctactaagtgtagatcccgcgctcggccgctgccgttttttaagcttggcgtggatccgatatcaactagatcttgaga

SEQ ID NO: 9226 - DNA, 170 bp, Artificial sequence
  Zc3h13.1387_Arid2.166
  crRNA array
cgatttcttggctttatatatcttgtggaaaggacgaaacaccgtaatttctactaagtgtagatgtgacgccggtcatgtgacttaatttctactaagtgtagataaccgcgatctgggttttttttttttaagcttggcgtggatccgatatcaactagatcttgaga

SEQ ID NO: 9227 - DNA, 170 bp, Artificial sequence
  Zc3h13.1387_Arid2.172
  crRNA array
cgatttcttggctttatatatcttgtggaaaggacgaaacaccgtaatttctactaagtgtagatgtgacgccggtcatgtgacttaatttctactaagtgtagatctggacgagctgcggcagttttttttaagcttggcgtggatccgatatcaactagatcttgaga

SEQ ID NO: 9228 - DNA, 170 bp, Artificial sequence
  Zc3h13.1387_Atm.120
  crRNA array
cgatttcttggctttatatatcttgtggaaaggacgaaacaccgtaatttctactaagtgtagatgtgacgccggtcatgtgacttaatttctactaagtgtagatgacaggtagtcggcagctaattttttaagcttggcgtggatccgatatcaactagatcttgaga

SEQ ID NO: 9229 - DNA, 170 bp, Artificial sequence
  Zc3h13.1387_Atm.997
  crRNA array
cgatttcttggctttatatatcttgtggaaaggacgaaacaccgtaatttctactaagtgtagatgtgacgccggtcatgtgacttaatttctactaagtgtagatgagaaagtctccgaatcgttttttttaagcttggcgtggatccgatatcaactagatcttgaga

SEQ ID NO: 9230 - DNA, 170 bp, Artificial sequence
  Zc3h13.1387_Atrx.249
  crRNA array
cgatttcttggctttatatatcttgtggaaaggacgaaacaccgtaatttctactaagtgtagatgtgacgccggtcatgtgacttaatttctactaagtgtagattagccagtcgctcatatctcttttttaagcttggcgtggatccgatatcaactagatcttgaga

SEQ ID NO: 9231 - DNA, 170 bp, Artificial sequence
  Zc3h13.1387_Atrx.251
  crRNA array
cgatttcttggctttatatatcttgtggaaaggacgaaacaccgtaatttctactaagtgtagatgtgacgccggtcatgtgacttaatttctactaagtgtagatgccagtcgctcatatctctgttttttaagcttggcgtggatccgatatcaactagatcttgaga

SEQ ID NO: 9232 - DNA, 170 bp, Artificial sequence
  Zc3h13.1387_Bcor.203
  crRNA array
cgatttcttggctttatatatcttgtggaaaggacgaaacaccgtaatttctactaagtgtagatgtgacgccggtcatgtgacttaatttctactaagtgtagatccccggagcggagtccaggcttttttaagcttggcgtggatccgatatcaactagatcttgaga

SEQ ID NO: 9233 - DNA, 170 bp, Artificial sequence
  Zc3h13.1387_Bcor.475
  crRNA array
cgatttcttggctttatatatcttgtggaaaggacgaaacaccgtaatttctactaagtgtagatgtgacgccggtcatgtgacttaatttctactaagtgtagattgcaacccctctgtatgggattttttaagcttggcgtggatccgatatcaactagatcttgaga

SEQ ID NO: 9234 - DNA, 170 bp, Artificial sequence
  Zc3h13.1387_Brca1.112
  crRNA array
cgatttcttggctttatatatcttgtggaaaggacgaaacaccgtaatttctactaagtgtagatgtgacgccggtcatgtgacttaatttctactaagtgtagatctagacgctctgtggagactttttttaagcttggcgtggatccgatatcaactagatcttgaga

SEQ ID NO: 9235 - DNA, 170 bp, Artificial sequence
  Zc3h13.1387_Brca1.53
  crRNA array
cgatttcttggctttatatatcttgtggaaaggacgaaacaccgtaatttctactaagtgtagatgtgacgccggtcatgtgacttaatttctactaagtgtagataatgaggaggcgtcgatcatttttttaagcttggcgtggatccgatatcaactagatcttgaga

SEQ ID NO: 9236 - DNA, 170 bp, Artificial sequence
  Zc3h13.1387_Casp8.45
  crRNA array
cgatttcttggctttatatatcttgtggaaaggacgaaacaccgtaatttctactaagtgtagatgtgacgccggtcatgtgacttaatttctactaagtgtagatctaccgagatcctgtgaatgttttttaagcttggcgtggatccgatatcaactagatcttgaga

SEQ ID NO: 9237 - DNA, 170 bp, Artificial sequence
  Zc3h13.1387_Casp8.54
  crRNA array
cgatttcttggctttatatatcttgtggaaaggacgaaacaccgtaatttctactaagtgtagatgtgacgccggtcatgtgacttaatttctactaagtgtagatcagtgcagtcgtcgtaagatttttttaagcttggcgtggatccgatatcaactagatcttgaga

SEQ ID NO: 9238 - DNA, 170 bp, Artificial sequence
  Zc3h13.1387_Cbwd1.84
  crRNA array
cgatttcttggctttatatatcttgtggaaaggacgaaacaccgtaatttctactaagtgtagatgtgacgccggtcatgtgacttaatttctactaagtgtagatcacagcaggtaacatgccgcttttttaagcttggcgtggatccgatatcaactagatcttgaga

SEQ ID NO: 9239 - DNA, 170 bp, Artificial sequence
  Zc3h13.1387_Cbwd1.85
  crRNA array
cgatttcttggctttatatatcttgtggaaaggacgaaacaccgtaatttctactaagtgtagatgtgacgccggtcatgtgacttaatttctactaagtgtagatacagcaggtaacatgccgccttttttaagcttggcgtggatccgatatcaactagatcttgaga

SEQ ID NO: 9240 - DNA, 170 bp, Artificial sequence
  Zc3h13.1387_Cdh1.387
  crRNA array
cgatttcttggctttatatatcttgtggaaaggacgaaacaccgtaatttctactaagtgtagatgtgacgccggtcatgtgacttaatttctactaagtgtagatctcggcgtctgccgggtccgttttttaagcttggcgtggatccgatatcaactagatcttgaga

SEQ ID NO: 9241 - DNA, 170 bp, Artificial sequence
  Zc3h13.1387_Cdh1.58
  crRNA array
cgatttcttggctttatatatcttgtggaaaggacgaaacaccgtaatttctactaagtgtagatgtgacgccggtcatgtgacttaatttctactaagtgtagatctcgtccgcgcccgggactcttttttaagcttggcgtggatccgatatcaactagatcttgaga

SEQ ID NO: 9242 - DNA, 170 bp, Artificial sequence
  Zc3h13.1387_Cdkn2a.647
  crRNA array
cgatttcttggctttatatatcttgtggaaaggacgaaacaccgtaatttctactaagtgtagatgtgacgccggtcatgtgacttaatttctactaagtgtagatgcaatcacgggagggagcagttttttaagcttggcgtggatccgatatcaactagatcttgaga

SEQ ID NO: 9243 - DNA, 170 bp, Artificial sequence
  Zc3h13.1387_Cdkn2a.648
  crRNA array
cgatttcttggctttatatatcttgtggaaaggacgaaacaccgtaatttctactaagtgtagatgtgacgccggtcatgtgacttaatttctactaagtgtagatcaatcacgggagggagcagattttttaagcttggcgtggatccgatatcaactagatcttgaga

SEQ ID NO: 9244 - DNA, 170 bp, Artificial sequence
  Zc3h13.1387_Cic.162
  crRNA array
cgatttcttggctttatatatcttgtggaaaggacgaaacaccgtaatttctactaagtgtagatgtgacgccggtcatgtgacttaatttctactaagtgtagatcgcaggcgcgcccggcggagttttttaagcttggcgtggatccgatatcaactagatcttgaga

SEQ ID NO: 9245 - DNA, 170 bp, Artificial sequence
  Zc3h13.1387_Cic.164
  crRNA array
cgatttcttggctttatatatcttgtggaaaggacgaaacaccgtaatttctactaagtgtagatgtgacgccggtcatgtgacttaatttctactaagtgtagatcgggccctgggccggcggctttttttaagcttggcgtggatccgatatcaactagatcttgaga

SEQ ID NO: 9246 - DNA, 170 bp, Artificial sequence
  Zc3h13.1387_Ctcf.229
  crRNA array
cgatttcttggctttatatatcttgtggaaaggacgaaacaccgtaatttctactaagtgtagatgtgacgccggtcatgtgacttaatttctactaagtgtagatggctggtggctgatagtctgttttttaagcttggcgtggatccgatatcaactagatcttgaga

SEQ ID NO: 9247 - DNA, 170 bp, Artificial sequence
  Zc3h13.1387_Ctcf.809
  crRNA array
cgatttcttggctttatatatcttgtggaaaggacgaaacaccgtaatttctactaagtgtagatgtgacgccggtcatgtgacttaatttctactaagtgtagataagcgctatcatgatcccaattttttaagcttggcgtggatccgatatcaactagatcttgaga

SEQ ID NO: 9248 - DNA, 170 bp, Artificial sequence
  Zc3h13.1387_Elf3.826
  crRNA array
cgatttcttggctttatatatcttgtggaaaggacgaaacaccgtaatttctactaagtgtagatgtgacgccggtcatgtgacttaatttctactaagtgtagattccgagacatcctaatccacttttttaagcttggcgtggatccgatatcaactagatcttgaga

SEQ ID NO: 9249 - DNA, 170 bp, Artificial sequence
  Zc3h13.1387_Elf3.983
  crRNA array
cgatttcttggctttatatatcttgtggaaaggacgaaacaccgtaatttctactaagtgtagatgtgacgccggtcatgtgacttaatttctactaagtgtagattaggccccctaactggaccattttttaagcttggcgtggatccgatatcaactagatcttgaga

SEQ ID NO: 9250 - DNA, 170 bp, Artificial sequence
  Zc3h13.1387_Ep300.310
  crRNA array
cgatttcttggctttatatatcttgtggaaaggacgaaacaccgtaatttctactaagtgtagatgtgacgccggtcatgtgacttaatttctactaagtgtagatatggtacgacagtgaggaagttttttaagcttggcgtggatccgatatcaactagatcttgaga

SEQ ID NO: 9251 - DNA, 170 bp, Artificial sequence
  Zc3h13.1387_Ep300.587
  crRNA array
cgatttcttggctttatatatcttgtggaaaggacgaaacaccgtaatttctactaagtgtagatgtgacgccggtcatgtgacttaatttctactaagtgtagatcgccccggggcccccaaccattttttaagcttggcgtggatccgatatcaactagatcttgaga

SEQ ID NO: 9252 - DNA, 170 bp, Artificial sequence
  Zc3h13.1387_Epha2.126
  crRNA array
cgatttcttggctttatatatcttgtggaaaggacgaaacaccgtaatttctactaagtgtagatgtgacgccggtcatgtgacttaatttctactaagtgtagatcctgtgccgccgcggccgccttttttaagcttggcgtggatccgatatcaactagatcttgaga

SEQ ID NO: 9253 - DNA, 170 bp, Artificial sequence
  Zc3h13.1387_Epha2.5
  crRNA array
cgatttcttggctttatatatcttgtggaaaggacgaaacaccgtaatttctactaagtgtagatgtgacgccggtcatgtgacttaatttctactaagtgtagatcatgagctggcgccacccggttttttaagcttggcgtggatccgatatcaactagatcttgaga

SEQ ID NO: 9254 - DNA, 170 bp, Artificial sequence
  Zc3h13.1387_Fat1.105
  crRNA array
cgatttcttggctttatatatcttgtggaaaggacgaaacaccgtaatttctactaagtgtagatgtgacgccggtcatgtgacttaatttctactaagtgtagataactcgaggtgacaacaagtttttttaagcttggcgtggatccgatatcaactagatcttgaga

SEQ ID NO: 9255 - DNA, 170 bp, Artificial sequence
  Zc3h13.1387_Fat1.122
  crRNA array
cgatttcttggctttatatatcttgtggaaaggacgaaacaccgtaatttctactaagtgtagatgtgacgccggtcatgtgacttaatttctactaagtgtagatccatcgacatggaaacgggattttttaagcttggcgtggatccgatatcaactagatcttgaga

SEQ ID NO: 9256 - DNA, 170 bp, Artificial sequence
  Zc3h13.1387_Fbxw7.21
  crRNA array
cgatttcttggctttatatatcttgtggaaaggacgaaacaccgtaatttctactaagtgtagatgtgacgccggtcatgtgacttaatttctactaagtgtagattaatgtgccgtagaaacccattttttaagcttggcgtggatccgatatcaactagatcttgaga

SEQ ID NO: 9257 - DNA, 170 bp, Artificial sequence
  Zc3h13.1387_Fbxw7.23
  crRNA array
cgatttcttggctttatatatcttgtggaaaggacgaaacaccgtaatttctactaagtgtagatgtgacgccggtcatgtgacttaatttctactaagtgtagatatgtgccgtagaaacccatattttttaagcttggcgtggatccgatatcaactagatcttgaga

SEQ ID NO: 9258 - DNA, 170 bp, Artificial sequence
  Zc3h13.1387_Gata3.34
  crRNA array
cgatttcttggctttatatatcttgtggaaaggacgaaacaccgtaatttctactaagtgtagatgtgacgccggtcatgtgacttaatttctactaagtgtagatctaaactatcccgcaaagatttttttaagcttggcgtggatccgatatcaactagatcttgaga

SEQ ID NO: 9259 - DNA, 170 bp, Artificial sequence
  Zc3h13.1387_Gata3.47
  crRNA array
cgatttcttggctttatatatcttgtggaaaggacgaaacaccgtaatttctactaagtgtagatgtgacgccggtcatgtgacttaatttctactaagtgtagatcgtagtaggacgggacgtggttttttaagcttggcgtggatccgatatcaactagatcttgaga

SEQ ID NO: 9260 - DNA, 170 bp, Artificial sequence
  Zc3h13.1387_H2-Q2.1
  crRNA array
cgatttcttggctttatatatcttgtggaaaggacgaaacaccgtaatttctactaagtgtagatgtgacgccggtcatgtgacttaatttctactaagtgtagatagggcggccaccaacagcagttttttaagcttggcgtggatccgatatcaactagatcttgaga

SEQ ID NO: 9261 - DNA, 170 bp, Artificial sequence
  Zc3h13.1387_H2-Q2.2
  crRNA array
cgatttcttggctttatatatcttgtggaaaggacgaaacaccgtaatttctactaagtgtagatgtgacgccggtcatgtgacttaatttctactaagtgtagattaacctgcgcccgctgctgattttttaagcttggcgtggatccgatatcaactagatcttgaga

SEQ ID NO: 9262 - DNA, 170 bp, Artificial sequence
  Zc3h13.1387_Kdm5c.1878
  crRNA array
cgatttcttggctttatatatcttgtggaaaggacgaaacaccgtaatttctactaagtgtagatgtgacgccggtcatgtgacttaatttctactaagtgtagatagagcacggcacccgcccccttttttaagcttggcgtggatccgatatcaactagatcttgaga

SEQ ID NO: 9263 - DNA, 170 bp, Artificial sequence
  Zc3h13.1387_Kdm5c.1879
  crRNA array
cgatttcttggctttatatatcttgtggaaaggacgaaacaccgtaatttctactaagtgtagatgtgacgccggtcatgtgacttaatttctactaagtgtagatgagcacggcacccgccccccttttttaagcttggcgtggatccgatatcaactagatcttgaga

SEQ ID NO: 9264 - DNA, 170 bp, Artificial sequence
  Zc3h13.1387_Kdm6a.56
  crRNA array
cgatttcttggctttatatatcttgtggaaaggacgaaacaccgtaatttctactaagtgtagatgtgacgccggtcatgtgacttaatttctactaagtgtagattcgctgccgcctctcgcggcttttttaagcttggcgtggatccgatatcaactagatcttgaga

SEQ ID NO: 9265 - DNA, 170 bp, Artificial sequence
  Zc3h13.1387_Kdm6a.57
  crRNA array
cgatttcttggctttatatatcttgtggaaaggacgaaacaccgtaatttctactaagtgtagatgtgacgccggtcatgtgacttaatttctactaagtgtagatcgctgccgcctctcgcggcattttttaagcttggcgtggatccgatatcaactagatcttgaga

SEQ ID NO: 9266 - DNA, 170 bp, Artificial sequence
  Zc3h13.1387_Kmt2b.265
  crRNA array
cgatttcttggctttatatatcttgtggaaaggacgaaacaccgtaatttctactaagtgtagatgtgacgccggtcatgtgacttaatttctactaagtgtagatccccaagtgaagcccacctgttttttaagcttggcgtggatccgatatcaactagatcttgaga

SEQ ID NO: 9267 - DNA, 170 bp, Artificial sequence
  Zc3h13.1387_Kmt2b.298
  crRNA array
cgatttcttggctttatatatcttgtggaaaggacgaaacaccgtaatttctactaagtgtagatgtgacgccggtcatgtgacttaatttctactaagtgtagattccggcagggaccggctggcttttttaagcttggcgtggatccgatatcaactagatcttgaga

SEQ ID NO: 9268 - DNA, 170 bp, Artificial sequence
  Zc3h13.1387_Kmt2c.1962
  crRNA array
cgatttcttggctttatatatcttgtggaaaggacgaaacaccgtaatttctactaagtgtagatgtgacgccggtcatgtgacttaatttctactaagtgtagatgtgacgatctgtgccacaagttttttaagcttggcgtggatccgatatcaactagatcttgaga

SEQ ID NO: 9269 - DNA, 170 bp, Artificial sequence
  Zc3h13.1387_Kmt2c.2236
  crRNA array
cgatttcttggctttatatatcttgtggaaaggacgaaacaccgtaatttctactaagtgtagatgtgacgccggtcatgtgacttaatttctactaagtgtagatactcgacctccacctccctattttttaagcttggcgtggatccgatatcaactagatcttgaga

SEQ ID NO: 9270 - DNA, 170 bp, Artificial sequence
  Zc3h13.1387_Kmt2d.316
  crRNA array
cgatttcttggctttatatatcttgtggaaaggacgaaacaccgtaatttctactaagtgtagatgtgacgccggtcatgtgacttaatttctactaagtgtagatactccaggccacccaggtggttttttaagcttggcgtggatccgatatcaactagatcttgaga

SEQ ID NO: 9271 - DNA, 170 bp, Artificial sequence
  Zc3h13.1387_Kmt2d.416
  crRNA array
cgatttcttggctttatatatcttgtggaaaggacgaaacaccgtaatttctactaagtgtagatgtgacgccggtcatgtgacttaatttctactaagtgtagattaaacccccgggggaagggtttttttaagcttggcgtggatccgatatcaactagatcttgaga

SEQ ID NO: 9272 - DNA, 170 bp, Artificial sequence
  Zc3h13.1387_Map2k4.119
  crRNA array
cgatttcttggctttatatatcttgtggaaaggacgaaacaccgtaatttctactaagtgtagatgtgacgccggtcatgtgacttaatttctactaagtgtagattgctgtgtgggcggccacatttttttaagcttggcgtggatccgatatcaactagatcttgaga

SEQ ID NO: 9273 - DNA, 170 bp, Artificial sequence
  Zc3h13.1387_Map2k4.1261
  crRNA array
cgatttcttggctttatatatcttgtggaaaggacgaaacaccgtaatttctactaagtgtagatgtgacgccggtcatgtgacttaatttctactaagtgtagatgatgtagtaatgcggagtagttttttaagcttggcgtggatccgatatcaactagatcttgaga

SEQ ID NO: 9274 - DNA, 170 bp, Artificial sequence
  Zc3h13.1387_Map3k1.235
  crRNA array
cgatttcttggctttatatatcttgtggaaaggacgaaacaccgtaatttctactaagtgtagatgtgacgccggtcatgtgacttaatttctactaagtgtagataaaacgctactgatcgatcgttttttaagcttggcgtggatccgatatcaactagatcttgaga

SEQ ID NO: 9275 - DNA, 170 bp, Artificial sequence
  Zc3h13.1387_Map3k1.3838
  crRNA array
cgatttcttggctttatatatcttgtggaaaggacgaaacaccgtaatttctactaagtgtagatgtgacgccggtcatgtgacttaatttctactaagtgtagatccaacaacagggccccactattttttaagcttggcgtggatccgatatcaactagatcttgaga

SEQ ID NO: 9276 - DNA, 170 bp, Artificial sequence
  Zc3h13.1387_Mga.1655
  crRNA array
cgatttcttggctttatatatcttgtggaaaggacgaaacaccgtaatttctactaagtgtagatgtgacgccggtcatgtgacttaatttctactaagtgtagatcgagaagtggagagcatattttttttaagcttggcgtggatccgatatcaactagatcttgaga

SEQ ID NO: 9277 - DNA, 170 bp, Artificial sequence
  Zc3h13.1387_Mga.93
  crRNA array
cgatttcttggctttatatatcttgtggaaaggacgaaacaccgtaatttctactaagtgtagatgtgacgccggtcatgtgacttaatttctactaagtgtagatgagaaggctccccataatgtttttttaagcttggcgtggatccgatatcaactagatcttgaga

SEQ ID NO: 9278 - DNA, 170 bp, Artificial sequence
  Zc3h13.1387_Nf1.746
  crRNA array
cgatttcttggctttatatatcttgtggaaaggacgaaacaccgtaatttctactaagtgtagatgtgacgccggtcatgtgacttaatttctactaagtgtagattaagcataatgatgatgccattttttaagcttggcgtggatccgatatcaactagatcttgaga

SEQ ID NO: 9279 - DNA, 170 bp, Artificial sequence
  Zc3h13.1387_Nf1.97
  crRNA array
cgatttcttggctttatatatcttgtggaaaggacgaaacaccgtaatttctactaagtgtagatgtgacgccggtcatgtgacttaatttctactaagtgtagatagcccgctacatgctgatgcttttttaagcttggcgtggatccgatatcaactagatcttgaga

SEQ ID NO: 9280 - DNA, 170 bp, Artificial sequence
  Zc3h13.1387_Nf2.356
  crRNA array
cgatttcttggctttatatatcttgtggaaaggacgaaacaccgtaatttctactaagtgtagatgtgacgccggtcatgtgacttaatttctactaagtgtagatcggagtcatctgatagagatttttttaagcttggcgtggatccgatatcaactagatcttgaga

SEQ ID NO: 9281 - DNA, 170 bp, Artificial sequence
  Zc3h13.1387_Nf2.768
  crRNA array
cgatttcttggctttatatatcttgtggaaaggacgaaacaccgtaatttctactaagtgtagatgtgacgccggtcatgtgacttaatttctactaagtgtagatccgaagccccagtgtccggcttttttaagcttggcgtggatccgatatcaactagatcttgaga

SEQ ID NO: 9282 - DNA, 170 bp, Artificial sequence
  Zc3h13.1387_Notch1.1849
  crRNA array
cgatttcttggctttatatatcttgtggaaaggacgaaacaccgtaatttctactaagtgtagatgtgacgccggtcatgtgacttaatttctactaagtgtagatctggcgggtgggcggcgctgttttttaagcttggcgtggatccgatatcaactagatcttgaga

SEQ ID NO: 9283 - DNA, 170 bp, Artificial sequence
  Zc3h13.1387_Notch1.649
  crRNA array
cgatttcttggctttatatatcttgtggaaaggacgaaacaccgtaatttctactaagtgtagatgtgacgccggtcatgtgacttaatttctactaagtgtagattgggccaacgatgccaggacttttttaagcttggcgtggatccgatatcaactagatcttgaga

SEQ ID NO: 9284 - DNA, 170 bp, Artificial sequence
  Zc3h13.1387_Nsd1.70
  crRNA array
cgatttcttggctttatatatcttgtggaaaggacgaaacaccgtaatttctactaagtgtagatgtgacgccggtcatgtgacttaatttctactaagtgtagatactggtgtggacgatgcagattttttaagcttggcgtggatccgatatcaactagatcttgaga

SEQ ID NO: 9285 - DNA, 170 bp, Artificial sequence
  Zc3h13.1387_Nsd1.90
  crRNA array
cgatttcttggctttatatatcttgtggaaaggacgaaacaccgtaatttctactaagtgtagatgtgacgccggtcatgtgacttaatttctactaagtgtagataggagctaacggcaagaatgttttttaagcttggcgtggatccgatatcaactagatcttgaga

SEQ ID NO: 9286 - DNA, 170 bp, Artificial sequence
  Zc3h13.1387_Pbrm1.1236
  crRNA array
cgatttcttggctttatatatcttgtggaaaggacgaaacaccgtaatttctactaagtgtagatgtgacgccggtcatgtgacttaatttctactaagtgtagatgccgataaaaccaacagccgttttttaagcttggcgtggatccgatatcaactagatcttgaga

SEQ ID NO: 9287 - DNA, 170 bp, Artificial sequence
  Zc3h13.1387_Pbrm1.969
  crRNA array
cgatttcttggctttatatatcttgtggaaaggacgaaacaccgtaatttctactaagtgtagatgtgacgccggtcatgtgacttaatttctactaagtgtagatgagccctaatgaacagctcattttttaagcttggcgtggatccgatatcaactagatcttgaga

SEQ ID NO: 9288 - DNA, 170 bp, Artificial sequence
  Zc3h13.1387_Pik3r1.76
  crRNA array
cgatttcttggctttatatatcttgtggaaaggacgaaacaccgtaatttctactaagtgtagatgtgacgccggtcatgtgacttaatttctactaagtgtagataaaacctatacggcccgcacttttttaagcttggcgtggatccgatatcaactagatcttgaga

SEQ ID NO: 9289 - DNA, 170 bp, Artificial sequence
  Zc3h13.1387_Pik3r1.77
  crRNA array
cgatttcttggctttatatatcttgtggaaaggacgaaacaccgtaatttctactaagtgtagatgtgacgccggtcatgtgacttaatttctactaagtgtagataaacctatacggcccgcactttttttaagcttggcgtggatccgatatcaactagatcttgaga

SEQ ID NO: 9290 - DNA, 170 bp, Artificial sequence
  Zc3h13.1387_Pten.240
  crRNA array
cgatttcttggctttatatatcttgtggaaaggacgaaacaccgtaatttctactaagtgtagatgtgacgccggtcatgtgacttaatttctactaagtgtagattgcatacgctatagctgcttttttttaagcttggcgtggatccgatatcaactagatcttgaga

SEQ ID NO: 9291 - DNA, 170 bp, Artificial sequence
  Zc3h13.1387_Pten.265
  crRNA array
cgatttcttggctttatatatcttgtggaaaggacgaaacaccgtaatttctactaagtgtagatgtgacgccggtcatgtgacttaatttctactaagtgtagataagcgtggtgcgtgacgcacttttttaagcttggcgtggatccgatatcaactagatcttgaga

SEQ ID NO: 9292 - DNA, 170 bp, Artificial sequence
  Zc3h13.1387_Rasa1.1478
  crRNA array
cgatttcttggctttatatatcttgtggaaaggacgaaacaccgtaatttctactaagtgtagatgtgacgccggtcatgtgacttaatttctactaagtgtagatcgataatggtctatgatgtcttttttaagcttggcgtggatccgatatcaactagatcttgaga

SEQ ID NO: 9293 - DNA, 170 bp, Artificial sequence
  Zc3h13.1387_Rasa1.223
  crRNA array
cgatttcttggctttatatatcttgtggaaaggacgaaacaccgtaatttctactaagtgtagatgtgacgccggtcatgtgacttaatttctactaagtgtagattccatggagtatcgtgctcgttttttaagcttggcgtggatccgatatcaactagatcttgaga

SEQ ID NO: 9294 - DNA, 170 bp, Artificial sequence
  Zc3h13.1387_Rb1.211
  crRNA array
cgatttcttggctttatatatcttgtggaaaggacgaaacaccgtaatttctactaagtgtagatgtgacgccggtcatgtgacttaatttctactaagtgtagattctgacatgatcgggtacctttttttaagcttggcgtggatccgatatcaactagatcttgaga

SEQ ID NO: 9295 - DNA, 170 bp, Artificial sequence
  Zc3h13.1387_Rb1.394
  crRNA array
cgatttcttggctttatatatcttgtggaaaggacgaaacaccgtaatttctactaagtgtagatgtgacgccggtcatgtgacttaatttctactaagtgtagatagaaatctcgaagcaggatcttttttaagcttggcgtggatccgatatcaactagatcttgaga

SEQ ID NO: 9296 - DNA, 170 bp, Artificial sequence
  Zc3h13.1387_Rbm10.5
  crRNA array
cgatttcttggctttatatatcttgtggaaaggacgaaacaccgtaatttctactaagtgtagatgtgacgccggtcatgtgacttaatttctactaagtgtagatacgaaacctgaacccacacattttttaagcttggcgtggatccgatatcaactagatcttgaga

SEQ ID NO: 9297 - DNA, 170 bp, Artificial sequence
  Zc3h13.1387_Rbm10.6
  crRNA array
cgatttcttggctttatatatcttgtggaaaggacgaaacaccgtaatttctactaagtgtagatgtgacgccggtcatgtgacttaatttctactaagtgtagatcgaaacctgaacccacacagttttttaagcttggcgtggatccgatatcaactagatcttgaga

SEQ ID NO: 9298 - DNA, 170 bp, Artificial sequence
  Zc3h13.1387_Rnf43.1920
  crRNA array
cgatttcttggctttatatatcttgtggaaaggacgaaacaccgtaatttctactaagtgtagatgtgacgccggtcatgtgacttaatttctactaagtgtagatatccccgtgccgtggactccttttttaagcttggcgtggatccgatatcaactagatcttgaga

SEQ ID NO: 9299 - DNA, 170 bp, Artificial sequence
  Zc3h13.1387_Rnf43.39
  crRNA array
cgatttcttggctttatatatcttgtggaaaggacgaaacaccgtaatttctactaagtgtagatgtgacgccggtcatgtgacttaatttctactaagtgtagatcaaggggatcactctgataattttttaagcttggcgtggatccgatatcaactagatcttgaga

SEQ ID NO: 9300 - DNA, 170 bp, Artificial sequence
  Zc3h13.1387_Runx1.204
  crRNA array
cgatttcttggctttatatatcttgtggaaaggacgaaacaccgtaatttctactaagtgtagatgtgacgccggtcatgtgacttaatttctactaagtgtagattaaataagtccagccgttttttttttaagcttggcgtggatccgatatcaactagatcttgaga

SEQ ID NO: 9301 - DNA, 170 bp, Artificial sequence
  Zc3h13.1387_Runx1.81
  crRNA array
cgatttcttggctttatatatcttgtggaaaggacgaaacaccgtaatttctactaagtgtagatgtgacgccggtcatgtgacttaatttctactaagtgtagataggacgcgtatgggaattttttttttaagcttggcgtggatccgatatcaactagatcttgaga

SEQ ID NO: 9302 - DNA, 170 bp, Artificial sequence
  Zc3h13.1387_Setd2.143
  crRNA array
cgatttcttggctttatatatcttgtggaaaggacgaaacaccgtaatttctactaagtgtagatgtgacgccggtcatgtgacttaatttctactaagtgtagatgcacaaccacaacagactggttttttaagcttggcgtggatccgatatcaactagatcttgaga

SEQ ID NO: 9303 - DNA, 170 bp, Artificial sequence
  Zc3h13.1387_Setd2.508
  crRNA array
cgatttcttggctttatatatcttgtggaaaggacgaaacaccgtaatttctactaagtgtagatgtgacgccggtcatgtgacttaatttctactaagtgtagattacgatcccgagcacccgacttttttaagcttggcgtggatccgatatcaactagatcttgaga

SEQ ID NO: 9304 - DNA, 170 bp, Artificial sequence
  Zc3h13.1387_Smad4.3038
  crRNA array
cgatttcttggctttatatatcttgtggaaaggacgaaacaccgtaatttctactaagtgtagatgtgacgccggtcatgtgacttaatttctactaagtgtagatatctgcggcagtgtcaccggttttttaagcttggcgtggatccgatatcaactagatcttgaga

SEQ ID NO: 9305 - DNA, 170 bp, Artificial sequence
  Zc3h13.1387_Smad4.39
  crRNA array
cgatttcttggctttatatatcttgtggaaaggacgaaacaccgtaatttctactaagtgtagatgtgacgccggtcatgtgacttaatttctactaagtgtagatagtcaaacgcatactgacaattttttaagcttggcgtggatccgatatcaactagatcttgaga

SEQ ID NO: 9306 - DNA, 170 bp, Artificial sequence
  Zc3h13.1387_Stag2.1409
  crRNA array
cgatttcttggctttatatatcttgtggaaaggacgaaacaccgtaatttctactaagtgtagatgtgacgccggtcatgtgacttaatttctactaagtgtagatgctaataactgcggaagggcttttttaagcttggcgtggatccgatatcaactagatcttgaga

SEQ ID NO: 9307 - DNA, 170 bp, Artificial sequence
  Zc3h13.1387_Stag2.4401
  crRNA array
cgatttcttggctttatatatcttgtggaaaggacgaaacaccgtaatttctactaagtgtagatgtgacgccggtcatgtgacttaatttctactaagtgtagattaatcgtccagtggtgtatattttttaagcttggcgtggatccgatatcaactagatcttgaga

SEQ ID NO: 9308 - DNA, 170 bp, Artificial sequence
  Zc3h13.1387_Tbl1xr1.1
  crRNA array
cgatttcttggctttatatatcttgtggaaaggacgaaacaccgtaatttctactaagtgtagatgtgacgccggtcatgtgacttaatttctactaagtgtagatggatgcgcatactggtgaagttttttaagcttggcgtggatccgatatcaactagatcttgaga

SEQ ID NO: 9309 - DNA, 170 bp, Artificial sequence
  Zc3h13.1387_Tbl1xr1.83
  crRNA array
cgatttcttggctttatatatcttgtggaaaggacgaaacaccgtaatttctactaagtgtagatgtgacgccggtcatgtgacttaatttctactaagtgtagatatggtcgacccatcgagtctttttttaagcttggcgtggatccgatatcaactagatcttgaga

SEQ ID NO: 9310 - DNA, 170 bp, Artificial sequence
  Zc3h13.1387_Tgfbr2.290
  crRNA array
cgatttcttggctttatatatcttgtggaaaggacgaaacaccgtaatttctactaagtgtagatgtgacgccggtcatgtgacttaatttctactaagtgtagatcctctcggcgcccgggtaaattttttaagcttggcgtggatccgatatcaactagatcttgaga

SEQ ID NO: 9311 - DNA, 170 bp, Artificial sequence
  Zc3h13.1387_Tgfbr2.292
  crRNA array
cgatttcttggctttatatatcttgtggaaaggacgaaacaccgtaatttctactaagtgtagatgtgacgccggtcatgtgacttaatttctactaagtgtagatcccgggcgccgagagggaaattttttaagcttggcgtggatccgatatcaactagatcttgaga

SEQ ID NO: 9312 - DNA, 170 bp, Artificial sequence
  Zc3h13.1387_Trp53.4
  crRNA array
cgatttcttggctttatatatcttgtggaaaggacgaaacaccgtaatttctactaagtgtagatgtgacgccggtcatgtgacttaatttctactaagtgtagatccctgaactgcccccagggattttttaagcttggcgtggatccgatatcaactagatcttgaga

SEQ ID NO: 9313 - DNA, 170 bp, Artificial sequence
  Zc3h13.1387_Trp53.528
  crRNA array
cgatttcttggctttatatatcttgtggaaaggacgaaacaccgtaatttctactaagtgtagatgtgacgccggtcatgtgacttaatttctactaagtgtagatgctgggccagcagagacctgttttttaagcttggcgtggatccgatatcaactagatcttgaga

SEQ ID NO: 9314 - DNA, 170 bp, Artificial sequence
  Zc3h13.1387_Vhl.1
  crRNA array
cgatttcttggctttatatatcttgtggaaaggacgaaacaccgtaatttctactaagtgtagatgtgacgccggtcatgtgacttaatttctactaagtgtagatagggctcccggcggccatttttttttaagcttggcgtggatccgatatcaactagatcttgaga

SEQ ID NO: 9315 - DNA, 170 bp, Artificial sequence
  Zc3h13.1387_Vhl.151
  crRNA array
cgatttcttggctttatatatcttgtggaaaggacgaaacaccgtaatttctactaagtgtagatgtgacgccggtcatgtgacttaatttctactaagtgtagattagagcactcacccgagggattttttaagcttggcgtggatccgatatcaactagatcttgaga

SEQ ID NO: 9316 - DNA, 170 bp, Artificial sequence
  Zc3h13.1777_Acvr2a.155
  crRNA array
cgatttcttggctttatatatcttgtggaaaggacgaaacaccgtaatttctactaagtgtagatgatgctgccagtgtagcggctaatttctactaagtgtagatggacctggctaatcaagtatttttttaagcttggcgtggatccgatatcaactagatcttgaga

SEQ ID NO: 9317 - DNA, 170 bp, Artificial sequence
  Zc3h13.1777_Acvr2a.70
  crRNA array
cgatttcttggctttatatatcttgtggaaaggacgaaacaccgtaatttctactaagtgtagatgatgctgccagtgtagcggctaatttctactaagtgtagatcccgaggcgccggagaagccttttttaagcttggcgtggatccgatatcaactagatcttgaga

SEQ ID NO: 9318 - DNA, 170 bp, Artificial sequence
  Zc3h13.1777_Apc.21
  crRNA array
cgatttcttggctttatatatcttgtggaaaggacgaaacaccgtaatttctactaagtgtagatgatgctgccagtgtagcggctaatttctactaagtgtagatgtgatccacacgtgtagctgttttttaagcttggcgtggatccgatatcaactagatcttgaga

SEQ ID NO: 9319 - DNA, 170 bp, Artificial sequence
  Zc3h13.1777_Apc.867
  crRNA array
cgatttcttggctttatatatcttgtggaaaggacgaaacaccgtaatttctactaagtgtagatgatgctgccagtgtagcggctaatttctactaagtgtagatcagtcccaggcggcggaagcttttttaagcttggcgtggatccgatatcaactagatcttgaga

SEQ ID NO: 9320 - DNA, 170 bp, Artificial sequence
  Zc3h13.1777_Arid1a.2
  crRNA array
cgatttcttggctttatatatcttgtggaaaggacgaaacaccgtaatttctactaagtgtagatgatgctgccagtgtagcggctaatttctactaagtgtagatcccgcgcccccgtcctggggttttttaagcttggcgtggatccgatatcaactagatcttgaga

SEQ ID NO: 9321 - DNA, 170 bp, Artificial sequence
  Zc3h13.1777_Arid1a.5
  crRNA array
cgatttcttggctttatatatcttgtggaaaggacgaaacaccgtaatttctactaagtgtagatgatgctgccagtgtagcggctaatttctactaagtgtagatcccgcgctcggccgctgccgttttttaagcttggcgtggatccgatatcaactagatcttgaga

SEQ ID NO: 9322 - DNA, 170 bp, Artificial sequence
  Zc3h13.1777_Arid2.166
  crRNA array
cgatttcttggctttatatatcttgtggaaaggacgaaacaccgtaatttctactaagtgtagatgatgctgccagtgtagcggctaatttctactaagtgtagataaccgcgatctgggttttttttttttaagcttggcgtggatccgatatcaactagatcttgaga

SEQ ID NO: 9323 - DNA, 170 bp, Artificial sequence
  Zc3h13.1777_Arid2.172
  crRNA array
cgatttcttggctttatatatcttgtggaaaggacgaaacaccgtaatttctactaagtgtagatgatgctgccagtgtagcggctaatttctactaagtgtagatctggacgagctgcggcagttttttttaagcttggcgtggatccgatatcaactagatcttgaga

SEQ ID NO: 9324 - DNA, 170 bp, Artificial sequence
  Zc3h13.1777_Atm.120
  crRNA array
cgatttcttggctttatatatcttgtggaaaggacgaaacaccgtaatttctactaagtgtagatgatgctgccagtgtagcggctaatttctactaagtgtagatgacaggtagtcggcagctaattttttaagcttggcgtggatccgatatcaactagatcttgaga

SEQ ID NO: 9325 - DNA, 170 bp, Artificial sequence
  Zc3h13.1777_Atm.997
  crRNA array
cgatttcttggctttatatatcttgtggaaaggacgaaacaccgtaatttctactaagtgtagatgatgctgccagtgtagcggctaatttctactaagtgtagatgagaaagtctccgaatcgttttttttaagcttggcgtggatccgatatcaactagatcttgaga

SEQ ID NO: 9326 - DNA, 170 bp, Artificial sequence
  Zc3h13.1777_Atrx.249
  crRNA array
cgatttcttggctttatatatcttgtggaaaggacgaaacaccgtaatttctactaagtgtagatgatgctgccagtgtagcggctaatttctactaagtgtagattagccagtcgctcatatctcttttttaagcttggcgtggatccgatatcaactagatcttgaga

SEQ ID NO: 9327 - DNA, 170 bp, Artificial sequence
  Zc3h13.1777_Atrx.251
  crRNA array
cgatttcttggctttatatatcttgtggaaaggacgaaacaccgtaatttctactaagtgtagatgatgctgccagtgtagcggctaatttctactaagtgtagatgccagtcgctcatatctctgttttttaagcttggcgtggatccgatatcaactagatcttgaga

SEQ ID NO: 9328 - DNA, 170 bp, Artificial sequence
  Zc3h13.1777_Bcor.203
  crRNA array
cgatttcttggctttatatatcttgtggaaaggacgaaacaccgtaatttctactaagtgtagatgatgctgccagtgtagcggctaatttctactaagtgtagatccccggagcggagtccaggcttttttaagcttggcgtggatccgatatcaactagatcttgaga

SEQ ID NO: 9329 - DNA, 170 bp, Artificial sequence
  Zc3h13.1777_Bcor.475
  crRNA array
cgatttcttggctttatatatcttgtggaaaggacgaaacaccgtaatttctactaagtgtagatgatgctgccagtgtagcggctaatttctactaagtgtagattgcaacccctctgtatgggattttttaagcttggcgtggatccgatatcaactagatcttgaga

SEQ ID NO: 9330 - DNA, 170 bp, Artificial sequence
  Zc3h13.1777_Brca1.112
  crRNA array
cgatttcttggctttatatatcttgtggaaaggacgaaacaccgtaatttctactaagtgtagatgatgctgccagtgtagcggctaatttctactaagtgtagatctagacgctctgtggagactttttttaagcttggcgtggatccgatatcaactagatcttgaga

SEQ ID NO: 9331 - DNA, 170 bp, Artificial sequence
  Zc3h13.1777_Brca1.53
  crRNA array
cgatttcttggctttatatatcttgtggaaaggacgaaacaccgtaatttctactaagtgtagatgatgctgccagtgtagcggctaatttctactaagtgtagataatgaggaggcgtcgatcatttttttaagcttggcgtggatccgatatcaactagatcttgaga

SEQ ID NO: 9332 - DNA, 170 bp, Artificial sequence
  Zc3h13.1777_Casp8.45
  crRNA array
cgatttcttggctttatatatcttgtggaaaggacgaaacaccgtaatttctactaagtgtagatgatgctgccagtgtagcggctaatttctactaagtgtagatctaccgagatcctgtgaatgttttttaagcttggcgtggatccgatatcaactagatcttgaga

SEQ ID NO: 9333 - DNA, 170 bp, Artificial sequence
  Zc3h13.1777_Casp8.54
  crRNA array
cgatttcttggctttatatatcttgtggaaaggacgaaacaccgtaatttctactaagtgtagatgatgctgccagtgtagcggctaatttctactaagtgtagatcagtgcagtcgtcgtaagatttttttaagcttggcgtggatccgatatcaactagatcttgaga

SEQ ID NO: 9334 - DNA, 170 bp, Artificial sequence
  Zc3h13.1777_Cbwd1.84
  crRNA array
cgatttcttggctttatatatcttgtggaaaggacgaaacaccgtaatttctactaagtgtagatgatgctgccagtgtagcggctaatttctactaagtgtagatcacagcaggtaacatgccgcttttttaagcttggcgtggatccgatatcaactagatcttgaga

SEQ ID NO: 9335 - DNA, 170 bp, Artificial sequence
  Zc3h13.1777_Cbwd1.85
  crRNA array
cgatttcttggctttatatatcttgtggaaaggacgaaacaccgtaatttctactaagtgtagatgatgctgccagtgtagcggctaatttctactaagtgtagatacagcaggtaacatgccgccttttttaagcttggcgtggatccgatatcaactagatcttgaga

SEQ ID NO: 9336 - DNA, 170 bp, Artificial sequence
  Zc3h13.1777_Cdh1.387
  crRNA array
cgatttcttggctttatatatcttgtggaaaggacgaaacaccgtaatttctactaagtgtagatgatgctgccagtgtagcggctaatttctactaagtgtagatctcggcgtctgccgggtccgttttttaagcttggcgtggatccgatatcaactagatcttgaga

SEQ ID NO: 9337 - DNA, 170 bp, Artificial sequence
  Zc3h13.1777_Cdh1.58
  crRNA array
cgatttcttggctttatatatcttgtggaaaggacgaaacaccgtaatttctactaagtgtagatgatgctgccagtgtagcggctaatttctactaagtgtagatctcgtccgcgcccgggactcttttttaagcttggcgtggatccgatatcaactagatcttgaga

SEQ ID NO: 9338 - DNA, 170 bp, Artificial sequence
  Zc3h13.1777_Cdkn2a.647
  crRNA array
cgatttcttggctttatatatcttgtggaaaggacgaaacaccgtaatttctactaagtgtagatgatgctgccagtgtagcggctaatttctactaagtgtagatgcaatcacgggagggagcagttttttaagcttggcgtggatccgatatcaactagatcttgaga

SEQ ID NO: 9339 - DNA, 170 bp, Artificial sequence
  Zc3h13.1777_Cdkn2a.648
  crRNA array
cgatttcttggctttatatatcttgtggaaaggacgaaacaccgtaatttctactaagtgtagatgatgctgccagtgtagcggctaatttctactaagtgtagatcaatcacgggagggagcagattttttaagcttggcgtggatccgatatcaactagatcttgaga

SEQ ID NO: 9340 - DNA, 170 bp, Artificial sequence
  Zc3h13.1777_Cic.162
  crRNA array
cgatttcttggctttatatatcttgtggaaaggacgaaacaccgtaatttctactaagtgtagatgatgctgccagtgtagcggctaatttctactaagtgtagatcgcaggcgcgcccggcggagttttttaagcttggcgtggatccgatatcaactagatcttgaga

SEQ ID NO: 9341 - DNA, 170 bp, Artificial sequence
  Zc3h13.1777_Cic.164
  crRNA array
cgatttcttggctttatatatcttgtggaaaggacgaaacaccgtaatttctactaagtgtagatgatgctgccagtgtagcggctaatttctactaagtgtagatcgggccctgggccggcggctttttttaagcttggcgtggatccgatatcaactagatcttgaga

SEQ ID NO: 9342 - DNA, 170 bp, Artificial sequence
  Zc3h13.1777_Ctcf.229
  crRNA array
cgatttcttggctttatatatcttgtggaaaggacgaaacaccgtaatttctactaagtgtagatgatgctgccagtgtagcggctaatttctactaagtgtagatggctggtggctgatagtctgttttttaagcttggcgtggatccgatatcaactagatcttgaga

SEQ ID NO: 9343 - DNA, 170 bp, Artificial sequence
  Zc3h13.1777_Ctcf.809
  crRNA array
cgatttcttggctttatatatcttgtggaaaggacgaaacaccgtaatttctactaagtgtagatgatgctgccagtgtagcggctaatttctactaagtgtagataagcgctatcatgatcccaattttttaagcttggcgtggatccgatatcaactagatcttgaga

SEQ ID NO: 9344 - DNA, 170 bp, Artificial sequence
  Zc3h13.1777_Elf3.826
  crRNA array
cgatttcttggctttatatatcttgtggaaaggacgaaacaccgtaatttctactaagtgtagatgatgctgccagtgtagcggctaatttctactaagtgtagattccgagacatcctaatccacttttttaagcttggcgtggatccgatatcaactagatcttgaga

SEQ ID NO: 9345 - DNA, 170 bp, Artificial sequence
  Zc3h13.1777_Elf3.983
  crRNA array
cgatttcttggctttatatatcttgtggaaaggacgaaacaccgtaatttctactaagtgtagatgatgctgccagtgtagcggctaatttctactaagtgtagattaggccccctaactggaccattttttaagcttggcgtggatccgatatcaactagatcttgaga

SEQ ID NO: 9346 - DNA, 170 bp, Artificial sequence
  Zc3h13.1777_Ep300.310
  crRNA array
cgatttcttggctttatatatcttgtggaaaggacgaaacaccgtaatttctactaagtgtagatgatgctgccagtgtagcggctaatttctactaagtgtagatatggtacgacagtgaggaagttttttaagcttggcgtggatccgatatcaactagatcttgaga

SEQ ID NO: 9347 - DNA, 170 bp, Artificial sequence
  Zc3h13.1777_Ep300.587
  crRNA array
cgatttcttggctttatatatcttgtggaaaggacgaaacaccgtaatttctactaagtgtagatgatgctgccagtgtagcggctaatttctactaagtgtagatcgccccggggcccccaaccattttttaagcttggcgtggatccgatatcaactagatcttgaga

SEQ ID NO: 9348 - DNA, 170 bp, Artificial sequence
  Zc3h13.1777_Epha2.126
  crRNA array
cgatttcttggctttatatatcttgtggaaaggacgaaacaccgtaatttctactaagtgtagatgatgctgccagtgtagcggctaatttctactaagtgtagatcctgtgccgccgcggccgccttttttaagcttggcgtggatccgatatcaactagatcttgaga

SEQ ID NO: 9349 - DNA, 170 bp, Artificial sequence
  Zc3h13.1777_Epha2.5
  crRNA array
cgatttcttggctttatatatcttgtggaaaggacgaaacaccgtaatttctactaagtgtagatgatgctgccagtgtagcggctaatttctactaagtgtagatcatgagctggcgccacccggttttttaagcttggcgtggatccgatatcaactagatcttgaga

SEQ ID NO: 9350 - DNA, 170 bp, Artificial sequence
  Zc3h13.1777_Fat1.105
  crRNA array
cgatttcttggctttatatatcttgtggaaaggacgaaacaccgtaatttctactaagtgtagatgatgctgccagtgtagcggctaatttctactaagtgtagataactcgaggtgacaacaagtttttttaagcttggcgtggatccgatatcaactagatcttgaga

SEQ ID NO: 9351 - DNA, 170 bp, Artificial sequence
  Zc3h13.1777_Fat1.122
  crRNA array
cgatttcttggctttatatatcttgtggaaaggacgaaacaccgtaatttctactaagtgtagatgatgctgccagtgtagcggctaatttctactaagtgtagatccatcgacatggaaacgggattttttaagcttggcgtggatccgatatcaactagatcttgaga

SEQ ID NO: 9352 - DNA, 170 bp, Artificial sequence
  Zc3h13.1777_Fbxw7.21
  crRNA array
cgatttcttggctttatatatcttgtggaaaggacgaaacaccgtaatttctactaagtgtagatgatgctgccagtgtagcggctaatttctactaagtgtagattaatgtgccgtagaaacccattttttaagcttggcgtggatccgatatcaactagatcttgaga

SEQ ID NO: 9353 - DNA, 170 bp, Artificial sequence
  Zc3h13.1777_Fbxw7.23
  crRNA array
cgatttcttggctttatatatcttgtggaaaggacgaaacaccgtaatttctactaagtgtagatgatgctgccagtgtagcggctaatttctactaagtgtagatatgtgccgtagaaacccatattttttaagcttggcgtggatccgatatcaactagatcttgaga

SEQ ID NO: 9354 - DNA, 170 bp, Artificial sequence
  Zc3h13.1777_Gata3.34
  crRNA array
cgatttcttggctttatatatcttgtggaaaggacgaaacaccgtaatttctactaagtgtagatgatgctgccagtgtagcggctaatttctactaagtgtagatctaaactatcccgcaaagatttttttaagcttggcgtggatccgatatcaactagatcttgaga

SEQ ID NO: 9355 - DNA, 170 bp, Artificial sequence
  Zc3h13.1777_Gata3.47
  crRNA array
cgatttcttggctttatatatcttgtggaaaggacgaaacaccgtaatttctactaagtgtagatgatgctgccagtgtagcggctaatttctactaagtgtagatcgtagtaggacgggacgtggttttttaagcttggcgtggatccgatatcaactagatcttgaga

SEQ ID NO: 9356 - DNA, 170 bp, Artificial sequence
  Zc3h13.1777_H2-Q2.1
  crRNA array
cgatttcttggctttatatatcttgtggaaaggacgaaacaccgtaatttctactaagtgtagatgatgctgccagtgtagcggctaatttctactaagtgtagatagggcggccaccaacagcagttttttaagcttggcgtggatccgatatcaactagatcttgaga

SEQ ID NO: 9357 - DNA, 170 bp, Artificial sequence
  Zc3h13.1777_H2-Q2.2
  crRNA array
cgatttcttggctttatatatcttgtggaaaggacgaaacaccgtaatttctactaagtgtagatgatgctgccagtgtagcggctaatttctactaagtgtagattaacctgcgcccgctgctgattttttaagcttggcgtggatccgatatcaactagatcttgaga

SEQ ID NO: 9358 - DNA, 170 bp, Artificial sequence
  Zc3h13.1777_Kdm5c.1878
  crRNA array
cgatttcttggctttatatatcttgtggaaaggacgaaacaccgtaatttctactaagtgtagatgatgctgccagtgtagcggctaatttctactaagtgtagatagagcacggcacccgcccccttttttaagcttggcgtggatccgatatcaactagatcttgaga

SEQ ID NO: 9359 - DNA, 170 bp, Artificial sequence
  Zc3h13.1777_Kdm5c.1879
  crRNA array
cgatttcttggctttatatatcttgtggaaaggacgaaacaccgtaatttctactaagtgtagatgatgctgccagtgtagcggctaatttctactaagtgtagatgagcacggcacccgccccccttttttaagcttggcgtggatccgatatcaactagatcttgaga

SEQ ID NO: 9360 - DNA, 170 bp, Artificial sequence
  Zc3h13.1777_Kdm6a.56
  crRNA array
cgatttcttggctttatatatcttgtggaaaggacgaaacaccgtaatttctactaagtgtagatgatgctgccagtgtagcggctaatttctactaagtgtagattcgctgccgcctctcgcggcttttttaagcttggcgtggatccgatatcaactagatcttgaga

SEQ ID NO: 9361 - DNA, 170 bp, Artificial sequence
  Zc3h13.1777_Kdm6a.57
  crRNA array
cgatttcttggctttatatatcttgtggaaaggacgaaacaccgtaatttctactaagtgtagatgatgctgccagtgtagcggctaatttctactaagtgtagatcgctgccgcctctcgcggcattttttaagcttggcgtggatccgatatcaactagatcttgaga

SEQ ID NO: 9362 - DNA, 170 bp, Artificial sequence
  Zc3h13.1777_Kmt2b.265
  crRNA array
cgatttcttggctttatatatcttgtggaaaggacgaaacaccgtaatttctactaagtgtagatgatgctgccagtgtagcggctaatttctactaagtgtagatccccaagtgaagcccacctgttttttaagcttggcgtggatccgatatcaactagatcttgaga

SEQ ID NO: 9363 - DNA, 170 bp, Artificial sequence
  Zc3h13.1777_Kmt2b.298
  crRNA array
cgatttcttggctttatatatcttgtggaaaggacgaaacaccgtaatttctactaagtgtagatgatgctgccagtgtagcggctaatttctactaagtgtagattccggcagggaccggctggcttttttaagcttggcgtggatccgatatcaactagatcttgaga

SEQ ID NO: 9364 - DNA, 170 bp, Artificial sequence
  Zc3h13.1777_Kmt2c.1962
  crRNA array
cgatttcttggctttatatatcttgtggaaaggacgaaacaccgtaatttctactaagtgtagatgatgctgccagtgtagcggctaatttctactaagtgtagatgtgacgatctgtgccacaagttttttaagcttggcgtggatccgatatcaactagatcttgaga

SEQ ID NO: 9365 - DNA, 170 bp, Artificial sequence
  Zc3h13.1777_Kmt2c.2236
  crRNA array
cgatttcttggctttatatatcttgtggaaaggacgaaacaccgtaatttctactaagtgtagatgatgctgccagtgtagcggctaatttctactaagtgtagatactcgacctccacctccctattttttaagcttggcgtggatccgatatcaactagatcttgaga

SEQ ID NO: 9366 - DNA, 170 bp, Artificial sequence
  Zc3h13.1777_Kmt2d.316
  crRNA array
cgatttcttggctttatatatcttgtggaaaggacgaaacaccgtaatttctactaagtgtagatgatgctgccagtgtagcggctaatttctactaagtgtagatactccaggccacccaggtggttttttaagcttggcgtggatccgatatcaactagatcttgaga

SEQ ID NO: 9367 - DNA, 170 bp, Artificial sequence
  Zc3h13.1777_Kmt2d.416
  crRNA array
cgatttcttggctttatatatcttgtggaaaggacgaaacaccgtaatttctactaagtgtagatgatgctgccagtgtagcggctaatttctactaagtgtagattaaacccccgggggaagggtttttttaagcttggcgtggatccgatatcaactagatcttgaga

SEQ ID NO: 9368 - DNA, 170 bp, Artificial sequence
  Zc3h13.1777_Map2k4.119
  crRNA array
cgatttcttggctttatatatcttgtggaaaggacgaaacaccgtaatttctactaagtgtagatgatgctgccagtgtagcggctaatttctactaagtgtagattgctgtgtgggcggccacatttttttaagcttggcgtggatccgatatcaactagatcttgaga

SEQ ID NO: 9369 - DNA, 170 bp, Artificial sequence
  Zc3h13.1777_Map2k4.1261
  crRNA array
cgatttcttggctttatatatcttgtggaaaggacgaaacaccgtaatttctactaagtgtagatgatgctgccagtgtagcggctaatttctactaagtgtagatgatgtagtaatgcggagtagttttttaagcttggcgtggatccgatatcaactagatcttgaga

SEQ ID NO: 9370 - DNA, 170 bp, Artificial sequence
  Zc3h13.1777_Map3k1.235
  crRNA array
cgatttcttggctttatatatcttgtggaaaggacgaaacaccgtaatttctactaagtgtagatgatgctgccagtgtagcggctaatttctactaagtgtagataaaacgctactgatcgatcgttttttaagcttggcgtggatccgatatcaactagatcttgaga

SEQ ID NO: 9371 - DNA, 170 bp, Artificial sequence
  Zc3h13.1777_Map3k1.3838
  crRNA array
cgatttcttggctttatatatcttgtggaaaggacgaaacaccgtaatttctactaagtgtagatgatgctgccagtgtagcggctaatttctactaagtgtagatccaacaacagggccccactattttttaagcttggcgtggatccgatatcaactagatcttgaga

SEQ ID NO: 9372 - DNA, 170 bp, Artificial sequence
  Zc3h13.1777_Mga.1655
  crRNA array
cgatttcttggctttatatatcttgtggaaaggacgaaacaccgtaatttctactaagtgtagatgatgctgccagtgtagcggctaatttctactaagtgtagatcgagaagtggagagcatattttttttaagcttggcgtggatccgatatcaactagatcttgaga

SEQ ID NO: 9373 - DNA, 170 bp, Artificial sequence
  Zc3h13.1777_Mga.93
  crRNA array
cgatttcttggctttatatatcttgtggaaaggacgaaacaccgtaatttctactaagtgtagatgatgctgccagtgtagcggctaatttctactaagtgtagatgagaaggctccccataatgtttttttaagcttggcgtggatccgatatcaactagatcttgaga

SEQ ID NO: 9374 - DNA, 170 bp, Artificial sequence
  Zc3h13.1777_Nf1.746
  crRNA array
cgatttcttggctttatatatcttgtggaaaggacgaaacaccgtaatttctactaagtgtagatgatgctgccagtgtagcggctaatttctactaagtgtagattaagcataatgatgatgccattttttaagcttggcgtggatccgatatcaactagatcttgaga

SEQ ID NO: 9375 - DNA, 170 bp, Artificial sequence
  Zc3h13.1777_Nf1.97
  crRNA array
cgatttcttggctttatatatcttgtggaaaggacgaaacaccgtaatttctactaagtgtagatgatgctgccagtgtagcggctaatttctactaagtgtagatagcccgctacatgctgatgcttttttaagcttggcgtggatccgatatcaactagatcttgaga

SEQ ID NO: 9376 - DNA, 170 bp, Artificial sequence
  Zc3h13.1777_Nf2.356
  crRNA array
cgatttcttggctttatatatcttgtggaaaggacgaaacaccgtaatttctactaagtgtagatgatgctgccagtgtagcggctaatttctactaagtgtagatcggagtcatctgatagagatttttttaagcttggcgtggatccgatatcaactagatcttgaga

SEQ ID NO: 9377 - DNA, 170 bp, Artificial sequence
  Zc3h13.1777_Nf2.768
  crRNA array
cgatttcttggctttatatatcttgtggaaaggacgaaacaccgtaatttctactaagtgtagatgatgctgccagtgtagcggctaatttctactaagtgtagatccgaagccccagtgtccggcttttttaagcttggcgtggatccgatatcaactagatcttgaga

SEQ ID NO: 9378 - DNA, 170 bp, Artificial sequence
  Zc3h13.1777_Notch1.1849
  crRNA array
cgatttcttggctttatatatcttgtggaaaggacgaaacaccgtaatttctactaagtgtagatgatgctgccagtgtagcggctaatttctactaagtgtagatctggcgggtgggcggcgctgttttttaagcttggcgtggatccgatatcaactagatcttgaga

SEQ ID NO: 9379 - DNA, 170 bp, Artificial sequence
  Zc3h13.1777_Notch1.649
  crRNA array
cgatttcttggctttatatatcttgtggaaaggacgaaacaccgtaatttctactaagtgtagatgatgctgccagtgtagcggctaatttctactaagtgtagattgggccaacgatgccaggacttttttaagcttggcgtggatccgatatcaactagatcttgaga

SEQ ID NO: 9380 - DNA, 170 bp, Artificial sequence
  Zc3h13.1777_Nsd1.70
  crRNA array
cgatttcttggctttatatatcttgtggaaaggacgaaacaccgtaatttctactaagtgtagatgatgctgccagtgtagcggctaatttctactaagtgtagatactggtgtggacgatgcagattttttaagcttggcgtggatccgatatcaactagatcttgaga

SEQ ID NO: 9381 - DNA, 170 bp, Artificial sequence
  Zc3h13.1777_Nsd1.90
  crRNA array
cgatttcttggctttatatatcttgtggaaaggacgaaacaccgtaatttctactaagtgtagatgatgctgccagtgtagcggctaatttctactaagtgtagataggagctaacggcaagaatgttttttaagcttggcgtggatccgatatcaactagatcttgaga

SEQ ID NO: 9382 - DNA, 170 bp, Artificial sequence
  Zc3h13.1777_Pbrm1.1236
  crRNA array
cgatttcttggctttatatatcttgtggaaaggacgaaacaccgtaatttctactaagtgtagatgatgctgccagtgtagcggctaatttctactaagtgtagatgccgataaaaccaacagccgttttttaagcttggcgtggatccgatatcaactagatcttgaga

SEQ ID NO: 9383 - DNA, 170 bp, Artificial sequence
  Zc3h13.1777_Pbrm1.969
  crRNA array
cgatttcttggctttatatatcttgtggaaaggacgaaacaccgtaatttctactaagtgtagatgatgctgccagtgtagcggctaatttctactaagtgtagatgagccctaatgaacagctcattttttaagcttggcgtggatccgatatcaactagatcttgaga

SEQ ID NO: 9384 - DNA, 170 bp, Artificial sequence
  Zc3h13.1777_Pik3r1.76
  crRNA array
cgatttcttggctttatatatcttgtggaaaggacgaaacaccgtaatttctactaagtgtagatgatgctgccagtgtagcggctaatttctactaagtgtagataaaacctatacggcccgcacttttttaagcttggcgtggatccgatatcaactagatcttgaga

SEQ ID NO: 9385 - DNA, 170 bp, Artificial sequence
  Zc3h13.1777_Pik3r1.77
  crRNA array
cgatttcttggctttatatatcttgtggaaaggacgaaacaccgtaatttctactaagtgtagatgatgctgccagtgtagcggctaatttctactaagtgtagataaacctatacggcccgcactttttttaagcttggcgtggatccgatatcaactagatcttgaga

SEQ ID NO: 9386 - DNA, 170 bp, Artificial sequence
  Zc3h13.1777_Pten.240
  crRNA array
cgatttcttggctttatatatcttgtggaaaggacgaaacaccgtaatttctactaagtgtagatgatgctgccagtgtagcggctaatttctactaagtgtagattgcatacgctatagctgcttttttttaagcttggcgtggatccgatatcaactagatcttgaga

SEQ ID NO: 9387 - DNA, 170 bp, Artificial sequence
  Zc3h13.1777_Pten.265
  crRNA array
cgatttcttggctttatatatcttgtggaaaggacgaaacaccgtaatttctactaagtgtagatgatgctgccagtgtagcggctaatttctactaagtgtagataagcgtggtgcgtgacgcacttttttaagcttggcgtggatccgatatcaactagatcttgaga

SEQ ID NO: 9388 - DNA, 170 bp, Artificial sequence
  Zc3h13.1777_Rasa1.1478
  crRNA array
cgatttcttggctttatatatcttgtggaaaggacgaaacaccgtaatttctactaagtgtagatgatgctgccagtgtagcggctaatttctactaagtgtagatcgataatggtctatgatgtcttttttaagcttggcgtggatccgatatcaactagatcttgaga

SEQ ID NO: 9389 - DNA, 170 bp, Artificial sequence
  Zc3h13.1777_Rasa1.223
  crRNA array
cgatttcttggctttatatatcttgtggaaaggacgaaacaccgtaatttctactaagtgtagatgatgctgccagtgtagcggctaatttctactaagtgtagattccatggagtatcgtgctcgttttttaagcttggcgtggatccgatatcaactagatcttgaga

SEQ ID NO: 9390 - DNA, 170 bp, Artificial sequence
  Zc3h13.1777_Rb1.211
  crRNA array
cgatttcttggctttatatatcttgtggaaaggacgaaacaccgtaatttctactaagtgtagatgatgctgccagtgtagcggctaatttctactaagtgtagattctgacatgatcgggtacctttttttaagcttggcgtggatccgatatcaactagatcttgaga

SEQ ID NO: 9391 - DNA, 170 bp, Artificial sequence
  Zc3h13.1777_Rb1.394
  crRNA array
cgatttcttggctttatatatcttgtggaaaggacgaaacaccgtaatttctactaagtgtagatgatgctgccagtgtagcggctaatttctactaagtgtagatagaaatctcgaagcaggatcttttttaagcttggcgtggatccgatatcaactagatcttgaga

SEQ ID NO: 9392 - DNA, 170 bp, Artificial sequence
  Zc3h13.1777_Rbm10.5
  crRNA array
cgatttcttggctttatatatcttgtggaaaggacgaaacaccgtaatttctactaagtgtagatgatgctgccagtgtagcggctaatttctactaagtgtagatacgaaacctgaacccacacattttttaagcttggcgtggatccgatatcaactagatcttgaga

SEQ ID NO: 9393 - DNA, 170 bp, Artificial sequence
  Zc3h13.1777_Rbm10.6
  crRNA array
cgatttcttggctttatatatcttgtggaaaggacgaaacaccgtaatttctactaagtgtagatgatgctgccagtgtagcggctaatttctactaagtgtagatcgaaacctgaacccacacagttttttaagcttggcgtggatccgatatcaactagatcttgaga

SEQ ID NO: 9394 - DNA, 170 bp, Artificial sequence
  Zc3h13.1777_Rnf43.1920
  crRNA array
cgatttcttggctttatatatcttgtggaaaggacgaaacaccgtaatttctactaagtgtagatgatgctgccagtgtagcggctaatttctactaagtgtagatatccccgtgccgtggactccttttttaagcttggcgtggatccgatatcaactagatcttgaga

SEQ ID NO: 9395 - DNA, 170 bp, Artificial sequence
  Zc3h13.1777_Rnf43.39
  crRNA array
cgatttcttggctttatatatcttgtggaaaggacgaaacaccgtaatttctactaagtgtagatgatgctgccagtgtagcggctaatttctactaagtgtagatcaaggggatcactctgataattttttaagcttggcgtggatccgatatcaactagatcttgaga

SEQ ID NO: 9396 - DNA, 170 bp, Artificial sequence
  Zc3h13.1777_Runx1.204
  crRNA array
cgatttcttggctttatatatcttgtggaaaggacgaaacaccgtaatttctactaagtgtagatgatgctgccagtgtagcggctaatttctactaagtgtagattaaataagtccagccgttttttttttaagcttggcgtggatccgatatcaactagatcttgaga

SEQ ID NO: 9397 - DNA, 170 bp, Artificial sequence
  Zc3h13.1777_Runx1.81
  crRNA array
cgatttcttggctttatatatcttgtggaaaggacgaaacaccgtaatttctactaagtgtagatgatgctgccagtgtagcggctaatttctactaagtgtagataggacgcgtatgggaattttttttttaagcttggcgtggatccgatatcaactagatcttgaga

SEQ ID NO: 9398 - DNA, 170 bp, Artificial sequence
  Zc3h13.1777_Setd2.143
  crRNA array
cgatttcttggctttatatatcttgtggaaaggacgaaacaccgtaatttctactaagtgtagatgatgctgccagtgtagcggctaatttctactaagtgtagatgcacaaccacaacagactggttttttaagcttggcgtggatccgatatcaactagatcttgaga

SEQ ID NO: 9399 - DNA, 170 bp, Artificial sequence
  Zc3h13.1777_Setd2.508
  crRNA array
cgatttcttggctttatatatcttgtggaaaggacgaaacaccgtaatttctactaagtgtagatgatgctgccagtgtagcggctaatttctactaagtgtagattacgatcccgagcacccgacttttttaagcttggcgtggatccgatatcaactagatcttgaga

SEQ ID NO: 9400 - DNA, 170 bp, Artificial sequence
  Zc3h13.1777_Smad4.3038
  crRNA array
cgatttcttggctttatatatcttgtggaaaggacgaaacaccgtaatttctactaagtgtagatgatgctgccagtgtagcggctaatttctactaagtgtagatatctgcggcagtgtcaccggttttttaagcttggcgtggatccgatatcaactagatcttgaga

SEQ ID NO: 9401 - DNA, 170 bp, Artificial sequence
  Zc3h13.1777_Smad4.39
  crRNA array
cgatttcttggctttatatatcttgtggaaaggacgaaacaccgtaatttctactaagtgtagatgatgctgccagtgtagcggctaatttctactaagtgtagatagtcaaacgcatactgacaattttttaagcttggcgtggatccgatatcaactagatcttgaga

SEQ ID NO: 9402 - DNA, 170 bp, Artificial sequence
  Zc3h13.1777_Stag2.1409
  crRNA array
cgatttcttggctttatatatcttgtggaaaggacgaaacaccgtaatttctactaagtgtagatgatgctgccagtgtagcggctaatttctactaagtgtagatgctaataactgcggaagggcttttttaagcttggcgtggatccgatatcaactagatcttgaga

SEQ ID NO: 9403 - DNA, 170 bp, Artificial sequence
  Zc3h13.1777_Stag2.4401
  crRNA array
cgatttcttggctttatatatcttgtggaaaggacgaaacaccgtaatttctactaagtgtagatgatgctgccagtgtagcggctaatttctactaagtgtagattaatcgtccagtggtgtatattttttaagcttggcgtggatccgatatcaactagatcttgaga

SEQ ID NO: 9404 - DNA, 170 bp, Artificial sequence
  Zc3h13.1777_Tbl1xr1.1
  crRNA array
cgatttcttggctttatatatcttgtggaaaggacgaaacaccgtaatttctactaagtgtagatgatgctgccagtgtagcggctaatttctactaagtgtagatggatgcgcatactggtgaagttttttaagcttggcgtggatccgatatcaactagatcttgaga

SEQ ID NO: 9405 - DNA, 170 bp, Artificial sequence
  Zc3h13.1777_Tbl1xr1.83
  crRNA array
cgatttcttggctttatatatcttgtggaaaggacgaaacaccgtaatttctactaagtgtagatgatgctgccagtgtagcggctaatttctactaagtgtagatatggtcgacccatcgagtctttttttaagcttggcgtggatccgatatcaactagatcttgaga

SEQ ID NO: 9406 - DNA, 170 bp, Artificial sequence
  Zc3h13.1777_Tgfbr2.290
  crRNA array
cgatttcttggctttatatatcttgtggaaaggacgaaacaccgtaatttctactaagtgtagatgatgctgccagtgtagcggctaatttctactaagtgtagatcctctcggcgcccgggtaaattttttaagcttggcgtggatccgatatcaactagatcttgaga

SEQ ID NO: 9407 - DNA, 170 bp, Artificial sequence
  Zc3h13.1777_Tgfbr2.292
  crRNA array
cgatttcttggctttatatatcttgtggaaaggacgaaacaccgtaatttctactaagtgtagatgatgctgccagtgtagcggctaatttctactaagtgtagatcccgggcgccgagagggaaattttttaagcttggcgtggatccgatatcaactagatcttgaga

SEQ ID NO: 9408 - DNA, 170 bp, Artificial sequence
  Zc3h13.1777_Trp53.4
  crRNA array
cgatttcttggctttatatatcttgtggaaaggacgaaacaccgtaatttctactaagtgtagatgatgctgccagtgtagcggctaatttctactaagtgtagatccctgaactgcccccagggattttttaagcttggcgtggatccgatatcaactagatcttgaga

SEQ ID NO: 9409 - DNA, 170 bp, Artificial sequence
  Zc3h13.1777_Trp53.528
  crRNA array
cgatttcttggctttatatatcttgtggaaaggacgaaacaccgtaatttctactaagtgtagatgatgctgccagtgtagcggctaatttctactaagtgtagatgctgggccagcagagacctgttttttaagcttggcgtggatccgatatcaactagatcttgaga

SEQ ID NO: 9410 - DNA, 170 bp, Artificial sequence
  Zc3h13.1777_Vhl.1
  crRNA array
cgatttcttggctttatatatcttgtggaaaggacgaaacaccgtaatttctactaagtgtagatgatgctgccagtgtagcggctaatttctactaagtgtagatagggctcccggcggccatttttttttaagcttggcgtggatccgatatcaactagatcttgaga

SEQ ID NO: 9411 - DNA, 170 bp, Artificial sequence
  Zc3h13.1777_Vhl.151
  crRNA array
cgatttcttggctttatatatcttgtggaaaggacgaaacaccgtaatttctactaagtgtagatgatgctgccagtgtagcggctaatttctactaagtgtagattagagcactcacccgagggattttttaagcttggcgtggatccgatatcaactagatcttgaga

SEQ ID NO: 9412 - DNA, 170 bp, Artificial sequence
  Acvr2a.155_NTC.0
  crRNA array
cgatttcttggctttatatatcttgtggaaaggacgaaacaccgtaatttctactaagtgtagatggacctggctaatcaagtattaatttctactaagtgtagatacgacttcaatcccccactattttttaagcttggcgtggatccgatatcaactagatcttgaga

SEQ ID NO: 9413 - DNA, 170 bp, Artificial sequence
  Acvr2a.155_NTC.57
  crRNA array
cgatttcttggctttatatatcttgtggaaaggacgaaacaccgtaatttctactaagtgtagatggacctggctaatcaagtattaatttctactaagtgtagatagcgtaacgtgtgcgagtcgttttttaagcttggcgtggatccgatatcaactagatcttgaga

SEQ ID NO: 9414 - DNA, 170 bp, Artificial sequence
  Acvr2a.155_NTC.89
  crRNA array
cgatttcttggctttatatatcttgtggaaaggacgaaacaccgtaatttctactaagtgtagatggacctggctaatcaagtattaatttctactaagtgtagatcctcgccaggtcgttggtatttttttaagcttggcgtggatccgatatcaactagatcttgaga

SEQ ID NO: 9415 - DNA, 170 bp, Artificial sequence
  Acvr2a.70_NTC.0
  crRNA array
cgatttcttggctttatatatcttgtggaaaggacgaaacaccgtaatttctactaagtgtagatcccgaggcgccggagaagcctaatttctactaagtgtagatacgacttcaatcccccactattttttaagcttggcgtggatccgatatcaactagatcttgaga

SEQ ID NO: 9416 - DNA, 170 bp, Artificial sequence
  Acvr2a.70_NTC.57
  crRNA array
cgatttcttggctttatatatcttgtggaaaggacgaaacaccgtaatttctactaagtgtagatcccgaggcgccggagaagcctaatttctactaagtgtagatagcgtaacgtgtgcgagtcgttttttaagcttggcgtggatccgatatcaactagatcttgaga

SEQ ID NO: 9417 - DNA, 170 bp, Artificial sequence
  Acvr2a.70_NTC.89
  crRNA array
cgatttcttggctttatatatcttgtggaaaggacgaaacaccgtaatttctactaagtgtagatcccgaggcgccggagaagcctaatttctactaagtgtagatcctcgccaggtcgttggtatttttttaagcttggcgtggatccgatatcaactagatcttgaga

SEQ ID NO: 9418 - DNA, 170 bp, Artificial sequence
  Apc.21_NTC.0
  crRNA array
cgatttcttggctttatatatcttgtggaaaggacgaaacaccgtaatttctactaagtgtagatgtgatccacacgtgtagctgtaatttctactaagtgtagatacgacttcaatcccccactattttttaagcttggcgtggatccgatatcaactagatcttgaga

SEQ ID NO: 9419 - DNA, 170 bp, Artificial sequence
  Apc.21_NTC.57
  crRNA array
cgatttcttggctttatatatcttgtggaaaggacgaaacaccgtaatttctactaagtgtagatgtgatccacacgtgtagctgtaatttctactaagtgtagatagcgtaacgtgtgcgagtcgttttttaagcttggcgtggatccgatatcaactagatcttgaga

SEQ ID NO: 9420 - DNA, 170 bp, Artificial sequence
  Apc.21_NTC.89
  crRNA array
cgatttcttggctttatatatcttgtggaaaggacgaaacaccgtaatttctactaagtgtagatgtgatccacacgtgtagctgtaatttctactaagtgtagatcctcgccaggtcgttggtatttttttaagcttggcgtggatccgatatcaactagatcttgaga

SEQ ID NO: 9421 - DNA, 170 bp, Artificial sequence
  Apc.867_NTC.0
  crRNA array
cgatttcttggctttatatatcttgtggaaaggacgaaacaccgtaatttctactaagtgtagatcagtcccaggcggcggaagctaatttctactaagtgtagatacgacttcaatcccccactattttttaagcttggcgtggatccgatatcaactagatcttgaga

SEQ ID NO: 9422 - DNA, 170 bp, Artificial sequence
  Apc.867_NTC.57
  crRNA array
cgatttcttggctttatatatcttgtggaaaggacgaaacaccgtaatttctactaagtgtagatcagtcccaggcggcggaagctaatttctactaagtgtagatagcgtaacgtgtgcgagtcgttttttaagcttggcgtggatccgatatcaactagatcttgaga

SEQ ID NO: 9423 - DNA, 170 bp, Artificial sequence
  Apc.867_NTC.89
  crRNA array
cgatttcttggctttatatatcttgtggaaaggacgaaacaccgtaatttctactaagtgtagatcagtcccaggcggcggaagctaatttctactaagtgtagatcctcgccaggtcgttggtatttttttaagcttggcgtggatccgatatcaactagatcttgaga

SEQ ID NO: 9424 - DNA, 170 bp, Artificial sequence
  Arid1a.2_NTC.0
  crRNA array
cgatttcttggctttatatatcttgtggaaaggacgaaacaccgtaatttctactaagtgtagatcccgcgcccccgtcctggggtaatttctactaagtgtagatacgacttcaatcccccactattttttaagcttggcgtggatccgatatcaactagatcttgaga

SEQ ID NO: 9425 - DNA, 170 bp, Artificial sequence
  Arid1a.2_NTC.57
  crRNA array
cgatttcttggctttatatatcttgtggaaaggacgaaacaccgtaatttctactaagtgtagatcccgcgcccccgtcctggggtaatttctactaagtgtagatagcgtaacgtgtgcgagtcgttttttaagcttggcgtggatccgatatcaactagatcttgaga

SEQ ID NO: 9426 - DNA, 170 bp, Artificial sequence
  Arid1a.2_NTC.89
  crRNA array
cgatttcttggctttatatatcttgtggaaaggacgaaacaccgtaatttctactaagtgtagatcccgcgcccccgtcctggggtaatttctactaagtgtagatcctcgccaggtcgttggtatttttttaagcttggcgtggatccgatatcaactagatcttgaga

SEQ ID NO: 9427 - DNA, 170 bp, Artificial sequence
  Arid1a.5_NTC.0
  crRNA array
cgatttcttggctttatatatcttgtggaaaggacgaaacaccgtaatttctactaagtgtagatcccgcgctcggccgctgccgtaatttctactaagtgtagatacgacttcaatcccccactattttttaagcttggcgtggatccgatatcaactagatcttgaga

SEQ ID NO: 9428 - DNA, 170 bp, Artificial sequence
  Arid1a.5_NTC.57
  crRNA array
cgatttcttggctttatatatcttgtggaaaggacgaaacaccgtaatttctactaagtgtagatcccgcgctcggccgctgccgtaatttctactaagtgtagatagcgtaacgtgtgcgagtcgttttttaagcttggcgtggatccgatatcaactagatcttgaga

SEQ ID NO: 9429 - DNA, 170 bp, Artificial sequence
  Arid1a.5_NTC.89
  crRNA array
cgatttcttggctttatatatcttgtggaaaggacgaaacaccgtaatttctactaagtgtagatcccgcgctcggccgctgccgtaatttctactaagtgtagatcctcgccaggtcgttggtatttttttaagcttggcgtggatccgatatcaactagatcttgaga

SEQ ID NO: 9430 - DNA, 170 bp, Artificial sequence
  Arid2.166_NTC.0
  crRNA array
cgatttcttggctttatatatcttgtggaaaggacgaaacaccgtaatttctactaagtgtagataaccgcgatctgggtttttttaatttctactaagtgtagatacgacttcaatcccccactattttttaagcttggcgtggatccgatatcaactagatcttgaga

SEQ ID NO: 9431 - DNA, 170 bp, Artificial sequence
  Arid2.166_NTC.57
  crRNA array
cgatttcttggctttatatatcttgtggaaaggacgaaacaccgtaatttctactaagtgtagataaccgcgatctgggtttttttaatttctactaagtgtagatagcgtaacgtgtgcgagtcgttttttaagcttggcgtggatccgatatcaactagatcttgaga

SEQ ID NO: 9432 - DNA, 170 bp, Artificial sequence
  Arid2.166_NTC.89
  crRNA array
cgatttcttggctttatatatcttgtggaaaggacgaaacaccgtaatttctactaagtgtagataaccgcgatctgggtttttttaatttctactaagtgtagatcctcgccaggtcgttggtatttttttaagcttggcgtggatccgatatcaactagatcttgaga

SEQ ID NO: 9433 - DNA, 170 bp, Artificial sequence
  Arid2.172_NTC.0
  crRNA array
cgatttcttggctttatatatcttgtggaaaggacgaaacaccgtaatttctactaagtgtagatctggacgagctgcggcagtttaatttctactaagtgtagatacgacttcaatcccccactattttttaagcttggcgtggatccgatatcaactagatcttgaga

SEQ ID NO: 9434 - DNA, 170 bp, Artificial sequence
  Arid2.172_NTC.57
  crRNA array
cgatttcttggctttatatatcttgtggaaaggacgaaacaccgtaatttctactaagtgtagatctggacgagctgcggcagtttaatttctactaagtgtagatagcgtaacgtgtgcgagtcgttttttaagcttggcgtggatccgatatcaactagatcttgaga

SEQ ID NO: 9435 - DNA, 170 bp, Artificial sequence
  Arid2.172_NTC.89
  crRNA array
cgatttcttggctttatatatcttgtggaaaggacgaaacaccgtaatttctactaagtgtagatctggacgagctgcggcagtttaatttctactaagtgtagatcctcgccaggtcgttggtatttttttaagcttggcgtggatccgatatcaactagatcttgaga

SEQ ID NO: 9436 - DNA, 170 bp, Artificial sequence
  Atm.120_NTC.0
  crRNA array
cgatttcttggctttatatatcttgtggaaaggacgaaacaccgtaatttctactaagtgtagatgacaggtagtcggcagctaataatttctactaagtgtagatacgacttcaatcccccactattttttaagcttggcgtggatccgatatcaactagatcttgaga

SEQ ID NO: 9437 - DNA, 170 bp, Artificial sequence
  Atm.120_NTC.57
  crRNA array
cgatttcttggctttatatatcttgtggaaaggacgaaacaccgtaatttctactaagtgtagatgacaggtagtcggcagctaataatttctactaagtgtagatagcgtaacgtgtgcgagtcgttttttaagcttggcgtggatccgatatcaactagatcttgaga

SEQ ID NO: 9438 - DNA, 170 bp, Artificial sequence
  Atm.120_NTC.89
  crRNA array
cgatttcttggctttatatatcttgtggaaaggacgaaacaccgtaatttctactaagtgtagatgacaggtagtcggcagctaataatttctactaagtgtagatcctcgccaggtcgttggtatttttttaagcttggcgtggatccgatatcaactagatcttgaga

SEQ ID NO: 9439 - DNA, 170 bp, Artificial sequence
  Atm.997_NTC.0
  crRNA array
cgatttcttggctttatatatcttgtggaaaggacgaaacaccgtaatttctactaagtgtagatgagaaagtctccgaatcgtttaatttctactaagtgtagatacgacttcaatcccccactattttttaagcttggcgtggatccgatatcaactagatcttgaga

SEQ ID NO: 9440 - DNA, 170 bp, Artificial sequence
  Atm.997_NTC.57
  crRNA array
cgatttcttggctttatatatcttgtggaaaggacgaaacaccgtaatttctactaagtgtagatgagaaagtctccgaatcgtttaatttctactaagtgtagatagcgtaacgtgtgcgagtcgttttttaagcttggcgtggatccgatatcaactagatcttgaga

SEQ ID NO: 9441 - DNA, 170 bp, Artificial sequence
  Atm.997_NTC.89
  crRNA array
cgatttcttggctttatatatcttgtggaaaggacgaaacaccgtaatttctactaagtgtagatgagaaagtctccgaatcgtttaatttctactaagtgtagatcctcgccaggtcgttggtatttttttaagcttggcgtggatccgatatcaactagatcttgaga

SEQ ID NO: 9442 - DNA, 170 bp, Artificial sequence
  Atrx.249_NTC.0
  crRNA array
cgatttcttggctttatatatcttgtggaaaggacgaaacaccgtaatttctactaagtgtagattagccagtcgctcatatctctaatttctactaagtgtagatacgacttcaatcccccactattttttaagcttggcgtggatccgatatcaactagatcttgaga

SEQ ID NO: 9443 - DNA, 170 bp, Artificial sequence
  Atrx.249_NTC.57
  crRNA array
cgatttcttggctttatatatcttgtggaaaggacgaaacaccgtaatttctactaagtgtagattagccagtcgctcatatctctaatttctactaagtgtagatagcgtaacgtgtgcgagtcgttttttaagcttggcgtggatccgatatcaactagatcttgaga

SEQ ID NO: 9444 - DNA, 170 bp, Artificial sequence
  Atrx.249_NTC.89
  crRNA array
cgatttcttggctttatatatcttgtggaaaggacgaaacaccgtaatttctactaagtgtagattagccagtcgctcatatctctaatttctactaagtgtagatcctcgccaggtcgttggtatttttttaagcttggcgtggatccgatatcaactagatcttgaga

SEQ ID NO: 9445 - DNA, 170 bp, Artificial sequence
  Atrx.251_NTC.0
  crRNA array
cgatttcttggctttatatatcttgtggaaaggacgaaacaccgtaatttctactaagtgtagatgccagtcgctcatatctctgtaatttctactaagtgtagatacgacttcaatcccccactattttttaagcttggcgtggatccgatatcaactagatcttgaga

SEQ ID NO: 9446 - DNA, 170 bp, Artificial sequence
  Atrx.251_NTC.57
  crRNA array
cgatttcttggctttatatatcttgtggaaaggacgaaacaccgtaatttctactaagtgtagatgccagtcgctcatatctctgtaatttctactaagtgtagatagcgtaacgtgtgcgagtcgttttttaagcttggcgtggatccgatatcaactagatcttgaga

SEQ ID NO: 9447 - DNA, 170 bp, Artificial sequence
  Atrx.251_NTC.89
  crRNA array
cgatttcttggctttatatatcttgtggaaaggacgaaacaccgtaatttctactaagtgtagatgccagtcgctcatatctctgtaatttctactaagtgtagatcctcgccaggtcgttggtatttttttaagcttggcgtggatccgatatcaactagatcttgaga

SEQ ID NO: 9448 - DNA, 170 bp, Artificial sequence
  Bcor.203_NTC.0
  crRNA array
cgatttcttggctttatatatcttgtggaaaggacgaaacaccgtaatttctactaagtgtagatccccggagcggagtccaggctaatttctactaagtgtagatacgacttcaatcccccactattttttaagcttggcgtggatccgatatcaactagatcttgaga

SEQ ID NO: 9449 - DNA, 170 bp, Artificial sequence
  Bcor.203_NTC.57
  crRNA array
cgatttcttggctttatatatcttgtggaaaggacgaaacaccgtaatttctactaagtgtagatccccggagcggagtccaggctaatttctactaagtgtagatagcgtaacgtgtgcgagtcgttttttaagcttggcgtggatccgatatcaactagatcttgaga

SEQ ID NO: 9450 - DNA, 170 bp, Artificial sequence
  Bcor.203_NTC.89
  crRNA array
cgatttcttggctttatatatcttgtggaaaggacgaaacaccgtaatttctactaagtgtagatccccggagcggagtccaggctaatttctactaagtgtagatcctcgccaggtcgttggtatttttttaagcttggcgtggatccgatatcaactagatcttgaga

SEQ ID NO: 9451 - DNA, 170 bp, Artificial sequence
  Bcor.475_NTC.0
  crRNA array
cgatttcttggctttatatatcttgtggaaaggacgaaacaccgtaatttctactaagtgtagattgcaacccctctgtatgggataatttctactaagtgtagatacgacttcaatcccccactattttttaagcttggcgtggatccgatatcaactagatcttgaga

SEQ ID NO: 9452 - DNA, 170 bp, Artificial sequence
  Bcor.475_NTC.57
  crRNA array
cgatttcttggctttatatatcttgtggaaaggacgaaacaccgtaatttctactaagtgtagattgcaacccctctgtatgggataatttctactaagtgtagatagcgtaacgtgtgcgagtcgttttttaagcttggcgtggatccgatatcaactagatcttgaga

SEQ ID NO: 9453 - DNA, 170 bp, Artificial sequence
  Bcor.475_NTC.89
  crRNA array
cgatttcttggctttatatatcttgtggaaaggacgaaacaccgtaatttctactaagtgtagattgcaacccctctgtatgggataatttctactaagtgtagatcctcgccaggtcgttggtatttttttaagcttggcgtggatccgatatcaactagatcttgaga

SEQ ID NO: 9454 - DNA, 170 bp, Artificial sequence
  Brca1.112_NTC.0
  crRNA array
cgatttcttggctttatatatcttgtggaaaggacgaaacaccgtaatttctactaagtgtagatctagacgctctgtggagacttaatttctactaagtgtagatacgacttcaatcccccactattttttaagcttggcgtggatccgatatcaactagatcttgaga

SEQ ID NO: 9455 - DNA, 170 bp, Artificial sequence
  Brca1.112_NTC.57
  crRNA array
cgatttcttggctttatatatcttgtggaaaggacgaaacaccgtaatttctactaagtgtagatctagacgctctgtggagacttaatttctactaagtgtagatagcgtaacgtgtgcgagtcgttttttaagcttggcgtggatccgatatcaactagatcttgaga

SEQ ID NO: 9456 - DNA, 170 bp, Artificial sequence
  Brca1.112_NTC.89
  crRNA array
cgatttcttggctttatatatcttgtggaaaggacgaaacaccgtaatttctactaagtgtagatctagacgctctgtggagacttaatttctactaagtgtagatcctcgccaggtcgttggtatttttttaagcttggcgtggatccgatatcaactagatcttgaga

SEQ ID NO: 9457 - DNA, 170 bp, Artificial sequence
  Brca1.53_NTC.0
  crRNA array
cgatttcttggctttatatatcttgtggaaaggacgaaacaccgtaatttctactaagtgtagataatgaggaggcgtcgatcattaatttctactaagtgtagatacgacttcaatcccccactattttttaagcttggcgtggatccgatatcaactagatcttgaga

SEQ ID NO: 9458 - DNA, 170 bp, Artificial sequence
  Brca1.53_NTC.57
  crRNA array
cgatttcttggctttatatatcttgtggaaaggacgaaacaccgtaatttctactaagtgtagataatgaggaggcgtcgatcattaatttctactaagtgtagatagcgtaacgtgtgcgagtcgttttttaagcttggcgtggatccgatatcaactagatcttgaga

SEQ ID NO: 9459 - DNA, 170 bp, Artificial sequence
  Brca1.53_NTC.89
  crRNA array
cgatttcttggctttatatatcttgtggaaaggacgaaacaccgtaatttctactaagtgtagataatgaggaggcgtcgatcattaatttctactaagtgtagatcctcgccaggtcgttggtatttttttaagcttggcgtggatccgatatcaactagatcttgaga

SEQ ID NO: 9460 - DNA, 170 bp, Artificial sequence
  Casp8.45_NTC.0
  crRNA array
cgatttcttggctttatatatcttgtggaaaggacgaaacaccgtaatttctactaagtgtagatctaccgagatcctgtgaatgtaatttctactaagtgtagatacgacttcaatcccccactattttttaagcttggcgtggatccgatatcaactagatcttgaga

SEQ ID NO: 9461 - DNA, 170 bp, Artificial sequence
  Casp8.45_NTC.57
  crRNA array
cgatttcttggctttatatatcttgtggaaaggacgaaacaccgtaatttctactaagtgtagatctaccgagatcctgtgaatgtaatttctactaagtgtagatagcgtaacgtgtgcgagtcgttttttaagcttggcgtggatccgatatcaactagatcttgaga

SEQ ID NO: 9462 - DNA, 170 bp, Artificial sequence
  Casp8.45_NTC.89
  crRNA array
cgatttcttggctttatatatcttgtggaaaggacgaaacaccgtaatttctactaagtgtagatctaccgagatcctgtgaatgtaatttctactaagtgtagatcctcgccaggtcgttggtatttttttaagcttggcgtggatccgatatcaactagatcttgaga

SEQ ID NO: 9463 - DNA, 170 bp, Artificial sequence
  Casp8.54_NTC.0
  crRNA array
cgatttcttggctttatatatcttgtggaaaggacgaaacaccgtaatttctactaagtgtagatcagtgcagtcgtcgtaagattaatttctactaagtgtagatacgacttcaatcccccactattttttaagcttggcgtggatccgatatcaactagatcttgaga

SEQ ID NO: 9464 - DNA, 170 bp, Artificial sequence
  Casp8.54_NTC.57
  crRNA array
cgatttcttggctttatatatcttgtggaaaggacgaaacaccgtaatttctactaagtgtagatcagtgcagtcgtcgtaagattaatttctactaagtgtagatagcgtaacgtgtgcgagtcgttttttaagcttggcgtggatccgatatcaactagatcttgaga

SEQ ID NO: 9465 - DNA, 170 bp, Artificial sequence
  Casp8.54_NTC.89
  crRNA array
cgatttcttggctttatatatcttgtggaaaggacgaaacaccgtaatttctactaagtgtagatcagtgcagtcgtcgtaagattaatttctactaagtgtagatcctcgccaggtcgttggtatttttttaagcttggcgtggatccgatatcaactagatcttgaga

SEQ ID NO: 9466 - DNA, 170 bp, Artificial sequence
  Cbwd1.84_NTC.0
  crRNA array
cgatttcttggctttatatatcttgtggaaaggacgaaacaccgtaatttctactaagtgtagatcacagcaggtaacatgccgctaatttctactaagtgtagatacgacttcaatcccccactattttttaagcttggcgtggatccgatatcaactagatcttgaga

SEQ ID NO: 9467 - DNA, 170 bp, Artificial sequence
  Cbwd1.84_NTC.57
  crRNA array
cgatttcttggctttatatatcttgtggaaaggacgaaacaccgtaatttctactaagtgtagatcacagcaggtaacatgccgctaatttctactaagtgtagatagcgtaacgtgtgcgagtcgttttttaagcttggcgtggatccgatatcaactagatcttgaga

SEQ ID NO: 9468 - DNA, 170 bp, Artificial sequence
  Cbwd1.84_NTC.89
  crRNA array
cgatttcttggctttatatatcttgtggaaaggacgaaacaccgtaatttctactaagtgtagatcacagcaggtaacatgccgctaatttctactaagtgtagatcctcgccaggtcgttggtatttttttaagcttggcgtggatccgatatcaactagatcttgaga

SEQ ID NO: 9469 - DNA, 170 bp, Artificial sequence
  Cbwd1.85_NTC.0
  crRNA array
cgatttcttggctttatatatcttgtggaaaggacgaaacaccgtaatttctactaagtgtagatacagcaggtaacatgccgcctaatttctactaagtgtagatacgacttcaatcccccactattttttaagcttggcgtggatccgatatcaactagatcttgaga

SEQ ID NO: 9470 - DNA, 170 bp, Artificial sequence
  Cbwd1.85_NTC.57
  crRNA array
cgatttcttggctttatatatcttgtggaaaggacgaaacaccgtaatttctactaagtgtagatacagcaggtaacatgccgcctaatttctactaagtgtagatagcgtaacgtgtgcgagtcgttttttaagcttggcgtggatccgatatcaactagatcttgaga

SEQ ID NO: 9471 - DNA, 170 bp, Artificial sequence
  Cbwd1.85_NTC.89
  crRNA array
cgatttcttggctttatatatcttgtggaaaggacgaaacaccgtaatttctactaagtgtagatacagcaggtaacatgccgcctaatttctactaagtgtagatcctcgccaggtcgttggtatttttttaagcttggcgtggatccgatatcaactagatcttgaga

SEQ ID NO: 9472 - DNA, 170 bp, Artificial sequence
  Cdh1.387_NTC.0
  crRNA array
cgatttcttggctttatatatcttgtggaaaggacgaaacaccgtaatttctactaagtgtagatctcggcgtctgccgggtccgtaatttctactaagtgtagatacgacttcaatcccccactattttttaagcttggcgtggatccgatatcaactagatcttgaga

SEQ ID NO: 9473 - DNA, 170 bp, Artificial sequence
  Cdh1.387_NTC.57
  crRNA array
cgatttcttggctttatatatcttgtggaaaggacgaaacaccgtaatttctactaagtgtagatctcggcgtctgccgggtccgtaatttctactaagtgtagatagcgtaacgtgtgcgagtcgttttttaagcttggcgtggatccgatatcaactagatcttgaga

SEQ ID NO: 9474 - DNA, 170 bp, Artificial sequence
  Cdh1.387_NTC.89
  crRNA array
cgatttcttggctttatatatcttgtggaaaggacgaaacaccgtaatttctactaagtgtagatctcggcgtctgccgggtccgtaatttctactaagtgtagatcctcgccaggtcgttggtatttttttaagcttggcgtggatccgatatcaactagatcttgaga

SEQ ID NO: 9475 - DNA, 170 bp, Artificial sequence
  Cdh1.58_NTC.0
  crRNA array
cgatttcttggctttatatatcttgtggaaaggacgaaacaccgtaatttctactaagtgtagatctcgtccgcgcccgggactctaatttctactaagtgtagatacgacttcaatcccccactattttttaagcttggcgtggatccgatatcaactagatcttgaga

SEQ ID NO: 9476 - DNA, 170 bp, Artificial sequence
  Cdh1.58_NTC.57
  crRNA array
cgatttcttggctttatatatcttgtggaaaggacgaaacaccgtaatttctactaagtgtagatctcgtccgcgcccgggactctaatttctactaagtgtagatagcgtaacgtgtgcgagtcgttttttaagcttggcgtggatccgatatcaactagatcttgaga

SEQ ID NO: 9477 - DNA, 170 bp, Artificial sequence
  Cdh1.58_NTC.89
  crRNA array
cgatttcttggctttatatatcttgtggaaaggacgaaacaccgtaatttctactaagtgtagatctcgtccgcgcccgggactctaatttctactaagtgtagatcctcgccaggtcgttggtatttttttaagcttggcgtggatccgatatcaactagatcttgaga

SEQ ID NO: 9478 - DNA, 170 bp, Artificial sequence
  Cdkn2a.647_NTC.0
  crRNA array
cgatttcttggctttatatatcttgtggaaaggacgaaacaccgtaatttctactaagtgtagatgcaatcacgggagggagcagtaatttctactaagtgtagatacgacttcaatcccccactattttttaagcttggcgtggatccgatatcaactagatcttgaga

SEQ ID NO: 9479 - DNA, 170 bp, Artificial sequence
  Cdkn2a.647_NTC.57
  crRNA array
cgatttcttggctttatatatcttgtggaaaggacgaaacaccgtaatttctactaagtgtagatgcaatcacgggagggagcagtaatttctactaagtgtagatagcgtaacgtgtgcgagtcgttttttaagcttggcgtggatccgatatcaactagatcttgaga

SEQ ID NO: 9480 - DNA, 170 bp, Artificial sequence
  Cdkn2a.647_NTC.89
  crRNA array
cgatttcttggctttatatatcttgtggaaaggacgaaacaccgtaatttctactaagtgtagatgcaatcacgggagggagcagtaatttctactaagtgtagatcctcgccaggtcgttggtatttttttaagcttggcgtggatccgatatcaactagatcttgaga

SEQ ID NO: 9481 - DNA, 170 bp, Artificial sequence
  Cdkn2a.648_NTC.0
  crRNA array
cgatttcttggctttatatatcttgtggaaaggacgaaacaccgtaatttctactaagtgtagatcaatcacgggagggagcagataatttctactaagtgtagatacgacttcaatcccccactattttttaagcttggcgtggatccgatatcaactagatcttgaga

SEQ ID NO: 9482 - DNA, 170 bp, Artificial sequence
  Cdkn2a.648_NTC.57
  crRNA array
cgatttcttggctttatatatcttgtggaaaggacgaaacaccgtaatttctactaagtgtagatcaatcacgggagggagcagataatttctactaagtgtagatagcgtaacgtgtgcgagtcgttttttaagcttggcgtggatccgatatcaactagatcttgaga

SEQ ID NO: 9483 - DNA, 170 bp, Artificial sequence
  Cdkn2a.648_NTC.89
  crRNA array
cgatttcttggctttatatatcttgtggaaaggacgaaacaccgtaatttctactaagtgtagatcaatcacgggagggagcagataatttctactaagtgtagatcctcgccaggtcgttggtatttttttaagcttggcgtggatccgatatcaactagatcttgaga

SEQ ID NO: 9484 - DNA, 170 bp, Artificial sequence
  Cic.162_NTC.0
  crRNA array
cgatttcttggctttatatatcttgtggaaaggacgaaacaccgtaatttctactaagtgtagatcgcaggcgcgcccggcggagtaatttctactaagtgtagatacgacttcaatcccccactattttttaagcttggcgtggatccgatatcaactagatcttgaga

SEQ ID NO: 9485 - DNA, 170 bp, Artificial sequence
  Cic.162_NTC.57
  crRNA array
cgatttcttggctttatatatcttgtggaaaggacgaaacaccgtaatttctactaagtgtagatcgcaggcgcgcccggcggagtaatttctactaagtgtagatagcgtaacgtgtgcgagtcgttttttaagcttggcgtggatccgatatcaactagatcttgaga

SEQ ID NO: 9486 - DNA, 170 bp, Artificial sequence
  Cic.162_NTC.89
  crRNA array
cgatttcttggctttatatatcttgtggaaaggacgaaacaccgtaatttctactaagtgtagatcgcaggcgcgcccggcggagtaatttctactaagtgtagatcctcgccaggtcgttggtatttttttaagcttggcgtggatccgatatcaactagatcttgaga

SEQ ID NO: 9487 - DNA, 170 bp, Artificial sequence
  Cic.164_NTC.0
  crRNA array
cgatttcttggctttatatatcttgtggaaaggacgaaacaccgtaatttctactaagtgtagatcgggccctgggccggcggcttaatttctactaagtgtagatacgacttcaatcccccactattttttaagcttggcgtggatccgatatcaactagatcttgaga

SEQ ID NO: 9488 - DNA, 170 bp, Artificial sequence
  Cic.164_NTC.57
  crRNA array
cgatttcttggctttatatatcttgtggaaaggacgaaacaccgtaatttctactaagtgtagatcgggccctgggccggcggcttaatttctactaagtgtagatagcgtaacgtgtgcgagtcgttttttaagcttggcgtggatccgatatcaactagatcttgaga

SEQ ID NO: 9489 - DNA, 170 bp, Artificial sequence
  Cic.164_NTC.89
  crRNA array
cgatttcttggctttatatatcttgtggaaaggacgaaacaccgtaatttctactaagtgtagatcgggccctgggccggcggcttaatttctactaagtgtagatcctcgccaggtcgttggtatttttttaagcttggcgtggatccgatatcaactagatcttgaga

SEQ ID NO: 9490 - DNA, 170 bp, Artificial sequence
  Ctcf.229_NTC.0
  crRNA array
cgatttcttggctttatatatcttgtggaaaggacgaaacaccgtaatttctactaagtgtagatggctggtggctgatagtctgtaatttctactaagtgtagatacgacttcaatcccccactattttttaagcttggcgtggatccgatatcaactagatcttgaga

SEQ ID NO: 9491 - DNA, 170 bp, Artificial sequence
  Ctcf.229_NTC.57
  crRNA array
cgatttcttggctttatatatcttgtggaaaggacgaaacaccgtaatttctactaagtgtagatggctggtggctgatagtctgtaatttctactaagtgtagatagcgtaacgtgtgcgagtcgttttttaagcttggcgtggatccgatatcaactagatcttgaga

SEQ ID NO: 9492 - DNA, 170 bp, Artificial sequence
  Ctcf.229_NTC.89
  crRNA array
cgatttcttggctttatatatcttgtggaaaggacgaaacaccgtaatttctactaagtgtagatggctggtggctgatagtctgtaatttctactaagtgtagatcctcgccaggtcgttggtatttttttaagcttggcgtggatccgatatcaactagatcttgaga

SEQ ID NO: 9493 - DNA, 170 bp, Artificial sequence
  Ctcf.809_NTC.0
  crRNA array
cgatttcttggctttatatatcttgtggaaaggacgaaacaccgtaatttctactaagtgtagataagcgctatcatgatcccaataatttctactaagtgtagatacgacttcaatcccccactattttttaagcttggcgtggatccgatatcaactagatcttgaga

SEQ ID NO: 9494 - DNA, 170 bp, Artificial sequence
  Ctcf.809_NTC.57
  crRNA array
cgatttcttggctttatatatcttgtggaaaggacgaaacaccgtaatttctactaagtgtagataagcgctatcatgatcccaataatttctactaagtgtagatagcgtaacgtgtgcgagtcgttttttaagcttggcgtggatccgatatcaactagatcttgaga

SEQ ID NO: 9495 - DNA, 170 bp, Artificial sequence
  Ctcf.809_NTC.89
  crRNA array
cgatttcttggctttatatatcttgtggaaaggacgaaacaccgtaatttctactaagtgtagataagcgctatcatgatcccaataatttctactaagtgtagatcctcgccaggtcgttggtatttttttaagcttggcgtggatccgatatcaactagatcttgaga

SEQ ID NO: 9496 - DNA, 170 bp, Artificial sequence
  Elf3.826_NTC.0
  crRNA array
cgatttcttggctttatatatcttgtggaaaggacgaaacaccgtaatttctactaagtgtagattccgagacatcctaatccactaatttctactaagtgtagatacgacttcaatcccccactattttttaagcttggcgtggatccgatatcaactagatcttgaga

SEQ ID NO: 9497 - DNA, 170 bp, Artificial sequence
  Elf3.826_NTC.57
  crRNA array
cgatttcttggctttatatatcttgtggaaaggacgaaacaccgtaatttctactaagtgtagattccgagacatcctaatccactaatttctactaagtgtagatagcgtaacgtgtgcgagtcgttttttaagcttggcgtggatccgatatcaactagatcttgaga

SEQ ID NO: 9498 - DNA, 170 bp, Artificial sequence
  Elf3.826_NTC.89
  crRNA array
cgatttcttggctttatatatcttgtggaaaggacgaaacaccgtaatttctactaagtgtagattccgagacatcctaatccactaatttctactaagtgtagatcctcgccaggtcgttggtatttttttaagcttggcgtggatccgatatcaactagatcttgaga

SEQ ID NO: 9499 - DNA, 170 bp, Artificial sequence
  Elf3.983_NTC.0
  crRNA array
cgatttcttggctttatatatcttgtggaaaggacgaaacaccgtaatttctactaagtgtagattaggccccctaactggaccataatttctactaagtgtagatacgacttcaatcccccactattttttaagcttggcgtggatccgatatcaactagatcttgaga

SEQ ID NO: 9500 - DNA, 170 bp, Artificial sequence
  Elf3.983_NTC.57
  crRNA array
cgatttcttggctttatatatcttgtggaaaggacgaaacaccgtaatttctactaagtgtagattaggccccctaactggaccataatttctactaagtgtagatagcgtaacgtgtgcgagtcgttttttaagcttggcgtggatccgatatcaactagatcttgaga

SEQ ID NO: 9501 - DNA, 170 bp, Artificial sequence
  Elf3.983_NTC.89
  crRNA array
cgatttcttggctttatatatcttgtggaaaggacgaaacaccgtaatttctactaagtgtagattaggccccctaactggaccataatttctactaagtgtagatcctcgccaggtcgttggtatttttttaagcttggcgtggatccgatatcaactagatcttgaga

SEQ ID NO: 9502 - DNA, 170 bp, Artificial sequence
  Ep300.310_NTC.0
  crRNA array
cgatttcttggctttatatatcttgtggaaaggacgaaacaccgtaatttctactaagtgtagatatggtacgacagtgaggaagtaatttctactaagtgtagatacgacttcaatcccccactattttttaagcttggcgtggatccgatatcaactagatcttgaga

SEQ ID NO: 9503 - DNA, 170 bp, Artificial sequence
  Ep300.310_NTC.57
  crRNA array
cgatttcttggctttatatatcttgtggaaaggacgaaacaccgtaatttctactaagtgtagatatggtacgacagtgaggaagtaatttctactaagtgtagatagcgtaacgtgtgcgagtcgttttttaagcttggcgtggatccgatatcaactagatcttgaga

SEQ ID NO: 9504 - DNA, 170 bp, Artificial sequence
  Ep300.310_NTC.89
  crRNA array
cgatttcttggctttatatatcttgtggaaaggacgaaacaccgtaatttctactaagtgtagatatggtacgacagtgaggaagtaatttctactaagtgtagatcctcgccaggtcgttggtatttttttaagcttggcgtggatccgatatcaactagatcttgaga

SEQ ID NO: 9505 - DNA, 170 bp, Artificial sequence
  Ep300.587_NTC.0
  crRNA array
cgatttcttggctttatatatcttgtggaaaggacgaaacaccgtaatttctactaagtgtagatcgccccggggcccccaaccataatttctactaagtgtagatacgacttcaatcccccactattttttaagcttggcgtggatccgatatcaactagatcttgaga

SEQ ID NO: 9506 - DNA, 170 bp, Artificial sequence
  Ep300.587_NTC.57
  crRNA array
cgatttcttggctttatatatcttgtggaaaggacgaaacaccgtaatttctactaagtgtagatcgccccggggcccccaaccataatttctactaagtgtagatagcgtaacgtgtgcgagtcgttttttaagcttggcgtggatccgatatcaactagatcttgaga

SEQ ID NO: 9507 - DNA, 170 bp, Artificial sequence
  Ep300.587_NTC.89
  crRNA array
cgatttcttggctttatatatcttgtggaaaggacgaaacaccgtaatttctactaagtgtagatcgccccggggcccccaaccataatttctactaagtgtagatcctcgccaggtcgttggtatttttttaagcttggcgtggatccgatatcaactagatcttgaga

SEQ ID NO: 9508 - DNA, 170 bp, Artificial sequence
  Epha2.126_NTC.0
  crRNA array
cgatttcttggctttatatatcttgtggaaaggacgaaacaccgtaatttctactaagtgtagatcctgtgccgccgcggccgcctaatttctactaagtgtagatacgacttcaatcccccactattttttaagcttggcgtggatccgatatcaactagatcttgaga

SEQ ID NO: 9509 - DNA, 170 bp, Artificial sequence
  Epha2.126_NTC.57
  crRNA array
cgatttcttggctttatatatcttgtggaaaggacgaaacaccgtaatttctactaagtgtagatcctgtgccgccgcggccgcctaatttctactaagtgtagatagcgtaacgtgtgcgagtcgttttttaagcttggcgtggatccgatatcaactagatcttgaga

SEQ ID NO: 9510 - DNA, 170 bp, Artificial sequence
  Epha2.126_NTC.89
  crRNA array
cgatttcttggctttatatatcttgtggaaaggacgaaacaccgtaatttctactaagtgtagatcctgtgccgccgcggccgcctaatttctactaagtgtagatcctcgccaggtcgttggtatttttttaagcttggcgtggatccgatatcaactagatcttgaga

SEQ ID NO: 9511 - DNA, 170 bp, Artificial sequence
  Epha2.5_NTC.0
  crRNA array
cgatttcttggctttatatatcttgtggaaaggacgaaacaccgtaatttctactaagtgtagatcatgagctggcgccacccggtaatttctactaagtgtagatacgacttcaatcccccactattttttaagcttggcgtggatccgatatcaactagatcttgaga

SEQ ID NO: 9512 - DNA, 170 bp, Artificial sequence
  Epha2.5_NTC.57
  crRNA array
cgatttcttggctttatatatcttgtggaaaggacgaaacaccgtaatttctactaagtgtagatcatgagctggcgccacccggtaatttctactaagtgtagatagcgtaacgtgtgcgagtcgttttttaagcttggcgtggatccgatatcaactagatcttgaga

SEQ ID NO: 9513 - DNA, 170 bp, Artificial sequence
  Epha2.5_NTC.89
  crRNA array
cgatttcttggctttatatatcttgtggaaaggacgaaacaccgtaatttctactaagtgtagatcatgagctggcgccacccggtaatttctactaagtgtagatcctcgccaggtcgttggtatttttttaagcttggcgtggatccgatatcaactagatcttgaga

SEQ ID NO: 9514 - DNA, 170 bp, Artificial sequence
  Fat1.105_NTC.0
  crRNA array
cgatttcttggctttatatatcttgtggaaaggacgaaacaccgtaatttctactaagtgtagataactcgaggtgacaacaagttaatttctactaagtgtagatacgacttcaatcccccactattttttaagcttggcgtggatccgatatcaactagatcttgaga

SEQ ID NO: 9515 - DNA, 170 bp, Artificial sequence
  Fat1.105_NTC.57
  crRNA array
cgatttcttggctttatatatcttgtggaaaggacgaaacaccgtaatttctactaagtgtagataactcgaggtgacaacaagttaatttctactaagtgtagatagcgtaacgtgtgcgagtcgttttttaagcttggcgtggatccgatatcaactagatcttgaga

SEQ ID NO: 9516 - DNA, 170 bp, Artificial sequence
  Fat1.105_NTC.89
  crRNA array
cgatttcttggctttatatatcttgtggaaaggacgaaacaccgtaatttctactaagtgtagataactcgaggtgacaacaagttaatttctactaagtgtagatcctcgccaggtcgttggtatttttttaagcttggcgtggatccgatatcaactagatcttgaga

SEQ ID NO: 9517 - DNA, 170 bp, Artificial sequence
  Fat1.122_NTC.0
  crRNA array
cgatttcttggctttatatatcttgtggaaaggacgaaacaccgtaatttctactaagtgtagatccatcgacatggaaacgggataatttctactaagtgtagatacgacttcaatcccccactattttttaagcttggcgtggatccgatatcaactagatcttgaga

SEQ ID NO: 9518 - DNA, 170 bp, Artificial sequence
  Fat1.122_NTC.57
  crRNA array
cgatttcttggctttatatatcttgtggaaaggacgaaacaccgtaatttctactaagtgtagatccatcgacatggaaacgggataatttctactaagtgtagatagcgtaacgtgtgcgagtcgttttttaagcttggcgtggatccgatatcaactagatcttgaga

SEQ ID NO: 9519 - DNA, 170 bp, Artificial sequence
  Fat1.122_NTC.89
  crRNA array
cgatttcttggctttatatatcttgtggaaaggacgaaacaccgtaatttctactaagtgtagatccatcgacatggaaacgggataatttctactaagtgtagatcctcgccaggtcgttggtatttttttaagcttggcgtggatccgatatcaactagatcttgaga

SEQ ID NO: 9520 - DNA, 170 bp, Artificial sequence
  Fbxw7.21_NTC.0
  crRNA array
cgatttcttggctttatatatcttgtggaaaggacgaaacaccgtaatttctactaagtgtagattaatgtgccgtagaaacccataatttctactaagtgtagatacgacttcaatcccccactattttttaagcttggcgtggatccgatatcaactagatcttgaga

SEQ ID NO: 9521 - DNA, 170 bp, Artificial sequence
  Fbxw7.21_NTC.57
  crRNA array
cgatttcttggctttatatatcttgtggaaaggacgaaacaccgtaatttctactaagtgtagattaatgtgccgtagaaacccataatttctactaagtgtagatagcgtaacgtgtgcgagtcgttttttaagcttggcgtggatccgatatcaactagatcttgaga

SEQ ID NO: 9522 - DNA, 170 bp, Artificial sequence
  Fbxw7.21_NTC.89
  crRNA array
cgatttcttggctttatatatcttgtggaaaggacgaaacaccgtaatttctactaagtgtagattaatgtgccgtagaaacccataatttctactaagtgtagatcctcgccaggtcgttggtatttttttaagcttggcgtggatccgatatcaactagatcttgaga

SEQ ID NO: 9523 - DNA, 170 bp, Artificial sequence
  Fbxw7.23_NTC.0
  crRNA array
cgatttcttggctttatatatcttgtggaaaggacgaaacaccgtaatttctactaagtgtagatatgtgccgtagaaacccatataatttctactaagtgtagatacgacttcaatcccccactattttttaagcttggcgtggatccgatatcaactagatcttgaga

SEQ ID NO: 9524 - DNA, 170 bp, Artificial sequence
  Fbxw7.23_NTC.57
  crRNA array
cgatttcttggctttatatatcttgtggaaaggacgaaacaccgtaatttctactaagtgtagatatgtgccgtagaaacccatataatttctactaagtgtagatagcgtaacgtgtgcgagtcgttttttaagcttggcgtggatccgatatcaactagatcttgaga

SEQ ID NO: 9525 - DNA, 170 bp, Artificial sequence
  Fbxw7.23_NTC.89
  crRNA array
cgatttcttggctttatatatcttgtggaaaggacgaaacaccgtaatttctactaagtgtagatatgtgccgtagaaacccatataatttctactaagtgtagatcctcgccaggtcgttggtatttttttaagcttggcgtggatccgatatcaactagatcttgaga

SEQ ID NO: 9526 - DNA, 170 bp, Artificial sequence
  Gata3.34_NTC.0
  crRNA array
cgatttcttggctttatatatcttgtggaaaggacgaaacaccgtaatttctactaagtgtagatctaaactatcccgcaaagattaatttctactaagtgtagatacgacttcaatcccccactattttttaagcttggcgtggatccgatatcaactagatcttgaga

SEQ ID NO: 9527 - DNA, 170 bp, Artificial sequence
  Gata3.34_NTC.57
  crRNA array
cgatttcttggctttatatatcttgtggaaaggacgaaacaccgtaatttctactaagtgtagatctaaactatcccgcaaagattaatttctactaagtgtagatagcgtaacgtgtgcgagtcgttttttaagcttggcgtggatccgatatcaactagatcttgaga

SEQ ID NO: 9528 - DNA, 170 bp, Artificial sequence
  Gata3.34_NTC.89
  crRNA array
cgatttcttggctttatatatcttgtggaaaggacgaaacaccgtaatttctactaagtgtagatctaaactatcccgcaaagattaatttctactaagtgtagatcctcgccaggtcgttggtatttttttaagcttggcgtggatccgatatcaactagatcttgaga

SEQ ID NO: 9529 - DNA, 170 bp, Artificial sequence
  Gata3.47_NTC.0
  crRNA array
cgatttcttggctttatatatcttgtggaaaggacgaaacaccgtaatttctactaagtgtagatcgtagtaggacgggacgtggtaatttctactaagtgtagatacgacttcaatcccccactattttttaagcttggcgtggatccgatatcaactagatcttgaga

SEQ ID NO: 9530 - DNA, 170 bp, Artificial sequence
  Gata3.47_NTC.57
  crRNA array
cgatttcttggctttatatatcttgtggaaaggacgaaacaccgtaatttctactaagtgtagatcgtagtaggacgggacgtggtaatttctactaagtgtagatagcgtaacgtgtgcgagtcgttttttaagcttggcgtggatccgatatcaactagatcttgaga

SEQ ID NO: 9531 - DNA, 170 bp, Artificial sequence
  Gata3.47_NTC.89
  crRNA array
cgatttcttggctttatatatcttgtggaaaggacgaaacaccgtaatttctactaagtgtagatcgtagtaggacgggacgtggtaatttctactaagtgtagatcctcgccaggtcgttggtatttttttaagcttggcgtggatccgatatcaactagatcttgaga

SEQ ID NO: 9532 - DNA, 170 bp, Artificial sequence
  H2-Q2.1_NTC.0
  crRNA array
cgatttcttggctttatatatcttgtggaaaggacgaaacaccgtaatttctactaagtgtagatagggcggccaccaacagcagtaatttctactaagtgtagatacgacttcaatcccccactattttttaagcttggcgtggatccgatatcaactagatcttgaga

SEQ ID NO: 9533 - DNA, 170 bp, Artificial sequence
  H2-Q2.1_NTC.57
  crRNA array
cgatttcttggctttatatatcttgtggaaaggacgaaacaccgtaatttctactaagtgtagatagggcggccaccaacagcagtaatttctactaagtgtagatagcgtaacgtgtgcgagtcgttttttaagcttggcgtggatccgatatcaactagatcttgaga

SEQ ID NO: 9534 - DNA, 170 bp, Artificial sequence
  H2-Q2.1_NTC.89
  crRNA array
cgatttcttggctttatatatcttgtggaaaggacgaaacaccgtaatttctactaagtgtagatagggcggccaccaacagcagtaatttctactaagtgtagatcctcgccaggtcgttggtatttttttaagcttggcgtggatccgatatcaactagatcttgaga

SEQ ID NO: 9535 - DNA, 170 bp, Artificial sequence
  H2-Q2.2_NTC.0
  crRNA array
cgatttcttggctttatatatcttgtggaaaggacgaaacaccgtaatttctactaagtgtagattaacctgcgcccgctgctgataatttctactaagtgtagatacgacttcaatcccccactattttttaagcttggcgtggatccgatatcaactagatcttgaga

SEQ ID NO: 9536 - DNA, 170 bp, Artificial sequence
  H2-Q2.2_NTC.57
  crRNA array
cgatttcttggctttatatatcttgtggaaaggacgaaacaccgtaatttctactaagtgtagattaacctgcgcccgctgctgataatttctactaagtgtagatagcgtaacgtgtgcgagtcgttttttaagcttggcgtggatccgatatcaactagatcttgaga

SEQ ID NO: 9537 - DNA, 170 bp, Artificial sequence
  H2-Q2.2_NTC.89
  crRNA array
cgatttcttggctttatatatcttgtggaaaggacgaaacaccgtaatttctactaagtgtagattaacctgcgcccgctgctgataatttctactaagtgtagatcctcgccaggtcgttggtatttttttaagcttggcgtggatccgatatcaactagatcttgaga

SEQ ID NO: 9538 - DNA, 170 bp, Artificial sequence
  Kdm5c.1878_NTC.0
  crRNA array
cgatttcttggctttatatatcttgtggaaaggacgaaacaccgtaatttctactaagtgtagatagagcacggcacccgccccctaatttctactaagtgtagatacgacttcaatcccccactattttttaagcttggcgtggatccgatatcaactagatcttgaga

SEQ ID NO: 9539 - DNA, 170 bp, Artificial sequence
  Kdm5c.1878_NTC.57
  crRNA array
cgatttcttggctttatatatcttgtggaaaggacgaaacaccgtaatttctactaagtgtagatagagcacggcacccgccccctaatttctactaagtgtagatagcgtaacgtgtgcgagtcgttttttaagcttggcgtggatccgatatcaactagatcttgaga

SEQ ID NO: 9540 - DNA, 170 bp, Artificial sequence
  Kdm5c.1878_NTC.89
  crRNA array
cgatttcttggctttatatatcttgtggaaaggacgaaacaccgtaatttctactaagtgtagatagagcacggcacccgccccctaatttctactaagtgtagatcctcgccaggtcgttggtatttttttaagcttggcgtggatccgatatcaactagatcttgaga

SEQ ID NO: 9541 - DNA, 170 bp, Artificial sequence
  Kdm5c.1879_NTC.0
  crRNA array
cgatttcttggctttatatatcttgtggaaaggacgaaacaccgtaatttctactaagtgtagatgagcacggcacccgcccccctaatttctactaagtgtagatacgacttcaatcccccactattttttaagcttggcgtggatccgatatcaactagatcttgaga

SEQ ID NO: 9542 - DNA, 170 bp, Artificial sequence
  Kdm5c.1879_NTC.57
  crRNA array
cgatttcttggctttatatatcttgtggaaaggacgaaacaccgtaatttctactaagtgtagatgagcacggcacccgcccccctaatttctactaagtgtagatagcgtaacgtgtgcgagtcgttttttaagcttggcgtggatccgatatcaactagatcttgaga

SEQ ID NO: 9543 - DNA, 170 bp, Artificial sequence
  Kdm5c.1879_NTC.89
  crRNA array
cgatttcttggctttatatatcttgtggaaaggacgaaacaccgtaatttctactaagtgtagatgagcacggcacccgcccccctaatttctactaagtgtagatcctcgccaggtcgttggtatttttttaagcttggcgtggatccgatatcaactagatcttgaga

SEQ ID NO: 9544 - DNA, 170 bp, Artificial sequence
  Kdm6a.56_NTC.0
  crRNA array
cgatttcttggctttatatatcttgtggaaaggacgaaacaccgtaatttctactaagtgtagattcgctgccgcctctcgcggctaatttctactaagtgtagatacgacttcaatcccccactattttttaagcttggcgtggatccgatatcaactagatcttgaga

SEQ ID NO: 9545 - DNA, 170 bp, Artificial sequence
  Kdm6a.56_NTC.57
  crRNA array
cgatttcttggctttatatatcttgtggaaaggacgaaacaccgtaatttctactaagtgtagattcgctgccgcctctcgcggctaatttctactaagtgtagatagcgtaacgtgtgcgagtcgttttttaagcttggcgtggatccgatatcaactagatcttgaga

SEQ ID NO: 9546 - DNA, 170 bp, Artificial sequence
  Kdm6a.56_NTC.89
  crRNA array
cgatttcttggctttatatatcttgtggaaaggacgaaacaccgtaatttctactaagtgtagattcgctgccgcctctcgcggctaatttctactaagtgtagatcctcgccaggtcgttggtatttttttaagcttggcgtggatccgatatcaactagatcttgaga

SEQ ID NO: 9547 - DNA, 170 bp, Artificial sequence
  Kdm6a.57_NTC.0
  crRNA array
cgatttcttggctttatatatcttgtggaaaggacgaaacaccgtaatttctactaagtgtagatcgctgccgcctctcgcggcataatttctactaagtgtagatacgacttcaatcccccactattttttaagcttggcgtggatccgatatcaactagatcttgaga

SEQ ID NO: 9548 - DNA, 170 bp, Artificial sequence
  Kdm6a.57_NTC.57
  crRNA array
cgatttcttggctttatatatcttgtggaaaggacgaaacaccgtaatttctactaagtgtagatcgctgccgcctctcgcggcataatttctactaagtgtagatagcgtaacgtgtgcgagtcgttttttaagcttggcgtggatccgatatcaactagatcttgaga

SEQ ID NO: 9549 - DNA, 170 bp, Artificial sequence
  Kdm6a.57_NTC.89
  crRNA array
cgatttcttggctttatatatcttgtggaaaggacgaaacaccgtaatttctactaagtgtagatcgctgccgcctctcgcggcataatttctactaagtgtagatcctcgccaggtcgttggtatttttttaagcttggcgtggatccgatatcaactagatcttgaga

SEQ ID NO: 9550 - DNA, 170 bp, Artificial sequence
  Kmt2b.265_NTC.0
  crRNA array
cgatttcttggctttatatatcttgtggaaaggacgaaacaccgtaatttctactaagtgtagatccccaagtgaagcccacctgtaatttctactaagtgtagatacgacttcaatcccccactattttttaagcttggcgtggatccgatatcaactagatcttgaga

SEQ ID NO: 9551 - DNA, 170 bp, Artificial sequence
  Kmt2b.265_NTC.57
  crRNA array
cgatttcttggctttatatatcttgtggaaaggacgaaacaccgtaatttctactaagtgtagatccccaagtgaagcccacctgtaatttctactaagtgtagatagcgtaacgtgtgcgagtcgttttttaagcttggcgtggatccgatatcaactagatcttgaga

SEQ ID NO: 9552 - DNA, 170 bp, Artificial sequence
  Kmt2b.265_NTC.89
  crRNA array
cgatttcttggctttatatatcttgtggaaaggacgaaacaccgtaatttctactaagtgtagatccccaagtgaagcccacctgtaatttctactaagtgtagatcctcgccaggtcgttggtatttttttaagcttggcgtggatccgatatcaactagatcttgaga

SEQ ID NO: 9553 - DNA, 170 bp, Artificial sequence
  Kmt2b.298_NTC.0
  crRNA array
cgatttcttggctttatatatcttgtggaaaggacgaaacaccgtaatttctactaagtgtagattccggcagggaccggctggctaatttctactaagtgtagatacgacttcaatcccccactattttttaagcttggcgtggatccgatatcaactagatcttgaga

SEQ ID NO: 9554 - DNA, 170 bp, Artificial sequence
  Kmt2b.298_NTC.57
  crRNA array
cgatttcttggctttatatatcttgtggaaaggacgaaacaccgtaatttctactaagtgtagattccggcagggaccggctggctaatttctactaagtgtagatagcgtaacgtgtgcgagtcgttttttaagcttggcgtggatccgatatcaactagatcttgaga

SEQ ID NO: 9555 - DNA, 170 bp, Artificial sequence
  Kmt2b.298_NTC.89
  crRNA array
cgatttcttggctttatatatcttgtggaaaggacgaaacaccgtaatttctactaagtgtagattccggcagggaccggctggctaatttctactaagtgtagatcctcgccaggtcgttggtatttttttaagcttggcgtggatccgatatcaactagatcttgaga

SEQ ID NO: 9556 - DNA, 170 bp, Artificial sequence
  Kmt2c.1962_NTC.0
  crRNA array
cgatttcttggctttatatatcttgtggaaaggacgaaacaccgtaatttctactaagtgtagatgtgacgatctgtgccacaagtaatttctactaagtgtagatacgacttcaatcccccactattttttaagcttggcgtggatccgatatcaactagatcttgaga

SEQ ID NO: 9557 - DNA, 170 bp, Artificial sequence
  Kmt2c.1962_NTC.57
  crRNA array
cgatttcttggctttatatatcttgtggaaaggacgaaacaccgtaatttctactaagtgtagatgtgacgatctgtgccacaagtaatttctactaagtgtagatagcgtaacgtgtgcgagtcgttttttaagcttggcgtggatccgatatcaactagatcttgaga

SEQ ID NO: 9558 - DNA, 170 bp, Artificial sequence
  Kmt2c.1962_NTC.89
  crRNA array
cgatttcttggctttatatatcttgtggaaaggacgaaacaccgtaatttctactaagtgtagatgtgacgatctgtgccacaagtaatttctactaagtgtagatcctcgccaggtcgttggtatttttttaagcttggcgtggatccgatatcaactagatcttgaga

SEQ ID NO: 9559 - DNA, 170 bp, Artificial sequence
  Kmt2c.2236_NTC.0
  crRNA array
cgatttcttggctttatatatcttgtggaaaggacgaaacaccgtaatttctactaagtgtagatactcgacctccacctccctataatttctactaagtgtagatacgacttcaatcccccactattttttaagcttggcgtggatccgatatcaactagatcttgaga

SEQ ID NO: 9560 - DNA, 170 bp, Artificial sequence
  Kmt2c.2236_NTC.57
  crRNA array
cgatttcttggctttatatatcttgtggaaaggacgaaacaccgtaatttctactaagtgtagatactcgacctccacctccctataatttctactaagtgtagatagcgtaacgtgtgcgagtcgttttttaagcttggcgtggatccgatatcaactagatcttgaga

SEQ ID NO: 9561 - DNA, 170 bp, Artificial sequence
  Kmt2c.2236_NTC.89
  crRNA array
cgatttcttggctttatatatcttgtggaaaggacgaaacaccgtaatttctactaagtgtagatactcgacctccacctccctataatttctactaagtgtagatcctcgccaggtcgttggtatttttttaagcttggcgtggatccgatatcaactagatcttgaga

SEQ ID NO: 9562 - DNA, 170 bp, Artificial sequence
  Kmt2d.316_NTC.0
  crRNA array
cgatttcttggctttatatatcttgtggaaaggacgaaacaccgtaatttctactaagtgtagatactccaggccacccaggtggtaatttctactaagtgtagatacgacttcaatcccccactattttttaagcttggcgtggatccgatatcaactagatcttgaga

SEQ ID NO: 9563 - DNA, 170 bp, Artificial sequence
  Kmt2d.316_NTC.57
  crRNA array
cgatttcttggctttatatatcttgtggaaaggacgaaacaccgtaatttctactaagtgtagatactccaggccacccaggtggtaatttctactaagtgtagatagcgtaacgtgtgcgagtcgttttttaagcttggcgtggatccgatatcaactagatcttgaga

SEQ ID NO: 9564 - DNA, 170 bp, Artificial sequence
  Kmt2d.316_NTC.89
  crRNA array
cgatttcttggctttatatatcttgtggaaaggacgaaacaccgtaatttctactaagtgtagatactccaggccacccaggtggtaatttctactaagtgtagatcctcgccaggtcgttggtatttttttaagcttggcgtggatccgatatcaactagatcttgaga

SEQ ID NO: 9565 - DNA, 170 bp, Artificial sequence
  Kmt2d.416_NTC.0
  crRNA array
cgatttcttggctttatatatcttgtggaaaggacgaaacaccgtaatttctactaagtgtagattaaacccccgggggaagggttaatttctactaagtgtagatacgacttcaatcccccactattttttaagcttggcgtggatccgatatcaactagatcttgaga

SEQ ID NO: 9566 - DNA, 170 bp, Artificial sequence
  Kmt2d.416_NTC.57
  crRNA array
cgatttcttggctttatatatcttgtggaaaggacgaaacaccgtaatttctactaagtgtagattaaacccccgggggaagggttaatttctactaagtgtagatagcgtaacgtgtgcgagtcgttttttaagcttggcgtggatccgatatcaactagatcttgaga

SEQ ID NO: 9567 - DNA, 170 bp, Artificial sequence
  Kmt2d.416_NTC.89
  crRNA array
cgatttcttggctttatatatcttgtggaaaggacgaaacaccgtaatttctactaagtgtagattaaacccccgggggaagggttaatttctactaagtgtagatcctcgccaggtcgttggtatttttttaagcttggcgtggatccgatatcaactagatcttgaga

SEQ ID NO: 9568 - DNA, 170 bp, Artificial sequence
  Map2k4.119_NTC.0
  crRNA array
cgatttcttggctttatatatcttgtggaaaggacgaaacaccgtaatttctactaagtgtagattgctgtgtgggcggccacattaatttctactaagtgtagatacgacttcaatcccccactattttttaagcttggcgtggatccgatatcaactagatcttgaga

SEQ ID NO: 9569 - DNA, 170 bp, Artificial sequence
  Map2k4.119_NTC.57
  crRNA array
cgatttcttggctttatatatcttgtggaaaggacgaaacaccgtaatttctactaagtgtagattgctgtgtgggcggccacattaatttctactaagtgtagatagcgtaacgtgtgcgagtcgttttttaagcttggcgtggatccgatatcaactagatcttgaga

SEQ ID NO: 9570 - DNA, 170 bp, Artificial sequence
  Map2k4.119_NTC.89
  crRNA array
cgatttcttggctttatatatcttgtggaaaggacgaaacaccgtaatttctactaagtgtagattgctgtgtgggcggccacattaatttctactaagtgtagatcctcgccaggtcgttggtatttttttaagcttggcgtggatccgatatcaactagatcttgaga

SEQ ID NO: 9571 - DNA, 170 bp, Artificial sequence
  Map2k4.1261_NTC.0
  crRNA array
cgatttcttggctttatatatcttgtggaaaggacgaaacaccgtaatttctactaagtgtagatgatgtagtaatgcggagtagtaatttctactaagtgtagatacgacttcaatcccccactattttttaagcttggcgtggatccgatatcaactagatcttgaga

SEQ ID NO: 9572 - DNA, 170 bp, Artificial sequence
  Map2k4.1261_NTC.57
  crRNA array
cgatttcttggctttatatatcttgtggaaaggacgaaacaccgtaatttctactaagtgtagatgatgtagtaatgcggagtagtaatttctactaagtgtagatagcgtaacgtgtgcgagtcgttttttaagcttggcgtggatccgatatcaactagatcttgaga

SEQ ID NO: 9573 - DNA, 170 bp, Artificial sequence
  Map2k4.1261_NTC.89
  crRNA array
cgatttcttggctttatatatcttgtggaaaggacgaaacaccgtaatttctactaagtgtagatgatgtagtaatgcggagtagtaatttctactaagtgtagatcctcgccaggtcgttggtatttttttaagcttggcgtggatccgatatcaactagatcttgaga

SEQ ID NO: 9574 - DNA, 170 bp, Artificial sequence
  Map3k1.235_NTC.0
  crRNA array
cgatttcttggctttatatatcttgtggaaaggacgaaacaccgtaatttctactaagtgtagataaaacgctactgatcgatcgtaatttctactaagtgtagatacgacttcaatcccccactattttttaagcttggcgtggatccgatatcaactagatcttgaga

SEQ ID NO: 9575 - DNA, 170 bp, Artificial sequence
  Map3k1.235_NTC.57
  crRNA array
cgatttcttggctttatatatcttgtggaaaggacgaaacaccgtaatttctactaagtgtagataaaacgctactgatcgatcgtaatttctactaagtgtagatagcgtaacgtgtgcgagtcgttttttaagcttggcgtggatccgatatcaactagatcttgaga

SEQ ID NO: 9576 - DNA, 170 bp, Artificial sequence
  Map3k1.235_NTC.89
  crRNA array
cgatttcttggctttatatatcttgtggaaaggacgaaacaccgtaatttctactaagtgtagataaaacgctactgatcgatcgtaatttctactaagtgtagatcctcgccaggtcgttggtatttttttaagcttggcgtggatccgatatcaactagatcttgaga

SEQ ID NO: 9577 - DNA, 170 bp, Artificial sequence
  Map3k1.3838_NTC.0
  crRNA array
cgatttcttggctttatatatcttgtggaaaggacgaaacaccgtaatttctactaagtgtagatccaacaacagggccccactataatttctactaagtgtagatacgacttcaatcccccactattttttaagcttggcgtggatccgatatcaactagatcttgaga

SEQ ID NO: 9578 - DNA, 170 bp, Artificial sequence
  Map3k1.3838_NTC.57
  crRNA array
cgatttcttggctttatatatcttgtggaaaggacgaaacaccgtaatttctactaagtgtagatccaacaacagggccccactataatttctactaagtgtagatagcgtaacgtgtgcgagtcgttttttaagcttggcgtggatccgatatcaactagatcttgaga

SEQ ID NO: 9579 - DNA, 170 bp, Artificial sequence
  Map3k1.3838_NTC.89
  crRNA array
cgatttcttggctttatatatcttgtggaaaggacgaaacaccgtaatttctactaagtgtagatccaacaacagggccccactataatttctactaagtgtagatcctcgccaggtcgttggtatttttttaagcttggcgtggatccgatatcaactagatcttgaga

SEQ ID NO: 9580 - DNA, 170 bp, Artificial sequence
  Mga.1655_NTC.0
  crRNA array
cgatttcttggctttatatatcttgtggaaaggacgaaacaccgtaatttctactaagtgtagatcgagaagtggagagcatatttaatttctactaagtgtagatacgacttcaatcccccactattttttaagcttggcgtggatccgatatcaactagatcttgaga

SEQ ID NO: 9581 - DNA, 170 bp, Artificial sequence
  Mga.1655_NTC.57
  crRNA array
cgatttcttggctttatatatcttgtggaaaggacgaaacaccgtaatttctactaagtgtagatcgagaagtggagagcatatttaatttctactaagtgtagatagcgtaacgtgtgcgagtcgttttttaagcttggcgtggatccgatatcaactagatcttgaga

SEQ ID NO: 9582 - DNA, 170 bp, Artificial sequence
  Mga.1655_NTC.89
  crRNA array
cgatttcttggctttatatatcttgtggaaaggacgaaacaccgtaatttctactaagtgtagatcgagaagtggagagcatatttaatttctactaagtgtagatcctcgccaggtcgttggtatttttttaagcttggcgtggatccgatatcaactagatcttgaga

SEQ ID NO: 9583 - DNA, 170 bp, Artificial sequence
  Mga.93_NTC.0
  crRNA array
cgatttcttggctttatatatcttgtggaaaggacgaaacaccgtaatttctactaagtgtagatgagaaggctccccataatgttaatttctactaagtgtagatacgacttcaatcccccactattttttaagcttggcgtggatccgatatcaactagatcttgaga

SEQ ID NO: 9584 - DNA, 170 bp, Artificial sequence
  Mga.93_NTC.57
  crRNA array
cgatttcttggctttatatatcttgtggaaaggacgaaacaccgtaatttctactaagtgtagatgagaaggctccccataatgttaatttctactaagtgtagatagcgtaacgtgtgcgagtcgttttttaagcttggcgtggatccgatatcaactagatcttgaga

SEQ ID NO: 9585 - DNA, 170 bp, Artificial sequence
  Mga.93_NTC.89
  crRNA array
cgatttcttggctttatatatcttgtggaaaggacgaaacaccgtaatttctactaagtgtagatgagaaggctccccataatgttaatttctactaagtgtagatcctcgccaggtcgttggtatttttttaagcttggcgtggatccgatatcaactagatcttgaga

SEQ ID NO: 9586 - DNA, 170 bp, Artificial sequence
  Nf1.746_NTC.0
  crRNA array
cgatttcttggctttatatatcttgtggaaaggacgaaacaccgtaatttctactaagtgtagattaagcataatgatgatgccataatttctactaagtgtagatacgacttcaatcccccactattttttaagcttggcgtggatccgatatcaactagatcttgaga

SEQ ID NO: 9587 - DNA, 170 bp, Artificial sequence
  Nf1.746_NTC.57
  crRNA array
cgatttcttggctttatatatcttgtggaaaggacgaaacaccgtaatttctactaagtgtagattaagcataatgatgatgccataatttctactaagtgtagatagcgtaacgtgtgcgagtcgttttttaagcttggcgtggatccgatatcaactagatcttgaga

SEQ ID NO: 9588 - DNA, 170 bp, Artificial sequence
  Nf1.746_NTC.89
  crRNA array
cgatttcttggctttatatatcttgtggaaaggacgaaacaccgtaatttctactaagtgtagattaagcataatgatgatgccataatttctactaagtgtagatcctcgccaggtcgttggtatttttttaagcttggcgtggatccgatatcaactagatcttgaga

SEQ ID NO: 9589 - DNA, 170 bp, Artificial sequence
  Nf1.97_NTC.0
  crRNA array
cgatttcttggctttatatatcttgtggaaaggacgaaacaccgtaatttctactaagtgtagatagcccgctacatgctgatgctaatttctactaagtgtagatacgacttcaatcccccactattttttaagcttggcgtggatccgatatcaactagatcttgaga

SEQ ID NO: 9590 - DNA, 170 bp, Artificial sequence
  Nf1.97_NTC.57
  crRNA array
cgatttcttggctttatatatcttgtggaaaggacgaaacaccgtaatttctactaagtgtagatagcccgctacatgctgatgctaatttctactaagtgtagatagcgtaacgtgtgcgagtcgttttttaagcttggcgtggatccgatatcaactagatcttgaga

SEQ ID NO: 9591 - DNA, 170 bp, Artificial sequence
  Nf1.97_NTC.89
  crRNA array
cgatttcttggctttatatatcttgtggaaaggacgaaacaccgtaatttctactaagtgtagatagcccgctacatgctgatgctaatttctactaagtgtagatcctcgccaggtcgttggtatttttttaagcttggcgtggatccgatatcaactagatcttgaga

SEQ ID NO: 9592 - DNA, 170 bp, Artificial sequence
  Nf2.356_NTC.0
  crRNA array
cgatttcttggctttatatatcttgtggaaaggacgaaacaccgtaatttctactaagtgtagatcggagtcatctgatagagattaatttctactaagtgtagatacgacttcaatcccccactattttttaagcttggcgtggatccgatatcaactagatcttgaga

SEQ ID NO: 9593 - DNA, 170 bp, Artificial sequence
  Nf2.356_NTC.57
  crRNA array
cgatttcttggctttatatatcttgtggaaaggacgaaacaccgtaatttctactaagtgtagatcggagtcatctgatagagattaatttctactaagtgtagatagcgtaacgtgtgcgagtcgttttttaagcttggcgtggatccgatatcaactagatcttgaga

SEQ ID NO: 9594 - DNA, 170 bp, Artificial sequence
  Nf2.356_NTC.89
  crRNA array
cgatttcttggctttatatatcttgtggaaaggacgaaacaccgtaatttctactaagtgtagatcggagtcatctgatagagattaatttctactaagtgtagatcctcgccaggtcgttggtatttttttaagcttggcgtggatccgatatcaactagatcttgaga

SEQ ID NO: 9595 - DNA, 170 bp, Artificial sequence
  Nf2.768_NTC.0
  crRNA array
cgatttcttggctttatatatcttgtggaaaggacgaaacaccgtaatttctactaagtgtagatccgaagccccagtgtccggctaatttctactaagtgtagatacgacttcaatcccccactattttttaagcttggcgtggatccgatatcaactagatcttgaga

SEQ ID NO: 9596 - DNA, 170 bp, Artificial sequence
  Nf2.768_NTC.57
  crRNA array
cgatttcttggctttatatatcttgtggaaaggacgaaacaccgtaatttctactaagtgtagatccgaagccccagtgtccggctaatttctactaagtgtagatagcgtaacgtgtgcgagtcgttttttaagcttggcgtggatccgatatcaactagatcttgaga

SEQ ID NO: 9597 - DNA, 170 bp, Artificial sequence
  Nf2.768_NTC.89
  crRNA array
cgatttcttggctttatatatcttgtggaaaggacgaaacaccgtaatttctactaagtgtagatccgaagccccagtgtccggctaatttctactaagtgtagatcctcgccaggtcgttggtatttttttaagcttggcgtggatccgatatcaactagatcttgaga

SEQ ID NO: 9598 - DNA, 170 bp, Artificial sequence
  Notch1.1849_NTC.0
  crRNA array
cgatttcttggctttatatatcttgtggaaaggacgaaacaccgtaatttctactaagtgtagatctggcgggtgggcggcgctgtaatttctactaagtgtagatacgacttcaatcccccactattttttaagcttggcgtggatccgatatcaactagatcttgaga

SEQ ID NO: 9599 - DNA, 170 bp, Artificial sequence
  Notch1.1849_NTC.57
  crRNA array
cgatttcttggctttatatatcttgtggaaaggacgaaacaccgtaatttctactaagtgtagatctggcgggtgggcggcgctgtaatttctactaagtgtagatagcgtaacgtgtgcgagtcgttttttaagcttggcgtggatccgatatcaactagatcttgaga

SEQ ID NO: 9600 - DNA, 170 bp, Artificial sequence
  Notch1.1849_NTC.89
  crRNA array
cgatttcttggctttatatatcttgtggaaaggacgaaacaccgtaatttctactaagtgtagatctggcgggtgggcggcgctgtaatttctactaagtgtagatcctcgccaggtcgttggtatttttttaagcttggcgtggatccgatatcaactagatcttgaga

SEQ ID NO: 9601 - DNA, 170 bp, Artificial sequence
  Notch1.649_NTC.0
  crRNA array
cgatttcttggctttatatatcttgtggaaaggacgaaacaccgtaatttctactaagtgtagattgggccaacgatgccaggactaatttctactaagtgtagatacgacttcaatcccccactattttttaagcttggcgtggatccgatatcaactagatcttgaga

SEQ ID NO: 9602 - DNA, 170 bp, Artificial sequence
  Notch1.649_NTC.57
  crRNA array
cgatttcttggctttatatatcttgtggaaaggacgaaacaccgtaatttctactaagtgtagattgggccaacgatgccaggactaatttctactaagtgtagatagcgtaacgtgtgcgagtcgttttttaagcttggcgtggatccgatatcaactagatcttgaga

SEQ ID NO: 9603 - DNA, 170 bp, Artificial sequence
  Notch1.649_NTC.89
  crRNA array
cgatttcttggctttatatatcttgtggaaaggacgaaacaccgtaatttctactaagtgtagattgggccaacgatgccaggactaatttctactaagtgtagatcctcgccaggtcgttggtatttttttaagcttggcgtggatccgatatcaactagatcttgaga

SEQ ID NO: 9604 - DNA, 170 bp, Artificial sequence
  Nsd1.70_NTC.0
  crRNA array
cgatttcttggctttatatatcttgtggaaaggacgaaacaccgtaatttctactaagtgtagatactggtgtggacgatgcagataatttctactaagtgtagatacgacttcaatcccccactattttttaagcttggcgtggatccgatatcaactagatcttgaga

SEQ ID NO: 9605 - DNA, 170 bp, Artificial sequence
  Nsd1.70_NTC.57
  crRNA array
cgatttcttggctttatatatcttgtggaaaggacgaaacaccgtaatttctactaagtgtagatactggtgtggacgatgcagataatttctactaagtgtagatagcgtaacgtgtgcgagtcgttttttaagcttggcgtggatccgatatcaactagatcttgaga

SEQ ID NO: 9606 - DNA, 170 bp, Artificial sequence
  Nsd1.70_NTC.89
  crRNA array
cgatttcttggctttatatatcttgtggaaaggacgaaacaccgtaatttctactaagtgtagatactggtgtggacgatgcagataatttctactaagtgtagatcctcgccaggtcgttggtatttttttaagcttggcgtggatccgatatcaactagatcttgaga

SEQ ID NO: 9607 - DNA, 170 bp, Artificial sequence
  Nsd1.90_NTC.0
  crRNA array
cgatttcttggctttatatatcttgtggaaaggacgaaacaccgtaatttctactaagtgtagataggagctaacggcaagaatgtaatttctactaagtgtagatacgacttcaatcccccactattttttaagcttggcgtggatccgatatcaactagatcttgaga

SEQ ID NO: 9608 - DNA, 170 bp, Artificial sequence
  Nsd1.90_NTC.57
  crRNA array
cgatttcttggctttatatatcttgtggaaaggacgaaacaccgtaatttctactaagtgtagataggagctaacggcaagaatgtaatttctactaagtgtagatagcgtaacgtgtgcgagtcgttttttaagcttggcgtggatccgatatcaactagatcttgaga

SEQ ID NO: 9609 - DNA, 170 bp, Artificial sequence
  Nsd1.90_NTC.89
  crRNA array
cgatttcttggctttatatatcttgtggaaaggacgaaacaccgtaatttctactaagtgtagataggagctaacggcaagaatgtaatttctactaagtgtagatcctcgccaggtcgttggtatttttttaagcttggcgtggatccgatatcaactagatcttgaga

SEQ ID NO: 9610 - DNA, 170 bp, Artificial sequence
  Pbrm1.1236_NTC.0
  crRNA array
cgatttcttggctttatatatcttgtggaaaggacgaaacaccgtaatttctactaagtgtagatgccgataaaaccaacagccgtaatttctactaagtgtagatacgacttcaatcccccactattttttaagcttggcgtggatccgatatcaactagatcttgaga

SEQ ID NO: 9611 - DNA, 170 bp, Artificial sequence
  Pbrm1.1236_NTC.57
  crRNA array
cgatttcttggctttatatatcttgtggaaaggacgaaacaccgtaatttctactaagtgtagatgccgataaaaccaacagccgtaatttctactaagtgtagatagcgtaacgtgtgcgagtcgttttttaagcttggcgtggatccgatatcaactagatcttgaga

SEQ ID NO: 9612 - DNA, 170 bp, Artificial sequence
  Pbrm1.1236_NTC.89
  crRNA array
cgatttcttggctttatatatcttgtggaaaggacgaaacaccgtaatttctactaagtgtagatgccgataaaaccaacagccgtaatttctactaagtgtagatcctcgccaggtcgttggtatttttttaagcttggcgtggatccgatatcaactagatcttgaga

SEQ ID NO: 9613 - DNA, 170 bp, Artificial sequence
  Pbrm1.969_NTC.0
  crRNA array
cgatttcttggctttatatatcttgtggaaaggacgaaacaccgtaatttctactaagtgtagatgagccctaatgaacagctcataatttctactaagtgtagatacgacttcaatcccccactattttttaagcttggcgtggatccgatatcaactagatcttgaga

SEQ ID NO: 9614 - DNA, 170 bp, Artificial sequence
  Pbrm1.969_NTC.57
  crRNA array
cgatttcttggctttatatatcttgtggaaaggacgaaacaccgtaatttctactaagtgtagatgagccctaatgaacagctcataatttctactaagtgtagatagcgtaacgtgtgcgagtcgttttttaagcttggcgtggatccgatatcaactagatcttgaga

SEQ ID NO: 9615 - DNA, 170 bp, Artificial sequence
  Pbrm1.969_NTC.89
  crRNA array
cgatttcttggctttatatatcttgtggaaaggacgaaacaccgtaatttctactaagtgtagatgagccctaatgaacagctcataatttctactaagtgtagatcctcgccaggtcgttggtatttttttaagcttggcgtggatccgatatcaactagatcttgaga

SEQ ID NO: 9616 - DNA, 170 bp, Artificial sequence
  Pik3r1.76_NTC.0
  crRNA array
cgatttcttggctttatatatcttgtggaaaggacgaaacaccgtaatttctactaagtgtagataaaacctatacggcccgcactaatttctactaagtgtagatacgacttcaatcccccactattttttaagcttggcgtggatccgatatcaactagatcttgaga

SEQ ID NO: 9617 - DNA, 170 bp, Artificial sequence
  Pik3r1.76_NTC.57
  crRNA array
cgatttcttggctttatatatcttgtggaaaggacgaaacaccgtaatttctactaagtgtagataaaacctatacggcccgcactaatttctactaagtgtagatagcgtaacgtgtgcgagtcgttttttaagcttggcgtggatccgatatcaactagatcttgaga

SEQ ID NO: 9618 - DNA, 170 bp, Artificial sequence
  Pik3r1.76_NTC.89
  crRNA array
cgatttcttggctttatatatcttgtggaaaggacgaaacaccgtaatttctactaagtgtagataaaacctatacggcccgcactaatttctactaagtgtagatcctcgccaggtcgttggtatttttttaagcttggcgtggatccgatatcaactagatcttgaga

SEQ ID NO: 9619 - DNA, 170 bp, Artificial sequence
  Pik3r1.77_NTC.0
  crRNA array
cgatttcttggctttatatatcttgtggaaaggacgaaacaccgtaatttctactaagtgtagataaacctatacggcccgcacttaatttctactaagtgtagatacgacttcaatcccccactattttttaagcttggcgtggatccgatatcaactagatcttgaga

SEQ ID NO: 9620 - DNA, 170 bp, Artificial sequence
  Pik3r1.77_NTC.57
  crRNA array
cgatttcttggctttatatatcttgtggaaaggacgaaacaccgtaatttctactaagtgtagataaacctatacggcccgcacttaatttctactaagtgtagatagcgtaacgtgtgcgagtcgttttttaagcttggcgtggatccgatatcaactagatcttgaga

SEQ ID NO: 9621 - DNA, 170 bp, Artificial sequence
  Pik3r1.77_NTC.89
  crRNA array
cgatttcttggctttatatatcttgtggaaaggacgaaacaccgtaatttctactaagtgtagataaacctatacggcccgcacttaatttctactaagtgtagatcctcgccaggtcgttggtatttttttaagcttggcgtggatccgatatcaactagatcttgaga

SEQ ID NO: 9622 - DNA, 170 bp, Artificial sequence
  Pten.240_NTC.0
  crRNA array
cgatttcttggctttatatatcttgtggaaaggacgaaacaccgtaatttctactaagtgtagattgcatacgctatagctgctttaatttctactaagtgtagatacgacttcaatcccccactattttttaagcttggcgtggatccgatatcaactagatcttgaga

SEQ ID NO: 9623 - DNA, 170 bp, Artificial sequence
  Pten.240_NTC.57
  crRNA array
cgatttcttggctttatatatcttgtggaaaggacgaaacaccgtaatttctactaagtgtagattgcatacgctatagctgctttaatttctactaagtgtagatagcgtaacgtgtgcgagtcgttttttaagcttggcgtggatccgatatcaactagatcttgaga

SEQ ID NO: 9624 - DNA, 170 bp, Artificial sequence
  Pten.240_NTC.89
  crRNA array
cgatttcttggctttatatatcttgtggaaaggacgaaacaccgtaatttctactaagtgtagattgcatacgctatagctgctttaatttctactaagtgtagatcctcgccaggtcgttggtatttttttaagcttggcgtggatccgatatcaactagatcttgaga

SEQ ID NO: 9625 - DNA, 170 bp, Artificial sequence
  Pten.265_NTC.0
  crRNA array
cgatttcttggctttatatatcttgtggaaaggacgaaacaccgtaatttctactaagtgtagataagcgtggtgcgtgacgcactaatttctactaagtgtagatacgacttcaatcccccactattttttaagcttggcgtggatccgatatcaactagatcttgaga

SEQ ID NO: 9626 - DNA, 170 bp, Artificial sequence
  Pten.265_NTC.57
  crRNA array
cgatttcttggctttatatatcttgtggaaaggacgaaacaccgtaatttctactaagtgtagataagcgtggtgcgtgacgcactaatttctactaagtgtagatagcgtaacgtgtgcgagtcgttttttaagcttggcgtggatccgatatcaactagatcttgaga

SEQ ID NO: 9627 - DNA, 170 bp, Artificial sequence
  Pten.265_NTC.89
  crRNA array
cgatttcttggctttatatatcttgtggaaaggacgaaacaccgtaatttctactaagtgtagataagcgtggtgcgtgacgcactaatttctactaagtgtagatcctcgccaggtcgttggtatttttttaagcttggcgtggatccgatatcaactagatcttgaga

SEQ ID NO: 9628 - DNA, 170 bp, Artificial sequence
  Rasa1.1478_NTC.0
  crRNA array
cgatttcttggctttatatatcttgtggaaaggacgaaacaccgtaatttctactaagtgtagatcgataatggtctatgatgtctaatttctactaagtgtagatacgacttcaatcccccactattttttaagcttggcgtggatccgatatcaactagatcttgaga

SEQ ID NO: 9629 - DNA, 170 bp, Artificial sequence
  Rasa1.1478_NTC.57
  crRNA array
cgatttcttggctttatatatcttgtggaaaggacgaaacaccgtaatttctactaagtgtagatcgataatggtctatgatgtctaatttctactaagtgtagatagcgtaacgtgtgcgagtcgttttttaagcttggcgtggatccgatatcaactagatcttgaga

SEQ ID NO: 9630 - DNA, 170 bp, Artificial sequence
  Rasa1.1478_NTC.89
  crRNA array
cgatttcttggctttatatatcttgtggaaaggacgaaacaccgtaatttctactaagtgtagatcgataatggtctatgatgtctaatttctactaagtgtagatcctcgccaggtcgttggtatttttttaagcttggcgtggatccgatatcaactagatcttgaga

SEQ ID NO: 9631 - DNA, 170 bp, Artificial sequence
  Rasa1.223_NTC.0
  crRNA array
cgatttcttggctttatatatcttgtggaaaggacgaaacaccgtaatttctactaagtgtagattccatggagtatcgtgctcgtaatttctactaagtgtagatacgacttcaatcccccactattttttaagcttggcgtggatccgatatcaactagatcttgaga

SEQ ID NO: 9632 - DNA, 170 bp, Artificial sequence
  Rasa1.223_NTC.57
  crRNA array
cgatttcttggctttatatatcttgtggaaaggacgaaacaccgtaatttctactaagtgtagattccatggagtatcgtgctcgtaatttctactaagtgtagatagcgtaacgtgtgcgagtcgttttttaagcttggcgtggatccgatatcaactagatcttgaga

SEQ ID NO: 9633 - DNA, 170 bp, Artificial sequence
  Rasa1.223_NTC.89
  crRNA array
cgatttcttggctttatatatcttgtggaaaggacgaaacaccgtaatttctactaagtgtagattccatggagtatcgtgctcgtaatttctactaagtgtagatcctcgccaggtcgttggtatttttttaagcttggcgtggatccgatatcaactagatcttgaga

SEQ ID NO: 9634 - DNA, 170 bp, Artificial sequence
  Rb1.211_NTC.0
  crRNA array
cgatttcttggctttatatatcttgtggaaaggacgaaacaccgtaatttctactaagtgtagattctgacatgatcgggtaccttaatttctactaagtgtagatacgacttcaatcccccactattttttaagcttggcgtggatccgatatcaactagatcttgaga

SEQ ID NO: 9635 - DNA, 170 bp, Artificial sequence
  Rb1.211_NTC.57
  crRNA array
cgatttcttggctttatatatcttgtggaaaggacgaaacaccgtaatttctactaagtgtagattctgacatgatcgggtaccttaatttctactaagtgtagatagcgtaacgtgtgcgagtcgttttttaagcttggcgtggatccgatatcaactagatcttgaga

SEQ ID NO: 9636 - DNA, 170 bp, Artificial sequence
  Rb1.211_NTC.89
  crRNA array
cgatttcttggctttatatatcttgtggaaaggacgaaacaccgtaatttctactaagtgtagattctgacatgatcgggtaccttaatttctactaagtgtagatcctcgccaggtcgttggtatttttttaagcttggcgtggatccgatatcaactagatcttgaga

SEQ ID NO: 9637 - DNA, 170 bp, Artificial sequence
  Rb1.394_NTC.0
  crRNA array
cgatttcttggctttatatatcttgtggaaaggacgaaacaccgtaatttctactaagtgtagatagaaatctcgaagcaggatctaatttctactaagtgtagatacgacttcaatcccccactattttttaagcttggcgtggatccgatatcaactagatcttgaga

SEQ ID NO: 9638 - DNA, 170 bp, Artificial sequence
  Rb1.394_NTC.57
  crRNA array
cgatttcttggctttatatatcttgtggaaaggacgaaacaccgtaatttctactaagtgtagatagaaatctcgaagcaggatctaatttctactaagtgtagatagcgtaacgtgtgcgagtcgttttttaagcttggcgtggatccgatatcaactagatcttgaga

SEQ ID NO: 9639 - DNA, 170 bp, Artificial sequence
  Rb1.394_NTC.89
  crRNA array
cgatttcttggctttatatatcttgtggaaaggacgaaacaccgtaatttctactaagtgtagatagaaatctcgaagcaggatctaatttctactaagtgtagatcctcgccaggtcgttggtatttttttaagcttggcgtggatccgatatcaactagatcttgaga

SEQ ID NO: 9640 - DNA, 170 bp, Artificial sequence
  Rbm10.5_NTC.0
  crRNA array
cgatttcttggctttatatatcttgtggaaaggacgaaacaccgtaatttctactaagtgtagatacgaaacctgaacccacacataatttctactaagtgtagatacgacttcaatcccccactattttttaagcttggcgtggatccgatatcaactagatcttgaga

SEQ ID NO: 9641 - DNA, 170 bp, Artificial sequence
  Rbm10.5_NTC.57
  crRNA array
cgatttcttggctttatatatcttgtggaaaggacgaaacaccgtaatttctactaagtgtagatacgaaacctgaacccacacataatttctactaagtgtagatagcgtaacgtgtgcgagtcgttttttaagcttggcgtggatccgatatcaactagatcttgaga

SEQ ID NO: 9642 - DNA, 170 bp, Artificial sequence
  Rbm10.5_NTC.89
  crRNA array
cgatttcttggctttatatatcttgtggaaaggacgaaacaccgtaatttctactaagtgtagatacgaaacctgaacccacacataatttctactaagtgtagatcctcgccaggtcgttggtatttttttaagcttggcgtggatccgatatcaactagatcttgaga

SEQ ID NO: 9643 - DNA, 170 bp, Artificial sequence
  Rbm10.6_NTC.0
  crRNA array
cgatttcttggctttatatatcttgtggaaaggacgaaacaccgtaatttctactaagtgtagatcgaaacctgaacccacacagtaatttctactaagtgtagatacgacttcaatcccccactattttttaagcttggcgtggatccgatatcaactagatcttgaga

SEQ ID NO: 9644 - DNA, 170 bp, Artificial sequence
  Rbm10.6_NTC.57
  crRNA array
cgatttcttggctttatatatcttgtggaaaggacgaaacaccgtaatttctactaagtgtagatcgaaacctgaacccacacagtaatttctactaagtgtagatagcgtaacgtgtgcgagtcgttttttaagcttggcgtggatccgatatcaactagatcttgaga

SEQ ID NO: 9645 - DNA, 170 bp, Artificial sequence
  Rbm10.6_NTC.89
  crRNA array
cgatttcttggctttatatatcttgtggaaaggacgaaacaccgtaatttctactaagtgtagatcgaaacctgaacccacacagtaatttctactaagtgtagatcctcgccaggtcgttggtatttttttaagcttggcgtggatccgatatcaactagatcttgaga

SEQ ID NO: 9646 - DNA, 170 bp, Artificial sequence
  Rnf43.1920_NTC.0
  crRNA array
cgatttcttggctttatatatcttgtggaaaggacgaaacaccgtaatttctactaagtgtagatatccccgtgccgtggactcctaatttctactaagtgtagatacgacttcaatcccccactattttttaagcttggcgtggatccgatatcaactagatcttgaga

SEQ ID NO: 9647 - DNA, 170 bp, Artificial sequence
  Rnf43.1920_NTC.57
  crRNA array
cgatttcttggctttatatatcttgtggaaaggacgaaacaccgtaatttctactaagtgtagatatccccgtgccgtggactcctaatttctactaagtgtagatagcgtaacgtgtgcgagtcgttttttaagcttggcgtggatccgatatcaactagatcttgaga

SEQ ID NO: 9648 - DNA, 170 bp, Artificial sequence
  Rnf43.1920_NTC.89
  crRNA array
cgatttcttggctttatatatcttgtggaaaggacgaaacaccgtaatttctactaagtgtagatatccccgtgccgtggactcctaatttctactaagtgtagatcctcgccaggtcgttggtatttttttaagcttggcgtggatccgatatcaactagatcttgaga

SEQ ID NO: 9649 - DNA, 170 bp, Artificial sequence
  Rnf43.39_NTC.0
  crRNA array
cgatttcttggctttatatatcttgtggaaaggacgaaacaccgtaatttctactaagtgtagatcaaggggatcactctgataataatttctactaagtgtagatacgacttcaatcccccactattttttaagcttggcgtggatccgatatcaactagatcttgaga

SEQ ID NO: 9650 - DNA, 170 bp, Artificial sequence
  Rnf43.39_NTC.57
  crRNA array
cgatttcttggctttatatatcttgtggaaaggacgaaacaccgtaatttctactaagtgtagatcaaggggatcactctgataataatttctactaagtgtagatagcgtaacgtgtgcgagtcgttttttaagcttggcgtggatccgatatcaactagatcttgaga

SEQ ID NO: 9651 - DNA, 170 bp, Artificial sequence
  Rnf43.39_NTC.89
  crRNA array
cgatttcttggctttatatatcttgtggaaaggacgaaacaccgtaatttctactaagtgtagatcaaggggatcactctgataataatttctactaagtgtagatcctcgccaggtcgttggtatttttttaagcttggcgtggatccgatatcaactagatcttgaga

SEQ ID NO: 9652 - DNA, 170 bp, Artificial sequence
  Runx1.204_NTC.0
  crRNA array
cgatttcttggctttatatatcttgtggaaaggacgaaacaccgtaatttctactaagtgtagattaaataagtccagccgtttttaatttctactaagtgtagatacgacttcaatcccccactattttttaagcttggcgtggatccgatatcaactagatcttgaga

SEQ ID NO: 9653 - DNA, 170 bp, Artificial sequence
  Runx1.204_NTC.57
  crRNA array
cgatttcttggctttatatatcttgtggaaaggacgaaacaccgtaatttctactaagtgtagattaaataagtccagccgtttttaatttctactaagtgtagatagcgtaacgtgtgcgagtcgttttttaagcttggcgtggatccgatatcaactagatcttgaga

SEQ ID NO: 9654 - DNA, 170 bp, Artificial sequence
  Runx1.204_NTC.89
  crRNA array
cgatttcttggctttatatatcttgtggaaaggacgaaacaccgtaatttctactaagtgtagattaaataagtccagccgtttttaatttctactaagtgtagatcctcgccaggtcgttggtatttttttaagcttggcgtggatccgatatcaactagatcttgaga

SEQ ID NO: 9655 - DNA, 170 bp, Artificial sequence
  Runx1.81_NTC.0
  crRNA array
cgatttcttggctttatatatcttgtggaaaggacgaaacaccgtaatttctactaagtgtagataggacgcgtatgggaatttttaatttctactaagtgtagatacgacttcaatcccccactattttttaagcttggcgtggatccgatatcaactagatcttgaga

SEQ ID NO: 9656 - DNA, 170 bp, Artificial sequence
  Runx1.81_NTC.57
  crRNA array
cgatttcttggctttatatatcttgtggaaaggacgaaacaccgtaatttctactaagtgtagataggacgcgtatgggaatttttaatttctactaagtgtagatagcgtaacgtgtgcgagtcgttttttaagcttggcgtggatccgatatcaactagatcttgaga

SEQ ID NO: 9657 - DNA, 170 bp, Artificial sequence
  Runx1.81_NTC.89
  crRNA array
cgatttcttggctttatatatcttgtggaaaggacgaaacaccgtaatttctactaagtgtagataggacgcgtatgggaatttttaatttctactaagtgtagatcctcgccaggtcgttggtatttttttaagcttggcgtggatccgatatcaactagatcttgaga

SEQ ID NO: 9658 - DNA, 170 bp, Artificial sequence
  Setd2.143_NTC.0
  crRNA array
cgatttcttggctttatatatcttgtggaaaggacgaaacaccgtaatttctactaagtgtagatgcacaaccacaacagactggtaatttctactaagtgtagatacgacttcaatcccccactattttttaagcttggcgtggatccgatatcaactagatcttgaga

SEQ ID NO: 9659 - DNA, 170 bp, Artificial sequence
  Setd2.143_NTC.57
  crRNA array
cgatttcttggctttatatatcttgtggaaaggacgaaacaccgtaatttctactaagtgtagatgcacaaccacaacagactggtaatttctactaagtgtagatagcgtaacgtgtgcgagtcgttttttaagcttggcgtggatccgatatcaactagatcttgaga

SEQ ID NO: 9660 - DNA, 170 bp, Artificial sequence
  Setd2.143_NTC.89
  crRNA array
cgatttcttggctttatatatcttgtggaaaggacgaaacaccgtaatttctactaagtgtagatgcacaaccacaacagactggtaatttctactaagtgtagatcctcgccaggtcgttggtatttttttaagcttggcgtggatccgatatcaactagatcttgaga

SEQ ID NO: 9661 - DNA, 170 bp, Artificial sequence
  Setd2.508_NTC.0
  crRNA array
cgatttcttggctttatatatcttgtggaaaggacgaaacaccgtaatttctactaagtgtagattacgatcccgagcacccgactaatttctactaagtgtagatacgacttcaatcccccactattttttaagcttggcgtggatccgatatcaactagatcttgaga

SEQ ID NO: 9662 - DNA, 170 bp, Artificial sequence
  Setd2.508_NTC.57
  crRNA array
cgatttcttggctttatatatcttgtggaaaggacgaaacaccgtaatttctactaagtgtagattacgatcccgagcacccgactaatttctactaagtgtagatagcgtaacgtgtgcgagtcgttttttaagcttggcgtggatccgatatcaactagatcttgaga

SEQ ID NO: 9663 - DNA, 170 bp, Artificial sequence
  Setd2.508_NTC.89
  crRNA array
cgatttcttggctttatatatcttgtggaaaggacgaaacaccgtaatttctactaagtgtagattacgatcccgagcacccgactaatttctactaagtgtagatcctcgccaggtcgttggtatttttttaagcttggcgtggatccgatatcaactagatcttgaga

SEQ ID NO: 9664 - DNA, 170 bp, Artificial sequence
  Smad4.3038_NTC.0
  crRNA array
cgatttcttggctttatatatcttgtggaaaggacgaaacaccgtaatttctactaagtgtagatatctgcggcagtgtcaccggtaatttctactaagtgtagatacgacttcaatcccccactattttttaagcttggcgtggatccgatatcaactagatcttgaga

SEQ ID NO: 9665 - DNA, 170 bp, Artificial sequence
  Smad4.3038_NTC.57
  crRNA array
cgatttcttggctttatatatcttgtggaaaggacgaaacaccgtaatttctactaagtgtagatatctgcggcagtgtcaccggtaatttctactaagtgtagatagcgtaacgtgtgcgagtcgttttttaagcttggcgtggatccgatatcaactagatcttgaga

SEQ ID NO: 9666 - DNA, 170 bp, Artificial sequence
  Smad4.3038_NTC.89
  crRNA array
cgatttcttggctttatatatcttgtggaaaggacgaaacaccgtaatttctactaagtgtagatatctgcggcagtgtcaccggtaatttctactaagtgtagatcctcgccaggtcgttggtatttttttaagcttggcgtggatccgatatcaactagatcttgaga

SEQ ID NO: 9667 - DNA, 170 bp, Artificial sequence
  Smad4.39_NTC.0
  crRNA array
cgatttcttggctttatatatcttgtggaaaggacgaaacaccgtaatttctactaagtgtagatagtcaaacgcatactgacaataatttctactaagtgtagatacgacttcaatcccccactattttttaagcttggcgtggatccgatatcaactagatcttgaga

SEQ ID NO: 9668 - DNA, 170 bp, Artificial sequence
  Smad4.39_NTC.57
  crRNA array
cgatttcttggctttatatatcttgtggaaaggacgaaacaccgtaatttctactaagtgtagatagtcaaacgcatactgacaataatttctactaagtgtagatagcgtaacgtgtgcgagtcgttttttaagcttggcgtggatccgatatcaactagatcttgaga

SEQ ID NO: 9669 - DNA, 170 bp, Artificial sequence
  Smad4.39_NTC.89
  crRNA array
cgatttcttggctttatatatcttgtggaaaggacgaaacaccgtaatttctactaagtgtagatagtcaaacgcatactgacaataatttctactaagtgtagatcctcgccaggtcgttggtatttttttaagcttggcgtggatccgatatcaactagatcttgaga

SEQ ID NO: 9670 - DNA, 170 bp, Artificial sequence
  Stag2.1409_NTC.0
  crRNA array
cgatttcttggctttatatatcttgtggaaaggacgaaacaccgtaatttctactaagtgtagatgctaataactgcggaagggctaatttctactaagtgtagatacgacttcaatcccccactattttttaagcttggcgtggatccgatatcaactagatcttgaga

SEQ ID NO: 9671 - DNA, 170 bp, Artificial sequence
  Stag2.1409_NTC.57
  crRNA array
cgatttcttggctttatatatcttgtggaaaggacgaaacaccgtaatttctactaagtgtagatgctaataactgcggaagggctaatttctactaagtgtagatagcgtaacgtgtgcgagtcgttttttaagcttggcgtggatccgatatcaactagatcttgaga

SEQ ID NO: 9672 - DNA, 170 bp, Artificial sequence
  Stag2.1409_NTC.89
  crRNA array
cgatttcttggctttatatatcttgtggaaaggacgaaacaccgtaatttctactaagtgtagatgctaataactgcggaagggctaatttctactaagtgtagatcctcgccaggtcgttggtatttttttaagcttggcgtggatccgatatcaactagatcttgaga

SEQ ID NO: 9673 - DNA, 170 bp, Artificial sequence
  Stag2.4401_NTC.0
  crRNA array
cgatttcttggctttatatatcttgtggaaaggacgaaacaccgtaatttctactaagtgtagattaatcgtccagtggtgtatataatttctactaagtgtagatacgacttcaatcccccactattttttaagcttggcgtggatccgatatcaactagatcttgaga

SEQ ID NO: 9674 - DNA, 170 bp, Artificial sequence
  Stag2.4401_NTC.57
  crRNA array
cgatttcttggctttatatatcttgtggaaaggacgaaacaccgtaatttctactaagtgtagattaatcgtccagtggtgtatataatttctactaagtgtagatagcgtaacgtgtgcgagtcgttttttaagcttggcgtggatccgatatcaactagatcttgaga

SEQ ID NO: 9675 - DNA, 170 bp, Artificial sequence
  Stag2.4401_NTC.89
  crRNA array
cgatttcttggctttatatatcttgtggaaaggacgaaacaccgtaatttctactaagtgtagattaatcgtccagtggtgtatataatttctactaagtgtagatcctcgccaggtcgttggtatttttttaagcttggcgtggatccgatatcaactagatcttgaga

SEQ ID NO: 9676 - DNA, 170 bp, Artificial sequence
  Tbl1xr1.1_NTC.0
  crRNA array
cgatttcttggctttatatatcttgtggaaaggacgaaacaccgtaatttctactaagtgtagatggatgcgcatactggtgaagtaatttctactaagtgtagatacgacttcaatcccccactattttttaagcttggcgtggatccgatatcaactagatcttgaga

SEQ ID NO: 9677 - DNA, 170 bp, Artificial sequence
  Tbl1xr1.1_NTC.57
  crRNA array
cgatttcttggctttatatatcttgtggaaaggacgaaacaccgtaatttctactaagtgtagatggatgcgcatactggtgaagtaatttctactaagtgtagatagcgtaacgtgtgcgagtcgttttttaagcttggcgtggatccgatatcaactagatcttgaga

SEQ ID NO: 9678 - DNA, 170 bp, Artificial sequence
  Tbl1xr1.1_NTC.89
  crRNA array
cgatttcttggctttatatatcttgtggaaaggacgaaacaccgtaatttctactaagtgtagatggatgcgcatactggtgaagtaatttctactaagtgtagatcctcgccaggtcgttggtatttttttaagcttggcgtggatccgatatcaactagatcttgaga

SEQ ID NO: 9679 - DNA, 170 bp, Artificial sequence
  Tbl1xr1.83_NTC.0
  crRNA array
cgatttcttggctttatatatcttgtggaaaggacgaaacaccgtaatttctactaagtgtagatatggtcgacccatcgagtcttaatttctactaagtgtagatacgacttcaatcccccactattttttaagcttggcgtggatccgatatcaactagatcttgaga

SEQ ID NO: 9680 - DNA, 170 bp, Artificial sequence
  Tbl1xr1.83_NTC.57
  crRNA array
cgatttcttggctttatatatcttgtggaaaggacgaaacaccgtaatttctactaagtgtagatatggtcgacccatcgagtcttaatttctactaagtgtagatagcgtaacgtgtgcgagtcgttttttaagcttggcgtggatccgatatcaactagatcttgaga

SEQ ID NO: 9681 - DNA, 170 bp, Artificial sequence
  Tbl1xr1.83_NTC.89
  crRNA array
cgatttcttggctttatatatcttgtggaaaggacgaaacaccgtaatttctactaagtgtagatatggtcgacccatcgagtcttaatttctactaagtgtagatcctcgccaggtcgttggtatttttttaagcttggcgtggatccgatatcaactagatcttgaga

SEQ ID NO: 9682 - DNA, 170 bp, Artificial sequence
  Tgfbr2.290_NTC.0
  crRNA array
cgatttcttggctttatatatcttgtggaaaggacgaaacaccgtaatttctactaagtgtagatcctctcggcgcccgggtaaataatttctactaagtgtagatacgacttcaatcccccactattttttaagcttggcgtggatccgatatcaactagatcttgaga

SEQ ID NO: 9683 - DNA, 170 bp, Artificial sequence
  Tgfbr2.290_NTC.57
  crRNA array
cgatttcttggctttatatatcttgtggaaaggacgaaacaccgtaatttctactaagtgtagatcctctcggcgcccgggtaaataatttctactaagtgtagatagcgtaacgtgtgcgagtcgttttttaagcttggcgtggatccgatatcaactagatcttgaga

SEQ ID NO: 9684 - DNA, 170 bp, Artificial sequence
  Tgfbr2.290_NTC.89
  crRNA array
cgatttcttggctttatatatcttgtggaaaggacgaaacaccgtaatttctactaagtgtagatcctctcggcgcccgggtaaataatttctactaagtgtagatcctcgccaggtcgttggtatttttttaagcttggcgtggatccgatatcaactagatcttgaga

SEQ ID NO: 9685 - DNA, 170 bp, Artificial sequence
  Tgfbr2.292_NTC.0
  crRNA array
cgatttcttggctttatatatcttgtggaaaggacgaaacaccgtaatttctactaagtgtagatcccgggcgccgagagggaaataatttctactaagtgtagatacgacttcaatcccccactattttttaagcttggcgtggatccgatatcaactagatcttgaga

SEQ ID NO: 9686 - DNA, 170 bp, Artificial sequence
  Tgfbr2.292_NTC.57
  crRNA array
cgatttcttggctttatatatcttgtggaaaggacgaaacaccgtaatttctactaagtgtagatcccgggcgccgagagggaaataatttctactaagtgtagatagcgtaacgtgtgcgagtcgttttttaagcttggcgtggatccgatatcaactagatcttgaga

SEQ ID NO: 9687 - DNA, 170 bp, Artificial sequence
  Tgfbr2.292_NTC.89
  crRNA array
cgatttcttggctttatatatcttgtggaaaggacgaaacaccgtaatttctactaagtgtagatcccgggcgccgagagggaaataatttctactaagtgtagatcctcgccaggtcgttggtatttttttaagcttggcgtggatccgatatcaactagatcttgaga

SEQ ID NO: 9688 - DNA, 170 bp, Artificial sequence
  Trp53.4_NTC.0
  crRNA array
cgatttcttggctttatatatcttgtggaaaggacgaaacaccgtaatttctactaagtgtagatccctgaactgcccccagggataatttctactaagtgtagatacgacttcaatcccccactattttttaagcttggcgtggatccgatatcaactagatcttgaga

SEQ ID NO: 9689 - DNA, 170 bp, Artificial sequence
  Trp53.4_NTC.57
  crRNA array
cgatttcttggctttatatatcttgtggaaaggacgaaacaccgtaatttctactaagtgtagatccctgaactgcccccagggataatttctactaagtgtagatagcgtaacgtgtgcgagtcgttttttaagcttggcgtggatccgatatcaactagatcttgaga

SEQ ID NO: 9690 - DNA, 170 bp, Artificial sequence
  Trp53.4_NTC.89
  crRNA array
cgatttcttggctttatatatcttgtggaaaggacgaaacaccgtaatttctactaagtgtagatccctgaactgcccccagggataatttctactaagtgtagatcctcgccaggtcgttggtatttttttaagcttggcgtggatccgatatcaactagatcttgaga

SEQ ID NO: 9691 - DNA, 170 bp, Artificial sequence
  Trp53.528_NTC.0
  crRNA array
cgatttcttggctttatatatcttgtggaaaggacgaaacaccgtaatttctactaagtgtagatgctgggccagcagagacctgtaatttctactaagtgtagatacgacttcaatcccccactattttttaagcttggcgtggatccgatatcaactagatcttgaga

SEQ ID NO: 9692 - DNA, 170 bp, Artificial sequence
  Trp53.528_NTC.57
  crRNA array
cgatttcttggctttatatatcttgtggaaaggacgaaacaccgtaatttctactaagtgtagatgctgggccagcagagacctgtaatttctactaagtgtagatagcgtaacgtgtgcgagtcgttttttaagcttggcgtggatccgatatcaactagatcttgaga

SEQ ID NO: 9693 - DNA, 170 bp, Artificial sequence
  Trp53.528_NTC.89
  crRNA array
cgatttcttggctttatatatcttgtggaaaggacgaaacaccgtaatttctactaagtgtagatgctgggccagcagagacctgtaatttctactaagtgtagatcctcgccaggtcgttggtatttttttaagcttggcgtggatccgatatcaactagatcttgaga

SEQ ID NO: 9694 - DNA, 170 bp, Artificial sequence
  Vhl.1_NTC.0
  crRNA array
cgatttcttggctttatatatcttgtggaaaggacgaaacaccgtaatttctactaagtgtagatagggctcccggcggccattttaatttctactaagtgtagatacgacttcaatcccccactattttttaagcttggcgtggatccgatatcaactagatcttgaga

SEQ ID NO: 9695 - DNA, 170 bp, Artificial sequence
  Vhl.1_NTC.57
  crRNA array
cgatttcttggctttatatatcttgtggaaaggacgaaacaccgtaatttctactaagtgtagatagggctcccggcggccattttaatttctactaagtgtagatagcgtaacgtgtgcgagtcgttttttaagcttggcgtggatccgatatcaactagatcttgaga

SEQ ID NO: 9696 - DNA, 170 bp, Artificial sequence
  Vhl.1_NTC.89
  crRNA array
cgatttcttggctttatatatcttgtggaaaggacgaaacaccgtaatttctactaagtgtagatagggctcccggcggccattttaatttctactaagtgtagatcctcgccaggtcgttggtatttttttaagcttggcgtggatccgatatcaactagatcttgaga

SEQ ID NO: 9697 - DNA, 170 bp, Artificial sequence
  Vhl.151_NTC.0
  crRNA array
cgatttcttggctttatatatcttgtggaaaggacgaaacaccgtaatttctactaagtgtagattagagcactcacccgagggataatttctactaagtgtagatacgacttcaatcccccactattttttaagcttggcgtggatccgatatcaactagatcttgaga

SEQ ID NO: 9698 - DNA, 170 bp, Artificial sequence
  Vhl.151_NTC.57
  crRNA array
cgatttcttggctttatatatcttgtggaaaggacgaaacaccgtaatttctactaagtgtagattagagcactcacccgagggataatttctactaagtgtagatagcgtaacgtgtgcgagtcgttttttaagcttggcgtggatccgatatcaactagatcttgaga

SEQ ID NO: 9699 - DNA, 170 bp, Artificial sequence
  Vhl.151_NTC.89
  crRNA array
cgatttcttggctttatatatcttgtggaaaggacgaaacaccgtaatttctactaagtgtagattagagcactcacccgagggataatttctactaagtgtagatcctcgccaggtcgttggtatttttttaagcttggcgtggatccgatatcaactagatcttgaga

SEQ ID NO: 9700 - DNA, 170 bp, Artificial sequence
  Zc3h13.1387_NTC.0
  crRNA array
cgatttcttggctttatatatcttgtggaaaggacgaaacaccgtaatttctactaagtgtagatgtgacgccggtcatgtgacttaatttctactaagtgtagatacgacttcaatcccccactattttttaagcttggcgtggatccgatatcaactagatcttgaga

SEQ ID NO: 9701 - DNA, 170 bp, Artificial sequence
  Zc3h13.1387_NTC.57
  crRNA array
cgatttcttggctttatatatcttgtggaaaggacgaaacaccgtaatttctactaagtgtagatgtgacgccggtcatgtgacttaatttctactaagtgtagatagcgtaacgtgtgcgagtcgttttttaagcttggcgtggatccgatatcaactagatcttgaga

SEQ ID NO: 9702 - DNA, 170 bp, Artificial sequence
  Zc3h13.1387_NTC.89
  crRNA array
cgatttcttggctttatatatcttgtggaaaggacgaaacaccgtaatttctactaagtgtagatgtgacgccggtcatgtgacttaatttctactaagtgtagatcctcgccaggtcgttggtatttttttaagcttggcgtggatccgatatcaactagatcttgaga

SEQ ID NO: 9703 - DNA, 170 bp, Artificial sequence
  Zc3h13.1777_NTC.0
  crRNA array
cgatttcttggctttatatatcttgtggaaaggacgaaacaccgtaatttctactaagtgtagatgatgctgccagtgtagcggctaatttctactaagtgtagatacgacttcaatcccccactattttttaagcttggcgtggatccgatatcaactagatcttgaga

SEQ ID NO: 9704 - DNA, 170 bp, Artificial sequence
  Zc3h13.1777_NTC.57
  crRNA array
cgatttcttggctttatatatcttgtggaaaggacgaaacaccgtaatttctactaagtgtagatgatgctgccagtgtagcggctaatttctactaagtgtagatagcgtaacgtgtgcgagtcgttttttaagcttggcgtggatccgatatcaactagatcttgaga

SEQ ID NO: 9705 - DNA, 170 bp, Artificial sequence
  Zc3h13.1777_NTC.89
  crRNA array
cgatttcttggctttatatatcttgtggaaaggacgaaacaccgtaatttctactaagtgtagatgatgctgccagtgtagcggctaatttctactaagtgtagatcctcgccaggtcgttggtatttttttaagcttggcgtggatccgatatcaactagatcttgaga

SEQ ID NO: 9706 - DNA, 170 bp, Artificial sequence
  NTC.0_NTC.57
  crRNA array
cgatttcttggctttatatatcttgtggaaaggacgaaacaccgtaatttctactaagtgtagatacgacttcaatcccccactataatttctactaagtgtagatagcgtaacgtgtgcgagtcgttttttaagcttggcgtggatccgatatcaactagatcttgaga

SEQ ID NO: 9707 - DNA, 170 bp, Artificial sequence
  NTC.0_NTC.89
  crRNA array
cgatttcttggctttatatatcttgtggaaaggacgaaacaccgtaatttctactaagtgtagatacgacttcaatcccccactataatttctactaagtgtagatcctcgccaggtcgttggtatttttttaagcttggcgtggatccgatatcaactagatcttgaga

SEQ ID NO: 9708 - DNA, 170 bp, Artificial sequence
  NTC.57_NTC.89
  crRNA array
cgatttcttggctttatatatcttgtggaaaggacgaaacaccgtaatttctactaagtgtagatagcgtaacgtgtgcgagtcgtaatttctactaagtgtagatcctcgccaggtcgttggtatttttttaagcttggcgtggatccgatatcaactagatcttgaga

SEQ ID NO: 9709 - DNA, 20 bp, Artificial sequence
  crPten
  crRNA array
tgcatacgctatagctgctt

SEQ ID NO: 9710 - DNA, 20 bp, Artificial sequence
  crNf1
  crRNA array
taagcataatgatgatgcca

SEQ ID NO: 9711 - DNA, 25 bp, Artificial sequence
  Pten_fwd
  primer
actcaccagtgtttaacatgcaggc

SEQ ID NO: 9712 - DNA, 23 bp, Artificial sequence
  Pten_rev
  primer
ggcaaggtaggtacgcatttgct

SEQ ID NO: 9713 - DNA, 20 bp, Artificial sequence
  Nf1_fwd
  primer
agcagctgtcctggctgttc

SEQ ID NO: 9714 - DNA, 20 bp, Artificial sequence
  Nf1_rev
  primer
cgtgcacctcccttgtcagg

SEQ ID NO: 9715 - DNA, 41 bp, Artificial sequence
  primer
aatggactatcatatgcttaccgtaacttgaaagtatttcg

SEQ ID NO: 9716 - DNA, 45 bp, Artificial sequence
  primer
ctttagtttgtatgtctgttgctattatgtctactattctttccc

SEQ ID NO: 9717 - DNA, 30 bp, Artificial sequence
  Artifically generated sequence
ttttttaagcttggcgtggatccgatatca

SEQ ID NO: 9718 - DNA, 37 bp, Artificial sequence
  Artifically generated sequence
aaaggacgaaacaccgtaatttctactaagtgtagat

SEQ ID NO: 9719 - DNA, 79 bp, Artificial sequence
  NPF oligo 1
tagattaagcataatgatgatgccattttttaaaaaaaagcagctatagcgtatgcaatctacacttagtagaaattaa

SEQ ID NO: 9720 - DNA, 79 bp, Artificial sequence
  NPF oligo 2
gttattaatttctactaagtgtagattgcatacgctatagctgcttttttttaaaaaatggcatcatcattatgcttaa

SEQ ID NO: 9721 - DNA, 20 bp, Artificial sequence
  crDNMT1
  crRNA spacer sequence
ctgatggtccatgtctgtta

SEQ ID NO: 9722 - DNA, 20 bp, Artificial sequence
  crVEGFA
  crRNA spacer sequence
ctaggaatattgaagggggc

SEQ ID NO: 9723 - DNA, 20 bp, Artificial sequence
  crFasl
  crRNA spacer sequence
gtccggccctctaggcccac

SEQ ID NO: 9724 - DNA, 20 bp, Artificial sequence
  crIdo1
  crRNA spacer sequence
ctacagggaatgcacagatg

SEQ ID NO: 9725 - DNA, 20 bp, Artificial sequence
  crJak2
  crRNA spacer sequence
acatacatcgagaagagtaa

SEQ ID NO: 9726 - DNA, 20 bp, Artificial sequence
  crLgals9
  crRNA spacer sequence
tgcagtaccaacaccgcgta

SEQ ID NO: 9727 - DNA, 20 bp, Artificial sequence
  crB2m
  crRNA spacer sequence
tgcacgcagaaagaaatagc

SEQ ID NO: 9728 - DNA, 20 bp, Artificial sequence
  crCd274
  crRNA spacer sequence
taaagcacgtactcaccgag

SEQ ID NO: 9729 - DNA, 32 bp, Artificial sequence
  primer
gagggcctatttcccatgattccttcatattt

SEQ ID NO: 9730 - DNA, 25 bp, Artificial sequence
  primer
acagtgcaggggaaagaatagtaga

SEQ ID NO: 9731 - DNA, 24 bp, Artificial sequence
  primer
tcttgtggaaaggacgaaacaccg

SEQ ID NO: 9732 - DNA, 37 bp, Artificial sequence
  primer
tgcatacgctatagctgcttttttttaaaaaatggca

SEQ ID NO: 9733 - DNA, 38 bp, Artificial sequence
  primer
taagcataatgatgatgccattttttaaaaaaaagcag

SEQ ID NO: 9734 - DNA, 36 bp, Artificial sequence
  primer
gggcttttttaaaaaataacagacatggaccatcag

SEQ ID NO: 9735 - DNA, 36 bp, Artificial sequence
  primer
ctgatggtccatgtctgttattttttaaaaaagccc

SEQ ID NO: 9736 - DNA, 28 bp, Artificial sequence
  primer
tgtagatagcgctataacttcgtatagc

SEQ ID NO: 9737 - DNA, 23 bp, Artificial sequence
  primer
aagcagctatagcgtatgcaatc

SEQ ID NO: 9738 - DNA, 25 bp, Artificial sequence
  primer
ttctttggcgagggcaaggagacaa

SEQ ID NO: 9739 - DNA, 25 bp, Artificial sequence
  primer
gcacgcgcacctctgtattgatctt

SEQ ID NO: 9740 - DNA, 20 bp, Artificial sequence
  Nf1_F
  primer
gggtccgattgccagtaccc

SEQ ID NO: 9741 - DNA, 20 bp, Artificial sequence
  Nf1_R
  primer
aacgtgcacctcccttgtca

SEQ ID NO: 9742 - DNA, 20 bp, Artificial sequence
  DNMT1_F
  primer
ctgggactcaggcgggtcac

SEQ ID NO: 9743 - DNA, 25 bp, Artificial sequence
  DNMT1_R
  primer
cctcacacaacagcttcatgtcagc

SEQ ID NO: 9744 - DNA, 23 bp, Artificial sequence
  VEGFA_F
  primer
ctcagctccacaaacttggtgcc

SEQ ID NO: 9745 - DNA, 18 bp, Artificial sequence
  VEGFA_R
  primer
agcccgccgcaatgaagg

SEQ ID NO: 9746 - DNA, 27 bp, Artificial sequence
  Cd274_F
  primer
gaatggtccccaagacaaagaagaaga

SEQ ID NO: 9747 - DNA, 27 bp, Artificial sequence
  Cd274_R
  primer
attcccaaaggagaacctgtaatgagc

SEQ ID NO: 9748 - DNA, 27 bp, Artificial sequence
  Ido1_F
  primer
ttcattgttcttcaccccatgattggt

SEQ ID NO: 9749 - DNA, 27 bp, Artificial sequence
  Ido1_R
  primer
cccatgactttcctaaggagtgtgaaa

SEQ ID NO: 9750 - DNA, 27 bp, Artificial sequence
  B2m_F
  primer
tgtcaggtggagtctagtggtagaaaa

SEQ ID NO: 9751 - DNA, 27 bp, Artificial sequence
  B2m_R
  primer
attgggcacagtgacagacttcaatta

SEQ ID NO: 9752 - DNA, 27 bp, Artificial sequence
  Fasl_F
  primer
cgcctgattctccaactctaaagagac

SEQ ID NO: 9753 - DNA, 27 bp, Artificial sequence
  Fasl_R
  primer
gcaaagagaagagaacaggagaaaggt

SEQ ID NO: 9754 - DNA, 27 bp, Artificial sequence
  Jak2_F
  primer
agattcatagctgtcgttcatcactgg

SEQ ID NO: 9755 - DNA, 27 bp, Artificial sequence
  Jak2_R
  primer
gttagttctctttctgcttctctgcca

SEQ ID NO: 9756 - DNA, 27 bp, Artificial sequence
  Lgals9_F
  primer
tttggcatcttcaccaaggtagattgt

SEQ ID NO: 9757 - DNA, 27 bp, Artificial sequence
  Lgals9_R
  primer
taagcctggactaagtaagtgaatgcc

SEQ ID NO: 9758 - DNA, 13 bp, Artificial sequence
  Artificially generated sequence
tgtagattttttt

SEQ ID NO: 9759 - DNA, 16 bp, Artificial sequence
  Artificially generated sequence
aagcttggcgtggatc

SEQ ID NO: 9760 - DNA, 20 bp, Artificial sequence
  Artificially generated sequence
tactaagtgtagattttttt

SEQ ID NO: 9761 - DNA, 24 bp, Artificial sequence
  Artificially generated sequence
aagcttggcgtggatccgatatca

SEQ ID NO: 9762 - DNA, 301 bp, Artificial Sequence
  Ube2g2.1_Trp53.1
  crRNA array
  misc_feature (148)..(157): n is a, c, g, or t
cttggctttatatatcttgtggaaaggacgaaacaccgtaatttctactaagtgtagatgtgtgggtctcctgggggcctaatttctactaagtgtagatccctgaactgcccccagggataatttctactaagtgtagatttttttnnnnnnnnnnaagcttggcgtggatccgatatcaactagatcttgagacaaatggcagtattcatccacaattttaaaagaaaaggggggattggggggtacagtgcaggggaaagaatagtagacataatagcaacagacatacaaactaaag

SEQ ID NO: 9763 - DNA, 301 bp, Artificial Sequence
  Ube2g2.1_Trp53.2
  crRNA array
  misc_feature (148)..(157): n is a, c, g, or t
cttggctttatatatcttgtggaaaggacgaaacaccgtaatttctactaagtgtagatgtgtgggtctcctgggggcctaatttctactaagtgtagatgccagggtgagcacgtgggataatttctactaagtgtagatttttttnnnnnnnnnnaagcttggcgtggatccgatatcaactagatcttgagacaaatggcagtattcatccacaattttaaaagaaaaggggggattggggggtacagtgcaggggaaagaatagtagacataatagcaacagacatacaaactaaag

SEQ ID NO: 9764 - DNA, 301 bp, Artificial Sequence
  Ube2g2.1_Trp53.3
  crRNA array
  misc_feature (148)..(157): n is a, c, g, or t
cttggctttatatatcttgtggaaaggacgaaacaccgtaatttctactaagtgtagatgtgtgggtctcctgggggcctaatttctactaagtgtagatccctcccacgtgctcacccttaatttctactaagtgtagatttttttnnnnnnnnnnaagcttggcgtggatccgatatcaactagatcttgagacaaatggcagtattcatccacaattttaaaagaaaaggggggattggggggtacagtgcaggggaaagaatagtagacataatagcaacagacatacaaactaaag

SEQ ID NO: 9765 - DNA, 301 bp, Artificial Sequence
  Ube2g2.1_Trp53.4
  crRNA array
  misc_feature (148)..(157): n is a, c, g, or t
cttggctttatatatcttgtggaaaggacgaaacaccgtaatttctactaagtgtagatgtgtgggtctcctgggggcctaatttctactaagtgtagattccaccccccaccctgtctctaatttctactaagtgtagatttttttnnnnnnnnnnaagcttggcgtggatccgatatcaactagatcttgagacaaatggcagtattcatccacaattttaaaagaaaaggggggattggggggtacagtgcaggggaaagaatagtagacataatagcaacagacatacaaactaaag

SEQ ID NO: 9766 - DNA, 301 bp, Artificial Sequence
  Ube2g2.2_Trp53.1
  crRNA array
  misc_feature (148)..(157): n is a, c, g, or t
cttggctttatatatcttgtggaaaggacgaaacaccgtaatttctactaagtgtagatgcagcgcagcagctgtcatttaatttctactaagtgtagatccctgaactgcccccagggataatttctactaagtgtagatttttttnnnnnnnnnnaagcttggcgtggatccgatatcaactagatcttgagacaaatggcagtattcatccacaattttaaaagaaaaggggggattggggggtacagtgcaggggaaagaatagtagacataatagcaacagacatacaaactaaag

SEQ ID NO: 9767 - DNA, 301 bp, Artificial Sequence
  Ube2g2.2_Trp53.2
  crRNA array
  misc_feature (148)..(157): n is a, c, g, or t
cttggctttatatatcttgtggaaaggacgaaacaccgtaatttctactaagtgtagatgcagcgcagcagctgtcatttaatttctactaagtgtagatgccagggtgagcacgtgggataatttctactaagtgtagatttttttnnnnnnnnnnaagcttggcgtggatccgatatcaactagatcttgagacaaatggcagtattcatccacaattttaaaagaaaaggggggattggggggtacagtgcaggggaaagaatagtagacataatagcaacagacatacaaactaaag

SEQ ID NO: 9768 - DNA, 301 bp, Artificial Sequence
  Ube2g2.2_Trp53.3
  crRNA array
  misc_feature (148)..(157): n is a, c, g, or t
cttggctttatatatcttgtggaaaggacgaaacaccgtaatttctactaagtgtagatgcagcgcagcagctgtcatttaatttctactaagtgtagatccctcccacgtgctcacccttaatttctactaagtgtagatttttttnnnnnnnnnnaagcttggcgtggatccgatatcaactagatcttgagacaaatggcagtattcatccacaattttaaaagaaaaggggggattggggggtacagtgcaggggaaagaatagtagacataatagcaacagacatacaaactaaag

SEQ ID NO: 9769 - DNA, 301 bp, Artificial Sequence
  Ube2g2.2_Trp53.4
  crRNA array
  misc_feature (148)..(157): n is a, c, g, or t
cttggctttatatatcttgtggaaaggacgaaacaccgtaatttctactaagtgtagatgcagcgcagcagctgtcatttaatttctactaagtgtagattccaccccccaccctgtctctaatttctactaagtgtagatttttttnnnnnnnnnnaagcttggcgtggatccgatatcaactagatcttgagacaaatggcagtattcatccacaattttaaaagaaaaggggggattggggggtacagtgcaggggaaagaatagtagacataatagcaacagacatacaaactaaag

SEQ ID NO: 9770 - DNA, 301 bp, Artificial Sequence
  Ube2g2.3_Trp53.1
  crRNA array
  misc_feature (148)..(157): n is a, c, g, or t
cttggctttatatatcttgtggaaaggacgaaacaccgtaatttctactaagtgtagataaacgcaacagagtctggtgtaatttctactaagtgtagatccctgaactgcccccagggataatttctactaagtgtagatttttttnnnnnnnnnnaagcttggcgtggatccgatatcaactagatcttgagacaaatggcagtattcatccacaattttaaaagaaaaggggggattggggggtacagtgcaggggaaagaatagtagacataatagcaacagacatacaaactaaag

SEQ ID NO: 9771 - DNA, 301 bp, Artificial Sequence
  Ube2g2.3_Trp53.2
  crRNA array
  misc_feature (148)..(157): n is a, c, g, or t
cttggctttatatatcttgtggaaaggacgaaacaccgtaatttctactaagtgtagataaacgcaacagagtctggtgtaatttctactaagtgtagatgccagggtgagcacgtgggataatttctactaagtgtagatttttttnnnnnnnnnnaagcttggcgtggatccgatatcaactagatcttgagacaaatggcagtattcatccacaattttaaaagaaaaggggggattggggggtacagtgcaggggaaagaatagtagacataatagcaacagacatacaaactaaag

SEQ ID NO: 9772 - DNA, 301 bp, Artificial Sequence
  Ube2g2.3_Trp53.3
  crRNA array
  misc_feature (148)..(157): n is a, c, g, or t
cttggctttatatatcttgtggaaaggacgaaacaccgtaatttctactaagtgtagataaacgcaacagagtctggtgtaatttctactaagtgtagatccctcccacgtgctcacccttaatttctactaagtgtagatttttttnnnnnnnnnnaagcttggcgtggatccgatatcaactagatcttgagacaaatggcagtattcatccacaattttaaaagaaaaggggggattggggggtacagtgcaggggaaagaatagtagacataatagcaacagacatacaaactaaag

SEQ ID NO: 9773 - DNA, 301 bp, Artificial Sequence
  Ube2g2.3_Trp53.4
  crRNA array
  misc_feature (148)..(157): n is a, c, g, or t
cttggctttatatatcttgtggaaaggacgaaacaccgtaatttctactaagtgtagataaacgcaacagagtctggtgtaatttctactaagtgtagattccaccccccaccctgtctctaatttctactaagtgtagatttttttnnnnnnnnnnaagcttggcgtggatccgatatcaactagatcttgagacaaatggcagtattcatccacaattttaaaagaaaaggggggattggggggtacagtgcaggggaaagaatagtagacataatagcaacagacatacaaactaaag

SEQ ID NO: 9774 - DNA, 301 bp, Artificial Sequence
  Ube2g2.4_Trp53.1
  crRNA array
  misc_feature (148)..(157): n is a, c, g, or t
cttggctttatatatcttgtggaaaggacgaaacaccgtaatttctactaagtgtagatgaaaaggccaagcatccacctaatttctactaagtgtagatccctgaactgcccccagggataatttctactaagtgtagatttttttnnnnnnnnnnaagcttggcgtggatccgatatcaactagatcttgagacaaatggcagtattcatccacaattttaaaagaaaaggggggattggggggtacagtgcaggggaaagaatagtagacataatagcaacagacatacaaactaaag

SEQ ID NO: 9775 - DNA, 301 bp, Artificial Sequence
  Ube2g2.4_Trp53.2
  crRNA array
  misc_feature (148)..(157): n is a, c, g, or t
cttggctttatatatcttgtggaaaggacgaaacaccgtaatttctactaagtgtagatgaaaaggccaagcatccacctaatttctactaagtgtagatgccagggtgagcacgtgggataatttctactaagtgtagatttttttnnnnnnnnnnaagcttggcgtggatccgatatcaactagatcttgagacaaatggcagtattcatccacaattttaaaagaaaaggggggattggggggtacagtgcaggggaaagaatagtagacataatagcaacagacatacaaactaaag

SEQ ID NO: 9776 - DNA, 301 bp, Artificial Sequence
  Ube2g2.4_Trp53.3
  crRNA array
  misc_feature (148)..(157): n is a, c, g, or t
cttggctttatatatcttgtggaaaggacgaaacaccgtaatttctactaagtgtagatgaaaaggccaagcatccacctaatttctactaagtgtagatccctcccacgtgctcacccttaatttctactaagtgtagatttttttnnnnnnnnnnaagcttggcgtggatccgatatcaactagatcttgagacaaatggcagtattcatccacaattttaaaagaaaaggggggattggggggtacagtgcaggggaaagaatagtagacataatagcaacagacatacaaactaaag

SEQ ID NO: 9777 - DNA, 301 bp, Artificial Sequence
  Ube2g2.4_Trp53.4
  crRNA array
  misc_feature (148)..(157): n is a, c, g, or t
cttggctttatatatcttgtggaaaggacgaaacaccgtaatttctactaagtgtagatgaaaaggccaagcatccacctaatttctactaagtgtagattccaccccccaccctgtctctaatttctactaagtgtagatttttttnnnnnnnnnnaagcttggcgtggatccgatatcaactagatcttgagacaaatggcagtattcatccacaattttaaaagaaaaggggggattggggggtacagtgcaggggaaagaatagtagacataatagcaacagacatacaaactaaag

SEQ ID NO: 9778 - DNA, 301 bp, Artificial Sequence
  Ube2g2.1_Kmt2d.1
  crRNA array
  misc_feature (148)..(157): n is a, c, g, or t
cttggctttatatatcttgtggaaaggacgaaacaccgtaatttctactaagtgtagatgtgtgggtctcctgggggcctaatttctactaagtgtagatactccaggccacccaggtggtaatttctactaagtgtagatttttttnnnnnnnnnnaagcttggcgtggatccgatatcaactagatcttgagacaaatggcagtattcatccacaattttaaaagaaaaggggggattggggggtacagtgcaggggaaagaatagtagacataatagcaacagacatacaaactaaag

SEQ ID NO: 9779 - DNA, 301 bp, Artificial Sequence
  Ube2g2.1_Kmt2d.2
  crRNA array
  misc_feature (148)..(157): n is a, c, g, or t
cttggctttatatatcttgtggaaaggacgaaacaccgtaatttctactaagtgtagatgtgtgggtctcctgggggcctaatttctactaagtgtagatggggaccatagccaggagagtaatttctactaagtgtagatttttttnnnnnnnnnnaagcttggcgtggatccgatatcaactagatcttgagacaaatggcagtattcatccacaattttaaaagaaaaggggggattggggggtacagtgcaggggaaagaatagtagacataatagcaacagacatacaaactaaag

SEQ ID NO: 9780 - DNA, 301 bp, Artificial Sequence
  Ube2g2.1_Kmt2d.3
  crRNA array
  misc_feature (148)..(157): n is a, c, g, or t
cttggctttatatatcttgtggaaaggacgaaacaccgtaatttctactaagtgtagatgtgtgggtctcctgggggcctaatttctactaagtgtagataggaaggggtcaggcgtggataatttctactaagtgtagatttttttnnnnnnnnnnaagcttggcgtggatccgatatcaactagatcttgagacaaatggcagtattcatccacaattttaaaagaaaaggggggattggggggtacagtgcaggggaaagaatagtagacataatagcaacagacatacaaactaaag

SEQ ID NO: 9781 - DNA, 301 bp, Artificial Sequence
  Ube2g2.1_Kmt2d.4
  crRNA array
  misc_feature (148)..(157): n is a, c, g, or t
cttggctttatatatcttgtggaaaggacgaaacaccgtaatttctactaagtgtagatgtgtgggtctcctgggggcctaatttctactaagtgtagatcccagtcagcgaggaactcctaatttctactaagtgtagatttttttnnnnnnnnnnaagcttggcgtggatccgatatcaactagatcttgagacaaatggcagtattcatccacaattttaaaagaaaaggggggattggggggtacagtgcaggggaaagaatagtagacataatagcaacagacatacaaactaaag

SEQ ID NO: 9782 - DNA, 301 bp, Artificial Sequence
  Ube2g2.2_Kmt2d.1
  crRNA array
  misc_feature (148)..(157): n is a, c, g, or t
cttggctttatatatcttgtggaaaggacgaaacaccgtaatttctactaagtgtagatgcagcgcagcagctgtcatttaatttctactaagtgtagatactccaggccacccaggtggtaatttctactaagtgtagatttttttnnnnnnnnnnaagcttggcgtggatccgatatcaactagatcttgagacaaatggcagtattcatccacaattttaaaagaaaaggggggattggggggtacagtgcaggggaaagaatagtagacataatagcaacagacatacaaactaaag

SEQ ID NO: 9783 - DNA, 301 bp, Artificial Sequence
  Ube2g2.2_Kmt2d.2
  crRNA array
  misc_feature (148)..(157): n is a, c, g, or t
cttggctttatatatcttgtggaaaggacgaaacaccgtaatttctactaagtgtagatgcagcgcagcagctgtcatttaatttctactaagtgtagatggggaccatagccaggagagtaatttctactaagtgtagatttttttnnnnnnnnnnaagcttggcgtggatccgatatcaactagatcttgagacaaatggcagtattcatccacaattttaaaagaaaaggggggattggggggtacagtgcaggggaaagaatagtagacataatagcaacagacatacaaactaaag

SEQ ID NO: 9784 - DNA, 301 bp, Artificial Sequence
  Ube2g2.2_Kmt2d.3
  crRNA array
  misc_feature (148)..(157): n is a, c, g, or t
cttggctttatatatcttgtggaaaggacgaaacaccgtaatttctactaagtgtagatgcagcgcagcagctgtcatttaatttctactaagtgtagataggaaggggtcaggcgtggataatttctactaagtgtagatttttttnnnnnnnnnnaagcttggcgtggatccgatatcaactagatcttgagacaaatggcagtattcatccacaattttaaaagaaaaggggggattggggggtacagtgcaggggaaagaatagtagacataatagcaacagacatacaaactaaag

SEQ ID NO: 9785 - DNA, 301 bp, Artificial Sequence
  Ube2g2.2_Kmt2d.4
  crRNA array
  misc_feature (148)..(157): n is a, c, g, or t
cttggctttatatatcttgtggaaaggacgaaacaccgtaatttctactaagtgtagatgcagcgcagcagctgtcatttaatttctactaagtgtagatcccagtcagcgaggaactcctaatttctactaagtgtagatttttttnnnnnnnnnnaagcttggcgtggatccgatatcaactagatcttgagacaaatggcagtattcatccacaattttaaaagaaaaggggggattggggggtacagtgcaggggaaagaatagtagacataatagcaacagacatacaaactaaag

SEQ ID NO: 9786 - DNA, 301 bp, Artificial Sequence
  Ube2g2.3_Kmt2d.1
  crRNA array
  misc_feature (148)..(157): n is a, c, g, or t
cttggctttatatatcttgtggaaaggacgaaacaccgtaatttctactaagtgtagataaacgcaacagagtctggtgtaatttctactaagtgtagatactccaggccacccaggtggtaatttctactaagtgtagatttttttnnnnnnnnnnaagcttggcgtggatccgatatcaactagatcttgagacaaatggcagtattcatccacaattttaaaagaaaaggggggattggggggtacagtgcaggggaaagaatagtagacataatagcaacagacatacaaactaaag

SEQ ID NO: 9787 - DNA, 301 bp, Artificial Sequence
  Ube2g2.3_Kmt2d.2
  crRNA array
  misc_feature (148)..(157): n is a, c, g, or t
cttggctttatatatcttgtggaaaggacgaaacaccgtaatttctactaagtgtagataaacgcaacagagtctggtgtaatttctactaagtgtagatggggaccatagccaggagagtaatttctactaagtgtagatttttttnnnnnnnnnnaagcttggcgtggatccgatatcaactagatcttgagacaaatggcagtattcatccacaattttaaaagaaaaggggggattggggggtacagtgcaggggaaagaatagtagacataatagcaacagacatacaaactaaag

SEQ ID NO: 9788 - DNA, 301 bp, Artificial Sequence
  Ube2g2.3_Kmt2d.3
  crRNA array
  misc_feature (148)..(157): n is a, c, g, or t
cttggctttatatatcttgtggaaaggacgaaacaccgtaatttctactaagtgtagataaacgcaacagagtctggtgtaatttctactaagtgtagataggaaggggtcaggcgtggataatttctactaagtgtagatttttttnnnnnnnnnnaagcttggcgtggatccgatatcaactagatcttgagacaaatggcagtattcatccacaattttaaaagaaaaggggggattggggggtacagtgcaggggaaagaatagtagacataatagcaacagacatacaaactaaag

SEQ ID NO: 9789 - DNA, 301 bp, Artificial Sequence
  Ube2g2.3_Kmt2d.4
  crRNA array
  misc_feature (148)..(157): n is a, c, g, or t
cttggctttatatatcttgtggaaaggacgaaacaccgtaatttctactaagtgtagataaacgcaacagagtctggtgtaatttctactaagtgtagatcccagtcagcgaggaactcctaatttctactaagtgtagatttttttnnnnnnnnnnaagcttggcgtggatccgatatcaactagatcttgagacaaatggcagtattcatccacaattttaaaagaaaaggggggattggggggtacagtgcaggggaaagaatagtagacataatagcaacagacatacaaactaaag

SEQ ID NO: 9790 - DNA, 301 bp, Artificial Sequence
  Ube2g2.4_Kmt2d.1
  crRNA array
  misc_feature (148)..(157): n is a, c, g, or t
cttggctttatatatcttgtggaaaggacgaaacaccgtaatttctactaagtgtagatgaaaaggccaagcatccacctaatttctactaagtgtagatactccaggccacccaggtggtaatttctactaagtgtagatttttttnnnnnnnnnnaagcttggcgtggatccgatatcaactagatcttgagacaaatggcagtattcatccacaattttaaaagaaaaggggggattggggggtacagtgcaggggaaagaatagtagacataatagcaacagacatacaaactaaag

SEQ ID NO: 9791 - DNA, 301 bp, Artificial Sequence
  Ube2g2.4_Kmt2d.2
  crRNA array
  misc_feature (148)..(157): n is a, c, g, or t
cttggctttatatatcttgtggaaaggacgaaacaccgtaatttctactaagtgtagatgaaaaggccaagcatccacctaatttctactaagtgtagatggggaccatagccaggagagtaatttctactaagtgtagatttttttnnnnnnnnnnaagcttggcgtggatccgatatcaactagatcttgagacaaatggcagtattcatccacaattttaaaagaaaaggggggattggggggtacagtgcaggggaaagaatagtagacataatagcaacagacatacaaactaaag

SEQ ID NO: 9792 - DNA, 301 bp, Artificial Sequence
  Ube2g2.4_Kmt2d.3
  crRNA array
  misc_feature (148)..(157): n is a, c, g, or t
cttggctttatatatcttgtggaaaggacgaaacaccgtaatttctactaagtgtagatgaaaaggccaagcatccacctaatttctactaagtgtagataggaaggggtcaggcgtggataatttctactaagtgtagatttttttnnnnnnnnnnaagcttggcgtggatccgatatcaactagatcttgagacaaatggcagtattcatccacaattttaaaagaaaaggggggattggggggtacagtgcaggggaaagaatagtagacataatagcaacagacatacaaactaaag

SEQ ID NO: 9793 - DNA, 301 bp, Artificial Sequence
  Ube2g2.4_Kmt2d.4
  crRNA array
  misc_feature (148)..(157): n is a, c, g, or t
cttggctttatatatcttgtggaaaggacgaaacaccgtaatttctactaagtgtagatgaaaaggccaagcatccacctaatttctactaagtgtagatcccagtcagcgaggaactcctaatttctactaagtgtagatttttttnnnnnnnnnnaagcttggcgtggatccgatatcaactagatcttgagacaaatggcagtattcatccacaattttaaaagaaaaggggggattggggggtacagtgcaggggaaagaatagtagacataatagcaacagacatacaaactaaag

SEQ ID NO: 9794 - DNA, 301 bp, Artificial Sequence
  Ube2g2.1_Atrx.1
  crRNA array
  misc_feature (148)..(157): n is a, c, g, or t
cttggctttatatatcttgtggaaaggacgaaacaccgtaatttctactaagtgtagatgtgtgggtctcctgggggcctaatttctactaagtgtagatgccagtcgctcatatctctgtaatttctactaagtgtagatttttttnnnnnnnnnnaagcttggcgtggatccgatatcaactagatcttgagacaaatggcagtattcatccacaattttaaaagaaaaggggggattggggggtacagtgcaggggaaagaatagtagacataatagcaacagacatacaaactaaag

SEQ ID NO: 9795 - DNA, 301 bp, Artificial Sequence
  Ube2g2.1_Atrx.2
  crRNA array
  misc_feature (148)..(157): n is a, c, g, or t
cttggctttatatatcttgtggaaaggacgaaacaccgtaatttctactaagtgtagatgtgtgggtctcctgggggcctaatttctactaagtgtagatgcagcatgggggtatccctttaatttctactaagtgtagatttttttnnnnnnnnnnaagcttggcgtggatccgatatcaactagatcttgagacaaatggcagtattcatccacaattttaaaagaaaaggggggattggggggtacagtgcaggggaaagaatagtagacataatagcaacagacatacaaactaaag

SEQ ID NO: 9796 - DNA, 301 bp, Artificial Sequence
  Ube2g2.1_Atrx.3
  crRNA array
  misc_feature (148)..(157): n is a, c, g, or t
cttggctttatatatcttgtggaaaggacgaaacaccgtaatttctactaagtgtagatgtgtgggtctcctgggggcctaatttctactaagtgtagatggagccctgtccgcaatgagtaatttctactaagtgtagatttttttnnnnnnnnnnaagcttggcgtggatccgatatcaactagatcttgagacaaatggcagtattcatccacaattttaaaagaaaaggggggattggggggtacagtgcaggggaaagaatagtagacataatagcaacagacatacaaactaaag

SEQ ID NO: 9797 - DNA, 301 bp, Artificial Sequence
  Ube2g2.1_Atrx.4
  crRNA array
  misc_feature (148)..(157): n is a, c, g, or t
cttggctttatatatcttgtggaaaggacgaaacaccgtaatttctactaagtgtagatgtgtgggtctcctgggggcctaatttctactaagtgtagataaactgggctcctactaaattaatttctactaagtgtagatttttttnnnnnnnnnnaagcttggcgtggatccgatatcaactagatcttgagacaaatggcagtattcatccacaattttaaaagaaaaggggggattggggggtacagtgcaggggaaagaatagtagacataatagcaacagacatacaaactaaag

SEQ ID NO: 9798 - DNA, 301 bp, Artificial Sequence
  Ube2g2.2_Atrx.1
  crRNA array
  misc_feature (148)..(157): n is a, c, g, or t
cttggctttatatatcttgtggaaaggacgaaacaccgtaatttctactaagtgtagatgcagcgcagcagctgtcatttaatttctactaagtgtagatgccagtcgctcatatctctgtaatttctactaagtgtagatttttttnnnnnnnnnnaagcttggcgtggatccgatatcaactagatcttgagacaaatggcagtattcatccacaattttaaaagaaaaggggggattggggggtacagtgcaggggaaagaatagtagacataatagcaacagacatacaaactaaag

SEQ ID NO: 9799 - DNA, 301 bp, Artificial Sequence
  Ube2g2.2_Atrx.2
  crRNA array
  misc_feature (148)..(157): n is a, c, g, or t
cttggctttatatatcttgtggaaaggacgaaacaccgtaatttctactaagtgtagatgcagcgcagcagctgtcatttaatttctactaagtgtagatgcagcatgggggtatccctttaatttctactaagtgtagatttttttnnnnnnnnnnaagcttggcgtggatccgatatcaactagatcttgagacaaatggcagtattcatccacaattttaaaagaaaaggggggattggggggtacagtgcaggggaaagaatagtagacataatagcaacagacatacaaactaaag

SEQ ID NO: 9800 - DNA, 301 bp, Artificial Sequence
  Ube2g2.2_Atrx.3
  crRNA array
  misc_feature (148)..(157): n is a, c, g, or t
cttggctttatatatcttgtggaaaggacgaaacaccgtaatttctactaagtgtagatgcagcgcagcagctgtcatttaatttctactaagtgtagatggagccctgtccgcaatgagtaatttctactaagtgtagatttttttnnnnnnnnnnaagcttggcgtggatccgatatcaactagatcttgagacaaatggcagtattcatccacaattttaaaagaaaaggggggattggggggtacagtgcaggggaaagaatagtagacataatagcaacagacatacaaactaaag

SEQ ID NO: 9801 - DNA, 301 bp, Artificial Sequence
  Ube2g2.2_Atrx.4
  crRNA array
  misc_feature (148)..(157): n is a, c, g, or t
cttggctttatatatcttgtggaaaggacgaaacaccgtaatttctactaagtgtagatgcagcgcagcagctgtcatttaatttctactaagtgtagataaactgggctcctactaaattaatttctactaagtgtagatttttttnnnnnnnnnnaagcttggcgtggatccgatatcaactagatcttgagacaaatggcagtattcatccacaattttaaaagaaaaggggggattggggggtacagtgcaggggaaagaatagtagacataatagcaacagacatacaaactaaag

SEQ ID NO: 9802 - DNA, 301 bp, Artificial Sequence
  Ube2g2.3_Atrx.1
  crRNA array
  misc_feature (148)..(157): n is a, c, g, or t
cttggctttatatatcttgtggaaaggacgaaacaccgtaatttctactaagtgtagataaacgcaacagagtctggtgtaatttctactaagtgtagatgccagtcgctcatatctctgtaatttctactaagtgtagatttttttnnnnnnnnnnaagcttggcgtggatccgatatcaactagatcttgagacaaatggcagtattcatccacaattttaaaagaaaaggggggattggggggtacagtgcaggggaaagaatagtagacataatagcaacagacatacaaactaaag

SEQ ID NO: 9803 - DNA, 301 bp, Artificial Sequence
  Ube2g2.3_Atrx.2
  crRNA array
  misc_feature (148)..(157): n is a, c, g, or t
cttggctttatatatcttgtggaaaggacgaaacaccgtaatttctactaagtgtagataaacgcaacagagtctggtgtaatttctactaagtgtagatgcagcatgggggtatccctttaatttctactaagtgtagatttttttnnnnnnnnnnaagcttggcgtggatccgatatcaactagatcttgagacaaatggcagtattcatccacaattttaaaagaaaaggggggattggggggtacagtgcaggggaaagaatagtagacataatagcaacagacatacaaactaaag

SEQ ID NO: 9804 - DNA, 301 bp, Artificial Sequence
  Ube2g2.3_Atrx.3
  crRNA array
  misc_feature (148)..(157): n is a, c, g, or t
cttggctttatatatcttgtggaaaggacgaaacaccgtaatttctactaagtgtagataaacgcaacagagtctggtgtaatttctactaagtgtagatggagccctgtccgcaatgagtaatttctactaagtgtagatttttttnnnnnnnnnnaagcttggcgtggatccgatatcaactagatcttgagacaaatggcagtattcatccacaattttaaaagaaaaggggggattggggggtacagtgcaggggaaagaatagtagacataatagcaacagacatacaaactaaag

SEQ ID NO: 9805 - DNA, 301 bp, Artificial Sequence
  Ube2g2.3_Atrx.4
  crRNA array
  misc_feature (148)..(157): n is a, c, g, or t
cttggctttatatatcttgtggaaaggacgaaacaccgtaatttctactaagtgtagataaacgcaacagagtctggtgtaatttctactaagtgtagataaactgggctcctactaaattaatttctactaagtgtagatttttttnnnnnnnnnnaagcttggcgtggatccgatatcaactagatcttgagacaaatggcagtattcatccacaattttaaaagaaaaggggggattggggggtacagtgcaggggaaagaatagtagacataatagcaacagacatacaaactaaag

SEQ ID NO: 9806 - DNA, 301 bp, Artificial Sequence
  Ube2g2.4_Atrx.1
  crRNA array
  misc_feature (148)..(157): n is a, c, g, or t
cttggctttatatatcttgtggaaaggacgaaacaccgtaatttctactaagtgtagatgaaaaggccaagcatccacctaatttctactaagtgtagatgccagtcgctcatatctctgtaatttctactaagtgtagatttttttnnnnnnnnnnaagcttggcgtggatccgatatcaactagatcttgagacaaatggcagtattcatccacaattttaaaagaaaaggggggattggggggtacagtgcaggggaaagaatagtagacataatagcaacagacatacaaactaaag

SEQ ID NO: 9807 - DNA, 301 bp, Artificial Sequence
  Ube2g2.4_Atrx.2
  crRNA array
  misc_feature (148)..(157): n is a, c, g, or t
cttggctttatatatcttgtggaaaggacgaaacaccgtaatttctactaagtgtagatgaaaaggccaagcatccacctaatttctactaagtgtagatgcagcatgggggtatccctttaatttctactaagtgtagatttttttnnnnnnnnnnaagcttggcgtggatccgatatcaactagatcttgagacaaatggcagtattcatccacaattttaaaagaaaaggggggattggggggtacagtgcaggggaaagaatagtagacataatagcaacagacatacaaactaaag

SEQ ID NO: 9808 - DNA, 301 bp, Artificial Sequence
  Ube2g2.4_Atrx.3
  crRNA array
  misc_feature (148)..(157): n is a, c, g, or t
cttggctttatatatcttgtggaaaggacgaaacaccgtaatttctactaagtgtagatgaaaaggccaagcatccacctaatttctactaagtgtagatggagccctgtccgcaatgagtaatttctactaagtgtagatttttttnnnnnnnnnnaagcttggcgtggatccgatatcaactagatcttgagacaaatggcagtattcatccacaattttaaaagaaaaggggggattggggggtacagtgcaggggaaagaatagtagacataatagcaacagacatacaaactaaag

SEQ ID NO: 9809 - DNA, 301 bp, Artificial Sequence
  Ube2g2.4_Atrx.4
  crRNA array
  misc_feature (148)..(157): n is a, c, g, or t
cttggctttatatatcttgtggaaaggacgaaacaccgtaatttctactaagtgtagatgaaaaggccaagcatccacctaatttctactaagtgtagataaactgggctcctactaaattaatttctactaagtgtagatttttttnnnnnnnnnnaagcttggcgtggatccgatatcaactagatcttgagacaaatggcagtattcatccacaattttaaaagaaaaggggggattggggggtacagtgcaggggaaagaatagtagacataatagcaacagacatacaaactaaag

SEQ ID NO: 9810 - DNA, 301 bp, Artificial Sequence
  Ube2g2.1_Nf2.1
  crRNA array
  misc_feature (148)..(157): n is a, c, g, or t
cttggctttatatatcttgtggaaaggacgaaacaccgtaatttctactaagtgtagatgtgtgggtctcctgggggcctaatttctactaagtgtagatcggagtcatctgatagagattaatttctactaagtgtagatttttttnnnnnnnnnnaagcttggcgtggatccgatatcaactagatcttgagacaaatggcagtattcatccacaattttaaaagaaaaggggggattggggggtacagtgcaggggaaagaatagtagacataatagcaacagacatacaaactaaag

SEQ ID NO: 9811 - DNA, 301 bp, Artificial Sequence
  Ube2g2.1_Nf2.2
  crRNA array
  misc_feature (148)..(157): n is a, c, g, or t
cttggctttatatatcttgtggaaaggacgaaacaccgtaatttctactaagtgtagatgtgtgggtctcctgggggcctaatttctactaagtgtagattgaggcgacggaaagctgactaatttctactaagtgtagatttttttnnnnnnnnnnaagcttggcgtggatccgatatcaactagatcttgagacaaatggcagtattcatccacaattttaaaagaaaaggggggattggggggtacagtgcaggggaaagaatagtagacataatagcaacagacatacaaactaaag

SEQ ID NO: 9812 - DNA, 301 bp, Artificial Sequence
  Ube2g2.1_Nf2.3
  crRNA array
  misc_feature (148)..(157): n is a, c, g, or t
cttggctttatatatcttgtggaaaggacgaaacaccgtaatttctactaagtgtagatgtgtgggtctcctgggggcctaatttctactaagtgtagatcgtcgcctcataaataggtctaatttctactaagtgtagatttttttnnnnnnnnnnaagcttggcgtggatccgatatcaactagatcttgagacaaatggcagtattcatccacaattttaaaagaaaaggggggattggggggtacagtgcaggggaaagaatagtagacataatagcaacagacatacaaactaaag

SEQ ID NO: 9813 - DNA, 301 bp, Artificial Sequence
  Ube2g2.1_Nf2.4
  crRNA array
  misc_feature (148)..(157): n is a, c, g, or t
cttggctttatatatcttgtggaaaggacgaaacaccgtaatttctactaagtgtagatgtgtgggtctcctgggggcctaatttctactaagtgtagataaggcctcgatctccgtctttaatttctactaagtgtagatttttttnnnnnnnnnnaagcttggcgtggatccgatatcaactagatcttgagacaaatggcagtattcatccacaattttaaaagaaaaggggggattggggggtacagtgcaggggaaagaatagtagacataatagcaacagacatacaaactaaag

SEQ ID NO: 9814 - DNA, 301 bp, Artificial Sequence
  Ube2g2.2_Nf2.1
  crRNA array
  misc_feature (148)..(157): n is a, c, g, or t
cttggctttatatatcttgtggaaaggacgaaacaccgtaatttctactaagtgtagatgcagcgcagcagctgtcatttaatttctactaagtgtagatcggagtcatctgatagagattaatttctactaagtgtagatttttttnnnnnnnnnnaagcttggcgtggatccgatatcaactagatcttgagacaaatggcagtattcatccacaattttaaaagaaaaggggggattggggggtacagtgcaggggaaagaatagtagacataatagcaacagacatacaaactaaag

SEQ ID NO: 9815 - DNA, 301 bp, Artificial Sequence
  Ube2g2.2_Nf2.2
  crRNA array
  misc_feature (148)..(157): n is a, c, g, or t
cttggctttatatatcttgtggaaaggacgaaacaccgtaatttctactaagtgtagatgcagcgcagcagctgtcatttaatttctactaagtgtagattgaggcgacggaaagctgactaatttctactaagtgtagatttttttnnnnnnnnnnaagcttggcgtggatccgatatcaactagatcttgagacaaatggcagtattcatccacaattttaaaagaaaaggggggattggggggtacagtgcaggggaaagaatagtagacataatagcaacagacatacaaactaaag

SEQ ID NO: 9816 - DNA, 301 bp, Artificial Sequence
  Ube2g2.2_Nf2.3
  crRNA array
  misc_feature (148)..(157): n is a, c, g, or t
cttggctttatatatcttgtggaaaggacgaaacaccgtaatttctactaagtgtagatgcagcgcagcagctgtcatttaatttctactaagtgtagatcgtcgcctcataaataggtctaatttctactaagtgtagatttttttnnnnnnnnnnaagcttggcgtggatccgatatcaactagatcttgagacaaatggcagtattcatccacaattttaaaagaaaaggggggattggggggtacagtgcaggggaaagaatagtagacataatagcaacagacatacaaactaaag

SEQ ID NO: 9817 - DNA, 301 bp, Artificial Sequence
  Ube2g2.2_Nf2.4
  crRNA array
  misc_feature (148)..(157): n is a, c, g, or t
cttggctttatatatcttgtggaaaggacgaaacaccgtaatttctactaagtgtagatgcagcgcagcagctgtcatttaatttctactaagtgtagataaggcctcgatctccgtctttaatttctactaagtgtagatttttttnnnnnnnnnnaagcttggcgtggatccgatatcaactagatcttgagacaaatggcagtattcatccacaattttaaaagaaaaggggggattggggggtacagtgcaggggaaagaatagtagacataatagcaacagacatacaaactaaag

SEQ ID NO: 9818 - DNA, 301 bp, Artificial Sequence
  Ube2g2.3_Nf2.1
  crRNA array
  misc_feature (148)..(157): n is a, c, g, or t
cttggctttatatatcttgtggaaaggacgaaacaccgtaatttctactaagtgtagataaacgcaacagagtctggtgtaatttctactaagtgtagatcggagtcatctgatagagattaatttctactaagtgtagatttttttnnnnnnnnnnaagcttggcgtggatccgatatcaactagatcttgagacaaatggcagtattcatccacaattttaaaagaaaaggggggattggggggtacagtgcaggggaaagaatagtagacataatagcaacagacatacaaactaaag

SEQ ID NO: 9819 - DNA, 301 bp, Artificial Sequence
  Ube2g2.3_Nf2.2
  crRNA array
  misc_feature (148)..(157): n is a, c, g, or t
cttggctttatatatcttgtggaaaggacgaaacaccgtaatttctactaagtgtagataaacgcaacagagtctggtgtaatttctactaagtgtagattgaggcgacggaaagctgactaatttctactaagtgtagatttttttnnnnnnnnnnaagcttggcgtggatccgatatcaactagatcttgagacaaatggcagtattcatccacaattttaaaagaaaaggggggattggggggtacagtgcaggggaaagaatagtagacataatagcaacagacatacaaactaaag

SEQ ID NO: 9820 - DNA, 301 bp, Artificial Sequence
  Ube2g2.3_Nf2.3
  crRNA array
  misc_feature (148)..(157): n is a, c, g, or t
cttggctttatatatcttgtggaaaggacgaaacaccgtaatttctactaagtgtagataaacgcaacagagtctggtgtaatttctactaagtgtagatcgtcgcctcataaataggtctaatttctactaagtgtagatttttttnnnnnnnnnnaagcttggcgtggatccgatatcaactagatcttgagacaaatggcagtattcatccacaattttaaaagaaaaggggggattggggggtacagtgcaggggaaagaatagtagacataatagcaacagacatacaaactaaag

SEQ ID NO: 9821 - DNA, 301 bp, Artificial Sequence
  Ube2g2.3_Nf2.4
  crRNA array
  misc_feature (148)..(157): n is a, c, g, or t
cttggctttatatatcttgtggaaaggacgaaacaccgtaatttctactaagtgtagataaacgcaacagagtctggtgtaatttctactaagtgtagataaggcctcgatctccgtctttaatttctactaagtgtagatttttttnnnnnnnnnnaagcttggcgtggatccgatatcaactagatcttgagacaaatggcagtattcatccacaattttaaaagaaaaggggggattggggggtacagtgcaggggaaagaatagtagacataatagcaacagacatacaaactaaag

SEQ ID NO: 9822 - DNA, 301 bp, Artificial Sequence
  Ube2g2.4_Nf2.1
  crRNA array
  misc_feature (148)..(157): n is a, c, g, or t
cttggctttatatatcttgtggaaaggacgaaacaccgtaatttctactaagtgtagatgaaaaggccaagcatccacctaatttctactaagtgtagatcggagtcatctgatagagattaatttctactaagtgtagatttttttnnnnnnnnnnaagcttggcgtggatccgatatcaactagatcttgagacaaatggcagtattcatccacaattttaaaagaaaaggggggattggggggtacagtgcaggggaaagaatagtagacataatagcaacagacatacaaactaaag

SEQ ID NO: 9823 - DNA, 301 bp, Artificial Sequence
  Ube2g2.4_Nf2.2
  crRNA array
  misc_feature (148)..(157): n is a, c, g, or t
cttggctttatatatcttgtggaaaggacgaaacaccgtaatttctactaagtgtagatgaaaaggccaagcatccacctaatttctactaagtgtagattgaggcgacggaaagctgactaatttctactaagtgtagatttttttnnnnnnnnnnaagcttggcgtggatccgatatcaactagatcttgagacaaatggcagtattcatccacaattttaaaagaaaaggggggattggggggtacagtgcaggggaaagaatagtagacataatagcaacagacatacaaactaaag

SEQ ID NO: 9824 - DNA, 301 bp, Artificial Sequence
  Ube2g2.4_Nf2.3
  crRNA array
  misc_feature (148)..(157): n is a, c, g, or t
cttggctttatatatcttgtggaaaggacgaaacaccgtaatttctactaagtgtagatgaaaaggccaagcatccacctaatttctactaagtgtagatcgtcgcctcataaataggtctaatttctactaagtgtagatttttttnnnnnnnnnnaagcttggcgtggatccgatatcaactagatcttgagacaaatggcagtattcatccacaattttaaaagaaaaggggggattggggggtacagtgcaggggaaagaatagtagacataatagcaacagacatacaaactaaag

SEQ ID NO: 9825 - DNA, 301 bp, Artificial Sequence
  Ube2g2.4_Nf2.4
  crRNA array
  misc_feature (148)..(157): n is a, c, g, or t
cttggctttatatatcttgtggaaaggacgaaacaccgtaatttctactaagtgtagatgaaaaggccaagcatccacctaatttctactaagtgtagataaggcctcgatctccgtctttaatttctactaagtgtagatttttttnnnnnnnnnnaagcttggcgtggatccgatatcaactagatcttgagacaaatggcagtattcatccacaattttaaaagaaaaggggggattggggggtacagtgcaggggaaagaatagtagacataatagcaacagacatacaaactaaag

SEQ ID NO: 9826 - DNA, 301 bp, Artificial Sequence
  Ube2g2.1_Jak1.1
  crRNA array
  misc_feature (148)..(157): n is a, c, g, or t
cttggctttatatatcttgtggaaaggacgaaacaccgtaatttctactaagtgtagatgtgtgggtctcctgggggcctaatttctactaagtgtagatgagcgcaggccgccgcagcctaatttctactaagtgtagatttttttnnnnnnnnnnaagcttggcgtggatccgatatcaactagatcttgagacaaatggcagtattcatccacaattttaaaagaaaaggggggattggggggtacagtgcaggggaaagaatagtagacataatagcaacagacatacaaactaaag

SEQ ID NO: 9827 - DNA, 301 bp, Artificial Sequence
  Ube2g2.1_Jak1.2
  crRNA array
  misc_feature (148)..(157): n is a, c, g, or t
cttggctttatatatcttgtggaaaggacgaaacaccgtaatttctactaagtgtagatgtgtgggtctcctgggggcctaatttctactaagtgtagatagggacactggacaaccgaataatttctactaagtgtagatttttttnnnnnnnnnnaagcttggcgtggatccgatatcaactagatcttgagacaaatggcagtattcatccacaattttaaaagaaaaggggggattggggggtacagtgcaggggaaagaatagtagacataatagcaacagacatacaaactaaag

SEQ ID NO: 9828 - DNA, 301 bp, Artificial Sequence
  Ube2g2.1_Jak1.3
  crRNA array
  misc_feature (148)..(157): n is a, c, g, or t
cttggctttatatatcttgtggaaaggacgaaacaccgtaatttctactaagtgtagatgtgtgggtctcctgggggcctaatttctactaagtgtagatgcacagaacgccatggcatttaatttctactaagtgtagatttttttnnnnnnnnnnaagcttggcgtggatccgatatcaactagatcttgagacaaatggcagtattcatccacaattttaaaagaaaaggggggattggggggtacagtgcaggggaaagaatagtagacataatagcaacagacatacaaactaaag

SEQ ID NO: 9829 - DNA, 301 bp, Artificial Sequence
  Ube2g2.1_Jak1.4
  crRNA array
  misc_feature (148)..(157): n is a, c, g, or t
cttggctttatatatcttgtggaaaggacgaaacaccgtaatttctactaagtgtagatgtgtgggtctcctgggggcctaatttctactaagtgtagattgccgccactggatcccgagtaatttctactaagtgtagatttttttnnnnnnnnnnaagcttggcgtggatccgatatcaactagatcttgagacaaatggcagtattcatccacaattttaaaagaaaaggggggattggggggtacagtgcaggggaaagaatagtagacataatagcaacagacatacaaactaaag

SEQ ID NO: 9830 - DNA, 301 bp, Artificial Sequence
  Ube2g2.2_Jak1.1
  crRNA array
  misc_feature (148)..(157): n is a, c, g, or t
cttggctttatatatcttgtggaaaggacgaaacaccgtaatttctactaagtgtagatgcagcgcagcagctgtcatttaatttctactaagtgtagatgagcgcaggccgccgcagcctaatttctactaagtgtagatttttttnnnnnnnnnnaagcttggcgtggatccgatatcaactagatcttgagacaaatggcagtattcatccacaattttaaaagaaaaggggggattggggggtacagtgcaggggaaagaatagtagacataatagcaacagacatacaaactaaag

SEQ ID NO: 9831 - DNA, 301 bp, Artificial Sequence
  Ube2g2.2_Jak1.2
  crRNA array
  misc_feature (148)..(157): n is a, c, g, or t
cttggctttatatatcttgtggaaaggacgaaacaccgtaatttctactaagtgtagatgcagcgcagcagctgtcatttaatttctactaagtgtagatagggacactggacaaccgaataatttctactaagtgtagatttttttnnnnnnnnnnaagcttggcgtggatccgatatcaactagatcttgagacaaatggcagtattcatccacaattttaaaagaaaaggggggattggggggtacagtgcaggggaaagaatagtagacataatagcaacagacatacaaactaaag

SEQ ID NO: 9832 - DNA, 301 bp, Artificial Sequence
  Ube2g2.2_Jak1.3
  crRNA array
  misc_feature (148)..(157): n is a, c, g, or t
cttggctttatatatcttgtggaaaggacgaaacaccgtaatttctactaagtgtagatgcagcgcagcagctgtcatttaatttctactaagtgtagatgcacagaacgccatggcatttaatttctactaagtgtagatttttttnnnnnnnnnnaagcttggcgtggatccgatatcaactagatcttgagacaaatggcagtattcatccacaattttaaaagaaaaggggggattggggggtacagtgcaggggaaagaatagtagacataatagcaacagacatacaaactaaag

SEQ ID NO: 9833 - DNA, 301 bp, Artificial Sequence
  Ube2g2.2_Jak1.4
  crRNA array
  misc_feature (148)..(157): n is a, c, g, or t
cttggctttatatatcttgtggaaaggacgaaacaccgtaatttctactaagtgtagatgcagcgcagcagctgtcatttaatttctactaagtgtagattgccgccactggatcccgagtaatttctactaagtgtagatttttttnnnnnnnnnnaagcttggcgtggatccgatatcaactagatcttgagacaaatggcagtattcatccacaattttaaaagaaaaggggggattggggggtacagtgcaggggaaagaatagtagacataatagcaacagacatacaaactaaag

SEQ ID NO: 9834 - DNA, 301 bp, Artificial Sequence
  Ube2g2.3_Jak1.1
  crRNA array
  misc_feature (148)..(157): n is a, c, g, or t
cttggctttatatatcttgtggaaaggacgaaacaccgtaatttctactaagtgtagataaacgcaacagagtctggtgtaatttctactaagtgtagatgagcgcaggccgccgcagcctaatttctactaagtgtagatttttttnnnnnnnnnnaagcttggcgtggatccgatatcaactagatcttgagacaaatggcagtattcatccacaattttaaaagaaaaggggggattggggggtacagtgcaggggaaagaatagtagacataatagcaacagacatacaaactaaag

SEQ ID NO: 9835 - DNA, 301 bp, Artificial Sequence
  Ube2g2.3_Jak1.2
  crRNA array
  misc_feature (148)..(157): n is a, c, g, or t
cttggctttatatatcttgtggaaaggacgaaacaccgtaatttctactaagtgtagataaacgcaacagagtctggtgtaatttctactaagtgtagatagggacactggacaaccgaataatttctactaagtgtagatttttttnnnnnnnnnnaagcttggcgtggatccgatatcaactagatcttgagacaaatggcagtattcatccacaattttaaaagaaaaggggggattggggggtacagtgcaggggaaagaatagtagacataatagcaacagacatacaaactaaag

SEQ ID NO: 9836 - DNA, 301 bp, Artificial Sequence
  Ube2g2.3_Jak1.3
  crRNA array
  misc_feature (148)..(157): n is a, c, g, or t
cttggctttatatatcttgtggaaaggacgaaacaccgtaatttctactaagtgtagataaacgcaacagagtctggtgtaatttctactaagtgtagatgcacagaacgccatggcatttaatttctactaagtgtagatttttttnnnnnnnnnnaagcttggcgtggatccgatatcaactagatcttgagacaaatggcagtattcatccacaattttaaaagaaaaggggggattggggggtacagtgcaggggaaagaatagtagacataatagcaacagacatacaaactaaag

SEQ ID NO: 9837 - DNA, 301 bp, Artificial Sequence
  Ube2g2.3_Jak1.4
  crRNA array
  misc_feature (148)..(157): n is a, c, g, or t
cttggctttatatatcttgtggaaaggacgaaacaccgtaatttctactaagtgtagataaacgcaacagagtctggtgtaatttctactaagtgtagattgccgccactggatcccgagtaatttctactaagtgtagatttttttnnnnnnnnnnaagcttggcgtggatccgatatcaactagatcttgagacaaatggcagtattcatccacaattttaaaagaaaaggggggattggggggtacagtgcaggggaaagaatagtagacataatagcaacagacatacaaactaaag

SEQ ID NO: 9838 - DNA, 301 bp, Artificial Sequence
  Ube2g2.4_Jak1.1
  crRNA array
  misc_feature (148)..(157): n is a, c, g, or t
cttggctttatatatcttgtggaaaggacgaaacaccgtaatttctactaagtgtagatgaaaaggccaagcatccacctaatttctactaagtgtagatgagcgcaggccgccgcagcctaatttctactaagtgtagatttttttnnnnnnnnnnaagcttggcgtggatccgatatcaactagatcttgagacaaatggcagtattcatccacaattttaaaagaaaaggggggattggggggtacagtgcaggggaaagaatagtagacataatagcaacagacatacaaactaaag

SEQ ID NO: 9839 - DNA, 301 bp, Artificial Sequence
  Ube2g2.4_Jak1.2
  crRNA array
  misc_feature (148)..(157): n is a, c, g, or t
cttggctttatatatcttgtggaaaggacgaaacaccgtaatttctactaagtgtagatgaaaaggccaagcatccacctaatttctactaagtgtagatagggacactggacaaccgaataatttctactaagtgtagatttttttnnnnnnnnnnaagcttggcgtggatccgatatcaactagatcttgagacaaatggcagtattcatccacaattttaaaagaaaaggggggattggggggtacagtgcaggggaaagaatagtagacataatagcaacagacatacaaactaaag

SEQ ID NO: 9840 - DNA, 301 bp, Artificial Sequence
  Ube2g2.4_Jak1.3
  crRNA array
  misc_feature (148)..(157): n is a, c, g, or t
cttggctttatatatcttgtggaaaggacgaaacaccgtaatttctactaagtgtagatgaaaaggccaagcatccacctaatttctactaagtgtagatgcacagaacgccatggcatttaatttctactaagtgtagatttttttnnnnnnnnnnaagcttggcgtggatccgatatcaactagatcttgagacaaatggcagtattcatccacaattttaaaagaaaaggggggattggggggtacagtgcaggggaaagaatagtagacataatagcaacagacatacaaactaaag

SEQ ID NO: 9841 - DNA, 301 bp, Artificial Sequence
  Ube2g2.4_Jak1.4
  crRNA array
  misc_feature (148)..(157): n is a, c, g, or t
cttggctttatatatcttgtggaaaggacgaaacaccgtaatttctactaagtgtagatgaaaaggccaagcatccacctaatttctactaagtgtagattgccgccactggatcccgagtaatttctactaagtgtagatttttttnnnnnnnnnnaagcttggcgtggatccgatatcaactagatcttgagacaaatggcagtattcatccacaattttaaaagaaaaggggggattggggggtacagtgcaggggaaagaatagtagacataatagcaacagacatacaaactaaag

SEQ ID NO: 9842 - DNA, 301 bp, Artificial Sequence
  Ube2g2.1_Chd1.1
  crRNA array
  misc_feature (148)..(157): n is a, c, g, or t
cttggctttatatatcttgtggaaaggacgaaacaccgtaatttctactaagtgtagatgtgtgggtctcctgggggcctaatttctactaagtgtagatcgccccactctgcaatccattaatttctactaagtgtagatttttttnnnnnnnnnnaagcttggcgtggatccgatatcaactagatcttgagacaaatggcagtattcatccacaattttaaaagaaaaggggggattggggggtacagtgcaggggaaagaatagtagacataatagcaacagacatacaaactaaag

SEQ ID NO: 9843 - DNA, 301 bp, Artificial Sequence
  Ube2g2.1_Chd1.2
  crRNA array
  misc_feature (148)..(157): n is a, c, g, or t
cttggctttatatatcttgtggaaaggacgaaacaccgtaatttctactaagtgtagatgtgtgggtctcctgggggcctaatttctactaagtgtagattgcagccggcgtctggcagctaatttctactaagtgtagatttttttnnnnnnnnnnaagcttggcgtggatccgatatcaactagatcttgagacaaatggcagtattcatccacaattttaaaagaaaaggggggattggggggtacagtgcaggggaaagaatagtagacataatagcaacagacatacaaactaaag

SEQ ID NO: 9844 - DNA, 301 bp, Artificial Sequence
  Ube2g2.1_Chd1.3
  crRNA array
  misc_feature (148)..(157): n is a, c, g, or t
cttggctttatatatcttgtggaaaggacgaaacaccgtaatttctactaagtgtagatgtgtgggtctcctgggggcctaatttctactaagtgtagatatcagcaagtatgcaactattaatttctactaagtgtagatttttttnnnnnnnnnnaagcttggcgtggatccgatatcaactagatcttgagacaaatggcagtattcatccacaattttaaaagaaaaggggggattggggggtacagtgcaggggaaagaatagtagacataatagcaacagacatacaaactaaag

SEQ ID NO: 9845 - DNA, 301 bp, Artificial Sequence
  Ube2g2.1_Chd1.4
  crRNA array
  misc_feature (148)..(157): n is a, c, g, or t
cttggctttatatatcttgtggaaaggacgaaacaccgtaatttctactaagtgtagatgtgtgggtctcctgggggcctaatttctactaagtgtagataaatggcggataactcctcttaatttctactaagtgtagatttttttnnnnnnnnnnaagcttggcgtggatccgatatcaactagatcttgagacaaatggcagtattcatccacaattttaaaagaaaaggggggattggggggtacagtgcaggggaaagaatagtagacataatagcaacagacatacaaactaaag

SEQ ID NO: 9846 - DNA, 301 bp, Artificial Sequence
  Ube2g2.2_Chd1.1
  crRNA array
  misc_feature (148)..(157): n is a, c, g, or t
cttggctttatatatcttgtggaaaggacgaaacaccgtaatttctactaagtgtagatgcagcgcagcagctgtcatttaatttctactaagtgtagatcgccccactctgcaatccattaatttctactaagtgtagatttttttnnnnnnnnnnaagcttggcgtggatccgatatcaactagatcttgagacaaatggcagtattcatccacaattttaaaagaaaaggggggattggggggtacagtgcaggggaaagaatagtagacataatagcaacagacatacaaactaaag

SEQ ID NO: 9847 - DNA, 301 bp, Artificial Sequence
  Ube2g2.2_Chd1.2
  crRNA array
  misc_feature (148)..(157): n is a, c, g, or t
cttggctttatatatcttgtggaaaggacgaaacaccgtaatttctactaagtgtagatgcagcgcagcagctgtcatttaatttctactaagtgtagattgcagccggcgtctggcagctaatttctactaagtgtagatttttttnnnnnnnnnnaagcttggcgtggatccgatatcaactagatcttgagacaaatggcagtattcatccacaattttaaaagaaaaggggggattggggggtacagtgcaggggaaagaatagtagacataatagcaacagacatacaaactaaag

SEQ ID NO: 9848 - DNA, 301 bp, Artificial Sequence
  Ube2g2.2_Chd1.3
  crRNA array
  misc_feature (148)..(157): n is a, c, g, or t
cttggctttatatatcttgtggaaaggacgaaacaccgtaatttctactaagtgtagatgcagcgcagcagctgtcatttaatttctactaagtgtagatatcagcaagtatgcaactattaatttctactaagtgtagatttttttnnnnnnnnnnaagcttggcgtggatccgatatcaactagatcttgagacaaatggcagtattcatccacaattttaaaagaaaaggggggattggggggtacagtgcaggggaaagaatagtagacataatagcaacagacatacaaactaaag

SEQ ID NO: 9849 - DNA, 301 bp, Artificial Sequence
  Ube2g2.2_Chd1.4
  crRNA array
  misc_feature (148)..(157): n is a, c, g, or t
cttggctttatatatcttgtggaaaggacgaaacaccgtaatttctactaagtgtagatgcagcgcagcagctgtcatttaatttctactaagtgtagataaatggcggataactcctcttaatttctactaagtgtagatttttttnnnnnnnnnnaagcttggcgtggatccgatatcaactagatcttgagacaaatggcagtattcatccacaattttaaaagaaaaggggggattggggggtacagtgcaggggaaagaatagtagacataatagcaacagacatacaaactaaag

SEQ ID NO: 9850 - DNA, 301 bp, Artificial Sequence
  Ube2g2.3_Chd1.1
  crRNA array
  misc_feature (148)..(157): n is a, c, g, or t
cttggctttatatatcttgtggaaaggacgaaacaccgtaatttctactaagtgtagataaacgcaacagagtctggtgtaatttctactaagtgtagatcgccccactctgcaatccattaatttctactaagtgtagatttttttnnnnnnnnnnaagcttggcgtggatccgatatcaactagatcttgagacaaatggcagtattcatccacaattttaaaagaaaaggggggattggggggtacagtgcaggggaaagaatagtagacataatagcaacagacatacaaactaaag

SEQ ID NO: 9851 - DNA, 301 bp, Artificial Sequence
  Ube2g2.3_Chd1.2
  crRNA array
  misc_feature (148)..(157): n is a, c, g, or t
cttggctttatatatcttgtggaaaggacgaaacaccgtaatttctactaagtgtagataaacgcaacagagtctggtgtaatttctactaagtgtagattgcagccggcgtctggcagctaatttctactaagtgtagatttttttnnnnnnnnnnaagcttggcgtggatccgatatcaactagatcttgagacaaatggcagtattcatccacaattttaaaagaaaaggggggattggggggtacagtgcaggggaaagaatagtagacataatagcaacagacatacaaactaaag

SEQ ID NO: 9852 - DNA, 301 bp, Artificial Sequence
  Ube2g2.3_Chd1.3
  crRNA array
  misc_feature (148)..(157): n is a, c, g, or t
cttggctttatatatcttgtggaaaggacgaaacaccgtaatttctactaagtgtagataaacgcaacagagtctggtgtaatttctactaagtgtagatatcagcaagtatgcaactattaatttctactaagtgtagatttttttnnnnnnnnnnaagcttggcgtggatccgatatcaactagatcttgagacaaatggcagtattcatccacaattttaaaagaaaaggggggattggggggtacagtgcaggggaaagaatagtagacataatagcaacagacatacaaactaaag

SEQ ID NO: 9853 - DNA, 301 bp, Artificial Sequence
  Ube2g2.3_Chd1.4
  crRNA array
  misc_feature (148)..(157): n is a, c, g, or t
cttggctttatatatcttgtggaaaggacgaaacaccgtaatttctactaagtgtagataaacgcaacagagtctggtgtaatttctactaagtgtagataaatggcggataactcctcttaatttctactaagtgtagatttttttnnnnnnnnnnaagcttggcgtggatccgatatcaactagatcttgagacaaatggcagtattcatccacaattttaaaagaaaaggggggattggggggtacagtgcaggggaaagaatagtagacataatagcaacagacatacaaactaaag

SEQ ID NO: 9854 - DNA, 301 bp, Artificial Sequence
  Ube2g2.4_Chd1.1
  crRNA array
  misc_feature (148)..(157): n is a, c, g, or t
cttggctttatatatcttgtggaaaggacgaaacaccgtaatttctactaagtgtagatgaaaaggccaagcatccacctaatttctactaagtgtagatcgccccactctgcaatccattaatttctactaagtgtagatttttttnnnnnnnnnnaagcttggcgtggatccgatatcaactagatcttgagacaaatggcagtattcatccacaattttaaaagaaaaggggggattggggggtacagtgcaggggaaagaatagtagacataatagcaacagacatacaaactaaag

SEQ ID NO: 9855 - DNA, 301 bp, Artificial Sequence
  Ube2g2.4_Chd1.2
  crRNA array
  misc_feature (148)..(157): n is a, c, g, or t
cttggctttatatatcttgtggaaaggacgaaacaccgtaatttctactaagtgtagatgaaaaggccaagcatccacctaatttctactaagtgtagattgcagccggcgtctggcagctaatttctactaagtgtagatttttttnnnnnnnnnnaagcttggcgtggatccgatatcaactagatcttgagacaaatggcagtattcatccacaattttaaaagaaaaggggggattggggggtacagtgcaggggaaagaatagtagacataatagcaacagacatacaaactaaag

SEQ ID NO: 9856 - DNA, 301 bp, Artificial Sequence
  Ube2g2.4_Chd1.3
  crRNA array
  misc_feature (148)..(157): n is a, c, g, or t
cttggctttatatatcttgtggaaaggacgaaacaccgtaatttctactaagtgtagatgaaaaggccaagcatccacctaatttctactaagtgtagatatcagcaagtatgcaactattaatttctactaagtgtagatttttttnnnnnnnnnnaagcttggcgtggatccgatatcaactagatcttgagacaaatggcagtattcatccacaattttaaaagaaaaggggggattggggggtacagtgcaggggaaagaatagtagacataatagcaacagacatacaaactaaag

SEQ ID NO: 9857 - DNA, 301 bp, Artificial Sequence
  Ube2g2.4_Chd1.4
  crRNA array
  misc_feature (148)..(157): n is a, c, g, or t
cttggctttatatatcttgtggaaaggacgaaacaccgtaatttctactaagtgtagatgaaaaggccaagcatccacctaatttctactaagtgtagataaatggcggataactcctcttaatttctactaagtgtagatttttttnnnnnnnnnnaagcttggcgtggatccgatatcaactagatcttgagacaaatggcagtattcatccacaattttaaaagaaaaggggggattggggggtacagtgcaggggaaagaatagtagacataatagcaacagacatacaaactaaag

SEQ ID NO: 9858 - DNA, 301 bp, Artificial Sequence
  Ube2g2.1_Pole.1
  crRNA array
  misc_feature (148)..(157): n is a, c, g, or t
cttggctttatatatcttgtggaaaggacgaaacaccgtaatttctactaagtgtagatgtgtgggtctcctgggggcctaatttctactaagtgtagatgcgcgctctccacgtgctcttaatttctactaagtgtagatttttttnnnnnnnnnnaagcttggcgtggatccgatatcaactagatcttgagacaaatggcagtattcatccacaattttaaaagaaaaggggggattggggggtacagtgcaggggaaagaatagtagacataatagcaacagacatacaaactaaag

SEQ ID NO: 9859 - DNA, 301 bp, Artificial Sequence
  Ube2g2.1_Pole.2
  crRNA array
  misc_feature (148)..(157): n is a, c, g, or t
cttggctttatatatcttgtggaaaggacgaaacaccgtaatttctactaagtgtagatgtgtgggtctcctgggggcctaatttctactaagtgtagatacatcgagacgaccaaactgtaatttctactaagtgtagatttttttnnnnnnnnnnaagcttggcgtggatccgatatcaactagatcttgagacaaatggcagtattcatccacaattttaaaagaaaaggggggattggggggtacagtgcaggggaaagaatagtagacataatagcaacagacatacaaactaaag

SEQ ID NO: 9860 - DNA, 301 bp, Artificial Sequence
  Ube2g2.1_Pole.3
  crRNA array
  misc_feature (148)..(157): n is a, c, g, or t
cttggctttatatatcttgtggaaaggacgaaacaccgtaatttctactaagtgtagatgtgtgggtctcctgggggcctaatttctactaagtgtagatctgctgcaacgagtcgagaataatttctactaagtgtagatttttttnnnnnnnnnnaagcttggcgtggatccgatatcaactagatcttgagacaaatggcagtattcatccacaattttaaaagaaaaggggggattggggggtacagtgcaggggaaagaatagtagacataatagcaacagacatacaaactaaag

SEQ ID NO: 9861 - DNA, 301 bp, Artificial Sequence
  Ube2g2.1_Pole.4
  crRNA array
  misc_feature (148)..(157): n is a, c, g, or t
cttggctttatatatcttgtggaaaggacgaaacaccgtaatttctactaagtgtagatgtgtgggtctcctgggggcctaatttctactaagtgtagatgggagatgatatagcggcagtaatttctactaagtgtagatttttttnnnnnnnnnnaagcttggcgtggatccgatatcaactagatcttgagacaaatggcagtattcatccacaattttaaaagaaaaggggggattggggggtacagtgcaggggaaagaatagtagacataatagcaacagacatacaaactaaag

SEQ ID NO: 9862 - DNA, 301 bp, Artificial Sequence
  Ube2g2.2_Pole.1
  crRNA array
  misc_feature (148)..(157): n is a, c, g, or t
cttggctttatatatcttgtggaaaggacgaaacaccgtaatttctactaagtgtagatgcagcgcagcagctgtcatttaatttctactaagtgtagatgcgcgctctccacgtgctcttaatttctactaagtgtagatttttttnnnnnnnnnnaagcttggcgtggatccgatatcaactagatcttgagacaaatggcagtattcatccacaattttaaaagaaaaggggggattggggggtacagtgcaggggaaagaatagtagacataatagcaacagacatacaaactaaag

SEQ ID NO: 9863 - DNA, 301 bp, Artificial Sequence
  Ube2g2.2_Pole.2
  crRNA array
  misc_feature (148)..(157): n is a, c, g, or t
cttggctttatatatcttgtggaaaggacgaaacaccgtaatttctactaagtgtagatgcagcgcagcagctgtcatttaatttctactaagtgtagatacatcgagacgaccaaactgtaatttctactaagtgtagatttttttnnnnnnnnnnaagcttggcgtggatccgatatcaactagatcttgagacaaatggcagtattcatccacaattttaaaagaaaaggggggattggggggtacagtgcaggggaaagaatagtagacataatagcaacagacatacaaactaaag

SEQ ID NO: 9864 - DNA, 301 bp, Artificial Sequence
  Ube2g2.2_Pole.3
  crRNA array
  misc_feature (148)..(157): n is a, c, g, or t
cttggctttatatatcttgtggaaaggacgaaacaccgtaatttctactaagtgtagatgcagcgcagcagctgtcatttaatttctactaagtgtagatctgctgcaacgagtcgagaataatttctactaagtgtagatttttttnnnnnnnnnnaagcttggcgtggatccgatatcaactagatcttgagacaaatggcagtattcatccacaattttaaaagaaaaggggggattggggggtacagtgcaggggaaagaatagtagacataatagcaacagacatacaaactaaag

SEQ ID NO: 9865 - DNA, 301 bp, Artificial Sequence
  Ube2g2.2_Pole.4
  crRNA array
  misc_feature (148)..(157): n is a, c, g, or t
cttggctttatatatcttgtggaaaggacgaaacaccgtaatttctactaagtgtagatgcagcgcagcagctgtcatttaatttctactaagtgtagatgggagatgatatagcggcagtaatttctactaagtgtagatttttttnnnnnnnnnnaagcttggcgtggatccgatatcaactagatcttgagacaaatggcagtattcatccacaattttaaaagaaaaggggggattggggggtacagtgcaggggaaagaatagtagacataatagcaacagacatacaaactaaag

SEQ ID NO: 9866 - DNA, 301 bp, Artificial Sequence
  Ube2g2.3_Pole.1
  crRNA array
  misc_feature (148)..(157): n is a, c, g, or t
cttggctttatatatcttgtggaaaggacgaaacaccgtaatttctactaagtgtagataaacgcaacagagtctggtgtaatttctactaagtgtagatgcgcgctctccacgtgctcttaatttctactaagtgtagatttttttnnnnnnnnnnaagcttggcgtggatccgatatcaactagatcttgagacaaatggcagtattcatccacaattttaaaagaaaaggggggattggggggtacagtgcaggggaaagaatagtagacataatagcaacagacatacaaactaaag

SEQ ID NO: 9867 - DNA, 301 bp, Artificial Sequence
  Ube2g2.3_Pole.2
  crRNA array
  misc_feature (148)..(157): n is a, c, g, or t
cttggctttatatatcttgtggaaaggacgaaacaccgtaatttctactaagtgtagataaacgcaacagagtctggtgtaatttctactaagtgtagatacatcgagacgaccaaactgtaatttctactaagtgtagatttttttnnnnnnnnnnaagcttggcgtggatccgatatcaactagatcttgagacaaatggcagtattcatccacaattttaaaagaaaaggggggattggggggtacagtgcaggggaaagaatagtagacataatagcaacagacatacaaactaaag

SEQ ID NO: 9868 - DNA, 301 bp, Artificial Sequence
  Ube2g2.3_Pole.3
  crRNA array
  misc_feature (148)..(157): n is a, c, g, or t
cttggctttatatatcttgtggaaaggacgaaacaccgtaatttctactaagtgtagataaacgcaacagagtctggtgtaatttctactaagtgtagatctgctgcaacgagtcgagaataatttctactaagtgtagatttttttnnnnnnnnnnaagcttggcgtggatccgatatcaactagatcttgagacaaatggcagtattcatccacaattttaaaagaaaaggggggattggggggtacagtgcaggggaaagaatagtagacataatagcaacagacatacaaactaaag

SEQ ID NO: 9869 - DNA, 301 bp, Artificial Sequence
  Ube2g2.3_Pole.4
  crRNA array
  misc_feature (148)..(157): n is a, c, g, or t
cttggctttatatatcttgtggaaaggacgaaacaccgtaatttctactaagtgtagataaacgcaacagagtctggtgtaatttctactaagtgtagatgggagatgatatagcggcagtaatttctactaagtgtagatttttttnnnnnnnnnnaagcttggcgtggatccgatatcaactagatcttgagacaaatggcagtattcatccacaattttaaaagaaaaggggggattggggggtacagtgcaggggaaagaatagtagacataatagcaacagacatacaaactaaag

SEQ ID NO: 9870 - DNA, 301 bp, Artificial Sequence
  Ube2g2.4_Pole.1
  crRNA array
  misc_feature (148)..(157): n is a, c, g, or t
cttggctttatatatcttgtggaaaggacgaaacaccgtaatttctactaagtgtagatgaaaaggccaagcatccacctaatttctactaagtgtagatgcgcgctctccacgtgctcttaatttctactaagtgtagatttttttnnnnnnnnnnaagcttggcgtggatccgatatcaactagatcttgagacaaatggcagtattcatccacaattttaaaagaaaaggggggattggggggtacagtgcaggggaaagaatagtagacataatagcaacagacatacaaactaaag

SEQ ID NO: 9871 - DNA, 301 bp, Artificial Sequence
  Ube2g2.4_Pole.2
  crRNA array
  misc_feature (148)..(157): n is a, c, g, or t
cttggctttatatatcttgtggaaaggacgaaacaccgtaatttctactaagtgtagatgaaaaggccaagcatccacctaatttctactaagtgtagatacatcgagacgaccaaactgtaatttctactaagtgtagatttttttnnnnnnnnnnaagcttggcgtggatccgatatcaactagatcttgagacaaatggcagtattcatccacaattttaaaagaaaaggggggattggggggtacagtgcaggggaaagaatagtagacataatagcaacagacatacaaactaaag

SEQ ID NO: 9872 - DNA, 301 bp, Artificial Sequence
  Ube2g2.4_Pole.3
  crRNA array
  misc_feature (148)..(157): n is a, c, g, or t
cttggctttatatatcttgtggaaaggacgaaacaccgtaatttctactaagtgtagatgaaaaggccaagcatccacctaatttctactaagtgtagatctgctgcaacgagtcgagaataatttctactaagtgtagatttttttnnnnnnnnnnaagcttggcgtggatccgatatcaactagatcttgagacaaatggcagtattcatccacaattttaaaagaaaaggggggattggggggtacagtgcaggggaaagaatagtagacataatagcaacagacatacaaactaaag

SEQ ID NO: 9873 - DNA, 301 bp, Artificial Sequence
  Ube2g2.4_Pole.4
  crRNA array
  misc_feature (148)..(157): n is a, c, g, or t
cttggctttatatatcttgtggaaaggacgaaacaccgtaatttctactaagtgtagatgaaaaggccaagcatccacctaatttctactaagtgtagatgggagatgatatagcggcagtaatttctactaagtgtagatttttttnnnnnnnnnnaagcttggcgtggatccgatatcaactagatcttgagacaaatggcagtattcatccacaattttaaaagaaaaggggggattggggggtacagtgcaggggaaagaatagtagacataatagcaacagacatacaaactaaag

SEQ ID NO: 9874 - DNA, 301 bp, Artificial Sequence
  Ube2g2.1_Notch1.1
  crRNA array
  misc_feature (148)..(157): n is a, c, g, or t
cttggctttatatatcttgtggaaaggacgaaacaccgtaatttctactaagtgtagatgtgtgggtctcctgggggcctaatttctactaagtgtagattgggccaacgatgccaggactaatttctactaagtgtagatttttttnnnnnnnnnnaagcttggcgtggatccgatatcaactagatcttgagacaaatggcagtattcatccacaattttaaaagaaaaggggggattggggggtacagtgcaggggaaagaatagtagacataatagcaacagacatacaaactaaag

SEQ ID NO: 9875 - DNA, 301 bp, Artificial Sequence
  Ube2g2.1_Notch1.2
  crRNA array
  misc_feature (148)..(157): n is a, c, g, or t
cttggctttatatatcttgtggaaaggacgaaacaccgtaatttctactaagtgtagatgtgtgggtctcctgggggcctaatttctactaagtgtagatgtcgccccagcatcctgaagtaatttctactaagtgtagatttttttnnnnnnnnnnaagcttggcgtggatccgatatcaactagatcttgagacaaatggcagtattcatccacaattttaaaagaaaaggggggattggggggtacagtgcaggggaaagaatagtagacataatagcaacagacatacaaactaaag

SEQ ID NO: 9876 - DNA, 301 bp, Artificial Sequence
  Ube2g2.1_Notch1.3
  crRNA array
  misc_feature (148)..(157): n is a, c, g, or t
cttggctttatatatcttgtggaaaggacgaaacaccgtaatttctactaagtgtagatgtgtgggtctcctgggggcctaatttctactaagtgtagatagccacccccgccacgcctctaatttctactaagtgtagatttttttnnnnnnnnnnaagcttggcgtggatccgatatcaactagatcttgagacaaatggcagtattcatccacaattttaaaagaaaaggggggattggggggtacagtgcaggggaaagaatagtagacataatagcaacagacatacaaactaaag

SEQ ID NO: 9877 - DNA, 301 bp, Artificial Sequence
  Ube2g2.1_Notch1.4
  crRNA array
  misc_feature (148)..(157): n is a, c, g, or t
cttggctttatatatcttgtggaaaggacgaaacaccgtaatttctactaagtgtagatgtgtgggtctcctgggggcctaatttctactaagtgtagataaagtgtcagaggccagcaataatttctactaagtgtagatttttttnnnnnnnnnnaagcttggcgtggatccgatatcaactagatcttgagacaaatggcagtattcatccacaattttaaaagaaaaggggggattggggggtacagtgcaggggaaagaatagtagacataatagcaacagacatacaaactaaag

SEQ ID NO: 9878 - DNA, 301 bp, Artificial Sequence
  Ube2g2.2_Notch1.1
  crRNA array
  misc_feature (148)..(157): n is a, c, g, or t
cttggctttatatatcttgtggaaaggacgaaacaccgtaatttctactaagtgtagatgcagcgcagcagctgtcatttaatttctactaagtgtagattgggccaacgatgccaggactaatttctactaagtgtagatttttttnnnnnnnnnnaagcttggcgtggatccgatatcaactagatcttgagacaaatggcagtattcatccacaattttaaaagaaaaggggggattggggggtacagtgcaggggaaagaatagtagacataatagcaacagacatacaaactaaag

SEQ ID NO: 9879 - DNA, 301 bp, Artificial Sequence
  Ube2g2.2_Notch1.2
  crRNA array
  misc_feature (148)..(157): n is a, c, g, or t
cttggctttatatatcttgtggaaaggacgaaacaccgtaatttctactaagtgtagatgcagcgcagcagctgtcatttaatttctactaagtgtagatgtcgccccagcatcctgaagtaatttctactaagtgtagatttttttnnnnnnnnnnaagcttggcgtggatccgatatcaactagatcttgagacaaatggcagtattcatccacaattttaaaagaaaaggggggattggggggtacagtgcaggggaaagaatagtagacataatagcaacagacatacaaactaaag

SEQ ID NO: 9880 - DNA, 301 bp, Artificial Sequence
  Ube2g2.2_Notch1.3
  crRNA array
  misc_feature (148)..(157): n is a, c, g, or t
cttggctttatatatcttgtggaaaggacgaaacaccgtaatttctactaagtgtagatgcagcgcagcagctgtcatttaatttctactaagtgtagatagccacccccgccacgcctctaatttctactaagtgtagatttttttnnnnnnnnnnaagcttggcgtggatccgatatcaactagatcttgagacaaatggcagtattcatccacaattttaaaagaaaaggggggattggggggtacagtgcaggggaaagaatagtagacataatagcaacagacatacaaactaaag

SEQ ID NO: 9881 - DNA, 301 bp, Artificial Sequence
  Ube2g2.2_Notch1.4
  crRNA array
  misc_feature (148)..(157): n is a, c, g, or t
cttggctttatatatcttgtggaaaggacgaaacaccgtaatttctactaagtgtagatgcagcgcagcagctgtcatttaatttctactaagtgtagataaagtgtcagaggccagcaataatttctactaagtgtagatttttttnnnnnnnnnnaagcttggcgtggatccgatatcaactagatcttgagacaaatggcagtattcatccacaattttaaaagaaaaggggggattggggggtacagtgcaggggaaagaatagtagacataatagcaacagacatacaaactaaag

SEQ ID NO: 9882 - DNA, 301 bp, Artificial Sequence
  Ube2g2.3_Notch1.1
  crRNA array
  misc_feature (148)..(157): n is a, c, g, or t
cttggctttatatatcttgtggaaaggacgaaacaccgtaatttctactaagtgtagataaacgcaacagagtctggtgtaatttctactaagtgtagattgggccaacgatgccaggactaatttctactaagtgtagatttttttnnnnnnnnnnaagcttggcgtggatccgatatcaactagatcttgagacaaatggcagtattcatccacaattttaaaagaaaaggggggattggggggtacagtgcaggggaaagaatagtagacataatagcaacagacatacaaactaaag

SEQ ID NO: 9883 - DNA, 301 bp, Artificial Sequence
  Ube2g2.3_Notch1.2
  crRNA array
  misc_feature (148)..(157): n is a, c, g, or t
cttggctttatatatcttgtggaaaggacgaaacaccgtaatttctactaagtgtagataaacgcaacagagtctggtgtaatttctactaagtgtagatgtcgccccagcatcctgaagtaatttctactaagtgtagatttttttnnnnnnnnnnaagcttggcgtggatccgatatcaactagatcttgagacaaatggcagtattcatccacaattttaaaagaaaaggggggattggggggtacagtgcaggggaaagaatagtagacataatagcaacagacatacaaactaaag

SEQ ID NO: 9884 - DNA, 301 bp, Artificial Sequence
  Ube2g2.3_Notch1.3
  crRNA array
  misc_feature (148)..(157): n is a, c, g, or t
cttggctttatatatcttgtggaaaggacgaaacaccgtaatttctactaagtgtagataaacgcaacagagtctggtgtaatttctactaagtgtagatagccacccccgccacgcctctaatttctactaagtgtagatttttttnnnnnnnnnnaagcttggcgtggatccgatatcaactagatcttgagacaaatggcagtattcatccacaattttaaaagaaaaggggggattggggggtacagtgcaggggaaagaatagtagacataatagcaacagacatacaaactaaag

SEQ ID NO: 9885 - DNA, 301 bp, Artificial Sequence
  Ube2g2.3_Notch1.4
  crRNA array
  misc_feature (148)..(157): n is a, c, g, or t
cttggctttatatatcttgtggaaaggacgaaacaccgtaatttctactaagtgtagataaacgcaacagagtctggtgtaatttctactaagtgtagataaagtgtcagaggccagcaataatttctactaagtgtagatttttttnnnnnnnnnnaagcttggcgtggatccgatatcaactagatcttgagacaaatggcagtattcatccacaattttaaaagaaaaggggggattggggggtacagtgcaggggaaagaatagtagacataatagcaacagacatacaaactaaag

SEQ ID NO: 9886 - DNA, 301 bp, Artificial Sequence
  Ube2g2.4_Notch1.1
  crRNA array
  misc_feature (148)..(157): n is a, c, g, or t
cttggctttatatatcttgtggaaaggacgaaacaccgtaatttctactaagtgtagatgaaaaggccaagcatccacctaatttctactaagtgtagattgggccaacgatgccaggactaatttctactaagtgtagatttttttnnnnnnnnnnaagcttggcgtggatccgatatcaactagatcttgagacaaatggcagtattcatccacaattttaaaagaaaaggggggattggggggtacagtgcaggggaaagaatagtagacataatagcaacagacatacaaactaaag

SEQ ID NO: 9887 - DNA, 301 bp, Artificial Sequence
  Ube2g2.4_Notch1.2
  crRNA array
  misc_feature (148)..(157): n is a, c, g, or t
cttggctttatatatcttgtggaaaggacgaaacaccgtaatttctactaagtgtagatgaaaaggccaagcatccacctaatttctactaagtgtagatgtcgccccagcatcctgaagtaatttctactaagtgtagatttttttnnnnnnnnnnaagcttggcgtggatccgatatcaactagatcttgagacaaatggcagtattcatccacaattttaaaagaaaaggggggattggggggtacagtgcaggggaaagaatagtagacataatagcaacagacatacaaactaaag

SEQ ID NO: 9888 - DNA, 301 bp, Artificial Sequence
  Ube2g2.4_Notch1.3
  crRNA array
  misc_feature (148)..(157): n is a, c, g, or t
cttggctttatatatcttgtggaaaggacgaaacaccgtaatttctactaagtgtagatgaaaaggccaagcatccacctaatttctactaagtgtagatagccacccccgccacgcctctaatttctactaagtgtagatttttttnnnnnnnnnnaagcttggcgtggatccgatatcaactagatcttgagacaaatggcagtattcatccacaattttaaaagaaaaggggggattggggggtacagtgcaggggaaagaatagtagacataatagcaacagacatacaaactaaag

SEQ ID NO: 9889 - DNA, 301 bp, Artificial Sequence
  Ube2g2.4_Notch1.4
  crRNA array
  misc_feature (148)..(157): n is a, c, g, or t
cttggctttatatatcttgtggaaaggacgaaacaccgtaatttctactaagtgtagatgaaaaggccaagcatccacctaatttctactaagtgtagataaagtgtcagaggccagcaataatttctactaagtgtagatttttttnnnnnnnnnnaagcttggcgtggatccgatatcaactagatcttgagacaaatggcagtattcatccacaattttaaaagaaaaggggggattggggggtacagtgcaggggaaagaatagtagacataatagcaacagacatacaaactaaag

SEQ ID NO: 9890 - DNA, 301 bp, Artificial Sequence
  Ube2g2.1_Arid1a.1
  crRNA array
  misc_feature (148)..(157): n is a, c, g, or t
cttggctttatatatcttgtggaaaggacgaaacaccgtaatttctactaagtgtagatgtgtgggtctcctgggggcctaatttctactaagtgtagatcccgcgctcggccgctgccgtaatttctactaagtgtagatttttttnnnnnnnnnnaagcttggcgtggatccgatatcaactagatcttgagacaaatggcagtattcatccacaattttaaaagaaaaggggggattggggggtacagtgcaggggaaagaatagtagacataatagcaacagacatacaaactaaag

SEQ ID NO: 9891 - DNA, 301 bp, Artificial Sequence
  Ube2g2.1_Arid1a.2
  crRNA array
  misc_feature (148)..(157): n is a, c, g, or t
cttggctttatatatcttgtggaaaggacgaaacaccgtaatttctactaagtgtagatgtgtgggtctcctgggggcctaatttctactaagtgtagatagtgcaagatcgagcgtggataatttctactaagtgtagatttttttnnnnnnnnnnaagcttggcgtggatccgatatcaactagatcttgagacaaatggcagtattcatccacaattttaaaagaaaaggggggattggggggtacagtgcaggggaaagaatagtagacataatagcaacagacatacaaactaaag

SEQ ID NO: 9892 - DNA, 301 bp, Artificial Sequence
  Ube2g2.1_Arid1a.3
  crRNA array
  misc_feature (148)..(157): n is a, c, g, or t
cttggctttatatatcttgtggaaaggacgaaacaccgtaatttctactaagtgtagatgtgtgggtctcctgggggcctaatttctactaagtgtagatagtgagctggcagcactgcttaatttctactaagtgtagatttttttnnnnnnnnnnaagcttggcgtggatccgatatcaactagatcttgagacaaatggcagtattcatccacaattttaaaagaaaaggggggattggggggtacagtgcaggggaaagaatagtagacataatagcaacagacatacaaactaaag

SEQ ID NO: 9893 - DNA, 301 bp, Artificial Sequence
  Ube2g2.1_Arid1a.4
  crRNA array
  misc_feature (148)..(157): n is a, c, g, or t
cttggctttatatatcttgtggaaaggacgaaacaccgtaatttctactaagtgtagatgtgtgggtctcctgggggcctaatttctactaagtgtagatgccgagaccgagtctctgcataatttctactaagtgtagatttttttnnnnnnnnnnaagcttggcgtggatccgatatcaactagatcttgagacaaatggcagtattcatccacaattttaaaagaaaaggggggattggggggtacagtgcaggggaaagaatagtagacataatagcaacagacatacaaactaaag

SEQ ID NO: 9894 - DNA, 301 bp, Artificial Sequence
  Ube2g2.2_Arid1a.1
  crRNA array
  misc_feature (148)..(157): n is a, c, g, or t
cttggctttatatatcttgtggaaaggacgaaacaccgtaatttctactaagtgtagatgcagcgcagcagctgtcatttaatttctactaagtgtagatcccgcgctcggccgctgccgtaatttctactaagtgtagatttttttnnnnnnnnnnaagcttggcgtggatccgatatcaactagatcttgagacaaatggcagtattcatccacaattttaaaagaaaaggggggattggggggtacagtgcaggggaaagaatagtagacataatagcaacagacatacaaactaaag

SEQ ID NO: 9895 - DNA, 301 bp, Artificial Sequence
  Ube2g2.2_Arid1a.2
  crRNA array
  misc_feature (148)..(157): n is a, c, g, or t
cttggctttatatatcttgtggaaaggacgaaacaccgtaatttctactaagtgtagatgcagcgcagcagctgtcatttaatttctactaagtgtagatagtgcaagatcgagcgtggataatttctactaagtgtagatttttttnnnnnnnnnnaagcttggcgtggatccgatatcaactagatcttgagacaaatggcagtattcatccacaattttaaaagaaaaggggggattggggggtacagtgcaggggaaagaatagtagacataatagcaacagacatacaaactaaag

SEQ ID NO: 9896 - DNA, 301 bp, Artificial Sequence
  Ube2g2.2_Arid1a.3
  crRNA array
  misc_feature (148)..(157): n is a, c, g, or t
cttggctttatatatcttgtggaaaggacgaaacaccgtaatttctactaagtgtagatgcagcgcagcagctgtcatttaatttctactaagtgtagatagtgagctggcagcactgcttaatttctactaagtgtagatttttttnnnnnnnnnnaagcttggcgtggatccgatatcaactagatcttgagacaaatggcagtattcatccacaattttaaaagaaaaggggggattggggggtacagtgcaggggaaagaatagtagacataatagcaacagacatacaaactaaag

SEQ ID NO: 9897 - DNA, 301 bp, Artificial Sequence
  Ube2g2.2_Arid1a.4
  crRNA array
  misc_feature (148)..(157): n is a, c, g, or t
cttggctttatatatcttgtggaaaggacgaaacaccgtaatttctactaagtgtagatgcagcgcagcagctgtcatttaatttctactaagtgtagatgccgagaccgagtctctgcataatttctactaagtgtagatttttttnnnnnnnnnnaagcttggcgtggatccgatatcaactagatcttgagacaaatggcagtattcatccacaattttaaaagaaaaggggggattggggggtacagtgcaggggaaagaatagtagacataatagcaacagacatacaaactaaag

SEQ ID NO: 9898 - DNA, 301 bp, Artificial Sequence
  Ube2g2.3_Arid1a.1
  crRNA array
  misc_feature (148)..(157): n is a, c, g, or t
cttggctttatatatcttgtggaaaggacgaaacaccgtaatttctactaagtgtagataaacgcaacagagtctggtgtaatttctactaagtgtagatcccgcgctcggccgctgccgtaatttctactaagtgtagatttttttnnnnnnnnnnaagcttggcgtggatccgatatcaactagatcttgagacaaatggcagtattcatccacaattttaaaagaaaaggggggattggggggtacagtgcaggggaaagaatagtagacataatagcaacagacatacaaactaaag

SEQ ID NO: 9899 - DNA, 301 bp, Artificial Sequence
  Ube2g2.3_Arid1a.2
  crRNA array
  misc_feature (148)..(157): n is a, c, g, or t
cttggctttatatatcttgtggaaaggacgaaacaccgtaatttctactaagtgtagataaacgcaacagagtctggtgtaatttctactaagtgtagatagtgcaagatcgagcgtggataatttctactaagtgtagatttttttnnnnnnnnnnaagcttggcgtggatccgatatcaactagatcttgagacaaatggcagtattcatccacaattttaaaagaaaaggggggattggggggtacagtgcaggggaaagaatagtagacataatagcaacagacatacaaactaaag

SEQ ID NO: 9900 - DNA, 301 bp, Artificial Sequence
  Ube2g2.3_Arid1a.3
  crRNA array
  misc_feature (148)..(157): n is a, c, g, or t
cttggctttatatatcttgtggaaaggacgaaacaccgtaatttctactaagtgtagataaacgcaacagagtctggtgtaatttctactaagtgtagatagtgagctggcagcactgcttaatttctactaagtgtagatttttttnnnnnnnnnnaagcttggcgtggatccgatatcaactagatcttgagacaaatggcagtattcatccacaattttaaaagaaaaggggggattggggggtacagtgcaggggaaagaatagtagacataatagcaacagacatacaaactaaag

SEQ ID NO: 9901 - DNA, 301 bp, Artificial Sequence
  Ube2g2.3_Arid1a.4
  crRNA array
  misc_feature (148)..(157): n is a, c, g, or t
cttggctttatatatcttgtggaaaggacgaaacaccgtaatttctactaagtgtagataaacgcaacagagtctggtgtaatttctactaagtgtagatgccgagaccgagtctctgcataatttctactaagtgtagatttttttnnnnnnnnnnaagcttggcgtggatccgatatcaactagatcttgagacaaatggcagtattcatccacaattttaaaagaaaaggggggattggggggtacagtgcaggggaaagaatagtagacataatagcaacagacatacaaactaaag

SEQ ID NO: 9902 - DNA, 301 bp, Artificial Sequence
  Ube2g2.4_Arid1a.1
  crRNA array
  misc_feature (148)..(157): n is a, c, g, or t
cttggctttatatatcttgtggaaaggacgaaacaccgtaatttctactaagtgtagatgaaaaggccaagcatccacctaatttctactaagtgtagatcccgcgctcggccgctgccgtaatttctactaagtgtagatttttttnnnnnnnnnnaagcttggcgtggatccgatatcaactagatcttgagacaaatggcagtattcatccacaattttaaaagaaaaggggggattggggggtacagtgcaggggaaagaatagtagacataatagcaacagacatacaaactaaag

SEQ ID NO: 9903 - DNA, 301 bp, Artificial Sequence
  Ube2g2.4_Arid1a.2
  crRNA array
  misc_feature (148)..(157): n is a, c, g, or t
cttggctttatatatcttgtggaaaggacgaaacaccgtaatttctactaagtgtagatgaaaaggccaagcatccacctaatttctactaagtgtagatagtgcaagatcgagcgtggataatttctactaagtgtagatttttttnnnnnnnnnnaagcttggcgtggatccgatatcaactagatcttgagacaaatggcagtattcatccacaattttaaaagaaaaggggggattggggggtacagtgcaggggaaagaatagtagacataatagcaacagacatacaaactaaag

SEQ ID NO: 9904 - DNA, 301 bp, Artificial Sequence
  Ube2g2.4_Arid1a.3
  crRNA array
  misc_feature (148)..(157): n is a, c, g, or t
cttggctttatatatcttgtggaaaggacgaaacaccgtaatttctactaagtgtagatgaaaaggccaagcatccacctaatttctactaagtgtagatagtgagctggcagcactgcttaatttctactaagtgtagatttttttnnnnnnnnnnaagcttggcgtggatccgatatcaactagatcttgagacaaatggcagtattcatccacaattttaaaagaaaaggggggattggggggtacagtgcaggggaaagaatagtagacataatagcaacagacatacaaactaaag

SEQ ID NO: 9905 - DNA, 301 bp, Artificial Sequence
  Ube2g2.4_Arid1a.4
  crRNA array
  misc_feature (148)..(157): n is a, c, g, or t
cttggctttatatatcttgtggaaaggacgaaacaccgtaatttctactaagtgtagatgaaaaggccaagcatccacctaatttctactaagtgtagatgccgagaccgagtctctgcataatttctactaagtgtagatttttttnnnnnnnnnnaagcttggcgtggatccgatatcaactagatcttgagacaaatggcagtattcatccacaattttaaaagaaaaggggggattggggggtacagtgcaggggaaagaatagtagacataatagcaacagacatacaaactaaag

SEQ ID NO: 9906 - DNA, 301 bp, Artificial Sequence
  Ube2g2.1_Trim72.1
  crRNA array
  misc_feature (148)..(157): n is a, c, g, or t
cttggctttatatatcttgtggaaaggacgaaacaccgtaatttctactaagtgtagatgtgtgggtctcctgggggcctaatttctactaagtgtagataccccagctctgcgcacccgtaatttctactaagtgtagatttttttnnnnnnnnnnaagcttggcgtggatccgatatcaactagatcttgagacaaatggcagtattcatccacaattttaaaagaaaaggggggattggggggtacagtgcaggggaaagaatagtagacataatagcaacagacatacaaactaaag

SEQ ID NO: 9907 - DNA, 301 bp, Artificial Sequence
  Ube2g2.1_Trim72.2
  crRNA array
  misc_feature (148)..(157): n is a, c, g, or t
cttggctttatatatcttgtggaaaggacgaaacaccgtaatttctactaagtgtagatgtgtgggtctcctgggggcctaatttctactaagtgtagatcacgagcgtctgcccgggcctaatttctactaagtgtagatttttttnnnnnnnnnnaagcttggcgtggatccgatatcaactagatcttgagacaaatggcagtattcatccacaattttaaaagaaaaggggggattggggggtacagtgcaggggaaagaatagtagacataatagcaacagacatacaaactaaag

SEQ ID NO: 9908 - DNA, 301 bp, Artificial Sequence
  Ube2g2.1_Trim72.3
  crRNA array
  misc_feature (148)..(157): n is a, c, g, or t
cttggctttatatatcttgtggaaaggacgaaacaccgtaatttctactaagtgtagatgtgtgggtctcctgggggcctaatttctactaagtgtagatacgtgtgctggcacgacaagtaatttctactaagtgtagatttttttnnnnnnnnnnaagcttggcgtggatccgatatcaactagatcttgagacaaatggcagtattcatccacaattttaaaagaaaaggggggattggggggtacagtgcaggggaaagaatagtagacataatagcaacagacatacaaactaaag

SEQ ID NO: 9909 - DNA, 301 bp, Artificial Sequence
  Ube2g2.1_Trim72.4
  crRNA array
  misc_feature (148)..(157): n is a, c, g, or t
cttggctttatatatcttgtggaaaggacgaaacaccgtaatttctactaagtgtagatgtgtgggtctcctgggggcctaatttctactaagtgtagattgccgtgcctgcctgatccgtaatttctactaagtgtagatttttttnnnnnnnnnnaagcttggcgtggatccgatatcaactagatcttgagacaaatggcagtattcatccacaattttaaaagaaaaggggggattggggggtacagtgcaggggaaagaatagtagacataatagcaacagacatacaaactaaag

SEQ ID NO: 9910 - DNA, 301 bp, Artificial Sequence
  Ube2g2.2_Trim72.1
  crRNA array
  misc_feature (148)..(157): n is a, c, g, or t
cttggctttatatatcttgtggaaaggacgaaacaccgtaatttctactaagtgtagatgcagcgcagcagctgtcatttaatttctactaagtgtagataccccagctctgcgcacccgtaatttctactaagtgtagatttttttnnnnnnnnnnaagcttggcgtggatccgatatcaactagatcttgagacaaatggcagtattcatccacaattttaaaagaaaaggggggattggggggtacagtgcaggggaaagaatagtagacataatagcaacagacatacaaactaaag

SEQ ID NO: 9911 - DNA, 301 bp, Artificial Sequence
  Ube2g2.2_Trim72.2
  crRNA array
  misc_feature (148)..(157): n is a, c, g, or t
cttggctttatatatcttgtggaaaggacgaaacaccgtaatttctactaagtgtagatgcagcgcagcagctgtcatttaatttctactaagtgtagatcacgagcgtctgcccgggcctaatttctactaagtgtagatttttttnnnnnnnnnnaagcttggcgtggatccgatatcaactagatcttgagacaaatggcagtattcatccacaattttaaaagaaaaggggggattggggggtacagtgcaggggaaagaatagtagacataatagcaacagacatacaaactaaag

SEQ ID NO: 9912 - DNA, 301 bp, Artificial Sequence
  Ube2g2.2_Trim72.3
  crRNA array
  misc_feature (148)..(157): n is a, c, g, or t
cttggctttatatatcttgtggaaaggacgaaacaccgtaatttctactaagtgtagatgcagcgcagcagctgtcatttaatttctactaagtgtagatacgtgtgctggcacgacaagtaatttctactaagtgtagatttttttnnnnnnnnnnaagcttggcgtggatccgatatcaactagatcttgagacaaatggcagtattcatccacaattttaaaagaaaaggggggattggggggtacagtgcaggggaaagaatagtagacataatagcaacagacatacaaactaaag

SEQ ID NO: 9913 - DNA, 301 bp, Artificial Sequence
  Ube2g2.2_Trim72.4
  crRNA array
  misc_feature (148)..(157): n is a, c, g, or t
cttggctttatatatcttgtggaaaggacgaaacaccgtaatttctactaagtgtagatgcagcgcagcagctgtcatttaatttctactaagtgtagattgccgtgcctgcctgatccgtaatttctactaagtgtagatttttttnnnnnnnnnnaagcttggcgtggatccgatatcaactagatcttgagacaaatggcagtattcatccacaattttaaaagaaaaggggggattggggggtacagtgcaggggaaagaatagtagacataatagcaacagacatacaaactaaag

SEQ ID NO: 9914 - DNA, 301 bp, Artificial Sequence
  Ube2g2.3_Trim72.1
  crRNA array
  misc_feature (148)..(157): n is a, c, g, or t
cttggctttatatatcttgtggaaaggacgaaacaccgtaatttctactaagtgtagataaacgcaacagagtctggtgtaatttctactaagtgtagataccccagctctgcgcacccgtaatttctactaagtgtagatttttttnnnnnnnnnnaagcttggcgtggatccgatatcaactagatcttgagacaaatggcagtattcatccacaattttaaaagaaaaggggggattggggggtacagtgcaggggaaagaatagtagacataatagcaacagacatacaaactaaag

SEQ ID NO: 9915 - DNA, 301 bp, Artificial Sequence
  Ube2g2.3_Trim72.2
  crRNA array
  misc_feature (148)..(157): n is a, c, g, or t
cttggctttatatatcttgtggaaaggacgaaacaccgtaatttctactaagtgtagataaacgcaacagagtctggtgtaatttctactaagtgtagatcacgagcgtctgcccgggcctaatttctactaagtgtagatttttttnnnnnnnnnnaagcttggcgtggatccgatatcaactagatcttgagacaaatggcagtattcatccacaattttaaaagaaaaggggggattggggggtacagtgcaggggaaagaatagtagacataatagcaacagacatacaaactaaag

SEQ ID NO: 9916 - DNA, 301 bp, Artificial Sequence
  Ube2g2.3_Trim72.3
  crRNA array
  misc_feature (148)..(157): n is a, c, g, or t
cttggctttatatatcttgtggaaaggacgaaacaccgtaatttctactaagtgtagataaacgcaacagagtctggtgtaatttctactaagtgtagatacgtgtgctggcacgacaagtaatttctactaagtgtagatttttttnnnnnnnnnnaagcttggcgtggatccgatatcaactagatcttgagacaaatggcagtattcatccacaattttaaaagaaaaggggggattggggggtacagtgcaggggaaagaatagtagacataatagcaacagacatacaaactaaag

SEQ ID NO: 9917 - DNA, 301 bp, Artificial Sequence
  Ube2g2.3_Trim72.4
  crRNA array
  misc_feature (148)..(157): n is a, c, g, or t
cttggctttatatatcttgtggaaaggacgaaacaccgtaatttctactaagtgtagataaacgcaacagagtctggtgtaatttctactaagtgtagattgccgtgcctgcctgatccgtaatttctactaagtgtagatttttttnnnnnnnnnnaagcttggcgtggatccgatatcaactagatcttgagacaaatggcagtattcatccacaattttaaaagaaaaggggggattggggggtacagtgcaggggaaagaatagtagacataatagcaacagacatacaaactaaag

SEQ ID NO: 9918 - DNA, 301 bp, Artificial Sequence
  Ube2g2.4_Trim72.1
  crRNA array
  misc_feature (148)..(157): n is a, c, g, or t
cttggctttatatatcttgtggaaaggacgaaacaccgtaatttctactaagtgtagatgaaaaggccaagcatccacctaatttctactaagtgtagataccccagctctgcgcacccgtaatttctactaagtgtagatttttttnnnnnnnnnnaagcttggcgtggatccgatatcaactagatcttgagacaaatggcagtattcatccacaattttaaaagaaaaggggggattggggggtacagtgcaggggaaagaatagtagacataatagcaacagacatacaaactaaag

SEQ ID NO: 9919 - DNA, 301 bp, Artificial Sequence
  Ube2g2.4_Trim72.2
  crRNA array
  misc_feature (148)..(157): n is a, c, g, or t
cttggctttatatatcttgtggaaaggacgaaacaccgtaatttctactaagtgtagatgaaaaggccaagcatccacctaatttctactaagtgtagatcacgagcgtctgcccgggcctaatttctactaagtgtagatttttttnnnnnnnnnnaagcttggcgtggatccgatatcaactagatcttgagacaaatggcagtattcatccacaattttaaaagaaaaggggggattggggggtacagtgcaggggaaagaatagtagacataatagcaacagacatacaaactaaag

SEQ ID NO: 9920 - DNA, 301 bp, Artificial Sequence
  Ube2g2.4_Trim72.3
  crRNA array
  misc_feature (148)..(157): n is a, c, g, or t
cttggctttatatatcttgtggaaaggacgaaacaccgtaatttctactaagtgtagatgaaaaggccaagcatccacctaatttctactaagtgtagatacgtgtgctggcacgacaagtaatttctactaagtgtagatttttttnnnnnnnnnnaagcttggcgtggatccgatatcaactagatcttgagacaaatggcagtattcatccacaattttaaaagaaaaggggggattggggggtacagtgcaggggaaagaatagtagacataatagcaacagacatacaaactaaag

SEQ ID NO: 9921 - DNA, 301 bp, Artificial Sequence
  Ube2g2.4_Trim72.4
  crRNA array
  misc_feature (148)..(157): n is a, c, g, or t
cttggctttatatatcttgtggaaaggacgaaacaccgtaatttctactaagtgtagatgaaaaggccaagcatccacctaatttctactaagtgtagattgccgtgcctgcctgatccgtaatttctactaagtgtagatttttttnnnnnnnnnnaagcttggcgtggatccgatatcaactagatcttgagacaaatggcagtattcatccacaattttaaaagaaaaggggggattggggggtacagtgcaggggaaagaatagtagacataatagcaacagacatacaaactaaag

SEQ ID NO: 9922 - DNA, 301 bp, Artificial Sequence
  Ube2g2.1_Zfhx3.1
  crRNA array
  misc_feature (148)..(157): n is a, c, g, or t
cttggctttatatatcttgtggaaaggacgaaacaccgtaatttctactaagtgtagatgtgtgggtctcctgggggcctaatttctactaagtgtagatcgctgcgaggtgtgtaactataatttctactaagtgtagatttttttnnnnnnnnnnaagcttggcgtggatccgatatcaactagatcttgagacaaatggcagtattcatccacaattttaaaagaaaaggggggattggggggtacagtgcaggggaaagaatagtagacataatagcaacagacatacaaactaaag

SEQ ID NO: 9923 - DNA, 301 bp, Artificial Sequence
  Ube2g2.1_Zfhx3.2
  crRNA array
  misc_feature (148)..(157): n is a, c, g, or t
cttggctttatatatcttgtggaaaggacgaaacaccgtaatttctactaagtgtagatgtgtgggtctcctgggggcctaatttctactaagtgtagatacgtgcgacacaaaagcaactaatttctactaagtgtagatttttttnnnnnnnnnnaagcttggcgtggatccgatatcaactagatcttgagacaaatggcagtattcatccacaattttaaaagaaaaggggggattggggggtacagtgcaggggaaagaatagtagacataatagcaacagacatacaaactaaag

SEQ ID NO: 9924 - DNA, 301 bp, Artificial Sequence
  Ube2g2.1_Zfhx3.3
  crRNA array
  misc_feature (148)..(157): n is a, c, g, or t
cttggctttatatatcttgtggaaaggacgaaacaccgtaatttctactaagtgtagatgtgtgggtctcctgggggcctaatttctactaagtgtagattgctctacggcaagaggaaataatttctactaagtgtagatttttttnnnnnnnnnnaagcttggcgtggatccgatatcaactagatcttgagacaaatggcagtattcatccacaattttaaaagaaaaggggggattggggggtacagtgcaggggaaagaatagtagacataatagcaacagacatacaaactaaag

SEQ ID NO: 9925 - DNA, 301 bp, Artificial Sequence
  Ube2g2.1_Zfhx3.4
  crRNA array
  misc_feature (148)..(157): n is a, c, g, or t
cttggctttatatatcttgtggaaaggacgaaacaccgtaatttctactaagtgtagatgtgtgggtctcctgggggcctaatttctactaagtgtagatagtgagcggcagactgcgagtaatttctactaagtgtagatttttttnnnnnnnnnnaagcttggcgtggatccgatatcaactagatcttgagacaaatggcagtattcatccacaattttaaaagaaaaggggggattggggggtacagtgcaggggaaagaatagtagacataatagcaacagacatacaaactaaag

SEQ ID NO: 9926 - DNA, 301 bp, Artificial Sequence
  Ube2g2.2_Zfhx3.1
  crRNA array
  misc_feature (148)..(157): n is a, c, g, or t
cttggctttatatatcttgtggaaaggacgaaacaccgtaatttctactaagtgtagatgcagcgcagcagctgtcatttaatttctactaagtgtagatcgctgcgaggtgtgtaactataatttctactaagtgtagatttttttnnnnnnnnnnaagcttggcgtggatccgatatcaactagatcttgagacaaatggcagtattcatccacaattttaaaagaaaaggggggattggggggtacagtgcaggggaaagaatagtagacataatagcaacagacatacaaactaaag

SEQ ID NO: 9927 - DNA, 301 bp, Artificial Sequence
  Ube2g2.2_Zfhx3.2
  crRNA array
  misc_feature (148)..(157): n is a, c, g, or t
cttggctttatatatcttgtggaaaggacgaaacaccgtaatttctactaagtgtagatgcagcgcagcagctgtcatttaatttctactaagtgtagatacgtgcgacacaaaagcaactaatttctactaagtgtagatttttttnnnnnnnnnnaagcttggcgtggatccgatatcaactagatcttgagacaaatggcagtattcatccacaattttaaaagaaaaggggggattggggggtacagtgcaggggaaagaatagtagacataatagcaacagacatacaaactaaag

SEQ ID NO: 9928 - DNA, 301 bp, Artificial Sequence
  Ube2g2.2_Zfhx3.3
  crRNA array
  misc_feature (148)..(157): n is a, c, g, or t
cttggctttatatatcttgtggaaaggacgaaacaccgtaatttctactaagtgtagatgcagcgcagcagctgtcatttaatttctactaagtgtagattgctctacggcaagaggaaataatttctactaagtgtagatttttttnnnnnnnnnnaagcttggcgtggatccgatatcaactagatcttgagacaaatggcagtattcatccacaattttaaaagaaaaggggggattggggggtacagtgcaggggaaagaatagtagacataatagcaacagacatacaaactaaag

SEQ ID NO: 9929 - DNA, 301 bp, Artificial Sequence
  Ube2g2.2_Zfhx3.4
  crRNA array
  misc_feature (148)..(157): n is a, c, g, or t
cttggctttatatatcttgtggaaaggacgaaacaccgtaatttctactaagtgtagatgcagcgcagcagctgtcatttaatttctactaagtgtagatagtgagcggcagactgcgagtaatttctactaagtgtagatttttttnnnnnnnnnnaagcttggcgtggatccgatatcaactagatcttgagacaaatggcagtattcatccacaattttaaaagaaaaggggggattggggggtacagtgcaggggaaagaatagtagacataatagcaacagacatacaaactaaag

SEQ ID NO: 9930 - DNA, 301 bp, Artificial Sequence
  Ube2g2.3_Zfhx3.1
  crRNA array
  misc_feature (148)..(157): n is a, c, g, or t
cttggctttatatatcttgtggaaaggacgaaacaccgtaatttctactaagtgtagataaacgcaacagagtctggtgtaatttctactaagtgtagatcgctgcgaggtgtgtaactataatttctactaagtgtagatttttttnnnnnnnnnnaagcttggcgtggatccgatatcaactagatcttgagacaaatggcagtattcatccacaattttaaaagaaaaggggggattggggggtacagtgcaggggaaagaatagtagacataatagcaacagacatacaaactaaag

SEQ ID NO: 9931 - DNA, 301 bp, Artificial Sequence
  Ube2g2.3_Zfhx3.2
  crRNA array
  misc_feature (148)..(157): n is a, c, g, or t
cttggctttatatatcttgtggaaaggacgaaacaccgtaatttctactaagtgtagataaacgcaacagagtctggtgtaatttctactaagtgtagatacgtgcgacacaaaagcaactaatttctactaagtgtagatttttttnnnnnnnnnnaagcttggcgtggatccgatatcaactagatcttgagacaaatggcagtattcatccacaattttaaaagaaaaggggggattggggggtacagtgcaggggaaagaatagtagacataatagcaacagacatacaaactaaag

SEQ ID NO: 9932 - DNA, 301 bp, Artificial Sequence
  Ube2g2.3_Zfhx3.3
  crRNA array
  misc_feature (148)..(157): n is a, c, g, or t
cttggctttatatatcttgtggaaaggacgaaacaccgtaatttctactaagtgtagataaacgcaacagagtctggtgtaatttctactaagtgtagattgctctacggcaagaggaaataatttctactaagtgtagatttttttnnnnnnnnnnaagcttggcgtggatccgatatcaactagatcttgagacaaatggcagtattcatccacaattttaaaagaaaaggggggattggggggtacagtgcaggggaaagaatagtagacataatagcaacagacatacaaactaaag

SEQ ID NO: 9933 - DNA, 301 bp, Artificial Sequence
  Ube2g2.3_Zfhx3.4
  crRNA array
  misc_feature (148)..(157): n is a, c, g, or t
cttggctttatatatcttgtggaaaggacgaaacaccgtaatttctactaagtgtagataaacgcaacagagtctggtgtaatttctactaagtgtagatagtgagcggcagactgcgagtaatttctactaagtgtagatttttttnnnnnnnnnnaagcttggcgtggatccgatatcaactagatcttgagacaaatggcagtattcatccacaattttaaaagaaaaggggggattggggggtacagtgcaggggaaagaatagtagacataatagcaacagacatacaaactaaag

SEQ ID NO: 9934 - DNA, 301 bp, Artificial Sequence
  Ube2g2.4_Zfhx3.1
  crRNA array
  misc_feature (148)..(157): n is a, c, g, or t
cttggctttatatatcttgtggaaaggacgaaacaccgtaatttctactaagtgtagatgaaaaggccaagcatccacctaatttctactaagtgtagatcgctgcgaggtgtgtaactataatttctactaagtgtagatttttttnnnnnnnnnnaagcttggcgtggatccgatatcaactagatcttgagacaaatggcagtattcatccacaattttaaaagaaaaggggggattggggggtacagtgcaggggaaagaatagtagacataatagcaacagacatacaaactaaag

SEQ ID NO: 9935 - DNA, 301 bp, Artificial Sequence
  Ube2g2.4_Zfhx3.2
  crRNA array
  misc_feature (148)..(157): n is a, c, g, or t
cttggctttatatatcttgtggaaaggacgaaacaccgtaatttctactaagtgtagatgaaaaggccaagcatccacctaatttctactaagtgtagatacgtgcgacacaaaagcaactaatttctactaagtgtagatttttttnnnnnnnnnnaagcttggcgtggatccgatatcaactagatcttgagacaaatggcagtattcatccacaattttaaaagaaaaggggggattggggggtacagtgcaggggaaagaatagtagacataatagcaacagacatacaaactaaag

SEQ ID NO: 9936 - DNA, 301 bp, Artificial Sequence
  Ube2g2.4_Zfhx3.3
  crRNA array
  misc_feature (148)..(157): n is a, c, g, or t
cttggctttatatatcttgtggaaaggacgaaacaccgtaatttctactaagtgtagatgaaaaggccaagcatccacctaatttctactaagtgtagattgctctacggcaagaggaaataatttctactaagtgtagatttttttnnnnnnnnnnaagcttggcgtggatccgatatcaactagatcttgagacaaatggcagtattcatccacaattttaaaagaaaaggggggattggggggtacagtgcaggggaaagaatagtagacataatagcaacagacatacaaactaaag

SEQ ID NO: 9937 - DNA, 301 bp, Artificial Sequence
  Ube2g2.4_Zfhx3.4
  crRNA array
  misc_feature (148)..(157): n is a, c, g, or t
cttggctttatatatcttgtggaaaggacgaaacaccgtaatttctactaagtgtagatgaaaaggccaagcatccacctaatttctactaagtgtagatagtgagcggcagactgcgagtaatttctactaagtgtagatttttttnnnnnnnnnnaagcttggcgtggatccgatatcaactagatcttgagacaaatggcagtattcatccacaattttaaaagaaaaggggggattggggggtacagtgcaggggaaagaatagtagacataatagcaacagacatacaaactaaag

SEQ ID NO: 9938 - DNA, 301 bp, Artificial Sequence
  Ube2g2.1_Crebbp.1
  crRNA array
  misc_feature (148)..(157): n is a, c, g, or t
cttggctttatatatcttgtggaaaggacgaaacaccgtaatttctactaagtgtagatgtgtgggtctcctgggggcctaatttctactaagtgtagatctcacggcggcggcgggccgtaatttctactaagtgtagatttttttnnnnnnnnnnaagcttggcgtggatccgatatcaactagatcttgagacaaatggcagtattcatccacaattttaaaagaaaaggggggattggggggtacagtgcaggggaaagaatagtagacataatagcaacagacatacaaactaaag

SEQ ID NO: 9939 - DNA, 301 bp, Artificial Sequence
  Ube2g2.1_Crebbp.2
  crRNA array
  misc_feature (148)..(157): n is a, c, g, or t
cttggctttatatatcttgtggaaaggacgaaacaccgtaatttctactaagtgtagatgtgtgggtctcctgggggcctaatttctactaagtgtagatcgcgagcaggtgaagatggctaatttctactaagtgtagatttttttnnnnnnnnnnaagcttggcgtggatccgatatcaactagatcttgagacaaatggcagtattcatccacaattttaaaagaaaaggggggattggggggtacagtgcaggggaaagaatagtagacataatagcaacagacatacaaactaaag

SEQ ID NO: 9940 - DNA, 301 bp, Artificial Sequence
  Ube2g2.1_Crebbp.3
  crRNA array
  misc_feature (148)..(157): n is a, c, g, or t
cttggctttatatatcttgtggaaaggacgaaacaccgtaatttctactaagtgtagatgtgtgggtctcctgggggcctaatttctactaagtgtagatggctccgccgcccgcccgcgtaatttctactaagtgtagatttttttnnnnnnnnnnaagcttggcgtggatccgatatcaactagatcttgagacaaatggcagtattcatccacaattttaaaagaaaaggggggattggggggtacagtgcaggggaaagaatagtagacataatagcaacagacatacaaactaaag

SEQ ID NO: 9941 - DNA, 301 bp, Artificial Sequence
  Ube2g2.1_Crebbp.4
  crRNA array
  misc_feature (148)..(157): n is a, c, g, or t
cttggctttatatatcttgtggaaaggacgaaacaccgtaatttctactaagtgtagatgtgtgggtctcctgggggcctaatttctactaagtgtagattggactagatgactccgtagtaatttctactaagtgtagatttttttnnnnnnnnnnaagcttggcgtggatccgatatcaactagatcttgagacaaatggcagtattcatccacaattttaaaagaaaaggggggattggggggtacagtgcaggggaaagaatagtagacataatagcaacagacatacaaactaaag

SEQ ID NO: 9942 - DNA, 301 bp, Artificial Sequence
  Ube2g2.2_Crebbp.1
  crRNA array
  misc_feature (148)..(157): n is a, c, g, or t
cttggctttatatatcttgtggaaaggacgaaacaccgtaatttctactaagtgtagatgcagcgcagcagctgtcatttaatttctactaagtgtagatctcacggcggcggcgggccgtaatttctactaagtgtagatttttttnnnnnnnnnnaagcttggcgtggatccgatatcaactagatcttgagacaaatggcagtattcatccacaattttaaaagaaaaggggggattggggggtacagtgcaggggaaagaatagtagacataatagcaacagacatacaaactaaag

SEQ ID NO: 9943 - DNA, 301 bp, Artificial Sequence
  Ube2g2.2_Crebbp.2
  crRNA array
  misc_feature (148)..(157): n is a, c, g, or t
cttggctttatatatcttgtggaaaggacgaaacaccgtaatttctactaagtgtagatgcagcgcagcagctgtcatttaatttctactaagtgtagatcgcgagcaggtgaagatggctaatttctactaagtgtagatttttttnnnnnnnnnnaagcttggcgtggatccgatatcaactagatcttgagacaaatggcagtattcatccacaattttaaaagaaaaggggggattggggggtacagtgcaggggaaagaatagtagacataatagcaacagacatacaaactaaag

SEQ ID NO: 9944 - DNA, 301 bp, Artificial Sequence
  Ube2g2.2_Crebbp.3
  crRNA array
  misc_feature (148)..(157): n is a, c, g, or t
cttggctttatatatcttgtggaaaggacgaaacaccgtaatttctactaagtgtagatgcagcgcagcagctgtcatttaatttctactaagtgtagatggctccgccgcccgcccgcgtaatttctactaagtgtagatttttttnnnnnnnnnnaagcttggcgtggatccgatatcaactagatcttgagacaaatggcagtattcatccacaattttaaaagaaaaggggggattggggggtacagtgcaggggaaagaatagtagacataatagcaacagacatacaaactaaag

SEQ ID NO: 9945 - DNA, 301 bp, Artificial Sequence
  Ube2g2.2_Crebbp.4
  crRNA array
  misc_feature (148)..(157): n is a, c, g, or t
cttggctttatatatcttgtggaaaggacgaaacaccgtaatttctactaagtgtagatgcagcgcagcagctgtcatttaatttctactaagtgtagattggactagatgactccgtagtaatttctactaagtgtagatttttttnnnnnnnnnnaagcttggcgtggatccgatatcaactagatcttgagacaaatggcagtattcatccacaattttaaaagaaaaggggggattggggggtacagtgcaggggaaagaatagtagacataatagcaacagacatacaaactaaag

SEQ ID NO: 9946 - DNA, 301 bp, Artificial Sequence
  Ube2g2.3_Crebbp.1
  crRNA array
  misc_feature (148)..(157): n is a, c, g, or t
cttggctttatatatcttgtggaaaggacgaaacaccgtaatttctactaagtgtagataaacgcaacagagtctggtgtaatttctactaagtgtagatctcacggcggcggcgggccgtaatttctactaagtgtagatttttttnnnnnnnnnnaagcttggcgtggatccgatatcaactagatcttgagacaaatggcagtattcatccacaattttaaaagaaaaggggggattggggggtacagtgcaggggaaagaatagtagacataatagcaacagacatacaaactaaag

SEQ ID NO: 9947 - DNA, 301 bp, Artificial Sequence
  Ube2g2.3_Crebbp.2
  crRNA array
  misc_feature (148)..(157): n is a, c, g, or t
cttggctttatatatcttgtggaaaggacgaaacaccgtaatttctactaagtgtagataaacgcaacagagtctggtgtaatttctactaagtgtagatcgcgagcaggtgaagatggctaatttctactaagtgtagatttttttnnnnnnnnnnaagcttggcgtggatccgatatcaactagatcttgagacaaatggcagtattcatccacaattttaaaagaaaaggggggattggggggtacagtgcaggggaaagaatagtagacataatagcaacagacatacaaactaaag

SEQ ID NO: 9948 - DNA, 301 bp, Artificial Sequence
  Ube2g2.3_Crebbp.3
  crRNA array
  misc_feature (148)..(157): n is a, c, g, or t
cttggctttatatatcttgtggaaaggacgaaacaccgtaatttctactaagtgtagataaacgcaacagagtctggtgtaatttctactaagtgtagatggctccgccgcccgcccgcgtaatttctactaagtgtagatttttttnnnnnnnnnnaagcttggcgtggatccgatatcaactagatcttgagacaaatggcagtattcatccacaattttaaaagaaaaggggggattggggggtacagtgcaggggaaagaatagtagacataatagcaacagacatacaaactaaag

SEQ ID NO: 9949 - DNA, 301 bp, Artificial Sequence
  Ube2g2.3_Crebbp.4
  crRNA array
  misc_feature (148)..(157): n is a, c, g, or t
cttggctttatatatcttgtggaaaggacgaaacaccgtaatttctactaagtgtagataaacgcaacagagtctggtgtaatttctactaagtgtagattggactagatgactccgtagtaatttctactaagtgtagatttttttnnnnnnnnnnaagcttggcgtggatccgatatcaactagatcttgagacaaatggcagtattcatccacaattttaaaagaaaaggggggattggggggtacagtgcaggggaaagaatagtagacataatagcaacagacatacaaactaaag

SEQ ID NO: 9950 - DNA, 301 bp, Artificial Sequence
  Ube2g2.4_Crebbp.1
  crRNA array
  misc_feature (148)..(157): n is a, c, g, or t
cttggctttatatatcttgtggaaaggacgaaacaccgtaatttctactaagtgtagatgaaaaggccaagcatccacctaatttctactaagtgtagatctcacggcggcggcgggccgtaatttctactaagtgtagatttttttnnnnnnnnnnaagcttggcgtggatccgatatcaactagatcttgagacaaatggcagtattcatccacaattttaaaagaaaaggggggattggggggtacagtgcaggggaaagaatagtagacataatagcaacagacatacaaactaaag

SEQ ID NO: 9951 - DNA, 301 bp, Artificial Sequence
  Ube2g2.4_Crebbp.2
  crRNA array
  misc_feature (148)..(157): n is a, c, g, or t
cttggctttatatatcttgtggaaaggacgaaacaccgtaatttctactaagtgtagatgaaaaggccaagcatccacctaatttctactaagtgtagatcgcgagcaggtgaagatggctaatttctactaagtgtagatttttttnnnnnnnnnnaagcttggcgtggatccgatatcaactagatcttgagacaaatggcagtattcatccacaattttaaaagaaaaggggggattggggggtacagtgcaggggaaagaatagtagacataatagcaacagacatacaaactaaag

SEQ ID NO: 9952 - DNA, 301 bp, Artificial Sequence
  Ube2g2.4_Crebbp.3
  crRNA array
  misc_feature (148)..(157): n is a, c, g, or t
cttggctttatatatcttgtggaaaggacgaaacaccgtaatttctactaagtgtagatgaaaaggccaagcatccacctaatttctactaagtgtagatggctccgccgcccgcccgcgtaatttctactaagtgtagatttttttnnnnnnnnnnaagcttggcgtggatccgatatcaactagatcttgagacaaatggcagtattcatccacaattttaaaagaaaaggggggattggggggtacagtgcaggggaaagaatagtagacataatagcaacagacatacaaactaaag

SEQ ID NO: 9953 - DNA, 301 bp, Artificial Sequence
  Ube2g2.4_Crebbp.4
  crRNA array
  misc_feature (148)..(157): n is a, c, g, or t
cttggctttatatatcttgtggaaaggacgaaacaccgtaatttctactaagtgtagatgaaaaggccaagcatccacctaatttctactaagtgtagattggactagatgactccgtagtaatttctactaagtgtagatttttttnnnnnnnnnnaagcttggcgtggatccgatatcaactagatcttgagacaaatggcagtattcatccacaattttaaaagaaaaggggggattggggggtacagtgcaggggaaagaatagtagacataatagcaacagacatacaaactaaag

SEQ ID NO: 9954 - DNA, 301 bp, Artificial Sequence
  Ube2g2.1_Cdkn2a.1
  crRNA array
  misc_feature (148)..(157): n is a, c, g, or t
cttggctttatatatcttgtggaaaggacgaaacaccgtaatttctactaagtgtagatgtgtgggtctcctgggggcctaatttctactaagtgtagatcaatcacgggagggagcagataatttctactaagtgtagatttttttnnnnnnnnnnaagcttggcgtggatccgatatcaactagatcttgagacaaatggcagtattcatccacaattttaaaagaaaaggggggattggggggtacagtgcaggggaaagaatagtagacataatagcaacagacatacaaactaaag

SEQ ID NO: 9955 - DNA, 301 bp, Artificial Sequence
  Ube2g2.1_Cdkn2a.2
  crRNA array
  misc_feature (148)..(157): n is a, c, g, or t
cttggctttatatatcttgtggaaaggacgaaacaccgtaatttctactaagtgtagatgtgtgggtctcctgggggcctaatttctactaagtgtagatgcccaacgccccgaactctttaatttctactaagtgtagatttttttnnnnnnnnnnaagcttggcgtggatccgatatcaactagatcttgagacaaatggcagtattcatccacaattttaaaagaaaaggggggattggggggtacagtgcaggggaaagaatagtagacataatagcaacagacatacaaactaaag

SEQ ID NO: 9956 - DNA, 301 bp, Artificial Sequence
  Ube2g2.1_Cdkn2a.3
  crRNA array
  misc_feature (148)..(157): n is a, c, g, or t
cttggctttatatatcttgtggaaaggacgaaacaccgtaatttctactaagtgtagatgtgtgggtctcctgggggcctaatttctactaagtgtagattgtaccgctgggaacgtcgctaatttctactaagtgtagatttttttnnnnnnnnnnaagcttggcgtggatccgatatcaactagatcttgagacaaatggcagtattcatccacaattttaaaagaaaaggggggattggggggtacagtgcaggggaaagaatagtagacataatagcaacagacatacaaactaaag

SEQ ID NO: 9957 - DNA, 301 bp, Artificial Sequence
  Ube2g2.1_Cdkn2a.4
  crRNA array
  misc_feature (148)..(157): n is a, c, g, or t
cttggctttatatatcttgtggaaaggacgaaacaccgtaatttctactaagtgtagatgtgtgggtctcctgggggcctaatttctactaagtgtagataagccacatgctagacacgctaatttctactaagtgtagatttttttnnnnnnnnnnaagcttggcgtggatccgatatcaactagatcttgagacaaatggcagtattcatccacaattttaaaagaaaaggggggattggggggtacagtgcaggggaaagaatagtagacataatagcaacagacatacaaactaaag

SEQ ID NO: 9958 - DNA, 301 bp, Artificial Sequence
  Ube2g2.2_Cdkn2a.1
  crRNA array
  misc_feature (148)..(157): n is a, c, g, or t
cttggctttatatatcttgtggaaaggacgaaacaccgtaatttctactaagtgtagatgcagcgcagcagctgtcatttaatttctactaagtgtagatcaatcacgggagggagcagataatttctactaagtgtagatttttttnnnnnnnnnnaagcttggcgtggatccgatatcaactagatcttgagacaaatggcagtattcatccacaattttaaaagaaaaggggggattggggggtacagtgcaggggaaagaatagtagacataatagcaacagacatacaaactaaag

SEQ ID NO: 9959 - DNA, 301 bp, Artificial Sequence
  Ube2g2.2_Cdkn2a.2
  crRNA array
  misc_feature (148)..(157): n is a, c, g, or t
cttggctttatatatcttgtggaaaggacgaaacaccgtaatttctactaagtgtagatgcagcgcagcagctgtcatttaatttctactaagtgtagatgcccaacgccccgaactctttaatttctactaagtgtagatttttttnnnnnnnnnnaagcttggcgtggatccgatatcaactagatcttgagacaaatggcagtattcatccacaattttaaaagaaaaggggggattggggggtacagtgcaggggaaagaatagtagacataatagcaacagacatacaaactaaag

SEQ ID NO: 9960 - DNA, 301 bp, Artificial Sequence
  Ube2g2.2_Cdkn2a.3
  crRNA array
  misc_feature (148)..(157): n is a, c, g, or t
cttggctttatatatcttgtggaaaggacgaaacaccgtaatttctactaagtgtagatgcagcgcagcagctgtcatttaatttctactaagtgtagattgtaccgctgggaacgtcgctaatttctactaagtgtagatttttttnnnnnnnnnnaagcttggcgtggatccgatatcaactagatcttgagacaaatggcagtattcatccacaattttaaaagaaaaggggggattggggggtacagtgcaggggaaagaatagtagacataatagcaacagacatacaaactaaag

SEQ ID NO: 9961 - DNA, 301 bp, Artificial Sequence
  Ube2g2.2_Cdkn2a.4
  crRNA array
  misc_feature (148)..(157): n is a, c, g, or t
cttggctttatatatcttgtggaaaggacgaaacaccgtaatttctactaagtgtagatgcagcgcagcagctgtcatttaatttctactaagtgtagataagccacatgctagacacgctaatttctactaagtgtagatttttttnnnnnnnnnnaagcttggcgtggatccgatatcaactagatcttgagacaaatggcagtattcatccacaattttaaaagaaaaggggggattggggggtacagtgcaggggaaagaatagtagacataatagcaacagacatacaaactaaag

SEQ ID NO: 9962 - DNA, 301 bp, Artificial Sequence
  Ube2g2.3_Cdkn2a.1
  crRNA array
  misc_feature (148)..(157): n is a, c, g, or t
cttggctttatatatcttgtggaaaggacgaaacaccgtaatttctactaagtgtagataaacgcaacagagtctggtgtaatttctactaagtgtagatcaatcacgggagggagcagataatttctactaagtgtagatttttttnnnnnnnnnnaagcttggcgtggatccgatatcaactagatcttgagacaaatggcagtattcatccacaattttaaaagaaaaggggggattggggggtacagtgcaggggaaagaatagtagacataatagcaacagacatacaaactaaag

SEQ ID NO: 9963 - DNA, 301 bp, Artificial Sequence
  Ube2g2.3_Cdkn2a.2
  crRNA array
  misc_feature (148)..(157): n is a, c, g, or t
cttggctttatatatcttgtggaaaggacgaaacaccgtaatttctactaagtgtagataaacgcaacagagtctggtgtaatttctactaagtgtagatgcccaacgccccgaactctttaatttctactaagtgtagatttttttnnnnnnnnnnaagcttggcgtggatccgatatcaactagatcttgagacaaatggcagtattcatccacaattttaaaagaaaaggggggattggggggtacagtgcaggggaaagaatagtagacataatagcaacagacatacaaactaaag

SEQ ID NO: 9964 - DNA, 301 bp, Artificial Sequence
  Ube2g2.3_Cdkn2a.3
  crRNA array
  misc_feature (148)..(157): n is a, c, g, or t
cttggctttatatatcttgtggaaaggacgaaacaccgtaatttctactaagtgtagataaacgcaacagagtctggtgtaatttctactaagtgtagattgtaccgctgggaacgtcgctaatttctactaagtgtagatttttttnnnnnnnnnnaagcttggcgtggatccgatatcaactagatcttgagacaaatggcagtattcatccacaattttaaaagaaaaggggggattggggggtacagtgcaggggaaagaatagtagacataatagcaacagacatacaaactaaag

SEQ ID NO: 9965 - DNA, 301 bp, Artificial Sequence
  Ube2g2.3_Cdkn2a.4
  crRNA array
  misc_feature (148)..(157): n is a, c, g, or t
cttggctttatatatcttgtggaaaggacgaaacaccgtaatttctactaagtgtagataaacgcaacagagtctggtgtaatttctactaagtgtagataagccacatgctagacacgctaatttctactaagtgtagatttttttnnnnnnnnnnaagcttggcgtggatccgatatcaactagatcttgagacaaatggcagtattcatccacaattttaaaagaaaaggggggattggggggtacagtgcaggggaaagaatagtagacataatagcaacagacatacaaactaaag

SEQ ID NO: 9966 - DNA, 301 bp, Artificial Sequence
  Ube2g2.4_Cdkn2a.1
  crRNA array
  misc_feature (148)..(157): n is a, c, g, or t
cttggctttatatatcttgtggaaaggacgaaacaccgtaatttctactaagtgtagatgaaaaggccaagcatccacctaatttctactaagtgtagatcaatcacgggagggagcagataatttctactaagtgtagatttttttnnnnnnnnnnaagcttggcgtggatccgatatcaactagatcttgagacaaatggcagtattcatccacaattttaaaagaaaaggggggattggggggtacagtgcaggggaaagaatagtagacataatagcaacagacatacaaactaaag

SEQ ID NO: 9967 - DNA, 301 bp, Artificial Sequence
  Ube2g2.4_Cdkn2a.2
  crRNA array
  misc_feature (148)..(157): n is a, c, g, or t
cttggctttatatatcttgtggaaaggacgaaacaccgtaatttctactaagtgtagatgaaaaggccaagcatccacctaatttctactaagtgtagatgcccaacgccccgaactctttaatttctactaagtgtagatttttttnnnnnnnnnnaagcttggcgtggatccgatatcaactagatcttgagacaaatggcagtattcatccacaattttaaaagaaaaggggggattggggggtacagtgcaggggaaagaatagtagacataatagcaacagacatacaaactaaag

SEQ ID NO: 9968 - DNA, 301 bp, Artificial Sequence
  Ube2g2.4_Cdkn2a.3
  crRNA array
  misc_feature (148)..(157): n is a, c, g, or t
cttggctttatatatcttgtggaaaggacgaaacaccgtaatttctactaagtgtagatgaaaaggccaagcatccacctaatttctactaagtgtagattgtaccgctgggaacgtcgctaatttctactaagtgtagatttttttnnnnnnnnnnaagcttggcgtggatccgatatcaactagatcttgagacaaatggcagtattcatccacaattttaaaagaaaaggggggattggggggtacagtgcaggggaaagaatagtagacataatagcaacagacatacaaactaaag

SEQ ID NO: 9969 - DNA, 301 bp, Artificial Sequence
  Ube2g2.4_Cdkn2a.4
  crRNA array
  misc_feature (148)..(157): n is a, c, g, or t
cttggctttatatatcttgtggaaaggacgaaacaccgtaatttctactaagtgtagatgaaaaggccaagcatccacctaatttctactaagtgtagataagccacatgctagacacgctaatttctactaagtgtagatttttttnnnnnnnnnnaagcttggcgtggatccgatatcaactagatcttgagacaaatggcagtattcatccacaattttaaaagaaaaggggggattggggggtacagtgcaggggaaagaatagtagacataatagcaacagacatacaaactaaag

SEQ ID NO: 9970 - DNA, 301 bp, Artificial Sequence
  Ube2g2.1_Wrn.1
  crRNA array
  misc_feature (148)..(157): n is a, c, g, or t
cttggctttatatatcttgtggaaaggacgaaacaccgtaatttctactaagtgtagatgtgtgggtctcctgggggcctaatttctactaagtgtagatgcaaaccactcgggtaattttaatttctactaagtgtagatttttttnnnnnnnnnnaagcttggcgtggatccgatatcaactagatcttgagacaaatggcagtattcatccacaattttaaaagaaaaggggggattggggggtacagtgcaggggaaagaatagtagacataatagcaacagacatacaaactaaag

SEQ ID NO: 9971 - DNA, 301 bp, Artificial Sequence
  Ube2g2.1_Wrn.2
  crRNA array
  misc_feature (148)..(157): n is a, c, g, or t
cttggctttatatatcttgtggaaaggacgaaacaccgtaatttctactaagtgtagatgtgtgggtctcctgggggcctaatttctactaagtgtagatgccatgtccagcagaacctttaatttctactaagtgtagatttttttnnnnnnnnnnaagcttggcgtggatccgatatcaactagatcttgagacaaatggcagtattcatccacaattttaaaagaaaaggggggattggggggtacagtgcaggggaaagaatagtagacataatagcaacagacatacaaactaaag

SEQ ID NO: 9972 - DNA, 301 bp, Artificial Sequence
  Ube2g2.1_Wrn.3
  crRNA array
  misc_feature (148)..(157): n is a, c, g, or t
cttggctttatatatcttgtggaaaggacgaaacaccgtaatttctactaagtgtagatgtgtgggtctcctgggggcctaatttctactaagtgtagatctgcagcaggccaccgcaattaatttctactaagtgtagatttttttnnnnnnnnnnaagcttggcgtggatccgatatcaactagatcttgagacaaatggcagtattcatccacaattttaaaagaaaaggggggattggggggtacagtgcaggggaaagaatagtagacataatagcaacagacatacaaactaaag

SEQ ID NO: 9973 - DNA, 301 bp, Artificial Sequence
  Ube2g2.1_Wrn.4
  crRNA array
  misc_feature (148)..(157): n is a, c, g, or t
cttggctttatatatcttgtggaaaggacgaaacaccgtaatttctactaagtgtagatgtgtgggtctcctgggggcctaatttctactaagtgtagattcgaaggacaatagatgatgtaatttctactaagtgtagatttttttnnnnnnnnnnaagcttggcgtggatccgatatcaactagatcttgagacaaatggcagtattcatccacaattttaaaagaaaaggggggattggggggtacagtgcaggggaaagaatagtagacataatagcaacagacatacaaactaaag

SEQ ID NO: 9974 - DNA, 301 bp, Artificial Sequence
  Ube2g2.2_Wrn.1
  crRNA array
  misc_feature (148)..(157): n is a, c, g, or t
cttggctttatatatcttgtggaaaggacgaaacaccgtaatttctactaagtgtagatgcagcgcagcagctgtcatttaatttctactaagtgtagatgcaaaccactcgggtaattttaatttctactaagtgtagatttttttnnnnnnnnnnaagcttggcgtggatccgatatcaactagatcttgagacaaatggcagtattcatccacaattttaaaagaaaaggggggattggggggtacagtgcaggggaaagaatagtagacataatagcaacagacatacaaactaaag

SEQ ID NO: 9975 - DNA, 301 bp, Artificial Sequence
  Ube2g2.2_Wrn.2
  crRNA array
  misc_feature (148)..(157): n is a, c, g, or t
cttggctttatatatcttgtggaaaggacgaaacaccgtaatttctactaagtgtagatgcagcgcagcagctgtcatttaatttctactaagtgtagatgccatgtccagcagaacctttaatttctactaagtgtagatttttttnnnnnnnnnnaagcttggcgtggatccgatatcaactagatcttgagacaaatggcagtattcatccacaattttaaaagaaaaggggggattggggggtacagtgcaggggaaagaatagtagacataatagcaacagacatacaaactaaag

SEQ ID NO: 9976 - DNA, 301 bp, Artificial Sequence
  Ube2g2.2_Wrn.3
  crRNA array
  misc_feature (148)..(157): n is a, c, g, or t
cttggctttatatatcttgtggaaaggacgaaacaccgtaatttctactaagtgtagatgcagcgcagcagctgtcatttaatttctactaagtgtagatctgcagcaggccaccgcaattaatttctactaagtgtagatttttttnnnnnnnnnnaagcttggcgtggatccgatatcaactagatcttgagacaaatggcagtattcatccacaattttaaaagaaaaggggggattggggggtacagtgcaggggaaagaatagtagacataatagcaacagacatacaaactaaag

SEQ ID NO: 9977 - DNA, 301 bp, Artificial Sequence
  Ube2g2.2_Wrn.4
  crRNA array
  misc_feature (148)..(157): n is a, c, g, or t
cttggctttatatatcttgtggaaaggacgaaacaccgtaatttctactaagtgtagatgcagcgcagcagctgtcatttaatttctactaagtgtagattcgaaggacaatagatgatgtaatttctactaagtgtagatttttttnnnnnnnnnnaagcttggcgtggatccgatatcaactagatcttgagacaaatggcagtattcatccacaattttaaaagaaaaggggggattggggggtacagtgcaggggaaagaatagtagacataatagcaacagacatacaaactaaag

SEQ ID NO: 9978 - DNA, 301 bp, Artificial Sequence
  Ube2g2.3_Wrn.1
  crRNA array
  misc_feature (148)..(157): n is a, c, g, or t
cttggctttatatatcttgtggaaaggacgaaacaccgtaatttctactaagtgtagataaacgcaacagagtctggtgtaatttctactaagtgtagatgcaaaccactcgggtaattttaatttctactaagtgtagatttttttnnnnnnnnnnaagcttggcgtggatccgatatcaactagatcttgagacaaatggcagtattcatccacaattttaaaagaaaaggggggattggggggtacagtgcaggggaaagaatagtagacataatagcaacagacatacaaactaaag

SEQ ID NO: 9979 - DNA, 301 bp, Artificial Sequence
  Ube2g2.3_Wrn.2
  crRNA array
  misc_feature (148)..(157): n is a, c, g, or t
cttggctttatatatcttgtggaaaggacgaaacaccgtaatttctactaagtgtagataaacgcaacagagtctggtgtaatttctactaagtgtagatgccatgtccagcagaacctttaatttctactaagtgtagatttttttnnnnnnnnnnaagcttggcgtggatccgatatcaactagatcttgagacaaatggcagtattcatccacaattttaaaagaaaaggggggattggggggtacagtgcaggggaaagaatagtagacataatagcaacagacatacaaactaaag

SEQ ID NO: 9980 - DNA, 301 bp, Artificial Sequence
  Ube2g2.3_Wrn.3
  crRNA array
  misc_feature (148)..(157): n is a, c, g, or t
cttggctttatatatcttgtggaaaggacgaaacaccgtaatttctactaagtgtagataaacgcaacagagtctggtgtaatttctactaagtgtagatctgcagcaggccaccgcaattaatttctactaagtgtagatttttttnnnnnnnnnnaagcttggcgtggatccgatatcaactagatcttgagacaaatggcagtattcatccacaattttaaaagaaaaggggggattggggggtacagtgcaggggaaagaatagtagacataatagcaacagacatacaaactaaag

SEQ ID NO: 9981 - DNA, 301 bp, Artificial Sequence
  Ube2g2.3_Wrn.4
  crRNA array
  misc_feature (148)..(157): n is a, c, g, or t
cttggctttatatatcttgtggaaaggacgaaacaccgtaatttctactaagtgtagataaacgcaacagagtctggtgtaatttctactaagtgtagattcgaaggacaatagatgatgtaatttctactaagtgtagatttttttnnnnnnnnnnaagcttggcgtggatccgatatcaactagatcttgagacaaatggcagtattcatccacaattttaaaagaaaaggggggattggggggtacagtgcaggggaaagaatagtagacataatagcaacagacatacaaactaaag

SEQ ID NO: 9982 - DNA, 301 bp, Artificial Sequence
  Ube2g2.4_Wrn.1
  crRNA array
  misc_feature (148)..(157): n is a, c, g, or t
cttggctttatatatcttgtggaaaggacgaaacaccgtaatttctactaagtgtagatgaaaaggccaagcatccacctaatttctactaagtgtagatgcaaaccactcgggtaattttaatttctactaagtgtagatttttttnnnnnnnnnnaagcttggcgtggatccgatatcaactagatcttgagacaaatggcagtattcatccacaattttaaaagaaaaggggggattggggggtacagtgcaggggaaagaatagtagacataatagcaacagacatacaaactaaag

SEQ ID NO: 9983 - DNA, 301 bp, Artificial Sequence
  Ube2g2.4_Wrn.2
  crRNA array
  misc_feature (148)..(157): n is a, c, g, or t
cttggctttatatatcttgtggaaaggacgaaacaccgtaatttctactaagtgtagatgaaaaggccaagcatccacctaatttctactaagtgtagatgccatgtccagcagaacctttaatttctactaagtgtagatttttttnnnnnnnnnnaagcttggcgtggatccgatatcaactagatcttgagacaaatggcagtattcatccacaattttaaaagaaaaggggggattggggggtacagtgcaggggaaagaatagtagacataatagcaacagacatacaaactaaag

SEQ ID NO: 9984 - DNA, 301 bp, Artificial Sequence
  Ube2g2.4_Wrn.3
  crRNA array
  misc_feature (148)..(157): n is a, c, g, or t
cttggctttatatatcttgtggaaaggacgaaacaccgtaatttctactaagtgtagatgaaaaggccaagcatccacctaatttctactaagtgtagatctgcagcaggccaccgcaattaatttctactaagtgtagatttttttnnnnnnnnnnaagcttggcgtggatccgatatcaactagatcttgagacaaatggcagtattcatccacaattttaaaagaaaaggggggattggggggtacagtgcaggggaaagaatagtagacataatagcaacagacatacaaactaaag

SEQ ID NO: 9985 - DNA, 301 bp, Artificial Sequence
  Ube2g2.4_Wrn.4
  crRNA array
  misc_feature (148)..(157): n is a, c, g, or t
cttggctttatatatcttgtggaaaggacgaaacaccgtaatttctactaagtgtagatgaaaaggccaagcatccacctaatttctactaagtgtagattcgaaggacaatagatgatgtaatttctactaagtgtagatttttttnnnnnnnnnnaagcttggcgtggatccgatatcaactagatcttgagacaaatggcagtattcatccacaattttaaaagaaaaggggggattggggggtacagtgcaggggaaagaatagtagacataatagcaacagacatacaaactaaag

SEQ ID NO: 9986 - DNA, 301 bp, Artificial Sequence
  Ube2g2.1_Brca2.1
  crRNA array
  misc_feature (148)..(157): n is a, c, g, or t
cttggctttatatatcttgtggaaaggacgaaacaccgtaatttctactaagtgtagatgtgtgggtctcctgggggcctaatttctactaagtgtagatctaagcgtagaaccagaaattaatttctactaagtgtagatttttttnnnnnnnnnnaagcttggcgtggatccgatatcaactagatcttgagacaaatggcagtattcatccacaattttaaaagaaaaggggggattggggggtacagtgcaggggaaagaatagtagacataatagcaacagacatacaaactaaag

SEQ ID NO: 9987 - DNA, 301 bp, Artificial Sequence
  Ube2g2.1_Brca2.2
  crRNA array
  misc_feature (148)..(157): n is a, c, g, or t
cttggctttatatatcttgtggaaaggacgaaacaccgtaatttctactaagtgtagatgtgtgggtctcctgggggcctaatttctactaagtgtagatgatccaggtgtaacaagccataatttctactaagtgtagatttttttnnnnnnnnnnaagcttggcgtggatccgatatcaactagatcttgagacaaatggcagtattcatccacaattttaaaagaaaaggggggattggggggtacagtgcaggggaaagaatagtagacataatagcaacagacatacaaactaaag

SEQ ID NO: 9988 - DNA, 301 bp, Artificial Sequence
  Ube2g2.1_Brca2.3
  crRNA array
  misc_feature (148)..(157): n is a, c, g, or t
cttggctttatatatcttgtggaaaggacgaaacaccgtaatttctactaagtgtagatgtgtgggtctcctgggggcctaatttctactaagtgtagattgaatataaactgggccacttaatttctactaagtgtagatttttttnnnnnnnnnnaagcttggcgtggatccgatatcaactagatcttgagacaaatggcagtattcatccacaattttaaaagaaaaggggggattggggggtacagtgcaggggaaagaatagtagacataatagcaacagacatacaaactaaag

SEQ ID NO: 9989 - DNA, 301 bp, Artificial Sequence
  Ube2g2.1_Brca2.4
  crRNA array
  misc_feature (148)..(157): n is a, c, g, or t
cttggctttatatatcttgtggaaaggacgaaacaccgtaatttctactaagtgtagatgtgtgggtctcctgggggcctaatttctactaagtgtagatgaaacgccgtatatatagagtaatttctactaagtgtagatttttttnnnnnnnnnnaagcttggcgtggatccgatatcaactagatcttgagacaaatggcagtattcatccacaattttaaaagaaaaggggggattggggggtacagtgcaggggaaagaatagtagacataatagcaacagacatacaaactaaag

SEQ ID NO: 9990 - DNA, 301 bp, Artificial Sequence
  Ube2g2.2_Brca2.1
  crRNA array
  misc_feature (148)..(157): n is a, c, g, or t
cttggctttatatatcttgtggaaaggacgaaacaccgtaatttctactaagtgtagatgcagcgcagcagctgtcatttaatttctactaagtgtagatctaagcgtagaaccagaaattaatttctactaagtgtagatttttttnnnnnnnnnnaagcttggcgtggatccgatatcaactagatcttgagacaaatggcagtattcatccacaattttaaaagaaaaggggggattggggggtacagtgcaggggaaagaatagtagacataatagcaacagacatacaaactaaag

SEQ ID NO: 9991 - DNA, 301 bp, Artificial Sequence
  Ube2g2.2_Brca2.2
  crRNA array
  misc_feature (148)..(157): n is a, c, g, or t
cttggctttatatatcttgtggaaaggacgaaacaccgtaatttctactaagtgtagatgcagcgcagcagctgtcatttaatttctactaagtgtagatgatccaggtgtaacaagccataatttctactaagtgtagatttttttnnnnnnnnnnaagcttggcgtggatccgatatcaactagatcttgagacaaatggcagtattcatccacaattttaaaagaaaaggggggattggggggtacagtgcaggggaaagaatagtagacataatagcaacagacatacaaactaaag

SEQ ID NO: 9992 - DNA, 301 bp, Artificial Sequence
  Ube2g2.2_Brca2.3
  crRNA array
  misc_feature (148)..(157): n is a, c, g, or t
cttggctttatatatcttgtggaaaggacgaaacaccgtaatttctactaagtgtagatgcagcgcagcagctgtcatttaatttctactaagtgtagattgaatataaactgggccacttaatttctactaagtgtagatttttttnnnnnnnnnnaagcttggcgtggatccgatatcaactagatcttgagacaaatggcagtattcatccacaattttaaaagaaaaggggggattggggggtacagtgcaggggaaagaatagtagacataatagcaacagacatacaaactaaag

SEQ ID NO: 9993 - DNA, 301 bp, Artificial Sequence
  Ube2g2.2_Brca2.4
  crRNA array
  misc_feature (148)..(157): n is a, c, g, or t
cttggctttatatatcttgtggaaaggacgaaacaccgtaatttctactaagtgtagatgcagcgcagcagctgtcatttaatttctactaagtgtagatgaaacgccgtatatatagagtaatttctactaagtgtagatttttttnnnnnnnnnnaagcttggcgtggatccgatatcaactagatcttgagacaaatggcagtattcatccacaattttaaaagaaaaggggggattggggggtacagtgcaggggaaagaatagtagacataatagcaacagacatacaaactaaag

SEQ ID NO: 9994 - DNA, 301 bp, Artificial Sequence
  Ube2g2.3_Brca2.1
  crRNA array
  misc_feature (148)..(157): n is a, c, g, or t
cttggctttatatatcttgtggaaaggacgaaacaccgtaatttctactaagtgtagataaacgcaacagagtctggtgtaatttctactaagtgtagatctaagcgtagaaccagaaattaatttctactaagtgtagatttttttnnnnnnnnnnaagcttggcgtggatccgatatcaactagatcttgagacaaatggcagtattcatccacaattttaaaagaaaaggggggattggggggtacagtgcaggggaaagaatagtagacataatagcaacagacatacaaactaaag

SEQ ID NO: 9995 - DNA, 301 bp, Artificial Sequence
  Ube2g2.3_Brca2.2
  crRNA array
  misc_feature (148)..(157): n is a, c, g, or t
cttggctttatatatcttgtggaaaggacgaaacaccgtaatttctactaagtgtagataaacgcaacagagtctggtgtaatttctactaagtgtagatgatccaggtgtaacaagccataatttctactaagtgtagatttttttnnnnnnnnnnaagcttggcgtggatccgatatcaactagatcttgagacaaatggcagtattcatccacaattttaaaagaaaaggggggattggggggtacagtgcaggggaaagaatagtagacataatagcaacagacatacaaactaaag

SEQ ID NO: 9996 - DNA, 301 bp, Artificial Sequence
  Ube2g2.3_Brca2.3
  crRNA array
  misc_feature (148)..(157): n is a, c, g, or t
cttggctttatatatcttgtggaaaggacgaaacaccgtaatttctactaagtgtagataaacgcaacagagtctggtgtaatttctactaagtgtagattgaatataaactgggccacttaatttctactaagtgtagatttttttnnnnnnnnnnaagcttggcgtggatccgatatcaactagatcttgagacaaatggcagtattcatccacaattttaaaagaaaaggggggattggggggtacagtgcaggggaaagaatagtagacataatagcaacagacatacaaactaaag

SEQ ID NO: 9997 - DNA, 301 bp, Artificial Sequence
  Ube2g2.3_Brca2.4
  crRNA array
  misc_feature (148)..(157): n is a, c, g, or t
cttggctttatatatcttgtggaaaggacgaaacaccgtaatttctactaagtgtagataaacgcaacagagtctggtgtaatttctactaagtgtagatgaaacgccgtatatatagagtaatttctactaagtgtagatttttttnnnnnnnnnnaagcttggcgtggatccgatatcaactagatcttgagacaaatggcagtattcatccacaattttaaaagaaaaggggggattggggggtacagtgcaggggaaagaatagtagacataatagcaacagacatacaaactaaag

SEQ ID NO: 9998 - DNA, 301 bp, Artificial Sequence
  Ube2g2.4_Brca2.1
  crRNA array
  misc_feature (148)..(157): n is a, c, g, or t
cttggctttatatatcttgtggaaaggacgaaacaccgtaatttctactaagtgtagatgaaaaggccaagcatccacctaatttctactaagtgtagatctaagcgtagaaccagaaattaatttctactaagtgtagatttttttnnnnnnnnnnaagcttggcgtggatccgatatcaactagatcttgagacaaatggcagtattcatccacaattttaaaagaaaaggggggattggggggtacagtgcaggggaaagaatagtagacataatagcaacagacatacaaactaaag

SEQ ID NO: 9999 - DNA, 301 bp, Artificial Sequence
  Ube2g2.4_Brca2.2
  crRNA array
  misc_feature (148)..(157): n is a, c, g, or t
cttggctttatatatcttgtggaaaggacgaaacaccgtaatttctactaagtgtagatgaaaaggccaagcatccacctaatttctactaagtgtagatgatccaggtgtaacaagccataatttctactaagtgtagatttttttnnnnnnnnnnaagcttggcgtggatccgatatcaactagatcttgagacaaatggcagtattcatccacaattttaaaagaaaaggggggattggggggtacagtgcaggggaaagaatagtagacataatagcaacagacatacaaactaaag

SEQ ID NO: 10000 - DNA, 301 bp, Artificial Sequence
  Ube2g2.4_Brca2.3
  crRNA array
  misc_feature (148)..(157): n is a, c, g, or t
cttggctttatatatcttgtggaaaggacgaaacaccgtaatttctactaagtgtagatgaaaaggccaagcatccacctaatttctactaagtgtagattgaatataaactgggccacttaatttctactaagtgtagatttttttnnnnnnnnnnaagcttggcgtggatccgatatcaactagatcttgagacaaatggcagtattcatccacaattttaaaagaaaaggggggattggggggtacagtgcaggggaaagaatagtagacataatagcaacagacatacaaactaaag

SEQ ID NO: 10001 - DNA, 301 bp, Artificial Sequence
  Ube2g2.4_Brca2.4
  crRNA array
  misc_feature (148)..(157): n is a, c, g, or t
cttggctttatatatcttgtggaaaggacgaaacaccgtaatttctactaagtgtagatgaaaaggccaagcatccacctaatttctactaagtgtagatgaaacgccgtatatatagagtaatttctactaagtgtagatttttttnnnnnnnnnnaagcttggcgtggatccgatatcaactagatcttgagacaaatggcagtattcatccacaattttaaaagaaaaggggggattggggggtacagtgcaggggaaagaatagtagacataatagcaacagacatacaaactaaag

SEQ ID NO: 10002 - DNA, 301 bp, Artificial Sequence
  Ube2g2.1_Apc.1
  crRNA array
  misc_feature (148)..(157): n is a, c, g, or t
cttggctttatatatcttgtggaaaggacgaaacaccgtaatttctactaagtgtagatgtgtgggtctcctgggggcctaatttctactaagtgtagatgtgatccacacgtgtagctgtaatttctactaagtgtagatttttttnnnnnnnnnnaagcttggcgtggatccgatatcaactagatcttgagacaaatggcagtattcatccacaattttaaaagaaaaggggggattggggggtacagtgcaggggaaagaatagtagacataatagcaacagacatacaaactaaag

SEQ ID NO: 10003 - DNA, 301 bp, Artificial Sequence
  Ube2g2.1_Apc.2
  crRNA array
  misc_feature (148)..(157): n is a, c, g, or t
cttggctttatatatcttgtggaaaggacgaaacaccgtaatttctactaagtgtagatgtgtgggtctcctgggggcctaatttctactaagtgtagatcatctgctcgccaagacaaataatttctactaagtgtagatttttttnnnnnnnnnnaagcttggcgtggatccgatatcaactagatcttgagacaaatggcagtattcatccacaattttaaaagaaaaggggggattggggggtacagtgcaggggaaagaatagtagacataatagcaacagacatacaaactaaag

SEQ ID NO: 10004 - DNA, 301 bp, Artificial Sequence
  Ube2g2.1_Apc.3
  crRNA array
  misc_feature (148)..(157): n is a, c, g, or t
cttggctttatatatcttgtggaaaggacgaaacaccgtaatttctactaagtgtagatgtgtgggtctcctgggggcctaatttctactaagtgtagatacgccaatcgacatgatgattaatttctactaagtgtagatttttttnnnnnnnnnnaagcttggcgtggatccgatatcaactagatcttgagacaaatggcagtattcatccacaattttaaaagaaaaggggggattggggggtacagtgcaggggaaagaatagtagacataatagcaacagacatacaaactaaag

SEQ ID NO: 10005 - DNA, 301 bp, Artificial Sequence
  Ube2g2.1_Apc.4
  crRNA array
  misc_feature (148)..(157): n is a, c, g, or t
cttggctttatatatcttgtggaaaggacgaaacaccgtaatttctactaagtgtagatgtgtgggtctcctgggggcctaatttctactaagtgtagatcaccaggggatgatgtgccctaatttctactaagtgtagatttttttnnnnnnnnnnaagcttggcgtggatccgatatcaactagatcttgagacaaatggcagtattcatccacaattttaaaagaaaaggggggattggggggtacagtgcaggggaaagaatagtagacataatagcaacagacatacaaactaaag

SEQ ID NO: 10006 - DNA, 301 bp, Artificial Sequence
  Ube2g2.2_Apc.1
  crRNA array
  misc_feature (148)..(157): n is a, c, g, or t
cttggctttatatatcttgtggaaaggacgaaacaccgtaatttctactaagtgtagatgcagcgcagcagctgtcatttaatttctactaagtgtagatgtgatccacacgtgtagctgtaatttctactaagtgtagatttttttnnnnnnnnnnaagcttggcgtggatccgatatcaactagatcttgagacaaatggcagtattcatccacaattttaaaagaaaaggggggattggggggtacagtgcaggggaaagaatagtagacataatagcaacagacatacaaactaaag

SEQ ID NO: 10007 - DNA, 301 bp, Artificial Sequence
  Ube2g2.2_Apc.2
  crRNA array
  misc_feature (148)..(157): n is a, c, g, or t
cttggctttatatatcttgtggaaaggacgaaacaccgtaatttctactaagtgtagatgcagcgcagcagctgtcatttaatttctactaagtgtagatcatctgctcgccaagacaaataatttctactaagtgtagatttttttnnnnnnnnnnaagcttggcgtggatccgatatcaactagatcttgagacaaatggcagtattcatccacaattttaaaagaaaaggggggattggggggtacagtgcaggggaaagaatagtagacataatagcaacagacatacaaactaaag

SEQ ID NO: 10008 - DNA, 301 bp, Artificial Sequence
  Ube2g2.2_Apc.3
  crRNA array
  misc_feature (148)..(157): n is a, c, g, or t
cttggctttatatatcttgtggaaaggacgaaacaccgtaatttctactaagtgtagatgcagcgcagcagctgtcatttaatttctactaagtgtagatacgccaatcgacatgatgattaatttctactaagtgtagatttttttnnnnnnnnnnaagcttggcgtggatccgatatcaactagatcttgagacaaatggcagtattcatccacaattttaaaagaaaaggggggattggggggtacagtgcaggggaaagaatagtagacataatagcaacagacatacaaactaaag

SEQ ID NO: 10009 - DNA, 301 bp, Artificial Sequence
  Ube2g2.2_Apc.4
  crRNA array
  misc_feature (148)..(157): n is a, c, g, or t
cttggctttatatatcttgtggaaaggacgaaacaccgtaatttctactaagtgtagatgcagcgcagcagctgtcatttaatttctactaagtgtagatcaccaggggatgatgtgccctaatttctactaagtgtagatttttttnnnnnnnnnnaagcttggcgtggatccgatatcaactagatcttgagacaaatggcagtattcatccacaattttaaaagaaaaggggggattggggggtacagtgcaggggaaagaatagtagacataatagcaacagacatacaaactaaag

SEQ ID NO: 10010 - DNA, 301 bp, Artificial Sequence
  Ube2g2.3_Apc.1
  crRNA array
  misc_feature (148)..(157): n is a, c, g, or t
cttggctttatatatcttgtggaaaggacgaaacaccgtaatttctactaagtgtagataaacgcaacagagtctggtgtaatttctactaagtgtagatgtgatccacacgtgtagctgtaatttctactaagtgtagatttttttnnnnnnnnnnaagcttggcgtggatccgatatcaactagatcttgagacaaatggcagtattcatccacaattttaaaagaaaaggggggattggggggtacagtgcaggggaaagaatagtagacataatagcaacagacatacaaactaaag

SEQ ID NO: 10011 - DNA, 301 bp, Artificial Sequence
  Ube2g2.3_Apc.2
  crRNA array
  misc_feature (148)..(157): n is a, c, g, or t
cttggctttatatatcttgtggaaaggacgaaacaccgtaatttctactaagtgtagataaacgcaacagagtctggtgtaatttctactaagtgtagatcatctgctcgccaagacaaataatttctactaagtgtagatttttttnnnnnnnnnnaagcttggcgtggatccgatatcaactagatcttgagacaaatggcagtattcatccacaattttaaaagaaaaggggggattggggggtacagtgcaggggaaagaatagtagacataatagcaacagacatacaaactaaag

SEQ ID NO: 10012 - DNA, 301 bp, Artificial Sequence
  Ube2g2.3_Apc.3
  crRNA array
  misc_feature (148)..(157): n is a, c, g, or t
cttggctttatatatcttgtggaaaggacgaaacaccgtaatttctactaagtgtagataaacgcaacagagtctggtgtaatttctactaagtgtagatacgccaatcgacatgatgattaatttctactaagtgtagatttttttnnnnnnnnnnaagcttggcgtggatccgatatcaactagatcttgagacaaatggcagtattcatccacaattttaaaagaaaaggggggattggggggtacagtgcaggggaaagaatagtagacataatagcaacagacatacaaactaaag

SEQ ID NO: 10013 - DNA, 301 bp, Artificial Sequence
  Ube2g2.3_Apc.4
  crRNA array
  misc_feature (148)..(157): n is a, c, g, or t
cttggctttatatatcttgtggaaaggacgaaacaccgtaatttctactaagtgtagataaacgcaacagagtctggtgtaatttctactaagtgtagatcaccaggggatgatgtgccctaatttctactaagtgtagatttttttnnnnnnnnnnaagcttggcgtggatccgatatcaactagatcttgagacaaatggcagtattcatccacaattttaaaagaaaaggggggattggggggtacagtgcaggggaaagaatagtagacataatagcaacagacatacaaactaaag

SEQ ID NO: 10014 - DNA, 301 bp, Artificial Sequence
  Ube2g2.4_Apc.1
  crRNA array
  misc_feature (148)..(157): n is a, c, g, or t
cttggctttatatatcttgtggaaaggacgaaacaccgtaatttctactaagtgtagatgaaaaggccaagcatccacctaatttctactaagtgtagatgtgatccacacgtgtagctgtaatttctactaagtgtagatttttttnnnnnnnnnnaagcttggcgtggatccgatatcaactagatcttgagacaaatggcagtattcatccacaattttaaaagaaaaggggggattggggggtacagtgcaggggaaagaatagtagacataatagcaacagacatacaaactaaag

SEQ ID NO: 10015 - DNA, 301 bp, Artificial Sequence
  Ube2g2.4_Apc.2
  crRNA array
  misc_feature (148)..(157): n is a, c, g, or t
cttggctttatatatcttgtggaaaggacgaaacaccgtaatttctactaagtgtagatgaaaaggccaagcatccacctaatttctactaagtgtagatcatctgctcgccaagacaaataatttctactaagtgtagatttttttnnnnnnnnnnaagcttggcgtggatccgatatcaactagatcttgagacaaatggcagtattcatccacaattttaaaagaaaaggggggattggggggtacagtgcaggggaaagaatagtagacataatagcaacagacatacaaactaaag

SEQ ID NO: 10016 - DNA, 301 bp, Artificial Sequence
  Ube2g2.4_Apc.3
  crRNA array
  misc_feature (148)..(157): n is a, c, g, or t
cttggctttatatatcttgtggaaaggacgaaacaccgtaatttctactaagtgtagatgaaaaggccaagcatccacctaatttctactaagtgtagatacgccaatcgacatgatgattaatttctactaagtgtagatttttttnnnnnnnnnnaagcttggcgtggatccgatatcaactagatcttgagacaaatggcagtattcatccacaattttaaaagaaaaggggggattggggggtacagtgcaggggaaagaatagtagacataatagcaacagacatacaaactaaag

SEQ ID NO: 10017 - DNA, 301 bp, Artificial Sequence
  Ube2g2.4_Apc.4
  crRNA array
  misc_feature (148)..(157): n is a, c, g, or t
cttggctttatatatcttgtggaaaggacgaaacaccgtaatttctactaagtgtagatgaaaaggccaagcatccacctaatttctactaagtgtagatcaccaggggatgatgtgccctaatttctactaagtgtagatttttttnnnnnnnnnnaagcttggcgtggatccgatatcaactagatcttgagacaaatggcagtattcatccacaattttaaaagaaaaggggggattggggggtacagtgcaggggaaagaatagtagacataatagcaacagacatacaaactaaag

SEQ ID NO: 10018 - DNA, 301 bp, Artificial Sequence
  Ube2g2.1_Fanca.1
  crRNA array
  misc_feature (148)..(157): n is a, c, g, or t
cttggctttatatatcttgtggaaaggacgaaacaccgtaatttctactaagtgtagatgtgtgggtctcctgggggcctaatttctactaagtgtagatggaggccccggggcccaccataatttctactaagtgtagatttttttnnnnnnnnnnaagcttggcgtggatccgatatcaactagatcttgagacaaatggcagtattcatccacaattttaaaagaaaaggggggattggggggtacagtgcaggggaaagaatagtagacataatagcaacagacatacaaactaaag

SEQ ID NO: 10019 - DNA, 301 bp, Artificial Sequence
  Ube2g2.1_Fanca.2
  crRNA array
  misc_feature (148)..(157): n is a, c, g, or t
cttggctttatatatcttgtggaaaggacgaaacaccgtaatttctactaagtgtagatgtgtgggtctcctgggggcctaatttctactaagtgtagatagagctaccacctagacagctaatttctactaagtgtagatttttttnnnnnnnnnnaagcttggcgtggatccgatatcaactagatcttgagacaaatggcagtattcatccacaattttaaaagaaaaggggggattggggggtacagtgcaggggaaagaatagtagacataatagcaacagacatacaaactaaag

SEQ ID NO: 10020 - DNA, 301 bp, Artificial Sequence
  Ube2g2.1_Fanca.3
  crRNA array
  misc_feature (148)..(157): n is a, c, g, or t
cttggctttatatatcttgtggaaaggacgaaacaccgtaatttctactaagtgtagatgtgtgggtctcctgggggcctaatttctactaagtgtagataccaactgctgtgcctcgggtaatttctactaagtgtagatttttttnnnnnnnnnnaagcttggcgtggatccgatatcaactagatcttgagacaaatggcagtattcatccacaattttaaaagaaaaggggggattggggggtacagtgcaggggaaagaatagtagacataatagcaacagacatacaaactaaag

SEQ ID NO: 10021 - DNA, 301 bp, Artificial Sequence
  Ube2g2.1_Fanca.4
  crRNA array
  misc_feature (148)..(157): n is a, c, g, or t
cttggctttatatatcttgtggaaaggacgaaacaccgtaatttctactaagtgtagatgtgtgggtctcctgggggcctaatttctactaagtgtagatcacccacccctggtgccaagtaatttctactaagtgtagatttttttnnnnnnnnnnaagcttggcgtggatccgatatcaactagatcttgagacaaatggcagtattcatccacaattttaaaagaaaaggggggattggggggtacagtgcaggggaaagaatagtagacataatagcaacagacatacaaactaaag

SEQ ID NO: 10022 - DNA, 301 bp, Artificial Sequence
  Ube2g2.2_Fanca.1
  crRNA array
  misc_feature (148)..(157): n is a, c, g, or t
cttggctttatatatcttgtggaaaggacgaaacaccgtaatttctactaagtgtagatgcagcgcagcagctgtcatttaatttctactaagtgtagatggaggccccggggcccaccataatttctactaagtgtagatttttttnnnnnnnnnnaagcttggcgtggatccgatatcaactagatcttgagacaaatggcagtattcatccacaattttaaaagaaaaggggggattggggggtacagtgcaggggaaagaatagtagacataatagcaacagacatacaaactaaag

SEQ ID NO: 10023 - DNA, 301 bp, Artificial Sequence
  Ube2g2.2_Fanca.2
  crRNA array
  misc_feature (148)..(157): n is a, c, g, or t
cttggctttatatatcttgtggaaaggacgaaacaccgtaatttctactaagtgtagatgcagcgcagcagctgtcatttaatttctactaagtgtagatagagctaccacctagacagctaatttctactaagtgtagatttttttnnnnnnnnnnaagcttggcgtggatccgatatcaactagatcttgagacaaatggcagtattcatccacaattttaaaagaaaaggggggattggggggtacagtgcaggggaaagaatagtagacataatagcaacagacatacaaactaaag

SEQ ID NO: 10024 - DNA, 301 bp, Artificial Sequence
  Ube2g2.2_Fanca.3
  crRNA array
  misc_feature (148)..(157): n is a, c, g, or t
cttggctttatatatcttgtggaaaggacgaaacaccgtaatttctactaagtgtagatgcagcgcagcagctgtcatttaatttctactaagtgtagataccaactgctgtgcctcgggtaatttctactaagtgtagatttttttnnnnnnnnnnaagcttggcgtggatccgatatcaactagatcttgagacaaatggcagtattcatccacaattttaaaagaaaaggggggattggggggtacagtgcaggggaaagaatagtagacataatagcaacagacatacaaactaaag

SEQ ID NO: 10025 - DNA, 301 bp, Artificial Sequence
  Ube2g2.2_Fanca.4
  crRNA array
  misc_feature (148)..(157): n is a, c, g, or t
cttggctttatatatcttgtggaaaggacgaaacaccgtaatttctactaagtgtagatgcagcgcagcagctgtcatttaatttctactaagtgtagatcacccacccctggtgccaagtaatttctactaagtgtagatttttttnnnnnnnnnnaagcttggcgtggatccgatatcaactagatcttgagacaaatggcagtattcatccacaattttaaaagaaaaggggggattggggggtacagtgcaggggaaagaatagtagacataatagcaacagacatacaaactaaag

SEQ ID NO: 10026 - DNA, 301 bp, Artificial Sequence
  Ube2g2.3_Fanca.1
  crRNA array
  misc_feature (148)..(157): n is a, c, g, or t
cttggctttatatatcttgtggaaaggacgaaacaccgtaatttctactaagtgtagataaacgcaacagagtctggtgtaatttctactaagtgtagatggaggccccggggcccaccataatttctactaagtgtagatttttttnnnnnnnnnnaagcttggcgtggatccgatatcaactagatcttgagacaaatggcagtattcatccacaattttaaaagaaaaggggggattggggggtacagtgcaggggaaagaatagtagacataatagcaacagacatacaaactaaag

SEQ ID NO: 10027 - DNA, 301 bp, Artificial Sequence
  Ube2g2.3_Fanca.2
  crRNA array
  misc_feature (148)..(157): n is a, c, g, or t
cttggctttatatatcttgtggaaaggacgaaacaccgtaatttctactaagtgtagataaacgcaacagagtctggtgtaatttctactaagtgtagatagagctaccacctagacagctaatttctactaagtgtagatttttttnnnnnnnnnnaagcttggcgtggatccgatatcaactagatcttgagacaaatggcagtattcatccacaattttaaaagaaaaggggggattggggggtacagtgcaggggaaagaatagtagacataatagcaacagacatacaaactaaag

SEQ ID NO: 10028 - DNA, 301 bp, Artificial Sequence
  Ube2g2.3_Fanca.3
  crRNA array
  misc_feature (148)..(157): n is a, c, g, or t
cttggctttatatatcttgtggaaaggacgaaacaccgtaatttctactaagtgtagataaacgcaacagagtctggtgtaatttctactaagtgtagataccaactgctgtgcctcgggtaatttctactaagtgtagatttttttnnnnnnnnnnaagcttggcgtggatccgatatcaactagatcttgagacaaatggcagtattcatccacaattttaaaagaaaaggggggattggggggtacagtgcaggggaaagaatagtagacataatagcaacagacatacaaactaaag

SEQ ID NO: 10029 - DNA, 301 bp, Artificial Sequence
  Ube2g2.3_Fanca.4
  crRNA array
  misc_feature (148)..(157): n is a, c, g, or t
cttggctttatatatcttgtggaaaggacgaaacaccgtaatttctactaagtgtagataaacgcaacagagtctggtgtaatttctactaagtgtagatcacccacccctggtgccaagtaatttctactaagtgtagatttttttnnnnnnnnnnaagcttggcgtggatccgatatcaactagatcttgagacaaatggcagtattcatccacaattttaaaagaaaaggggggattggggggtacagtgcaggggaaagaatagtagacataatagcaacagacatacaaactaaag

SEQ ID NO: 10030 - DNA, 301 bp, Artificial Sequence
  Ube2g2.4_Fanca.1
  crRNA array
  misc_feature (148)..(157): n is a, c, g, or t
cttggctttatatatcttgtggaaaggacgaaacaccgtaatttctactaagtgtagatgaaaaggccaagcatccacctaatttctactaagtgtagatggaggccccggggcccaccataatttctactaagtgtagatttttttnnnnnnnnnnaagcttggcgtggatccgatatcaactagatcttgagacaaatggcagtattcatccacaattttaaaagaaaaggggggattggggggtacagtgcaggggaaagaatagtagacataatagcaacagacatacaaactaaag

SEQ ID NO: 10031 - DNA, 301 bp, Artificial Sequence
  Ube2g2.4_Fanca.2
  crRNA array
  misc_feature (148)..(157): n is a, c, g, or t
cttggctttatatatcttgtggaaaggacgaaacaccgtaatttctactaagtgtagatgaaaaggccaagcatccacctaatttctactaagtgtagatagagctaccacctagacagctaatttctactaagtgtagatttttttnnnnnnnnnnaagcttggcgtggatccgatatcaactagatcttgagacaaatggcagtattcatccacaattttaaaagaaaaggggggattggggggtacagtgcaggggaaagaatagtagacataatagcaacagacatacaaactaaag

SEQ ID NO: 10032 - DNA, 301 bp, Artificial Sequence
  Ube2g2.4_Fanca.3
  crRNA array
  misc_feature (148)..(157): n is a, c, g, or t
cttggctttatatatcttgtggaaaggacgaaacaccgtaatttctactaagtgtagatgaaaaggccaagcatccacctaatttctactaagtgtagataccaactgctgtgcctcgggtaatttctactaagtgtagatttttttnnnnnnnnnnaagcttggcgtggatccgatatcaactagatcttgagacaaatggcagtattcatccacaattttaaaagaaaaggggggattggggggtacagtgcaggggaaagaatagtagacataatagcaacagacatacaaactaaag

SEQ ID NO: 10033 - DNA, 301 bp, Artificial Sequence
  Ube2g2.4_Fanca.4
  crRNA array
  misc_feature (148)..(157): n is a, c, g, or t
cttggctttatatatcttgtggaaaggacgaaacaccgtaatttctactaagtgtagatgaaaaggccaagcatccacctaatttctactaagtgtagatcacccacccctggtgccaagtaatttctactaagtgtagatttttttnnnnnnnnnnaagcttggcgtggatccgatatcaactagatcttgagacaaatggcagtattcatccacaattttaaaagaaaaggggggattggggggtacagtgcaggggaaagaatagtagacataatagcaacagacatacaaactaaag

SEQ ID NO: 10034 - DNA, 301 bp, Artificial Sequence
  Ube2g2.1_Nf1.1
  crRNA array
  misc_feature (148)..(157): n is a, c, g, or t
cttggctttatatatcttgtggaaaggacgaaacaccgtaatttctactaagtgtagatgtgtgggtctcctgggggcctaatttctactaagtgtagattggcgatccggaatcctctgtaatttctactaagtgtagatttttttnnnnnnnnnnaagcttggcgtggatccgatatcaactagatcttgagacaaatggcagtattcatccacaattttaaaagaaaaggggggattggggggtacagtgcaggggaaagaatagtagacataatagcaacagacatacaaactaaag

SEQ ID NO: 10035 - DNA, 301 bp, Artificial Sequence
  Ube2g2.1_Nf1.2
  crRNA array
  misc_feature (148)..(157): n is a, c, g, or t
cttggctttatatatcttgtggaaaggacgaaacaccgtaatttctactaagtgtagatgtgtgggtctcctgggggcctaatttctactaagtgtagatggaaacacaacgctggcctctaatttctactaagtgtagatttttttnnnnnnnnnnaagcttggcgtggatccgatatcaactagatcttgagacaaatggcagtattcatccacaattttaaaagaaaaggggggattggggggtacagtgcaggggaaagaatagtagacataatagcaacagacatacaaactaaag

SEQ ID NO: 10036 - DNA, 301 bp, Artificial Sequence
  Ube2g2.1_Nf1.3
  crRNA array
  misc_feature (148)..(157): n is a, c, g, or t
cttggctttatatatcttgtggaaaggacgaaacaccgtaatttctactaagtgtagatgtgtgggtctcctgggggcctaatttctactaagtgtagataatgatggaacgcagtcgcataatttctactaagtgtagatttttttnnnnnnnnnnaagcttggcgtggatccgatatcaactagatcttgagacaaatggcagtattcatccacaattttaaaagaaaaggggggattggggggtacagtgcaggggaaagaatagtagacataatagcaacagacatacaaactaaag

SEQ ID NO: 10037 - DNA, 301 bp, Artificial Sequence
  Ube2g2.1_Nf1.4
  crRNA array
  misc_feature (148)..(157): n is a, c, g, or t
cttggctttatatatcttgtggaaaggacgaaacaccgtaatttctactaagtgtagatgtgtgggtctcctgggggcctaatttctactaagtgtagattgcaaaaccatccaccaagttaatttctactaagtgtagatttttttnnnnnnnnnnaagcttggcgtggatccgatatcaactagatcttgagacaaatggcagtattcatccacaattttaaaagaaaaggggggattggggggtacagtgcaggggaaagaatagtagacataatagcaacagacatacaaactaaag

SEQ ID NO: 10038 - DNA, 301 bp, Artificial Sequence
  Ube2g2.2_Nf1.1
  crRNA array
  misc_feature (148)..(157): n is a, c, g, or t
cttggctttatatatcttgtggaaaggacgaaacaccgtaatttctactaagtgtagatgcagcgcagcagctgtcatttaatttctactaagtgtagattggcgatccggaatcctctgtaatttctactaagtgtagatttttttnnnnnnnnnnaagcttggcgtggatccgatatcaactagatcttgagacaaatggcagtattcatccacaattttaaaagaaaaggggggattggggggtacagtgcaggggaaagaatagtagacataatagcaacagacatacaaactaaag

SEQ ID NO: 10039 - DNA, 301 bp, Artificial Sequence
  Ube2g2.2_Nf1.2
  crRNA array
  misc_feature (148)..(157): n is a, c, g, or t
cttggctttatatatcttgtggaaaggacgaaacaccgtaatttctactaagtgtagatgcagcgcagcagctgtcatttaatttctactaagtgtagatggaaacacaacgctggcctctaatttctactaagtgtagatttttttnnnnnnnnnnaagcttggcgtggatccgatatcaactagatcttgagacaaatggcagtattcatccacaattttaaaagaaaaggggggattggggggtacagtgcaggggaaagaatagtagacataatagcaacagacatacaaactaaag

SEQ ID NO: 10040 - DNA, 301 bp, Artificial Sequence
  Ube2g2.2_Nf1.3
  crRNA array
  misc_feature (148)..(157): n is a, c, g, or t
cttggctttatatatcttgtggaaaggacgaaacaccgtaatttctactaagtgtagatgcagcgcagcagctgtcatttaatttctactaagtgtagataatgatggaacgcagtcgcataatttctactaagtgtagatttttttnnnnnnnnnnaagcttggcgtggatccgatatcaactagatcttgagacaaatggcagtattcatccacaattttaaaagaaaaggggggattggggggtacagtgcaggggaaagaatagtagacataatagcaacagacatacaaactaaag

SEQ ID NO: 10041 - DNA, 301 bp, Artificial Sequence
  Ube2g2.2_Nf1.4
  crRNA array
  misc_feature (148)..(157): n is a, c, g, or t
cttggctttatatatcttgtggaaaggacgaaacaccgtaatttctactaagtgtagatgcagcgcagcagctgtcatttaatttctactaagtgtagattgcaaaaccatccaccaagttaatttctactaagtgtagatttttttnnnnnnnnnnaagcttggcgtggatccgatatcaactagatcttgagacaaatggcagtattcatccacaattttaaaagaaaaggggggattggggggtacagtgcaggggaaagaatagtagacataatagcaacagacatacaaactaaag

SEQ ID NO: 10042 - DNA, 301 bp, Artificial Sequence
  Ube2g2.3_Nf1.1
  crRNA array
  misc_feature (148)..(157): n is a, c, g, or t
cttggctttatatatcttgtggaaaggacgaaacaccgtaatttctactaagtgtagataaacgcaacagagtctggtgtaatttctactaagtgtagattggcgatccggaatcctctgtaatttctactaagtgtagatttttttnnnnnnnnnnaagcttggcgtggatccgatatcaactagatcttgagacaaatggcagtattcatccacaattttaaaagaaaaggggggattggggggtacagtgcaggggaaagaatagtagacataatagcaacagacatacaaactaaag

SEQ ID NO: 10043 - DNA, 301 bp, Artificial Sequence
  Ube2g2.3_Nf1.2
  crRNA array
  misc_feature (148)..(157): n is a, c, g, or t
cttggctttatatatcttgtggaaaggacgaaacaccgtaatttctactaagtgtagataaacgcaacagagtctggtgtaatttctactaagtgtagatggaaacacaacgctggcctctaatttctactaagtgtagatttttttnnnnnnnnnnaagcttggcgtggatccgatatcaactagatcttgagacaaatggcagtattcatccacaattttaaaagaaaaggggggattggggggtacagtgcaggggaaagaatagtagacataatagcaacagacatacaaactaaag

SEQ ID NO: 10044 - DNA, 301 bp, Artificial Sequence
  Ube2g2.3_Nf1.3
  crRNA array
  misc_feature (148)..(157): n is a, c, g, or t
cttggctttatatatcttgtggaaaggacgaaacaccgtaatttctactaagtgtagataaacgcaacagagtctggtgtaatttctactaagtgtagataatgatggaacgcagtcgcataatttctactaagtgtagatttttttnnnnnnnnnnaagcttggcgtggatccgatatcaactagatcttgagacaaatggcagtattcatccacaattttaaaagaaaaggggggattggggggtacagtgcaggggaaagaatagtagacataatagcaacagacatacaaactaaag

SEQ ID NO: 10045 - DNA, 301 bp, Artificial Sequence
  Ube2g2.3_Nf1.4
  crRNA array
  misc_feature (148)..(157): n is a, c, g, or t
cttggctttatatatcttgtggaaaggacgaaacaccgtaatttctactaagtgtagataaacgcaacagagtctggtgtaatttctactaagtgtagattgcaaaaccatccaccaagttaatttctactaagtgtagatttttttnnnnnnnnnnaagcttggcgtggatccgatatcaactagatcttgagacaaatggcagtattcatccacaattttaaaagaaaaggggggattggggggtacagtgcaggggaaagaatagtagacataatagcaacagacatacaaactaaag

SEQ ID NO: 10046 - DNA, 301 bp, Artificial Sequence
  Ube2g2.4_Nf1.1
  crRNA array
  misc_feature (148)..(157): n is a, c, g, or t
cttggctttatatatcttgtggaaaggacgaaacaccgtaatttctactaagtgtagatgaaaaggccaagcatccacctaatttctactaagtgtagattggcgatccggaatcctctgtaatttctactaagtgtagatttttttnnnnnnnnnnaagcttggcgtggatccgatatcaactagatcttgagacaaatggcagtattcatccacaattttaaaagaaaaggggggattggggggtacagtgcaggggaaagaatagtagacataatagcaacagacatacaaactaaag

SEQ ID NO: 10047 - DNA, 301 bp, Artificial Sequence
  Ube2g2.4_Nf1.2
  crRNA array
  misc_feature (148)..(157): n is a, c, g, or t
cttggctttatatatcttgtggaaaggacgaaacaccgtaatttctactaagtgtagatgaaaaggccaagcatccacctaatttctactaagtgtagatggaaacacaacgctggcctctaatttctactaagtgtagatttttttnnnnnnnnnnaagcttggcgtggatccgatatcaactagatcttgagacaaatggcagtattcatccacaattttaaaagaaaaggggggattggggggtacagtgcaggggaaagaatagtagacataatagcaacagacatacaaactaaag

SEQ ID NO: 10048 - DNA, 301 bp, Artificial Sequence
  Ube2g2.4_Nf1.3
  crRNA array
  misc_feature (148)..(157): n is a, c, g, or t
cttggctttatatatcttgtggaaaggacgaaacaccgtaatttctactaagtgtagatgaaaaggccaagcatccacctaatttctactaagtgtagataatgatggaacgcagtcgcataatttctactaagtgtagatttttttnnnnnnnnnnaagcttggcgtggatccgatatcaactagatcttgagacaaatggcagtattcatccacaattttaaaagaaaaggggggattggggggtacagtgcaggggaaagaatagtagacataatagcaacagacatacaaactaaag

SEQ ID NO: 10049 - DNA, 301 bp, Artificial Sequence
  Ube2g2.4_Nf1.4
  crRNA array
  misc_feature (148)..(157): n is a, c, g, or t
cttggctttatatatcttgtggaaaggacgaaacaccgtaatttctactaagtgtagatgaaaaggccaagcatccacctaatttctactaagtgtagattgcaaaaccatccaccaagttaatttctactaagtgtagatttttttnnnnnnnnnnaagcttggcgtggatccgatatcaactagatcttgagacaaatggcagtattcatccacaattttaaaagaaaaggggggattggggggtacagtgcaggggaaagaatagtagacataatagcaacagacatacaaactaaag

SEQ ID NO: 10050 - DNA, 301 bp, Artificial Sequence
  Ube2g2.1_Kdm6a.1
  crRNA array
  misc_feature (148)..(157): n is a, c, g, or t
cttggctttatatatcttgtggaaaggacgaaacaccgtaatttctactaagtgtagatgtgtgggtctcctgggggcctaatttctactaagtgtagatgctgccgcctctcgcggcagtaatttctactaagtgtagatttttttnnnnnnnnnnaagcttggcgtggatccgatatcaactagatcttgagacaaatggcagtattcatccacaattttaaaagaaaaggggggattggggggtacagtgcaggggaaagaatagtagacataatagcaacagacatacaaactaaag

SEQ ID NO: 10051 - DNA, 301 bp, Artificial Sequence
  Ube2g2.1_Kdm6a.2
  crRNA array
  misc_feature (148)..(157): n is a, c, g, or t
cttggctttatatatcttgtggaaaggacgaaacaccgtaatttctactaagtgtagatgtgtgggtctcctgggggcctaatttctactaagtgtagatgctgcaggtaaggcacgttttaatttctactaagtgtagatttttttnnnnnnnnnnaagcttggcgtggatccgatatcaactagatcttgagacaaatggcagtattcatccacaattttaaaagaaaaggggggattggggggtacagtgcaggggaaagaatagtagacataatagcaacagacatacaaactaaag

SEQ ID NO: 10052 - DNA, 301 bp, Artificial Sequence
  Ube2g2.1_Kdm6a.3
  crRNA array
  misc_feature (148)..(157): n is a, c, g, or t
cttggctttatatatcttgtggaaaggacgaaacaccgtaatttctactaagtgtagatgtgtgggtctcctgggggcctaatttctactaagtgtagattgctggtgccggggaagttttaatttctactaagtgtagatttttttnnnnnnnnnnaagcttggcgtggatccgatatcaactagatcttgagacaaatggcagtattcatccacaattttaaaagaaaaggggggattggggggtacagtgcaggggaaagaatagtagacataatagcaacagacatacaaactaaag

SEQ ID NO: 10053 - DNA, 301 bp, Artificial Sequence
  Ube2g2.1_Kdm6a.4
  crRNA array
  misc_feature (148)..(157): n is a, c, g, or t
cttggctttatatatcttgtggaaaggacgaaacaccgtaatttctactaagtgtagatgtgtgggtctcctgggggcctaatttctactaagtgtagattgtctcctacgaatcccccctaatttctactaagtgtagatttttttnnnnnnnnnnaagcttggcgtggatccgatatcaactagatcttgagacaaatggcagtattcatccacaattttaaaagaaaaggggggattggggggtacagtgcaggggaaagaatagtagacataatagcaacagacatacaaactaaag

SEQ ID NO: 10054 - DNA, 301 bp, Artificial Sequence
  Ube2g2.2_Kdm6a.1
  crRNA array
  misc_feature (148)..(157): n is a, c, g, or t
cttggctttatatatcttgtggaaaggacgaaacaccgtaatttctactaagtgtagatgcagcgcagcagctgtcatttaatttctactaagtgtagatgctgccgcctctcgcggcagtaatttctactaagtgtagatttttttnnnnnnnnnnaagcttggcgtggatccgatatcaactagatcttgagacaaatggcagtattcatccacaattttaaaagaaaaggggggattggggggtacagtgcaggggaaagaatagtagacataatagcaacagacatacaaactaaag

SEQ ID NO: 10055 - DNA, 301 bp, Artificial Sequence
  Ube2g2.2_Kdm6a.2
  crRNA array
  misc_feature (148)..(157): n is a, c, g, or t
cttggctttatatatcttgtggaaaggacgaaacaccgtaatttctactaagtgtagatgcagcgcagcagctgtcatttaatttctactaagtgtagatgctgcaggtaaggcacgttttaatttctactaagtgtagatttttttnnnnnnnnnnaagcttggcgtggatccgatatcaactagatcttgagacaaatggcagtattcatccacaattttaaaagaaaaggggggattggggggtacagtgcaggggaaagaatagtagacataatagcaacagacatacaaactaaag

SEQ ID NO: 10056 - DNA, 301 bp, Artificial Sequence
  Ube2g2.2_Kdm6a.3
  crRNA array
  misc_feature (148)..(157): n is a, c, g, or t
cttggctttatatatcttgtggaaaggacgaaacaccgtaatttctactaagtgtagatgcagcgcagcagctgtcatttaatttctactaagtgtagattgctggtgccggggaagttttaatttctactaagtgtagatttttttnnnnnnnnnnaagcttggcgtggatccgatatcaactagatcttgagacaaatggcagtattcatccacaattttaaaagaaaaggggggattggggggtacagtgcaggggaaagaatagtagacataatagcaacagacatacaaactaaag

SEQ ID NO: 10057 - DNA, 301 bp, Artificial Sequence
  Ube2g2.2_Kdm6a.4
  crRNA array
  misc_feature (148)..(157): n is a, c, g, or t
cttggctttatatatcttgtggaaaggacgaaacaccgtaatttctactaagtgtagatgcagcgcagcagctgtcatttaatttctactaagtgtagattgtctcctacgaatcccccctaatttctactaagtgtagatttttttnnnnnnnnnnaagcttggcgtggatccgatatcaactagatcttgagacaaatggcagtattcatccacaattttaaaagaaaaggggggattggggggtacagtgcaggggaaagaatagtagacataatagcaacagacatacaaactaaag

SEQ ID NO: 10058 - DNA, 301 bp, Artificial Sequence
  Ube2g2.3_Kdm6a.1
  crRNA array
  misc_feature (148)..(157): n is a, c, g, or t
cttggctttatatatcttgtggaaaggacgaaacaccgtaatttctactaagtgtagataaacgcaacagagtctggtgtaatttctactaagtgtagatgctgccgcctctcgcggcagtaatttctactaagtgtagatttttttnnnnnnnnnnaagcttggcgtggatccgatatcaactagatcttgagacaaatggcagtattcatccacaattttaaaagaaaaggggggattggggggtacagtgcaggggaaagaatagtagacataatagcaacagacatacaaactaaag

SEQ ID NO: 10059 - DNA, 301 bp, Artificial Sequence
  Ube2g2.3_Kdm6a.2
  crRNA array
  misc_feature (148)..(157): n is a, c, g, or t
cttggctttatatatcttgtggaaaggacgaaacaccgtaatttctactaagtgtagataaacgcaacagagtctggtgtaatttctactaagtgtagatgctgcaggtaaggcacgttttaatttctactaagtgtagatttttttnnnnnnnnnnaagcttggcgtggatccgatatcaactagatcttgagacaaatggcagtattcatccacaattttaaaagaaaaggggggattggggggtacagtgcaggggaaagaatagtagacataatagcaacagacatacaaactaaag

SEQ ID NO: 10060 - DNA, 301 bp, Artificial Sequence
  Ube2g2.3_Kdm6a.3
  crRNA array
  misc_feature (148)..(157): n is a, c, g, or t
cttggctttatatatcttgtggaaaggacgaaacaccgtaatttctactaagtgtagataaacgcaacagagtctggtgtaatttctactaagtgtagattgctggtgccggggaagttttaatttctactaagtgtagatttttttnnnnnnnnnnaagcttggcgtggatccgatatcaactagatcttgagacaaatggcagtattcatccacaattttaaaagaaaaggggggattggggggtacagtgcaggggaaagaatagtagacataatagcaacagacatacaaactaaag

SEQ ID NO: 10061 - DNA, 301 bp, Artificial Sequence
  Ube2g2.3_Kdm6a.4
  crRNA array
  misc_feature (148)..(157): n is a, c, g, or t
cttggctttatatatcttgtggaaaggacgaaacaccgtaatttctactaagtgtagataaacgcaacagagtctggtgtaatttctactaagtgtagattgtctcctacgaatcccccctaatttctactaagtgtagatttttttnnnnnnnnnnaagcttggcgtggatccgatatcaactagatcttgagacaaatggcagtattcatccacaattttaaaagaaaaggggggattggggggtacagtgcaggggaaagaatagtagacataatagcaacagacatacaaactaaag

SEQ ID NO: 10062 - DNA, 301 bp, Artificial Sequence
  Ube2g2.4_Kdm6a.1
  crRNA array
  misc_feature (148)..(157): n is a, c, g, or t
cttggctttatatatcttgtggaaaggacgaaacaccgtaatttctactaagtgtagatgaaaaggccaagcatccacctaatttctactaagtgtagatgctgccgcctctcgcggcagtaatttctactaagtgtagatttttttnnnnnnnnnnaagcttggcgtggatccgatatcaactagatcttgagacaaatggcagtattcatccacaattttaaaagaaaaggggggattggggggtacagtgcaggggaaagaatagtagacataatagcaacagacatacaaactaaag

SEQ ID NO: 10063 - DNA, 301 bp, Artificial Sequence
  Ube2g2.4_Kdm6a.2
  crRNA array
  misc_feature (148)..(157): n is a, c, g, or t
cttggctttatatatcttgtggaaaggacgaaacaccgtaatttctactaagtgtagatgaaaaggccaagcatccacctaatttctactaagtgtagatgctgcaggtaaggcacgttttaatttctactaagtgtagatttttttnnnnnnnnnnaagcttggcgtggatccgatatcaactagatcttgagacaaatggcagtattcatccacaattttaaaagaaaaggggggattggggggtacagtgcaggggaaagaatagtagacataatagcaacagacatacaaactaaag

SEQ ID NO: 10064 - DNA, 301 bp, Artificial Sequence
  Ube2g2.4_Kdm6a.3
  crRNA array
  misc_feature (148)..(157): n is a, c, g, or t
cttggctttatatatcttgtggaaaggacgaaacaccgtaatttctactaagtgtagatgaaaaggccaagcatccacctaatttctactaagtgtagattgctggtgccggggaagttttaatttctactaagtgtagatttttttnnnnnnnnnnaagcttggcgtggatccgatatcaactagatcttgagacaaatggcagtattcatccacaattttaaaagaaaaggggggattggggggtacagtgcaggggaaagaatagtagacataatagcaacagacatacaaactaaag

SEQ ID NO: 10065 - DNA, 301 bp, Artificial Sequence
  Ube2g2.4_Kdm6a.4
  crRNA array
  misc_feature (148)..(157): n is a, c, g, or t
cttggctttatatatcttgtggaaaggacgaaacaccgtaatttctactaagtgtagatgaaaaggccaagcatccacctaatttctactaagtgtagattgtctcctacgaatcccccctaatttctactaagtgtagatttttttnnnnnnnnnnaagcttggcgtggatccgatatcaactagatcttgagacaaatggcagtattcatccacaattttaaaagaaaaggggggattggggggtacagtgcaggggaaagaatagtagacataatagcaacagacatacaaactaaag

SEQ ID NO: 10066 - DNA, 301 bp, Artificial Sequence
  Ube2g2.1_Ercc5.1
  crRNA array
  misc_feature (148)..(157): n is a, c, g, or t
cttggctttatatatcttgtggaaaggacgaaacaccgtaatttctactaagtgtagatgtgtgggtctcctgggggcctaatttctactaagtgtagatacggcacgagcaagagacactaatttctactaagtgtagatttttttnnnnnnnnnnaagcttggcgtggatccgatatcaactagatcttgagacaaatggcagtattcatccacaattttaaaagaaaaggggggattggggggtacagtgcaggggaaagaatagtagacataatagcaacagacatacaaactaaag

SEQ ID NO: 10067 - DNA, 301 bp, Artificial Sequence
  Ube2g2.1_Ercc5.2
  crRNA array
  misc_feature (148)..(157): n is a, c, g, or t
cttggctttatatatcttgtggaaaggacgaaacaccgtaatttctactaagtgtagatgtgtgggtctcctgggggcctaatttctactaagtgtagatgagtatcacatcggtgactctaatttctactaagtgtagatttttttnnnnnnnnnnaagcttggcgtggatccgatatcaactagatcttgagacaaatggcagtattcatccacaattttaaaagaaaaggggggattggggggtacagtgcaggggaaagaatagtagacataatagcaacagacatacaaactaaag

SEQ ID NO: 10068 - DNA, 301 bp, Artificial Sequence
  Ube2g2.1_Ercc5.3
  crRNA array
  misc_feature (148)..(157): n is a, c, g, or t
cttggctttatatatcttgtggaaaggacgaaacaccgtaatttctactaagtgtagatgtgtgggtctcctgggggcctaatttctactaagtgtagatggagtgggtccaggcctcgttaatttctactaagtgtagatttttttnnnnnnnnnnaagcttggcgtggatccgatatcaactagatcttgagacaaatggcagtattcatccacaattttaaaagaaaaggggggattggggggtacagtgcaggggaaagaatagtagacataatagcaacagacatacaaactaaag

SEQ ID NO: 10069 - DNA, 301 bp, Artificial Sequence
  Ube2g2.1_Ercc5.4
  crRNA array
  misc_feature (148)..(157): n is a, c, g, or t
cttggctttatatatcttgtggaaaggacgaaacaccgtaatttctactaagtgtagatgtgtgggtctcctgggggcctaatttctactaagtgtagatcagagccggtggaataatgttaatttctactaagtgtagatttttttnnnnnnnnnnaagcttggcgtggatccgatatcaactagatcttgagacaaatggcagtattcatccacaattttaaaagaaaaggggggattggggggtacagtgcaggggaaagaatagtagacataatagcaacagacatacaaactaaag

SEQ ID NO: 10070 - DNA, 301 bp, Artificial Sequence
  Ube2g2.2_Ercc5.1
  crRNA array
  misc_feature (148)..(157): n is a, c, g, or t
cttggctttatatatcttgtggaaaggacgaaacaccgtaatttctactaagtgtagatgcagcgcagcagctgtcatttaatttctactaagtgtagatacggcacgagcaagagacactaatttctactaagtgtagatttttttnnnnnnnnnnaagcttggcgtggatccgatatcaactagatcttgagacaaatggcagtattcatccacaattttaaaagaaaaggggggattggggggtacagtgcaggggaaagaatagtagacataatagcaacagacatacaaactaaag

SEQ ID NO: 10071 - DNA, 301 bp, Artificial Sequence
  Ube2g2.2_Ercc5.2
  crRNA array
  misc_feature (148)..(157): n is a, c, g, or t
cttggctttatatatcttgtggaaaggacgaaacaccgtaatttctactaagtgtagatgcagcgcagcagctgtcatttaatttctactaagtgtagatgagtatcacatcggtgactctaatttctactaagtgtagatttttttnnnnnnnnnnaagcttggcgtggatccgatatcaactagatcttgagacaaatggcagtattcatccacaattttaaaagaaaaggggggattggggggtacagtgcaggggaaagaatagtagacataatagcaacagacatacaaactaaag

SEQ ID NO: 10072 - DNA, 301 bp, Artificial Sequence
  Ube2g2.2_Ercc5.3
  crRNA array
  misc_feature (148)..(157): n is a, c, g, or t
cttggctttatatatcttgtggaaaggacgaaacaccgtaatttctactaagtgtagatgcagcgcagcagctgtcatttaatttctactaagtgtagatggagtgggtccaggcctcgttaatttctactaagtgtagatttttttnnnnnnnnnnaagcttggcgtggatccgatatcaactagatcttgagacaaatggcagtattcatccacaattttaaaagaaaaggggggattggggggtacagtgcaggggaaagaatagtagacataatagcaacagacatacaaactaaag

SEQ ID NO: 10073 - DNA, 301 bp, Artificial Sequence
  Ube2g2.2_Ercc5.4
  crRNA array
  misc_feature (148)..(157): n is a, c, g, or t
cttggctttatatatcttgtggaaaggacgaaacaccgtaatttctactaagtgtagatgcagcgcagcagctgtcatttaatttctactaagtgtagatcagagccggtggaataatgttaatttctactaagtgtagatttttttnnnnnnnnnnaagcttggcgtggatccgatatcaactagatcttgagacaaatggcagtattcatccacaattttaaaagaaaaggggggattggggggtacagtgcaggggaaagaatagtagacataatagcaacagacatacaaactaaag

SEQ ID NO: 10074 - DNA, 301 bp, Artificial Sequence
  Ube2g2.3_Ercc5.1
  crRNA array
  misc_feature (148)..(157): n is a, c, g, or t
cttggctttatatatcttgtggaaaggacgaaacaccgtaatttctactaagtgtagataaacgcaacagagtctggtgtaatttctactaagtgtagatacggcacgagcaagagacactaatttctactaagtgtagatttttttnnnnnnnnnnaagcttggcgtggatccgatatcaactagatcttgagacaaatggcagtattcatccacaattttaaaagaaaaggggggattggggggtacagtgcaggggaaagaatagtagacataatagcaacagacatacaaactaaag

SEQ ID NO: 10075 - DNA, 301 bp, Artificial Sequence
  Ube2g2.3_Ercc5.2
  crRNA array
  misc_feature (148)..(157): n is a, c, g, or t
cttggctttatatatcttgtggaaaggacgaaacaccgtaatttctactaagtgtagataaacgcaacagagtctggtgtaatttctactaagtgtagatgagtatcacatcggtgactctaatttctactaagtgtagatttttttnnnnnnnnnnaagcttggcgtggatccgatatcaactagatcttgagacaaatggcagtattcatccacaattttaaaagaaaaggggggattggggggtacagtgcaggggaaagaatagtagacataatagcaacagacatacaaactaaag

SEQ ID NO: 10076 - DNA, 301 bp, Artificial Sequence
  Ube2g2.3_Ercc5.3
  crRNA array
  misc_feature (148)..(157): n is a, c, g, or t
cttggctttatatatcttgtggaaaggacgaaacaccgtaatttctactaagtgtagataaacgcaacagagtctggtgtaatttctactaagtgtagatggagtgggtccaggcctcgttaatttctactaagtgtagatttttttnnnnnnnnnnaagcttggcgtggatccgatatcaactagatcttgagacaaatggcagtattcatccacaattttaaaagaaaaggggggattggggggtacagtgcaggggaaagaatagtagacataatagcaacagacatacaaactaaag

SEQ ID NO: 10077 - DNA, 301 bp, Artificial Sequence
  Ube2g2.3_Ercc5.4
  crRNA array
  misc_feature (148)..(157): n is a, c, g, or t
cttggctttatatatcttgtggaaaggacgaaacaccgtaatttctactaagtgtagataaacgcaacagagtctggtgtaatttctactaagtgtagatcagagccggtggaataatgttaatttctactaagtgtagatttttttnnnnnnnnnnaagcttggcgtggatccgatatcaactagatcttgagacaaatggcagtattcatccacaattttaaaagaaaaggggggattggggggtacagtgcaggggaaagaatagtagacataatagcaacagacatacaaactaaag

SEQ ID NO: 10078 - DNA, 301 bp, Artificial Sequence
  Ube2g2.4_Ercc5.1
  crRNA array
  misc_feature (148)..(157): n is a, c, g, or t
cttggctttatatatcttgtggaaaggacgaaacaccgtaatttctactaagtgtagatgaaaaggccaagcatccacctaatttctactaagtgtagatacggcacgagcaagagacactaatttctactaagtgtagatttttttnnnnnnnnnnaagcttggcgtggatccgatatcaactagatcttgagacaaatggcagtattcatccacaattttaaaagaaaaggggggattggggggtacagtgcaggggaaagaatagtagacataatagcaacagacatacaaactaaag

SEQ ID NO: 10079 - DNA, 301 bp, Artificial Sequence
  Ube2g2.4_Ercc5.2
  crRNA array
  misc_feature (148)..(157): n is a, c, g, or t
cttggctttatatatcttgtggaaaggacgaaacaccgtaatttctactaagtgtagatgaaaaggccaagcatccacctaatttctactaagtgtagatgagtatcacatcggtgactctaatttctactaagtgtagatttttttnnnnnnnnnnaagcttggcgtggatccgatatcaactagatcttgagacaaatggcagtattcatccacaattttaaaagaaaaggggggattggggggtacagtgcaggggaaagaatagtagacataatagcaacagacatacaaactaaag

SEQ ID NO: 10080 - DNA, 301 bp, Artificial Sequence
  Ube2g2.4_Ercc5.3
  crRNA array
  misc_feature (148)..(157): n is a, c, g, or t
cttggctttatatatcttgtggaaaggacgaaacaccgtaatttctactaagtgtagatgaaaaggccaagcatccacctaatttctactaagtgtagatggagtgggtccaggcctcgttaatttctactaagtgtagatttttttnnnnnnnnnnaagcttggcgtggatccgatatcaactagatcttgagacaaatggcagtattcatccacaattttaaaagaaaaggggggattggggggtacagtgcaggggaaagaatagtagacataatagcaacagacatacaaactaaag

SEQ ID NO: 10081 - DNA, 301 bp, Artificial Sequence
  Ube2g2.4_Ercc5.4
  crRNA array
  misc_feature (148)..(157): n is a, c, g, or t
cttggctttatatatcttgtggaaaggacgaaacaccgtaatttctactaagtgtagatgaaaaggccaagcatccacctaatttctactaagtgtagatcagagccggtggaataatgttaatttctactaagtgtagatttttttnnnnnnnnnnaagcttggcgtggatccgatatcaactagatcttgagacaaatggcagtattcatccacaattttaaaagaaaaggggggattggggggtacagtgcaggggaaagaatagtagacataatagcaacagacatacaaactaaag

SEQ ID NO: 10082 - DNA, 301 bp, Artificial Sequence
  Ube2g2.1_Arid1b.1
  crRNA array
  misc_feature (148)..(157): n is a, c, g, or t
cttggctttatatatcttgtggaaaggacgaaacaccgtaatttctactaagtgtagatgtgtgggtctcctgggggcctaatttctactaagtgtagatgctgctgctgtagtgcgtggtaatttctactaagtgtagatttttttnnnnnnnnnnaagcttggcgtggatccgatatcaactagatcttgagacaaatggcagtattcatccacaattttaaaagaaaaggggggattggggggtacagtgcaggggaaagaatagtagacataatagcaacagacatacaaactaaag

SEQ ID NO: 10083 - DNA, 301 bp, Artificial Sequence
  Ube2g2.1_Arid1b.2
  crRNA array
  misc_feature (148)..(157): n is a, c, g, or t
cttggctttatatatcttgtggaaaggacgaaacaccgtaatttctactaagtgtagatgtgtgggtctcctgggggcctaatttctactaagtgtagatagtgcaaaactgagcgcgggtaatttctactaagtgtagatttttttnnnnnnnnnnaagcttggcgtggatccgatatcaactagatcttgagacaaatggcagtattcatccacaattttaaaagaaaaggggggattggggggtacagtgcaggggaaagaatagtagacataatagcaacagacatacaaactaaag

SEQ ID NO: 10084 - DNA, 301 bp, Artificial Sequence
  Ube2g2.1_Arid1b.3
  crRNA array
  misc_feature (148)..(157): n is a, c, g, or t
cttggctttatatatcttgtggaaaggacgaaacaccgtaatttctactaagtgtagatgtgtgggtctcctgggggcctaatttctactaagtgtagatcactcaaaggcgaacaggtataatttctactaagtgtagatttttttnnnnnnnnnnaagcttggcgtggatccgatatcaactagatcttgagacaaatggcagtattcatccacaattttaaaagaaaaggggggattggggggtacagtgcaggggaaagaatagtagacataatagcaacagacatacaaactaaag

SEQ ID NO: 10085 - DNA, 301 bp, Artificial Sequence
  Ube2g2.1_Arid1b.4
  crRNA array
  misc_feature (148)..(157): n is a, c, g, or t
cttggctttatatatcttgtggaaaggacgaaacaccgtaatttctactaagtgtagatgtgtgggtctcctgggggcctaatttctactaagtgtagatctcctggctccgtagaagcataatttctactaagtgtagatttttttnnnnnnnnnnaagcttggcgtggatccgatatcaactagatcttgagacaaatggcagtattcatccacaattttaaaagaaaaggggggattggggggtacagtgcaggggaaagaatagtagacataatagcaacagacatacaaactaaag

SEQ ID NO: 10086 - DNA, 301 bp, Artificial Sequence
  Ube2g2.2_Arid1b.1
  crRNA array
  misc_feature (148)..(157): n is a, c, g, or t
cttggctttatatatcttgtggaaaggacgaaacaccgtaatttctactaagtgtagatgcagcgcagcagctgtcatttaatttctactaagtgtagatgctgctgctgtagtgcgtggtaatttctactaagtgtagatttttttnnnnnnnnnnaagcttggcgtggatccgatatcaactagatcttgagacaaatggcagtattcatccacaattttaaaagaaaaggggggattggggggtacagtgcaggggaaagaatagtagacataatagcaacagacatacaaactaaag

SEQ ID NO: 10087 - DNA, 301 bp, Artificial Sequence
  Ube2g2.2_Arid1b.2
  crRNA array
  misc_feature (148)..(157): n is a, c, g, or t
cttggctttatatatcttgtggaaaggacgaaacaccgtaatttctactaagtgtagatgcagcgcagcagctgtcatttaatttctactaagtgtagatagtgcaaaactgagcgcgggtaatttctactaagtgtagatttttttnnnnnnnnnnaagcttggcgtggatccgatatcaactagatcttgagacaaatggcagtattcatccacaattttaaaagaaaaggggggattggggggtacagtgcaggggaaagaatagtagacataatagcaacagacatacaaactaaag

SEQ ID NO: 10088 - DNA, 301 bp, Artificial Sequence
  Ube2g2.2_Arid1b.3
  crRNA array
  misc_feature (148)..(157): n is a, c, g, or t
cttggctttatatatcttgtggaaaggacgaaacaccgtaatttctactaagtgtagatgcagcgcagcagctgtcatttaatttctactaagtgtagatcactcaaaggcgaacaggtataatttctactaagtgtagatttttttnnnnnnnnnnaagcttggcgtggatccgatatcaactagatcttgagacaaatggcagtattcatccacaattttaaaagaaaaggggggattggggggtacagtgcaggggaaagaatagtagacataatagcaacagacatacaaactaaag

SEQ ID NO: 10089 - DNA, 301 bp, Artificial Sequence
  Ube2g2.2_Arid1b.4
  crRNA array
  misc_feature (148)..(157): n is a, c, g, or t
cttggctttatatatcttgtggaaaggacgaaacaccgtaatttctactaagtgtagatgcagcgcagcagctgtcatttaatttctactaagtgtagatctcctggctccgtagaagcataatttctactaagtgtagatttttttnnnnnnnnnnaagcttggcgtggatccgatatcaactagatcttgagacaaatggcagtattcatccacaattttaaaagaaaaggggggattggggggtacagtgcaggggaaagaatagtagacataatagcaacagacatacaaactaaag

SEQ ID NO: 10090 - DNA, 301 bp, Artificial Sequence
  Ube2g2.3_Arid1b.1
  crRNA array
  misc_feature (148)..(157): n is a, c, g, or t
cttggctttatatatcttgtggaaaggacgaaacaccgtaatttctactaagtgtagataaacgcaacagagtctggtgtaatttctactaagtgtagatgctgctgctgtagtgcgtggtaatttctactaagtgtagatttttttnnnnnnnnnnaagcttggcgtggatccgatatcaactagatcttgagacaaatggcagtattcatccacaattttaaaagaaaaggggggattggggggtacagtgcaggggaaagaatagtagacataatagcaacagacatacaaactaaag

SEQ ID NO: 10091 - DNA, 301 bp, Artificial Sequence
  Ube2g2.3_Arid1b.2
  crRNA array
  misc_feature (148)..(157): n is a, c, g, or t
cttggctttatatatcttgtggaaaggacgaaacaccgtaatttctactaagtgtagataaacgcaacagagtctggtgtaatttctactaagtgtagatagtgcaaaactgagcgcgggtaatttctactaagtgtagatttttttnnnnnnnnnnaagcttggcgtggatccgatatcaactagatcttgagacaaatggcagtattcatccacaattttaaaagaaaaggggggattggggggtacagtgcaggggaaagaatagtagacataatagcaacagacatacaaactaaag

SEQ ID NO: 10092 - DNA, 301 bp, Artificial Sequence
  Ube2g2.3_Arid1b.3
  crRNA array
  misc_feature (148)..(157): n is a, c, g, or t
cttggctttatatatcttgtggaaaggacgaaacaccgtaatttctactaagtgtagataaacgcaacagagtctggtgtaatttctactaagtgtagatcactcaaaggcgaacaggtataatttctactaagtgtagatttttttnnnnnnnnnnaagcttggcgtggatccgatatcaactagatcttgagacaaatggcagtattcatccacaattttaaaagaaaaggggggattggggggtacagtgcaggggaaagaatagtagacataatagcaacagacatacaaactaaag

SEQ ID NO: 10093 - DNA, 301 bp, Artificial Sequence
  Ube2g2.3_Arid1b.4
  crRNA array
  misc_feature (148)..(157): n is a, c, g, or t
cttggctttatatatcttgtggaaaggacgaaacaccgtaatttctactaagtgtagataaacgcaacagagtctggtgtaatttctactaagtgtagatctcctggctccgtagaagcataatttctactaagtgtagatttttttnnnnnnnnnnaagcttggcgtggatccgatatcaactagatcttgagacaaatggcagtattcatccacaattttaaaagaaaaggggggattggggggtacagtgcaggggaaagaatagtagacataatagcaacagacatacaaactaaag

SEQ ID NO: 10094 - DNA, 301 bp, Artificial Sequence
  Ube2g2.4_Arid1b.1
  crRNA array
  misc_feature (148)..(157): n is a, c, g, or t
cttggctttatatatcttgtggaaaggacgaaacaccgtaatttctactaagtgtagatgaaaaggccaagcatccacctaatttctactaagtgtagatgctgctgctgtagtgcgtggtaatttctactaagtgtagatttttttnnnnnnnnnnaagcttggcgtggatccgatatcaactagatcttgagacaaatggcagtattcatccacaattttaaaagaaaaggggggattggggggtacagtgcaggggaaagaatagtagacataatagcaacagacatacaaactaaag

SEQ ID NO: 10095 - DNA, 301 bp, Artificial Sequence
  Ube2g2.4_Arid1b.2
  crRNA array
  misc_feature (148)..(157): n is a, c, g, or t
cttggctttatatatcttgtggaaaggacgaaacaccgtaatttctactaagtgtagatgaaaaggccaagcatccacctaatttctactaagtgtagatagtgcaaaactgagcgcgggtaatttctactaagtgtagatttttttnnnnnnnnnnaagcttggcgtggatccgatatcaactagatcttgagacaaatggcagtattcatccacaattttaaaagaaaaggggggattggggggtacagtgcaggggaaagaatagtagacataatagcaacagacatacaaactaaag

SEQ ID NO: 10096 - DNA, 301 bp, Artificial Sequence
  Ube2g2.4_Arid1b.3
  crRNA array
  misc_feature (148)..(157): n is a, c, g, or t
cttggctttatatatcttgtggaaaggacgaaacaccgtaatttctactaagtgtagatgaaaaggccaagcatccacctaatttctactaagtgtagatcactcaaaggcgaacaggtataatttctactaagtgtagatttttttnnnnnnnnnnaagcttggcgtggatccgatatcaactagatcttgagacaaatggcagtattcatccacaattttaaaagaaaaggggggattggggggtacagtgcaggggaaagaatagtagacataatagcaacagacatacaaactaaag

SEQ ID NO: 10097 - DNA, 301 bp, Artificial Sequence
  Ube2g2.4_Arid1b.4
  crRNA array
  misc_feature (148)..(157): n is a, c, g, or t
cttggctttatatatcttgtggaaaggacgaaacaccgtaatttctactaagtgtagatgaaaaggccaagcatccacctaatttctactaagtgtagatctcctggctccgtagaagcataatttctactaagtgtagatttttttnnnnnnnnnnaagcttggcgtggatccgatatcaactagatcttgagacaaatggcagtattcatccacaattttaaaagaaaaggggggattggggggtacagtgcaggggaaagaatagtagacataatagcaacagacatacaaactaaag

SEQ ID NO: 10098 - DNA, 301 bp, Artificial Sequence
  Ube2g2.1_Rb1.1
  crRNA array
  misc_feature (148)..(157): n is a, c, g, or t
cttggctttatatatcttgtggaaaggacgaaacaccgtaatttctactaagtgtagatgtgtgggtctcctgggggcctaatttctactaagtgtagattctgacatgatcgggtaccttaatttctactaagtgtagatttttttnnnnnnnnnnaagcttggcgtggatccgatatcaactagatcttgagacaaatggcagtattcatccacaattttaaaagaaaaggggggattggggggtacagtgcaggggaaagaatagtagacataatagcaacagacatacaaactaaag

SEQ ID NO: 10099 - DNA, 301 bp, Artificial Sequence
  Ube2g2.1_Rb1.2
  crRNA array
  misc_feature (148)..(157): n is a, c, g, or t
cttggctttatatatcttgtggaaaggacgaaacaccgtaatttctactaagtgtagatgtgtgggtctcctgggggcctaatttctactaagtgtagatgtctctgcatgaaaacggagtaatttctactaagtgtagatttttttnnnnnnnnnnaagcttggcgtggatccgatatcaactagatcttgagacaaatggcagtattcatccacaattttaaaagaaaaggggggattggggggtacagtgcaggggaaagaatagtagacataatagcaacagacatacaaactaaag

SEQ ID NO: 10100 - DNA, 301 bp, Artificial Sequence
  Ube2g2.1_Rb1.3
  crRNA array
  misc_feature (148)..(157): n is a, c, g, or t
cttggctttatatatcttgtggaaaggacgaaacaccgtaatttctactaagtgtagatgtgtgggtctcctgggggcctaatttctactaagtgtagatagccaatctggtctaataactaatttctactaagtgtagatttttttnnnnnnnnnnaagcttggcgtggatccgatatcaactagatcttgagacaaatggcagtattcatccacaattttaaaagaaaaggggggattggggggtacagtgcaggggaaagaatagtagacataatagcaacagacatacaaactaaag

SEQ ID NO: 10101 - DNA, 301 bp, Artificial Sequence
  Ube2g2.1_Rb1.4
  crRNA array
  misc_feature (148)..(157): n is a, c, g, or t
cttggctttatatatcttgtggaaaggacgaaacaccgtaatttctactaagtgtagatgtgtgggtctcctgggggcctaatttctactaagtgtagattgtagctcagtaaaagtgaataatttctactaagtgtagatttttttnnnnnnnnnnaagcttggcgtggatccgatatcaactagatcttgagacaaatggcagtattcatccacaattttaaaagaaaaggggggattggggggtacagtgcaggggaaagaatagtagacataatagcaacagacatacaaactaaag

SEQ ID NO: 10102 - DNA, 301 bp, Artificial Sequence
  Ube2g2.2_Rb1.1
  crRNA array
  misc_feature (148)..(157): n is a, c, g, or t
cttggctttatatatcttgtggaaaggacgaaacaccgtaatttctactaagtgtagatgcagcgcagcagctgtcatttaatttctactaagtgtagattctgacatgatcgggtaccttaatttctactaagtgtagatttttttnnnnnnnnnnaagcttggcgtggatccgatatcaactagatcttgagacaaatggcagtattcatccacaattttaaaagaaaaggggggattggggggtacagtgcaggggaaagaatagtagacataatagcaacagacatacaaactaaag

SEQ ID NO: 10103 - DNA, 301 bp, Artificial Sequence
  Ube2g2.2_Rb1.2
  crRNA array
  misc_feature (148)..(157): n is a, c, g, or t
cttggctttatatatcttgtggaaaggacgaaacaccgtaatttctactaagtgtagatgcagcgcagcagctgtcatttaatttctactaagtgtagatgtctctgcatgaaaacggagtaatttctactaagtgtagatttttttnnnnnnnnnnaagcttggcgtggatccgatatcaactagatcttgagacaaatggcagtattcatccacaattttaaaagaaaaggggggattggggggtacagtgcaggggaaagaatagtagacataatagcaacagacatacaaactaaag

SEQ ID NO: 10104 - DNA, 301 bp, Artificial Sequence
  Ube2g2.2_Rb1.3
  crRNA array
  misc_feature (148)..(157): n is a, c, g, or t
cttggctttatatatcttgtggaaaggacgaaacaccgtaatttctactaagtgtagatgcagcgcagcagctgtcatttaatttctactaagtgtagatagccaatctggtctaataactaatttctactaagtgtagatttttttnnnnnnnnnnaagcttggcgtggatccgatatcaactagatcttgagacaaatggcagtattcatccacaattttaaaagaaaaggggggattggggggtacagtgcaggggaaagaatagtagacataatagcaacagacatacaaactaaag

SEQ ID NO: 10105 - DNA, 301 bp, Artificial Sequence
  Ube2g2.2_Rb1.4
  crRNA array
  misc_feature (148)..(157): n is a, c, g, or t
cttggctttatatatcttgtggaaaggacgaaacaccgtaatttctactaagtgtagatgcagcgcagcagctgtcatttaatttctactaagtgtagattgtagctcagtaaaagtgaataatttctactaagtgtagatttttttnnnnnnnnnnaagcttggcgtggatccgatatcaactagatcttgagacaaatggcagtattcatccacaattttaaaagaaaaggggggattggggggtacagtgcaggggaaagaatagtagacataatagcaacagacatacaaactaaag

SEQ ID NO: 10106 - DNA, 301 bp, Artificial Sequence
  Ube2g2.3_Rb1.1
  crRNA array
  misc_feature (148)..(157): n is a, c, g, or t
cttggctttatatatcttgtggaaaggacgaaacaccgtaatttctactaagtgtagataaacgcaacagagtctggtgtaatttctactaagtgtagattctgacatgatcgggtaccttaatttctactaagtgtagatttttttnnnnnnnnnnaagcttggcgtggatccgatatcaactagatcttgagacaaatggcagtattcatccacaattttaaaagaaaaggggggattggggggtacagtgcaggggaaagaatagtagacataatagcaacagacatacaaactaaag

SEQ ID NO: 10107 - DNA, 301 bp, Artificial Sequence
  Ube2g2.3_Rb1.2
  crRNA array
  misc_feature (148)..(157): n is a, c, g, or t
cttggctttatatatcttgtggaaaggacgaaacaccgtaatttctactaagtgtagataaacgcaacagagtctggtgtaatttctactaagtgtagatgtctctgcatgaaaacggagtaatttctactaagtgtagatttttttnnnnnnnnnnaagcttggcgtggatccgatatcaactagatcttgagacaaatggcagtattcatccacaattttaaaagaaaaggggggattggggggtacagtgcaggggaaagaatagtagacataatagcaacagacatacaaactaaag

SEQ ID NO: 10108 - DNA, 301 bp, Artificial Sequence
  Ube2g2.3_Rb1.3
  crRNA array
  misc_feature (148)..(157): n is a, c, g, or t
cttggctttatatatcttgtggaaaggacgaaacaccgtaatttctactaagtgtagataaacgcaacagagtctggtgtaatttctactaagtgtagatagccaatctggtctaataactaatttctactaagtgtagatttttttnnnnnnnnnnaagcttggcgtggatccgatatcaactagatcttgagacaaatggcagtattcatccacaattttaaaagaaaaggggggattggggggtacagtgcaggggaaagaatagtagacataatagcaacagacatacaaactaaag

SEQ ID NO: 10109 - DNA, 301 bp, Artificial Sequence
  Ube2g2.3_Rb1.4
  crRNA array
  misc_feature (148)..(157): n is a, c, g, or t
cttggctttatatatcttgtggaaaggacgaaacaccgtaatttctactaagtgtagataaacgcaacagagtctggtgtaatttctactaagtgtagattgtagctcagtaaaagtgaataatttctactaagtgtagatttttttnnnnnnnnnnaagcttggcgtggatccgatatcaactagatcttgagacaaatggcagtattcatccacaattttaaaagaaaaggggggattggggggtacagtgcaggggaaagaatagtagacataatagcaacagacatacaaactaaag

SEQ ID NO: 10110 - DNA, 301 bp, Artificial Sequence
  Ube2g2.4_Rb1.1
  crRNA array
  misc_feature (148)..(157): n is a, c, g, or t
cttggctttatatatcttgtggaaaggacgaaacaccgtaatttctactaagtgtagatgaaaaggccaagcatccacctaatttctactaagtgtagattctgacatgatcgggtaccttaatttctactaagtgtagatttttttnnnnnnnnnnaagcttggcgtggatccgatatcaactagatcttgagacaaatggcagtattcatccacaattttaaaagaaaaggggggattggggggtacagtgcaggggaaagaatagtagacataatagcaacagacatacaaactaaag

SEQ ID NO: 10111 - DNA, 301 bp, Artificial Sequence
  Ube2g2.4_Rb1.2
  crRNA array
  misc_feature (148)..(157): n is a, c, g, or t
cttggctttatatatcttgtggaaaggacgaaacaccgtaatttctactaagtgtagatgaaaaggccaagcatccacctaatttctactaagtgtagatgtctctgcatgaaaacggagtaatttctactaagtgtagatttttttnnnnnnnnnnaagcttggcgtggatccgatatcaactagatcttgagacaaatggcagtattcatccacaattttaaaagaaaaggggggattggggggtacagtgcaggggaaagaatagtagacataatagcaacagacatacaaactaaag

SEQ ID NO: 10112 - DNA, 301 bp, Artificial Sequence
  Ube2g2.4_Rb1.3
  crRNA array
  misc_feature (148)..(157): n is a, c, g, or t
cttggctttatatatcttgtggaaaggacgaaacaccgtaatttctactaagtgtagatgaaaaggccaagcatccacctaatttctactaagtgtagatagccaatctggtctaataactaatttctactaagtgtagatttttttnnnnnnnnnnaagcttggcgtggatccgatatcaactagatcttgagacaaatggcagtattcatccacaattttaaaagaaaaggggggattggggggtacagtgcaggggaaagaatagtagacataatagcaacagacatacaaactaaag

SEQ ID NO: 10113 - DNA, 301 bp, Artificial Sequence
  Ube2g2.4_Rb1.4
  crRNA array
  misc_feature (148)..(157): n is a, c, g, or t
cttggctttatatatcttgtggaaaggacgaaacaccgtaatttctactaagtgtagatgaaaaggccaagcatccacctaatttctactaagtgtagattgtagctcagtaaaagtgaataatttctactaagtgtagatttttttnnnnnnnnnnaagcttggcgtggatccgatatcaactagatcttgagacaaatggcagtattcatccacaattttaaaagaaaaggggggattggggggtacagtgcaggggaaagaatagtagacataatagcaacagacatacaaactaaag

SEQ ID NO: 10114 - DNA, 301 bp, Artificial Sequence
  Ube2g2.1_Kmt2c.1
  crRNA array
  misc_feature (148)..(157): n is a, c, g, or t
cttggctttatatatcttgtggaaaggacgaaacaccgtaatttctactaagtgtagatgtgtgggtctcctgggggcctaatttctactaagtgtagatactcgacctccacctccctataatttctactaagtgtagatttttttnnnnnnnnnnaagcttggcgtggatccgatatcaactagatcttgagacaaatggcagtattcatccacaattttaaaagaaaaggggggattggggggtacagtgcaggggaaagaatagtagacataatagcaacagacatacaaactaaag

SEQ ID NO: 10115 - DNA, 301 bp, Artificial Sequence
  Ube2g2.1_Kmt2c.2
  crRNA array
  misc_feature (148)..(157): n is a, c, g, or t
cttggctttatatatcttgtggaaaggacgaaacaccgtaatttctactaagtgtagatgtgtgggtctcctgggggcctaatttctactaagtgtagatcccaaagatcagcgtggacctaatttctactaagtgtagatttttttnnnnnnnnnnaagcttggcgtggatccgatatcaactagatcttgagacaaatggcagtattcatccacaattttaaaagaaaaggggggattggggggtacagtgcaggggaaagaatagtagacataatagcaacagacatacaaactaaag

SEQ ID NO: 10116 - DNA, 301 bp, Artificial Sequence
  Ube2g2.1_Kmt2c.3
  crRNA array
  misc_feature (148)..(157): n is a, c, g, or t
cttggctttatatatcttgtggaaaggacgaaacaccgtaatttctactaagtgtagatgtgtgggtctcctgggggcctaatttctactaagtgtagataaaagatccgaatcgatgcgtaatttctactaagtgtagatttttttnnnnnnnnnnaagcttggcgtggatccgatatcaactagatcttgagacaaatggcagtattcatccacaattttaaaagaaaaggggggattggggggtacagtgcaggggaaagaatagtagacataatagcaacagacatacaaactaaag

SEQ ID NO: 10117 - DNA, 301 bp, Artificial Sequence
  Ube2g2.1_Kmt2c.4
  crRNA array
  misc_feature (148)..(157): n is a, c, g, or t
cttggctttatatatcttgtggaaaggacgaaacaccgtaatttctactaagtgtagatgtgtgggtctcctgggggcctaatttctactaagtgtagatctgaggcacatggaagcgattaatttctactaagtgtagatttttttnnnnnnnnnnaagcttggcgtggatccgatatcaactagatcttgagacaaatggcagtattcatccacaattttaaaagaaaaggggggattggggggtacagtgcaggggaaagaatagtagacataatagcaacagacatacaaactaaag

SEQ ID NO: 10118 - DNA, 301 bp, Artificial Sequence
  Ube2g2.2_Kmt2c.1
  crRNA array
  misc_feature (148)..(157): n is a, c, g, or t
cttggctttatatatcttgtggaaaggacgaaacaccgtaatttctactaagtgtagatgcagcgcagcagctgtcatttaatttctactaagtgtagatactcgacctccacctccctataatttctactaagtgtagatttttttnnnnnnnnnnaagcttggcgtggatccgatatcaactagatcttgagacaaatggcagtattcatccacaattttaaaagaaaaggggggattggggggtacagtgcaggggaaagaatagtagacataatagcaacagacatacaaactaaag

SEQ ID NO: 10119 - DNA, 301 bp, Artificial Sequence
  Ube2g2.2_Kmt2c.2
  crRNA array
  misc_feature (148)..(157): n is a, c, g, or t
cttggctttatatatcttgtggaaaggacgaaacaccgtaatttctactaagtgtagatgcagcgcagcagctgtcatttaatttctactaagtgtagatcccaaagatcagcgtggacctaatttctactaagtgtagatttttttnnnnnnnnnnaagcttggcgtggatccgatatcaactagatcttgagacaaatggcagtattcatccacaattttaaaagaaaaggggggattggggggtacagtgcaggggaaagaatagtagacataatagcaacagacatacaaactaaag

SEQ ID NO: 10120 - DNA, 301 bp, Artificial Sequence
  Ube2g2.2_Kmt2c.3
  crRNA array
  misc_feature (148)..(157): n is a, c, g, or t
cttggctttatatatcttgtggaaaggacgaaacaccgtaatttctactaagtgtagatgcagcgcagcagctgtcatttaatttctactaagtgtagataaaagatccgaatcgatgcgtaatttctactaagtgtagatttttttnnnnnnnnnnaagcttggcgtggatccgatatcaactagatcttgagacaaatggcagtattcatccacaattttaaaagaaaaggggggattggggggtacagtgcaggggaaagaatagtagacataatagcaacagacatacaaactaaag

SEQ ID NO: 10121 - DNA, 301 bp, Artificial Sequence
  Ube2g2.2_Kmt2c.4
  crRNA array
  misc_feature (148)..(157): n is a, c, g, or t
cttggctttatatatcttgtggaaaggacgaaacaccgtaatttctactaagtgtagatgcagcgcagcagctgtcatttaatttctactaagtgtagatctgaggcacatggaagcgattaatttctactaagtgtagatttttttnnnnnnnnnnaagcttggcgtggatccgatatcaactagatcttgagacaaatggcagtattcatccacaattttaaaagaaaaggggggattggggggtacagtgcaggggaaagaatagtagacataatagcaacagacatacaaactaaag

SEQ ID NO: 10122 - DNA, 301 bp, Artificial Sequence
  Ube2g2.3_Kmt2c.1
  crRNA array
  misc_feature (148)..(157): n is a, c, g, or t
cttggctttatatatcttgtggaaaggacgaaacaccgtaatttctactaagtgtagataaacgcaacagagtctggtgtaatttctactaagtgtagatactcgacctccacctccctataatttctactaagtgtagatttttttnnnnnnnnnnaagcttggcgtggatccgatatcaactagatcttgagacaaatggcagtattcatccacaattttaaaagaaaaggggggattggggggtacagtgcaggggaaagaatagtagacataatagcaacagacatacaaactaaag

SEQ ID NO: 10123 - DNA, 301 bp, Artificial Sequence
  Ube2g2.3_Kmt2c.2
  crRNA array
  misc_feature (148)..(157): n is a, c, g, or t
cttggctttatatatcttgtggaaaggacgaaacaccgtaatttctactaagtgtagataaacgcaacagagtctggtgtaatttctactaagtgtagatcccaaagatcagcgtggacctaatttctactaagtgtagatttttttnnnnnnnnnnaagcttggcgtggatccgatatcaactagatcttgagacaaatggcagtattcatccacaattttaaaagaaaaggggggattggggggtacagtgcaggggaaagaatagtagacataatagcaacagacatacaaactaaag

SEQ ID NO: 10124 - DNA, 301 bp, Artificial Sequence
  Ube2g2.3_Kmt2c.3
  crRNA array
  misc_feature (148)..(157): n is a, c, g, or t
cttggctttatatatcttgtggaaaggacgaaacaccgtaatttctactaagtgtagataaacgcaacagagtctggtgtaatttctactaagtgtagataaaagatccgaatcgatgcgtaatttctactaagtgtagatttttttnnnnnnnnnnaagcttggcgtggatccgatatcaactagatcttgagacaaatggcagtattcatccacaattttaaaagaaaaggggggattggggggtacagtgcaggggaaagaatagtagacataatagcaacagacatacaaactaaag

SEQ ID NO: 10125 - DNA, 301 bp, Artificial Sequence
  Ube2g2.3_Kmt2c.4
  crRNA array
  misc_feature (148)..(157): n is a, c, g, or t
cttggctttatatatcttgtggaaaggacgaaacaccgtaatttctactaagtgtagataaacgcaacagagtctggtgtaatttctactaagtgtagatctgaggcacatggaagcgattaatttctactaagtgtagatttttttnnnnnnnnnnaagcttggcgtggatccgatatcaactagatcttgagacaaatggcagtattcatccacaattttaaaagaaaaggggggattggggggtacagtgcaggggaaagaatagtagacataatagcaacagacatacaaactaaag

SEQ ID NO: 10126 - DNA, 301 bp, Artificial Sequence
  Ube2g2.4_Kmt2c.1
  crRNA array
  misc_feature (148)..(157): n is a, c, g, or t
cttggctttatatatcttgtggaaaggacgaaacaccgtaatttctactaagtgtagatgaaaaggccaagcatccacctaatttctactaagtgtagatactcgacctccacctccctataatttctactaagtgtagatttttttnnnnnnnnnnaagcttggcgtggatccgatatcaactagatcttgagacaaatggcagtattcatccacaattttaaaagaaaaggggggattggggggtacagtgcaggggaaagaatagtagacataatagcaacagacatacaaactaaag

SEQ ID NO: 10127 - DNA, 301 bp, Artificial Sequence
  Ube2g2.4_Kmt2c.2
  crRNA array
  misc_feature (148)..(157): n is a, c, g, or t
cttggctttatatatcttgtggaaaggacgaaacaccgtaatttctactaagtgtagatgaaaaggccaagcatccacctaatttctactaagtgtagatcccaaagatcagcgtggacctaatttctactaagtgtagatttttttnnnnnnnnnnaagcttggcgtggatccgatatcaactagatcttgagacaaatggcagtattcatccacaattttaaaagaaaaggggggattggggggtacagtgcaggggaaagaatagtagacataatagcaacagacatacaaactaaag

SEQ ID NO: 10128 - DNA, 301 bp, Artificial Sequence
  Ube2g2.4_Kmt2c.3
  crRNA array
  misc_feature (148)..(157): n is a, c, g, or t
cttggctttatatatcttgtggaaaggacgaaacaccgtaatttctactaagtgtagatgaaaaggccaagcatccacctaatttctactaagtgtagataaaagatccgaatcgatgcgtaatttctactaagtgtagatttttttnnnnnnnnnnaagcttggcgtggatccgatatcaactagatcttgagacaaatggcagtattcatccacaattttaaaagaaaaggggggattggggggtacagtgcaggggaaagaatagtagacataatagcaacagacatacaaactaaag

SEQ ID NO: 10129 - DNA, 301 bp, Artificial Sequence
  Ube2g2.4_Kmt2c.4
  crRNA array
  misc_feature (148)..(157): n is a, c, g, or t
cttggctttatatatcttgtggaaaggacgaaacaccgtaatttctactaagtgtagatgaaaaggccaagcatccacctaatttctactaagtgtagatctgaggcacatggaagcgattaatttctactaagtgtagatttttttnnnnnnnnnnaagcttggcgtggatccgatatcaactagatcttgagacaaatggcagtattcatccacaattttaaaagaaaaggggggattggggggtacagtgcaggggaaagaatagtagacataatagcaacagacatacaaactaaag

SEQ ID NO: 10130 - DNA, 301 bp, Artificial Sequence
  Ube2g2.1_Pten.1
  crRNA array
  misc_feature (148)..(157): n is a, c, g, or t
cttggctttatatatcttgtggaaaggacgaaacaccgtaatttctactaagtgtagatgtgtgggtctcctgggggcctaatttctactaagtgtagataagcgtggtgcgtgacgcactaatttctactaagtgtagatttttttnnnnnnnnnnaagcttggcgtggatccgatatcaactagatcttgagacaaatggcagtattcatccacaattttaaaagaaaaggggggattggggggtacagtgcaggggaaagaatagtagacataatagcaacagacatacaaactaaag

SEQ ID NO: 10131 - DNA, 301 bp, Artificial Sequence
  Ube2g2.1_Pten.2
  crRNA array
  misc_feature (148)..(157): n is a, c, g, or t
cttggctttatatatcttgtggaaaggacgaaacaccgtaatttctactaagtgtagatgtgtgggtctcctgggggcctaatttctactaagtgtagattgtcaccagctgaagtggcttaatttctactaagtgtagatttttttnnnnnnnnnnaagcttggcgtggatccgatatcaactagatcttgagacaaatggcagtattcatccacaattttaaaagaaaaggggggattggggggtacagtgcaggggaaagaatagtagacataatagcaacagacatacaaactaaag

SEQ ID NO: 10132 - DNA, 301 bp, Artificial Sequence
  Ube2g2.1_Pten.3
  crRNA array
  misc_feature (148)..(157): n is a, c, g, or t
cttggctttatatatcttgtggaaaggacgaaacaccgtaatttctactaagtgtagatgtgtgggtctcctgggggcctaatttctactaagtgtagatggagtcaagaggctgatttttaatttctactaagtgtagatttttttnnnnnnnnnnaagcttggcgtggatccgatatcaactagatcttgagacaaatggcagtattcatccacaattttaaaagaaaaggggggattggggggtacagtgcaggggaaagaatagtagacataatagcaacagacatacaaactaaag

SEQ ID NO: 10133 - DNA, 301 bp, Artificial Sequence
  Ube2g2.1_Pten.4
  crRNA array
  misc_feature (148)..(157): n is a, c, g, or t
cttggctttatatatcttgtggaaaggacgaaacaccgtaatttctactaagtgtagatgtgtgggtctcctgggggcctaatttctactaagtgtagatctgtaagctaaaccactacataatttctactaagtgtagatttttttnnnnnnnnnnaagcttggcgtggatccgatatcaactagatcttgagacaaatggcagtattcatccacaattttaaaagaaaaggggggattggggggtacagtgcaggggaaagaatagtagacataatagcaacagacatacaaactaaag

SEQ ID NO: 10134 - DNA, 301 bp, Artificial Sequence
  Ube2g2.2_Pten.1
  crRNA array
  misc_feature (148)..(157): n is a, c, g, or t
cttggctttatatatcttgtggaaaggacgaaacaccgtaatttctactaagtgtagatgcagcgcagcagctgtcatttaatttctactaagtgtagataagcgtggtgcgtgacgcactaatttctactaagtgtagatttttttnnnnnnnnnnaagcttggcgtggatccgatatcaactagatcttgagacaaatggcagtattcatccacaattttaaaagaaaaggggggattggggggtacagtgcaggggaaagaatagtagacataatagcaacagacatacaaactaaag

SEQ ID NO: 10135 - DNA, 301 bp, Artificial Sequence
  Ube2g2.2_Pten.2
  crRNA array
  misc_feature (148)..(157): n is a, c, g, or t
cttggctttatatatcttgtggaaaggacgaaacaccgtaatttctactaagtgtagatgcagcgcagcagctgtcatttaatttctactaagtgtagattgtcaccagctgaagtggcttaatttctactaagtgtagatttttttnnnnnnnnnnaagcttggcgtggatccgatatcaactagatcttgagacaaatggcagtattcatccacaattttaaaagaaaaggggggattggggggtacagtgcaggggaaagaatagtagacataatagcaacagacatacaaactaaag

SEQ ID NO: 10136 - DNA, 301 bp, Artificial Sequence
  Ube2g2.2_Pten.3
  crRNA array
  misc_feature (148)..(157): n is a, c, g, or t
cttggctttatatatcttgtggaaaggacgaaacaccgtaatttctactaagtgtagatgcagcgcagcagctgtcatttaatttctactaagtgtagatggagtcaagaggctgatttttaatttctactaagtgtagatttttttnnnnnnnnnnaagcttggcgtggatccgatatcaactagatcttgagacaaatggcagtattcatccacaattttaaaagaaaaggggggattggggggtacagtgcaggggaaagaatagtagacataatagcaacagacatacaaactaaag

SEQ ID NO: 10137 - DNA, 301 bp, Artificial Sequence
  Ube2g2.2_Pten.4
  crRNA array
  misc_feature (148)..(157): n is a, c, g, or t
cttggctttatatatcttgtggaaaggacgaaacaccgtaatttctactaagtgtagatgcagcgcagcagctgtcatttaatttctactaagtgtagatctgtaagctaaaccactacataatttctactaagtgtagatttttttnnnnnnnnnnaagcttggcgtggatccgatatcaactagatcttgagacaaatggcagtattcatccacaattttaaaagaaaaggggggattggggggtacagtgcaggggaaagaatagtagacataatagcaacagacatacaaactaaag

SEQ ID NO: 10138 - DNA, 301 bp, Artificial Sequence
  Ube2g2.3_Pten.1
  crRNA array
  misc_feature (148)..(157): n is a, c, g, or t
cttggctttatatatcttgtggaaaggacgaaacaccgtaatttctactaagtgtagataaacgcaacagagtctggtgtaatttctactaagtgtagataagcgtggtgcgtgacgcactaatttctactaagtgtagatttttttnnnnnnnnnnaagcttggcgtggatccgatatcaactagatcttgagacaaatggcagtattcatccacaattttaaaagaaaaggggggattggggggtacagtgcaggggaaagaatagtagacataatagcaacagacatacaaactaaag

SEQ ID NO: 10139 - DNA, 301 bp, Artificial Sequence
  Ube2g2.3_Pten.2
  crRNA array
  misc_feature (148)..(157): n is a, c, g, or t
cttggctttatatatcttgtggaaaggacgaaacaccgtaatttctactaagtgtagataaacgcaacagagtctggtgtaatttctactaagtgtagattgtcaccagctgaagtggcttaatttctactaagtgtagatttttttnnnnnnnnnnaagcttggcgtggatccgatatcaactagatcttgagacaaatggcagtattcatccacaattttaaaagaaaaggggggattggggggtacagtgcaggggaaagaatagtagacataatagcaacagacatacaaactaaag

SEQ ID NO: 10140 - DNA, 301 bp, Artificial Sequence
  Ube2g2.3_Pten.3
  crRNA array
  misc_feature (148)..(157): n is a, c, g, or t
cttggctttatatatcttgtggaaaggacgaaacaccgtaatttctactaagtgtagataaacgcaacagagtctggtgtaatttctactaagtgtagatggagtcaagaggctgatttttaatttctactaagtgtagatttttttnnnnnnnnnnaagcttggcgtggatccgatatcaactagatcttgagacaaatggcagtattcatccacaattttaaaagaaaaggggggattggggggtacagtgcaggggaaagaatagtagacataatagcaacagacatacaaactaaag

SEQ ID NO: 10141 - DNA, 301 bp, Artificial Sequence
  Ube2g2.3_Pten.4
  crRNA array
  misc_feature (148)..(157): n is a, c, g, or t
cttggctttatatatcttgtggaaaggacgaaacaccgtaatttctactaagtgtagataaacgcaacagagtctggtgtaatttctactaagtgtagatctgtaagctaaaccactacataatttctactaagtgtagatttttttnnnnnnnnnnaagcttggcgtggatccgatatcaactagatcttgagacaaatggcagtattcatccacaattttaaaagaaaaggggggattggggggtacagtgcaggggaaagaatagtagacataatagcaacagacatacaaactaaag

SEQ ID NO: 10142 - DNA, 301 bp, Artificial Sequence
  Ube2g2.4_Pten.1
  crRNA array
  misc_feature (148)..(157): n is a, c, g, or t
cttggctttatatatcttgtggaaaggacgaaacaccgtaatttctactaagtgtagatgaaaaggccaagcatccacctaatttctactaagtgtagataagcgtggtgcgtgacgcactaatttctactaagtgtagatttttttnnnnnnnnnnaagcttggcgtggatccgatatcaactagatcttgagacaaatggcagtattcatccacaattttaaaagaaaaggggggattggggggtacagtgcaggggaaagaatagtagacataatagcaacagacatacaaactaaag

SEQ ID NO: 10143 - DNA, 301 bp, Artificial Sequence
  Ube2g2.4_Pten.2
  crRNA array
  misc_feature (148)..(157): n is a, c, g, or t
cttggctttatatatcttgtggaaaggacgaaacaccgtaatttctactaagtgtagatgaaaaggccaagcatccacctaatttctactaagtgtagattgtcaccagctgaagtggcttaatttctactaagtgtagatttttttnnnnnnnnnnaagcttggcgtggatccgatatcaactagatcttgagacaaatggcagtattcatccacaattttaaaagaaaaggggggattggggggtacagtgcaggggaaagaatagtagacataatagcaacagacatacaaactaaag

SEQ ID NO: 10144 - DNA, 301 bp, Artificial Sequence
  Ube2g2.4_Pten.3
  crRNA array
  misc_feature (148)..(157): n is a, c, g, or t
cttggctttatatatcttgtggaaaggacgaaacaccgtaatttctactaagtgtagatgaaaaggccaagcatccacctaatttctactaagtgtagatggagtcaagaggctgatttttaatttctactaagtgtagatttttttnnnnnnnnnnaagcttggcgtggatccgatatcaactagatcttgagacaaatggcagtattcatccacaattttaaaagaaaaggggggattggggggtacagtgcaggggaaagaatagtagacataatagcaacagacatacaaactaaag

SEQ ID NO: 10145 - DNA, 301 bp, Artificial Sequence
  Ube2g2.4_Pten.4
  crRNA array
  misc_feature (148)..(157): n is a, c, g, or t
cttggctttatatatcttgtggaaaggacgaaacaccgtaatttctactaagtgtagatgaaaaggccaagcatccacctaatttctactaagtgtagatctgtaagctaaaccactacataatttctactaagtgtagatttttttnnnnnnnnnnaagcttggcgtggatccgatatcaactagatcttgagacaaatggcagtattcatccacaattttaaaagaaaaggggggattggggggtacagtgcaggggaaagaatagtagacataatagcaacagacatacaaactaaag

SEQ ID NO: 10146 - DNA, 301 bp, Artificial Sequence
  Ube2g2.1_Atm.1
  crRNA array
  misc_feature (148)..(157): n is a, c, g, or t
cttggctttatatatcttgtggaaaggacgaaacaccgtaatttctactaagtgtagatgtgtgggtctcctgggggcctaatttctactaagtgtagatgagaaagtctccgaatcgtttaatttctactaagtgtagatttttttnnnnnnnnnnaagcttggcgtggatccgatatcaactagatcttgagacaaatggcagtattcatccacaattttaaaagaaaaggggggattggggggtacagtgcaggggaaagaatagtagacataatagcaacagacatacaaactaaag

SEQ ID NO: 10147 - DNA, 301 bp, Artificial Sequence
  Ube2g2.1_Atm.2
  crRNA array
  misc_feature (148)..(157): n is a, c, g, or t
cttggctttatatatcttgtggaaaggacgaaacaccgtaatttctactaagtgtagatgtgtgggtctcctgggggcctaatttctactaagtgtagatcctacgagggcacgagagactaatttctactaagtgtagatttttttnnnnnnnnnnaagcttggcgtggatccgatatcaactagatcttgagacaaatggcagtattcatccacaattttaaaagaaaaggggggattggggggtacagtgcaggggaaagaatagtagacataatagcaacagacatacaaactaaag

SEQ ID NO: 10148 - DNA, 301 bp, Artificial Sequence
  Ube2g2.1_Atm.3
  crRNA array
  misc_feature (148)..(157): n is a, c, g, or t
cttggctttatatatcttgtggaaaggacgaaacaccgtaatttctactaagtgtagatgtgtgggtctcctgggggcctaatttctactaagtgtagattgaaagtctccgatatgccataatttctactaagtgtagatttttttnnnnnnnnnnaagcttggcgtggatccgatatcaactagatcttgagacaaatggcagtattcatccacaattttaaaagaaaaggggggattggggggtacagtgcaggggaaagaatagtagacataatagcaacagacatacaaactaaag

SEQ ID NO: 10149 - DNA, 301 bp, Artificial Sequence
  Ube2g2.1_Atm.4
  crRNA array
  misc_feature (148)..(157): n is a, c, g, or t
cttggctttatatatcttgtggaaaggacgaaacaccgtaatttctactaagtgtagatgtgtgggtctcctgggggcctaatttctactaagtgtagatggtggtgatcagtcaagtagtaatttctactaagtgtagatttttttnnnnnnnnnnaagcttggcgtggatccgatatcaactagatcttgagacaaatggcagtattcatccacaattttaaaagaaaaggggggattggggggtacagtgcaggggaaagaatagtagacataatagcaacagacatacaaactaaag

SEQ ID NO: 10150 - DNA, 301 bp, Artificial Sequence
  Ube2g2.2_Atm.1
  crRNA array
  misc_feature (148)..(157): n is a, c, g, or t
cttggctttatatatcttgtggaaaggacgaaacaccgtaatttctactaagtgtagatgcagcgcagcagctgtcatttaatttctactaagtgtagatgagaaagtctccgaatcgtttaatttctactaagtgtagatttttttnnnnnnnnnnaagcttggcgtggatccgatatcaactagatcttgagacaaatggcagtattcatccacaattttaaaagaaaaggggggattggggggtacagtgcaggggaaagaatagtagacataatagcaacagacatacaaactaaag

SEQ ID NO: 10151 - DNA, 301 bp, Artificial Sequence
  Ube2g2.2_Atm.2
  crRNA array
  misc_feature (148)..(157): n is a, c, g, or t
cttggctttatatatcttgtggaaaggacgaaacaccgtaatttctactaagtgtagatgcagcgcagcagctgtcatttaatttctactaagtgtagatcctacgagggcacgagagactaatttctactaagtgtagatttttttnnnnnnnnnnaagcttggcgtggatccgatatcaactagatcttgagacaaatggcagtattcatccacaattttaaaagaaaaggggggattggggggtacagtgcaggggaaagaatagtagacataatagcaacagacatacaaactaaag

SEQ ID NO: 10152 - DNA, 301 bp, Artificial Sequence
  Ube2g2.2_Atm.3
  crRNA array
  misc_feature (148)..(157): n is a, c, g, or t
cttggctttatatatcttgtggaaaggacgaaacaccgtaatttctactaagtgtagatgcagcgcagcagctgtcatttaatttctactaagtgtagattgaaagtctccgatatgccataatttctactaagtgtagatttttttnnnnnnnnnnaagcttggcgtggatccgatatcaactagatcttgagacaaatggcagtattcatccacaattttaaaagaaaaggggggattggggggtacagtgcaggggaaagaatagtagacataatagcaacagacatacaaactaaag

SEQ ID NO: 10153 - DNA, 301 bp, Artificial Sequence
  Ube2g2.2_Atm.4
  crRNA array
  misc_feature (148)..(157): n is a, c, g, or t
cttggctttatatatcttgtggaaaggacgaaacaccgtaatttctactaagtgtagatgcagcgcagcagctgtcatttaatttctactaagtgtagatggtggtgatcagtcaagtagtaatttctactaagtgtagatttttttnnnnnnnnnnaagcttggcgtggatccgatatcaactagatcttgagacaaatggcagtattcatccacaattttaaaagaaaaggggggattggggggtacagtgcaggggaaagaatagtagacataatagcaacagacatacaaactaaag

SEQ ID NO: 10154 - DNA, 301 bp, Artificial Sequence
  Ube2g2.3_Atm.1
  crRNA array
  misc_feature (148)..(157): n is a, c, g, or t
cttggctttatatatcttgtggaaaggacgaaacaccgtaatttctactaagtgtagataaacgcaacagagtctggtgtaatttctactaagtgtagatgagaaagtctccgaatcgtttaatttctactaagtgtagatttttttnnnnnnnnnnaagcttggcgtggatccgatatcaactagatcttgagacaaatggcagtattcatccacaattttaaaagaaaaggggggattggggggtacagtgcaggggaaagaatagtagacataatagcaacagacatacaaactaaag

SEQ ID NO: 10155 - DNA, 301 bp, Artificial Sequence
  Ube2g2.3_Atm.2
  crRNA array
  misc_feature (148)..(157): n is a, c, g, or t
cttggctttatatatcttgtggaaaggacgaaacaccgtaatttctactaagtgtagataaacgcaacagagtctggtgtaatttctactaagtgtagatcctacgagggcacgagagactaatttctactaagtgtagatttttttnnnnnnnnnnaagcttggcgtggatccgatatcaactagatcttgagacaaatggcagtattcatccacaattttaaaagaaaaggggggattggggggtacagtgcaggggaaagaatagtagacataatagcaacagacatacaaactaaag

SEQ ID NO: 10156 - DNA, 301 bp, Artificial Sequence
  Ube2g2.3_Atm.3
  crRNA array
  misc_feature (148)..(157): n is a, c, g, or t
cttggctttatatatcttgtggaaaggacgaaacaccgtaatttctactaagtgtagataaacgcaacagagtctggtgtaatttctactaagtgtagattgaaagtctccgatatgccataatttctactaagtgtagatttttttnnnnnnnnnnaagcttggcgtggatccgatatcaactagatcttgagacaaatggcagtattcatccacaattttaaaagaaaaggggggattggggggtacagtgcaggggaaagaatagtagacataatagcaacagacatacaaactaaag

SEQ ID NO: 10157 - DNA, 301 bp, Artificial Sequence
  Ube2g2.3_Atm.4
  crRNA array
  misc_feature (148)..(157): n is a, c, g, or t
cttggctttatatatcttgtggaaaggacgaaacaccgtaatttctactaagtgtagataaacgcaacagagtctggtgtaatttctactaagtgtagatggtggtgatcagtcaagtagtaatttctactaagtgtagatttttttnnnnnnnnnnaagcttggcgtggatccgatatcaactagatcttgagacaaatggcagtattcatccacaattttaaaagaaaaggggggattggggggtacagtgcaggggaaagaatagtagacataatagcaacagacatacaaactaaag

SEQ ID NO: 10158 - DNA, 301 bp, Artificial Sequence
  Ube2g2.4_Atm.1
  crRNA array
  misc_feature (148)..(157): n is a, c, g, or t
cttggctttatatatcttgtggaaaggacgaaacaccgtaatttctactaagtgtagatgaaaaggccaagcatccacctaatttctactaagtgtagatgagaaagtctccgaatcgtttaatttctactaagtgtagatttttttnnnnnnnnnnaagcttggcgtggatccgatatcaactagatcttgagacaaatggcagtattcatccacaattttaaaagaaaaggggggattggggggtacagtgcaggggaaagaatagtagacataatagcaacagacatacaaactaaag

SEQ ID NO: 10159 - DNA, 301 bp, Artificial Sequence
  Ube2g2.4_Atm.2
  crRNA array
  misc_feature (148)..(157): n is a, c, g, or t
cttggctttatatatcttgtggaaaggacgaaacaccgtaatttctactaagtgtagatgaaaaggccaagcatccacctaatttctactaagtgtagatcctacgagggcacgagagactaatttctactaagtgtagatttttttnnnnnnnnnnaagcttggcgtggatccgatatcaactagatcttgagacaaatggcagtattcatccacaattttaaaagaaaaggggggattggggggtacagtgcaggggaaagaatagtagacataatagcaacagacatacaaactaaag

SEQ ID NO: 10160 - DNA, 301 bp, Artificial Sequence
  Ube2g2.4_Atm.3
  crRNA array
  misc_feature (148)..(157): n is a, c, g, or t
cttggctttatatatcttgtggaaaggacgaaacaccgtaatttctactaagtgtagatgaaaaggccaagcatccacctaatttctactaagtgtagattgaaagtctccgatatgccataatttctactaagtgtagatttttttnnnnnnnnnnaagcttggcgtggatccgatatcaactagatcttgagacaaatggcagtattcatccacaattttaaaagaaaaggggggattggggggtacagtgcaggggaaagaatagtagacataatagcaacagacatacaaactaaag

SEQ ID NO: 10161 - DNA, 301 bp, Artificial Sequence
  Ube2g2.4_Atm.4
  crRNA array
  misc_feature (148)..(157): n is a, c, g, or t
cttggctttatatatcttgtggaaaggacgaaacaccgtaatttctactaagtgtagatgaaaaggccaagcatccacctaatttctactaagtgtagatggtggtgatcagtcaagtagtaatttctactaagtgtagatttttttnnnnnnnnnnaagcttggcgtggatccgatatcaactagatcttgagacaaatggcagtattcatccacaattttaaaagaaaaggggggattggggggtacagtgcaggggaaagaatagtagacataatagcaacagacatacaaactaaag

SEQ ID NO: 10162 - DNA, 301 bp, Artificial Sequence
  Trp53.1_Kmt2d.1
  crRNA array
  misc_feature (148)..(157): n is a, c, g, or t
cttggctttatatatcttgtggaaaggacgaaacaccgtaatttctactaagtgtagatccctgaactgcccccagggataatttctactaagtgtagatactccaggccacccaggtggtaatttctactaagtgtagatttttttnnnnnnnnnnaagcttggcgtggatccgatatcaactagatcttgagacaaatggcagtattcatccacaattttaaaagaaaaggggggattggggggtacagtgcaggggaaagaatagtagacataatagcaacagacatacaaactaaag

SEQ ID NO: 10163 - DNA, 301 bp, Artificial Sequence
  Trp53.1_Kmt2d.2
  crRNA array
  misc_feature (148)..(157): n is a, c, g, or t
cttggctttatatatcttgtggaaaggacgaaacaccgtaatttctactaagtgtagatccctgaactgcccccagggataatttctactaagtgtagatggggaccatagccaggagagtaatttctactaagtgtagatttttttnnnnnnnnnnaagcttggcgtggatccgatatcaactagatcttgagacaaatggcagtattcatccacaattttaaaagaaaaggggggattggggggtacagtgcaggggaaagaatagtagacataatagcaacagacatacaaactaaag

SEQ ID NO: 10164 - DNA, 301 bp, Artificial Sequence
  Trp53.1_Kmt2d.3
  crRNA array
  misc_feature (148)..(157): n is a, c, g, or t
cttggctttatatatcttgtggaaaggacgaaacaccgtaatttctactaagtgtagatccctgaactgcccccagggataatttctactaagtgtagataggaaggggtcaggcgtggataatttctactaagtgtagatttttttnnnnnnnnnnaagcttggcgtggatccgatatcaactagatcttgagacaaatggcagtattcatccacaattttaaaagaaaaggggggattggggggtacagtgcaggggaaagaatagtagacataatagcaacagacatacaaactaaag

SEQ ID NO: 10165 - DNA, 301 bp, Artificial Sequence
  Trp53.1_Kmt2d.4
  crRNA array
  misc_feature (148)..(157): n is a, c, g, or t
cttggctttatatatcttgtggaaaggacgaaacaccgtaatttctactaagtgtagatccctgaactgcccccagggataatttctactaagtgtagatcccagtcagcgaggaactcctaatttctactaagtgtagatttttttnnnnnnnnnnaagcttggcgtggatccgatatcaactagatcttgagacaaatggcagtattcatccacaattttaaaagaaaaggggggattggggggtacagtgcaggggaaagaatagtagacataatagcaacagacatacaaactaaag

SEQ ID NO: 10166 - DNA, 301 bp, Artificial Sequence
  Trp53.2_Kmt2d.1
  crRNA array
  misc_feature (148)..(157): n is a, c, g, or t
cttggctttatatatcttgtggaaaggacgaaacaccgtaatttctactaagtgtagatgccagggtgagcacgtgggataatttctactaagtgtagatactccaggccacccaggtggtaatttctactaagtgtagatttttttnnnnnnnnnnaagcttggcgtggatccgatatcaactagatcttgagacaaatggcagtattcatccacaattttaaaagaaaaggggggattggggggtacagtgcaggggaaagaatagtagacataatagcaacagacatacaaactaaag

SEQ ID NO: 10167 - DNA, 301 bp, Artificial Sequence
  Trp53.2_Kmt2d.2
  crRNA array
  misc_feature (148)..(157): n is a, c, g, or t
cttggctttatatatcttgtggaaaggacgaaacaccgtaatttctactaagtgtagatgccagggtgagcacgtgggataatttctactaagtgtagatggggaccatagccaggagagtaatttctactaagtgtagatttttttnnnnnnnnnnaagcttggcgtggatccgatatcaactagatcttgagacaaatggcagtattcatccacaattttaaaagaaaaggggggattggggggtacagtgcaggggaaagaatagtagacataatagcaacagacatacaaactaaag

SEQ ID NO: 10168 - DNA, 301 bp, Artificial Sequence
  Trp53.2_Kmt2d.3
  crRNA array
  misc_feature (148)..(157): n is a, c, g, or t
cttggctttatatatcttgtggaaaggacgaaacaccgtaatttctactaagtgtagatgccagggtgagcacgtgggataatttctactaagtgtagataggaaggggtcaggcgtggataatttctactaagtgtagatttttttnnnnnnnnnnaagcttggcgtggatccgatatcaactagatcttgagacaaatggcagtattcatccacaattttaaaagaaaaggggggattggggggtacagtgcaggggaaagaatagtagacataatagcaacagacatacaaactaaag

SEQ ID NO: 10169 - DNA, 301 bp, Artificial Sequence
  Trp53.2_Kmt2d.4
  crRNA array
  misc_feature (148)..(157): n is a, c, g, or t
cttggctttatatatcttgtggaaaggacgaaacaccgtaatttctactaagtgtagatgccagggtgagcacgtgggataatttctactaagtgtagatcccagtcagcgaggaactcctaatttctactaagtgtagatttttttnnnnnnnnnnaagcttggcgtggatccgatatcaactagatcttgagacaaatggcagtattcatccacaattttaaaagaaaaggggggattggggggtacagtgcaggggaaagaatagtagacataatagcaacagacatacaaactaaag

SEQ ID NO: 10170 - DNA, 301 bp, Artificial Sequence
  Trp53.3_Kmt2d.1
  crRNA array
  misc_feature (148)..(157): n is a, c, g, or t
cttggctttatatatcttgtggaaaggacgaaacaccgtaatttctactaagtgtagatccctcccacgtgctcacccttaatttctactaagtgtagatactccaggccacccaggtggtaatttctactaagtgtagatttttttnnnnnnnnnnaagcttggcgtggatccgatatcaactagatcttgagacaaatggcagtattcatccacaattttaaaagaaaaggggggattggggggtacagtgcaggggaaagaatagtagacataatagcaacagacatacaaactaaag

SEQ ID NO: 10171 - DNA, 301 bp, Artificial Sequence
  Trp53.3_Kmt2d.2
  crRNA array
  misc_feature (148)..(157): n is a, c, g, or t
cttggctttatatatcttgtggaaaggacgaaacaccgtaatttctactaagtgtagatccctcccacgtgctcacccttaatttctactaagtgtagatggggaccatagccaggagagtaatttctactaagtgtagatttttttnnnnnnnnnnaagcttggcgtggatccgatatcaactagatcttgagacaaatggcagtattcatccacaattttaaaagaaaaggggggattggggggtacagtgcaggggaaagaatagtagacataatagcaacagacatacaaactaaag

SEQ ID NO: 10172 - DNA, 301 bp, Artificial Sequence
  Trp53.3_Kmt2d.3
  crRNA array
  misc_feature (148)..(157): n is a, c, g, or t
cttggctttatatatcttgtggaaaggacgaaacaccgtaatttctactaagtgtagatccctcccacgtgctcacccttaatttctactaagtgtagataggaaggggtcaggcgtggataatttctactaagtgtagatttttttnnnnnnnnnnaagcttggcgtggatccgatatcaactagatcttgagacaaatggcagtattcatccacaattttaaaagaaaaggggggattggggggtacagtgcaggggaaagaatagtagacataatagcaacagacatacaaactaaag

SEQ ID NO: 10173 - DNA, 301 bp, Artificial Sequence
  Trp53.3_Kmt2d.4
  crRNA array
  misc_feature (148)..(157): n is a, c, g, or t
cttggctttatatatcttgtggaaaggacgaaacaccgtaatttctactaagtgtagatccctcccacgtgctcacccttaatttctactaagtgtagatcccagtcagcgaggaactcctaatttctactaagtgtagatttttttnnnnnnnnnnaagcttggcgtggatccgatatcaactagatcttgagacaaatggcagtattcatccacaattttaaaagaaaaggggggattggggggtacagtgcaggggaaagaatagtagacataatagcaacagacatacaaactaaag

SEQ ID NO: 10174 - DNA, 301 bp, Artificial Sequence
  Trp53.4_Kmt2d.1
  crRNA array
  misc_feature (148)..(157): n is a, c, g, or t
cttggctttatatatcttgtggaaaggacgaaacaccgtaatttctactaagtgtagattccaccccccaccctgtctctaatttctactaagtgtagatactccaggccacccaggtggtaatttctactaagtgtagatttttttnnnnnnnnnnaagcttggcgtggatccgatatcaactagatcttgagacaaatggcagtattcatccacaattttaaaagaaaaggggggattggggggtacagtgcaggggaaagaatagtagacataatagcaacagacatacaaactaaag

SEQ ID NO: 10175 - DNA, 301 bp, Artificial Sequence
  Trp53.4_Kmt2d.2
  crRNA array
  misc_feature (148)..(157): n is a, c, g, or t
cttggctttatatatcttgtggaaaggacgaaacaccgtaatttctactaagtgtagattccaccccccaccctgtctctaatttctactaagtgtagatggggaccatagccaggagagtaatttctactaagtgtagatttttttnnnnnnnnnnaagcttggcgtggatccgatatcaactagatcttgagacaaatggcagtattcatccacaattttaaaagaaaaggggggattggggggtacagtgcaggggaaagaatagtagacataatagcaacagacatacaaactaaag

SEQ ID NO: 10176 - DNA, 301 bp, Artificial Sequence
  Trp53.4_Kmt2d.3
  crRNA array
  misc_feature (148)..(157): n is a, c, g, or t
cttggctttatatatcttgtggaaaggacgaaacaccgtaatttctactaagtgtagattccaccccccaccctgtctctaatttctactaagtgtagataggaaggggtcaggcgtggataatttctactaagtgtagatttttttnnnnnnnnnnaagcttggcgtggatccgatatcaactagatcttgagacaaatggcagtattcatccacaattttaaaagaaaaggggggattggggggtacagtgcaggggaaagaatagtagacataatagcaacagacatacaaactaaag

SEQ ID NO: 10177 - DNA, 301 bp, Artificial Sequence
  Trp53.4_Kmt2d.4
  crRNA array
  misc_feature (148)..(157): n is a, c, g, or t
cttggctttatatatcttgtggaaaggacgaaacaccgtaatttctactaagtgtagattccaccccccaccctgtctctaatttctactaagtgtagatcccagtcagcgaggaactcctaatttctactaagtgtagatttttttnnnnnnnnnnaagcttggcgtggatccgatatcaactagatcttgagacaaatggcagtattcatccacaattttaaaagaaaaggggggattggggggtacagtgcaggggaaagaatagtagacataatagcaacagacatacaaactaaag

SEQ ID NO: 10178 - DNA, 301 bp, Artificial Sequence
  Trp53.1_Atrx.1
  crRNA array
  misc_feature (148)..(157): n is a, c, g, or t
cttggctttatatatcttgtggaaaggacgaaacaccgtaatttctactaagtgtagatccctgaactgcccccagggataatttctactaagtgtagatgccagtcgctcatatctctgtaatttctactaagtgtagatttttttnnnnnnnnnnaagcttggcgtggatccgatatcaactagatcttgagacaaatggcagtattcatccacaattttaaaagaaaaggggggattggggggtacagtgcaggggaaagaatagtagacataatagcaacagacatacaaactaaag

SEQ ID NO: 10179 - DNA, 301 bp, Artificial Sequence
  Trp53.1_Atrx.2
  crRNA array
  misc_feature (148)..(157): n is a, c, g, or t
cttggctttatatatcttgtggaaaggacgaaacaccgtaatttctactaagtgtagatccctgaactgcccccagggataatttctactaagtgtagatgcagcatgggggtatccctttaatttctactaagtgtagatttttttnnnnnnnnnnaagcttggcgtggatccgatatcaactagatcttgagacaaatggcagtattcatccacaattttaaaagaaaaggggggattggggggtacagtgcaggggaaagaatagtagacataatagcaacagacatacaaactaaag

SEQ ID NO: 10180 - DNA, 301 bp, Artificial Sequence
  Trp53.1_Atrx.3
  crRNA array
  misc_feature (148)..(157): n is a, c, g, or t
cttggctttatatatcttgtggaaaggacgaaacaccgtaatttctactaagtgtagatccctgaactgcccccagggataatttctactaagtgtagatggagccctgtccgcaatgagtaatttctactaagtgtagatttttttnnnnnnnnnnaagcttggcgtggatccgatatcaactagatcttgagacaaatggcagtattcatccacaattttaaaagaaaaggggggattggggggtacagtgcaggggaaagaatagtagacataatagcaacagacatacaaactaaag

SEQ ID NO: 10181 - DNA, 301 bp, Artificial Sequence
  Trp53.1_Atrx.4
  crRNA array
  misc_feature (148)..(157): n is a, c, g, or t
cttggctttatatatcttgtggaaaggacgaaacaccgtaatttctactaagtgtagatccctgaactgcccccagggataatttctactaagtgtagataaactgggctcctactaaattaatttctactaagtgtagatttttttnnnnnnnnnnaagcttggcgtggatccgatatcaactagatcttgagacaaatggcagtattcatccacaattttaaaagaaaaggggggattggggggtacagtgcaggggaaagaatagtagacataatagcaacagacatacaaactaaag

SEQ ID NO: 10182 - DNA, 301 bp, Artificial Sequence
  Trp53.2_Atrx.1
  crRNA array
  misc_feature (148)..(157): n is a, c, g, or t
cttggctttatatatcttgtggaaaggacgaaacaccgtaatttctactaagtgtagatgccagggtgagcacgtgggataatttctactaagtgtagatgccagtcgctcatatctctgtaatttctactaagtgtagatttttttnnnnnnnnnnaagcttggcgtggatccgatatcaactagatcttgagacaaatggcagtattcatccacaattttaaaagaaaaggggggattggggggtacagtgcaggggaaagaatagtagacataatagcaacagacatacaaactaaag

SEQ ID NO: 10183 - DNA, 301 bp, Artificial Sequence
  Trp53.2_Atrx.2
  crRNA array
  misc_feature (148)..(157): n is a, c, g, or t
cttggctttatatatcttgtggaaaggacgaaacaccgtaatttctactaagtgtagatgccagggtgagcacgtgggataatttctactaagtgtagatgcagcatgggggtatccctttaatttctactaagtgtagatttttttnnnnnnnnnnaagcttggcgtggatccgatatcaactagatcttgagacaaatggcagtattcatccacaattttaaaagaaaaggggggattggggggtacagtgcaggggaaagaatagtagacataatagcaacagacatacaaactaaag

SEQ ID NO: 10184 - DNA, 301 bp, Artificial Sequence
  Trp53.2_Atrx.3
  crRNA array
  misc_feature (148)..(157): n is a, c, g, or t
cttggctttatatatcttgtggaaaggacgaaacaccgtaatttctactaagtgtagatgccagggtgagcacgtgggataatttctactaagtgtagatggagccctgtccgcaatgagtaatttctactaagtgtagatttttttnnnnnnnnnnaagcttggcgtggatccgatatcaactagatcttgagacaaatggcagtattcatccacaattttaaaagaaaaggggggattggggggtacagtgcaggggaaagaatagtagacataatagcaacagacatacaaactaaag

SEQ ID NO: 10185 - DNA, 301 bp, Artificial Sequence
  Trp53.2_Atrx.4
  crRNA array
  misc_feature (148)..(157): n is a, c, g, or t
cttggctttatatatcttgtggaaaggacgaaacaccgtaatttctactaagtgtagatgccagggtgagcacgtgggataatttctactaagtgtagataaactgggctcctactaaattaatttctactaagtgtagatttttttnnnnnnnnnnaagcttggcgtggatccgatatcaactagatcttgagacaaatggcagtattcatccacaattttaaaagaaaaggggggattggggggtacagtgcaggggaaagaatagtagacataatagcaacagacatacaaactaaag

SEQ ID NO: 10186 - DNA, 301 bp, Artificial Sequence
  Trp53.3_Atrx.1
  crRNA array
  misc_feature (148)..(157): n is a, c, g, or t
cttggctttatatatcttgtggaaaggacgaaacaccgtaatttctactaagtgtagatccctcccacgtgctcacccttaatttctactaagtgtagatgccagtcgctcatatctctgtaatttctactaagtgtagatttttttnnnnnnnnnnaagcttggcgtggatccgatatcaactagatcttgagacaaatggcagtattcatccacaattttaaaagaaaaggggggattggggggtacagtgcaggggaaagaatagtagacataatagcaacagacatacaaactaaag

SEQ ID NO: 10187 - DNA, 301 bp, Artificial Sequence
  Trp53.3_Atrx.2
  crRNA array
  misc_feature (148)..(157): n is a, c, g, or t
cttggctttatatatcttgtggaaaggacgaaacaccgtaatttctactaagtgtagatccctcccacgtgctcacccttaatttctactaagtgtagatgcagcatgggggtatccctttaatttctactaagtgtagatttttttnnnnnnnnnnaagcttggcgtggatccgatatcaactagatcttgagacaaatggcagtattcatccacaattttaaaagaaaaggggggattggggggtacagtgcaggggaaagaatagtagacataatagcaacagacatacaaactaaag

SEQ ID NO: 10188 - DNA, 301 bp, Artificial Sequence
  Trp53.3_Atrx.3
  crRNA array
  misc_feature (148)..(157): n is a, c, g, or t
cttggctttatatatcttgtggaaaggacgaaacaccgtaatttctactaagtgtagatccctcccacgtgctcacccttaatttctactaagtgtagatggagccctgtccgcaatgagtaatttctactaagtgtagatttttttnnnnnnnnnnaagcttggcgtggatccgatatcaactagatcttgagacaaatggcagtattcatccacaattttaaaagaaaaggggggattggggggtacagtgcaggggaaagaatagtagacataatagcaacagacatacaaactaaag

SEQ ID NO: 10189 - DNA, 301 bp, Artificial Sequence
  Trp53.3_Atrx.4
  crRNA array
  misc_feature (148)..(157): n is a, c, g, or t
cttggctttatatatcttgtggaaaggacgaaacaccgtaatttctactaagtgtagatccctcccacgtgctcacccttaatttctactaagtgtagataaactgggctcctactaaattaatttctactaagtgtagatttttttnnnnnnnnnnaagcttggcgtggatccgatatcaactagatcttgagacaaatggcagtattcatccacaattttaaaagaaaaggggggattggggggtacagtgcaggggaaagaatagtagacataatagcaacagacatacaaactaaag

SEQ ID NO: 10190 - DNA, 301 bp, Artificial Sequence
  Trp53.4_Atrx.1
  crRNA array
  misc_feature (148)..(157): n is a, c, g, or t
cttggctttatatatcttgtggaaaggacgaaacaccgtaatttctactaagtgtagattccaccccccaccctgtctctaatttctactaagtgtagatgccagtcgctcatatctctgtaatttctactaagtgtagatttttttnnnnnnnnnnaagcttggcgtggatccgatatcaactagatcttgagacaaatggcagtattcatccacaattttaaaagaaaaggggggattggggggtacagtgcaggggaaagaatagtagacataatagcaacagacatacaaactaaag

SEQ ID NO: 10191 - DNA, 301 bp, Artificial Sequence
  Trp53.4_Atrx.2
  crRNA array
  misc_feature (148)..(157): n is a, c, g, or t
cttggctttatatatcttgtggaaaggacgaaacaccgtaatttctactaagtgtagattccaccccccaccctgtctctaatttctactaagtgtagatgcagcatgggggtatccctttaatttctactaagtgtagatttttttnnnnnnnnnnaagcttggcgtggatccgatatcaactagatcttgagacaaatggcagtattcatccacaattttaaaagaaaaggggggattggggggtacagtgcaggggaaagaatagtagacataatagcaacagacatacaaactaaag

SEQ ID NO: 10192 - DNA, 301 bp, Artificial Sequence
  Trp53.4_Atrx.3
  crRNA array
  misc_feature (148)..(157): n is a, c, g, or t
cttggctttatatatcttgtggaaaggacgaaacaccgtaatttctactaagtgtagattccaccccccaccctgtctctaatttctactaagtgtagatggagccctgtccgcaatgagtaatttctactaagtgtagatttttttnnnnnnnnnnaagcttggcgtggatccgatatcaactagatcttgagacaaatggcagtattcatccacaattttaaaagaaaaggggggattggggggtacagtgcaggggaaagaatagtagacataatagcaacagacatacaaactaaag

SEQ ID NO: 10193 - DNA, 301 bp, Artificial Sequence
  Trp53.4_Atrx.4
  crRNA array
  misc_feature (148)..(157): n is a, c, g, or t
cttggctttatatatcttgtggaaaggacgaaacaccgtaatttctactaagtgtagattccaccccccaccctgtctctaatttctactaagtgtagataaactgggctcctactaaattaatttctactaagtgtagatttttttnnnnnnnnnnaagcttggcgtggatccgatatcaactagatcttgagacaaatggcagtattcatccacaattttaaaagaaaaggggggattggggggtacagtgcaggggaaagaatagtagacataatagcaacagacatacaaactaaag

SEQ ID NO: 10194 - DNA, 301 bp, Artificial Sequence
  Trp53.1_Nf2.1
  crRNA array
  misc_feature (148)..(157): n is a, c, g, or t
cttggctttatatatcttgtggaaaggacgaaacaccgtaatttctactaagtgtagatccctgaactgcccccagggataatttctactaagtgtagatcggagtcatctgatagagattaatttctactaagtgtagatttttttnnnnnnnnnnaagcttggcgtggatccgatatcaactagatcttgagacaaatggcagtattcatccacaattttaaaagaaaaggggggattggggggtacagtgcaggggaaagaatagtagacataatagcaacagacatacaaactaaag

SEQ ID NO: 10195 - DNA, 301 bp, Artificial Sequence
  Trp53.1_Nf2.2
  crRNA array
  misc_feature (148)..(157): n is a, c, g, or t
cttggctttatatatcttgtggaaaggacgaaacaccgtaatttctactaagtgtagatccctgaactgcccccagggataatttctactaagtgtagattgaggcgacggaaagctgactaatttctactaagtgtagatttttttnnnnnnnnnnaagcttggcgtggatccgatatcaactagatcttgagacaaatggcagtattcatccacaattttaaaagaaaaggggggattggggggtacagtgcaggggaaagaatagtagacataatagcaacagacatacaaactaaag

SEQ ID NO: 10196 - DNA, 301 bp, Artificial Sequence
  Trp53.1_Nf2.3
  crRNA array
  misc_feature (148)..(157): n is a, c, g, or t
cttggctttatatatcttgtggaaaggacgaaacaccgtaatttctactaagtgtagatccctgaactgcccccagggataatttctactaagtgtagatcgtcgcctcataaataggtctaatttctactaagtgtagatttttttnnnnnnnnnnaagcttggcgtggatccgatatcaactagatcttgagacaaatggcagtattcatccacaattttaaaagaaaaggggggattggggggtacagtgcaggggaaagaatagtagacataatagcaacagacatacaaactaaag

SEQ ID NO: 10197 - DNA, 301 bp, Artificial Sequence
  Trp53.1_Nf2.4
  crRNA array
  misc_feature (148)..(157): n is a, c, g, or t
cttggctttatatatcttgtggaaaggacgaaacaccgtaatttctactaagtgtagatccctgaactgcccccagggataatttctactaagtgtagataaggcctcgatctccgtctttaatttctactaagtgtagatttttttnnnnnnnnnnaagcttggcgtggatccgatatcaactagatcttgagacaaatggcagtattcatccacaattttaaaagaaaaggggggattggggggtacagtgcaggggaaagaatagtagacataatagcaacagacatacaaactaaag

SEQ ID NO: 10198 - DNA, 301 bp, Artificial Sequence
  Trp53.2_Nf2.1
  crRNA array
  misc_feature (148)..(157): n is a, c, g, or t
cttggctttatatatcttgtggaaaggacgaaacaccgtaatttctactaagtgtagatgccagggtgagcacgtgggataatttctactaagtgtagatcggagtcatctgatagagattaatttctactaagtgtagatttttttnnnnnnnnnnaagcttggcgtggatccgatatcaactagatcttgagacaaatggcagtattcatccacaattttaaaagaaaaggggggattggggggtacagtgcaggggaaagaatagtagacataatagcaacagacatacaaactaaag

SEQ ID NO: 10199 - DNA, 301 bp, Artificial Sequence
  Trp53.2_Nf2.2
  crRNA array
  misc_feature (148)..(157): n is a, c, g, or t
cttggctttatatatcttgtggaaaggacgaaacaccgtaatttctactaagtgtagatgccagggtgagcacgtgggataatttctactaagtgtagattgaggcgacggaaagctgactaatttctactaagtgtagatttttttnnnnnnnnnnaagcttggcgtggatccgatatcaactagatcttgagacaaatggcagtattcatccacaattttaaaagaaaaggggggattggggggtacagtgcaggggaaagaatagtagacataatagcaacagacatacaaactaaag

SEQ ID NO: 10200 - DNA, 301 bp, Artificial Sequence
  Trp53.2_Nf2.3
  crRNA array
  misc_feature (148)..(157): n is a, c, g, or t
cttggctttatatatcttgtggaaaggacgaaacaccgtaatttctactaagtgtagatgccagggtgagcacgtgggataatttctactaagtgtagatcgtcgcctcataaataggtctaatttctactaagtgtagatttttttnnnnnnnnnnaagcttggcgtggatccgatatcaactagatcttgagacaaatggcagtattcatccacaattttaaaagaaaaggggggattggggggtacagtgcaggggaaagaatagtagacataatagcaacagacatacaaactaaag

SEQ ID NO: 10201 - DNA, 301 bp, Artificial Sequence
  Trp53.2_Nf2.4
  crRNA array
  misc_feature (148)..(157): n is a, c, g, or t
cttggctttatatatcttgtggaaaggacgaaacaccgtaatttctactaagtgtagatgccagggtgagcacgtgggataatttctactaagtgtagataaggcctcgatctccgtctttaatttctactaagtgtagatttttttnnnnnnnnnnaagcttggcgtggatccgatatcaactagatcttgagacaaatggcagtattcatccacaattttaaaagaaaaggggggattggggggtacagtgcaggggaaagaatagtagacataatagcaacagacatacaaactaaag

SEQ ID NO: 10202 - DNA, 301 bp, Artificial Sequence
  Trp53.3_Nf2.1
  crRNA array
  misc_feature (148)..(157): n is a, c, g, or t
cttggctttatatatcttgtggaaaggacgaaacaccgtaatttctactaagtgtagatccctcccacgtgctcacccttaatttctactaagtgtagatcggagtcatctgatagagattaatttctactaagtgtagatttttttnnnnnnnnnnaagcttggcgtggatccgatatcaactagatcttgagacaaatggcagtattcatccacaattttaaaagaaaaggggggattggggggtacagtgcaggggaaagaatagtagacataatagcaacagacatacaaactaaag

SEQ ID NO: 10203 - DNA, 301 bp, Artificial Sequence
  Trp53.3_Nf2.2
  crRNA array
  misc_feature (148)..(157): n is a, c, g, or t
cttggctttatatatcttgtggaaaggacgaaacaccgtaatttctactaagtgtagatccctcccacgtgctcacccttaatttctactaagtgtagattgaggcgacggaaagctgactaatttctactaagtgtagatttttttnnnnnnnnnnaagcttggcgtggatccgatatcaactagatcttgagacaaatggcagtattcatccacaattttaaaagaaaaggggggattggggggtacagtgcaggggaaagaatagtagacataatagcaacagacatacaaactaaag

SEQ ID NO: 10204 - DNA, 301 bp, Artificial Sequence
  Trp53.3_Nf2.3
  crRNA array
  misc_feature (148)..(157): n is a, c, g, or t
cttggctttatatatcttgtggaaaggacgaaacaccgtaatttctactaagtgtagatccctcccacgtgctcacccttaatttctactaagtgtagatcgtcgcctcataaataggtctaatttctactaagtgtagatttttttnnnnnnnnnnaagcttggcgtggatccgatatcaactagatcttgagacaaatggcagtattcatccacaattttaaaagaaaaggggggattggggggtacagtgcaggggaaagaatagtagacataatagcaacagacatacaaactaaag

SEQ ID NO: 10205 - DNA, 301 bp, Artificial Sequence
  Trp53.3_Nf2.4
  crRNA array
  misc_feature (148)..(157): n is a, c, g, or t
cttggctttatatatcttgtggaaaggacgaaacaccgtaatttctactaagtgtagatccctcccacgtgctcacccttaatttctactaagtgtagataaggcctcgatctccgtctttaatttctactaagtgtagatttttttnnnnnnnnnnaagcttggcgtggatccgatatcaactagatcttgagacaaatggcagtattcatccacaattttaaaagaaaaggggggattggggggtacagtgcaggggaaagaatagtagacataatagcaacagacatacaaactaaag

SEQ ID NO: 10206 - DNA, 301 bp, Artificial Sequence
  Trp53.4_Nf2.1
  crRNA array
  misc_feature (148)..(157): n is a, c, g, or t
cttggctttatatatcttgtggaaaggacgaaacaccgtaatttctactaagtgtagattccaccccccaccctgtctctaatttctactaagtgtagatcggagtcatctgatagagattaatttctactaagtgtagatttttttnnnnnnnnnnaagcttggcgtggatccgatatcaactagatcttgagacaaatggcagtattcatccacaattttaaaagaaaaggggggattggggggtacagtgcaggggaaagaatagtagacataatagcaacagacatacaaactaaag

SEQ ID NO: 10207 - DNA, 301 bp, Artificial Sequence
  Trp53.4_Nf2.2
  crRNA array
  misc_feature (148)..(157): n is a, c, g, or t
cttggctttatatatcttgtggaaaggacgaaacaccgtaatttctactaagtgtagattccaccccccaccctgtctctaatttctactaagtgtagattgaggcgacggaaagctgactaatttctactaagtgtagatttttttnnnnnnnnnnaagcttggcgtggatccgatatcaactagatcttgagacaaatggcagtattcatccacaattttaaaagaaaaggggggattggggggtacagtgcaggggaaagaatagtagacataatagcaacagacatacaaactaaag

SEQ ID NO: 10208 - DNA, 301 bp, Artificial Sequence
  Trp53.4_Nf2.3
  crRNA array
  misc_feature (148)..(157): n is a, c, g, or t
cttggctttatatatcttgtggaaaggacgaaacaccgtaatttctactaagtgtagattccaccccccaccctgtctctaatttctactaagtgtagatcgtcgcctcataaataggtctaatttctactaagtgtagatttttttnnnnnnnnnnaagcttggcgtggatccgatatcaactagatcttgagacaaatggcagtattcatccacaattttaaaagaaaaggggggattggggggtacagtgcaggggaaagaatagtagacataatagcaacagacatacaaactaaag

SEQ ID NO: 10209 - DNA, 301 bp, Artificial Sequence
  Trp53.4_Nf2.4
  crRNA array
  misc_feature (148)..(157): n is a, c, g, or t
cttggctttatatatcttgtggaaaggacgaaacaccgtaatttctactaagtgtagattccaccccccaccctgtctctaatttctactaagtgtagataaggcctcgatctccgtctttaatttctactaagtgtagatttttttnnnnnnnnnnaagcttggcgtggatccgatatcaactagatcttgagacaaatggcagtattcatccacaattttaaaagaaaaggggggattggggggtacagtgcaggggaaagaatagtagacataatagcaacagacatacaaactaaag

SEQ ID NO: 10210 - DNA, 301 bp, Artificial Sequence
  Trp53.1_Jak1.1
  crRNA array
  misc_feature (148)..(157): n is a, c, g, or t
cttggctttatatatcttgtggaaaggacgaaacaccgtaatttctactaagtgtagatccctgaactgcccccagggataatttctactaagtgtagatgagcgcaggccgccgcagcctaatttctactaagtgtagatttttttnnnnnnnnnnaagcttggcgtggatccgatatcaactagatcttgagacaaatggcagtattcatccacaattttaaaagaaaaggggggattggggggtacagtgcaggggaaagaatagtagacataatagcaacagacatacaaactaaag

SEQ ID NO: 10211 - DNA, 301 bp, Artificial Sequence
  Trp53.1_Jak1.2
  crRNA array
  misc_feature (148)..(157): n is a, c, g, or t
cttggctttatatatcttgtggaaaggacgaaacaccgtaatttctactaagtgtagatccctgaactgcccccagggataatttctactaagtgtagatagggacactggacaaccgaataatttctactaagtgtagatttttttnnnnnnnnnnaagcttggcgtggatccgatatcaactagatcttgagacaaatggcagtattcatccacaattttaaaagaaaaggggggattggggggtacagtgcaggggaaagaatagtagacataatagcaacagacatacaaactaaag

SEQ ID NO: 10212 - DNA, 301 bp, Artificial Sequence
  Trp53.1_Jak1.3
  crRNA array
  misc_feature (148)..(157): n is a, c, g, or t
cttggctttatatatcttgtggaaaggacgaaacaccgtaatttctactaagtgtagatccctgaactgcccccagggataatttctactaagtgtagatgcacagaacgccatggcatttaatttctactaagtgtagatttttttnnnnnnnnnnaagcttggcgtggatccgatatcaactagatcttgagacaaatggcagtattcatccacaattttaaaagaaaaggggggattggggggtacagtgcaggggaaagaatagtagacataatagcaacagacatacaaactaaag

SEQ ID NO: 10213 - DNA, 301 bp, Artificial Sequence
  Trp53.1_Jak1.4
  crRNA array
  misc_feature (148)..(157): n is a, c, g, or t
cttggctttatatatcttgtggaaaggacgaaacaccgtaatttctactaagtgtagatccctgaactgcccccagggataatttctactaagtgtagattgccgccactggatcccgagtaatttctactaagtgtagatttttttnnnnnnnnnnaagcttggcgtggatccgatatcaactagatcttgagacaaatggcagtattcatccacaattttaaaagaaaaggggggattggggggtacagtgcaggggaaagaatagtagacataatagcaacagacatacaaactaaag

SEQ ID NO: 10214 - DNA, 301 bp, Artificial Sequence
  Trp53.2_Jak1.1
  crRNA array
  misc_feature (148)..(157): n is a, c, g, or t
cttggctttatatatcttgtggaaaggacgaaacaccgtaatttctactaagtgtagatgccagggtgagcacgtgggataatttctactaagtgtagatgagcgcaggccgccgcagcctaatttctactaagtgtagatttttttnnnnnnnnnnaagcttggcgtggatccgatatcaactagatcttgagacaaatggcagtattcatccacaattttaaaagaaaaggggggattggggggtacagtgcaggggaaagaatagtagacataatagcaacagacatacaaactaaag

SEQ ID NO: 10215 - DNA, 301 bp, Artificial Sequence
  Trp53.2_Jak1.2
  crRNA array
  misc_feature (148)..(157): n is a, c, g, or t
cttggctttatatatcttgtggaaaggacgaaacaccgtaatttctactaagtgtagatgccagggtgagcacgtgggataatttctactaagtgtagatagggacactggacaaccgaataatttctactaagtgtagatttttttnnnnnnnnnnaagcttggcgtggatccgatatcaactagatcttgagacaaatggcagtattcatccacaattttaaaagaaaaggggggattggggggtacagtgcaggggaaagaatagtagacataatagcaacagacatacaaactaaag

SEQ ID NO: 10216 - DNA, 301 bp, Artificial Sequence
  Trp53.2_Jak1.3
  crRNA array
  misc_feature (148)..(157): n is a, c, g, or t
cttggctttatatatcttgtggaaaggacgaaacaccgtaatttctactaagtgtagatgccagggtgagcacgtgggataatttctactaagtgtagatgcacagaacgccatggcatttaatttctactaagtgtagatttttttnnnnnnnnnnaagcttggcgtggatccgatatcaactagatcttgagacaaatggcagtattcatccacaattttaaaagaaaaggggggattggggggtacagtgcaggggaaagaatagtagacataatagcaacagacatacaaactaaag

SEQ ID NO: 10217 - DNA, 301 bp, Artificial Sequence
  Trp53.2_Jak1.4
  crRNA array
  misc_feature (148)..(157): n is a, c, g, or t
cttggctttatatatcttgtggaaaggacgaaacaccgtaatttctactaagtgtagatgccagggtgagcacgtgggataatttctactaagtgtagattgccgccactggatcccgagtaatttctactaagtgtagatttttttnnnnnnnnnnaagcttggcgtggatccgatatcaactagatcttgagacaaatggcagtattcatccacaattttaaaagaaaaggggggattggggggtacagtgcaggggaaagaatagtagacataatagcaacagacatacaaactaaag

SEQ ID NO: 10218 - DNA, 301 bp, Artificial Sequence
  Trp53.3_Jak1.1
  crRNA array
  misc_feature (148)..(157): n is a, c, g, or t
cttggctttatatatcttgtggaaaggacgaaacaccgtaatttctactaagtgtagatccctcccacgtgctcacccttaatttctactaagtgtagatgagcgcaggccgccgcagcctaatttctactaagtgtagatttttttnnnnnnnnnnaagcttggcgtggatccgatatcaactagatcttgagacaaatggcagtattcatccacaattttaaaagaaaaggggggattggggggtacagtgcaggggaaagaatagtagacataatagcaacagacatacaaactaaag

SEQ ID NO: 10219 - DNA, 301 bp, Artificial Sequence
  Trp53.3_Jak1.2
  crRNA array
  misc_feature (148)..(157): n is a, c, g, or t
cttggctttatatatcttgtggaaaggacgaaacaccgtaatttctactaagtgtagatccctcccacgtgctcacccttaatttctactaagtgtagatagggacactggacaaccgaataatttctactaagtgtagatttttttnnnnnnnnnnaagcttggcgtggatccgatatcaactagatcttgagacaaatggcagtattcatccacaattttaaaagaaaaggggggattggggggtacagtgcaggggaaagaatagtagacataatagcaacagacatacaaactaaag

SEQ ID NO: 10220 - DNA, 301 bp, Artificial Sequence
  Trp53.3_Jak1.3
  crRNA array
  misc_feature (148)..(157): n is a, c, g, or t
cttggctttatatatcttgtggaaaggacgaaacaccgtaatttctactaagtgtagatccctcccacgtgctcacccttaatttctactaagtgtagatgcacagaacgccatggcatttaatttctactaagtgtagatttttttnnnnnnnnnnaagcttggcgtggatccgatatcaactagatcttgagacaaatggcagtattcatccacaattttaaaagaaaaggggggattggggggtacagtgcaggggaaagaatagtagacataatagcaacagacatacaaactaaag

SEQ ID NO: 10221 - DNA, 301 bp, Artificial Sequence
  Trp53.3_Jak1.4
  crRNA array
  misc_feature (148)..(157): n is a, c, g, or t
cttggctttatatatcttgtggaaaggacgaaacaccgtaatttctactaagtgtagatccctcccacgtgctcacccttaatttctactaagtgtagattgccgccactggatcccgagtaatttctactaagtgtagatttttttnnnnnnnnnnaagcttggcgtggatccgatatcaactagatcttgagacaaatggcagtattcatccacaattttaaaagaaaaggggggattggggggtacagtgcaggggaaagaatagtagacataatagcaacagacatacaaactaaag

SEQ ID NO: 10222 - DNA, 301 bp, Artificial Sequence
  Trp53.4_Jak1.1
  crRNA array
  misc_feature (148)..(157): n is a, c, g, or t
cttggctttatatatcttgtggaaaggacgaaacaccgtaatttctactaagtgtagattccaccccccaccctgtctctaatttctactaagtgtagatgagcgcaggccgccgcagcctaatttctactaagtgtagatttttttnnnnnnnnnnaagcttggcgtggatccgatatcaactagatcttgagacaaatggcagtattcatccacaattttaaaagaaaaggggggattggggggtacagtgcaggggaaagaatagtagacataatagcaacagacatacaaactaaag

SEQ ID NO: 10223 - DNA, 301 bp, Artificial Sequence
  Trp53.4_Jak1.2
  crRNA array
  misc_feature (148)..(157): n is a, c, g, or t
cttggctttatatatcttgtggaaaggacgaaacaccgtaatttctactaagtgtagattccaccccccaccctgtctctaatttctactaagtgtagatagggacactggacaaccgaataatttctactaagtgtagatttttttnnnnnnnnnnaagcttggcgtggatccgatatcaactagatcttgagacaaatggcagtattcatccacaattttaaaagaaaaggggggattggggggtacagtgcaggggaaagaatagtagacataatagcaacagacatacaaactaaag

SEQ ID NO: 10224 - DNA, 301 bp, Artificial Sequence
  Trp53.4_Jak1.3
  crRNA array
  misc_feature (148)..(157): n is a, c, g, or t
cttggctttatatatcttgtggaaaggacgaaacaccgtaatttctactaagtgtagattccaccccccaccctgtctctaatttctactaagtgtagatgcacagaacgccatggcatttaatttctactaagtgtagatttttttnnnnnnnnnnaagcttggcgtggatccgatatcaactagatcttgagacaaatggcagtattcatccacaattttaaaagaaaaggggggattggggggtacagtgcaggggaaagaatagtagacataatagcaacagacatacaaactaaag

SEQ ID NO: 10225 - DNA, 301 bp, Artificial Sequence
  Trp53.4_Jak1.4
  crRNA array
  misc_feature (148)..(157): n is a, c, g, or t
cttggctttatatatcttgtggaaaggacgaaacaccgtaatttctactaagtgtagattccaccccccaccctgtctctaatttctactaagtgtagattgccgccactggatcccgagtaatttctactaagtgtagatttttttnnnnnnnnnnaagcttggcgtggatccgatatcaactagatcttgagacaaatggcagtattcatccacaattttaaaagaaaaggggggattggggggtacagtgcaggggaaagaatagtagacataatagcaacagacatacaaactaaag

SEQ ID NO: 10226 - DNA, 301 bp, Artificial Sequence
  Trp53.1_Chd1.1
  crRNA array
  misc_feature (148)..(157): n is a, c, g, or t
cttggctttatatatcttgtggaaaggacgaaacaccgtaatttctactaagtgtagatccctgaactgcccccagggataatttctactaagtgtagatcgccccactctgcaatccattaatttctactaagtgtagatttttttnnnnnnnnnnaagcttggcgtggatccgatatcaactagatcttgagacaaatggcagtattcatccacaattttaaaagaaaaggggggattggggggtacagtgcaggggaaagaatagtagacataatagcaacagacatacaaactaaag

SEQ ID NO: 10227 - DNA, 301 bp, Artificial Sequence
  Trp53.1_Chd1.2
  crRNA array
  misc_feature (148)..(157): n is a, c, g, or t
cttggctttatatatcttgtggaaaggacgaaacaccgtaatttctactaagtgtagatccctgaactgcccccagggataatttctactaagtgtagattgcagccggcgtctggcagctaatttctactaagtgtagatttttttnnnnnnnnnnaagcttggcgtggatccgatatcaactagatcttgagacaaatggcagtattcatccacaattttaaaagaaaaggggggattggggggtacagtgcaggggaaagaatagtagacataatagcaacagacatacaaactaaag

SEQ ID NO: 10228 - DNA, 301 bp, Artificial Sequence
  Trp53.1_Chd1.3
  crRNA array
  misc_feature (148)..(157): n is a, c, g, or t
cttggctttatatatcttgtggaaaggacgaaacaccgtaatttctactaagtgtagatccctgaactgcccccagggataatttctactaagtgtagatatcagcaagtatgcaactattaatttctactaagtgtagatttttttnnnnnnnnnnaagcttggcgtggatccgatatcaactagatcttgagacaaatggcagtattcatccacaattttaaaagaaaaggggggattggggggtacagtgcaggggaaagaatagtagacataatagcaacagacatacaaactaaag

SEQ ID NO: 10229 - DNA, 301 bp, Artificial Sequence
  Trp53.1_Chd1.4
  crRNA array
  misc_feature (148)..(157): n is a, c, g, or t
cttggctttatatatcttgtggaaaggacgaaacaccgtaatttctactaagtgtagatccctgaactgcccccagggataatttctactaagtgtagataaatggcggataactcctcttaatttctactaagtgtagatttttttnnnnnnnnnnaagcttggcgtggatccgatatcaactagatcttgagacaaatggcagtattcatccacaattttaaaagaaaaggggggattggggggtacagtgcaggggaaagaatagtagacataatagcaacagacatacaaactaaag

SEQ ID NO: 10230 - DNA, 301 bp, Artificial Sequence
  Trp53.2_Chd1.1
  crRNA array
  misc_feature (148)..(157): n is a, c, g, or t
cttggctttatatatcttgtggaaaggacgaaacaccgtaatttctactaagtgtagatgccagggtgagcacgtgggataatttctactaagtgtagatcgccccactctgcaatccattaatttctactaagtgtagatttttttnnnnnnnnnnaagcttggcgtggatccgatatcaactagatcttgagacaaatggcagtattcatccacaattttaaaagaaaaggggggattggggggtacagtgcaggggaaagaatagtagacataatagcaacagacatacaaactaaag

SEQ ID NO: 10231 - DNA, 301 bp, Artificial Sequence
  Trp53.2_Chd1.2
  crRNA array
  misc_feature (148)..(157): n is a, c, g, or t
cttggctttatatatcttgtggaaaggacgaaacaccgtaatttctactaagtgtagatgccagggtgagcacgtgggataatttctactaagtgtagattgcagccggcgtctggcagctaatttctactaagtgtagatttttttnnnnnnnnnnaagcttggcgtggatccgatatcaactagatcttgagacaaatggcagtattcatccacaattttaaaagaaaaggggggattggggggtacagtgcaggggaaagaatagtagacataatagcaacagacatacaaactaaag

SEQ ID NO: 10232 - DNA, 301 bp, Artificial Sequence
  Trp53.2_Chd1.3
  crRNA array
  misc_feature (148)..(157): n is a, c, g, or t
cttggctttatatatcttgtggaaaggacgaaacaccgtaatttctactaagtgtagatgccagggtgagcacgtgggataatttctactaagtgtagatatcagcaagtatgcaactattaatttctactaagtgtagatttttttnnnnnnnnnnaagcttggcgtggatccgatatcaactagatcttgagacaaatggcagtattcatccacaattttaaaagaaaaggggggattggggggtacagtgcaggggaaagaatagtagacataatagcaacagacatacaaactaaag

SEQ ID NO: 10233 - DNA, 301 bp, Artificial Sequence
  Trp53.2_Chd1.4
  crRNA array
  misc_feature (148)..(157): n is a, c, g, or t
cttggctttatatatcttgtggaaaggacgaaacaccgtaatttctactaagtgtagatgccagggtgagcacgtgggataatttctactaagtgtagataaatggcggataactcctcttaatttctactaagtgtagatttttttnnnnnnnnnnaagcttggcgtggatccgatatcaactagatcttgagacaaatggcagtattcatccacaattttaaaagaaaaggggggattggggggtacagtgcaggggaaagaatagtagacataatagcaacagacatacaaactaaag

SEQ ID NO: 10234 - DNA, 301 bp, Artificial Sequence
  Trp53.3_Chd1.1
  crRNA array
  misc_feature (148)..(157): n is a, c, g, or t
cttggctttatatatcttgtggaaaggacgaaacaccgtaatttctactaagtgtagatccctcccacgtgctcacccttaatttctactaagtgtagatcgccccactctgcaatccattaatttctactaagtgtagatttttttnnnnnnnnnnaagcttggcgtggatccgatatcaactagatcttgagacaaatggcagtattcatccacaattttaaaagaaaaggggggattggggggtacagtgcaggggaaagaatagtagacataatagcaacagacatacaaactaaag

SEQ ID NO: 10235 - DNA, 301 bp, Artificial Sequence
  Trp53.3_Chd1.2
  crRNA array
  misc_feature (148)..(157): n is a, c, g, or t
cttggctttatatatcttgtggaaaggacgaaacaccgtaatttctactaagtgtagatccctcccacgtgctcacccttaatttctactaagtgtagattgcagccggcgtctggcagctaatttctactaagtgtagatttttttnnnnnnnnnnaagcttggcgtggatccgatatcaactagatcttgagacaaatggcagtattcatccacaattttaaaagaaaaggggggattggggggtacagtgcaggggaaagaatagtagacataatagcaacagacatacaaactaaag

SEQ ID NO: 10236 - DNA, 301 bp, Artificial Sequence
  Trp53.3_Chd1.3
  crRNA array
  misc_feature (148)..(157): n is a, c, g, or t
cttggctttatatatcttgtggaaaggacgaaacaccgtaatttctactaagtgtagatccctcccacgtgctcacccttaatttctactaagtgtagatatcagcaagtatgcaactattaatttctactaagtgtagatttttttnnnnnnnnnnaagcttggcgtggatccgatatcaactagatcttgagacaaatggcagtattcatccacaattttaaaagaaaaggggggattggggggtacagtgcaggggaaagaatagtagacataatagcaacagacatacaaactaaag

SEQ ID NO: 10237 - DNA, 301 bp, Artificial Sequence
  Trp53.3_Chd1.4
  crRNA array
  misc_feature (148)..(157): n is a, c, g, or t
cttggctttatatatcttgtggaaaggacgaaacaccgtaatttctactaagtgtagatccctcccacgtgctcacccttaatttctactaagtgtagataaatggcggataactcctcttaatttctactaagtgtagatttttttnnnnnnnnnnaagcttggcgtggatccgatatcaactagatcttgagacaaatggcagtattcatccacaattttaaaagaaaaggggggattggggggtacagtgcaggggaaagaatagtagacataatagcaacagacatacaaactaaag

SEQ ID NO: 10238 - DNA, 301 bp, Artificial Sequence
  Trp53.4_Chd1.1
  crRNA array
  misc_feature (148)..(157): n is a, c, g, or t
cttggctttatatatcttgtggaaaggacgaaacaccgtaatttctactaagtgtagattccaccccccaccctgtctctaatttctactaagtgtagatcgccccactctgcaatccattaatttctactaagtgtagatttttttnnnnnnnnnnaagcttggcgtggatccgatatcaactagatcttgagacaaatggcagtattcatccacaattttaaaagaaaaggggggattggggggtacagtgcaggggaaagaatagtagacataatagcaacagacatacaaactaaag

SEQ ID NO: 10239 - DNA, 301 bp, Artificial Sequence
  Trp53.4_Chd1.2
  crRNA array
  misc_feature (148)..(157): n is a, c, g, or t
cttggctttatatatcttgtggaaaggacgaaacaccgtaatttctactaagtgtagattccaccccccaccctgtctctaatttctactaagtgtagattgcagccggcgtctggcagctaatttctactaagtgtagatttttttnnnnnnnnnnaagcttggcgtggatccgatatcaactagatcttgagacaaatggcagtattcatccacaattttaaaagaaaaggggggattggggggtacagtgcaggggaaagaatagtagacataatagcaacagacatacaaactaaag

SEQ ID NO: 10240 - DNA, 301 bp, Artificial Sequence
  Trp53.4_Chd1.3
  crRNA array
  misc_feature (148)..(157): n is a, c, g, or t
cttggctttatatatcttgtggaaaggacgaaacaccgtaatttctactaagtgtagattccaccccccaccctgtctctaatttctactaagtgtagatatcagcaagtatgcaactattaatttctactaagtgtagatttttttnnnnnnnnnnaagcttggcgtggatccgatatcaactagatcttgagacaaatggcagtattcatccacaattttaaaagaaaaggggggattggggggtacagtgcaggggaaagaatagtagacataatagcaacagacatacaaactaaag

SEQ ID NO: 10241 - DNA, 301 bp, Artificial Sequence
  Trp53.4_Chd1.4
  crRNA array
  misc_feature (148)..(157): n is a, c, g, or t
cttggctttatatatcttgtggaaaggacgaaacaccgtaatttctactaagtgtagattccaccccccaccctgtctctaatttctactaagtgtagataaatggcggataactcctcttaatttctactaagtgtagatttttttnnnnnnnnnnaagcttggcgtggatccgatatcaactagatcttgagacaaatggcagtattcatccacaattttaaaagaaaaggggggattggggggtacagtgcaggggaaagaatagtagacataatagcaacagacatacaaactaaag

SEQ ID NO: 10242 - DNA, 301 bp, Artificial Sequence
  Trp53.1_Pole.1
  crRNA array
  misc_feature (148)..(157): n is a, c, g, or t
cttggctttatatatcttgtggaaaggacgaaacaccgtaatttctactaagtgtagatccctgaactgcccccagggataatttctactaagtgtagatgcgcgctctccacgtgctcttaatttctactaagtgtagatttttttnnnnnnnnnnaagcttggcgtggatccgatatcaactagatcttgagacaaatggcagtattcatccacaattttaaaagaaaaggggggattggggggtacagtgcaggggaaagaatagtagacataatagcaacagacatacaaactaaag

SEQ ID NO: 10243 - DNA, 301 bp, Artificial Sequence
  Trp53.1_Pole.2
  crRNA array
  misc_feature (148)..(157): n is a, c, g, or t
cttggctttatatatcttgtggaaaggacgaaacaccgtaatttctactaagtgtagatccctgaactgcccccagggataatttctactaagtgtagatacatcgagacgaccaaactgtaatttctactaagtgtagatttttttnnnnnnnnnnaagcttggcgtggatccgatatcaactagatcttgagacaaatggcagtattcatccacaattttaaaagaaaaggggggattggggggtacagtgcaggggaaagaatagtagacataatagcaacagacatacaaactaaag

SEQ ID NO: 10244 - DNA, 301 bp, Artificial Sequence
  Trp53.1_Pole.3
  crRNA array
  misc_feature (148)..(157): n is a, c, g, or t
cttggctttatatatcttgtggaaaggacgaaacaccgtaatttctactaagtgtagatccctgaactgcccccagggataatttctactaagtgtagatctgctgcaacgagtcgagaataatttctactaagtgtagatttttttnnnnnnnnnnaagcttggcgtggatccgatatcaactagatcttgagacaaatggcagtattcatccacaattttaaaagaaaaggggggattggggggtacagtgcaggggaaagaatagtagacataatagcaacagacatacaaactaaag

SEQ ID NO: 10245 - DNA, 301 bp, Artificial Sequence
  Trp53.1_Pole.4
  crRNA array
  misc_feature (148)..(157): n is a, c, g, or t
cttggctttatatatcttgtggaaaggacgaaacaccgtaatttctactaagtgtagatccctgaactgcccccagggataatttctactaagtgtagatgggagatgatatagcggcagtaatttctactaagtgtagatttttttnnnnnnnnnnaagcttggcgtggatccgatatcaactagatcttgagacaaatggcagtattcatccacaattttaaaagaaaaggggggattggggggtacagtgcaggggaaagaatagtagacataatagcaacagacatacaaactaaag

SEQ ID NO: 10246 - DNA, 301 bp, Artificial Sequence
  Trp53.2_Pole.1
  crRNA array
  misc_feature (148)..(157): n is a, c, g, or t
cttggctttatatatcttgtggaaaggacgaaacaccgtaatttctactaagtgtagatgccagggtgagcacgtgggataatttctactaagtgtagatgcgcgctctccacgtgctcttaatttctactaagtgtagatttttttnnnnnnnnnnaagcttggcgtggatccgatatcaactagatcttgagacaaatggcagtattcatccacaattttaaaagaaaaggggggattggggggtacagtgcaggggaaagaatagtagacataatagcaacagacatacaaactaaag

SEQ ID NO: 10247 - DNA, 301 bp, Artificial Sequence
  Trp53.2_Pole.2
  crRNA array
  misc_feature (148)..(157): n is a, c, g, or t
cttggctttatatatcttgtggaaaggacgaaacaccgtaatttctactaagtgtagatgccagggtgagcacgtgggataatttctactaagtgtagatacatcgagacgaccaaactgtaatttctactaagtgtagatttttttnnnnnnnnnnaagcttggcgtggatccgatatcaactagatcttgagacaaatggcagtattcatccacaattttaaaagaaaaggggggattggggggtacagtgcaggggaaagaatagtagacataatagcaacagacatacaaactaaag

SEQ ID NO: 10248 - DNA, 301 bp, Artificial Sequence
  Trp53.2_Pole.3
  crRNA array
  misc_feature (148)..(157): n is a, c, g, or t
cttggctttatatatcttgtggaaaggacgaaacaccgtaatttctactaagtgtagatgccagggtgagcacgtgggataatttctactaagtgtagatctgctgcaacgagtcgagaataatttctactaagtgtagatttttttnnnnnnnnnnaagcttggcgtggatccgatatcaactagatcttgagacaaatggcagtattcatccacaattttaaaagaaaaggggggattggggggtacagtgcaggggaaagaatagtagacataatagcaacagacatacaaactaaag

SEQ ID NO: 10249 - DNA, 301 bp, Artificial Sequence
  Trp53.2_Pole.4
  crRNA array
  misc_feature (148)..(157): n is a, c, g, or t
cttggctttatatatcttgtggaaaggacgaaacaccgtaatttctactaagtgtagatgccagggtgagcacgtgggataatttctactaagtgtagatgggagatgatatagcggcagtaatttctactaagtgtagatttttttnnnnnnnnnnaagcttggcgtggatccgatatcaactagatcttgagacaaatggcagtattcatccacaattttaaaagaaaaggggggattggggggtacagtgcaggggaaagaatagtagacataatagcaacagacatacaaactaaag

SEQ ID NO: 10250 - DNA, 301 bp, Artificial Sequence
  Trp53.3_Pole.1
  crRNA array
  misc_feature (148)..(157): n is a, c, g, or t
cttggctttatatatcttgtggaaaggacgaaacaccgtaatttctactaagtgtagatccctcccacgtgctcacccttaatttctactaagtgtagatgcgcgctctccacgtgctcttaatttctactaagtgtagatttttttnnnnnnnnnnaagcttggcgtggatccgatatcaactagatcttgagacaaatggcagtattcatccacaattttaaaagaaaaggggggattggggggtacagtgcaggggaaagaatagtagacataatagcaacagacatacaaactaaag

SEQ ID NO: 10251 - DNA, 301 bp, Artificial Sequence
  Trp53.3_Pole.2
  crRNA array
  misc_feature (148)..(157): n is a, c, g, or t
cttggctttatatatcttgtggaaaggacgaaacaccgtaatttctactaagtgtagatccctcccacgtgctcacccttaatttctactaagtgtagatacatcgagacgaccaaactgtaatttctactaagtgtagatttttttnnnnnnnnnnaagcttggcgtggatccgatatcaactagatcttgagacaaatggcagtattcatccacaattttaaaagaaaaggggggattggggggtacagtgcaggggaaagaatagtagacataatagcaacagacatacaaactaaag

SEQ ID NO: 10252 - DNA, 301 bp, Artificial Sequence
  Trp53.3_Pole.3
  crRNA array
  misc_feature (148)..(157): n is a, c, g, or t
cttggctttatatatcttgtggaaaggacgaaacaccgtaatttctactaagtgtagatccctcccacgtgctcacccttaatttctactaagtgtagatctgctgcaacgagtcgagaataatttctactaagtgtagatttttttnnnnnnnnnnaagcttggcgtggatccgatatcaactagatcttgagacaaatggcagtattcatccacaattttaaaagaaaaggggggattggggggtacagtgcaggggaaagaatagtagacataatagcaacagacatacaaactaaag

SEQ ID NO: 10253 - DNA, 301 bp, Artificial Sequence
  Trp53.3_Pole.4
  crRNA array
  misc_feature (148)..(157): n is a, c, g, or t
cttggctttatatatcttgtggaaaggacgaaacaccgtaatttctactaagtgtagatccctcccacgtgctcacccttaatttctactaagtgtagatgggagatgatatagcggcagtaatttctactaagtgtagatttttttnnnnnnnnnnaagcttggcgtggatccgatatcaactagatcttgagacaaatggcagtattcatccacaattttaaaagaaaaggggggattggggggtacagtgcaggggaaagaatagtagacataatagcaacagacatacaaactaaag

SEQ ID NO: 10254 - DNA, 301 bp, Artificial Sequence
  Trp53.4_Pole.1
  crRNA array
  misc_feature (148)..(157): n is a, c, g, or t
cttggctttatatatcttgtggaaaggacgaaacaccgtaatttctactaagtgtagattccaccccccaccctgtctctaatttctactaagtgtagatgcgcgctctccacgtgctcttaatttctactaagtgtagatttttttnnnnnnnnnnaagcttggcgtggatccgatatcaactagatcttgagacaaatggcagtattcatccacaattttaaaagaaaaggggggattggggggtacagtgcaggggaaagaatagtagacataatagcaacagacatacaaactaaag

SEQ ID NO: 10255 - DNA, 301 bp, Artificial Sequence
  Trp53.4_Pole.2
  crRNA array
  misc_feature (148)..(157): n is a, c, g, or t
cttggctttatatatcttgtggaaaggacgaaacaccgtaatttctactaagtgtagattccaccccccaccctgtctctaatttctactaagtgtagatacatcgagacgaccaaactgtaatttctactaagtgtagatttttttnnnnnnnnnnaagcttggcgtggatccgatatcaactagatcttgagacaaatggcagtattcatccacaattttaaaagaaaaggggggattggggggtacagtgcaggggaaagaatagtagacataatagcaacagacatacaaactaaag

SEQ ID NO: 10256 - DNA, 301 bp, Artificial Sequence
  Trp53.4_Pole.3
  crRNA array
  misc_feature (148)..(157): n is a, c, g, or t
cttggctttatatatcttgtggaaaggacgaaacaccgtaatttctactaagtgtagattccaccccccaccctgtctctaatttctactaagtgtagatctgctgcaacgagtcgagaataatttctactaagtgtagatttttttnnnnnnnnnnaagcttggcgtggatccgatatcaactagatcttgagacaaatggcagtattcatccacaattttaaaagaaaaggggggattggggggtacagtgcaggggaaagaatagtagacataatagcaacagacatacaaactaaag

SEQ ID NO: 10257 - DNA, 301 bp, Artificial Sequence
  Trp53.4_Pole.4
  crRNA array
  misc_feature (148)..(157): n is a, c, g, or t
cttggctttatatatcttgtggaaaggacgaaacaccgtaatttctactaagtgtagattccaccccccaccctgtctctaatttctactaagtgtagatgggagatgatatagcggcagtaatttctactaagtgtagatttttttnnnnnnnnnnaagcttggcgtggatccgatatcaactagatcttgagacaaatggcagtattcatccacaattttaaaagaaaaggggggattggggggtacagtgcaggggaaagaatagtagacataatagcaacagacatacaaactaaag

SEQ ID NO: 10258 - DNA, 301 bp, Artificial Sequence
  Trp53.1_Notch1.1
  crRNA array
  misc_feature (148)..(157): n is a, c, g, or t
cttggctttatatatcttgtggaaaggacgaaacaccgtaatttctactaagtgtagatccctgaactgcccccagggataatttctactaagtgtagattgggccaacgatgccaggactaatttctactaagtgtagatttttttnnnnnnnnnnaagcttggcgtggatccgatatcaactagatcttgagacaaatggcagtattcatccacaattttaaaagaaaaggggggattggggggtacagtgcaggggaaagaatagtagacataatagcaacagacatacaaactaaag

SEQ ID NO: 10259 - DNA, 301 bp, Artificial Sequence
  Trp53.1_Notch1.2
  crRNA array
  misc_feature (148)..(157): n is a, c, g, or t
cttggctttatatatcttgtggaaaggacgaaacaccgtaatttctactaagtgtagatccctgaactgcccccagggataatttctactaagtgtagatgtcgccccagcatcctgaagtaatttctactaagtgtagatttttttnnnnnnnnnnaagcttggcgtggatccgatatcaactagatcttgagacaaatggcagtattcatccacaattttaaaagaaaaggggggattggggggtacagtgcaggggaaagaatagtagacataatagcaacagacatacaaactaaag

SEQ ID NO: 10260 - DNA, 301 bp, Artificial Sequence
  Trp53.1_Notch1.3
  crRNA array
  misc_feature (148)..(157): n is a, c, g, or t
cttggctttatatatcttgtggaaaggacgaaacaccgtaatttctactaagtgtagatccctgaactgcccccagggataatttctactaagtgtagatagccacccccgccacgcctctaatttctactaagtgtagatttttttnnnnnnnnnnaagcttggcgtggatccgatatcaactagatcttgagacaaatggcagtattcatccacaattttaaaagaaaaggggggattggggggtacagtgcaggggaaagaatagtagacataatagcaacagacatacaaactaaag

SEQ ID NO: 10261 - DNA, 301 bp, Artificial Sequence
  Trp53.1_Notch1.4
  crRNA array
  misc_feature (148)..(157): n is a, c, g, or t
cttggctttatatatcttgtggaaaggacgaaacaccgtaatttctactaagtgtagatccctgaactgcccccagggataatttctactaagtgtagataaagtgtcagaggccagcaataatttctactaagtgtagatttttttnnnnnnnnnnaagcttggcgtggatccgatatcaactagatcttgagacaaatggcagtattcatccacaattttaaaagaaaaggggggattggggggtacagtgcaggggaaagaatagtagacataatagcaacagacatacaaactaaag

SEQ ID NO: 10262 - DNA, 301 bp, Artificial Sequence
  Trp53.2_Notch1.1
  crRNA array
  misc_feature (148)..(157): n is a, c, g, or t
cttggctttatatatcttgtggaaaggacgaaacaccgtaatttctactaagtgtagatgccagggtgagcacgtgggataatttctactaagtgtagattgggccaacgatgccaggactaatttctactaagtgtagatttttttnnnnnnnnnnaagcttggcgtggatccgatatcaactagatcttgagacaaatggcagtattcatccacaattttaaaagaaaaggggggattggggggtacagtgcaggggaaagaatagtagacataatagcaacagacatacaaactaaag

SEQ ID NO: 10263 - DNA, 301 bp, Artificial Sequence
  Trp53.2_Notch1.2
  crRNA array
  misc_feature (148)..(157): n is a, c, g, or t
cttggctttatatatcttgtggaaaggacgaaacaccgtaatttctactaagtgtagatgccagggtgagcacgtgggataatttctactaagtgtagatgtcgccccagcatcctgaagtaatttctactaagtgtagatttttttnnnnnnnnnnaagcttggcgtggatccgatatcaactagatcttgagacaaatggcagtattcatccacaattttaaaagaaaaggggggattggggggtacagtgcaggggaaagaatagtagacataatagcaacagacatacaaactaaag

SEQ ID NO: 10264 - DNA, 301 bp, Artificial Sequence
  Trp53.2_Notch1.3
  crRNA array
  misc_feature (148)..(157): n is a, c, g, or t
cttggctttatatatcttgtggaaaggacgaaacaccgtaatttctactaagtgtagatgccagggtgagcacgtgggataatttctactaagtgtagatagccacccccgccacgcctctaatttctactaagtgtagatttttttnnnnnnnnnnaagcttggcgtggatccgatatcaactagatcttgagacaaatggcagtattcatccacaattttaaaagaaaaggggggattggggggtacagtgcaggggaaagaatagtagacataatagcaacagacatacaaactaaag

SEQ ID NO: 10265 - DNA, 301 bp, Artificial Sequence
  Trp53.2_Notch1.4
  crRNA array
  misc_feature (148)..(157): n is a, c, g, or t
cttggctttatatatcttgtggaaaggacgaaacaccgtaatttctactaagtgtagatgccagggtgagcacgtgggataatttctactaagtgtagataaagtgtcagaggccagcaataatttctactaagtgtagatttttttnnnnnnnnnnaagcttggcgtggatccgatatcaactagatcttgagacaaatggcagtattcatccacaattttaaaagaaaaggggggattggggggtacagtgcaggggaaagaatagtagacataatagcaacagacatacaaactaaag

SEQ ID NO: 10266 - DNA, 301 bp, Artificial Sequence
  Trp53.3_Notch1.1
  crRNA array
  misc_feature (148)..(157): n is a, c, g, or t
cttggctttatatatcttgtggaaaggacgaaacaccgtaatttctactaagtgtagatccctcccacgtgctcacccttaatttctactaagtgtagattgggccaacgatgccaggactaatttctactaagtgtagatttttttnnnnnnnnnnaagcttggcgtggatccgatatcaactagatcttgagacaaatggcagtattcatccacaattttaaaagaaaaggggggattggggggtacagtgcaggggaaagaatagtagacataatagcaacagacatacaaactaaag

SEQ ID NO: 10267 - DNA, 301 bp, Artificial Sequence
  Trp53.3_Notch1.2
  crRNA array
  misc_feature (148)..(157): n is a, c, g, or t
cttggctttatatatcttgtggaaaggacgaaacaccgtaatttctactaagtgtagatccctcccacgtgctcacccttaatttctactaagtgtagatgtcgccccagcatcctgaagtaatttctactaagtgtagatttttttnnnnnnnnnnaagcttggcgtggatccgatatcaactagatcttgagacaaatggcagtattcatccacaattttaaaagaaaaggggggattggggggtacagtgcaggggaaagaatagtagacataatagcaacagacatacaaactaaag

SEQ ID NO: 10268 - DNA, 301 bp, Artificial Sequence
  Trp53.3_Notch1.3
  crRNA array
  misc_feature (148)..(157): n is a, c, g, or t
cttggctttatatatcttgtggaaaggacgaaacaccgtaatttctactaagtgtagatccctcccacgtgctcacccttaatttctactaagtgtagatagccacccccgccacgcctctaatttctactaagtgtagatttttttnnnnnnnnnnaagcttggcgtggatccgatatcaactagatcttgagacaaatggcagtattcatccacaattttaaaagaaaaggggggattggggggtacagtgcaggggaaagaatagtagacataatagcaacagacatacaaactaaag

SEQ ID NO: 10269 - DNA, 301 bp, Artificial Sequence
  Trp53.3_Notch1.4
  crRNA array
  misc_feature (148)..(157): n is a, c, g, or t
cttggctttatatatcttgtggaaaggacgaaacaccgtaatttctactaagtgtagatccctcccacgtgctcacccttaatttctactaagtgtagataaagtgtcagaggccagcaataatttctactaagtgtagatttttttnnnnnnnnnnaagcttggcgtggatccgatatcaactagatcttgagacaaatggcagtattcatccacaattttaaaagaaaaggggggattggggggtacagtgcaggggaaagaatagtagacataatagcaacagacatacaaactaaag

SEQ ID NO: 10270 - DNA, 301 bp, Artificial Sequence
  Trp53.4_Notch1.1
  crRNA array
  misc_feature (148)..(157): n is a, c, g, or t
cttggctttatatatcttgtggaaaggacgaaacaccgtaatttctactaagtgtagattccaccccccaccctgtctctaatttctactaagtgtagattgggccaacgatgccaggactaatttctactaagtgtagatttttttnnnnnnnnnnaagcttggcgtggatccgatatcaactagatcttgagacaaatggcagtattcatccacaattttaaaagaaaaggggggattggggggtacagtgcaggggaaagaatagtagacataatagcaacagacatacaaactaaag

SEQ ID NO: 10271 - DNA, 301 bp, Artificial Sequence
  Trp53.4_Notch1.2
  crRNA array
  misc_feature (148)..(157): n is a, c, g, or t
cttggctttatatatcttgtggaaaggacgaaacaccgtaatttctactaagtgtagattccaccccccaccctgtctctaatttctactaagtgtagatgtcgccccagcatcctgaagtaatttctactaagtgtagatttttttnnnnnnnnnnaagcttggcgtggatccgatatcaactagatcttgagacaaatggcagtattcatccacaattttaaaagaaaaggggggattggggggtacagtgcaggggaaagaatagtagacataatagcaacagacatacaaactaaag

SEQ ID NO: 10272 - DNA, 301 bp, Artificial Sequence
  Trp53.4_Notch1.3
  crRNA array
  misc_feature (148)..(157): n is a, c, g, or t
cttggctttatatatcttgtggaaaggacgaaacaccgtaatttctactaagtgtagattccaccccccaccctgtctctaatttctactaagtgtagatagccacccccgccacgcctctaatttctactaagtgtagatttttttnnnnnnnnnnaagcttggcgtggatccgatatcaactagatcttgagacaaatggcagtattcatccacaattttaaaagaaaaggggggattggggggtacagtgcaggggaaagaatagtagacataatagcaacagacatacaaactaaag

SEQ ID NO: 10273 - DNA, 301 bp, Artificial Sequence
  Trp53.4_Notch1.4
  crRNA array
  misc_feature (148)..(157): n is a, c, g, or t
cttggctttatatatcttgtggaaaggacgaaacaccgtaatttctactaagtgtagattccaccccccaccctgtctctaatttctactaagtgtagataaagtgtcagaggccagcaataatttctactaagtgtagatttttttnnnnnnnnnnaagcttggcgtggatccgatatcaactagatcttgagacaaatggcagtattcatccacaattttaaaagaaaaggggggattggggggtacagtgcaggggaaagaatagtagacataatagcaacagacatacaaactaaag

SEQ ID NO: 10274 - DNA, 301 bp, Artificial Sequence
  Trp53.1_Arid1a.1
  crRNA array
  misc_feature (148)..(157): n is a, c, g, or t
cttggctttatatatcttgtggaaaggacgaaacaccgtaatttctactaagtgtagatccctgaactgcccccagggataatttctactaagtgtagatcccgcgctcggccgctgccgtaatttctactaagtgtagatttttttnnnnnnnnnnaagcttggcgtggatccgatatcaactagatcttgagacaaatggcagtattcatccacaattttaaaagaaaaggggggattggggggtacagtgcaggggaaagaatagtagacataatagcaacagacatacaaactaaag

SEQ ID NO: 10275 - DNA, 301 bp, Artificial Sequence
  Trp53.1_Arid1a.2
  crRNA array
  misc_feature (148)..(157): n is a, c, g, or t
cttggctttatatatcttgtggaaaggacgaaacaccgtaatttctactaagtgtagatccctgaactgcccccagggataatttctactaagtgtagatagtgcaagatcgagcgtggataatttctactaagtgtagatttttttnnnnnnnnnnaagcttggcgtggatccgatatcaactagatcttgagacaaatggcagtattcatccacaattttaaaagaaaaggggggattggggggtacagtgcaggggaaagaatagtagacataatagcaacagacatacaaactaaag

SEQ ID NO: 10276 - DNA, 301 bp, Artificial Sequence
  Trp53.1_Arid1a.3
  crRNA array
  misc_feature (148)..(157): n is a, c, g, or t
cttggctttatatatcttgtggaaaggacgaaacaccgtaatttctactaagtgtagatccctgaactgcccccagggataatttctactaagtgtagatagtgagctggcagcactgcttaatttctactaagtgtagatttttttnnnnnnnnnnaagcttggcgtggatccgatatcaactagatcttgagacaaatggcagtattcatccacaattttaaaagaaaaggggggattggggggtacagtgcaggggaaagaatagtagacataatagcaacagacatacaaactaaag

SEQ ID NO: 10277 - DNA, 301 bp, Artificial Sequence
  Trp53.1_Arid1a.4
  crRNA array
  misc_feature (148)..(157): n is a, c, g, or t
cttggctttatatatcttgtggaaaggacgaaacaccgtaatttctactaagtgtagatccctgaactgcccccagggataatttctactaagtgtagatgccgagaccgagtctctgcataatttctactaagtgtagatttttttnnnnnnnnnnaagcttggcgtggatccgatatcaactagatcttgagacaaatggcagtattcatccacaattttaaaagaaaaggggggattggggggtacagtgcaggggaaagaatagtagacataatagcaacagacatacaaactaaag

SEQ ID NO: 10278 - DNA, 301 bp, Artificial Sequence
  Trp53.2_Arid1a.1
  crRNA array
  misc_feature (148)..(157): n is a, c, g, or t
cttggctttatatatcttgtggaaaggacgaaacaccgtaatttctactaagtgtagatgccagggtgagcacgtgggataatttctactaagtgtagatcccgcgctcggccgctgccgtaatttctactaagtgtagatttttttnnnnnnnnnnaagcttggcgtggatccgatatcaactagatcttgagacaaatggcagtattcatccacaattttaaaagaaaaggggggattggggggtacagtgcaggggaaagaatagtagacataatagcaacagacatacaaactaaag

SEQ ID NO: 10279 - DNA, 301 bp, Artificial Sequence
  Trp53.2_Arid1a.2
  crRNA array
  misc_feature (148)..(157): n is a, c, g, or t
cttggctttatatatcttgtggaaaggacgaaacaccgtaatttctactaagtgtagatgccagggtgagcacgtgggataatttctactaagtgtagatagtgcaagatcgagcgtggataatttctactaagtgtagatttttttnnnnnnnnnnaagcttggcgtggatccgatatcaactagatcttgagacaaatggcagtattcatccacaattttaaaagaaaaggggggattggggggtacagtgcaggggaaagaatagtagacataatagcaacagacatacaaactaaag

SEQ ID NO: 10280 - DNA, 301 bp, Artificial Sequence
  Trp53.2_Arid1a.3
  crRNA array
  misc_feature (148)..(157): n is a, c, g, or t
cttggctttatatatcttgtggaaaggacgaaacaccgtaatttctactaagtgtagatgccagggtgagcacgtgggataatttctactaagtgtagatagtgagctggcagcactgcttaatttctactaagtgtagatttttttnnnnnnnnnnaagcttggcgtggatccgatatcaactagatcttgagacaaatggcagtattcatccacaattttaaaagaaaaggggggattggggggtacagtgcaggggaaagaatagtagacataatagcaacagacatacaaactaaag

SEQ ID NO: 10281 - DNA, 301 bp, Artificial Sequence
  Trp53.2_Arid1a.4
  crRNA array
  misc_feature (148)..(157): n is a, c, g, or t
cttggctttatatatcttgtggaaaggacgaaacaccgtaatttctactaagtgtagatgccagggtgagcacgtgggataatttctactaagtgtagatgccgagaccgagtctctgcataatttctactaagtgtagatttttttnnnnnnnnnnaagcttggcgtggatccgatatcaactagatcttgagacaaatggcagtattcatccacaattttaaaagaaaaggggggattggggggtacagtgcaggggaaagaatagtagacataatagcaacagacatacaaactaaag

SEQ ID NO: 10282 - DNA, 301 bp, Artificial Sequence
  Trp53.3_Arid1a.1
  crRNA array
  misc_feature (148)..(157): n is a, c, g, or t
cttggctttatatatcttgtggaaaggacgaaacaccgtaatttctactaagtgtagatccctcccacgtgctcacccttaatttctactaagtgtagatcccgcgctcggccgctgccgtaatttctactaagtgtagatttttttnnnnnnnnnnaagcttggcgtggatccgatatcaactagatcttgagacaaatggcagtattcatccacaattttaaaagaaaaggggggattggggggtacagtgcaggggaaagaatagtagacataatagcaacagacatacaaactaaag

SEQ ID NO: 10283 - DNA, 301 bp, Artificial Sequence
  Trp53.3_Arid1a.2
  crRNA array
  misc_feature (148)..(157): n is a, c, g, or t
cttggctttatatatcttgtggaaaggacgaaacaccgtaatttctactaagtgtagatccctcccacgtgctcacccttaatttctactaagtgtagatagtgcaagatcgagcgtggataatttctactaagtgtagatttttttnnnnnnnnnnaagcttggcgtggatccgatatcaactagatcttgagacaaatggcagtattcatccacaattttaaaagaaaaggggggattggggggtacagtgcaggggaaagaatagtagacataatagcaacagacatacaaactaaag

SEQ ID NO: 10284 - DNA, 301 bp, Artificial Sequence
  Trp53.3_Arid1a.3
  crRNA array
  misc_feature (148)..(157): n is a, c, g, or t
cttggctttatatatcttgtggaaaggacgaaacaccgtaatttctactaagtgtagatccctcccacgtgctcacccttaatttctactaagtgtagatagtgagctggcagcactgcttaatttctactaagtgtagatttttttnnnnnnnnnnaagcttggcgtggatccgatatcaactagatcttgagacaaatggcagtattcatccacaattttaaaagaaaaggggggattggggggtacagtgcaggggaaagaatagtagacataatagcaacagacatacaaactaaag

SEQ ID NO: 10285 - DNA, 301 bp, Artificial Sequence
  Trp53.3_Arid1a.4
  crRNA array
  misc_feature (148)..(157): n is a, c, g, or t
cttggctttatatatcttgtggaaaggacgaaacaccgtaatttctactaagtgtagatccctcccacgtgctcacccttaatttctactaagtgtagatgccgagaccgagtctctgcataatttctactaagtgtagatttttttnnnnnnnnnnaagcttggcgtggatccgatatcaactagatcttgagacaaatggcagtattcatccacaattttaaaagaaaaggggggattggggggtacagtgcaggggaaagaatagtagacataatagcaacagacatacaaactaaag

SEQ ID NO: 10286 - DNA, 301 bp, Artificial Sequence
  Trp53.4_Arid1a.1
  crRNA array
  misc_feature (148)..(157): n is a, c, g, or t
cttggctttatatatcttgtggaaaggacgaaacaccgtaatttctactaagtgtagattccaccccccaccctgtctctaatttctactaagtgtagatcccgcgctcggccgctgccgtaatttctactaagtgtagatttttttnnnnnnnnnnaagcttggcgtggatccgatatcaactagatcttgagacaaatggcagtattcatccacaattttaaaagaaaaggggggattggggggtacagtgcaggggaaagaatagtagacataatagcaacagacatacaaactaaag

SEQ ID NO: 10287 - DNA, 301 bp, Artificial Sequence
  Trp53.4_Arid1a.2
  crRNA array
  misc_feature (148)..(157): n is a, c, g, or t
cttggctttatatatcttgtggaaaggacgaaacaccgtaatttctactaagtgtagattccaccccccaccctgtctctaatttctactaagtgtagatagtgcaagatcgagcgtggataatttctactaagtgtagatttttttnnnnnnnnnnaagcttggcgtggatccgatatcaactagatcttgagacaaatggcagtattcatccacaattttaaaagaaaaggggggattggggggtacagtgcaggggaaagaatagtagacataatagcaacagacatacaaactaaag

SEQ ID NO: 10288 - DNA, 301 bp, Artificial Sequence
  Trp53.4_Arid1a.3
  crRNA array
  misc_feature (148)..(157): n is a, c, g, or t
cttggctttatatatcttgtggaaaggacgaaacaccgtaatttctactaagtgtagattccaccccccaccctgtctctaatttctactaagtgtagatagtgagctggcagcactgcttaatttctactaagtgtagatttttttnnnnnnnnnnaagcttggcgtggatccgatatcaactagatcttgagacaaatggcagtattcatccacaattttaaaagaaaaggggggattggggggtacagtgcaggggaaagaatagtagacataatagcaacagacatacaaactaaag

SEQ ID NO: 10289 - DNA, 301 bp, Artificial Sequence
  Trp53.4_Arid1a.4
  crRNA array
  misc_feature (148)..(157): n is a, c, g, or t
cttggctttatatatcttgtggaaaggacgaaacaccgtaatttctactaagtgtagattccaccccccaccctgtctctaatttctactaagtgtagatgccgagaccgagtctctgcataatttctactaagtgtagatttttttnnnnnnnnnnaagcttggcgtggatccgatatcaactagatcttgagacaaatggcagtattcatccacaattttaaaagaaaaggggggattggggggtacagtgcaggggaaagaatagtagacataatagcaacagacatacaaactaaag

SEQ ID NO: 10290 - DNA, 301 bp, Artificial Sequence
  Trp53.1_Trim72.1
  crRNA array
  misc_feature (148)..(157): n is a, c, g, or t
cttggctttatatatcttgtggaaaggacgaaacaccgtaatttctactaagtgtagatccctgaactgcccccagggataatttctactaagtgtagataccccagctctgcgcacccgtaatttctactaagtgtagatttttttnnnnnnnnnnaagcttggcgtggatccgatatcaactagatcttgagacaaatggcagtattcatccacaattttaaaagaaaaggggggattggggggtacagtgcaggggaaagaatagtagacataatagcaacagacatacaaactaaag

SEQ ID NO: 10291 - DNA, 301 bp, Artificial Sequence
  Trp53.1_Trim72.2
  crRNA array
  misc_feature (148)..(157): n is a, c, g, or t
cttggctttatatatcttgtggaaaggacgaaacaccgtaatttctactaagtgtagatccctgaactgcccccagggataatttctactaagtgtagatcacgagcgtctgcccgggcctaatttctactaagtgtagatttttttnnnnnnnnnnaagcttggcgtggatccgatatcaactagatcttgagacaaatggcagtattcatccacaattttaaaagaaaaggggggattggggggtacagtgcaggggaaagaatagtagacataatagcaacagacatacaaactaaag

SEQ ID NO: 10292 - DNA, 301 bp, Artificial Sequence
  Trp53.1_Trim72.3
  crRNA array
  misc_feature (148)..(157): n is a, c, g, or t
cttggctttatatatcttgtggaaaggacgaaacaccgtaatttctactaagtgtagatccctgaactgcccccagggataatttctactaagtgtagatacgtgtgctggcacgacaagtaatttctactaagtgtagatttttttnnnnnnnnnnaagcttggcgtggatccgatatcaactagatcttgagacaaatggcagtattcatccacaattttaaaagaaaaggggggattggggggtacagtgcaggggaaagaatagtagacataatagcaacagacatacaaactaaag

SEQ ID NO: 10293 - DNA, 301 bp, Artificial Sequence
  Trp53.1_Trim72.4
  crRNA array
  misc_feature (148)..(157): n is a, c, g, or t
cttggctttatatatcttgtggaaaggacgaaacaccgtaatttctactaagtgtagatccctgaactgcccccagggataatttctactaagtgtagattgccgtgcctgcctgatccgtaatttctactaagtgtagatttttttnnnnnnnnnnaagcttggcgtggatccgatatcaactagatcttgagacaaatggcagtattcatccacaattttaaaagaaaaggggggattggggggtacagtgcaggggaaagaatagtagacataatagcaacagacatacaaactaaag

SEQ ID NO: 10294 - DNA, 301 bp, Artificial Sequence
  Trp53.2_Trim72.1
  crRNA array
  misc_feature (148)..(157): n is a, c, g, or t
cttggctttatatatcttgtggaaaggacgaaacaccgtaatttctactaagtgtagatgccagggtgagcacgtgggataatttctactaagtgtagataccccagctctgcgcacccgtaatttctactaagtgtagatttttttnnnnnnnnnnaagcttggcgtggatccgatatcaactagatcttgagacaaatggcagtattcatccacaattttaaaagaaaaggggggattggggggtacagtgcaggggaaagaatagtagacataatagcaacagacatacaaactaaag

SEQ ID NO: 10295 - DNA, 301 bp, Artificial Sequence
  Trp53.2_Trim72.2
  crRNA array
  misc_feature (148)..(157): n is a, c, g, or t
cttggctttatatatcttgtggaaaggacgaaacaccgtaatttctactaagtgtagatgccagggtgagcacgtgggataatttctactaagtgtagatcacgagcgtctgcccgggcctaatttctactaagtgtagatttttttnnnnnnnnnnaagcttggcgtggatccgatatcaactagatcttgagacaaatggcagtattcatccacaattttaaaagaaaaggggggattggggggtacagtgcaggggaaagaatagtagacataatagcaacagacatacaaactaaag

SEQ ID NO: 10296 - DNA, 301 bp, Artificial Sequence
  Trp53.2_Trim72.3
  crRNA array
  misc_feature (148)..(157): n is a, c, g, or t
cttggctttatatatcttgtggaaaggacgaaacaccgtaatttctactaagtgtagatgccagggtgagcacgtgggataatttctactaagtgtagatacgtgtgctggcacgacaagtaatttctactaagtgtagatttttttnnnnnnnnnnaagcttggcgtggatccgatatcaactagatcttgagacaaatggcagtattcatccacaattttaaaagaaaaggggggattggggggtacagtgcaggggaaagaatagtagacataatagcaacagacatacaaactaaag

SEQ ID NO: 10297 - DNA, 301 bp, Artificial Sequence
  Trp53.2_Trim72.4
  crRNA array
  misc_feature (148)..(157): n is a, c, g, or t
cttggctttatatatcttgtggaaaggacgaaacaccgtaatttctactaagtgtagatgccagggtgagcacgtgggataatttctactaagtgtagattgccgtgcctgcctgatccgtaatttctactaagtgtagatttttttnnnnnnnnnnaagcttggcgtggatccgatatcaactagatcttgagacaaatggcagtattcatccacaattttaaaagaaaaggggggattggggggtacagtgcaggggaaagaatagtagacataatagcaacagacatacaaactaaag

SEQ ID NO: 10298 - DNA, 301 bp, Artificial Sequence
  Trp53.3_Trim72.1
  crRNA array
  misc_feature (148)..(157): n is a, c, g, or t
cttggctttatatatcttgtggaaaggacgaaacaccgtaatttctactaagtgtagatccctcccacgtgctcacccttaatttctactaagtgtagataccccagctctgcgcacccgtaatttctactaagtgtagatttttttnnnnnnnnnnaagcttggcgtggatccgatatcaactagatcttgagacaaatggcagtattcatccacaattttaaaagaaaaggggggattggggggtacagtgcaggggaaagaatagtagacataatagcaacagacatacaaactaaag

SEQ ID NO: 10299 - DNA, 301 bp, Artificial Sequence
  Trp53.3_Trim72.2
  crRNA array
  misc_feature (148)..(157): n is a, c, g, or t
cttggctttatatatcttgtggaaaggacgaaacaccgtaatttctactaagtgtagatccctcccacgtgctcacccttaatttctactaagtgtagatcacgagcgtctgcccgggcctaatttctactaagtgtagatttttttnnnnnnnnnnaagcttggcgtggatccgatatcaactagatcttgagacaaatggcagtattcatccacaattttaaaagaaaaggggggattggggggtacagtgcaggggaaagaatagtagacataatagcaacagacatacaaactaaag

SEQ ID NO: 10300 - DNA, 301 bp, Artificial Sequence
  Trp53.3_Trim72.3
  crRNA array
  misc_feature (148)..(157): n is a, c, g, or t
cttggctttatatatcttgtggaaaggacgaaacaccgtaatttctactaagtgtagatccctcccacgtgctcacccttaatttctactaagtgtagatacgtgtgctggcacgacaagtaatttctactaagtgtagatttttttnnnnnnnnnnaagcttggcgtggatccgatatcaactagatcttgagacaaatggcagtattcatccacaattttaaaagaaaaggggggattggggggtacagtgcaggggaaagaatagtagacataatagcaacagacatacaaactaaag

SEQ ID NO: 10301 - DNA, 301 bp, Artificial Sequence
  Trp53.3_Trim72.4
  crRNA array
  misc_feature (148)..(157): n is a, c, g, or t
cttggctttatatatcttgtggaaaggacgaaacaccgtaatttctactaagtgtagatccctcccacgtgctcacccttaatttctactaagtgtagattgccgtgcctgcctgatccgtaatttctactaagtgtagatttttttnnnnnnnnnnaagcttggcgtggatccgatatcaactagatcttgagacaaatggcagtattcatccacaattttaaaagaaaaggggggattggggggtacagtgcaggggaaagaatagtagacataatagcaacagacatacaaactaaag

SEQ ID NO: 10302 - DNA, 301 bp, Artificial Sequence
  Trp53.4_Trim72.1
  crRNA array
  misc_feature (148)..(157): n is a, c, g, or t
cttggctttatatatcttgtggaaaggacgaaacaccgtaatttctactaagtgtagattccaccccccaccctgtctctaatttctactaagtgtagataccccagctctgcgcacccgtaatttctactaagtgtagatttttttnnnnnnnnnnaagcttggcgtggatccgatatcaactagatcttgagacaaatggcagtattcatccacaattttaaaagaaaaggggggattggggggtacagtgcaggggaaagaatagtagacataatagcaacagacatacaaactaaag

SEQ ID NO: 10303 - DNA, 301 bp, Artificial Sequence
  Trp53.4_Trim72.2
  crRNA array
  misc_feature (148)..(157): n is a, c, g, or t
cttggctttatatatcttgtggaaaggacgaaacaccgtaatttctactaagtgtagattccaccccccaccctgtctctaatttctactaagtgtagatcacgagcgtctgcccgggcctaatttctactaagtgtagatttttttnnnnnnnnnnaagcttggcgtggatccgatatcaactagatcttgagacaaatggcagtattcatccacaattttaaaagaaaaggggggattggggggtacagtgcaggggaaagaatagtagacataatagcaacagacatacaaactaaag

SEQ ID NO: 10304 - DNA, 301 bp, Artificial Sequence
  Trp53.4_Trim72.3
  crRNA array
  misc_feature (148)..(157): n is a, c, g, or t
cttggctttatatatcttgtggaaaggacgaaacaccgtaatttctactaagtgtagattccaccccccaccctgtctctaatttctactaagtgtagatacgtgtgctggcacgacaagtaatttctactaagtgtagatttttttnnnnnnnnnnaagcttggcgtggatccgatatcaactagatcttgagacaaatggcagtattcatccacaattttaaaagaaaaggggggattggggggtacagtgcaggggaaagaatagtagacataatagcaacagacatacaaactaaag

SEQ ID NO: 10305 - DNA, 301 bp, Artificial Sequence
  Trp53.4_Trim72.4
  crRNA array
  misc_feature (148)..(157): n is a, c, g, or t
cttggctttatatatcttgtggaaaggacgaaacaccgtaatttctactaagtgtagattccaccccccaccctgtctctaatttctactaagtgtagattgccgtgcctgcctgatccgtaatttctactaagtgtagatttttttnnnnnnnnnnaagcttggcgtggatccgatatcaactagatcttgagacaaatggcagtattcatccacaattttaaaagaaaaggggggattggggggtacagtgcaggggaaagaatagtagacataatagcaacagacatacaaactaaag

SEQ ID NO: 10306 - DNA, 301 bp, Artificial Sequence
  Trp53.1_Zfhx3.1
  crRNA array
  misc_feature (148)..(157): n is a, c, g, or t
cttggctttatatatcttgtggaaaggacgaaacaccgtaatttctactaagtgtagatccctgaactgcccccagggataatttctactaagtgtagatcgctgcgaggtgtgtaactataatttctactaagtgtagatttttttnnnnnnnnnnaagcttggcgtggatccgatatcaactagatcttgagacaaatggcagtattcatccacaattttaaaagaaaaggggggattggggggtacagtgcaggggaaagaatagtagacataatagcaacagacatacaaactaaag

SEQ ID NO: 10307 - DNA, 301 bp, Artificial Sequence
  Trp53.1_Zfhx3.2
  crRNA array
  misc_feature (148)..(157): n is a, c, g, or t
cttggctttatatatcttgtggaaaggacgaaacaccgtaatttctactaagtgtagatccctgaactgcccccagggataatttctactaagtgtagatacgtgcgacacaaaagcaactaatttctactaagtgtagatttttttnnnnnnnnnnaagcttggcgtggatccgatatcaactagatcttgagacaaatggcagtattcatccacaattttaaaagaaaaggggggattggggggtacagtgcaggggaaagaatagtagacataatagcaacagacatacaaactaaag

SEQ ID NO: 10308 - DNA, 301 bp, Artificial Sequence
  Trp53.1_Zfhx3.3
  crRNA array
  misc_feature (148)..(157): n is a, c, g, or t
cttggctttatatatcttgtggaaaggacgaaacaccgtaatttctactaagtgtagatccctgaactgcccccagggataatttctactaagtgtagattgctctacggcaagaggaaataatttctactaagtgtagatttttttnnnnnnnnnnaagcttggcgtggatccgatatcaactagatcttgagacaaatggcagtattcatccacaattttaaaagaaaaggggggattggggggtacagtgcaggggaaagaatagtagacataatagcaacagacatacaaactaaag

SEQ ID NO: 10309 - DNA, 301 bp, Artificial Sequence
  Trp53.1_Zfhx3.4
  crRNA array
  misc_feature (148)..(157): n is a, c, g, or t
cttggctttatatatcttgtggaaaggacgaaacaccgtaatttctactaagtgtagatccctgaactgcccccagggataatttctactaagtgtagatagtgagcggcagactgcgagtaatttctactaagtgtagatttttttnnnnnnnnnnaagcttggcgtggatccgatatcaactagatcttgagacaaatggcagtattcatccacaattttaaaagaaaaggggggattggggggtacagtgcaggggaaagaatagtagacataatagcaacagacatacaaactaaag

SEQ ID NO: 10310 - DNA, 301 bp, Artificial Sequence
  Trp53.2_Zfhx3.1
  crRNA array
  misc_feature (148)..(157): n is a, c, g, or t
cttggctttatatatcttgtggaaaggacgaaacaccgtaatttctactaagtgtagatgccagggtgagcacgtgggataatttctactaagtgtagatcgctgcgaggtgtgtaactataatttctactaagtgtagatttttttnnnnnnnnnnaagcttggcgtggatccgatatcaactagatcttgagacaaatggcagtattcatccacaattttaaaagaaaaggggggattggggggtacagtgcaggggaaagaatagtagacataatagcaacagacatacaaactaaag

SEQ ID NO: 10311 - DNA, 301 bp, Artificial Sequence
  Trp53.2_Zfhx3.2
  crRNA array
  misc_feature (148)..(157): n is a, c, g, or t
cttggctttatatatcttgtggaaaggacgaaacaccgtaatttctactaagtgtagatgccagggtgagcacgtgggataatttctactaagtgtagatacgtgcgacacaaaagcaactaatttctactaagtgtagatttttttnnnnnnnnnnaagcttggcgtggatccgatatcaactagatcttgagacaaatggcagtattcatccacaattttaaaagaaaaggggggattggggggtacagtgcaggggaaagaatagtagacataatagcaacagacatacaaactaaag

SEQ ID NO: 10312 - DNA, 301 bp, Artificial Sequence
  Trp53.2_Zfhx3.3
  crRNA array
  misc_feature (148)..(157): n is a, c, g, or t
cttggctttatatatcttgtggaaaggacgaaacaccgtaatttctactaagtgtagatgccagggtgagcacgtgggataatttctactaagtgtagattgctctacggcaagaggaaataatttctactaagtgtagatttttttnnnnnnnnnnaagcttggcgtggatccgatatcaactagatcttgagacaaatggcagtattcatccacaattttaaaagaaaaggggggattggggggtacagtgcaggggaaagaatagtagacataatagcaacagacatacaaactaaag

SEQ ID NO: 10313 - DNA, 301 bp, Artificial Sequence
  Trp53.2_Zfhx3.4
  crRNA array
  misc_feature (148)..(157): n is a, c, g, or t
cttggctttatatatcttgtggaaaggacgaaacaccgtaatttctactaagtgtagatgccagggtgagcacgtgggataatttctactaagtgtagatagtgagcggcagactgcgagtaatttctactaagtgtagatttttttnnnnnnnnnnaagcttggcgtggatccgatatcaactagatcttgagacaaatggcagtattcatccacaattttaaaagaaaaggggggattggggggtacagtgcaggggaaagaatagtagacataatagcaacagacatacaaactaaag

SEQ ID NO: 10314 - DNA, 301 bp, Artificial Sequence
  Trp53.3_Zfhx3.1
  crRNA array
  misc_feature (148)..(157): n is a, c, g, or t
cttggctttatatatcttgtggaaaggacgaaacaccgtaatttctactaagtgtagatccctcccacgtgctcacccttaatttctactaagtgtagatcgctgcgaggtgtgtaactataatttctactaagtgtagatttttttnnnnnnnnnnaagcttggcgtggatccgatatcaactagatcttgagacaaatggcagtattcatccacaattttaaaagaaaaggggggattggggggtacagtgcaggggaaagaatagtagacataatagcaacagacatacaaactaaag

SEQ ID NO: 10315 - DNA, 301 bp, Artificial Sequence
  Trp53.3_Zfhx3.2
  crRNA array
  misc_feature (148)..(157): n is a, c, g, or t
cttggctttatatatcttgtggaaaggacgaaacaccgtaatttctactaagtgtagatccctcccacgtgctcacccttaatttctactaagtgtagatacgtgcgacacaaaagcaactaatttctactaagtgtagatttttttnnnnnnnnnnaagcttggcgtggatccgatatcaactagatcttgagacaaatggcagtattcatccacaattttaaaagaaaaggggggattggggggtacagtgcaggggaaagaatagtagacataatagcaacagacatacaaactaaag

SEQ ID NO: 10316 - DNA, 301 bp, Artificial Sequence
  Trp53.3_Zfhx3.3
  crRNA array
  misc_feature (148)..(157): n is a, c, g, or t
cttggctttatatatcttgtggaaaggacgaaacaccgtaatttctactaagtgtagatccctcccacgtgctcacccttaatttctactaagtgtagattgctctacggcaagaggaaataatttctactaagtgtagatttttttnnnnnnnnnnaagcttggcgtggatccgatatcaactagatcttgagacaaatggcagtattcatccacaattttaaaagaaaaggggggattggggggtacagtgcaggggaaagaatagtagacataatagcaacagacatacaaactaaag

SEQ ID NO: 10317 - DNA, 301 bp, Artificial Sequence
  Trp53.3_Zfhx3.4
  crRNA array
  misc_feature (148)..(157): n is a, c, g, or t
cttggctttatatatcttgtggaaaggacgaaacaccgtaatttctactaagtgtagatccctcccacgtgctcacccttaatttctactaagtgtagatagtgagcggcagactgcgagtaatttctactaagtgtagatttttttnnnnnnnnnnaagcttggcgtggatccgatatcaactagatcttgagacaaatggcagtattcatccacaattttaaaagaaaaggggggattggggggtacagtgcaggggaaagaatagtagacataatagcaacagacatacaaactaaag

SEQ ID NO: 10318 - DNA, 301 bp, Artificial Sequence
  Trp53.4_Zfhx3.1
  crRNA array
  misc_feature (148)..(157): n is a, c, g, or t
cttggctttatatatcttgtggaaaggacgaaacaccgtaatttctactaagtgtagattccaccccccaccctgtctctaatttctactaagtgtagatcgctgcgaggtgtgtaactataatttctactaagtgtagatttttttnnnnnnnnnnaagcttggcgtggatccgatatcaactagatcttgagacaaatggcagtattcatccacaattttaaaagaaaaggggggattggggggtacagtgcaggggaaagaatagtagacataatagcaacagacatacaaactaaag

SEQ ID NO: 10319 - DNA, 301 bp, Artificial Sequence
  Trp53.4_Zfhx3.2
  crRNA array
  misc_feature (148)..(157): n is a, c, g, or t
cttggctttatatatcttgtggaaaggacgaaacaccgtaatttctactaagtgtagattccaccccccaccctgtctctaatttctactaagtgtagatacgtgcgacacaaaagcaactaatttctactaagtgtagatttttttnnnnnnnnnnaagcttggcgtggatccgatatcaactagatcttgagacaaatggcagtattcatccacaattttaaaagaaaaggggggattggggggtacagtgcaggggaaagaatagtagacataatagcaacagacatacaaactaaag

SEQ ID NO: 10320 - DNA, 301 bp, Artificial Sequence
  Trp53.4_Zfhx3.3
  crRNA array
  misc_feature (148)..(157): n is a, c, g, or t
cttggctttatatatcttgtggaaaggacgaaacaccgtaatttctactaagtgtagattccaccccccaccctgtctctaatttctactaagtgtagattgctctacggcaagaggaaataatttctactaagtgtagatttttttnnnnnnnnnnaagcttggcgtggatccgatatcaactagatcttgagacaaatggcagtattcatccacaattttaaaagaaaaggggggattggggggtacagtgcaggggaaagaatagtagacataatagcaacagacatacaaactaaag

SEQ ID NO: 10321 - DNA, 301 bp, Artificial Sequence
  Trp53.4_Zfhx3.4
  crRNA array
  misc_feature (148)..(157): n is a, c, g, or t
cttggctttatatatcttgtggaaaggacgaaacaccgtaatttctactaagtgtagattccaccccccaccctgtctctaatttctactaagtgtagatagtgagcggcagactgcgagtaatttctactaagtgtagatttttttnnnnnnnnnnaagcttggcgtggatccgatatcaactagatcttgagacaaatggcagtattcatccacaattttaaaagaaaaggggggattggggggtacagtgcaggggaaagaatagtagacataatagcaacagacatacaaactaaag

SEQ ID NO: 10322 - DNA, 301 bp, Artificial Sequence
  Trp53.1_Crebbp.1
  crRNA array
  misc_feature (148)..(157): n is a, c, g, or t
cttggctttatatatcttgtggaaaggacgaaacaccgtaatttctactaagtgtagatccctgaactgcccccagggataatttctactaagtgtagatctcacggcggcggcgggccgtaatttctactaagtgtagatttttttnnnnnnnnnnaagcttggcgtggatccgatatcaactagatcttgagacaaatggcagtattcatccacaattttaaaagaaaaggggggattggggggtacagtgcaggggaaagaatagtagacataatagcaacagacatacaaactaaag

SEQ ID NO: 10323 - DNA, 301 bp, Artificial Sequence
  Trp53.1_Crebbp.2
  crRNA array
  misc_feature (148)..(157): n is a, c, g, or t
cttggctttatatatcttgtggaaaggacgaaacaccgtaatttctactaagtgtagatccctgaactgcccccagggataatttctactaagtgtagatcgcgagcaggtgaagatggctaatttctactaagtgtagatttttttnnnnnnnnnnaagcttggcgtggatccgatatcaactagatcttgagacaaatggcagtattcatccacaattttaaaagaaaaggggggattggggggtacagtgcaggggaaagaatagtagacataatagcaacagacatacaaactaaag

SEQ ID NO: 10324 - DNA, 301 bp, Artificial Sequence
  Trp53.1_Crebbp.3
  crRNA array
  misc_feature (148)..(157): n is a, c, g, or t
cttggctttatatatcttgtggaaaggacgaaacaccgtaatttctactaagtgtagatccctgaactgcccccagggataatttctactaagtgtagatggctccgccgcccgcccgcgtaatttctactaagtgtagatttttttnnnnnnnnnnaagcttggcgtggatccgatatcaactagatcttgagacaaatggcagtattcatccacaattttaaaagaaaaggggggattggggggtacagtgcaggggaaagaatagtagacataatagcaacagacatacaaactaaag

SEQ ID NO: 10325 - DNA, 301 bp, Artificial Sequence
  Trp53.1_Crebbp.4
  crRNA array
  misc_feature (148)..(157): n is a, c, g, or t
cttggctttatatatcttgtggaaaggacgaaacaccgtaatttctactaagtgtagatccctgaactgcccccagggataatttctactaagtgtagattggactagatgactccgtagtaatttctactaagtgtagatttttttnnnnnnnnnnaagcttggcgtggatccgatatcaactagatcttgagacaaatggcagtattcatccacaattttaaaagaaaaggggggattggggggtacagtgcaggggaaagaatagtagacataatagcaacagacatacaaactaaag

SEQ ID NO: 10326 - DNA, 301 bp, Artificial Sequence
  Trp53.2_Crebbp.1
  crRNA array
  misc_feature (148)..(157): n is a, c, g, or t
cttggctttatatatcttgtggaaaggacgaaacaccgtaatttctactaagtgtagatgccagggtgagcacgtgggataatttctactaagtgtagatctcacggcggcggcgggccgtaatttctactaagtgtagatttttttnnnnnnnnnnaagcttggcgtggatccgatatcaactagatcttgagacaaatggcagtattcatccacaattttaaaagaaaaggggggattggggggtacagtgcaggggaaagaatagtagacataatagcaacagacatacaaactaaag

SEQ ID NO: 10327 - DNA, 301 bp, Artificial Sequence
  Trp53.2_Crebbp.2
  crRNA array
  misc_feature (148)..(157): n is a, c, g, or t
cttggctttatatatcttgtggaaaggacgaaacaccgtaatttctactaagtgtagatgccagggtgagcacgtgggataatttctactaagtgtagatcgcgagcaggtgaagatggctaatttctactaagtgtagatttttttnnnnnnnnnnaagcttggcgtggatccgatatcaactagatcttgagacaaatggcagtattcatccacaattttaaaagaaaaggggggattggggggtacagtgcaggggaaagaatagtagacataatagcaacagacatacaaactaaag

SEQ ID NO: 10328 - DNA, 301 bp, Artificial Sequence
  Trp53.2_Crebbp.3
  crRNA array
  misc_feature (148)..(157): n is a, c, g, or t
cttggctttatatatcttgtggaaaggacgaaacaccgtaatttctactaagtgtagatgccagggtgagcacgtgggataatttctactaagtgtagatggctccgccgcccgcccgcgtaatttctactaagtgtagatttttttnnnnnnnnnnaagcttggcgtggatccgatatcaactagatcttgagacaaatggcagtattcatccacaattttaaaagaaaaggggggattggggggtacagtgcaggggaaagaatagtagacataatagcaacagacatacaaactaaag

SEQ ID NO: 10329 - DNA, 301 bp, Artificial Sequence
  Trp53.2_Crebbp.4
  crRNA array
  misc_feature (148)..(157): n is a, c, g, or t
cttggctttatatatcttgtggaaaggacgaaacaccgtaatttctactaagtgtagatgccagggtgagcacgtgggataatttctactaagtgtagattggactagatgactccgtagtaatttctactaagtgtagatttttttnnnnnnnnnnaagcttggcgtggatccgatatcaactagatcttgagacaaatggcagtattcatccacaattttaaaagaaaaggggggattggggggtacagtgcaggggaaagaatagtagacataatagcaacagacatacaaactaaag

SEQ ID NO: 10330 - DNA, 301 bp, Artificial Sequence
  Trp53.3_Crebbp.1
  crRNA array
  misc_feature (148)..(157): n is a, c, g, or t
cttggctttatatatcttgtggaaaggacgaaacaccgtaatttctactaagtgtagatccctcccacgtgctcacccttaatttctactaagtgtagatctcacggcggcggcgggccgtaatttctactaagtgtagatttttttnnnnnnnnnnaagcttggcgtggatccgatatcaactagatcttgagacaaatggcagtattcatccacaattttaaaagaaaaggggggattggggggtacagtgcaggggaaagaatagtagacataatagcaacagacatacaaactaaag

SEQ ID NO: 10331 - DNA, 301 bp, Artificial Sequence
  Trp53.3_Crebbp.2
  crRNA array
  misc_feature (148)..(157): n is a, c, g, or t
cttggctttatatatcttgtggaaaggacgaaacaccgtaatttctactaagtgtagatccctcccacgtgctcacccttaatttctactaagtgtagatcgcgagcaggtgaagatggctaatttctactaagtgtagatttttttnnnnnnnnnnaagcttggcgtggatccgatatcaactagatcttgagacaaatggcagtattcatccacaattttaaaagaaaaggggggattggggggtacagtgcaggggaaagaatagtagacataatagcaacagacatacaaactaaag

SEQ ID NO: 10332 - DNA, 301 bp, Artificial Sequence
  Trp53.3_Crebbp.3
  crRNA array
  misc_feature (148)..(157): n is a, c, g, or t
cttggctttatatatcttgtggaaaggacgaaacaccgtaatttctactaagtgtagatccctcccacgtgctcacccttaatttctactaagtgtagatggctccgccgcccgcccgcgtaatttctactaagtgtagatttttttnnnnnnnnnnaagcttggcgtggatccgatatcaactagatcttgagacaaatggcagtattcatccacaattttaaaagaaaaggggggattggggggtacagtgcaggggaaagaatagtagacataatagcaacagacatacaaactaaag

SEQ ID NO: 10333 - DNA, 301 bp, Artificial Sequence
  Trp53.3_Crebbp.4
  crRNA array
  misc_feature (148)..(157): n is a, c, g, or t
cttggctttatatatcttgtggaaaggacgaaacaccgtaatttctactaagtgtagatccctcccacgtgctcacccttaatttctactaagtgtagattggactagatgactccgtagtaatttctactaagtgtagatttttttnnnnnnnnnnaagcttggcgtggatccgatatcaactagatcttgagacaaatggcagtattcatccacaattttaaaagaaaaggggggattggggggtacagtgcaggggaaagaatagtagacataatagcaacagacatacaaactaaag

SEQ ID NO: 10334 - DNA, 301 bp, Artificial Sequence
  Trp53.4_Crebbp.1
  crRNA array
  misc_feature (148)..(157): n is a, c, g, or t
cttggctttatatatcttgtggaaaggacgaaacaccgtaatttctactaagtgtagattccaccccccaccctgtctctaatttctactaagtgtagatctcacggcggcggcgggccgtaatttctactaagtgtagatttttttnnnnnnnnnnaagcttggcgtggatccgatatcaactagatcttgagacaaatggcagtattcatccacaattttaaaagaaaaggggggattggggggtacagtgcaggggaaagaatagtagacataatagcaacagacatacaaactaaag

SEQ ID NO: 10335 - DNA, 301 bp, Artificial Sequence
  Trp53.4_Crebbp.2
  crRNA array
  misc_feature (148)..(157): n is a, c, g, or t
cttggctttatatatcttgtggaaaggacgaaacaccgtaatttctactaagtgtagattccaccccccaccctgtctctaatttctactaagtgtagatcgcgagcaggtgaagatggctaatttctactaagtgtagatttttttnnnnnnnnnnaagcttggcgtggatccgatatcaactagatcttgagacaaatggcagtattcatccacaattttaaaagaaaaggggggattggggggtacagtgcaggggaaagaatagtagacataatagcaacagacatacaaactaaag

SEQ ID NO: 10336 - DNA, 301 bp, Artificial Sequence
  Trp53.4_Crebbp.3
  crRNA array
  misc_feature (148)..(157): n is a, c, g, or t
cttggctttatatatcttgtggaaaggacgaaacaccgtaatttctactaagtgtagattccaccccccaccctgtctctaatttctactaagtgtagatggctccgccgcccgcccgcgtaatttctactaagtgtagatttttttnnnnnnnnnnaagcttggcgtggatccgatatcaactagatcttgagacaaatggcagtattcatccacaattttaaaagaaaaggggggattggggggtacagtgcaggggaaagaatagtagacataatagcaacagacatacaaactaaag

SEQ ID NO: 10337 - DNA, 301 bp, Artificial Sequence
  Trp53.4_Crebbp.4
  crRNA array
  misc_feature (148)..(157): n is a, c, g, or t
cttggctttatatatcttgtggaaaggacgaaacaccgtaatttctactaagtgtagattccaccccccaccctgtctctaatttctactaagtgtagattggactagatgactccgtagtaatttctactaagtgtagatttttttnnnnnnnnnnaagcttggcgtggatccgatatcaactagatcttgagacaaatggcagtattcatccacaattttaaaagaaaaggggggattggggggtacagtgcaggggaaagaatagtagacataatagcaacagacatacaaactaaag

SEQ ID NO: 10338 - DNA, 301 bp, Artificial Sequence
  Trp53.1_Cdkn2a.1
  crRNA array
  misc_feature (148)..(157): n is a, c, g, or t
cttggctttatatatcttgtggaaaggacgaaacaccgtaatttctactaagtgtagatccctgaactgcccccagggataatttctactaagtgtagatcaatcacgggagggagcagataatttctactaagtgtagatttttttnnnnnnnnnnaagcttggcgtggatccgatatcaactagatcttgagacaaatggcagtattcatccacaattttaaaagaaaaggggggattggggggtacagtgcaggggaaagaatagtagacataatagcaacagacatacaaactaaag

SEQ ID NO: 10339 - DNA, 301 bp, Artificial Sequence
  Trp53.1_Cdkn2a.2
  crRNA array
  misc_feature (148)..(157): n is a, c, g, or t
cttggctttatatatcttgtggaaaggacgaaacaccgtaatttctactaagtgtagatccctgaactgcccccagggataatttctactaagtgtagatgcccaacgccccgaactctttaatttctactaagtgtagatttttttnnnnnnnnnnaagcttggcgtggatccgatatcaactagatcttgagacaaatggcagtattcatccacaattttaaaagaaaaggggggattggggggtacagtgcaggggaaagaatagtagacataatagcaacagacatacaaactaaag

SEQ ID NO: 10340 - DNA, 301 bp, Artificial Sequence
  Trp53.1_Cdkn2a.3
  crRNA array
  misc_feature (148)..(157): n is a, c, g, or t
cttggctttatatatcttgtggaaaggacgaaacaccgtaatttctactaagtgtagatccctgaactgcccccagggataatttctactaagtgtagattgtaccgctgggaacgtcgctaatttctactaagtgtagatttttttnnnnnnnnnnaagcttggcgtggatccgatatcaactagatcttgagacaaatggcagtattcatccacaattttaaaagaaaaggggggattggggggtacagtgcaggggaaagaatagtagacataatagcaacagacatacaaactaaag

SEQ ID NO: 10341 - DNA, 301 bp, Artificial Sequence
  Trp53.1_Cdkn2a.4
  crRNA array
  misc_feature (148)..(157): n is a, c, g, or t
cttggctttatatatcttgtggaaaggacgaaacaccgtaatttctactaagtgtagatccctgaactgcccccagggataatttctactaagtgtagataagccacatgctagacacgctaatttctactaagtgtagatttttttnnnnnnnnnnaagcttggcgtggatccgatatcaactagatcttgagacaaatggcagtattcatccacaattttaaaagaaaaggggggattggggggtacagtgcaggggaaagaatagtagacataatagcaacagacatacaaactaaag

SEQ ID NO: 10342 - DNA, 301 bp, Artificial Sequence
  Trp53.2_Cdkn2a.1
  crRNA array
  misc_feature (148)..(157): n is a, c, g, or t
cttggctttatatatcttgtggaaaggacgaaacaccgtaatttctactaagtgtagatgccagggtgagcacgtgggataatttctactaagtgtagatcaatcacgggagggagcagataatttctactaagtgtagatttttttnnnnnnnnnnaagcttggcgtggatccgatatcaactagatcttgagacaaatggcagtattcatccacaattttaaaagaaaaggggggattggggggtacagtgcaggggaaagaatagtagacataatagcaacagacatacaaactaaag

SEQ ID NO: 10343 - DNA, 301 bp, Artificial Sequence
  Trp53.2_Cdkn2a.2
  crRNA array
  misc_feature (148)..(157): n is a, c, g, or t
cttggctttatatatcttgtggaaaggacgaaacaccgtaatttctactaagtgtagatgccagggtgagcacgtgggataatttctactaagtgtagatgcccaacgccccgaactctttaatttctactaagtgtagatttttttnnnnnnnnnnaagcttggcgtggatccgatatcaactagatcttgagacaaatggcagtattcatccacaattttaaaagaaaaggggggattggggggtacagtgcaggggaaagaatagtagacataatagcaacagacatacaaactaaag

SEQ ID NO: 10344 - DNA, 301 bp, Artificial Sequence
  Trp53.2_Cdkn2a.3
  crRNA array
  misc_feature (148)..(157): n is a, c, g, or t
cttggctttatatatcttgtggaaaggacgaaacaccgtaatttctactaagtgtagatgccagggtgagcacgtgggataatttctactaagtgtagattgtaccgctgggaacgtcgctaatttctactaagtgtagatttttttnnnnnnnnnnaagcttggcgtggatccgatatcaactagatcttgagacaaatggcagtattcatccacaattttaaaagaaaaggggggattggggggtacagtgcaggggaaagaatagtagacataatagcaacagacatacaaactaaag

SEQ ID NO: 10345 - DNA, 301 bp, Artificial Sequence
  Trp53.2_Cdkn2a.4
  crRNA array
  misc_feature (148)..(157): n is a, c, g, or t
cttggctttatatatcttgtggaaaggacgaaacaccgtaatttctactaagtgtagatgccagggtgagcacgtgggataatttctactaagtgtagataagccacatgctagacacgctaatttctactaagtgtagatttttttnnnnnnnnnnaagcttggcgtggatccgatatcaactagatcttgagacaaatggcagtattcatccacaattttaaaagaaaaggggggattggggggtacagtgcaggggaaagaatagtagacataatagcaacagacatacaaactaaag

SEQ ID NO: 10346 - DNA, 301 bp, Artificial Sequence
  Trp53.3_Cdkn2a.1
  crRNA array
  misc_feature (148)..(157): n is a, c, g, or t
cttggctttatatatcttgtggaaaggacgaaacaccgtaatttctactaagtgtagatccctcccacgtgctcacccttaatttctactaagtgtagatcaatcacgggagggagcagataatttctactaagtgtagatttttttnnnnnnnnnnaagcttggcgtggatccgatatcaactagatcttgagacaaatggcagtattcatccacaattttaaaagaaaaggggggattggggggtacagtgcaggggaaagaatagtagacataatagcaacagacatacaaactaaag

SEQ ID NO: 10347 - DNA, 301 bp, Artificial Sequence
  Trp53.3_Cdkn2a.2
  crRNA array
  misc_feature (148)..(157): n is a, c, g, or t
cttggctttatatatcttgtggaaaggacgaaacaccgtaatttctactaagtgtagatccctcccacgtgctcacccttaatttctactaagtgtagatgcccaacgccccgaactctttaatttctactaagtgtagatttttttnnnnnnnnnnaagcttggcgtggatccgatatcaactagatcttgagacaaatggcagtattcatccacaattttaaaagaaaaggggggattggggggtacagtgcaggggaaagaatagtagacataatagcaacagacatacaaactaaag

SEQ ID NO: 10348 - DNA, 301 bp, Artificial Sequence
  Trp53.3_Cdkn2a.3
  crRNA array
  misc_feature (148)..(157): n is a, c, g, or t
cttggctttatatatcttgtggaaaggacgaaacaccgtaatttctactaagtgtagatccctcccacgtgctcacccttaatttctactaagtgtagattgtaccgctgggaacgtcgctaatttctactaagtgtagatttttttnnnnnnnnnnaagcttggcgtggatccgatatcaactagatcttgagacaaatggcagtattcatccacaattttaaaagaaaaggggggattggggggtacagtgcaggggaaagaatagtagacataatagcaacagacatacaaactaaag

SEQ ID NO: 10349 - DNA, 301 bp, Artificial Sequence
  Trp53.3_Cdkn2a.4
  crRNA array
  misc_feature (148)..(157): n is a, c, g, or t
cttggctttatatatcttgtggaaaggacgaaacaccgtaatttctactaagtgtagatccctcccacgtgctcacccttaatttctactaagtgtagataagccacatgctagacacgctaatttctactaagtgtagatttttttnnnnnnnnnnaagcttggcgtggatccgatatcaactagatcttgagacaaatggcagtattcatccacaattttaaaagaaaaggggggattggggggtacagtgcaggggaaagaatagtagacataatagcaacagacatacaaactaaag

SEQ ID NO: 10350 - DNA, 301 bp, Artificial Sequence
  Trp53.4_Cdkn2a.1
  crRNA array
  misc_feature (148)..(157): n is a, c, g, or t
cttggctttatatatcttgtggaaaggacgaaacaccgtaatttctactaagtgtagattccaccccccaccctgtctctaatttctactaagtgtagatcaatcacgggagggagcagataatttctactaagtgtagatttttttnnnnnnnnnnaagcttggcgtggatccgatatcaactagatcttgagacaaatggcagtattcatccacaattttaaaagaaaaggggggattggggggtacagtgcaggggaaagaatagtagacataatagcaacagacatacaaactaaag

SEQ ID NO: 10351 - DNA, 301 bp, Artificial Sequence
  Trp53.4_Cdkn2a.2
  crRNA array
  misc_feature (148)..(157): n is a, c, g, or t
cttggctttatatatcttgtggaaaggacgaaacaccgtaatttctactaagtgtagattccaccccccaccctgtctctaatttctactaagtgtagatgcccaacgccccgaactctttaatttctactaagtgtagatttttttnnnnnnnnnnaagcttggcgtggatccgatatcaactagatcttgagacaaatggcagtattcatccacaattttaaaagaaaaggggggattggggggtacagtgcaggggaaagaatagtagacataatagcaacagacatacaaactaaag

SEQ ID NO: 10352 - DNA, 301 bp, Artificial Sequence
  Trp53.4_Cdkn2a.3
  crRNA array
  misc_feature (148)..(157): n is a, c, g, or t
cttggctttatatatcttgtggaaaggacgaaacaccgtaatttctactaagtgtagattccaccccccaccctgtctctaatttctactaagtgtagattgtaccgctgggaacgtcgctaatttctactaagtgtagatttttttnnnnnnnnnnaagcttggcgtggatccgatatcaactagatcttgagacaaatggcagtattcatccacaattttaaaagaaaaggggggattggggggtacagtgcaggggaaagaatagtagacataatagcaacagacatacaaactaaag

SEQ ID NO: 10353 - DNA, 301 bp, Artificial Sequence
  Trp53.4_Cdkn2a.4
  crRNA array
  misc_feature (148)..(157): n is a, c, g, or t
cttggctttatatatcttgtggaaaggacgaaacaccgtaatttctactaagtgtagattccaccccccaccctgtctctaatttctactaagtgtagataagccacatgctagacacgctaatttctactaagtgtagatttttttnnnnnnnnnnaagcttggcgtggatccgatatcaactagatcttgagacaaatggcagtattcatccacaattttaaaagaaaaggggggattggggggtacagtgcaggggaaagaatagtagacataatagcaacagacatacaaactaaag

SEQ ID NO: 10354 - DNA, 301 bp, Artificial Sequence
  Trp53.1_Wrn.1
  crRNA array
  misc_feature (148)..(157): n is a, c, g, or t
cttggctttatatatcttgtggaaaggacgaaacaccgtaatttctactaagtgtagatccctgaactgcccccagggataatttctactaagtgtagatgcaaaccactcgggtaattttaatttctactaagtgtagatttttttnnnnnnnnnnaagcttggcgtggatccgatatcaactagatcttgagacaaatggcagtattcatccacaattttaaaagaaaaggggggattggggggtacagtgcaggggaaagaatagtagacataatagcaacagacatacaaactaaag

SEQ ID NO: 10355 - DNA, 301 bp, Artificial Sequence
  Trp53.1_Wrn.2
  crRNA array
  misc_feature (148)..(157): n is a, c, g, or t
cttggctttatatatcttgtggaaaggacgaaacaccgtaatttctactaagtgtagatccctgaactgcccccagggataatttctactaagtgtagatgccatgtccagcagaacctttaatttctactaagtgtagatttttttnnnnnnnnnnaagcttggcgtggatccgatatcaactagatcttgagacaaatggcagtattcatccacaattttaaaagaaaaggggggattggggggtacagtgcaggggaaagaatagtagacataatagcaacagacatacaaactaaag

SEQ ID NO: 10356 - DNA, 301 bp, Artificial Sequence
  Trp53.1_Wrn.3
  crRNA array
  misc_feature (148)..(157): n is a, c, g, or t
cttggctttatatatcttgtggaaaggacgaaacaccgtaatttctactaagtgtagatccctgaactgcccccagggataatttctactaagtgtagatctgcagcaggccaccgcaattaatttctactaagtgtagatttttttnnnnnnnnnnaagcttggcgtggatccgatatcaactagatcttgagacaaatggcagtattcatccacaattttaaaagaaaaggggggattggggggtacagtgcaggggaaagaatagtagacataatagcaacagacatacaaactaaag

SEQ ID NO: 10357 - DNA, 301 bp, Artificial Sequence
  Trp53.1_Wrn.4
  crRNA array
  misc_feature (148)..(157): n is a, c, g, or t
cttggctttatatatcttgtggaaaggacgaaacaccgtaatttctactaagtgtagatccctgaactgcccccagggataatttctactaagtgtagattcgaaggacaatagatgatgtaatttctactaagtgtagatttttttnnnnnnnnnnaagcttggcgtggatccgatatcaactagatcttgagacaaatggcagtattcatccacaattttaaaagaaaaggggggattggggggtacagtgcaggggaaagaatagtagacataatagcaacagacatacaaactaaag

SEQ ID NO: 10358 - DNA, 301 bp, Artificial Sequence
  Trp53.2_Wrn.1
  crRNA array
  misc_feature (148)..(157): n is a, c, g, or t
cttggctttatatatcttgtggaaaggacgaaacaccgtaatttctactaagtgtagatgccagggtgagcacgtgggataatttctactaagtgtagatgcaaaccactcgggtaattttaatttctactaagtgtagatttttttnnnnnnnnnnaagcttggcgtggatccgatatcaactagatcttgagacaaatggcagtattcatccacaattttaaaagaaaaggggggattggggggtacagtgcaggggaaagaatagtagacataatagcaacagacatacaaactaaag

SEQ ID NO: 10359 - DNA, 301 bp, Artificial Sequence
  Trp53.2_Wrn.2
  crRNA array
  misc_feature (148)..(157): n is a, c, g, or t
cttggctttatatatcttgtggaaaggacgaaacaccgtaatttctactaagtgtagatgccagggtgagcacgtgggataatttctactaagtgtagatgccatgtccagcagaacctttaatttctactaagtgtagatttttttnnnnnnnnnnaagcttggcgtggatccgatatcaactagatcttgagacaaatggcagtattcatccacaattttaaaagaaaaggggggattggggggtacagtgcaggggaaagaatagtagacataatagcaacagacatacaaactaaag

SEQ ID NO: 10360 - DNA, 301 bp, Artificial Sequence
  Trp53.2_Wrn.3
  crRNA array
  misc_feature (148)..(157): n is a, c, g, or t
cttggctttatatatcttgtggaaaggacgaaacaccgtaatttctactaagtgtagatgccagggtgagcacgtgggataatttctactaagtgtagatctgcagcaggccaccgcaattaatttctactaagtgtagatttttttnnnnnnnnnnaagcttggcgtggatccgatatcaactagatcttgagacaaatggcagtattcatccacaattttaaaagaaaaggggggattggggggtacagtgcaggggaaagaatagtagacataatagcaacagacatacaaactaaag

SEQ ID NO: 10361 - DNA, 301 bp, Artificial Sequence
  Trp53.2_Wrn.4
  crRNA array
  misc_feature (148)..(157): n is a, c, g, or t
cttggctttatatatcttgtggaaaggacgaaacaccgtaatttctactaagtgtagatgccagggtgagcacgtgggataatttctactaagtgtagattcgaaggacaatagatgatgtaatttctactaagtgtagatttttttnnnnnnnnnnaagcttggcgtggatccgatatcaactagatcttgagacaaatggcagtattcatccacaattttaaaagaaaaggggggattggggggtacagtgcaggggaaagaatagtagacataatagcaacagacatacaaactaaag

SEQ ID NO: 10362 - DNA, 301 bp, Artificial Sequence
  Trp53.3_Wrn.1
  crRNA array
  misc_feature (148)..(157): n is a, c, g, or t
cttggctttatatatcttgtggaaaggacgaaacaccgtaatttctactaagtgtagatccctcccacgtgctcacccttaatttctactaagtgtagatgcaaaccactcgggtaattttaatttctactaagtgtagatttttttnnnnnnnnnnaagcttggcgtggatccgatatcaactagatcttgagacaaatggcagtattcatccacaattttaaaagaaaaggggggattggggggtacagtgcaggggaaagaatagtagacataatagcaacagacatacaaactaaag

SEQ ID NO: 10363 - DNA, 301 bp, Artificial Sequence
  Trp53.3_Wrn.2
  crRNA array
  misc_feature (148)..(157): n is a, c, g, or t
cttggctttatatatcttgtggaaaggacgaaacaccgtaatttctactaagtgtagatccctcccacgtgctcacccttaatttctactaagtgtagatgccatgtccagcagaacctttaatttctactaagtgtagatttttttnnnnnnnnnnaagcttggcgtggatccgatatcaactagatcttgagacaaatggcagtattcatccacaattttaaaagaaaaggggggattggggggtacagtgcaggggaaagaatagtagacataatagcaacagacatacaaactaaag

SEQ ID NO: 10364 - DNA, 301 bp, Artificial Sequence
  Trp53.3_Wrn.3
  crRNA array
  misc_feature (148)..(157): n is a, c, g, or t
cttggctttatatatcttgtggaaaggacgaaacaccgtaatttctactaagtgtagatccctcccacgtgctcacccttaatttctactaagtgtagatctgcagcaggccaccgcaattaatttctactaagtgtagatttttttnnnnnnnnnnaagcttggcgtggatccgatatcaactagatcttgagacaaatggcagtattcatccacaattttaaaagaaaaggggggattggggggtacagtgcaggggaaagaatagtagacataatagcaacagacatacaaactaaag

SEQ ID NO: 10365 - DNA, 301 bp, Artificial Sequence
  Trp53.3_Wrn.4
  crRNA array
  misc_feature (148)..(157): n is a, c, g, or t
cttggctttatatatcttgtggaaaggacgaaacaccgtaatttctactaagtgtagatccctcccacgtgctcacccttaatttctactaagtgtagattcgaaggacaatagatgatgtaatttctactaagtgtagatttttttnnnnnnnnnnaagcttggcgtggatccgatatcaactagatcttgagacaaatggcagtattcatccacaattttaaaagaaaaggggggattggggggtacagtgcaggggaaagaatagtagacataatagcaacagacatacaaactaaag

SEQ ID NO: 10366 - DNA, 301 bp, Artificial Sequence
  Trp53.4_Wrn.1
  crRNA array
  misc_feature (148)..(157): n is a, c, g, or t
cttggctttatatatcttgtggaaaggacgaaacaccgtaatttctactaagtgtagattccaccccccaccctgtctctaatttctactaagtgtagatgcaaaccactcgggtaattttaatttctactaagtgtagatttttttnnnnnnnnnnaagcttggcgtggatccgatatcaactagatcttgagacaaatggcagtattcatccacaattttaaaagaaaaggggggattggggggtacagtgcaggggaaagaatagtagacataatagcaacagacatacaaactaaag

SEQ ID NO: 10367 - DNA, 301 bp, Artificial Sequence
  Trp53.4_Wrn.2
  crRNA array
  misc_feature (148)..(157): n is a, c, g, or t
cttggctttatatatcttgtggaaaggacgaaacaccgtaatttctactaagtgtagattccaccccccaccctgtctctaatttctactaagtgtagatgccatgtccagcagaacctttaatttctactaagtgtagatttttttnnnnnnnnnnaagcttggcgtggatccgatatcaactagatcttgagacaaatggcagtattcatccacaattttaaaagaaaaggggggattggggggtacagtgcaggggaaagaatagtagacataatagcaacagacatacaaactaaag

SEQ ID NO: 10368 - DNA, 301 bp, Artificial Sequence
  Trp53.4_Wrn.3
  crRNA array
  misc_feature (148)..(157): n is a, c, g, or t
cttggctttatatatcttgtggaaaggacgaaacaccgtaatttctactaagtgtagattccaccccccaccctgtctctaatttctactaagtgtagatctgcagcaggccaccgcaattaatttctactaagtgtagatttttttnnnnnnnnnnaagcttggcgtggatccgatatcaactagatcttgagacaaatggcagtattcatccacaattttaaaagaaaaggggggattggggggtacagtgcaggggaaagaatagtagacataatagcaacagacatacaaactaaag

SEQ ID NO: 10369 - DNA, 301 bp, Artificial Sequence
  Trp53.4_Wrn.4
  crRNA array
  misc_feature (148)..(157): n is a, c, g, or t
cttggctttatatatcttgtggaaaggacgaaacaccgtaatttctactaagtgtagattccaccccccaccctgtctctaatttctactaagtgtagattcgaaggacaatagatgatgtaatttctactaagtgtagatttttttnnnnnnnnnnaagcttggcgtggatccgatatcaactagatcttgagacaaatggcagtattcatccacaattttaaaagaaaaggggggattggggggtacagtgcaggggaaagaatagtagacataatagcaacagacatacaaactaaag

SEQ ID NO: 10370 - DNA, 301 bp, Artificial Sequence
  Trp53.1_Brca2.1
  crRNA array
  misc_feature (148)..(157): n is a, c, g, or t
cttggctttatatatcttgtggaaaggacgaaacaccgtaatttctactaagtgtagatccctgaactgcccccagggataatttctactaagtgtagatctaagcgtagaaccagaaattaatttctactaagtgtagatttttttnnnnnnnnnnaagcttggcgtggatccgatatcaactagatcttgagacaaatggcagtattcatccacaattttaaaagaaaaggggggattggggggtacagtgcaggggaaagaatagtagacataatagcaacagacatacaaactaaag

SEQ ID NO: 10371 - DNA, 301 bp, Artificial Sequence
  Trp53.1_Brca2.2
  crRNA array
  misc_feature (148)..(157): n is a, c, g, or t
cttggctttatatatcttgtggaaaggacgaaacaccgtaatttctactaagtgtagatccctgaactgcccccagggataatttctactaagtgtagatgatccaggtgtaacaagccataatttctactaagtgtagatttttttnnnnnnnnnnaagcttggcgtggatccgatatcaactagatcttgagacaaatggcagtattcatccacaattttaaaagaaaaggggggattggggggtacagtgcaggggaaagaatagtagacataatagcaacagacatacaaactaaag

SEQ ID NO: 10372 - DNA, 301 bp, Artificial Sequence
  Trp53.1_Brca2.3
  crRNA array
  misc_feature (148)..(157): n is a, c, g, or t
cttggctttatatatcttgtggaaaggacgaaacaccgtaatttctactaagtgtagatccctgaactgcccccagggataatttctactaagtgtagattgaatataaactgggccacttaatttctactaagtgtagatttttttnnnnnnnnnnaagcttggcgtggatccgatatcaactagatcttgagacaaatggcagtattcatccacaattttaaaagaaaaggggggattggggggtacagtgcaggggaaagaatagtagacataatagcaacagacatacaaactaaag

SEQ ID NO: 10373 - DNA, 301 bp, Artificial Sequence
  Trp53.1_Brca2.4
  crRNA array
  misc_feature (148)..(157): n is a, c, g, or t
cttggctttatatatcttgtggaaaggacgaaacaccgtaatttctactaagtgtagatccctgaactgcccccagggataatttctactaagtgtagatgaaacgccgtatatatagagtaatttctactaagtgtagatttttttnnnnnnnnnnaagcttggcgtggatccgatatcaactagatcttgagacaaatggcagtattcatccacaattttaaaagaaaaggggggattggggggtacagtgcaggggaaagaatagtagacataatagcaacagacatacaaactaaag

SEQ ID NO: 10374 - DNA, 301 bp, Artificial Sequence
  Trp53.2_Brca2.1
  crRNA array
  misc_feature (148)..(157): n is a, c, g, or t
cttggctttatatatcttgtggaaaggacgaaacaccgtaatttctactaagtgtagatgccagggtgagcacgtgggataatttctactaagtgtagatctaagcgtagaaccagaaattaatttctactaagtgtagatttttttnnnnnnnnnnaagcttggcgtggatccgatatcaactagatcttgagacaaatggcagtattcatccacaattttaaaagaaaaggggggattggggggtacagtgcaggggaaagaatagtagacataatagcaacagacatacaaactaaag

SEQ ID NO: 10375 - DNA, 301 bp, Artificial Sequence
  Trp53.2_Brca2.2
  crRNA array
  misc_feature (148)..(157): n is a, c, g, or t
cttggctttatatatcttgtggaaaggacgaaacaccgtaatttctactaagtgtagatgccagggtgagcacgtgggataatttctactaagtgtagatgatccaggtgtaacaagccataatttctactaagtgtagatttttttnnnnnnnnnnaagcttggcgtggatccgatatcaactagatcttgagacaaatggcagtattcatccacaattttaaaagaaaaggggggattggggggtacagtgcaggggaaagaatagtagacataatagcaacagacatacaaactaaag

SEQ ID NO: 10376 - DNA, 301 bp, Artificial Sequence
  Trp53.2_Brca2.3
  crRNA array
  misc_feature (148)..(157): n is a, c, g, or t
cttggctttatatatcttgtggaaaggacgaaacaccgtaatttctactaagtgtagatgccagggtgagcacgtgggataatttctactaagtgtagattgaatataaactgggccacttaatttctactaagtgtagatttttttnnnnnnnnnnaagcttggcgtggatccgatatcaactagatcttgagacaaatggcagtattcatccacaattttaaaagaaaaggggggattggggggtacagtgcaggggaaagaatagtagacataatagcaacagacatacaaactaaag

SEQ ID NO: 10377 - DNA, 301 bp, Artificial Sequence
  Trp53.2_Brca2.4
  crRNA array
  misc_feature (148)..(157): n is a, c, g, or t
cttggctttatatatcttgtggaaaggacgaaacaccgtaatttctactaagtgtagatgccagggtgagcacgtgggataatttctactaagtgtagatgaaacgccgtatatatagagtaatttctactaagtgtagatttttttnnnnnnnnnnaagcttggcgtggatccgatatcaactagatcttgagacaaatggcagtattcatccacaattttaaaagaaaaggggggattggggggtacagtgcaggggaaagaatagtagacataatagcaacagacatacaaactaaag

SEQ ID NO: 10378 - DNA, 301 bp, Artificial Sequence
  Trp53.3_Brca2.1
  crRNA array
  misc_feature (148)..(157): n is a, c, g, or t
cttggctttatatatcttgtggaaaggacgaaacaccgtaatttctactaagtgtagatccctcccacgtgctcacccttaatttctactaagtgtagatctaagcgtagaaccagaaattaatttctactaagtgtagatttttttnnnnnnnnnnaagcttggcgtggatccgatatcaactagatcttgagacaaatggcagtattcatccacaattttaaaagaaaaggggggattggggggtacagtgcaggggaaagaatagtagacataatagcaacagacatacaaactaaag

SEQ ID NO: 10379 - DNA, 301 bp, Artificial Sequence
  Trp53.3_Brca2.2
  crRNA array
  misc_feature (148)..(157): n is a, c, g, or t
cttggctttatatatcttgtggaaaggacgaaacaccgtaatttctactaagtgtagatccctcccacgtgctcacccttaatttctactaagtgtagatgatccaggtgtaacaagccataatttctactaagtgtagatttttttnnnnnnnnnnaagcttggcgtggatccgatatcaactagatcttgagacaaatggcagtattcatccacaattttaaaagaaaaggggggattggggggtacagtgcaggggaaagaatagtagacataatagcaacagacatacaaactaaag

SEQ ID NO: 10380 - DNA, 301 bp, Artificial Sequence
  Trp53.3_Brca2.3
  crRNA array
  misc_feature (148)..(157): n is a, c, g, or t
cttggctttatatatcttgtggaaaggacgaaacaccgtaatttctactaagtgtagatccctcccacgtgctcacccttaatttctactaagtgtagattgaatataaactgggccacttaatttctactaagtgtagatttttttnnnnnnnnnnaagcttggcgtggatccgatatcaactagatcttgagacaaatggcagtattcatccacaattttaaaagaaaaggggggattggggggtacagtgcaggggaaagaatagtagacataatagcaacagacatacaaactaaag

SEQ ID NO: 10381 - DNA, 301 bp, Artificial Sequence
  Trp53.3_Brca2.4
  crRNA array
  misc_feature (148)..(157): n is a, c, g, or t
cttggctttatatatcttgtggaaaggacgaaacaccgtaatttctactaagtgtagatccctcccacgtgctcacccttaatttctactaagtgtagatgaaacgccgtatatatagagtaatttctactaagtgtagatttttttnnnnnnnnnnaagcttggcgtggatccgatatcaactagatcttgagacaaatggcagtattcatccacaattttaaaagaaaaggggggattggggggtacagtgcaggggaaagaatagtagacataatagcaacagacatacaaactaaag

SEQ ID NO: 10382 - DNA, 301 bp, Artificial Sequence
  Trp53.4_Brca2.1
  crRNA array
  misc_feature (148)..(157): n is a, c, g, or t
cttggctttatatatcttgtggaaaggacgaaacaccgtaatttctactaagtgtagattccaccccccaccctgtctctaatttctactaagtgtagatctaagcgtagaaccagaaattaatttctactaagtgtagatttttttnnnnnnnnnnaagcttggcgtggatccgatatcaactagatcttgagacaaatggcagtattcatccacaattttaaaagaaaaggggggattggggggtacagtgcaggggaaagaatagtagacataatagcaacagacatacaaactaaag

SEQ ID NO: 10383 - DNA, 301 bp, Artificial Sequence
  Trp53.4_Brca2.2
  crRNA array
  misc_feature (148)..(157): n is a, c, g, or t
cttggctttatatatcttgtggaaaggacgaaacaccgtaatttctactaagtgtagattccaccccccaccctgtctctaatttctactaagtgtagatgatccaggtgtaacaagccataatttctactaagtgtagatttttttnnnnnnnnnnaagcttggcgtggatccgatatcaactagatcttgagacaaatggcagtattcatccacaattttaaaagaaaaggggggattggggggtacagtgcaggggaaagaatagtagacataatagcaacagacatacaaactaaag

SEQ ID NO: 10384 - DNA, 301 bp, Artificial Sequence
  Trp53.4_Brca2.3
  crRNA array
  misc_feature (148)..(157): n is a, c, g, or t
cttggctttatatatcttgtggaaaggacgaaacaccgtaatttctactaagtgtagattccaccccccaccctgtctctaatttctactaagtgtagattgaatataaactgggccacttaatttctactaagtgtagatttttttnnnnnnnnnnaagcttggcgtggatccgatatcaactagatcttgagacaaatggcagtattcatccacaattttaaaagaaaaggggggattggggggtacagtgcaggggaaagaatagtagacataatagcaacagacatacaaactaaag

SEQ ID NO: 10385 - DNA, 301 bp, Artificial Sequence
  Trp53.4_Brca2.4
  crRNA array
  misc_feature (148)..(157): n is a, c, g, or t
cttggctttatatatcttgtggaaaggacgaaacaccgtaatttctactaagtgtagattccaccccccaccctgtctctaatttctactaagtgtagatgaaacgccgtatatatagagtaatttctactaagtgtagatttttttnnnnnnnnnnaagcttggcgtggatccgatatcaactagatcttgagacaaatggcagtattcatccacaattttaaaagaaaaggggggattggggggtacagtgcaggggaaagaatagtagacataatagcaacagacatacaaactaaag

SEQ ID NO: 10386 - DNA, 301 bp, Artificial Sequence
  Trp53.1_Apc.1
  crRNA array
  misc_feature (148)..(157): n is a, c, g, or t
cttggctttatatatcttgtggaaaggacgaaacaccgtaatttctactaagtgtagatccctgaactgcccccagggataatttctactaagtgtagatgtgatccacacgtgtagctgtaatttctactaagtgtagatttttttnnnnnnnnnnaagcttggcgtggatccgatatcaactagatcttgagacaaatggcagtattcatccacaattttaaaagaaaaggggggattggggggtacagtgcaggggaaagaatagtagacataatagcaacagacatacaaactaaag

SEQ ID NO: 10387 - DNA, 301 bp, Artificial Sequence
  Trp53.1_Apc.2
  crRNA array
  misc_feature (148)..(157): n is a, c, g, or t
cttggctttatatatcttgtggaaaggacgaaacaccgtaatttctactaagtgtagatccctgaactgcccccagggataatttctactaagtgtagatcatctgctcgccaagacaaataatttctactaagtgtagatttttttnnnnnnnnnnaagcttggcgtggatccgatatcaactagatcttgagacaaatggcagtattcatccacaattttaaaagaaaaggggggattggggggtacagtgcaggggaaagaatagtagacataatagcaacagacatacaaactaaag

SEQ ID NO: 10388 - DNA, 301 bp, Artificial Sequence
  Trp53.1_Apc.3
  crRNA array
  misc_feature (148)..(157): n is a, c, g, or t
cttggctttatatatcttgtggaaaggacgaaacaccgtaatttctactaagtgtagatccctgaactgcccccagggataatttctactaagtgtagatacgccaatcgacatgatgattaatttctactaagtgtagatttttttnnnnnnnnnnaagcttggcgtggatccgatatcaactagatcttgagacaaatggcagtattcatccacaattttaaaagaaaaggggggattggggggtacagtgcaggggaaagaatagtagacataatagcaacagacatacaaactaaag

SEQ ID NO: 10389 - DNA, 301 bp, Artificial Sequence
  Trp53.1_Apc.4
  crRNA array
  misc_feature (148)..(157): n is a, c, g, or t
cttggctttatatatcttgtggaaaggacgaaacaccgtaatttctactaagtgtagatccctgaactgcccccagggataatttctactaagtgtagatcaccaggggatgatgtgccctaatttctactaagtgtagatttttttnnnnnnnnnnaagcttggcgtggatccgatatcaactagatcttgagacaaatggcagtattcatccacaattttaaaagaaaaggggggattggggggtacagtgcaggggaaagaatagtagacataatagcaacagacatacaaactaaag

SEQ ID NO: 10390 - DNA, 301 bp, Artificial Sequence
  Trp53.2_Apc.1
  crRNA array
  misc_feature (148)..(157): n is a, c, g, or t
cttggctttatatatcttgtggaaaggacgaaacaccgtaatttctactaagtgtagatgccagggtgagcacgtgggataatttctactaagtgtagatgtgatccacacgtgtagctgtaatttctactaagtgtagatttttttnnnnnnnnnnaagcttggcgtggatccgatatcaactagatcttgagacaaatggcagtattcatccacaattttaaaagaaaaggggggattggggggtacagtgcaggggaaagaatagtagacataatagcaacagacatacaaactaaag

SEQ ID NO: 10391 - DNA, 301 bp, Artificial Sequence
  Trp53.2_Apc.2
  crRNA array
  misc_feature (148)..(157): n is a, c, g, or t
cttggctttatatatcttgtggaaaggacgaaacaccgtaatttctactaagtgtagatgccagggtgagcacgtgggataatttctactaagtgtagatcatctgctcgccaagacaaataatttctactaagtgtagatttttttnnnnnnnnnnaagcttggcgtggatccgatatcaactagatcttgagacaaatggcagtattcatccacaattttaaaagaaaaggggggattggggggtacagtgcaggggaaagaatagtagacataatagcaacagacatacaaactaaag

SEQ ID NO: 10392 - DNA, 301 bp, Artificial Sequence
  Trp53.2_Apc.3
  crRNA array
  misc_feature (148)..(157): n is a, c, g, or t
cttggctttatatatcttgtggaaaggacgaaacaccgtaatttctactaagtgtagatgccagggtgagcacgtgggataatttctactaagtgtagatacgccaatcgacatgatgattaatttctactaagtgtagatttttttnnnnnnnnnnaagcttggcgtggatccgatatcaactagatcttgagacaaatggcagtattcatccacaattttaaaagaaaaggggggattggggggtacagtgcaggggaaagaatagtagacataatagcaacagacatacaaactaaag

SEQ ID NO: 10393 - DNA, 301 bp, Artificial Sequence
  Trp53.2_Apc.4
  crRNA array
  misc_feature (148)..(157): n is a, c, g, or t
cttggctttatatatcttgtggaaaggacgaaacaccgtaatttctactaagtgtagatgccagggtgagcacgtgggataatttctactaagtgtagatcaccaggggatgatgtgccctaatttctactaagtgtagatttttttnnnnnnnnnnaagcttggcgtggatccgatatcaactagatcttgagacaaatggcagtattcatccacaattttaaaagaaaaggggggattggggggtacagtgcaggggaaagaatagtagacataatagcaacagacatacaaactaaag

SEQ ID NO: 10394 - DNA, 301 bp, Artificial Sequence
  Trp53.3_Apc.1
  crRNA array
  misc_feature (148)..(157): n is a, c, g, or t
cttggctttatatatcttgtggaaaggacgaaacaccgtaatttctactaagtgtagatccctcccacgtgctcacccttaatttctactaagtgtagatgtgatccacacgtgtagctgtaatttctactaagtgtagatttttttnnnnnnnnnnaagcttggcgtggatccgatatcaactagatcttgagacaaatggcagtattcatccacaattttaaaagaaaaggggggattggggggtacagtgcaggggaaagaatagtagacataatagcaacagacatacaaactaaag

SEQ ID NO: 10395 - DNA, 301 bp, Artificial Sequence
  Trp53.3_Apc.2
  crRNA array
  misc_feature (148)..(157): n is a, c, g, or t
cttggctttatatatcttgtggaaaggacgaaacaccgtaatttctactaagtgtagatccctcccacgtgctcacccttaatttctactaagtgtagatcatctgctcgccaagacaaataatttctactaagtgtagatttttttnnnnnnnnnnaagcttggcgtggatccgatatcaactagatcttgagacaaatggcagtattcatccacaattttaaaagaaaaggggggattggggggtacagtgcaggggaaagaatagtagacataatagcaacagacatacaaactaaag

SEQ ID NO: 10396 - DNA, 301 bp, Artificial Sequence
  Trp53.3_Apc.3
  crRNA array
  misc_feature (148)..(157): n is a, c, g, or t
cttggctttatatatcttgtggaaaggacgaaacaccgtaatttctactaagtgtagatccctcccacgtgctcacccttaatttctactaagtgtagatacgccaatcgacatgatgattaatttctactaagtgtagatttttttnnnnnnnnnnaagcttggcgtggatccgatatcaactagatcttgagacaaatggcagtattcatccacaattttaaaagaaaaggggggattggggggtacagtgcaggggaaagaatagtagacataatagcaacagacatacaaactaaag

SEQ ID NO: 10397 - DNA, 301 bp, Artificial Sequence
  Trp53.3_Apc.4
  crRNA array
  misc_feature (148)..(157): n is a, c, g, or t
cttggctttatatatcttgtggaaaggacgaaacaccgtaatttctactaagtgtagatccctcccacgtgctcacccttaatttctactaagtgtagatcaccaggggatgatgtgccctaatttctactaagtgtagatttttttnnnnnnnnnnaagcttggcgtggatccgatatcaactagatcttgagacaaatggcagtattcatccacaattttaaaagaaaaggggggattggggggtacagtgcaggggaaagaatagtagacataatagcaacagacatacaaactaaag

SEQ ID NO: 10398 - DNA, 301 bp, Artificial Sequence
  Trp53.4_Apc.1
  crRNA array
  misc_feature (148)..(157): n is a, c, g, or t
cttggctttatatatcttgtggaaaggacgaaacaccgtaatttctactaagtgtagattccaccccccaccctgtctctaatttctactaagtgtagatgtgatccacacgtgtagctgtaatttctactaagtgtagatttttttnnnnnnnnnnaagcttggcgtggatccgatatcaactagatcttgagacaaatggcagtattcatccacaattttaaaagaaaaggggggattggggggtacagtgcaggggaaagaatagtagacataatagcaacagacatacaaactaaag

SEQ ID NO: 10399 - DNA, 301 bp, Artificial Sequence
  Trp53.4_Apc.2
  crRNA array
  misc_feature (148)..(157): n is a, c, g, or t
cttggctttatatatcttgtggaaaggacgaaacaccgtaatttctactaagtgtagattccaccccccaccctgtctctaatttctactaagtgtagatcatctgctcgccaagacaaataatttctactaagtgtagatttttttnnnnnnnnnnaagcttggcgtggatccgatatcaactagatcttgagacaaatggcagtattcatccacaattttaaaagaaaaggggggattggggggtacagtgcaggggaaagaatagtagacataatagcaacagacatacaaactaaag

SEQ ID NO: 10400 - DNA, 301 bp, Artificial Sequence
  Trp53.4_Apc.3
  crRNA array
  misc_feature (148)..(157): n is a, c, g, or t
cttggctttatatatcttgtggaaaggacgaaacaccgtaatttctactaagtgtagattccaccccccaccctgtctctaatttctactaagtgtagatacgccaatcgacatgatgattaatttctactaagtgtagatttttttnnnnnnnnnnaagcttggcgtggatccgatatcaactagatcttgagacaaatggcagtattcatccacaattttaaaagaaaaggggggattggggggtacagtgcaggggaaagaatagtagacataatagcaacagacatacaaactaaag

SEQ ID NO: 10401 - DNA, 301 bp, Artificial Sequence
  Trp53.4_Apc.4
  crRNA array
  misc_feature (148)..(157): n is a, c, g, or t
cttggctttatatatcttgtggaaaggacgaaacaccgtaatttctactaagtgtagattccaccccccaccctgtctctaatttctactaagtgtagatcaccaggggatgatgtgccctaatttctactaagtgtagatttttttnnnnnnnnnnaagcttggcgtggatccgatatcaactagatcttgagacaaatggcagtattcatccacaattttaaaagaaaaggggggattggggggtacagtgcaggggaaagaatagtagacataatagcaacagacatacaaactaaag

SEQ ID NO: 10402 - DNA, 301 bp, Artificial Sequence
  Trp53.1_Fanca.1
  crRNA array
  misc_feature (148)..(157): n is a, c, g, or t
cttggctttatatatcttgtggaaaggacgaaacaccgtaatttctactaagtgtagatccctgaactgcccccagggataatttctactaagtgtagatggaggccccggggcccaccataatttctactaagtgtagatttttttnnnnnnnnnnaagcttggcgtggatccgatatcaactagatcttgagacaaatggcagtattcatccacaattttaaaagaaaaggggggattggggggtacagtgcaggggaaagaatagtagacataatagcaacagacatacaaactaaag

SEQ ID NO: 10403 - DNA, 301 bp, Artificial Sequence
  Trp53.1_Fanca.2
  crRNA array
  misc_feature (148)..(157): n is a, c, g, or t
cttggctttatatatcttgtggaaaggacgaaacaccgtaatttctactaagtgtagatccctgaactgcccccagggataatttctactaagtgtagatagagctaccacctagacagctaatttctactaagtgtagatttttttnnnnnnnnnnaagcttggcgtggatccgatatcaactagatcttgagacaaatggcagtattcatccacaattttaaaagaaaaggggggattggggggtacagtgcaggggaaagaatagtagacataatagcaacagacatacaaactaaag

SEQ ID NO: 10404 - DNA, 301 bp, Artificial Sequence
  Trp53.1_Fanca.3
  crRNA array
  misc_feature (148)..(157): n is a, c, g, or t
cttggctttatatatcttgtggaaaggacgaaacaccgtaatttctactaagtgtagatccctgaactgcccccagggataatttctactaagtgtagataccaactgctgtgcctcgggtaatttctactaagtgtagatttttttnnnnnnnnnnaagcttggcgtggatccgatatcaactagatcttgagacaaatggcagtattcatccacaattttaaaagaaaaggggggattggggggtacagtgcaggggaaagaatagtagacataatagcaacagacatacaaactaaag

SEQ ID NO: 10405 - DNA, 301 bp, Artificial Sequence
  Trp53.1_Fanca.4
  crRNA array
  misc_feature (148)..(157): n is a, c, g, or t
cttggctttatatatcttgtggaaaggacgaaacaccgtaatttctactaagtgtagatccctgaactgcccccagggataatttctactaagtgtagatcacccacccctggtgccaagtaatttctactaagtgtagatttttttnnnnnnnnnnaagcttggcgtggatccgatatcaactagatcttgagacaaatggcagtattcatccacaattttaaaagaaaaggggggattggggggtacagtgcaggggaaagaatagtagacataatagcaacagacatacaaactaaag

SEQ ID NO: 10406 - DNA, 301 bp, Artificial Sequence
  Trp53.2_Fanca.1
  crRNA array
  misc_feature (148)..(157): n is a, c, g, or t
cttggctttatatatcttgtggaaaggacgaaacaccgtaatttctactaagtgtagatgccagggtgagcacgtgggataatttctactaagtgtagatggaggccccggggcccaccataatttctactaagtgtagatttttttnnnnnnnnnnaagcttggcgtggatccgatatcaactagatcttgagacaaatggcagtattcatccacaattttaaaagaaaaggggggattggggggtacagtgcaggggaaagaatagtagacataatagcaacagacatacaaactaaag

SEQ ID NO: 10407 - DNA, 301 bp, Artificial Sequence
  Trp53.2_Fanca.2
  crRNA array
  misc_feature (148)..(157): n is a, c, g, or t
cttggctttatatatcttgtggaaaggacgaaacaccgtaatttctactaagtgtagatgccagggtgagcacgtgggataatttctactaagtgtagatagagctaccacctagacagctaatttctactaagtgtagatttttttnnnnnnnnnnaagcttggcgtggatccgatatcaactagatcttgagacaaatggcagtattcatccacaattttaaaagaaaaggggggattggggggtacagtgcaggggaaagaatagtagacataatagcaacagacatacaaactaaag

SEQ ID NO: 10408 - DNA, 301 bp, Artificial Sequence
  Trp53.2_Fanca.3
  crRNA array
  misc_feature (148)..(157): n is a, c, g, or t
cttggctttatatatcttgtggaaaggacgaaacaccgtaatttctactaagtgtagatgccagggtgagcacgtgggataatttctactaagtgtagataccaactgctgtgcctcgggtaatttctactaagtgtagatttttttnnnnnnnnnnaagcttggcgtggatccgatatcaactagatcttgagacaaatggcagtattcatccacaattttaaaagaaaaggggggattggggggtacagtgcaggggaaagaatagtagacataatagcaacagacatacaaactaaag

SEQ ID NO: 10409 - DNA, 301 bp, Artificial Sequence
  Trp53.2_Fanca.4
  crRNA array
  misc_feature (148)..(157): n is a, c, g, or t
cttggctttatatatcttgtggaaaggacgaaacaccgtaatttctactaagtgtagatgccagggtgagcacgtgggataatttctactaagtgtagatcacccacccctggtgccaagtaatttctactaagtgtagatttttttnnnnnnnnnnaagcttggcgtggatccgatatcaactagatcttgagacaaatggcagtattcatccacaattttaaaagaaaaggggggattggggggtacagtgcaggggaaagaatagtagacataatagcaacagacatacaaactaaag

SEQ ID NO: 10410 - DNA, 301 bp, Artificial Sequence
  Trp53.3_Fanca.1
  crRNA array
  misc_feature (148)..(157): n is a, c, g, or t
cttggctttatatatcttgtggaaaggacgaaacaccgtaatttctactaagtgtagatccctcccacgtgctcacccttaatttctactaagtgtagatggaggccccggggcccaccataatttctactaagtgtagatttttttnnnnnnnnnnaagcttggcgtggatccgatatcaactagatcttgagacaaatggcagtattcatccacaattttaaaagaaaaggggggattggggggtacagtgcaggggaaagaatagtagacataatagcaacagacatacaaactaaag

SEQ ID NO: 10411 - DNA, 301 bp, Artificial Sequence
  Trp53.3_Fanca.2
  crRNA array
  misc_feature (148)..(157): n is a, c, g, or t
cttggctttatatatcttgtggaaaggacgaaacaccgtaatttctactaagtgtagatccctcccacgtgctcacccttaatttctactaagtgtagatagagctaccacctagacagctaatttctactaagtgtagatttttttnnnnnnnnnnaagcttggcgtggatccgatatcaactagatcttgagacaaatggcagtattcatccacaattttaaaagaaaaggggggattggggggtacagtgcaggggaaagaatagtagacataatagcaacagacatacaaactaaag

SEQ ID NO: 10412 - DNA, 301 bp, Artificial Sequence
  Trp53.3_Fanca.3
  crRNA array
  misc_feature (148)..(157): n is a, c, g, or t
cttggctttatatatcttgtggaaaggacgaaacaccgtaatttctactaagtgtagatccctcccacgtgctcacccttaatttctactaagtgtagataccaactgctgtgcctcgggtaatttctactaagtgtagatttttttnnnnnnnnnnaagcttggcgtggatccgatatcaactagatcttgagacaaatggcagtattcatccacaattttaaaagaaaaggggggattggggggtacagtgcaggggaaagaatagtagacataatagcaacagacatacaaactaaag

SEQ ID NO: 10413 - DNA, 301 bp, Artificial Sequence
  Trp53.3_Fanca.4
  crRNA array
  misc_feature (148)..(157): n is a, c, g, or t
cttggctttatatatcttgtggaaaggacgaaacaccgtaatttctactaagtgtagatccctcccacgtgctcacccttaatttctactaagtgtagatcacccacccctggtgccaagtaatttctactaagtgtagatttttttnnnnnnnnnnaagcttggcgtggatccgatatcaactagatcttgagacaaatggcagtattcatccacaattttaaaagaaaaggggggattggggggtacagtgcaggggaaagaatagtagacataatagcaacagacatacaaactaaag

SEQ ID NO: 10414 - DNA, 301 bp, Artificial Sequence
  Trp53.4_Fanca.1
  crRNA array
  misc_feature (148)..(157): n is a, c, g, or t
cttggctttatatatcttgtggaaaggacgaaacaccgtaatttctactaagtgtagattccaccccccaccctgtctctaatttctactaagtgtagatggaggccccggggcccaccataatttctactaagtgtagatttttttnnnnnnnnnnaagcttggcgtggatccgatatcaactagatcttgagacaaatggcagtattcatccacaattttaaaagaaaaggggggattggggggtacagtgcaggggaaagaatagtagacataatagcaacagacatacaaactaaag

SEQ ID NO: 10415 - DNA, 301 bp, Artificial Sequence
  Trp53.4_Fanca.2
  crRNA array
  misc_feature (148)..(157): n is a, c, g, or t
cttggctttatatatcttgtggaaaggacgaaacaccgtaatttctactaagtgtagattccaccccccaccctgtctctaatttctactaagtgtagatagagctaccacctagacagctaatttctactaagtgtagatttttttnnnnnnnnnnaagcttggcgtggatccgatatcaactagatcttgagacaaatggcagtattcatccacaattttaaaagaaaaggggggattggggggtacagtgcaggggaaagaatagtagacataatagcaacagacatacaaactaaag

SEQ ID NO: 10416 - DNA, 301 bp, Artificial Sequence
  Trp53.4_Fanca.3
  crRNA array
  misc_feature (148)..(157): n is a, c, g, or t
cttggctttatatatcttgtggaaaggacgaaacaccgtaatttctactaagtgtagattccaccccccaccctgtctctaatttctactaagtgtagataccaactgctgtgcctcgggtaatttctactaagtgtagatttttttnnnnnnnnnnaagcttggcgtggatccgatatcaactagatcttgagacaaatggcagtattcatccacaattttaaaagaaaaggggggattggggggtacagtgcaggggaaagaatagtagacataatagcaacagacatacaaactaaag

SEQ ID NO: 10417 - DNA, 301 bp, Artificial Sequence
  Trp53.4_Fanca.4
  crRNA array
  misc_feature (148)..(157): n is a, c, g, or t
cttggctttatatatcttgtggaaaggacgaaacaccgtaatttctactaagtgtagattccaccccccaccctgtctctaatttctactaagtgtagatcacccacccctggtgccaagtaatttctactaagtgtagatttttttnnnnnnnnnnaagcttggcgtggatccgatatcaactagatcttgagacaaatggcagtattcatccacaattttaaaagaaaaggggggattggggggtacagtgcaggggaaagaatagtagacataatagcaacagacatacaaactaaag

SEQ ID NO: 10418 - DNA, 301 bp, Artificial Sequence
  Trp53.1_Nf1.1
  crRNA array
  misc_feature (148)..(157): n is a, c, g, or t
cttggctttatatatcttgtggaaaggacgaaacaccgtaatttctactaagtgtagatccctgaactgcccccagggataatttctactaagtgtagattggcgatccggaatcctctgtaatttctactaagtgtagatttttttnnnnnnnnnnaagcttggcgtggatccgatatcaactagatcttgagacaaatggcagtattcatccacaattttaaaagaaaaggggggattggggggtacagtgcaggggaaagaatagtagacataatagcaacagacatacaaactaaag

SEQ ID NO: 10419 - DNA, 301 bp, Artificial Sequence
  Trp53.1_Nf1.2
  crRNA array
  misc_feature (148)..(157): n is a, c, g, or t
cttggctttatatatcttgtggaaaggacgaaacaccgtaatttctactaagtgtagatccctgaactgcccccagggataatttctactaagtgtagatggaaacacaacgctggcctctaatttctactaagtgtagatttttttnnnnnnnnnnaagcttggcgtggatccgatatcaactagatcttgagacaaatggcagtattcatccacaattttaaaagaaaaggggggattggggggtacagtgcaggggaaagaatagtagacataatagcaacagacatacaaactaaag

SEQ ID NO: 10420 - DNA, 301 bp, Artificial Sequence
  Trp53.1_Nf1.3
  crRNA array
  misc_feature (148)..(157): n is a, c, g, or t
cttggctttatatatcttgtggaaaggacgaaacaccgtaatttctactaagtgtagatccctgaactgcccccagggataatttctactaagtgtagataatgatggaacgcagtcgcataatttctactaagtgtagatttttttnnnnnnnnnnaagcttggcgtggatccgatatcaactagatcttgagacaaatggcagtattcatccacaattttaaaagaaaaggggggattggggggtacagtgcaggggaaagaatagtagacataatagcaacagacatacaaactaaag

SEQ ID NO: 10421 - DNA, 301 bp, Artificial Sequence
  Trp53.1_Nf1.4
  crRNA array
  misc_feature (148)..(157): n is a, c, g, or t
cttggctttatatatcttgtggaaaggacgaaacaccgtaatttctactaagtgtagatccctgaactgcccccagggataatttctactaagtgtagattgcaaaaccatccaccaagttaatttctactaagtgtagatttttttnnnnnnnnnnaagcttggcgtggatccgatatcaactagatcttgagacaaatggcagtattcatccacaattttaaaagaaaaggggggattggggggtacagtgcaggggaaagaatagtagacataatagcaacagacatacaaactaaag

SEQ ID NO: 10422 - DNA, 301 bp, Artificial Sequence
  Trp53.2_Nf1.1
  crRNA array
  misc_feature (148)..(157): n is a, c, g, or t
cttggctttatatatcttgtggaaaggacgaaacaccgtaatttctactaagtgtagatgccagggtgagcacgtgggataatttctactaagtgtagattggcgatccggaatcctctgtaatttctactaagtgtagatttttttnnnnnnnnnnaagcttggcgtggatccgatatcaactagatcttgagacaaatggcagtattcatccacaattttaaaagaaaaggggggattggggggtacagtgcaggggaaagaatagtagacataatagcaacagacatacaaactaaag

SEQ ID NO: 10423 - DNA, 301 bp, Artificial Sequence
  Trp53.2_Nf1.2
  crRNA array
  misc_feature (148)..(157): n is a, c, g, or t
cttggctttatatatcttgtggaaaggacgaaacaccgtaatttctactaagtgtagatgccagggtgagcacgtgggataatttctactaagtgtagatggaaacacaacgctggcctctaatttctactaagtgtagatttttttnnnnnnnnnnaagcttggcgtggatccgatatcaactagatcttgagacaaatggcagtattcatccacaattttaaaagaaaaggggggattggggggtacagtgcaggggaaagaatagtagacataatagcaacagacatacaaactaaag

SEQ ID NO: 10424 - DNA, 301 bp, Artificial Sequence
  Trp53.2_Nf1.3
  crRNA array
  misc_feature (148)..(157): n is a, c, g, or t
cttggctttatatatcttgtggaaaggacgaaacaccgtaatttctactaagtgtagatgccagggtgagcacgtgggataatttctactaagtgtagataatgatggaacgcagtcgcataatttctactaagtgtagatttttttnnnnnnnnnnaagcttggcgtggatccgatatcaactagatcttgagacaaatggcagtattcatccacaattttaaaagaaaaggggggattggggggtacagtgcaggggaaagaatagtagacataatagcaacagacatacaaactaaag

SEQ ID NO: 10425 - DNA, 301 bp, Artificial Sequence
  Trp53.2_Nf1.4
  crRNA array
  misc_feature (148)..(157): n is a, c, g, or t
cttggctttatatatcttgtggaaaggacgaaacaccgtaatttctactaagtgtagatgccagggtgagcacgtgggataatttctactaagtgtagattgcaaaaccatccaccaagttaatttctactaagtgtagatttttttnnnnnnnnnnaagcttggcgtggatccgatatcaactagatcttgagacaaatggcagtattcatccacaattttaaaagaaaaggggggattggggggtacagtgcaggggaaagaatagtagacataatagcaacagacatacaaactaaag

SEQ ID NO: 10426 - DNA, 301 bp, Artificial Sequence
  Trp53.3_Nf1.1
  crRNA array
  misc_feature (148)..(157): n is a, c, g, or t
cttggctttatatatcttgtggaaaggacgaaacaccgtaatttctactaagtgtagatccctcccacgtgctcacccttaatttctactaagtgtagattggcgatccggaatcctctgtaatttctactaagtgtagatttttttnnnnnnnnnnaagcttggcgtggatccgatatcaactagatcttgagacaaatggcagtattcatccacaattttaaaagaaaaggggggattggggggtacagtgcaggggaaagaatagtagacataatagcaacagacatacaaactaaag

SEQ ID NO: 10427 - DNA, 301 bp, Artificial Sequence
  Trp53.3_Nf1.2
  crRNA array
  misc_feature (148)..(157): n is a, c, g, or t
cttggctttatatatcttgtggaaaggacgaaacaccgtaatttctactaagtgtagatccctcccacgtgctcacccttaatttctactaagtgtagatggaaacacaacgctggcctctaatttctactaagtgtagatttttttnnnnnnnnnnaagcttggcgtggatccgatatcaactagatcttgagacaaatggcagtattcatccacaattttaaaagaaaaggggggattggggggtacagtgcaggggaaagaatagtagacataatagcaacagacatacaaactaaag

SEQ ID NO: 10428 - DNA, 301 bp, Artificial Sequence
  Trp53.3_Nf1.3
  crRNA array
  misc_feature (148)..(157): n is a, c, g, or t
cttggctttatatatcttgtggaaaggacgaaacaccgtaatttctactaagtgtagatccctcccacgtgctcacccttaatttctactaagtgtagataatgatggaacgcagtcgcataatttctactaagtgtagatttttttnnnnnnnnnnaagcttggcgtggatccgatatcaactagatcttgagacaaatggcagtattcatccacaattttaaaagaaaaggggggattggggggtacagtgcaggggaaagaatagtagacataatagcaacagacatacaaactaaag

SEQ ID NO: 10429 - DNA, 301 bp, Artificial Sequence
  Trp53.3_Nf1.4
  crRNA array
  misc_feature (148)..(157): n is a, c, g, or t
cttggctttatatatcttgtggaaaggacgaaacaccgtaatttctactaagtgtagatccctcccacgtgctcacccttaatttctactaagtgtagattgcaaaaccatccaccaagttaatttctactaagtgtagatttttttnnnnnnnnnnaagcttggcgtggatccgatatcaactagatcttgagacaaatggcagtattcatccacaattttaaaagaaaaggggggattggggggtacagtgcaggggaaagaatagtagacataatagcaacagacatacaaactaaag

SEQ ID NO: 10430 - DNA, 301 bp, Artificial Sequence
  Trp53.4_Nf1.1
  crRNA array
  misc_feature (148)..(157): n is a, c, g, or t
cttggctttatatatcttgtggaaaggacgaaacaccgtaatttctactaagtgtagattccaccccccaccctgtctctaatttctactaagtgtagattggcgatccggaatcctctgtaatttctactaagtgtagatttttttnnnnnnnnnnaagcttggcgtggatccgatatcaactagatcttgagacaaatggcagtattcatccacaattttaaaagaaaaggggggattggggggtacagtgcaggggaaagaatagtagacataatagcaacagacatacaaactaaag

SEQ ID NO: 10431 - DNA, 301 bp, Artificial Sequence
  Trp53.4_Nf1.2
  crRNA array
  misc_feature (148)..(157): n is a, c, g, or t
cttggctttatatatcttgtggaaaggacgaaacaccgtaatttctactaagtgtagattccaccccccaccctgtctctaatttctactaagtgtagatggaaacacaacgctggcctctaatttctactaagtgtagatttttttnnnnnnnnnnaagcttggcgtggatccgatatcaactagatcttgagacaaatggcagtattcatccacaattttaaaagaaaaggggggattggggggtacagtgcaggggaaagaatagtagacataatagcaacagacatacaaactaaag

SEQ ID NO: 10432 - DNA, 301 bp, Artificial Sequence
  Trp53.4_Nf1.3
  crRNA array
  misc_feature (148)..(157): n is a, c, g, or t
cttggctttatatatcttgtggaaaggacgaaacaccgtaatttctactaagtgtagattccaccccccaccctgtctctaatttctactaagtgtagataatgatggaacgcagtcgcataatttctactaagtgtagatttttttnnnnnnnnnnaagcttggcgtggatccgatatcaactagatcttgagacaaatggcagtattcatccacaattttaaaagaaaaggggggattggggggtacagtgcaggggaaagaatagtagacataatagcaacagacatacaaactaaag

SEQ ID NO: 10433 - DNA, 301 bp, Artificial Sequence
  Trp53.4_Nf1.4
  crRNA array
  misc_feature (148)..(157): n is a, c, g, or t
cttggctttatatatcttgtggaaaggacgaaacaccgtaatttctactaagtgtagattccaccccccaccctgtctctaatttctactaagtgtagattgcaaaaccatccaccaagttaatttctactaagtgtagatttttttnnnnnnnnnnaagcttggcgtggatccgatatcaactagatcttgagacaaatggcagtattcatccacaattttaaaagaaaaggggggattggggggtacagtgcaggggaaagaatagtagacataatagcaacagacatacaaactaaag

SEQ ID NO: 10434 - DNA, 301 bp, Artificial Sequence
  Trp53.1_Kdm6a.1
  crRNA array
  misc_feature (148)..(157): n is a, c, g, or t
cttggctttatatatcttgtggaaaggacgaaacaccgtaatttctactaagtgtagatccctgaactgcccccagggataatttctactaagtgtagatgctgccgcctctcgcggcagtaatttctactaagtgtagatttttttnnnnnnnnnnaagcttggcgtggatccgatatcaactagatcttgagacaaatggcagtattcatccacaattttaaaagaaaaggggggattggggggtacagtgcaggggaaagaatagtagacataatagcaacagacatacaaactaaag

SEQ ID NO: 10435 - DNA, 301 bp, Artificial Sequence
  Trp53.1_Kdm6a.2
  crRNA array
  misc_feature (148)..(157): n is a, c, g, or t
cttggctttatatatcttgtggaaaggacgaaacaccgtaatttctactaagtgtagatccctgaactgcccccagggataatttctactaagtgtagatgctgcaggtaaggcacgttttaatttctactaagtgtagatttttttnnnnnnnnnnaagcttggcgtggatccgatatcaactagatcttgagacaaatggcagtattcatccacaattttaaaagaaaaggggggattggggggtacagtgcaggggaaagaatagtagacataatagcaacagacatacaaactaaag

SEQ ID NO: 10436 - DNA, 301 bp, Artificial Sequence
  Trp53.1_Kdm6a.3
  crRNA array
  misc_feature (148)..(157): n is a, c, g, or t
cttggctttatatatcttgtggaaaggacgaaacaccgtaatttctactaagtgtagatccctgaactgcccccagggataatttctactaagtgtagattgctggtgccggggaagttttaatttctactaagtgtagatttttttnnnnnnnnnnaagcttggcgtggatccgatatcaactagatcttgagacaaatggcagtattcatccacaattttaaaagaaaaggggggattggggggtacagtgcaggggaaagaatagtagacataatagcaacagacatacaaactaaag

SEQ ID NO: 10437 - DNA, 301 bp, Artificial Sequence
  Trp53.1_Kdm6a.4
  crRNA array
  misc_feature (148)..(157): n is a, c, g, or t
cttggctttatatatcttgtggaaaggacgaaacaccgtaatttctactaagtgtagatccctgaactgcccccagggataatttctactaagtgtagattgtctcctacgaatcccccctaatttctactaagtgtagatttttttnnnnnnnnnnaagcttggcgtggatccgatatcaactagatcttgagacaaatggcagtattcatccacaattttaaaagaaaaggggggattggggggtacagtgcaggggaaagaatagtagacataatagcaacagacatacaaactaaag

SEQ ID NO: 10438 - DNA, 301 bp, Artificial Sequence
  Trp53.2_Kdm6a.1
  crRNA array
  misc_feature (148)..(157): n is a, c, g, or t
cttggctttatatatcttgtggaaaggacgaaacaccgtaatttctactaagtgtagatgccagggtgagcacgtgggataatttctactaagtgtagatgctgccgcctctcgcggcagtaatttctactaagtgtagatttttttnnnnnnnnnnaagcttggcgtggatccgatatcaactagatcttgagacaaatggcagtattcatccacaattttaaaagaaaaggggggattggggggtacagtgcaggggaaagaatagtagacataatagcaacagacatacaaactaaag

SEQ ID NO: 10439 - DNA, 301 bp, Artificial Sequence
  Trp53.2_Kdm6a.2
  crRNA array
  misc_feature (148)..(157): n is a, c, g, or t
cttggctttatatatcttgtggaaaggacgaaacaccgtaatttctactaagtgtagatgccagggtgagcacgtgggataatttctactaagtgtagatgctgcaggtaaggcacgttttaatttctactaagtgtagatttttttnnnnnnnnnnaagcttggcgtggatccgatatcaactagatcttgagacaaatggcagtattcatccacaattttaaaagaaaaggggggattggggggtacagtgcaggggaaagaatagtagacataatagcaacagacatacaaactaaag

SEQ ID NO: 10440 - DNA, 301 bp, Artificial Sequence
  Trp53.2_Kdm6a.3
  crRNA array
  misc_feature (148)..(157): n is a, c, g, or t
cttggctttatatatcttgtggaaaggacgaaacaccgtaatttctactaagtgtagatgccagggtgagcacgtgggataatttctactaagtgtagattgctggtgccggggaagttttaatttctactaagtgtagatttttttnnnnnnnnnnaagcttggcgtggatccgatatcaactagatcttgagacaaatggcagtattcatccacaattttaaaagaaaaggggggattggggggtacagtgcaggggaaagaatagtagacataatagcaacagacatacaaactaaag

SEQ ID NO: 10441 - DNA, 301 bp, Artificial Sequence
  Trp53.2_Kdm6a.4
  crRNA array
  misc_feature (148)..(157): n is a, c, g, or t
cttggctttatatatcttgtggaaaggacgaaacaccgtaatttctactaagtgtagatgccagggtgagcacgtgggataatttctactaagtgtagattgtctcctacgaatcccccctaatttctactaagtgtagatttttttnnnnnnnnnnaagcttggcgtggatccgatatcaactagatcttgagacaaatggcagtattcatccacaattttaaaagaaaaggggggattggggggtacagtgcaggggaaagaatagtagacataatagcaacagacatacaaactaaag

SEQ ID NO: 10442 - DNA, 301 bp, Artificial Sequence
  Trp53.3_Kdm6a.1
  crRNA array
  misc_feature (148)..(157): n is a, c, g, or t
cttggctttatatatcttgtggaaaggacgaaacaccgtaatttctactaagtgtagatccctcccacgtgctcacccttaatttctactaagtgtagatgctgccgcctctcgcggcagtaatttctactaagtgtagatttttttnnnnnnnnnnaagcttggcgtggatccgatatcaactagatcttgagacaaatggcagtattcatccacaattttaaaagaaaaggggggattggggggtacagtgcaggggaaagaatagtagacataatagcaacagacatacaaactaaag

SEQ ID NO: 10443 - DNA, 301 bp, Artificial Sequence
  Trp53.3_Kdm6a.2
  crRNA array
  misc_feature (148)..(157): n is a, c, g, or t
cttggctttatatatcttgtggaaaggacgaaacaccgtaatttctactaagtgtagatccctcccacgtgctcacccttaatttctactaagtgtagatgctgcaggtaaggcacgttttaatttctactaagtgtagatttttttnnnnnnnnnnaagcttggcgtggatccgatatcaactagatcttgagacaaatggcagtattcatccacaattttaaaagaaaaggggggattggggggtacagtgcaggggaaagaatagtagacataatagcaacagacatacaaactaaag

SEQ ID NO: 10444 - DNA, 301 bp, Artificial Sequence
  Trp53.3_Kdm6a.3
  crRNA array
  misc_feature (148)..(157): n is a, c, g, or t
cttggctttatatatcttgtggaaaggacgaaacaccgtaatttctactaagtgtagatccctcccacgtgctcacccttaatttctactaagtgtagattgctggtgccggggaagttttaatttctactaagtgtagatttttttnnnnnnnnnnaagcttggcgtggatccgatatcaactagatcttgagacaaatggcagtattcatccacaattttaaaagaaaaggggggattggggggtacagtgcaggggaaagaatagtagacataatagcaacagacatacaaactaaag

SEQ ID NO: 10445 - DNA, 301 bp, Artificial Sequence
  Trp53.3_Kdm6a.4
  crRNA array
  misc_feature (148)..(157): n is a, c, g, or t
cttggctttatatatcttgtggaaaggacgaaacaccgtaatttctactaagtgtagatccctcccacgtgctcacccttaatttctactaagtgtagattgtctcctacgaatcccccctaatttctactaagtgtagatttttttnnnnnnnnnnaagcttggcgtggatccgatatcaactagatcttgagacaaatggcagtattcatccacaattttaaaagaaaaggggggattggggggtacagtgcaggggaaagaatagtagacataatagcaacagacatacaaactaaag

SEQ ID NO: 10446 - DNA, 301 bp, Artificial Sequence
  Trp53.4_Kdm6a.1
  crRNA array
  misc_feature (148)..(157): n is a, c, g, or t
cttggctttatatatcttgtggaaaggacgaaacaccgtaatttctactaagtgtagattccaccccccaccctgtctctaatttctactaagtgtagatgctgccgcctctcgcggcagtaatttctactaagtgtagatttttttnnnnnnnnnnaagcttggcgtggatccgatatcaactagatcttgagacaaatggcagtattcatccacaattttaaaagaaaaggggggattggggggtacagtgcaggggaaagaatagtagacataatagcaacagacatacaaactaaag

SEQ ID NO: 10447 - DNA, 301 bp, Artificial Sequence
  Trp53.4_Kdm6a.2
  crRNA array
  misc_feature (148)..(157): n is a, c, g, or t
cttggctttatatatcttgtggaaaggacgaaacaccgtaatttctactaagtgtagattccaccccccaccctgtctctaatttctactaagtgtagatgctgcaggtaaggcacgttttaatttctactaagtgtagatttttttnnnnnnnnnnaagcttggcgtggatccgatatcaactagatcttgagacaaatggcagtattcatccacaattttaaaagaaaaggggggattggggggtacagtgcaggggaaagaatagtagacataatagcaacagacatacaaactaaag

SEQ ID NO: 10448 - DNA, 301 bp, Artificial Sequence
  Trp53.4_Kdm6a.3
  crRNA array
  misc_feature (148)..(157): n is a, c, g, or t
cttggctttatatatcttgtggaaaggacgaaacaccgtaatttctactaagtgtagattccaccccccaccctgtctctaatttctactaagtgtagattgctggtgccggggaagttttaatttctactaagtgtagatttttttnnnnnnnnnnaagcttggcgtggatccgatatcaactagatcttgagacaaatggcagtattcatccacaattttaaaagaaaaggggggattggggggtacagtgcaggggaaagaatagtagacataatagcaacagacatacaaactaaag

SEQ ID NO: 10449 - DNA, 301 bp, Artificial Sequence
  Trp53.4_Kdm6a.4
  crRNA array
  misc_feature (148)..(157): n is a, c, g, or t
cttggctttatatatcttgtggaaaggacgaaacaccgtaatttctactaagtgtagattccaccccccaccctgtctctaatttctactaagtgtagattgtctcctacgaatcccccctaatttctactaagtgtagatttttttnnnnnnnnnnaagcttggcgtggatccgatatcaactagatcttgagacaaatggcagtattcatccacaattttaaaagaaaaggggggattggggggtacagtgcaggggaaagaatagtagacataatagcaacagacatacaaactaaag

SEQ ID NO: 10450 - DNA, 301 bp, Artificial Sequence
  Trp53.1_Ercc5.1
  crRNA array
  misc_feature (148)..(157): n is a, c, g, or t
cttggctttatatatcttgtggaaaggacgaaacaccgtaatttctactaagtgtagatccctgaactgcccccagggataatttctactaagtgtagatacggcacgagcaagagacactaatttctactaagtgtagatttttttnnnnnnnnnnaagcttggcgtggatccgatatcaactagatcttgagacaaatggcagtattcatccacaattttaaaagaaaaggggggattggggggtacagtgcaggggaaagaatagtagacataatagcaacagacatacaaactaaag

SEQ ID NO: 10451 - DNA, 301 bp, Artificial Sequence
  Trp53.1_Ercc5.2
  crRNA array
  misc_feature (148)..(157): n is a, c, g, or t
cttggctttatatatcttgtggaaaggacgaaacaccgtaatttctactaagtgtagatccctgaactgcccccagggataatttctactaagtgtagatgagtatcacatcggtgactctaatttctactaagtgtagatttttttnnnnnnnnnnaagcttggcgtggatccgatatcaactagatcttgagacaaatggcagtattcatccacaattttaaaagaaaaggggggattggggggtacagtgcaggggaaagaatagtagacataatagcaacagacatacaaactaaag

SEQ ID NO: 10452 - DNA, 301 bp, Artificial Sequence
  Trp53.1_Ercc5.3
  crRNA array
  misc_feature (148)..(157): n is a, c, g, or t
cttggctttatatatcttgtggaaaggacgaaacaccgtaatttctactaagtgtagatccctgaactgcccccagggataatttctactaagtgtagatggagtgggtccaggcctcgttaatttctactaagtgtagatttttttnnnnnnnnnnaagcttggcgtggatccgatatcaactagatcttgagacaaatggcagtattcatccacaattttaaaagaaaaggggggattggggggtacagtgcaggggaaagaatagtagacataatagcaacagacatacaaactaaag

SEQ ID NO: 10453 - DNA, 301 bp, Artificial Sequence
  Trp53.1_Ercc5.4
  crRNA array
  misc_feature (148)..(157): n is a, c, g, or t
cttggctttatatatcttgtggaaaggacgaaacaccgtaatttctactaagtgtagatccctgaactgcccccagggataatttctactaagtgtagatcagagccggtggaataatgttaatttctactaagtgtagatttttttnnnnnnnnnnaagcttggcgtggatccgatatcaactagatcttgagacaaatggcagtattcatccacaattttaaaagaaaaggggggattggggggtacagtgcaggggaaagaatagtagacataatagcaacagacatacaaactaaag

SEQ ID NO: 10454 - DNA, 301 bp, Artificial Sequence
  Trp53.2_Ercc5.1
  crRNA array
  misc_feature (148)..(157): n is a, c, g, or t
cttggctttatatatcttgtggaaaggacgaaacaccgtaatttctactaagtgtagatgccagggtgagcacgtgggataatttctactaagtgtagatacggcacgagcaagagacactaatttctactaagtgtagatttttttnnnnnnnnnnaagcttggcgtggatccgatatcaactagatcttgagacaaatggcagtattcatccacaattttaaaagaaaaggggggattggggggtacagtgcaggggaaagaatagtagacataatagcaacagacatacaaactaaag

SEQ ID NO: 10455 - DNA, 301 bp, Artificial Sequence
  Trp53.2_Ercc5.2
  crRNA array
  misc_feature (148)..(157): n is a, c, g, or t
cttggctttatatatcttgtggaaaggacgaaacaccgtaatttctactaagtgtagatgccagggtgagcacgtgggataatttctactaagtgtagatgagtatcacatcggtgactctaatttctactaagtgtagatttttttnnnnnnnnnnaagcttggcgtggatccgatatcaactagatcttgagacaaatggcagtattcatccacaattttaaaagaaaaggggggattggggggtacagtgcaggggaaagaatagtagacataatagcaacagacatacaaactaaag

SEQ ID NO: 10456 - DNA, 301 bp, Artificial Sequence
  Trp53.2_Ercc5.3
  crRNA array
  misc_feature (148)..(157): n is a, c, g, or t
cttggctttatatatcttgtggaaaggacgaaacaccgtaatttctactaagtgtagatgccagggtgagcacgtgggataatttctactaagtgtagatggagtgggtccaggcctcgttaatttctactaagtgtagatttttttnnnnnnnnnnaagcttggcgtggatccgatatcaactagatcttgagacaaatggcagtattcatccacaattttaaaagaaaaggggggattggggggtacagtgcaggggaaagaatagtagacataatagcaacagacatacaaactaaag

SEQ ID NO: 10457 - DNA, 301 bp, Artificial Sequence
  Trp53.2_Ercc5.4
  crRNA array
  misc_feature (148)..(157): n is a, c, g, or t
cttggctttatatatcttgtggaaaggacgaaacaccgtaatttctactaagtgtagatgccagggtgagcacgtgggataatttctactaagtgtagatcagagccggtggaataatgttaatttctactaagtgtagatttttttnnnnnnnnnnaagcttggcgtggatccgatatcaactagatcttgagacaaatggcagtattcatccacaattttaaaagaaaaggggggattggggggtacagtgcaggggaaagaatagtagacataatagcaacagacatacaaactaaag

SEQ ID NO: 10458 - DNA, 301 bp, Artificial Sequence
  Trp53.3_Ercc5.1
  crRNA array
  misc_feature (148)..(157): n is a, c, g, or t
cttggctttatatatcttgtggaaaggacgaaacaccgtaatttctactaagtgtagatccctcccacgtgctcacccttaatttctactaagtgtagatacggcacgagcaagagacactaatttctactaagtgtagatttttttnnnnnnnnnnaagcttggcgtggatccgatatcaactagatcttgagacaaatggcagtattcatccacaattttaaaagaaaaggggggattggggggtacagtgcaggggaaagaatagtagacataatagcaacagacatacaaactaaag

SEQ ID NO: 10459 - DNA, 301 bp, Artificial Sequence
  Trp53.3_Ercc5.2
  crRNA array
  misc_feature (148)..(157): n is a, c, g, or t
cttggctttatatatcttgtggaaaggacgaaacaccgtaatttctactaagtgtagatccctcccacgtgctcacccttaatttctactaagtgtagatgagtatcacatcggtgactctaatttctactaagtgtagatttttttnnnnnnnnnnaagcttggcgtggatccgatatcaactagatcttgagacaaatggcagtattcatccacaattttaaaagaaaaggggggattggggggtacagtgcaggggaaagaatagtagacataatagcaacagacatacaaactaaag

SEQ ID NO: 10460 - DNA, 301 bp, Artificial Sequence
  Trp53.3_Ercc5.3
  crRNA array
  misc_feature (148)..(157): n is a, c, g, or t
cttggctttatatatcttgtggaaaggacgaaacaccgtaatttctactaagtgtagatccctcccacgtgctcacccttaatttctactaagtgtagatggagtgggtccaggcctcgttaatttctactaagtgtagatttttttnnnnnnnnnnaagcttggcgtggatccgatatcaactagatcttgagacaaatggcagtattcatccacaattttaaaagaaaaggggggattggggggtacagtgcaggggaaagaatagtagacataatagcaacagacatacaaactaaag

SEQ ID NO: 10461 - DNA, 301 bp, Artificial Sequence
  Trp53.3_Ercc5.4
  crRNA array
  misc_feature (148)..(157): n is a, c, g, or t
cttggctttatatatcttgtggaaaggacgaaacaccgtaatttctactaagtgtagatccctcccacgtgctcacccttaatttctactaagtgtagatcagagccggtggaataatgttaatttctactaagtgtagatttttttnnnnnnnnnnaagcttggcgtggatccgatatcaactagatcttgagacaaatggcagtattcatccacaattttaaaagaaaaggggggattggggggtacagtgcaggggaaagaatagtagacataatagcaacagacatacaaactaaag

SEQ ID NO: 10462 - DNA, 301 bp, Artificial Sequence
  Trp53.4_Ercc5.1
  crRNA array
  misc_feature (148)..(157): n is a, c, g, or t
cttggctttatatatcttgtggaaaggacgaaacaccgtaatttctactaagtgtagattccaccccccaccctgtctctaatttctactaagtgtagatacggcacgagcaagagacactaatttctactaagtgtagatttttttnnnnnnnnnnaagcttggcgtggatccgatatcaactagatcttgagacaaatggcagtattcatccacaattttaaaagaaaaggggggattggggggtacagtgcaggggaaagaatagtagacataatagcaacagacatacaaactaaag

SEQ ID NO: 10463 - DNA, 301 bp, Artificial Sequence
  Trp53.4_Ercc5.2
  crRNA array
  misc_feature (148)..(157): n is a, c, g, or t
cttggctttatatatcttgtggaaaggacgaaacaccgtaatttctactaagtgtagattccaccccccaccctgtctctaatttctactaagtgtagatgagtatcacatcggtgactctaatttctactaagtgtagatttttttnnnnnnnnnnaagcttggcgtggatccgatatcaactagatcttgagacaaatggcagtattcatccacaattttaaaagaaaaggggggattggggggtacagtgcaggggaaagaatagtagacataatagcaacagacatacaaactaaag

SEQ ID NO: 10464 - DNA, 301 bp, Artificial Sequence
  Trp53.4_Ercc5.3
  crRNA array
  misc_feature (148)..(157): n is a, c, g, or t
cttggctttatatatcttgtggaaaggacgaaacaccgtaatttctactaagtgtagattccaccccccaccctgtctctaatttctactaagtgtagatggagtgggtccaggcctcgttaatttctactaagtgtagatttttttnnnnnnnnnnaagcttggcgtggatccgatatcaactagatcttgagacaaatggcagtattcatccacaattttaaaagaaaaggggggattggggggtacagtgcaggggaaagaatagtagacataatagcaacagacatacaaactaaag

SEQ ID NO: 10465 - DNA, 301 bp, Artificial Sequence
  Trp53.4_Ercc5.4
  crRNA array
  misc_feature (148)..(157): n is a, c, g, or t
cttggctttatatatcttgtggaaaggacgaaacaccgtaatttctactaagtgtagattccaccccccaccctgtctctaatttctactaagtgtagatcagagccggtggaataatgttaatttctactaagtgtagatttttttnnnnnnnnnnaagcttggcgtggatccgatatcaactagatcttgagacaaatggcagtattcatccacaattttaaaagaaaaggggggattggggggtacagtgcaggggaaagaatagtagacataatagcaacagacatacaaactaaag

SEQ ID NO: 10466 - DNA, 301 bp, Artificial Sequence
  Trp53.1_Arid1b.1
  crRNA array
  misc_feature (148)..(157): n is a, c, g, or t
cttggctttatatatcttgtggaaaggacgaaacaccgtaatttctactaagtgtagatccctgaactgcccccagggataatttctactaagtgtagatgctgctgctgtagtgcgtggtaatttctactaagtgtagatttttttnnnnnnnnnnaagcttggcgtggatccgatatcaactagatcttgagacaaatggcagtattcatccacaattttaaaagaaaaggggggattggggggtacagtgcaggggaaagaatagtagacataatagcaacagacatacaaactaaag

SEQ ID NO: 10467 - DNA, 301 bp, Artificial Sequence
  Trp53.1_Arid1b.2
  crRNA array
  misc_feature (148)..(157): n is a, c, g, or t
cttggctttatatatcttgtggaaaggacgaaacaccgtaatttctactaagtgtagatccctgaactgcccccagggataatttctactaagtgtagatagtgcaaaactgagcgcgggtaatttctactaagtgtagatttttttnnnnnnnnnnaagcttggcgtggatccgatatcaactagatcttgagacaaatggcagtattcatccacaattttaaaagaaaaggggggattggggggtacagtgcaggggaaagaatagtagacataatagcaacagacatacaaactaaag

SEQ ID NO: 10468 - DNA, 301 bp, Artificial Sequence
  Trp53.1_Arid1b.3
  crRNA array
  misc_feature (148)..(157): n is a, c, g, or t
cttggctttatatatcttgtggaaaggacgaaacaccgtaatttctactaagtgtagatccctgaactgcccccagggataatttctactaagtgtagatcactcaaaggcgaacaggtataatttctactaagtgtagatttttttnnnnnnnnnnaagcttggcgtggatccgatatcaactagatcttgagacaaatggcagtattcatccacaattttaaaagaaaaggggggattggggggtacagtgcaggggaaagaatagtagacataatagcaacagacatacaaactaaag

SEQ ID NO: 10469 - DNA, 301 bp, Artificial Sequence
  Trp53.1_Arid1b.4
  crRNA array
  misc_feature (148)..(157): n is a, c, g, or t
cttggctttatatatcttgtggaaaggacgaaacaccgtaatttctactaagtgtagatccctgaactgcccccagggataatttctactaagtgtagatctcctggctccgtagaagcataatttctactaagtgtagatttttttnnnnnnnnnnaagcttggcgtggatccgatatcaactagatcttgagacaaatggcagtattcatccacaattttaaaagaaaaggggggattggggggtacagtgcaggggaaagaatagtagacataatagcaacagacatacaaactaaag

SEQ ID NO: 10470 - DNA, 301 bp, Artificial Sequence
  Trp53.2_Arid1b.1
  crRNA array
  misc_feature (148)..(157): n is a, c, g, or t
cttggctttatatatcttgtggaaaggacgaaacaccgtaatttctactaagtgtagatgccagggtgagcacgtgggataatttctactaagtgtagatgctgctgctgtagtgcgtggtaatttctactaagtgtagatttttttnnnnnnnnnnaagcttggcgtggatccgatatcaactagatcttgagacaaatggcagtattcatccacaattttaaaagaaaaggggggattggggggtacagtgcaggggaaagaatagtagacataatagcaacagacatacaaactaaag

SEQ ID NO: 10471 - DNA, 301 bp, Artificial Sequence
  Trp53.2_Arid1b.2
  crRNA array
  misc_feature (148)..(157): n is a, c, g, or t
cttggctttatatatcttgtggaaaggacgaaacaccgtaatttctactaagtgtagatgccagggtgagcacgtgggataatttctactaagtgtagatagtgcaaaactgagcgcgggtaatttctactaagtgtagatttttttnnnnnnnnnnaagcttggcgtggatccgatatcaactagatcttgagacaaatggcagtattcatccacaattttaaaagaaaaggggggattggggggtacagtgcaggggaaagaatagtagacataatagcaacagacatacaaactaaag

SEQ ID NO: 10472 - DNA, 301 bp, Artificial Sequence
  Trp53.2_Arid1b.3
  crRNA array
  misc_feature (148)..(157): n is a, c, g, or t
cttggctttatatatcttgtggaaaggacgaaacaccgtaatttctactaagtgtagatgccagggtgagcacgtgggataatttctactaagtgtagatcactcaaaggcgaacaggtataatttctactaagtgtagatttttttnnnnnnnnnnaagcttggcgtggatccgatatcaactagatcttgagacaaatggcagtattcatccacaattttaaaagaaaaggggggattggggggtacagtgcaggggaaagaatagtagacataatagcaacagacatacaaactaaag

SEQ ID NO: 10473 - DNA, 301 bp, Artificial Sequence
  Trp53.2_Arid1b.4
  crRNA array
  misc_feature (148)..(157): n is a, c, g, or t
cttggctttatatatcttgtggaaaggacgaaacaccgtaatttctactaagtgtagatgccagggtgagcacgtgggataatttctactaagtgtagatctcctggctccgtagaagcataatttctactaagtgtagatttttttnnnnnnnnnnaagcttggcgtggatccgatatcaactagatcttgagacaaatggcagtattcatccacaattttaaaagaaaaggggggattggggggtacagtgcaggggaaagaatagtagacataatagcaacagacatacaaactaaag

SEQ ID NO: 10474 - DNA, 301 bp, Artificial Sequence
  Trp53.3_Arid1b.1
  crRNA array
  misc_feature (148)..(157): n is a, c, g, or t
cttggctttatatatcttgtggaaaggacgaaacaccgtaatttctactaagtgtagatccctcccacgtgctcacccttaatttctactaagtgtagatgctgctgctgtagtgcgtggtaatttctactaagtgtagatttttttnnnnnnnnnnaagcttggcgtggatccgatatcaactagatcttgagacaaatggcagtattcatccacaattttaaaagaaaaggggggattggggggtacagtgcaggggaaagaatagtagacataatagcaacagacatacaaactaaag

SEQ ID NO: 10475 - DNA, 301 bp, Artificial Sequence
  Trp53.3_Arid1b.2
  crRNA array
  misc_feature (148)..(157): n is a, c, g, or t
cttggctttatatatcttgtggaaaggacgaaacaccgtaatttctactaagtgtagatccctcccacgtgctcacccttaatttctactaagtgtagatagtgcaaaactgagcgcgggtaatttctactaagtgtagatttttttnnnnnnnnnnaagcttggcgtggatccgatatcaactagatcttgagacaaatggcagtattcatccacaattttaaaagaaaaggggggattggggggtacagtgcaggggaaagaatagtagacataatagcaacagacatacaaactaaag

SEQ ID NO: 10476 - DNA, 301 bp, Artificial Sequence
  Trp53.3_Arid1b.3
  crRNA array
  misc_feature (148)..(157): n is a, c, g, or t
cttggctttatatatcttgtggaaaggacgaaacaccgtaatttctactaagtgtagatccctcccacgtgctcacccttaatttctactaagtgtagatcactcaaaggcgaacaggtataatttctactaagtgtagatttttttnnnnnnnnnnaagcttggcgtggatccgatatcaactagatcttgagacaaatggcagtattcatccacaattttaaaagaaaaggggggattggggggtacagtgcaggggaaagaatagtagacataatagcaacagacatacaaactaaag

SEQ ID NO: 10477 - DNA, 301 bp, Artificial Sequence
  Trp53.3_Arid1b.4
  crRNA array
  misc_feature (148)..(157): n is a, c, g, or t
cttggctttatatatcttgtggaaaggacgaaacaccgtaatttctactaagtgtagatccctcccacgtgctcacccttaatttctactaagtgtagatctcctggctccgtagaagcataatttctactaagtgtagatttttttnnnnnnnnnnaagcttggcgtggatccgatatcaactagatcttgagacaaatggcagtattcatccacaattttaaaagaaaaggggggattggggggtacagtgcaggggaaagaatagtagacataatagcaacagacatacaaactaaag

SEQ ID NO: 10478 - DNA, 301 bp, Artificial Sequence
  Trp53.4_Arid1b.1
  crRNA array
  misc_feature (148)..(157): n is a, c, g, or t
cttggctttatatatcttgtggaaaggacgaaacaccgtaatttctactaagtgtagattccaccccccaccctgtctctaatttctactaagtgtagatgctgctgctgtagtgcgtggtaatttctactaagtgtagatttttttnnnnnnnnnnaagcttggcgtggatccgatatcaactagatcttgagacaaatggcagtattcatccacaattttaaaagaaaaggggggattggggggtacagtgcaggggaaagaatagtagacataatagcaacagacatacaaactaaag

SEQ ID NO: 10479 - DNA, 301 bp, Artificial Sequence
  Trp53.4_Arid1b.2
  crRNA array
  misc_feature (148)..(157): n is a, c, g, or t
cttggctttatatatcttgtggaaaggacgaaacaccgtaatttctactaagtgtagattccaccccccaccctgtctctaatttctactaagtgtagatagtgcaaaactgagcgcgggtaatttctactaagtgtagatttttttnnnnnnnnnnaagcttggcgtggatccgatatcaactagatcttgagacaaatggcagtattcatccacaattttaaaagaaaaggggggattggggggtacagtgcaggggaaagaatagtagacataatagcaacagacatacaaactaaag

SEQ ID NO: 10480 - DNA, 301 bp, Artificial Sequence
  Trp53.4_Arid1b.3
  crRNA array
  misc_feature (148)..(157): n is a, c, g, or t
cttggctttatatatcttgtggaaaggacgaaacaccgtaatttctactaagtgtagattccaccccccaccctgtctctaatttctactaagtgtagatcactcaaaggcgaacaggtataatttctactaagtgtagatttttttnnnnnnnnnnaagcttggcgtggatccgatatcaactagatcttgagacaaatggcagtattcatccacaattttaaaagaaaaggggggattggggggtacagtgcaggggaaagaatagtagacataatagcaacagacatacaaactaaag

SEQ ID NO: 10481 - DNA, 301 bp, Artificial Sequence
  Trp53.4_Arid1b.4
  crRNA array
  misc_feature (148)..(157): n is a, c, g, or t
cttggctttatatatcttgtggaaaggacgaaacaccgtaatttctactaagtgtagattccaccccccaccctgtctctaatttctactaagtgtagatctcctggctccgtagaagcataatttctactaagtgtagatttttttnnnnnnnnnnaagcttggcgtggatccgatatcaactagatcttgagacaaatggcagtattcatccacaattttaaaagaaaaggggggattggggggtacagtgcaggggaaagaatagtagacataatagcaacagacatacaaactaaag

SEQ ID NO: 10482 - DNA, 301 bp, Artificial Sequence
  Trp53.1_Rb1.1
  crRNA array
  misc_feature (148)..(157): n is a, c, g, or t
cttggctttatatatcttgtggaaaggacgaaacaccgtaatttctactaagtgtagatccctgaactgcccccagggataatttctactaagtgtagattctgacatgatcgggtaccttaatttctactaagtgtagatttttttnnnnnnnnnnaagcttggcgtggatccgatatcaactagatcttgagacaaatggcagtattcatccacaattttaaaagaaaaggggggattggggggtacagtgcaggggaaagaatagtagacataatagcaacagacatacaaactaaag

SEQ ID NO: 10483 - DNA, 301 bp, Artificial Sequence
  Trp53.1_Rb1.2
  crRNA array
  misc_feature (148)..(157): n is a, c, g, or t
cttggctttatatatcttgtggaaaggacgaaacaccgtaatttctactaagtgtagatccctgaactgcccccagggataatttctactaagtgtagatgtctctgcatgaaaacggagtaatttctactaagtgtagatttttttnnnnnnnnnnaagcttggcgtggatccgatatcaactagatcttgagacaaatggcagtattcatccacaattttaaaagaaaaggggggattggggggtacagtgcaggggaaagaatagtagacataatagcaacagacatacaaactaaag

SEQ ID NO: 10484 - DNA, 301 bp, Artificial Sequence
  Trp53.1_Rb1.3
  crRNA array
  misc_feature (148)..(157): n is a, c, g, or t
cttggctttatatatcttgtggaaaggacgaaacaccgtaatttctactaagtgtagatccctgaactgcccccagggataatttctactaagtgtagatagccaatctggtctaataactaatttctactaagtgtagatttttttnnnnnnnnnnaagcttggcgtggatccgatatcaactagatcttgagacaaatggcagtattcatccacaattttaaaagaaaaggggggattggggggtacagtgcaggggaaagaatagtagacataatagcaacagacatacaaactaaag

SEQ ID NO: 10485 - DNA, 301 bp, Artificial Sequence
  Trp53.1_Rb1.4
  crRNA array
  misc_feature (148)..(157): n is a, c, g, or t
cttggctttatatatcttgtggaaaggacgaaacaccgtaatttctactaagtgtagatccctgaactgcccccagggataatttctactaagtgtagattgtagctcagtaaaagtgaataatttctactaagtgtagatttttttnnnnnnnnnnaagcttggcgtggatccgatatcaactagatcttgagacaaatggcagtattcatccacaattttaaaagaaaaggggggattggggggtacagtgcaggggaaagaatagtagacataatagcaacagacatacaaactaaag

SEQ ID NO: 10486 - DNA, 301 bp, Artificial Sequence
  Trp53.2_Rb1.1
  crRNA array
  misc_feature (148)..(157): n is a, c, g, or t
cttggctttatatatcttgtggaaaggacgaaacaccgtaatttctactaagtgtagatgccagggtgagcacgtgggataatttctactaagtgtagattctgacatgatcgggtaccttaatttctactaagtgtagatttttttnnnnnnnnnnaagcttggcgtggatccgatatcaactagatcttgagacaaatggcagtattcatccacaattttaaaagaaaaggggggattggggggtacagtgcaggggaaagaatagtagacataatagcaacagacatacaaactaaag

SEQ ID NO: 10487 - DNA, 301 bp, Artificial Sequence
  Trp53.2_Rb1.2
  crRNA array
  misc_feature (148)..(157): n is a, c, g, or t
cttggctttatatatcttgtggaaaggacgaaacaccgtaatttctactaagtgtagatgccagggtgagcacgtgggataatttctactaagtgtagatgtctctgcatgaaaacggagtaatttctactaagtgtagatttttttnnnnnnnnnnaagcttggcgtggatccgatatcaactagatcttgagacaaatggcagtattcatccacaattttaaaagaaaaggggggattggggggtacagtgcaggggaaagaatagtagacataatagcaacagacatacaaactaaag

SEQ ID NO: 10488 - DNA, 301 bp, Artificial Sequence
  Trp53.2_Rb1.3
  crRNA array
  misc_feature (148)..(157): n is a, c, g, or t
cttggctttatatatcttgtggaaaggacgaaacaccgtaatttctactaagtgtagatgccagggtgagcacgtgggataatttctactaagtgtagatagccaatctggtctaataactaatttctactaagtgtagatttttttnnnnnnnnnnaagcttggcgtggatccgatatcaactagatcttgagacaaatggcagtattcatccacaattttaaaagaaaaggggggattggggggtacagtgcaggggaaagaatagtagacataatagcaacagacatacaaactaaag

SEQ ID NO: 10489 - DNA, 301 bp, Artificial Sequence
  Trp53.2_Rb1.4
  crRNA array
  misc_feature (148)..(157): n is a, c, g, or t
cttggctttatatatcttgtggaaaggacgaaacaccgtaatttctactaagtgtagatgccagggtgagcacgtgggataatttctactaagtgtagattgtagctcagtaaaagtgaataatttctactaagtgtagatttttttnnnnnnnnnnaagcttggcgtggatccgatatcaactagatcttgagacaaatggcagtattcatccacaattttaaaagaaaaggggggattggggggtacagtgcaggggaaagaatagtagacataatagcaacagacatacaaactaaag

SEQ ID NO: 10490 - DNA, 301 bp, Artificial Sequence
  Trp53.3_Rb1.1
  crRNA array
  misc_feature (148)..(157): n is a, c, g, or t
cttggctttatatatcttgtggaaaggacgaaacaccgtaatttctactaagtgtagatccctcccacgtgctcacccttaatttctactaagtgtagattctgacatgatcgggtaccttaatttctactaagtgtagatttttttnnnnnnnnnnaagcttggcgtggatccgatatcaactagatcttgagacaaatggcagtattcatccacaattttaaaagaaaaggggggattggggggtacagtgcaggggaaagaatagtagacataatagcaacagacatacaaactaaag

SEQ ID NO: 10491 - DNA, 301 bp, Artificial Sequence
  Trp53.3_Rb1.2
  crRNA array
  misc_feature (148)..(157): n is a, c, g, or t
cttggctttatatatcttgtggaaaggacgaaacaccgtaatttctactaagtgtagatccctcccacgtgctcacccttaatttctactaagtgtagatgtctctgcatgaaaacggagtaatttctactaagtgtagatttttttnnnnnnnnnnaagcttggcgtggatccgatatcaactagatcttgagacaaatggcagtattcatccacaattttaaaagaaaaggggggattggggggtacagtgcaggggaaagaatagtagacataatagcaacagacatacaaactaaag

SEQ ID NO: 10492 - DNA, 301 bp, Artificial Sequence
  Trp53.3_Rb1.3
  crRNA array
  misc_feature (148)..(157): n is a, c, g, or t
cttggctttatatatcttgtggaaaggacgaaacaccgtaatttctactaagtgtagatccctcccacgtgctcacccttaatttctactaagtgtagatagccaatctggtctaataactaatttctactaagtgtagatttttttnnnnnnnnnnaagcttggcgtggatccgatatcaactagatcttgagacaaatggcagtattcatccacaattttaaaagaaaaggggggattggggggtacagtgcaggggaaagaatagtagacataatagcaacagacatacaaactaaag

SEQ ID NO: 10493 - DNA, 301 bp, Artificial Sequence
  Trp53.3_Rb1.4
  crRNA array
  misc_feature (148)..(157): n is a, c, g, or t
cttggctttatatatcttgtggaaaggacgaaacaccgtaatttctactaagtgtagatccctcccacgtgctcacccttaatttctactaagtgtagattgtagctcagtaaaagtgaataatttctactaagtgtagatttttttnnnnnnnnnnaagcttggcgtggatccgatatcaactagatcttgagacaaatggcagtattcatccacaattttaaaagaaaaggggggattggggggtacagtgcaggggaaagaatagtagacataatagcaacagacatacaaactaaag

SEQ ID NO: 10494 - DNA, 301 bp, Artificial Sequence
  Trp53.4_Rb1.1
  crRNA array
  misc_feature (148)..(157): n is a, c, g, or t
cttggctttatatatcttgtggaaaggacgaaacaccgtaatttctactaagtgtagattccaccccccaccctgtctctaatttctactaagtgtagattctgacatgatcgggtaccttaatttctactaagtgtagatttttttnnnnnnnnnnaagcttggcgtggatccgatatcaactagatcttgagacaaatggcagtattcatccacaattttaaaagaaaaggggggattggggggtacagtgcaggggaaagaatagtagacataatagcaacagacatacaaactaaag

SEQ ID NO: 10495 - DNA, 301 bp, Artificial Sequence
  Trp53.4_Rb1.2
  crRNA array
  misc_feature (148)..(157): n is a, c, g, or t
cttggctttatatatcttgtggaaaggacgaaacaccgtaatttctactaagtgtagattccaccccccaccctgtctctaatttctactaagtgtagatgtctctgcatgaaaacggagtaatttctactaagtgtagatttttttnnnnnnnnnnaagcttggcgtggatccgatatcaactagatcttgagacaaatggcagtattcatccacaattttaaaagaaaaggggggattggggggtacagtgcaggggaaagaatagtagacataatagcaacagacatacaaactaaag

SEQ ID NO: 10496 - DNA, 301 bp, Artificial Sequence
  Trp53.4_Rb1.3
  crRNA array
  misc_feature (148)..(157): n is a, c, g, or t
cttggctttatatatcttgtggaaaggacgaaacaccgtaatttctactaagtgtagattccaccccccaccctgtctctaatttctactaagtgtagatagccaatctggtctaataactaatttctactaagtgtagatttttttnnnnnnnnnnaagcttggcgtggatccgatatcaactagatcttgagacaaatggcagtattcatccacaattttaaaagaaaaggggggattggggggtacagtgcaggggaaagaatagtagacataatagcaacagacatacaaactaaag

SEQ ID NO: 10497 - DNA, 301 bp, Artificial Sequence
  Trp53.4_Rb1.4
  crRNA array
  misc_feature (148)..(157): n is a, c, g, or t
cttggctttatatatcttgtggaaaggacgaaacaccgtaatttctactaagtgtagattccaccccccaccctgtctctaatttctactaagtgtagattgtagctcagtaaaagtgaataatttctactaagtgtagatttttttnnnnnnnnnnaagcttggcgtggatccgatatcaactagatcttgagacaaatggcagtattcatccacaattttaaaagaaaaggggggattggggggtacagtgcaggggaaagaatagtagacataatagcaacagacatacaaactaaag

SEQ ID NO: 10498 - DNA, 301 bp, Artificial Sequence
  Trp53.1_Kmt2c.1
  crRNA array
  misc_feature (148)..(157): n is a, c, g, or t
cttggctttatatatcttgtggaaaggacgaaacaccgtaatttctactaagtgtagatccctgaactgcccccagggataatttctactaagtgtagatactcgacctccacctccctataatttctactaagtgtagatttttttnnnnnnnnnnaagcttggcgtggatccgatatcaactagatcttgagacaaatggcagtattcatccacaattttaaaagaaaaggggggattggggggtacagtgcaggggaaagaatagtagacataatagcaacagacatacaaactaaag

SEQ ID NO: 10499 - DNA, 301 bp, Artificial Sequence
  Trp53.1_Kmt2c.2
  crRNA array
  misc_feature (148)..(157): n is a, c, g, or t
cttggctttatatatcttgtggaaaggacgaaacaccgtaatttctactaagtgtagatccctgaactgcccccagggataatttctactaagtgtagatcccaaagatcagcgtggacctaatttctactaagtgtagatttttttnnnnnnnnnnaagcttggcgtggatccgatatcaactagatcttgagacaaatggcagtattcatccacaattttaaaagaaaaggggggattggggggtacagtgcaggggaaagaatagtagacataatagcaacagacatacaaactaaag

SEQ ID NO: 10500 - DNA, 301 bp, Artificial Sequence
  Trp53.1_Kmt2c.3
  crRNA array
  misc_feature (148)..(157): n is a, c, g, or t
cttggctttatatatcttgtggaaaggacgaaacaccgtaatttctactaagtgtagatccctgaactgcccccagggataatttctactaagtgtagataaaagatccgaatcgatgcgtaatttctactaagtgtagatttttttnnnnnnnnnnaagcttggcgtggatccgatatcaactagatcttgagacaaatggcagtattcatccacaattttaaaagaaaaggggggattggggggtacagtgcaggggaaagaatagtagacataatagcaacagacatacaaactaaag

SEQ ID NO: 10501 - DNA, 301 bp, Artificial Sequence
  Trp53.1_Kmt2c.4
  crRNA array
  misc_feature (148)..(157): n is a, c, g, or t
cttggctttatatatcttgtggaaaggacgaaacaccgtaatttctactaagtgtagatccctgaactgcccccagggataatttctactaagtgtagatctgaggcacatggaagcgattaatttctactaagtgtagatttttttnnnnnnnnnnaagcttggcgtggatccgatatcaactagatcttgagacaaatggcagtattcatccacaattttaaaagaaaaggggggattggggggtacagtgcaggggaaagaatagtagacataatagcaacagacatacaaactaaag

SEQ ID NO: 10502 - DNA, 301 bp, Artificial Sequence
  Trp53.2_Kmt2c.1
  crRNA array
  misc_feature (148)..(157): n is a, c, g, or t
cttggctttatatatcttgtggaaaggacgaaacaccgtaatttctactaagtgtagatgccagggtgagcacgtgggataatttctactaagtgtagatactcgacctccacctccctataatttctactaagtgtagatttttttnnnnnnnnnnaagcttggcgtggatccgatatcaactagatcttgagacaaatggcagtattcatccacaattttaaaagaaaaggggggattggggggtacagtgcaggggaaagaatagtagacataatagcaacagacatacaaactaaag

SEQ ID NO: 10503 - DNA, 301 bp, Artificial Sequence
  Trp53.2_Kmt2c.2
  crRNA array
  misc_feature (148)..(157): n is a, c, g, or t
cttggctttatatatcttgtggaaaggacgaaacaccgtaatttctactaagtgtagatgccagggtgagcacgtgggataatttctactaagtgtagatcccaaagatcagcgtggacctaatttctactaagtgtagatttttttnnnnnnnnnnaagcttggcgtggatccgatatcaactagatcttgagacaaatggcagtattcatccacaattttaaaagaaaaggggggattggggggtacagtgcaggggaaagaatagtagacataatagcaacagacatacaaactaaag

SEQ ID NO: 10504 - DNA, 301 bp, Artificial Sequence
  Trp53.2_Kmt2c.3
  crRNA array
  misc_feature (148)..(157): n is a, c, g, or t
cttggctttatatatcttgtggaaaggacgaaacaccgtaatttctactaagtgtagatgccagggtgagcacgtgggataatttctactaagtgtagataaaagatccgaatcgatgcgtaatttctactaagtgtagatttttttnnnnnnnnnnaagcttggcgtggatccgatatcaactagatcttgagacaaatggcagtattcatccacaattttaaaagaaaaggggggattggggggtacagtgcaggggaaagaatagtagacataatagcaacagacatacaaactaaag

SEQ ID NO: 10505 - DNA, 301 bp, Artificial Sequence
  Trp53.2_Kmt2c.4
  crRNA array
  misc_feature (148)..(157): n is a, c, g, or t
cttggctttatatatcttgtggaaaggacgaaacaccgtaatttctactaagtgtagatgccagggtgagcacgtgggataatttctactaagtgtagatctgaggcacatggaagcgattaatttctactaagtgtagatttttttnnnnnnnnnnaagcttggcgtggatccgatatcaactagatcttgagacaaatggcagtattcatccacaattttaaaagaaaaggggggattggggggtacagtgcaggggaaagaatagtagacataatagcaacagacatacaaactaaag

SEQ ID NO: 10506 - DNA, 301 bp, Artificial Sequence
  Trp53.3_Kmt2c.1
  crRNA array
  misc_feature (148)..(157): n is a, c, g, or t
cttggctttatatatcttgtggaaaggacgaaacaccgtaatttctactaagtgtagatccctcccacgtgctcacccttaatttctactaagtgtagatactcgacctccacctccctataatttctactaagtgtagatttttttnnnnnnnnnnaagcttggcgtggatccgatatcaactagatcttgagacaaatggcagtattcatccacaattttaaaagaaaaggggggattggggggtacagtgcaggggaaagaatagtagacataatagcaacagacatacaaactaaag

SEQ ID NO: 10507 - DNA, 301 bp, Artificial Sequence
  Trp53.3_Kmt2c.2
  crRNA array
  misc_feature (148)..(157): n is a, c, g, or t
cttggctttatatatcttgtggaaaggacgaaacaccgtaatttctactaagtgtagatccctcccacgtgctcacccttaatttctactaagtgtagatcccaaagatcagcgtggacctaatttctactaagtgtagatttttttnnnnnnnnnnaagcttggcgtggatccgatatcaactagatcttgagacaaatggcagtattcatccacaattttaaaagaaaaggggggattggggggtacagtgcaggggaaagaatagtagacataatagcaacagacatacaaactaaag

SEQ ID NO: 10508 - DNA, 301 bp, Artificial Sequence
  Trp53.3_Kmt2c.3
  crRNA array
  misc_feature (148)..(157): n is a, c, g, or t
cttggctttatatatcttgtggaaaggacgaaacaccgtaatttctactaagtgtagatccctcccacgtgctcacccttaatttctactaagtgtagataaaagatccgaatcgatgcgtaatttctactaagtgtagatttttttnnnnnnnnnnaagcttggcgtggatccgatatcaactagatcttgagacaaatggcagtattcatccacaattttaaaagaaaaggggggattggggggtacagtgcaggggaaagaatagtagacataatagcaacagacatacaaactaaag

SEQ ID NO: 10509 - DNA, 301 bp, Artificial Sequence
  Trp53.3_Kmt2c.4
  crRNA array
  misc_feature (148)..(157): n is a, c, g, or t
cttggctttatatatcttgtggaaaggacgaaacaccgtaatttctactaagtgtagatccctcccacgtgctcacccttaatttctactaagtgtagatctgaggcacatggaagcgattaatttctactaagtgtagatttttttnnnnnnnnnnaagcttggcgtggatccgatatcaactagatcttgagacaaatggcagtattcatccacaattttaaaagaaaaggggggattggggggtacagtgcaggggaaagaatagtagacataatagcaacagacatacaaactaaag

SEQ ID NO: 10510 - DNA, 301 bp, Artificial Sequence
  Trp53.4_Kmt2c.1
  crRNA array
  misc_feature (148)..(157): n is a, c, g, or t
cttggctttatatatcttgtggaaaggacgaaacaccgtaatttctactaagtgtagattccaccccccaccctgtctctaatttctactaagtgtagatactcgacctccacctccctataatttctactaagtgtagatttttttnnnnnnnnnnaagcttggcgtggatccgatatcaactagatcttgagacaaatggcagtattcatccacaattttaaaagaaaaggggggattggggggtacagtgcaggggaaagaatagtagacataatagcaacagacatacaaactaaag

SEQ ID NO: 10511 - DNA, 301 bp, Artificial Sequence
  Trp53.4_Kmt2c.2
  crRNA array
  misc_feature (148)..(157): n is a, c, g, or t
cttggctttatatatcttgtggaaaggacgaaacaccgtaatttctactaagtgtagattccaccccccaccctgtctctaatttctactaagtgtagatcccaaagatcagcgtggacctaatttctactaagtgtagatttttttnnnnnnnnnnaagcttggcgtggatccgatatcaactagatcttgagacaaatggcagtattcatccacaattttaaaagaaaaggggggattggggggtacagtgcaggggaaagaatagtagacataatagcaacagacatacaaactaaag

SEQ ID NO: 10512 - DNA, 301 bp, Artificial Sequence
  Trp53.4_Kmt2c.3
  crRNA array
  misc_feature (148)..(157): n is a, c, g, or t
cttggctttatatatcttgtggaaaggacgaaacaccgtaatttctactaagtgtagattccaccccccaccctgtctctaatttctactaagtgtagataaaagatccgaatcgatgcgtaatttctactaagtgtagatttttttnnnnnnnnnnaagcttggcgtggatccgatatcaactagatcttgagacaaatggcagtattcatccacaattttaaaagaaaaggggggattggggggtacagtgcaggggaaagaatagtagacataatagcaacagacatacaaactaaag

SEQ ID NO: 10513 - DNA, 301 bp, Artificial Sequence
  Trp53.4_Kmt2c.4
  crRNA array
  misc_feature (148)..(157): n is a, c, g, or t
cttggctttatatatcttgtggaaaggacgaaacaccgtaatttctactaagtgtagattccaccccccaccctgtctctaatttctactaagtgtagatctgaggcacatggaagcgattaatttctactaagtgtagatttttttnnnnnnnnnnaagcttggcgtggatccgatatcaactagatcttgagacaaatggcagtattcatccacaattttaaaagaaaaggggggattggggggtacagtgcaggggaaagaatagtagacataatagcaacagacatacaaactaaag

SEQ ID NO: 10514 - DNA, 301 bp, Artificial Sequence
  Trp53.1_Pten.1
  crRNA array
  misc_feature (148)..(157): n is a, c, g, or t
cttggctttatatatcttgtggaaaggacgaaacaccgtaatttctactaagtgtagatccctgaactgcccccagggataatttctactaagtgtagataagcgtggtgcgtgacgcactaatttctactaagtgtagatttttttnnnnnnnnnnaagcttggcgtggatccgatatcaactagatcttgagacaaatggcagtattcatccacaattttaaaagaaaaggggggattggggggtacagtgcaggggaaagaatagtagacataatagcaacagacatacaaactaaag

SEQ ID NO: 10515 - DNA, 301 bp, Artificial Sequence
  Trp53.1_Pten.2
  crRNA array
  misc_feature (148)..(157): n is a, c, g, or t
cttggctttatatatcttgtggaaaggacgaaacaccgtaatttctactaagtgtagatccctgaactgcccccagggataatttctactaagtgtagattgtcaccagctgaagtggcttaatttctactaagtgtagatttttttnnnnnnnnnnaagcttggcgtggatccgatatcaactagatcttgagacaaatggcagtattcatccacaattttaaaagaaaaggggggattggggggtacagtgcaggggaaagaatagtagacataatagcaacagacatacaaactaaag

SEQ ID NO: 10516 - DNA, 301 bp, Artificial Sequence
  Trp53.1_Pten.3
  crRNA array
  misc_feature (148)..(157): n is a, c, g, or t
cttggctttatatatcttgtggaaaggacgaaacaccgtaatttctactaagtgtagatccctgaactgcccccagggataatttctactaagtgtagatggagtcaagaggctgatttttaatttctactaagtgtagatttttttnnnnnnnnnnaagcttggcgtggatccgatatcaactagatcttgagacaaatggcagtattcatccacaattttaaaagaaaaggggggattggggggtacagtgcaggggaaagaatagtagacataatagcaacagacatacaaactaaag

SEQ ID NO: 10517 - DNA, 301 bp, Artificial Sequence
  Trp53.1_Pten.4
  crRNA array
  misc_feature (148)..(157): n is a, c, g, or t
cttggctttatatatcttgtggaaaggacgaaacaccgtaatttctactaagtgtagatccctgaactgcccccagggataatttctactaagtgtagatctgtaagctaaaccactacataatttctactaagtgtagatttttttnnnnnnnnnnaagcttggcgtggatccgatatcaactagatcttgagacaaatggcagtattcatccacaattttaaaagaaaaggggggattggggggtacagtgcaggggaaagaatagtagacataatagcaacagacatacaaactaaag

SEQ ID NO: 10518 - DNA, 301 bp, Artificial Sequence
  Trp53.2_Pten.1
  crRNA array
  misc_feature (148)..(157): n is a, c, g, or t
cttggctttatatatcttgtggaaaggacgaaacaccgtaatttctactaagtgtagatgccagggtgagcacgtgggataatttctactaagtgtagataagcgtggtgcgtgacgcactaatttctactaagtgtagatttttttnnnnnnnnnnaagcttggcgtggatccgatatcaactagatcttgagacaaatggcagtattcatccacaattttaaaagaaaaggggggattggggggtacagtgcaggggaaagaatagtagacataatagcaacagacatacaaactaaag

SEQ ID NO: 10519 - DNA, 301 bp, Artificial Sequence
  Trp53.2_Pten.2
  crRNA array
  misc_feature (148)..(157): n is a, c, g, or t
cttggctttatatatcttgtggaaaggacgaaacaccgtaatttctactaagtgtagatgccagggtgagcacgtgggataatttctactaagtgtagattgtcaccagctgaagtggcttaatttctactaagtgtagatttttttnnnnnnnnnnaagcttggcgtggatccgatatcaactagatcttgagacaaatggcagtattcatccacaattttaaaagaaaaggggggattggggggtacagtgcaggggaaagaatagtagacataatagcaacagacatacaaactaaag

SEQ ID NO: 10520 - DNA, 301 bp, Artificial Sequence
  Trp53.2_Pten.3
  crRNA array
  misc_feature (148)..(157): n is a, c, g, or t
cttggctttatatatcttgtggaaaggacgaaacaccgtaatttctactaagtgtagatgccagggtgagcacgtgggataatttctactaagtgtagatggagtcaagaggctgatttttaatttctactaagtgtagatttttttnnnnnnnnnnaagcttggcgtggatccgatatcaactagatcttgagacaaatggcagtattcatccacaattttaaaagaaaaggggggattggggggtacagtgcaggggaaagaatagtagacataatagcaacagacatacaaactaaag

(The sequence listing continues in the following parts.)

1. A vector comprising a first long terminal repeat (LTR) sequence, an Embryonal Fyn-Associated Substrate (EFS) sequence, a Cpf1 sequence, a Nuclear Localization Signal (NLS) sequence, an antibiotic resistance sequence, and a second LTR sequence.

2. The vector of claim 1, further comprising a tag sequence.

3. The vector of claim 2, wherein the tag sequence is a Flag2A sequence.

4. The vector of claim 1, wherein the vector comprises the nucleic acid sequence of SEQ ID NO: 1.

5. A vector comprising a first LTR sequence, a promoter sequence, a direct repeat sequence of Cpf1, a first restriction site, a second restriction site, an EFS sequence, an antibiotic resistance sequence, a posttranscriptional regulatory element sequence, and a second LTR sequence.

6. The vector of claim 5, wherein the first and/or second restriction site is a BsmBI restriction site.

7. The vector of claim 5, wherein the posttranscriptional regulatory element sequence comprises a Woodchuck Hepatitis Virus (WHP) Posttranscriptional Regulatory Element (WPRE) sequence.

8. The vector of claim 5, wherein the promoter sequence comprises a U6 promoter sequence.

9. The vector of claim 5, wherein in the vector comprises the nucleic acid sequence of SEQ ID NO: 2.

10. A crRNA array comprising a 5′ nucleotide sequence that is homologous to a first nucleotide sequence on a vector, a first crRNA sequence, a direct repeat sequence of Cpf1, a second crRNA sequence, a terminator sequence, and a 3′ sequence that is homologous to a second sequence on the vector.

11. The crRNA array of claim 10, wherein the vector comprises the vector of claim 5.

12. A vector comprising a first LTR sequence, a promoter sequence, a first direct repeat sequence of Cpf1, a first crRNA sequence, a second direct repeat sequence of Cpf1, a second crRNA sequence, a terminator sequence, an EFS sequence, a posttranscriptional regulatory sequence, and a second LTR sequence.

13. The vector of claim 12, wherein the posttranscriptional regulatory sequence comprises a WPRE sequence.

14. The vector of claim 12, wherein the first crRNA sequence is complementary to a gene selected from the group consisting of Pten and Nf1, and wherein the second crRNA sequence is complementary to a gene selected from the group consisting of Pten and Nf1.

15. A crRNA library comprising a plurality of crRNA arrays cloned into a plurality of vectors, wherein the crRNA arrays individually comprise a 5′ nucleotide sequence that is homologous to a first nucleotide sequence on a vector, a first crRNA sequence, a direct repeat sequence of Cpf1, a second crRNA sequence, a terminator sequence, and a 3′ sequence that is homologous to a second sequence on the vector.

16. The crRNA library of claim 15, wherein the vector comprises the vector of claim 12.

17. The crRNA library of claim 15, wherein the crRNA arrays comprise a nucleotide sequence selected from the group consisting of SEQ ID NOs: 4-9,708.

18. The crRNA library of claim 15, wherein the crRNA arrays comprise a nucleotide sequence selected from the group consisting of SEQ ID NOs: 9,762-21,695.

19. The crRNA library of claim 15, wherein the crRNA library comprises a Cpf1 crRNA array screening (CCAS) library, wherein the crRNA arrays consist of SEQ ID NOs: 4-9,708.

20. The crRNA library of claim 15, wherein the crRNA library comprises a Massively-Parallel crRNA Array Profiling (MCAP) library comprising a plurality of crRNA arrays targeting pairwise combinations of genes significantly mutated in human metastases.

21. The MCAP library of claim 20, wherein the crRNA arrays consist of SEQ ID NOs: 9,762-21,695.

22. A method for simultaneously mutagenizing multiple target sequences in a cell, the method comprising administering to the cell a crRNA library comprising a plurality of vectors comprising a plurality of crRNA arrays, wherein each crRNA array independently comprises a 5′ nucleotide sequence that is homologous to a first nucleotide sequence on the vector, a first crRNA sequence, a direct repeat sequence of Cpf1, a second crRNA sequence, a terminator sequence, and a 3′ sequence that is homologous to a second sequence on the vector, and wherein the first crRNA is complementary to a first target sequence and the second crRNA is complementary to a second target sequence.

23. The method of claim 22, wherein the plurality of crRNA arrays comprise a nucleotide sequence selected from the group consisting of SEQ ID NOs. 4-9,708.

24. The method of claim 22, wherein the plurality of crRNA arrays comprise a nucleotide sequence selected from the group consisting of SEQ ID NOs. 9,762-21,695.

25. The method of claim 22, wherein the terminator sequence comprises a U6 terminator sequence.

26. The method of claim 22, wherein the cell is selected from the group consisting of a T cell, a CD8+ cell, a CD4+ cell, a dendritic cell, an endothelial cell, and a stem cell.

27. The method of claim 22, further comprising wherein the crRNA array comprises at least one additional crRNA sequence that is complementary to at least one additional target sequence.

28. A method of identifying synergistic drivers of transformation and/or tumorigenesis in vivo comprising:
administering a cell mutagenized by a crRNA library to an animal, wherein the crRNA library comprises a plurality of vectors comprising a plurality of crRNA arrays, wherein each crRNA array independently comprises a 5′ nucleotide sequence that is homologous to a first nucleotide sequence on the vector, a first crRNA sequence, a direct repeat sequence of Cpf1, a second crRNA sequence, a terminator sequence and a 3′ sequence that is homologous to a second sequence on the vector, and wherein the first crRNA is complementary to a first target sequence and the second crRNA is complementary to a second target sequence, and
sequencing a nucleotide from a tumor from the animal, and analyzing the data from the sequencing to identify the synergistic drivers of transformation and/or tumorigenesis.

29. An in vivo method for identifying and mapping genetic interactions between a plurality of genes comprising:
administering a cell mutagenized by a crRNA library to an animal, wherein the crRNA library comprises a plurality of vectors comprising a plurality of crRNA arrays, wherein the crRNA array comprises a 5′ nucleotide sequence that is homologous to a first nucleotide sequence on the vector, a first crRNA sequence, a direct repeat sequence of Cpf1, a second crRNA sequence, a terminator sequence, and a 3′ sequence that is homologous to a second sequence on the vector, and wherein the first crRNA is complementary to a first target sequence and the second crRNA is complementary to a second target sequence, and
sequencing a nucleotide from a tissue from the animal, and analyzing the data from the sequencing to identify and map the genetic interactions.

30. The method of claim 28, wherein the plurality of crRNA arrays comprises a nucleotide sequence selected from the group consisting of SEQ ID NOs. 4-9,708.

31. The method of claim 28, wherein the plurality of crRNA arrays comprises a nucleotide sequence selected from the group consisting of SEQ ID NOs. 9,762-21,695.

32. The method of claim 28, further wherein the crRNA array comprises at least one additional crRNA sequence that is complementary to at least one additional target sequence.

33. The method of claim 28, wherein the animal is a mouse.

34. The method of claim 28, wherein the animal is a human.

35. A kit comprising a CCAS library comprising a plurality of vectors comprising a plurality of crRNA arrays, wherein the crRNA arrays comprise a nucleotide sequence selected from the group consisting of SEQ ID NOs: 4-9,708, and instructional material for use thereof.

36. A kit comprising a MCAP library comprising a plurality of vectors comprising a plurality of crRNA arrays, wherein the crRNA arrays comprise a nucleotide sequence selected from the group consisting of SEQ ID NOs: 9,762-21,695, and instructional material for use thereof.

37. The kit of claim 35, wherein the crRNA array comprises at least one additional crRNA sequence that is complementary to at least one additional target sequence.

38. A vector comprising a first promoter, a Cpf1 sequence, a second promoter, a first Cpf1 direct repeat sequence, a lox66 sequence, a second Cpf1 direct repeat sequence, two inverted restriction sites, an inverted lox71 sequence, and a crRNA FlipArray, wherein the crRNA FlipArray comprises a first crRNA sequence, 4-10 consecutive thymidines, a second inverted crRNA sequence, 4-10 consecutive adenines, and a third inverted direct repeat sequence.

39. The vector of claim 38, wherein the vector comprises SEQ ID NO: 21,697.

40. The vector of claim 38, wherein the first promoter is an EFS promoter.

41. The vector of claim 40, wherein the EFS promoter drives expression of Cpf1.

42. The vector of claim 38, wherein the second promoter is a U6 promoter.

43. The vector of claim 42, wherein the U6 promoter drives expression of the crRNA FlipArray.

44. The vector of claim 38, wherein the first promoter and the second promoter are in opposite orientations.

45. The vector of claim 38, further comprising antibiotic resistance marker.

46. The vector of claim 45, wherein the antibiotic resistance marker is a puromycin resistance sequence.

47. The vector of claim 38, wherein the restriction sites are BsmbI restriction sites.

48. The vector of claim 38, wherein the Cpf1 sequence is a Lachnospiraceae bacterium Cpf1 (LbCpf1) sequence.

49. The vector of claim 38, wherein the any one of the first, second, or third, direct repeat sequences is from LbCpf1.

50. A gene editing system capable of inducible, sequential mutagenesis in a cell, the system comprising a vector and a Cre recombinase,
wherein the vector comprising a first promoter, a Cpf1 sequence, a second promoter, a first Cpf1 direct repeat sequence, a lox66 sequence, a second Cpf1 direct repeat sequence, two inverted restriction sites, an inverted lox71 sequence, and a crRNA FlipArray, wherein the crRNA FlipArray comprises a first crRNA sequence, 4-10 consecutive thymidines, a second inverted crRNA sequence, 4-10 consecutive adenines, and a third inverted direct repeat sequence.

51. A gene editing system capable of inducible, sequential mutagenesis in a cell, the system comprising a plurality of vectors and a Cre recombinase,
wherein the vectors comprising a first promoter, a Cpf1 sequence, a second promoter, a first Cpf1 direct repeat sequence, a lox66 sequence, a second Cpf1 direct repeat sequence, two inverted restriction sites, an inverted lox71 sequence, and a crRNA FlipArray, wherein the crRNA FlipArray comprises a first crRNA sequence, 4-10 consecutive thymidines, a second inverted crRNA sequence, 4-10 consecutive adenines, and a third inverted direct repeat sequence.

52. The gene editing system of claim 50, wherein the first crRNA and/or the second crRNA target more than one sequence.

53. A method of inducible, sequential mutagenesis in a cell, the method comprising
administering to the cell a vector comprising a first promoter, a Cpf1 sequence, a second promoter, a first Cpf1 direct repeat sequence, a lox66 sequence, a second Cpf1 direct repeat sequence, two inverted restriction sites, an inverted lox71 sequence, and a crRNA FlipArray, wherein the crRNA FlipArray comprises a first crRNA sequence, 4-10 consecutive thymidines, a second inverted crRNA sequence, 4-10 consecutive adenines, and a third inverted direct repeat sequence,
wherein the first crRNA is expressed,
administering to the cell a Cre recombinase, wherein when the Cre recombinase is administered, the second crRNA is expressed, thus sequentially mutagenizing the cell.

54. The method of claim 53, wherein the cell is a human cell.

55. The method of claim 53, wherein the mutagenesis is selected from the group consisting of nucleotide insertion, nucleotide deletion, frameshift mutation, gene activation, gene repression, and epigenetic modification.

56. The method of claim 53, wherein the first crRNA targets Nf1 and the second crRNA targets Pten.

57. The method of claim 53, wherein the first crRNA and/or the second crRNA targets more than one sequence.

58. A method of inducible, sequential mutagenesis in a cell, the method comprising
administering to the cell a plurality of vectors individually comprising a first promoter, a Cpf1 sequence, a second promoter, a first Cpf1 direct repeat sequence, a lox66 sequence, a second Cpf1 direct repeat sequence, two inverted restriction sites, an inverted lox71 sequence, and a crRNA FlipArray, wherein the crRNA FlipArray comprises a first crRNA sequence, 4-10 consecutive thymidines, a second inverted crRNA sequence, 4-10 consecutive adenines, and a third inverted direct repeat sequence,
wherein the first crRNA is expressed,
administering to the cell a Cre recombinase, wherein when the Cre recombinase is administered, the second crRNA is expressed, thus sequentially mutagenizing the cell.

59. The method of claim 58, wherein the first crRNA and/or the second crRNA targets more than one sequence.

60. The method of claim 58, wherein first crRNA and/or the second crRNA targets a panel of immunomodulatory factors comprising Cd274, Ido1, B2m, Fas1, Jak2, and Lgals9.

61. A method of inducible, sequential mutagenesis in a cell in an animal, the method comprising
administering to the animal a plurality of vectors comprising a first promoter, a Cpf1 sequence, a second promoter, a first Cpf1 direct repeat sequence, a lox66 sequence, a second Cpf1 direct repeat sequence, two inverted restriction sites, an inverted lox71 sequence, and a crRNA FlipArray, wherein the crRNA FlipArray comprises a first crRNA sequence, 4-10 consecutive thymidines, a second inverted crRNA sequence, 4-10 consecutive adenines, and a third inverted direct repeat sequence,
wherein the first crRNA is expressed,
administering to the animal a Cre recombinase, wherein when the Cre recombinase is administered, the second crRNA is expressed thus sequentially mutagenizing the cell in the animal.

62. The vector of claim 38, wherein the first crRNA sequence of the FlipArray comprises six consecutive thymidines.

63. The vector of claim 38, wherein the second crRNA sequence comprises six consecutive adenines.
